United States Patent Application Publication US 2022/0096574 A1 - sequence listing, part 12

SEQ ID NO: 56131 - protein, 370 aa, Hydrogenovibrio crunogenus
  misc_feature (1)..(370): sp|Q31FZ5|TGT_HYDCU Queuine tRNA-ribosyltransferase OS= Hydrogenovibrio crunogenus (strain XCL-2) OX=317025 GN= tgt PE=3 SV=1
MKFELDKQDGRARRGRLIFKRGVVETPAFMPVGTYGSVKGMMPEEVADTGAQIILGNTFHLSIRPGTDIIEQHGDLHDFMNWKGPILTDSGGFQVFSLGKMRKITEEGVHFRNPVNGSKIFMGPEESMDVQRKLGSDIVMIFDECTPYPATHDVAADSMRLSLRWAERSKQAHGDNPSALFGIVQGGMYEDLRQESIKGLTDIGFDGYAIGGLSVGEPKEEMMGTLDFTEPHMPKDKPRYMMGVGKPEDIVEAVRRGIDMFDCVIPTRNARNGFLFTHSGVVKIRNAVNKTSLEPLDAKCDCYTCQNYTRAYLHHLDKCGEIQGARLNTIHNLHYYQLLMKGLREAIASETLDTFVSEFYQARGEDVPAL

SEQ ID NO: 56132 - protein, 374 aa, Hydrogenovibrio crunogenus
  misc_feature (1)..(374): tr|A0A4P7P0P8|A0A4P7P0P8_9GAMM Queuine tRNA-ribosyltran sferase OS=Hydrogenovibrio crunogenus OX=39765 GN=tgt P E=3 SV=1
MEKSMKFELDKQDGRARRGRLIFERGVVETPAFMPVGTYGSVKGMMPEEVADTGAQIILGNTFHLAIRPGTDIIEQHGDLHDFMNWKGPILTDSGGFQVFSLGKMRKITEEGVHFRNPVNGSKIFMGPEESMDVQRKLGSDIVMIFDECTPYPATHEVAADSMRLSLRWAERSKQAHGDNPSALFGIVQGGMYEDLRQESIKGLTDIGFDGYAIGGLSVGEPKEEMMGTLDFTEPHMPKDKPRYMMGVGKPEDIVEAVRRGIDMFDCVIPTRNARNGFLFTHNGVVKIRNAVNKTSLEPLDAKCDCYTCQNYTRSYLHHLDKCGEIQGARLNTIHNLHYYQLLMKGLREAIASETLDTFVSEFYQARGEEVPAL

SEQ ID NO: 56133 - protein, 370 aa, Hydrogenovibrio marinus
  misc_feature (1)..(370): tr|A0A066ZNG0|A0A066ZNG0_HYDMR Queuine tRNA-ribosyltran sferase OS=Hydrogenovibrio marinus OX=28885 GN=tgt PE=3 SV=1
MEFELDNQDGRARRGRLKFERGVVETPAFMPVGTYGSVKGMTPEEIEDTGAQIILGNTFHLAIRPGTDIIEQHGDLHDFINWKGPILTDSGGFQVFSLGKMRKISEQGVHFRNPVNGSKLFMGPEESMEVQRKLGSDIVMIFDECTPYPASYEVAADSMRLSLRWAQRSKDAHGDNPSALFGIVQGGMYEALRIESIEALKAIGFDGYAIGGLSVGEPKDEMMATLDFTEPHMPKDKPRYMMGVGKPEDIVEAVRRGIDMFDCVIPTRNARNGFLFTHDGVVKIRNAVHKTSLEPLDAQCDCYTCKNYTRAYLHHLDKCGEILGARLNTIHNLHYYQLLMKGLREAIANNQLESYVKHFYYQRGEVVPPM

SEQ ID NO: 56134 - protein, 370 aa, Hydrogenovibrio sp.
  misc_feature (1)..(370): tr|A0A2I2A2G8|A0A2I2A2G8_9GAMM Queuine tRNA-ribosyltran sferase OS=Hydrogenovibrio sp. SC-1 OX=2065820 GN=tgt P E=3 SV=1
MEFELDNQDGRARRGRLIFERGVVETPAFMPVGTYGSVKAMMPEEVAATGAQIILGNTFHLSLRPGTDIIEQHGDLHDFMNWQGPILTDSGGFQVFSLGKMRKITEEGVHFNSPVNGAKIFMGPEESMEVQRKLGADIVMIFDECTPYPASHEVAADSMRLSLRWAERSKQAHGDNPAALFGIVQGGMYEDLRQESADALTQIGFDGYAIGGLSVGEPKEEMMSTLDFTEPHLPQNKPRYMMGVGKPEDIVEAVRRGIDMFDCVIPTRNARNGFLFTHSGVVKIRNAVHKTSLVPLDKQCDCYTCQNYSRAYLHHMDKCGEIQGARLNTIHNLHYYQTLMKGLRDAIAENQLDTFVADFYQARGESVPAL

SEQ ID NO: 56135 - protein, 370 aa, Hydrogenovibrio thermophilus
  misc_feature (1)..(370): tr|A0A410H3K0|A0A410H3K0_9GAMM Queuine tRNA-ribosyltran sferase OS=Hydrogenovibrio thermophilus OX=265883 GN=tg t PE=3 SV=1
MKFELDKQDGRARRGRLIFDRGVVETPAFMPVGTYGSVKGMMPEEVADTGAQIILGNTFHLAIRPGTDIIEQHGDLHDFINWPGPILTDSGGFQVFSLGKMRKIVEEGVHFRNPVNGSRLFMGPEESMEIQRKLGSDIVMIFDECTPYPASHEVAAESMRLSLRWAERSKKAHEGNPSALFGIVQGGMYEDLREESIQALMEIGFDGYAIGGLSVGEPKEEMMATLDFTEPHMPTDKPRYMMGVGKPEDIVEAVRRGIDMFDCVIPTRNARNGFLFTHTGVVKIRNAVHKTSLEPLDVKCDCYTCRNYTRAYLHHLDKCGEIQGARLNTIHNLHYYQLLMKGLRNAIASNSLDAFVADFYAERDEAVPPL

SEQ ID NO: 56136 - protein, 372 aa, Hydromonas duriensis
  misc_feature (1)..(372): tr|A0A4R6Y305|A0A4R6Y305_9BURK Queuine tRNA-ribosyltran sferase OS=Hydromonas duriensis OX=1527608 GN=tgt PE=3 SV=1
MSLNFKLHKTSGKARRGTMTLNHGVVETPIFMPVGTYGAVKGMNPDMLGDINAQIILGNTFHLWLRPGLDVMKTHGGLHQFMNWNKPILTDSGGFQVFSLGEMRKISEEGVMFSSPVNGDKLFLTPEVSMQIQTVLNSDIVMQFDECTPYPASEKEARDSMEMSLRWAKRSLNEFNAQNNPNALFGIVQGGMYTHLRDESLAGLNELDFHGTAIGGLSVGEPKEDFYRVLEYVGHRLPAHKPRYLMGVGTPEDLVYGVQQGVDMFDCVMPTRNARNGWLFTRFGDLKIKNARYKHDTAPIDDTCTCYACRHFSRSYLHHLHKMNEMLGAQLNTIHNLHYYLQLMQELRDGLDNDRFDEVVAQFHANRARGIA

SEQ ID NO: 56137 - protein, 372 aa, Hydromonas sp.
  misc_feature (1)..(372): tr|A0A345DE31|A0A345DE31_9BURK Queuine tRNA-ribosyltran sferase OS=Hydromonas sp. F02 OX=2268024 GN=tgt PE=3 SV =1
MSLTFKLHKTSGKARRGTMTLNHGEVQTPIFMPVGTYGAVKGMNPDMLGDINAQIILGNTFHLWLRPGLDVIKTHGGLHQFMNWHKPILTDSGGFQVFSLGDMRKISEEGVMFSSPVNGDKLFLTPEVSMQIQTVLNSDIVMQFDECTPYPADEKTARLSMEMSLRWAKRSMDEFNAQENPNALFGIVQGGMHEHLREVSLAGLNELDFHGTAIGGLSVGEPKEEFHRILEHIGHQLPADKPRYLMGVGTPEDLVYGVQQGIDMFDCVMPTRNARNGWLFTRFGDVKIKNARYKQDLAPIDDTCTCYACQNFSRSYLHHLHKMNEMLGAQLNTIHNLHYYLQLMQELRDGLDNDDFDEVVRLFHANRARGIA

SEQ ID NO: 56138 - protein, 379 aa, Hydrotalea sandarakina
  misc_feature (1)..(379): tr|A0A2W7RX62|A0A2W7RX62_9BACT Queuine tRNA-ribosyltran sferase OS=Hydrotalea sandarakina OX=1004304 GN=tgt PE= 3 SV=1
MPALQFSIQQVDSASAARAGTIVTDHGTIQTPIFMPVGTVGSVKAVTQQQLNADVKAQIILGNTYHLYLRPGIEILNKAGGLHQFMGWHKPILTDSGGYQVFSLGSQRKIKEEGVTFQSHIDGSRHLFTPENVMDIERNIGADIIMAFDECPPYPSEYQYAKNSMELTHRWLDRCIARLKETPDLYGYTQNLFPIVQGGTYKDLRTASAQYIADKNAAGNAIGGLSVGEPEAMMYDFTALCCEFLPVEKPRYLMGVGTPWNILESIALGVDMFDCVMPTRNGRNGMLFTSKGVINIKNKKWATDFSVIDDGFISNISNYYTKAYLRHLFAADEILALQIASLHNLSFYLWLVGEARNQILNGNFYAWKQEMVPILKQRL

SEQ ID NO: 56139 - protein, 379 aa, Hydrotalea sp.
  misc_feature (1)..(379): tr|A0A4Q0AXM7|A0A4Q0AXM7_9BACT Queuine tRNA-ribosyltran sferase OS=Hydrotalea sp. AMD OX=2501297 GN=tgt PE=3 SV =1
MPQLQFSIQETDVACAARAGTIITDHGSIQTPIFMPVGTGGSVKAITQQQLQDDIHAQIILGNTYHLYLRPGTDILQQAGGLHKFMGWNRPILTDSGGYQVFSLATQRKIKEEGVTFQSHIDGSRHLFTPEYVMDIQRSIGADIIMAFDECPPYPSDYAYAKNSMELTHRWLDRGIARLAETPDLYGYTQNLFPIVQGGTFKDLRTASCAYIASKQAAGNAIGGLSVGEPEEMMYDFTALCCSILPSEKPRYLMGVGTPWNILEGIALGVDMFDCVMPTRNGRNGMLFTSKGIINIKNKKWATDFSVIDDGIPASISNYYSKAYLRHLFAANEISALQIASLHNLSFYLWLVAEARTQILLRNFNPWKQEMVPILKQRL

SEQ ID NO: 56140 - protein, 368 aa, Hyella patelloides
  misc_feature (1)..(368): tr|A0A563VKI1|A0A563VKI1_9CYAN Queuine tRNA-ribosyltran sferase OS=Hyella patelloides LEGE 07179 OX=945734 GN=t gt PE=3 SV=1
MAFSYYIQANCSHTKARAGIFTTPHGTVETPRFMPVGTLATVKGITPRQLKDAAAQMILANTYHLHLQPGEDIVESAGGLHKFMAWEQPILTDSGGFQVFSLSELRKISEEGVTFRSPRDGRIINMTPEHSIKIQNALGADVIMAFDECPPADASKAEVAAATERTYRWLKRCISAHQKPEKQALFGIVQGGIYLDLRSQSVADLVALDLPGYAIGGVSVGEKPELINATVQHTAPLLPADKPRYLMGVGTYREMVQAIASGVDLFDCVIPTRFGRHGTALVNGERINIKNAQYKRDYKPLDETCPCYACQNFSRSYLNHLVKSREMLGYILLSLHNITELIRFTQKIRTAILKDNFMVEFGNWLSKS

SEQ ID NO: 56141 - protein, 402 aa, Hylemonella gracilis
  misc_feature (1)..(402): tr|A0A4P6UJW1|A0A4P6UJW1_9BURK Queuine tRNA-ribosyltran sferase OS=Hylemonella gracilis OX=80880 GN=tgt PE=3 SV =1
MLRFELLRTEGLARRGRLTLNHGVVETPIFMPVGTYGTVKGVLPRSLHDMGAQIILGNTFHLWMRPGLDVMQSFGGLHGFEQWNKPILTDSGGFQVWSLGAMRKITEQGVHFASPVNGDKLFMSPEVSMQIQTTLNSDIVMQLDECTPYWQGEKGQGDKDSGHITTEAEARVSMELSQRWARRSQAEFARLENPNALFGIVQGGMFEHLRQESLEALVEMDFPGYAVGGVSVGEPKDEMNRIMAHTPHRLPAHKPRYLMGVGTPEDLVNGVANGVDMFDCVMPTRNARNGTIFTRYGDLKLRNARHKADHQPLDPSCTCYACAGGAGISWEQGGGPNHGWQGFSRAYLHHLDRCGEMLGPMLATIHNLHYYLNLMREVREALDAGTFAAFTARFQAERARGV

SEQ ID NO: 56142 - protein, 396 aa, Hylemonella gracilis
  misc_feature (1)..(396): tr|A0A016XLH3|A0A016XLH3_9BURK Queuine tRNA-ribosyltran sferase OS=Hylemonella gracilis str. Niagara R OX=14582 75 GN=tgt PE=3 SV=1
MLRFELLRTEGQARRGRLTLNHGVVETPIFMPVGTYGTVKGVLPCSLHDMGAQIILGNTFHLWMRPGLDVMQSFGGLHGFEQWNKPILTDSGGFQVWSLGAMRKITEQGVHFASPVNGDKLFMSPEVSMQIQTTLNSDIVMQLDECTPYWQGDKGSGHITTEAEARVSMELSQRWAKRSQAEFARLENPNALFGIVQGGMFEHLRQESLEALVDMDFPGYAVGGVSVGEPKDEMNRIMAHTPHRLPAHKPRYLMGVGTPEDLVNGVACGVDMFDCVMPTRNARNGTIFTRYGDLKLRNARHKADHQPLDPSCTCYACAGSAGISWEQGGPNQGWQGFSRAYLHHLDRCGEMLGPMLATIHNLHYYLNLMREVREALDAGAFAAFTARFHAERSRGV

SEQ ID NO: 56143 - protein, 376 aa, Hymenobacter actinosclerus
  misc_feature (1)..(376): tr|A0A1I0ACF0|A0A1I0ACF0_9BACT Queuine tRNA-ribosyltran sferase OS=Hymenobacter actinosclerus OX=82805 GN=tgt P E=3 SV=1
MTFDLLTTDPHTKARAGVVHTDHGAIETPIFMPVGTAGTVKAVQQRDLENDIQAQIILGNTYHLYLRPGLDILRQAGGLHQFNGWDRPILTDSGGYQVYSLSNTRKIKEEGVKFRSHVDGSQHLFTPEGVMDIQRTIGADIMMAFDECTPWPCEYAYAARSLDMTHRWLKRCIQRFDSTEGHYGYSQALFPIVQGSTFKDLRIKSAEFVAEQGREGNAIGGLSVGEPAELMYEMTELVCDILPPDKPRYLMGVGTPANILENIALGVDMFDCVMPTRNARNGLVYTTQGIMNLAARKWAEDFEPIDAALGGYVSTFYSRAYVRHLFHSKEMLGPQIASIHNLTFYLWLVKQAREQILAGTFREWKDVMVKKLMTRL

SEQ ID NO: 56144 - protein, 376 aa, Hymenobacter amundsenii
  misc_feature (1)..(376): tr|A0A246FLU7|A0A246FLU7_9BACT Queuine tRNA-ribosyltran sferase OS=Hymenobacter amundsenii OX=2006685 GN=tgt PE =3 SV=1
MTFDLLATDPHSKARAGVVHTDHGSIETPIFMPVGTAGTVKAVQQRDLKDDIKAQIILGNTYHLYLRPGLEVISKAGGLHKFNGWDGPILTDSGGYQVYSLSGTRKIKEEGVKFRSHIDGSQHLFSPEGVMDIQRTIGADIIMAFDECTPWPCEYDYAARSLDMTHRWLKRCIARFDSTEGHYGYSQTLFPIVQGSTFKDLRVKSAEFVAEQGREGNAIGGLSVGEPAELMYEMTELVCDILPPDKPRYLMGVGTPANILENIALGVDMFDCVMPTRNARNGMLFTTQGIMNIAARKWADDFEPIDAELGGYVSTFYSRSYVRHLFHSKEMLGPQVASIHNLTFYLWLVKQAREQILAGTFREWKEVMVKKLMTRL

SEQ ID NO: 56145 - protein, 376 aa, Hymenobacter aquaticus
  misc_feature (1)..(376): tr|A0A4Z0Q7K8|A0A4Z0Q7K8_9BACT Queuine tRNA-ribosyltran sferase OS=Hymenobacter aquaticus OX=1867101 GN=tgt PE= 3 SV=1
MTFDLVAHDPQSKARAGVVHTAHGAIQTPIFMPVGTAGTVKAVQQRDLNDDIKAQIILGNTYHLYLRPGLDVLRAAGGLHKFNGWDRPILTDSGGYQVYSLSGTRKIKEEGVKFRSHIDGSQHLFSPEGVMDIQRTIGADIMMAFDECTPWPCEYDYAARSLDMTHRWLKRCIERFDSTEGHYGYEQTLFPIVQGSTFKDLRVKSAEFIAEQGREGNAIGGLSVGEPAEQMYEMTELVCDILPQDKPRYLMGVGTPANILENIALGVDMFDCVMPTRNARNGMLFTTQGIMNITNKKWQLDFEPIDRELGGYVSTFYSRSYVRHLFQSQEMLGPQIASIHNLSFYLWLVQQAREQIVAGTFREWKDKMVKQVMTRL

SEQ ID NO: 56146 - protein, 376 aa, Hymenobacter chitinivorans
  misc_feature (1)..(376): tr|A0A2M9BLT6|A0A2M9BLT6_9BACT Queuine tRNA-ribosyltran sferase OS=Hymenobacter chitinivorans DSM 11115 OX=1121 954 GN=tgt PE=3 SV=1
MTFDLVAHDPQSKARAGVVHTAHGAIQTPIFMPVGTAGTVKAVQQRDLKDDIKAQIILGNTYHLYLRPGLDVLRAAGGLHKFNGWDRPILTDSGGYQVYSLSGTRKIKEEGVKFRSHIDGSQHLFSPEGVMDIQRTIGADIMMAFDECTPWPCEYNYAARSLDMTHRWLKRCIERFDSTEGHYGYEQTLFPIVQGSTFKDLRVKSAEFIAEQGREGNAIGGLSVGEPAEMMYEMTELVCDILPQDKPRYLMGVGTPANILENIALGVDMFDCVMPTRNARNGMLFTTQGIMNITNKKWQMDFEPIDRELGGYVSTFYSRSYVRHLFQSQEMLGPQIASIHNLSFYLWLVQQAREQIIAGTFRDWKDKMVKQVMTRL

SEQ ID NO: 56147 - protein, 376 aa, Hymenobacter coccineus
  misc_feature (1)..(376): tr|A0A1G1TE68|A0A1G1TE68_9BACT Queuine tRNA-ribosyltran sferase OS=Hymenobacter coccineus OX=1908235 GN=tgt PE= 3 SV=1
MTFDLIARDPATKARAGLLHTAHGAIETPIFMPVGTAGTVKAVSQQVLRTDVQAQIILGNTYHLYLRPGLEVLQAAGGLHRFNGWDGPILTDSGGYQVFSLSNTRKIKEDGVTFRSHVDGSKHLFTPEGVMDIQRVIGADIIMAFDECTPWPCDYDYARRSLDMTHRWLQRCIQRFDATEGLYGFEQNLFPIVQGSTFKDLRVQSAEFVAAQGRAGNAIGGLSVGEPAEMMYEMTELVCDILPADRPRYLMGVGTPANILENIALGVDMFDCVMPTRNARNGMLFTTQGIVNITNKKWATDFTPIDPSLPGVASTFYSRAYLRHLFQCKELLGPQIASAHNLAFYLWLVREARTQIQAGTFGPWKDRMVQQVMTRL

SEQ ID NO: 56148 - protein, 376 aa, Hymenobacter daecheongensis
  misc_feature (1)..(376): tr|A0A1M6GMP7|A0A1M6GMP7_9BACT Queuine tRNA-ribosyltran sferase OS=Hymenobacter daecheongensis DSM 21074 OX=112 1955 GN=tgt PE=3 SV=1
MTFDLVAHDPQTKARAGVVHTAHGAIETPIFMPVGTAGTVKAVQQRDLTHDVQAQIILGNTYHLYLRPGLDVLRAAGGLHKFNGWDRPILTDSGGYQVYSLSGTRKIKEEGVKFRSHIDGSSHLFSPEGVMDIQRTIGADIIMAFDECTPWPCEYDYASRSLDMTHRWLKRCIQRFDSTEGHYGYAQTLFPIVQGSTFKDLRVKSAEFVAEQGREGNAIGGLSVGEPAEQMYEMTELVCDILPKDKPRYLMGVGTPANILENIALGVDMFDCVMPTRNARNGMLFTTQGIINITNKKWQLDFEPIDATLGGYVSTFYSRSYVRHLFQSQEMLGPQIASIHNLSFYLWLVKQAREQIVAGTFREWKEKMVKQVMTRL

SEQ ID NO: 56149 - protein, 376 aa, Hymenobacter elongatus
  misc_feature (1)..(376): tr|A0A4Z0PMQ5|A0A4Z0PMQ5_9BACT Queuine tRNA-ribosyltran sferase OS=Hymenobacter elongatus OX=877208 GN=tgt PE=3 SV=1
MTFDLVAHDPHTKARAGVVHTAHGTIQTPIFMPVGTAGTVKAVQQRDLKDDVKAQIILGNTYHLYLRPGLDVLRNAGGLHKFNGWDRPILTDSGGYQVYSLSGTRKIKEEGVKFRSHIDGSQHLFSPEGVMDIQRTIGADIIMAFDECTPWPCEYDYASRSLDMTHRWLMRCIQRFDSTEGHYGYDQTLFPIVQGSTFKDLRVKSAEFVAEQQRAGNAIGGLSVGEPAELMYEMTELVCDILPKDKPRYLMGVGTPANILENIALGVDMFDCVMPTRNARNGMLFTTQGIINITNKKWQLDLEPLDQELGGYVSTFYSRSYVRHLFQSQEMLGPQIASVHNLTFYLWLVQQAREQIVAGTFRDWKEKMVKQVMTRL

SEQ ID NO: 56150 - protein, 376 aa, Hymenobacter gelipurpurascens
  misc_feature (1)..(376): tr|A0A212TPP9|A0A212TPP9_9BACT Queuine tRNA-ribosyltran sferase OS=Hymenobacter gelipurpurascens OX=89968 GN=tg t PE=3 SV=1
MTFDLVTQDPHTKARAGVVHTDHGTIETPIFMPVGTAGTVKAVQQRDLKDDIQAQIILGNTYHLYLRPGLEVLSKAGGLHKFNGWDKPILTDSGGYQVYSLSGTRKIKEEGVKFRSHIDGSQHLFSPEGVMDIQRTIGADIIMAFDECTPWPCEYDYASRSLDMTHRWLKRCIQRFDSTEGHYGYSQTLFPIVQGSTFKDLRVKSAEFIAEQGREGNAIGGLSVGEPAEMMYEMTEIVCDILPQDKPRYLMGVGTPANILENIALGVDMFDCVMPTRNARNGMLFTTQGIMNISNKKWADDFEPIDAELGGYVSTFYSRAYVRHLFHSKEMLGPQIASIHNLSFYLWLVKQAREQILAGTFREWKEKMVKQVMTRL

SEQ ID NO: 56151 - protein, 376 aa, Hymenobacter glacialis
  misc_feature (1)..(376): tr|A0A1G1SZ46|A0A1G1SZ46_9BACT Queuine tRNA-ribosyltran sferase OS=Hymenobacter glacialis OX=1908236 GN=tgt PE= 3 SV=1
MTFDLLAQDPATKARAGRLETAHGTIETPIFMPVGTAGTVKAVSQHTLKADIDAQIILGNTYHLYLRPGLDVLRAAGGLHKFNGWDRPILTDSGGYQVYSLSNTRKIKEEGVKFRSHIDGSQHLFSPEGVMDIQRVIGADIIMAFDECTPWPCEYDYAARSLDMTHRWLQRCIQRFDSTEGLYGYQQALFPIVQGSTFKDLRIKSAEFIAAQGREGNAIGGLSVGEPAELMYEMTELVCDILPKDKPRYLMGVGTPANILENIALGVDMFDCVMPTRNARNGMLFTTQGIMNVTNKKWATDFAPIDAELGGHASTFYTRAYLRHLFQCKEMLGPQIASAHNLAFYLWLVKEARLQIMAGTFGPWKERMVKQVMTRL

SEQ ID NO: 56152 - protein, 376 aa, Hymenobacter gummosus
  misc_feature (1)..(376): tr|A0A3S0JI42|A0A3S0JI42_9BACT Queuine tRNA-ribosyltran sferase OS=Hymenobacter gummosus OX=1776032 GN=tgt PE=3 SV=1
MKFDLLAHDPQSKARAGVLTTAHGTIETPIFMPVGTAGSVKAVHQREVKDDVQAQIILGNTYHLYLRPGLDTLRKAGGLHKFNGWDRPILTDSGGYQVYSLSNTRKIKEEGVKFRSHIDGSQHLFTPEGVMDIQRVIGADIIMAFDECTPWPCEYEYARKSLDMTHRWLKRCIQRIDETEPLYGYEQQLFPIVQGSTFKDLRVKSAEFIAEQGRAGNAIGGLSVGEPAELMYEMTEICCDILPADKPRYLMGVGTPANILENIALGVDMFDCVLPTRNARNGMLFTTQGIINIKNKKWEQDFSPIDEELGGYVSTFYSKSYLRHLFHAGEYLAGMAASVHNLTFYLWLVRNAREQILAGTFREWKERMVKQLMVRL

SEQ ID NO: 56153 - protein, 376 aa, Hymenobacter lapidarius
  misc_feature (1)..(376): tr|A0A1G1T1P6|A0A1G1T1P6_9BACT Queuine tRNA-ribosyltran sferase OS=Hymenobacter lapidarius OX=1908237 GN=tgt PE =3 SV=1
MTFDLLAQDPATKARAGRLETAHGTIETPIFMPVGTAGTVKAVSQHTLKADINAQIILGNTYHLYLRPGLDVLRAAGGLHQFNGWDRPILTDSGGYQVYSLSNTRKIKEEGVKFRSHIDGSQHLFSPEGVMDIQRVIGADIIMAFDECTPWPCEYDYAARSLDMTHRWLQRCIQRFDSTEGLYGYQQALFPIVQGSTFKDLRIKSAEFIAAQGREGNAIGGLSVGEPAELMYEITELVCDILPKDKPRYLMGVGTPANILENIALGVDMFDCVMPTRNARNGMLFTTQGILNVTNKKWATDFTPIDSELGGHASTFYSRAYLRHLFQCKEMLGPQIASAHNLAFYLWLVKEARQQIVAGTFGPWKERMVKQVMTRL

SEQ ID NO: 56154 - protein, 376 aa, Hymenobacter mucosus
  misc_feature (1)..(376): tr|A0A238YF99|A0A238YF99_9BACT Queuine tRNA-ribosyltran sferase OS=Hymenobacter mucosus OX=1411120 GN=tgt PE=3 SV=1
MTFDLVTQDPHTKARAGVVHTDHGAIETPIFMPVGTAGTVKAVQQRDLKDDIQAQIILGNTYHLYLRPGLDVLQKAGGLHKFNGWDRPILTDSGGYQVYSLSGTRKIKEEGVKFRSHIDGSQHLFSPEGVMDIQRTIGADIIMAFDECTPWPCEYDYAARSLDMTHRWLKRCIQRFDSTEGHYGYSQTLFPIVQGSTFKDLRVKSAEFIAEQGREGNAIGGLSVGEPAEMMYEMTEIVCDILPQDKPRYLMGVGTPANILENIALGVDMFDCVMPTRNARNGMLFTTQGIINIANKKWADDFTPIDEELGGYVSTFYSRSYVRHLFHSKEMLGPQIASIHNLTFYLWLVKQARQQILAGTFREWKERMVKQVMTRL

SEQ ID NO: 56155 - protein, 376 aa, Hymenobacter nivis
  misc_feature (1)..(376): tr|A0A2Z3GNK8|A0A2Z3GNK8_9BACT Queuine tRNA-ribosyltran sferase OS=Hymenobacter nivis OX=1850093 GN=tgt PE=3 SV =1
MTFDLLARDPATKARAGLLHTAHGAIETPIFMPVGTAGTVKAVSQQVLRTDVQAQIILGNTYHLYLRPGLEVLQAAGGLHRFNGWDGPILTDSGGYQVFSLSNTRKIKEEGVTFRSHVDGSKHLFTPEGVMDIQRVIGADIIMAFDECTPWPCEYDYARRSLDLTHRWLQRCIQRFDATEGLYGFEQNLFPIVQGSTFKDLRVQSAEFVAAQGRAGNAIGGLSVGEPAELMYEMTELVCDILPADKPRYLMGVGTPANILENIALGVDMFDCVMPTRNARNGMLFTTQGIVNITNKKWATDFTPIDPSLPGVASTFYSRAYLRHLFQCKELLGPQIASAHNLAFYLWLVREARTQIVAGTFGPWKDRMVQQVMTRL

SEQ ID NO: 56156 - protein, 376 aa, Hymenobacter nivis
  misc_feature (1)..(376): tr|A0A502HGN4|A0A502HGN4_9BACT Queuine tRNA-ribosyltran sferase OS=Hymenobacter nivis OX=1850093 GN=tgt PE=3 SV =1
MTFDLIARDPATKARAGLLHTAHGAIETPIFMPVGTAGTVKAVSQQVLRTDVQAQIILGNTYHLYLRPGLEVLQAAGGLHKFNGWDGPILTDSGGYQVFSLSNTRKIKEDGVTFRSHVDGSKHLFTPEGVMDIQRVIGADIIMAFDECTPWPCDYDYARRSLDMTHRWLQRCIARFDTTEGLYGFEQNLFPIVQGSTFKDLRVQSAEFVAAQGRAGNAIGGLSVGEPAEMMYEMTELVCDILPADKPRYLMGVGTPANILENIALGVDMFDCVMPTRNARNGMLFTTQGIVNITNKKWATDFTPIDPSLPGVASTFYSRAYLRHLFQSKELLGPQIASAHNLAFYLWLVREARTQIQAGTFGPWKDRMVQQVMTRL

SEQ ID NO: 56157 - protein, 376 aa, Hymenobacter perfusus
  misc_feature (1)..(376): tr|A0A3R9NSL6|A0A3R9NSL6_9BACT Queuine tRNA-ribosyltran sferase OS=Hymenobacter perfusus OX=1236770 GN=tgt PE=3 SV=1
MTFDLVANDPHSKARAGVVHTDHGAIETPIFMPVGTAGTVKAVQQRDLKDDINAQIILGNTYHLYLRPGLEVISKAGGLHKFNGWDRPILTDSGGYQVYSLSGTRKIKEEGVKFRSHIDGSQHLFSPEGVMDIQRTIGADIIMAFDECTPWPCEYSYAARSLDMTHRWLKRCITRFDGTEGHYGYSQTLFPIVQGSTFKDLRVKSAEFIAEQGREGNAIGGLSVGEPADMMYEMTEIVCDILPKDKPRYLMGVGTPANILENIALGVDMFDCVMPTRNARNGMLFTTQGIMNIANKKWADDFTPIDEELGGYVSTFYSRSYVRHLFHSKEMLGPQIASIHNLTFYLWLVKQARQQILAGTFREWKDRMVKQLMTRL

SEQ ID NO: 56158 - protein, 376 aa, Hymenobacter psychrophilus
  misc_feature (1)..(376): tr|A0A1H3FCE0|A0A1H3FCE0_9BACT Queuine tRNA-ribosyltran sferase OS=Hymenobacter psychrophilus OX=651662 GN=tgt PE=3 SV=1
MTFDLLTTDPHSKARAGVVHTDHGSIETPIFMPVGTAGTVKAVQQRDLKDDINAQIILGNTYHLYLRPGLDIIRQAGGLHKFNGWDRPILTDSGGYQVYSLSNTRKIKEEGVKFRSHVDGSQHLFTPEGVMDIQRTIGADIMMAFDECTPWPCEYDYAARSLDMTHRWLKRCIQRFDSTEGHYGYSQTLFPIVQGSTFKDLRIKSAEFVAEQGREGNAIGGLSVGEPADMMYEMTELVCDILPKDKPRYLMGVGTPANILENIALGVDMFDCVMPTRNARNGLVYTTQGIMNLAARKWAEDFEPIDAELGGYVSTFYSRSYVRHLFHSKEMLGPQIASIHNLTFYLWLVKQARAQILAGTFREWKDVMVKKLMTRL

SEQ ID NO: 56159 - protein, 376 aa, Hymenobacter psychrotolerans
  misc_feature (1)..(376): tr|A0A1M7CTV3|A0A1M7CTV3_9BACT Queuine tRNA-ribosyltran sferase OS=Hymenobacter psychrotolerans DSM 18569 OX=11 21959 GN=tgt PE=3 SV=1
MTFDLVANDPHTKARAGVVHTAHGAIETPIFMPVGTAGTVKAVQQRDLKDDVQAQIILGNTYHLYLRPGLDVLQKAGGLHRFNGWDRPILTDSGGYQVYSLSGTRKIKEEGVKFRSHIDGSQHLFSPEGVMDIQRTIGADIIMAFDECTPWPCEYDYAARSLDMTHRWLKRCIQRFDSTEGHYGYQQTLFPIVQGSTFRDLRIKSAEFIAEQGREGNAIGGLSVGEPADMMYEMTELVCDILPQDKPRYLMGVGTPANILENIALGVDMFDCVMPTRNARNGMLFTTQGIMNVTNKKWETDFEPIDAELGGYVSTFYSRSYVRHLFQSKEMLGPQIASIHNLTFYLWLVKQARQQILAGTFREWKEKMVKQVMTRL

SEQ ID NO: 56160 - protein, 376 aa, Hymenobacter rigui
  misc_feature (1)..(376): tr|A0A428KPV9|A0A428KPV9_9BACT Queuine tRNA-ribosyltran sferase OS=Hymenobacter rigui OX=334424 GN=tgt PE=3 SV= 1
MTFDLVANDPHSNARAGVVHTDHGAIETPIFMPVGTAGTVKAVQQRDLKDDINAQIILGNTYHLYLRPGLEVLQKAGGLHKFNGWDRPILTDSGGYQVYSLSGTRKIKEEGVKFRSHIDGSQHLFSPEGVMDIQRTIGADIMMAFDECTPWPCEYSYAARSLDMTHRWLKRCIQRFDSTEGHYGYSQTLFPIVQGSTFKDLRVKSAEFIAEQGREGNAIGGLSVGEPAEMMYEMTDLVCGILPKDKPRYLMGVGTPANILENIALGVDMFDCVMPTRNARNGMLFTTQGIMNIANKKWADDFAPIDEELGGYVSTFYSRSYVRHLFHSKEMLGPQIASIHNLTFYLWLVKQARQQILAGTFREWKDKMVKQVMTRL

SEQ ID NO: 56161 - protein, 376 aa, Hymenobacter roseosalivarius
  misc_feature (1)..(376): tr|A0A1W1V757|A0A1W1V757_9BACT Queuine tRNA-ribosyltran sferase OS=Hymenobacter roseosalivarius DSM 11622 OX=64 5990 GN=tgt PE=3 SV=1
MTFDLVAHDPQTKARAGVVHTAHGSIETPIFMPVGTAGTVKAVQQRDLTHDVQAQIILGNTYHLYLRPGLDILRQAGGLHKFNGWDRPILTDSGGYQVYSLSNTRKIKEEGVKFRSHIDGSQHLFSPEGVMDIQRTIGADIIMAFDECTPWPCEYDYARRSLDMTHRWLTRCIQRFDSTEGHYGYEQTLFPIVQGSTFKDLRIKSAEFIAEQQREGNAIGGLSVGEPAELMYEMTELVCDILPPDKPRYLMGVGTPANILENIALGVDMFDCVMPTRNARNGMLFTTQGIMNITNKKWATDFEPIDAELGGYVSTFYSRSYVRHLFQSQEMLGPQIASIHNLTFYLWLVRQARTHIIAGTFWEWKEKMVKQVMTRL

SEQ ID NO: 56162 - protein, 376 aa, Hymenobacter rubripertinctus
  misc_feature (1)..(376): tr|A0A418QRL4|A0A418QRL4_9BACT Queuine tRNA-ribosyltran sferase OS=Hymenobacter rubripertinctus OX=2029981 GN=t gt PE=3 SV=1
MTFDLLTTDPHSKARAGVVHTAHGAIETPIFMPVGTAGTVKAVQQRDLKNDIKAQIILGNTYHLYLRPGLEVISKAGGLHKFNGWDGPILTDSGGYQVYSLSGTRKIKEEGVKFRSHIDGSQHLFSPEGVMDIQRTIGADIIMAFDECTPWPCAYDYAARSLDMTHRWLKRCIARFDSTEGHYGYSQTLFPIVQGSTFKDLRIKSAEFVAEQGREGNAIGGLSVGEPAELMYEMTELVCDILPQDKPRYLMGVGTPANILENIALGVDMFDCVMPTRNARNGMLFTTQGIMNIAARKWADDFEPIDAELGGYVSTFYSRSYVRHLFHSKEMLGPQVASIHNLTFYLWLVKQAREQILAGTFREWKEVMVKKLMTRL

SEQ ID NO: 56163 - protein, 376 aa, Hymenobacter sedentarius
  misc_feature (1)..(376): tr|A0A0U3SBY4|A0A0U3SBY4_9BACT Queuine tRNA-ribosyltran sferase OS=Hymenobacter sedentarius OX=1411621 GN=tgt P E=3 SV=1
MTFDLLAQDPATKARAGCLETAHGAIETPIFMPVGTAGTVKAVSQQTLKEDIQAQIILGNTYHLYLRPGLDVLRAAGGLHQFNGWDRPILTDSGGYQVYSLSNTRKIKEEGVKFRSHIDGSQHLFSPEGVMDIQRVIGADIIMAFDECTPWPCEYDYAARSLDMTHRWLQRCIQRFDSTEGLYGYQQALFPIVQGSTFKDLRIKSAEFIAAQGREGNAIGGLSVGEPAELMYEMTELVCDILPKDKPRYLMGVGTPANILENIALGVDMFDCVMPTRNARNGMLFTTQGIMNVTNKKWANDFTPIDAELGGPASTFYTRAYVRHLFQCQEMLGPQIASAHNLTFYLWLVKEARKQIVAGTFAPWKERMVKQVMTRL

SEQ ID NO: 56164 - protein, 376 aa, Hymenobacter sp.
  misc_feature (1)..(376): tr|A0A5B7ZW47|A0A5B7ZW47_9BACT Queuine tRNA-ribosyltran sferase OS=Hymenobacter sp. 17J68-5 OX=2502781 GN=tgt P E=3 SV=1
MTFDLVAQDSQTKARVGVVTTAHGAIQTPIFMPVGTVGTVKAVQQRDLVNDVQAQIILGNTYHLYLRPGLDILRQAGGLHKFNGWDRPILTDSGGYQVYSLSGTRKIKEEGVKFRSHIDGSQHLFSPEGVMDIQRTIGADIIMAFDECTPWPCEYDYAKRSLDMTHRWLKRCIARFDSTEGHYGYEQTLFPIVQGSTFKDLRIQSAEFVAEQQREGNAIGGLSVGEPAELMYEMTELVCDILPKDKPRYLMGVGTPANILENIALGVDMFDCVMPTRNARNGMLFTTQGVMNITNKKWATDFEPIDAELGGYVSTFYSRAYVRHLFQSQEMLGPQIASVHNLTFYLWLVKQAREHILAGTFREWKDRMVKQLMTRL

SEQ ID NO: 56165 - protein, 376 aa, Hymenobacter sp.
  misc_feature (1)..(376): tr|A0A495UZJ8|A0A495UZJ8_9BACT Queuine tRNA-ribosyltran sferase OS=Hymenobacter sp. YR204 OX=2135668 GN=tgt PE= 3 SV=1
MTFDLVAQDPHTKARAGVVHTAHGSIETPIFMPVGTVGSVKAVHQRELKEDIKAQIILGNTYHLYLRPGLDVLRQAGGLHKFNGWDRPILTDSGGYQVYSLSKTRKIKEEGVKFRSHIDGSQHLFSPEGVMDIQRVIGADIIMAFDECTPWPCEYDYASRSLDMTHRWLKRCIQRFDSTEGLYGYQQTLFPIVQGSTFKDLRVKSAEFVAEQGREGNAIGGLSVGEPAELMYEMTEIVCDILPKDKPRYLMGVGTPANILENIALGVDMFDCVMPTRNARNGMLFTTQGIINIKNKKWETDFSPIDAELGGYASTFYTKSYLRHLFQSTEYLAGMVASVHNLSFYLWLVGEARQRIQNGTFLEWKERMVKQLMVRL

SEQ ID NO: 56166 - protein, 376 aa, Hymenobacter swuensis
  misc_feature (1)..(376): tr|W8F3E9|W8F3E9_9BACT Queuine tRNA-ribosyltransferase OS=Hymenobacter swuensis DY53 OX=1227739 GN=tgt PE=3 SV =1
MTFDLVAKDPHSKARAGVVHTDHGAIETPIFMPVGTAGTVKAVQQRDLKDDINAQIILGNTYHLYLRPGLEVIGKAGGLHKFNGWDRPILTDSGGYQVYSLSGTRKIKEEGVKFRSHIDGSQHLFSPEGVMDIQRTIGADIIMAFDECTPWPCEYSYAARSLDMTHRWLKRCITRFDGTEGHYGYSQTLFPIVQGSTFKDLRVKSAEFIAEQGREGNAIGGLSVGEPADMMYEMTEIVCDILPKDKPRYLMGVGTPANILENIALGVDMFDCVMPTRNARNGMLFTTQGIMNIANKKWADDFTPIDEELGGYVSTFYSRSYVRHLFHSKEMLGPQIASIHNLTFYLWLVKQARQQILAGTFREWKDRMVKQVMTRL

SEQ ID NO: 56167 - protein, 376 aa, Hymenobacter wooponensis
  misc_feature (1)..(376): tr|A0A4Z0MTC2|A0A4Z0MTC2_9BACT Queuine tRNA-ribosyltran sferase OS=Hymenobacter wooponensis OX=1525360 GN=tgt P E=3 SV=1
MTFDLVTQDPHTKARAGVVHTDHGAIETPIFMPVGTAGTVKAVQQRDLKDDIQAQIILGNTYHLYLRPGLDVLSKAGGLHKFNGWDRPILTDSGGYQVYSLSGTRKIKEEGVKFRSHIDGSQHLFSPEGVMDIQRTIGADIIMAFDECTPWPCEYDYAARSLDMTHRWLKRCIQRFDSTEGHYGYSQTLFPIVQGSTFKDLRVKSAEFIAEQGREGNAIGGLSVGEPAEMMYEMTEIVCDILPQDKPRYLMGVGTPANILENIALGVDMFDCVMPTRNARNGMLFTTQGIMNISNKKWAEDFEPIDAELGGYVSTFYSRAYVRHLFQSKEMLGPQIASIHNLSFYLWLVKQARQQILAGTFREWKEKMVKQVMTRL

SEQ ID NO: 56168 - protein, 383 aa, Hyphomicrobiaceae bacterium; identical to SEQ ID NO: 55259
  misc_feature (1)..(383): tr|A0A3R7ST39|A0A3R7ST39_9RHIZ Queuine tRNA-ribosyltran sferase OS=Hyphomicrobiaceae bacterium TMED74 OX=198677 4 GN=tgt PE=3 SV=1
  misc_feature (7)..(7): Xaa can be any naturally occurring amino acid
  misc_feature (12)..(12): Xaa can be any naturally occurring amino acid
  misc_feature (33)..(33): Xaa can be any naturally occurring amino acid
  misc_feature (48)..(48): Xaa can be any naturally occurring amino acid
  misc_feature (177)..(178): Xaa can be any naturally occurring amino acid

SEQ ID NO: 56169 - protein, 382 aa, Hyphomicrobium denitrificans
  misc_feature (1)..(382): tr|D8JQL3|D8JQL3_HYPDA Queuine tRNA-ribosyltransferase OS=Hyphomicrobium denitrificans (strain ATCC 51888 / DS M 1869 / NCIB 11706 / TK 0415) OX=582899 GN=tgt PE=3 SV =1
MTEHFAFHLKTTDGLARLGEITTSRGVIRTPAFMPVGTVATVKALYPDQVRDAGADILLGNTYHLMLRPGAERIARLGGLHKFMRWDGPILTDSGGFQVMSLGKIRKITEEGVAFQSHLDGSRHMLSPERSIEIQCLLGADIQMQFDECIELPAERREVERAMELSLRWAERSKRAFEAQRAAGGAHAGQALFGIVQGGTDAELRHRSAAALVDMDFPGYAVGGLAVGEGHEAMIATLGQTLPALPTDKPRYLMGVGTPLDLIESVRLGVDMFDCVMPTRNGRHGYAFTWNGALNMRNAKFAEDMSPLDELSSCPGARDYSKAYVHHLIKSGEFLGAMILSWVNTVFYQDLMAAMRDAIAHGRFAEWADETKARITKRPAAP

SEQ ID NO: 56170 - protein, 392 aa, Hyphomicrobium denitrificans
  misc_feature (1)..(392): tr|N0BE79|N0BE79_9RHIZ Queuine tRNA-ribosyltransferase OS=Hyphomicrobium denitrificans 1NES1 OX=670307 GN=tgt PE=3 SV=1
MKADVESRLSLGEHFAFHLKTTDGLARLGEIVTPRGVISTPAFMPVGTVATVKALYPEQVGDAGADIILGNTYHLMLRPGAERIARLGGLHKFMRWDGPILTDSGGFQVMSLGKIRKITEDGVAFQSHLDGSRHMLSPERSIEIQCLLGSDIQMQFDECIELPAERREVERAMELSLRWAERSKRAFEAQLVAGGAHRGQALFGIVQGGTDPELRRRSAEALVAMDFPGYAVGGLAVGEGHEAMVATLGETLPALPGDKPRYLMGVGTPLDLIESVRLGVDMFDCVMPTRNGRHGYAFTWNGALNMRNAKYAEDSSPIDELSSCPAARDYSRAYVHHLIKSGEFLGAMILSWVNTVFYQELMAAMREAIANGRFAEWAEATKTQIIRQPAAP

SEQ ID NO: 56171 - protein, 396 aa, Hyphomicrobium facile
  misc_feature (1)..(396): tr|A0A1I7N300|A0A1I7N300_9RHIZ Queuine tRNA-ribosyltran sferase OS=Hyphomicrobium facile OX=51670 GN=tgt PE=3 S V=1
MNVATTEHVTEKPSPAFGFRLLTQDGNARRSEIVTPRGVIRTPAFMPVGTVATVKALYPEQVRDAGADILLGNTYHLMLRPGAERVAKLGGLHKFMRWEKPILTDSGGFQVMSLGKIRKITEEGVAFQSHIDGSRHMLSPERSIEIQCLLGSDIQMQFDECIELPAERKEVERAMELSLRWAERSKRAFEMQLASGGAGPGQALFAIVQGGTDVELRRRSAEALVGMDFPGYAVGGLAVGEGHEAMIATLGETLPHLPAGKPRYLMGVGTPLDLIESVRLGVDMFDCVMPTRNGRHGYAFTWNGPVNMRNAKHAEDPSPLDALSSCPAAREYSRAYIHHLIKSGEYLGAMILSWVNTVFYQDLMAAMRSAIDDGRFDAWAAETKARITAAPTAQEP

SEQ ID NO: 56172 - protein, 378 aa, Hyphomicrobium nitrativorans
  misc_feature (1)..(378): tr|V5SF23|V5SF23_9RHIZ Queuine tRNA-ribosyltransferase OS=Hyphomicrobium nitrativorans NL23 OX=1029756 GN=tgt PE=3 SV=1
MTERFSFQLLARDGLARRGEIFTPRGTIRTPAFMPVGTVATVKALYPEQVRDAGADILLGNTYHLMLRPGAERMARLGGLHKFMRWEKPILTDSGGFQVMSLSKIRKINEEGALFQSHLDGSRHMLTPERAIEIQCLLGSDIQMQLDECIELPSERREVERAMELSLRWAERSRRAFEAQQASGAAGQGQAMFGIVQGGTDAELRRRSAEALVAMDLEGYAVGGLAVGEGHDLMLATLDATLPSLPETKPRYLMGVGTPLDLIEAVRRGIDMFDCVLPTRNGRHGLAFTWNGPVNLRNAVHAEDTSPLDEASTCPAARDYSRAYLHHLIRSGEYLGAMLLSWVNTAFYQELMASMRAAIEEGRFDAWAEETKARIARK

SEQ ID NO: 56173 - protein, 382 aa, Hyphomicrobium sp.
  misc_feature (1)..(382): tr|A0A258L3S0|A0A258L3S0_9RHIZ Queuine tRNA-ribosyltran sferase OS=Hyphomicrobium sp. 32-62-53 OX=1970390 GN=tg t PE=3 SV=1
MDQTVQTFGYTRLGQDGAARLGEIRTPRGVIRTPAFMPVGTVGTVKALYPEQVKGAGADILLGNTYHLMLRPGAERIARLGGLHKFMRWDGPILTDSGGFQVMSLATIRKITEEGAQFQSHIDGSRHMLTPERSIEIQCLLGSDIQMQFDECIELPAERSEVERAMALSLRWAERSKRAFEAQVAAGGATRGQALFAIVQGGVDSELRQRSARALVEMDFPGYAVGGLAVGEGHEAMVATLEETLPHLPADKPRYLMGVGTPLDLIESVRRGIDMFDCVMPTRNGRHGTAFTWDGRVNLHNAKHAEDLAPLDPESTCPAARDYSRAYLHHLVKSGEYLGAMILSWVNTVFYQDLMAAMRAAIAEGRFDAWAEATKARLERKG

SEQ ID NO: 56174 - protein, 400 aa, Hyphomicrobium sp.
  misc_feature (1)..(400): tr|F8J5W6|F8J5W6_HYPSM Queuine tRNA-ribosyltransferase OS=Hyphomicrobium sp. (strain MC1) OX=717785 GN=tgt PE= 3 SV=1
MQTTKVDTPSSEVPEGTSAFEFRKLAQDGKARLGEIHTPRGVIRTPAFMPVGTVATVKALYPEQVRDAGADILLGNTYHLMLRPGAERVAKLGGLHKFMRWEKPILTDSGGFQVMSLGKIRKITEEGVAFQSHIDGSRHMLSPERSIEIQCLLGSDIQMQFDECIELPAERKEVERAMKLSLRWAERSKRAFEMQLASGGAGPGQALFAIVQGGTDIPLRHRSADALVAMDFPGYAVGGLAVGEGHEAMIATLGETLPHLPSEKPRYLMGVGTPLDLIESVRLGVDMFDCVMPTRNGRHGYAFTWGGPLNLRNAKFAEDMAPLDEFSSCPAAKDFSRAYVHHLIKSGEFLGAMILSWVNTVFYQDLMAAMRAAIAEGRFDDWAAETKARIIASPQSAPAP

SEQ ID NO: 56175 - protein, 388 aa, Hyphomicrobium sulfonivorans
  misc_feature (1)..(388): tr|A0A109BIF8|A0A109BIF8_HYPSL Queuine tRNA-ribosyltran sferase OS=Hyphomicrobium sulfonivorans OX=121290 GN=tg t PE=3 SV=1
MTPSETKEHSPMQQQAQTFGYRLLKQDGAARLGEVVTPRGIVRTPAFMPVGTVATVKALTFDQVKQAGADIVLANTYHLMLRPGAERVARLGGLHNFMRWDGPILTDSGGFQVMSLSKIRKINEEGVRFASHIDGSRHLLTPERAVEIQCLLGSDIQMQLDECISLPAERKETERAMELSLRWAARAQRAFSDLAKPGQALFGIVQGGVDAELRQRSAEALVAMDLPGYAVGGLAVGEGQELMLRTLDGVLPHLPSHKPRYLMGVGTPSDLIKSVARGVDMFDCVMPTRNGRHGLAFTWNGKVNLRNARHADDPAPLDEQSSCPGARDYSRAYLHHLVRSGEYLGAMLLSWVNTTFYQELMAAMRLAIAEGRFNTWAEETLDRIERTN

SEQ ID NO: 56176 - protein, 383 aa, Hyphomonadaceae bacterium
  misc_feature (1)..(383): tr|A0A0F2QEZ3|A0A0F2QEZ3_9RHOB Queuine tRNA-ribosyltran sferase OS=Hyphomonadaceae bacterium BRH_c29 OX=1629720 GN=tgt PE=3 SV=1
MTTFPFEIKAREGKARTGVLKTTRGEIRTPAFMPVGTAGTVKALYMDQVKEAGADIILGNTYHLMLRPGAERVQRLGGLHKFAHWDGPMLTDSGGFQVWSLAQLRKMDADGVTFQSHIDGSTHRLTPARSIEIQADLLGADISMQLDECTNFPCTHEEAEQSLELSLRWGQRSLEAFGAREAQTLFGIIQGSNFADLRERSAKGVVSQGFGGIALGGLAVGEGHAQMCATIDMTVPHLPDALPRYVMGVGKPIDLVESVARGIDMFDCVLPTRSGRHGQAWTWAGPINVKNAKFAEDLSPLDAAVDCPASRDYPLAYYHHLFRAGEYLGPMLLSWHNTAFFQALMQEIRTSIAEGRFEALRAKLQTAWASTKSAPRTDEASAD

SEQ ID NO: 56177 - protein, 369 aa, Hyphomonadaceae bacterium
  misc_feature (1)..(369): tr|A0A354CH35|A0A354CH35_9RHOB Queuine tRNA-ribosyltran sferase OS=Hyphomonadaceae bacterium OX=2026748 GN=tgt PE=3 SV=1
MTDFPFEIHATQDRARTGKLVTPRGEIRTPAFMPVGTAATVKALYTDQVADAGADILLGNTYHLMLRPGSERVHRLGGLHKFMRWDKPILTDSGGFQVWSLAGLRKMKEEGVSFKSHIDGSSHFLSPERSIEIQADHLGADISMQLDECTEYPATHEQAKSSMEMSIRWGARSKAAFGERDSQTLFGIVQGSDFEDLRQQSAESLQEIGFGGYAIGGLAVGEGHNRMVEVIDFTEPHLPRERPRYLMGVGKPIDILEAVAHGVDMFDCVLPTRSGRHGQAWTWDGPINLKNARFAEDDTPIDPSSSCPASRDYSKAYLNHLFKAGEYLAPMLLSWHNTAFFQEFMQAMRTAIANGTFNELRADLKSRWT

SEQ ID NO: 56178 - protein, 383 aa, Hyphomonas adhaerens
  misc_feature (1)..(383): tr|A0A069E246|A0A069E246_9RHOB Queuine tRNA-ribosyltran sferase OS=Hyphomonas adhaerens MHS-3 OX=1280949 GN=tgt PE=3 SV=1
MTTFPFEINAREGKARTGVLKTPRGDIRTPAFMPVGTAGTVKALYMDQVKGAGADIILGNTYHLMLRPGAERVNRLGGLHKFAHWDGPMLTDSGGFQVWSLAQLRKMDADGVTFQSHIDGSTHRLDPARSIEIQADLLGADISMQLDECTNFPCTHEEAEESLELSLRWGERSLDAFGERDTQTLFGIIQGSNFADLRERSAKGVVSQGFGGIALGGLAVGEGHEQMCATIDMTVPHLPDAVPRYVMGVGKPIDLVESVARGIDMFDCVLPTRSGRHGQAWTWAGPVNVKNARFAEDLSPLDEAVDCPASRDYPRAYYHHLFRAGEYLGPMLLSWHNTAFFQALMQEIRASIAEGRFEALRAHLSEAWASTKSKPRTGEDTAS

SEQ ID NO: 56179 - protein, 380 aa, Hyphomonas atlantica
  misc_feature (1)..(380): tr|A0A059E0M2|A0A059E0M2_9RHOB Queuine tRNA-ribosyltran sferase OS=Hyphomonas atlantica OX=1280948 GN=tgt PE=3 SV=1
MAVFPFEISATEGKARTGVLKTPRGDIRTPAFMPVGTAGTVKALYMDQVKDAGADIILGNTYHLMLRPGAERVQRLGGLHAFAHWNGPMLTDSGGFQVWSLAQLRKMDPDGVTFQSHIDGSTHRLTPARSIEIQADLLGADISMQLDECTDYPCTHEEAERSLDLSLDWGQRSLDAFGDRDAQTLFGIIQGSNYADLREKSAKGVVSQGFGGLALGGLAVGEGHDQMCATIDMTVPHLPDHLPRYVMGVGKPIDLVESVARGIDMFDCVLPTRSGRHGQAWTWDGPVNVKNARFAEDVSPLDEAVNCPASQDYSRAYYHHLFKAGEYLGPMLLSWHNTAFFQALMQEIRASIAEGRFEALRTRLQTAWASTKSSPKDERA

SEQ ID NO: 56180 - protein, 380 aa, Hyphomonas beringensis
  misc_feature (1)..(380): tr|A0A062UG46|A0A062UG46_9RHOB Queuine tRNA-ribosyltran sferase OS=Hyphomonas beringensis OX=1280946 GN=tgt PE= 3 SV=1
MATFPFEIKATEGKARAGVLKTPRGDIRTPAFMPVGTAGTVKALYMDQVKDAGADIILGNTYHLMLRPGAERVQRLGGLHAFAHWDGPMLTDSGGFQVWSLAQLRKMDPDGVTFQSHIDGSTHRLTPARSIEIQADLLGADISMQLDECTDYPCSHEEAERSLDLSLDWGQRSLEAFGDRDSQTLFGIIQGSNYADLREKSAKGVVSQGFGGIALGGLAVGEGHEQMCATIDLTVPHLPDHLPRYVMGVGKPIDLVESVARGIDMFDCVLPTRSGRHGQAWTWDGPVNVKNAKFAEDLSPLDEAVNCPASQDYSRAYYHHLFKAGEYLGPMLLSWHNTAFFQALMQEIRDSIAEGRFEALRSRLQTAWASTKSSPKDERA

SEQ ID NO: 56181 - protein, 381 aa, Hyphomonas chukchiensis
  misc_feature (1)..(381): tr|A0A062UEV1|A0A062UEV1_9RHOB Queuine tRNA-ribosyltran sferase OS=Hyphomonas chukchiensis OX=1280947 GN=tgt PE =3 SV=1
MATFPFQIKATEGAARTGTLTTPRGEIRTPAFMPVGTAGTVKALYMDQVKSAGADIILGNTYHLMLRPGAERVKRLGGLHSFAHWDGPMLTDSGGFQVWSLAQLRKMDANGVTFQSHIDGSTHRLTPARSIEIQADLLGADISMQLDECTNFPCTHKEAERSLTLSLDWGQRSLDAFGDRDSQTLFGIIQGSNFADLREQSAKGVVAQGFGGIALGGLAVGEGHEQMCATIDMTVPHLPNHLPRYVMGVGKPIDLVESVARGIDMFDCVLPTRSGRHGQAWTWAGPVNVKNAQFAEDLSPLDEGVDCPASSDYSRAYYHHLFKAGEYLGPMLLSWHNTAFFQSLMAEIRLSILEGRFEALRSELAVRWAATKSSPKAEPEA

SEQ ID NO: 56182 - protein, 379 aa, Hyphomonas hirschiana
  misc_feature (1)..(379): tr|A0A059FYW2|A0A059FYW2_9RHOB Queuine tRNA-ribosyltran sferase OS=Hyphomonas hirschiana VP5 OX=1280951 GN=tgt PE=3 SV=1
MATFPFEISAREGKARTGRLKTPRGDIRTPAFMPVGTAGTVKALYMDQVQGAGADIILGNTYHLMLRPGAERVQRLGGLHKFSGWSGPMLTDSGGFQVWSLAQLRKMDADGVTFQSHIDGSTHRLTPARSIEIQADLLGADISMQLDECTNFPCTHEEAERSLALSLKWGERSLDAFGARDAQTLFGIIQGSNFPDLRERSAKGVTAQGFGGIALGGLAVGEGHDQMCATIDMTMPHLPDHMPRYVMGVGKPIDLVESVARGIDMFDCVLPTRSGRHGQAWTWDGPLNLNNAKFAEDTSPLDPVINCPASQVYSRAYLHHLFKAGEYLGPMLLSWHNTAFFQALMAEMRAAIAEGRFEALRATLSAGWENTKSKPKAES

SEQ ID NO: 56183 - protein, 383 aa, Hyphomonas jannaschiana
  misc_feature (1)..(383): tr|A0A059FAQ9|A0A059FAQ9_9RHOB Queuine tRNA-ribosyltran sferase OS=Hyphomonas jannaschiana VP2 OX=1280952 GN=tg t PE=3 SV=1
MTTFPFEIKAREGKARTGVLKTPRGDIRTPAFMPVGTAGTVKALYMDQVKGAGADIILGNTYHLMLRPGAERVSRLGGLHKFAHWDGPMLTDSGGFQVWSLAQLRKMDADGVTFQSHIDGSTHRLDPARSIEIQADLLGADISMQLDECTDYPCTHEQAEESLELSLRWGERSLDAFGERDAQTLFGIIQGSNFADLRERSAKGVVSQGFGGIALGGLAVGEGHAQMCETIDMTVPHLPDGMPRYVMGVGKPIDLVESVARGIDMFDCVLPTRSGRHGQAWTWAGPVNVKNAKFAEDLSPLDDAVDCPASRDYPRAYYHHLFRAGEYLGPMLLSWHNTAFFQALMQEIRTSIAEGRFETLRARLSDAWASTKSKPRASEGEPG

SEQ ID NO: 56184 - protein, 379 aa, Hyphomonas johnsonii
  misc_feature (1)..(379): tr|A0A059FTK9|A0A059FTK9_9RHOB Queuine tRNA-ribosyltran sferase OS=Hyphomonas johnsonii MHS-2 OX=1280950 GN=tgt PE=3 SV=1
MAIFPFDIQAREGKTRTGVLHTPRGEIRTPAFMPVGTTGTVKALYMDQVKAAGADIILGNTYHLMLRPGAERVKRLGGLHKFSGWSGPMLTDSGGFQVWSLAQLRKMDADGVTFQSHIDGSTHRLTPARSIEIQADLLGADISMQLDECTNFPCTHEEAERSLTLSLDWGQRSLDAFGDRESQTLFGIVQGSNFADLRERSAKGVVGQGFGGIALGGLAVGEGHEQMCATIDMTIPHLPDDLPRYVMGVGKPIDLVESVARGIDMFDCVLPTRSGRHGQAWTWAGPVNVKNAQFAEDLSPIDAAVDCPASRDYSRAYYHHLFKAGEYLGPMLLSWHNTAFFQALMAEIRLSIREGRFEALRARLTADWASTKSSPKAEA

SEQ ID NO: 56185 - protein, 379 aa, Hyphomonas neptunium; identical to SEQ ID NO: 56182
  misc_feature (1)..(379): tr|Q0C343|Q0C343_HYPNA Queuine tRNA-ribosyltransferase OS=Hyphomonas neptunium (strain ATCC 15444) OX=228405 G N=tgt PE=3 SV=1

SEQ ID NO: 56186 - protein, 381 aa, Hyphomonas oceanitis
  misc_feature (1)..(381): tr|A0A059G2X6|A0A059G2X6_9RHOB Queuine tRNA-ribosyltran sferase OS=Hyphomonas oceanitis SCH89 OX=1280953 GN=tgt PE=3 SV=1
MATFPFQIKATEGAARTGTLTTPRGEIRTPAFMPVGTAGTVKALYMDQVKSAGADIILGNTYHLMLRPGAERVKRLGGLHAFSGWKGPMLTDSGGFQVWSLAQLRKMDADGVTFQSHIDGSTHRLTPARSIEIQADLLGADISMQLDECTNFPCTHKEAERSLTLSLDWGQRSLDAFGDRDSQTLFGIIQGSNFADLREQSAKGVVAQGFGGIALGGLAVGEGHEQMCATIDMTVPHLPGHLPRYVMGVGKPIDLVESVARGIDMFDCVLPTRSGRHGQAWTWAGPVNVKNAQFAEDLSPLDEGVDCPASRDYSRAYYHHLFKAGEYLGPMLLSWHNTAFFQSLMAEIRLSILEGRFEALRSELAVRWAGTKSSPKAEPEA

SEQ ID NO: 56187 - protein, 379 aa, Hyphomonas polymorpha
  misc_feature (1)..(379): tr|A0A062VJP4|A0A062VJP4_9RHOB Queuine tRNA-ribosyltran sferase OS=Hyphomonas polymorpha PS728 OX=1280954 GN=tg t PE=3 SV=1
MTTFPFEISVREGKARTGRLKTPRGDIRTPAFMPVGTAGTVKALYMDQVKGAGADIILGNTYHLMLRPGAERVKSLGGLHKFSGWRGPMLTDSGGFQVWSLAQLRKMDGDGVTFQSHIDGSTHRLTPARSIEIQADLLGADISMQLDECTNFPCTHEEAARSLELSLRWGERSLDAFGARDSQTLFGIIQGSNFPDLRERSAKGVAAQGFGGIALGGLAVGEGHAQMCATIDMTVPHLPDHMPRYVMGVGKPIDLVESVARGIDMFDCVLPTRSGRHGQAWTWDGPLNLNNAKFAEDMGPLDEAVDCPASRDYTRAYLHHLFKAGEYLGPMLLSWHNTAFFQALMAEMRAAIAEGRFEALRAELSARWESTKSKPKAEG

SEQ ID NO: 56188 - protein, 381 aa, Hyphomonas sp.
  misc_feature (1)..(381): tr|A0A1Z9XZ77|A0A1Z9XZ77_9RHOB Queuine tRNA-ribosyltran sferase OS=Hyphomonas sp. TMED17 OX=1986605 GN=tgt PE=3 SV=1
MVKFPFKIRASSGMARRAVLETPRGDIQTPAFMPVGTAATVKALYMDQVKSAGADIILGNTYHLMLRPGAERIHRLGGLHKFAGWDGPILTDSGGFQVWSLSQLRKMDADGVTFRSHLDGSQYRLTPARSIEIQAELLGADISMQLDECTNWPCTYAEAEASMALSLDWGQRSIDAFGDRPDQTLFGILQGSTYEDLRKRSAAGVIRQGFGGIAIGGLAVGEGHDAMCATLDVTIPELPADLPRYVMGVGKPIDLVEAVARGVDMFDCVLPTRTGRHGQAWTWDGPINLKNAKFAEDLSPLEPELDCPASQNYSRAYIHHLIRSSELLGSMLLSWHNTAFFQALMAQLRLSISDGSFPQLRETLSTRWAATKSPPKNSDSI

SEQ ID NO: 56189 - protein, 383 aa, Hyphomonas sp.
  misc_feature (1)..(383): tr|A0A059DND1|A0A059DND1_9RHOB Queuine tRNA-ribosyltran sferase OS=Hyphomonas sp. CY54-11-8 OX=1280944 GN=tgt P E=3 SV=1
MTTFPFEIKAREGKARTGLLKTPRGDIRTPAFMPVGTAGTVKALYMNQVKEAGADIILGNTYHLMLRPGAERVHRLGGLHKFAHWDGPMLTDSGGFQVWSLAQLRKMDADGVTFQSHIDGSTHRLTPARSIEIQADLLGADISMQLDECTDYPCTHEAAEESLELSLRWGERSLEAFGERDTQTLFGIIQGSNFADLRERSAKGVVSQGFGGIALGGLAVGEGHAQMCETIDMTVPHLPDAVPRYVMGVGKPIDLIESVARGIDMFDCVLPTRSGRHGQAWTWAGPINVKNAKFAEDLSPLDETVDCPASRDYPKAYYHHLFRAGEYLGPMLLSWHNTAFFQALMQEIRAAIAEGRFEALRTRLQTAWASTKSRPRAEEGAEG

SEQ ID NO: 56190 - protein, 385 aa, Hypnocyclicus thermotrophus
  misc_feature (1)..(385): tr|A0A4R7L295|A0A4R7L295_9FUSO Queuine tRNA-ribosyltran sferase OS=Hypnocyclicus thermotrophus OX=1627895 GN=tg t PE=3 SV=1
MLPVKYKLEKKDGKARAGEINTPHGNIKTPVFMPVGTQATVKTMTPEELEKINAEIILGNTYHLYLRPTDEIVAKFGGLHKFMNWNKPILTDSGGFQVFSLGALRKITEEGVNFRSHIDGSKHFISPEKSISIQNNLGSDIMMAFDECPPGLADREYMKDSLERTTRWAKRCIKANKNPDRQGLFAIVQGGIYEDLRDQSLNELTEMDDHFSGYAIGGLAVGEPREDMYRILDYITPKLPEEKPRYLMGVGEPLDMLEAVANGVDMMDCVQPSRIGRHGTVFTKYGRLVIKNASYSEDTRPLDEDCDCYVCKNYTRGYIRHLFKTGEILGQRLATYHNLYFLIKMMNNAREAILNNNFYEFKKEFENNYTQGKKSEWIKPKKFKD

SEQ ID NO: 56191 - protein, 376 aa, Hyunsoonleella jejuensis
  misc_feature (1)..(376): tr|A0A1H9DWQ5|A0A1H9DWQ5_9FLAO Queuine tRNA-ribosyltran sferase OS=Hyunsoonleella jejuensis OX=419940 GN=tgt PE =3 SV=1
MKFDLKKKDVQTKARAGQITTDHGVIETPIFMPVGTVGSVKGVHQRELKNDINPDIILGNTYHLYLRPQTYILEKAGGLHKFMNWDRNILTDSGGYQVYSLSANRKIKEEGVKFKSHIDGSYHTFTPENVMEIQRTIGADIIMAFDECTPYPCDYNYAKRSMHMTHRWLDRCITHLEKTPLKYDYNQAFFPIVQGSTYKDLRVQSAEYIANAGAVGNAIGGLSVGEPAEEMYAMTEVVCNVLPEDKPRYLMGVGTPINILENIALGIDMFDCVMPTRNARNGMLFTAHGTINIKNKKWEDDFSPIDEMAITFVDTEYSKAYLKHLFSVNELLGKQIATIHNLGFYLWLVREARKHILAGDFSEWKNIMVKQMDKRL

SEQ ID NO: 56192 - protein, 376 aa, Hyunsoonleella pacifica
  misc_feature (1)..(376): tr|A0A4Q9FJ69|A0A4Q9FJ69_9FLAO Queuine tRNA-ribosyltran sferase OS=Hyunsoonleella pacifica OX=1080224 GN=tgt PE =3 SV=1
MKFDLKHKDVNSKARGGKITTDHGIIETPIFMPVGTVATVKGVHQRELKNDINPDVILGNTYHLYLRPQTNIIEKAGGLHKFMNWDRNILTDSGGYQVYSLSANRKIKEEGVKFKSHIDGSYHTFTPENVMEIQRTIGADIIMAFDECTPYPCDYNYAKRSMHMTHRWLDRCIKHLEKTPLKYDYNQAFFPIVQGSTYKDLRIQSAEYIANAGAVGNAIGGLSVGEPAEEMYAMTEVVCNVLPEDKPRYLMGVGTPINILENIALGIDMFDCVMPTRNARNGMLFTAHGTINIKNKKWEDDFSPIDGMGITFVDTEYSKAYLRHLFTVNELLGKQIATIHNLGFYLWLVREARKHILAGDFSEWKNIMVKQMDKRL

SEQ ID NO: 56193 - protein, 376 aa, Hyunsoonleella sp.
  misc_feature (1)..(376): tr|A0A4Q9FF63|A0A4Q9FF63_9FLAO Queuine tRNA-ribosyltran sferase OS=Hyunsoonleella sp. T58 OX=2527939 GN=tgt PE= 3 SV=1
MKFDLKQTDSQSKARAGTITTDHGVIETPIFMPVGTVATVKGVHQRELKNDINPDIILGNTYHLYLRPQTDIIEKAGGLHKFMNWDRNILTDSGGYQVYSLSANRKIKEEGVKFKSHIDGSHHVFTPENVMEIQRTIGADIIMAFDECAPYPCDYNYAKRSMHMTHRWLDRCINHLEKTPLKYDYSQAFFPIVQGSTYKDLRIQSAEYIANAGALGNAIGGLSVGEPAEEMYAMTEVVCNVLPEDKPRYLMGVGTPINILENIALGIDMFDCVMPTRNARNGMLFTAHGTINIKNKKWEDDFSNIDDMAITFVDTEYSKAYLRHLFTVNELLGKQIATIHNLGFYLWLVREARKHILAGDFGEWKNKMVKQMDKRL

SEQ ID NO: 56194 - protein, 384 aa, Ichthyenterobacterium magnum
  misc_feature (1)..(384): tr|A0A420DGE0|A0A420DGE0_9FLAO Queuine tRNA-ribosyltran sferase OS=Ichthyenterobacterium magnum OX=1230530 GN=t gt PE=3 SV=1
MPTDDFLNMTFELKNKDTQSSARAGVITTDHGKIETPIFMPVGTVASVKGVHQRELKNDINPDIILGNTYHLYLRPQTPILEQAGGLHKFMNWDRNILTDSGGYQVYSLSANRKIKEEGVKFKSHIDGSYHTFTPENVMEIQRSIGADIIMAFDECTPYPCDYNYAKRSMHMTHRWLERCLTHLDKTPFKYDYEQTFFPIVQGSTYKDLRKQSAEYIANAGAQGNAIGGLSVGEPAEEMYAMTEVVTDILPEDKPRYLMGVGTPINILENIALGVDMFDCVMPTRNARNGMLFTAHGTINMKNAKWKDDFSPIDDMGITFVDTEYSKAYLKHLFSVNELLGKQIATIHNLGFYMWLVREARKHILAGDFRTWKDMMVKQMDKRL

SEQ ID NO: 56195 - protein, 386 aa, Ideonella sakaiensis
  misc_feature (1)..(386): tr|A0A0K8P2R3|A0A0K8P2R3_IDESA Queuine tRNA-ribosyltran sferase OS=Ideonella sakaiensis (strain NBRC 110686 / T ISTR 2288 / 201-F6) OX=1547922 GN=tgt PE=3 SV=1
MLQFEVLATEGQARRGRLALRRGVVETPIFMPVGTYGTVKGVMPRSLEEMGAQIILGNTFHLWMRPGLDVLRQFGGLHRFEGWTRPILTDSGGFQVWSLGEMRKISEEGVRFASPVNGDRLFLTPELSMQIQQVLDSDIVMQFDECTPYENGGHVTTEAEARASMELSLRWARRCLDEFQRGGNPNALFGIVQGGMFTALRDASLEGLAALDLPGYAIGGLSVGEPKAEMLRVLEHTAPRLPAHKPRYLMGVGTPEDLVAGVAAGIDMFDCVMPTRNARNGHLFTRFGDLKLRNARHKADERPLDPTCGCYTCRGHTDALGRTHGGFSRAYLHHLDRCGEMLGPMLGTIHNLHYYLNLMREIREALEGGRFALFAAQFHADRARGV

SEQ ID NO: 56196 - protein, 375 aa, Ideonella sp.
  misc_feature (1)..(375): tr|A0A437RS06|A0A437RS06_9BURK Queuine tRNA-ribosyltran sferase OS=Ideonella sp. KYPY4 OX=1862385 GN=tgt PE=3 S V=1
MLKFELHKTHGHARRGTLTLNHGTVETPVFMPVGTYGTVKGVLPRSLEEMGAQIILGNTFHLWMRPGLDVIGKFGGLHRFEGWSKPMLTDSGGFQVWSLGEMRKISEEGVKFASPVNGDKLFLTPEVSMQIQTVLNSDIVMQFDECTPYEVKGHLTTEAEARKSMELSLRWAKRSQAEFARLENPNALFGIVQGGMFENLRQESLDALVAMDLPGYAVGGVSVGEPKDEMLRIMAHTPHRLPAHKPRYLMGVGTPEDLVEGVSQGVDMFDCVMPTRNARNGHLFTRFGDLKVRNARHRDSEAPVDETCTCYTCKNFSRAYLHHLDRCGEMLGPMLASIHNLHYYVNLMREVRQALDEDRFDSWRVQFHADRARGV

SEQ ID NO: 56197 - protein, 340 aa, Ideonella sp.
  misc_feature (1)..(340): tr|A0A523Q6G1|A0A523Q6G1_9BURK Queuine tRNA-ribosyltran sferase OS=Ideonella sp. MAG2 OX=2083017 GN=tgt PE=3 SV =1
MLPQSLYDMGAQIILGNTFHLWMRPGLDIMQSFGGLHGFERWDKPILTDSGGFQVWSLGEMRKISEEGVKFASPVNGDKLFLTPEVSMQIQTVLNSDIVMQFDECTPYETKGHLTTEKEARSSMELSRRWAKRCITEFERLQNPNALFGIVQGGMFENLREESLQALVEMDLPGYAIGGVSVGEPKDEMLRIMAHTPHRLPAHKPRYLMGVGTPEDLVEGVRCGVDMFDCVMPTRNARNGHLFTRFGDLKIRNARHKSDHRPIDESCGCYTCKGSGQHGGFSRAYLHHLDRCGEMLGPMLATIHNLHYYLNLMREVRESLDAGRFAEFRAQFAADRARGV

SEQ ID NO: 56198 - protein, 373 aa, Idiomarina abyssalis
  misc_feature (1)..(373): tr|A0A370QAD2|A0A370QAD2_9GAMM Queuine tRNA-ribosyltran sferase OS=Idiomarina abyssalis OX=86102 GN=tgt PE=3 SV =1
MTMKFELDKTSGRARRGRMVFERGTVETPAFMPVGTLGTVKGMTPEEVKDTGAQICLGNTFHLMLRPGTQIIQQHGDLHDFMNWDKPILTDSGGFQVFSLGELRKITEEGVTFRSPINGEKILLTPEKSMQVQRELGSDIVMIFDECTPFPATQAEARSSMELSLRWAERSKQEHGESKAALFGIIQGGMYEELRDISLKGLTDIGFDGYAIGGLSVGEPKEDMMRILEHTAPQMPEQKPRYLMGVGKPEDLVEAVRRGIDMFDCVMPTRNARNGHLFISTGVVKIRNAVHRTDTSPLDENCDCYTCKNYSRAYLHHLDRTNEMLGSRLNTIHNLRFYQKVMSDMRDALDAGTFDDYVKEFYRLRDQSVPALD

SEQ ID NO: 56199 - protein, 371 aa, Idiomarina aquatica
  misc_feature (1)..(371): tr|A0A4R6P495|A0A4R6P495_9GAMM Queuine tRNA-ribosyltran sferase OS=Idiomarina aquatica OX=1327752 GN=tgt PE=3 S V=1
MKFELDKTHGRARRGRMKFERGTVETPAFMPVGTLGTVKGMTPEEVEQTGAQICLGNTFHLMLRPGTSIIQQHGDLHDFMHWNKPILTDSGGFQVFSLGELRKITEEGVTFRSPINGEKILLTPEKSMQVQRELGSDIVMIFDECTPFPATQSEARKSMELSLRWAERSKQAHQGNQAALFGIIQGGMYEELRDISLKGLTDIGFDGYAIGGLSVGEPKEDMMRILEHTAPQMPEQKPRYLMGVGKPEDLVEAVRRGVDMFDCVMPTRNARNGHLFISTGVVKIRNAVHRTDTGPLDSDCDCYTCKNYSRAYLHHLDRTNEILGARLNTIHNLRYYQRVMSDMREALDNDSFDEFVSGFYAARDQQVPPLD

SEQ ID NO: 56200 - protein, 371 aa, Idiomarina aquimaris
  misc_feature (1)..(371): tr|A0A432XEZ2|A0A432XEZ2_9GAMM Queuine tRNA-ribosyltran sferase OS=Idiomarina aquimaris OX=641841 GN=tgt PE=3 S V=1
MKFELLNTCGKARRGRMIFERGVVETPAFMPVGTAGTVKGMTPEEVKATGAHICLGNTFHLMLRPGTQIIKQHGDLHDFMNWDKPILTDSGGFQVFSLGELRKITEEGVTFRSPINGEKILLTPEKSMEVQRDLGSDIVMIFDECTPYPATQAEARSSMELSLRWAERSKQAHGDNPSALFGIIQGGMYEELRTISLDGLTKIGFDGYAIGGLSVGEPKEDMMRVLDHIAPQMPEDKPRYLMGVGKPEDLVEAVRRGVDMFDCVMPTRNARNGHLFVSSGVVKIRNAVHRTDTGPLDPECDCYTCQNYSRAYLHHLDRSNEMLGGRLNTIHNLHFYQKVMQDLRDAIAADRLEAHVAEFYAKRGLEVPALA

SEQ ID NO: 56201 - protein, 371 aa, Idiomarina atlantica
  misc_feature (1)..(371): tr|A0A094L1H6|A0A094L1H6_9GAMM Queuine tRNA-ribosyltran sferase OS=Idiomarina atlantica OX=1517416 GN=tgt PE=3 SV=1
MKFELLNTCGKARRGRMIFDRGVVETPAFMPVGTAGTVKGLTPEEVKATGAHICLGNTFHLMLRPGTQIIKQHGDLHDFMNWDKPILTDSGGFQVFSLGELRKITEEGVTFRSPINGEKILLTPEKSMEVQRDLGSDIVMIFDECTPYPATQAEARSSMELSLRWAERSKQAHGDNPSALFGIIQGGMYEELRTISLEGLEQIGFDGYAIGGLSVGEPKDDMMRILDHIAPQMPVDKPRYLMGVGKPEDLVEAVRRGVDMFDCVMPTRNARNGHLFISTGVVKIRNAVHRTDTGPLDPECDCYTCQNYSRAYLHHLDRSNEMLGGRLNTIHNLHFYQKVMQDLRAAIEADRLEEHVAEFYAKRGLEVPALK

SEQ ID NO: 56202 - protein, 190 aa, Idiomarina baltica
  misc_feature (1)..(190): tr|A0A348WQN0|A0A348WQN0_9GAMM tRNA guanosine(34) trans glycosylase Tgt (Fragment) OS=Idiomarina baltica OX=190 892 GN=tgt PE=4 SV=1
LLTPEKSMQVQRELGSDIVMIFDECTPYPATQAEARKSMELSLRWAQRSKAAHEGNDAALFGIIQGGMYEELRDISLEGLTDIGFDGYAVGGLSVGEPKEDMMRILEHTAPKMPEHKPRYLMGVGKPEDLVESVRRGIDMFDCVMPTRNARNGHLFVSTGVIKIRNAVHRNDTSPLDEQCDCYTCKNYSR

SEQ ID NO: 56203 - protein, 88 aa, Idiomarina baltica
  misc_feature (1)..(88): tr|A0A348WQM9|A0A348WQM9_9GAMM tRNA guanosine(34) trans glycosylase Tgt (Fragment) OS=Idiomarina baltica OX=190 892 GN=tgt PE=4 SV=1
MKFELDKTQGRARRGRMVFERGTVETPAFMPVGTLGTIKGMTPEEVEATGAQICLGNTFHLMLRPGTSVIQQHGDLHDFMNWDKPILT

SEQ ID NO: 56204 - protein, 371 aa, Idiomarina donghaiensis
  misc_feature (1)..(371): tr|A0A432XFK5|A0A432XFK5_9GAMM Queuine tRNA-ribosyltran sferase OS=Idiomarina donghaiensis OX=519452 GN=tgt PE= 3 SV=1
MKFELLKTSGKARRGRMVFDRGVVETPAFMPVGTAGTVKGMTPEEVKATGAQICLGNTFHLMLRPGTSIIKQHGDLHDFMNWDKPILTDSGGFQVFSLGELRKITEEGVTFRSPINGEKILLTPEKSMEVQRDLGSDIVMIFDECTPYPATQAEARSSMELSLRWAERSKAAHGDNPSALFGIIQGGMYEELRTISLEGLTNIGFDGYAIGGLSVGEPKEDMMRVLDYITPQMPTDKPRYLMGVGKPEDLVEAVRRGVDMFDCVMPTRNARNGHLFVSNGVVKIRNAVHRTDTGPLDPECDCYTCQNYSRAYLHHLDRSNEMLGGRLNTIHNLHFYQKVMQDLRDAIENDRLEDHVAEFYAKRGLEVPALK

SEQ ID NO: 56205 - protein, 371 aa, Idiomarina fontislapidosi
  misc_feature (1)..(371): tr|A0A432Y8T3|A0A432Y8T3_9GAMM Queuine tRNA-ribosyltran sferase OS=Idiomarina fontislapidosi OX=263723 GN=tgt P E=3 SV=1
MKFELDKTYGRARRGRMVFERGTVETPAFMPVGTLGTIKGMTPEEVEATGAQICLGNTFHLMLRPGTSVIQQHGDLHDFMNWDKPILTDSGGFQVFSLGELRKIDEEGVTFRSPINGEKILLTPEKSMQVQRELGSDIVMIFDECTPYPATQAEARKSMELSLRWAQRSKDAHEGNDAALFGIIQGGMYEELRDISLKGLTDIGFDGYAVGGLSVGEPKEDMMRILEHTAPQMPEQKPRYLMGVGKPEDLVEAVRRGIDMFDCVMPTRNARNGHLFVSNGVIKIRNAVHRNDTSPLDEQCDCYTCKNYSRAYLHHLDRTNEMLGARLNTIHNLHFYQRVMQDMRDALDAGTFDDYVASFYAARGQSVPELD

SEQ ID NO: 56206 - protein, 371 aa, Idiomarina halophila
  misc_feature (1)..(371): tr|A0A432XS38|A0A432XS38_9GAMM Queuine tRNA-ribosyltran sferase OS=Idiomarina halophila OX=1449799 GN=tgt PE=3 SV=1
MKFELLSTCGKARRGRMTFDRGVVETPAFMPVGTAGTVKGMTPEEVKATGAHICLGNTFHLMLRPGTQIIKQHGDLHDFMNWDKPILTDSGGFQVFSLGELRKITEEGATFRSPINGEKILLTPEKSMEVQRDLGSDIVMIFDECTPYPATQAEARSSMELSLRWAERSKTAHGDNPAALFGIIQGGMYEELRTISLEGLTDIGFDGYAIGGLSVGEPKEDMMRVLDHIAPQMPIDKPRYLMGVGKPEDLVEAVRRGVDMFDCVMPTRNARNGHLFVSSGVVKIRNAVHRTDTGPLDPECDCYTCQNYSRAYLHHLDRSNEMLGGRLNTIHNLHFYQKVMQDLRDAIEADRLDEHVAEFYAKRGLDVPALD

SEQ ID NO: 56207 - protein, 371 aa, Idiomarina homiensis
  misc_feature (1)..(371): tr|A0A432XUK9|A0A432XUK9_9GAMM Queuine tRNA-ribosyltran sferase OS=Idiomarina homiensis OX=364198 GN=tgt PE=3 S V=1
MKFELLKTCGKARRGRMTFDRGVVETPAFMPVGTAGTVKGMTPEEVKATGAHICLGNTFHLMLRPGTQIIKQHGDLHDFMNWDKPILTDSGGFQVFSLGELRKITEEGVTFRSPINGEKILLTPEKSMEVQRDLGSDIVMIFDECTPYPATQAEARSSMELSLRWAERSKTAHGDNPAALFGIIQGGMYEELRTISLDGLTDIGFDGYAIGGLSVGEPKEDMMRILDHIAPQMPADKPRYLMGVGKPEDLVEAVRRGVDMFDCVMPTRNARNGHLFVSTGVVKIRNAVHRTDTGPLDPECDCYTCKNYSRAYLHHLDRSNEMLGGRLNTIHNLHFYQKVMQDLRDAIAEDRLEAHVAEFYAKRGLEVPSLA

SEQ ID NO: 56208 - protein, 371 aa, Idiomarina indica
  misc_feature (1)..(371): tr|A0A1G6DJA2|A0A1G6DJA2_9GAMM Queuine tRNA-ribosyltran sferase OS=Idiomarina indica OX=1159017 GN=tgt PE=3 SV= 1
MKFELLKTSGKARRGRITFARGTVDTPAFMPVGTAGTVKGMSPEEVAATGAQICLGNTFHLMLRPGTAVIKQHGDLHDFMNWDKPILTDSGGFQVFSLGELRKITEEGVTFRSPINGEKILLTPEKSMEVQRDLGSDIVMIFDECTPYPATPEEARSSMELSLRWAERSKKAHGDNPSALFGIIQGGMYEELRTISLEGLTNIGFDGYAIGGLSVGEPKHDMMRILDHIAPQMPSDKPRYLMGVGKPEDLVEAVRRGVDMFDCVMPTRNARNGHLFISTGVVKIRNAVHRTDTGPLDPECDCYTCQNYSRAYLHHLDRSNEMLGGRLNTIHNLHFYQKVMRDMRDALEADRFDDFVQEFYAKRGLEVPALK

SEQ ID NO: 56209 - protein, 371 aa, Idiomarina insulisalsae
  misc_feature (1)..(371): tr|A0A432YCK4|A0A432YCK4_9GAMM Queuine tRNA-ribosyltran sferase OS=Idiomarina insulisalsae OX=575789 GN=tgt PE= 3 SV=1
MKFELLKTCGKARRGRMIFDRGVVETPAFMPVGTAGTVKGLTPEEVKDTGAHICLGNTFHLMLRPGTSIIKQHGDLHDFMNWDKPILTDSGGFQVFSLGELRKITEEGVTFRSPINGEKILLTPEKSMEVQRDLGSDIVMIFDECTPYPATQAEARSSMELSLRWAERSKTAHGDNPSALFGIIQGGMYEELRTISLDGLTDIGFDGYAIGGLSVGEPKEDMMRVLDHIAPKMPADKPRYLMGVGKPEDLVEAVRRGIDMFDCVMPTRNARNGHLFISTGVVKIRNAVHRTDTGPLDPECDCYTCKNYSRAYLHHLDRSNEMLGGRLNTIHNLHFYQKVMQDLRDAIADDRLEEHVAEFYRKRDMEVPELA

SEQ ID NO: 56210 - protein, 371 aa, Idiomarina loihiensis
  misc_feature (1)..(371): tr|A0A349C5W0|A0A349C5W0_9GAMM Queuine tRNA-ribosyltran sferase OS=Idiomarina loihiensis OX=135577 GN=tgt PE=3 SV=1
MKFELDKTSGRARRGRMVFERGTVETPAFMPVGTLGTVKGMTPEEVKDTGAQICLGNTFHLMLRPGTQIIQQHGDLHDFMNWDKPILTDSGGFQVFSLGELRKITEEGVTFRSPINGEKILLTPEKSMQVQRELGSDIVMIFDECTPFPATQAEARSSMELSLRWAERSKQEHGESKAALFGIIQGGMYEELRDISLKGLTDIGFDGYAIGGLSVGEPKEDMMRILEHTAPQMPEQKPRYLMGVGKPEDLVEAVRRGIDMFDCVMPTRNARNGHLFISTGVVKIRNAVHRTDTSPLDENCDCYTCKNYSRAYLHHLDRTNEMLGSRLNTIHNLRFYQKVMSDMRDALDAGTFDDYVKEFYRLRDQSVPALD

SEQ ID NO: 56211 - protein, 373 aa, Idiomarina loihiensis; identical to SEQ ID NO: 56198
  misc_feature (1)..(373): sp|Q5QVL2|TGT_IDILO Queuine tRNA-ribosyltransferase OS= Idiomarina loihiensis (strain ATCC BAA-735 / DSM 15497 / L2-TR) OX=283942 GN=tgt PE=3 SV=1

SEQ ID NO: 56212 - protein, 371 aa, Idiomarina marina
  misc_feature (1)..(371): tr|A0A432YD78|A0A432YD78_9GAMM Queuine tRNA-ribosyltran sferase OS=Idiomarina marina OX=502366 GN=tgt PE=3 SV=1
MKFELLKTSGKARRGRMVFDRGVVETPAFMPVGTAGTVKGMTPEEVKATGAQICLGNTFHLMLRPGTSIIKQHGDLHDFMNWDKPILTDSGGFQVFSLGELRKITEEGVTFRSPINGEKILLTPEKSMEVQRDLGSDIVMIFDECTPYPATHAEARSSMELSLRWAERSKTAHGDNPSALFGIIQGGMYEELRTISLEGLTDIGFDGYAIGGLSVGEPKEDMMRILDHIAPEMPIDKPRYLMGVGKPEDLVEAVRRGVDMFDCVMPTRNARNGHLFVSNGVVKIRNAVHRTDTGPLDPECDCYTCKNYSRAYLHHLDRSNEMLGGRLNTIHNLHFYQKVMQDLRDAIDEDRLEQHVAEFYAKRGMEVPALK

SEQ ID NO: 56213 - protein, 371 aa, Idiomarina maritima
  misc_feature (1)..(371): tr|A0A1I6HX11|A0A1I6HX11_9GAMM Queuine tRNA-ribosyltran sferase OS=Idiomarina maritima OX=519453 GN=tgt PE=3 SV =1
MKFELLKTSGKARRGRMVFERGVVETPAFMPVGTAGTVKGMTPEEVAATGAQICLGNTFHLMLRPGTSIIKQHGDLHDFMNWDKPILTDSGGFQVFSLGELRKITEEGATFRSPINGEKILLTPEKSMEVQRDLGSDIVMIFDECTPYPATQAEARSSMELSLRWAERSKAAHGDNPSALFGIIQGGMYEELRTISLEGLTNIGFDGYAIGGLSVGEPKEDMMRILDHIAPEMPVDKPRYLMGVGKPEDLVEAVRRGVDMFDCVMPTRNARNGHLFVSNGVVKIRNAVHRTDTGPLDPECDCYTCKNYSRAYLHHLDRSNEMLGGRLNTIHNLHFYQKVMQDLRDAIEADRLDDHVAEFYAKRGMEVPALK

SEQ ID NO: 56214 - protein, 371 aa, Idiomarina maritima
  misc_feature (1)..(371): tr|A0A317QB13|A0A317QB13_9GAMM Queuine tRNA-ribosyltran sferase OS=Idiomarina maritima OX=519453 GN=tgt PE=3 SV =1
MKFELLTTSGKARRGRMVFERGVVETPAFMPVGTAGTVKGMTPEEVKATGAQICLGNTFHLMLRPGTSIIKQHGDLHDFMNWDKPILTDSGGFQVFSLGELRKITEEGVTFRSPINGEKILLTPEKSMEVQRDLGSDIVMIFDECTPYPATQAEARSSMELSLRWAERSKAAHGDNPSALFGIIQGGMYEELRTISLEGLTDIGFDGYAIGGLSVGEPKEDMMRVLDYITPAMPIDKPRYLMGVGKPEDLVEAVRRGVDMFDCVMPTRNARNGHLFISTGVVKIRNAVHRTDTGPLDPECDCYTCKNYSRAYLHHLDRSNEMLGGRLNTIHNLHFYQKVMQDLRDAIEADRLEEHVAEFYAKRGLPVPELK

SEQ ID NO: 56215 - protein, 371 aa, Idiomarina piscisalsi
  misc_feature (1)..(371): tr|A0A432YS13|A0A432YS13_9GAMM Queuine tRNA-ribosyltran sferase OS=Idiomarina piscisalsi OX=1096243 GN=tgt PE=3 SV=1
MKFELDKTSGRARRGRMKFERGTVETPAFMPVGTLGTVKGMTPEEVKDTGAQICLGNTFHLMLRPGTQIIQQHGDLHDFMNWDKPILTDSGGFQVFSLGELRKITEEGVTFRSPINGEKILLTPEKSMQVQRELGSDIVMIFDECTPFPATQAEARSSMELSLRWAERSKNAHGDNKAALFGIIQGGMYEELRDISLKGLTDIEFDGYAIGGLSVGEPKEDMMRILEHTAPKMPEQKPRYLMGVGKPEDLVEAVRRGIDMFDCVMPTRNARNGHLFISSGVVKIRNAVHRTDTGPLDENCDCYTCKNYSRAYLHHLDKTNEMLGGRLNTIHNLRFYQKVMSDMRDALDNDTFDEFVETFYQQRGQSVPPLD

SEQ ID NO: 56216 - protein, 372 aa, Idiomarina planktonica
  misc_feature (1)..(372): tr|A0A1Y6FWY2|A0A1Y6FWY2_9GAMM Queuine tRNA-ribosyltran sferase OS=Idiomarina planktonica OX=1323738 GN=tgt PE= 3 SV=1
MKFELLATDGRARRGRMTFARGTVETPAFMPVGTAGTVKGMSPEEVKATGAEICLGNTFHLMLRPGTSIIKQHGDLHDFMNWDKPILTDSGGFQVFSLGELRKITEEGATFRSPINGEKILLTPEKSMEVQRDLGADIVMIFDECTPHPATQAEARSSMELSLRWAQRSKDAHEGNPSALFGIVQGGMYEELRDISLQGLTDIGFDGYAIGGLSVGEPKEDMMRILSHTAPQMPIDKPRYLMGVGKPEDLVEAVRRGIDMFDCVMPTRNARNGHLFISTGVVKIRNAVHRTDTGPLDPDCDCYTCKNYSRAYLHHLDRSNEMLGGRLNTIHNLHYYQKVMQDLRDAIEAGRLQDHVAEFYAKRDLPVPALED

SEQ ID NO: 56217 - protein, 371 aa, Idiomarina ramblicola
  misc_feature (1)..(371): tr|A0A432YYM1|A0A432YYM1_9GAMM Queuine tRNA-ribosyltran sferase OS=Idiomarina ramblicola OX=263724 GN=tgt PE=3 SV=1
MKFELDKTSGRARRGRMAFERGTVETPAFMPVGTLGTVKGMTPEEVKDTGAQICLGNTFHLMLRPGTQIIQQHGDLHDFMNWDKPILTDSGGFQVFSLGELRKITEEGVTFRSPINGEKILLTPEKSMQVQRELGSDIVMIFDECTPFPATQAEARSSMELSLRWAERSKQEHGDNKAALFGIIQGGMYEELRDISLKGLTDIEFDGYAIGGLSVGEPKEDMMRILEHTAPQMPEQKPRYLMGVGKPEDLVEAVRRGIDMFDCVMPTRNARNGHLFISSGVVKIRNAVHRTDTSPLDENCDCYTCKNYSRAYLHHLDRTNEMLGSRLNTIHNLRFYQKVMSDMRDALDAGTFDEFVQEFYRLRDQSVPPLD

SEQ ID NO: 56218 - protein, 372 aa, Idiomarina salinarum
  misc_feature (1)..(372): tr|A0A094IX62|A0A094IX62_9GAMM Queuine tRNA-ribosyltran sferase OS=Idiomarina salinarum OX=435908 GN=tgt PE=3 S V=1
MKFELLKTSGKARRGRMTFDRGVVETPAFMPVGTAGTVKGMTPEEVAATGAQICLGNTFHLMLRPGTSIIKQHGDLHDFMNWDKPILTDSGGFQVFSLGELRKITEEGATFRSPINGEKILLTPEKSMEVQRDLGSDIVMIFDECTPHPATTTEARTSMELSLRWAERSKAAHGDNPAALFGIIQGGMYEELRTISLDGLTKIGFDGYAIGGLSVGEPKEDMMRILDHTAPQMPADKPRYLMGVGKPEDLVEAVRRGIDMFDCVMPTRNARNGHLFISTGVVKIRNAAHRTDTGPLDPECDCYTCKNYSRAYLHHLDRSNEMLGGRLNTIHNLHFYQKVMQDLRDAIEADRLEEHVAGFYAKRDLPVPSLPA

SEQ ID NO: 56219 - protein, 372 aa, Idiomarina sediminum
  misc_feature (1)..(372): tr|A0A432Z0T1|A0A432Z0T1_9GAMM Queuine tRNA-ribosyltran sferase OS=Idiomarina sediminum OX=431675 GN=tgt PE=3 S V=1
MKFELLKTCGKARRGRMTFARGEVETPAFMPVGTAGTVKGMSPEEVKATGAQICLGNTFHLMLRPGTQIIKQHGDLHDFMNWDKPILTDSGGFQVFSLGELRKITEEGVTFRSPINGEKILLTPEKSMEVQRDLGSDIVMIFDECTPYPATQAEARSSMELSLRWAQRSKEAHGDNPSALFGIIQGGMYEELRTISLDGLTDIGFDGYAIGGLSVGEPKEDMMRILDHTAPLMPIDKPRYLMGVGKPEDLVEAVRRGVDMFDCVMPTRNARNGHLFVSTGVVKIRNAVHRTDTGPLDPECDCYTCQNYSRAYLHHLDRSNEMLGGRLNTIHNLHFYQKVMQDLRDAIDADRLEEHVAEFYAKRGLEVPPLAD

SEQ ID NO: 56220 - protein, 372 aa, Idiomarina seosinensis
  misc_feature (1)..(372): tr|A0A432ZC15|A0A432ZC15_9GAMM Queuine tRNA-ribosyltran sferase OS=Idiomarina seosinensis OX=281739 GN=tgt PE=3 SV=1
MKFELDKTHGRARRGRMKFARGTVETPAFMPVGTVGTVKGMTPEEVKETGAEICLGNTFHLMLRPGTSIIQQHGDLHDFMNWDKPILTDSGGFQVFSLGELRKITEEGVTFRSPINGEKILLTPEKSMQVQRELGADIVMIFDECTPYPATQAEARQSMELSLRWADRSKKAHEGNKSALFGIIQGGMYEELRDISLKGLTDIEFDGYAIGGLSVGEPKEDMMRILEHTAPQMPEQKPRYLMGVGKPEDLVEAVRRGIDMFDCVMPTRNARNGHLFISSGVVKIRNAVHRTDTGPLDTDCDCYTCKNYSRAYLHHLDRTNEMLGARLNTIHNLRFYQRVMGDMRDALDNGTFDQYVERFYQLRDQQVPPLDC

SEQ ID NO: 56221 - protein, 371 aa, Idiomarina sp.
  misc_feature (1)..(371): tr|A0A1S2SWZ6|A0A1S2SWZ6_9GAMM Queuine tRNA-ribosyltran sferase OS=Idiomarina sp. MD25a OX=1889913 GN=tgt PE=3 SV=1
MKFELDTTHGRARRGRMVFERGTVETPAFMPVGTLGTIKGMTPEEVEATGAQICLGNTFHLMLRPGTSVIQQHGDLHDFMNWDKPILTDSGGFQVFSLGELRKIDEEGVTFRSPINGEKILLTPEKSMQVQRELGSDIVMIFDECTPYPATQAEARKSMELSLRWAQRSKDAHEGNDAALFGIIQGGMYEELRDISLEGLTDIGFDGYAVGGLSVGEPKEDMMRILEHTAPQMPEHKPRYLMGVGKPEDLVESVRRGIDMFDCVMPTRNARNGHLFVSNGVIKIRNAVHRNDTSPLDEQCDCYTCKNYSRAYLHHLDRTNEMLGARLNTIHNLHFYQRVMQDMRDALDAGTFDEYVAAFYAARGQSVPVLD

SEQ ID NO: 56222 - protein, 372 aa, Idiomarina sp.
  misc_feature (1)..(372): tr|A0A139C4K7|A0A139C4K7_9GAMM Queuine tRNA-ribosyltran sferase OS=Idiomarina sp. T82-3 OX=1794809 GN=tgt PE=3 SV=1
MMKFELDKTQGRARRGRMVFERGTVETPAFMPVGTLGTIKGMTPEEVEATGAQICLGNTFHLMLRPGTSVIQQHGDLHDFMNWDKPILTDSGGFQVFSLGELRKIDEEGVTFRSPINGEKILLTPEKSMQVQRELGSDIVMIFDECTPYPATQAEARKSMELSLRWAQRSKAAHEGNDAALFGIIQGGMYEELRDISLEGLTDIGFDGYAVGGLSVGEPKEDMMRILEHTAPKMPEHKPRYLMGVGKPEDLVESVRRGIDMFDCVMPTRNARNGHLFVSTGVIKIRNAVHRNDTSPLDEQCDCYTCKNYSRAYLHHLDRTNEMLGARLNTIHNLHFYQRVMQGMRDALDAGTFDDYVNAFYAARGQSVPSLD

SEQ ID NO: 56223 - protein, 371 aa, Idiomarina tainanensis; identical to SEQ ID NO: 56214
  misc_feature (1)..(371): tr|A0A368UVB7|A0A368UVB7_9GAMM Queuine tRNA-ribosyltran sferase OS=Idiomarina tainanensis OX=502365 GN=tgt PE=3 SV=1

SEQ ID NO: 56224 - protein, 371 aa, Idiomarina taiwanensis
  misc_feature (1)..(371): tr|A0A432ZCK1|A0A432ZCK1_9GAMM Queuine tRNA-ribosyltran sferase OS=Idiomarina taiwanensis OX=337250 GN=tgt PE=3 SV=1
MKFELLKTSGKARRGRMIFARGVVDTPAFMPVGTAGTVKGMSPEEVAATGAQICLGNTFHLMLRPGTGVIKAHGDLHDFMNWDKPILTDSGGFQVFSLGELRKITEEGATFRSPINGEKILLTPEKSMEVQRDLGSDIVMIFDECTPYPATVEQAEKSMELSLRWAERSKQAHGDNPSALFGIIQGGMYEDLRSVSLKGLEAIGFDGYAIGGLSVGEPKEDMIRILDHIAPEMPSDKPRYLMGVGKPEDLVEAVRRGVDMFDCVMPTRNARNGHLFVSTGVVKIRNAVHRHDTGPLDPECDCYTCQNYSRAYLHHLDRSNEMLGGRLNTIHNLHYYQRVMQDLRDAIAEDRLEQHVAEFYAKRGLEVPALK

SEQ ID NO: 56225 - protein, 372 aa, Idiomarina tyrosinivorans
  misc_feature (1)..(372): tr|A0A432ZSA7|A0A432ZSA7_9GAMM Queuine tRNA-ribosyltran sferase OS=Idiomarina tyrosinivorans OX=1445662 GN=tgt PE=3 SV=1
MKFELDKTQGKARRGRLIFERGVVETPAFMPVGTVGTVKGMTPEEVADTGAHICLGNTFHLMLRPGTGVIQQHGDLHDFMNWHKPILTDSGGFQVFSLGELRKITEEGVTFRSPINGEKILLTPEKSMQVQRELGSDIVMIFDECTPYPATEQQAKDSMELSLRWAQRSKDGHGDNPAALFGIIQGGMYEHLREQSLAGLEQIGFDGYAIGGLSVGEPKPEMMRILDHTPEKMPADKPRYLMGVGKPEDLVEAVRRGVDMFDCVMPTRNARNGHLFISTGVVKIRNAVHRNDTGPLDPECDCYTCKNYSRAYLHHLDKTNEMLGGRLNTIHNLRFYQKVMQDMREALEQERFDEFVAEFYAKRDLPVPELAQ

SEQ ID NO: 56226 - protein, 371 aa, Idiomarina woesei
  misc_feature (1)..(371): tr|A0A0K6HAM5|A0A0K6HAM5_9GAMM Queuine tRNA-ribosyltran sferase OS=Idiomarina woesei OX=1381080 GN=tgt PE=3 SV= 1
MKFELLKTSGKARRGRMVFDRGVVETPAFMPVGTAGTVKGMTPEEVKATGAQICLGNTFHLMLRPGTSIIKQHGDLHDFMNWDKPILTDSGGFQVFSLGELRKITEEGVTFRSPINGEKILLTPEKSMEVQRDLGSDIVMIFDECTPYPATQAEARTSMELSLRWAERSKAAHGDNPSALFGIIQGGMYEELRTISLEGLTNIGFDGYAIGGLSVGEPKEDMMRVLDYITPQMPIDKPRYLMGVGKPEDLVEAVRRGVDMFDCVMPTRNARNGHLFVSNGVVKIRNAVHRTDTGPLDPECDCYTCQNYSRAYLHHLDRSNEMLGGRLNTIHNLHFYQKVMQDLRDAIENDRLEDHVAEFYAKRGMEVPALK

SEQ ID NO: 56227 - protein, 371 aa, Idiomarina xiamenensis
  misc_feature (1)..(371): tr|K2KLQ7|K2KLQ7_9GAMM Queuine tRNA-ribosyltransferase OS=Idiomarina xiamenensis 10-D-4 OX=740709 GN=tgt PE=3 SV=1
MKFELLNNDGNARRGRMVFERGVVETPAFMPVGTVGTVKGMTPEEVEATGAHICLGNTFHLMLRPGTQIIREHGDLHDFMNWQKPILTDSGGFQVFSLGELRKISEQGATFRSPINGEKILLTPEKSMQVQRELGADIVMIFDECTPHPATQKQARDSMELSLRWAQRSKDAHADNPAALFGIIQGGMYEELRDISLKGLTDIGFDGYAIGGLSVGEPKQDMMRILSHTAPQMPTDKPRYLMGVGKPEDLVEAVRRGVDMFDCVMPTRNARNGHLFISSGVVKIRNAVHRSDTGPLDPECDCYTCKNYSRAYLHHLDKTNEILGARLNTIHNLRFYQKVMQDMRDAIEAGRFDQHVAEFYAKRDLPVPPLT

SEQ ID NO: 56228 - protein, 373 aa, Idiomarina zobellii
  misc_feature (1)..(373): tr|A0A1G7Q7T6|A0A1G7Q7T6_9GAMM Queuine tRNA-ribosyltran sferase OS=Idiomarina zobellii OX=86103 GN=tgt PE=3 SV= 1
MTMKFELDKTSGRARRGRMQFERGTVETPAFMPVGTLGTVKGMTPEEVKDTGAQICLGNTFHLMLRPGTQIIQQHGDLHDFMNWDKPILTDSGGFQVFSLGELRKITEEGVTFRSPINGEKILLTPEKSMQVQRELGSDIVMIFDECTPYPATQAEARSSMELSLRWAERSKKAHEGNKSALFGIIQGGMYEELRDISLKGLTDIEFDGYAIGGLSVGEPKEDMMRILEHTAPKMPEQKPRYLMGVGKPEDLVEAVRRGIDMFDCVMPTRNARNGHLFISSGVVKIRNAVHRTDTGPLDENCDCYTCKNYSRAYLHHLDKTNEMLGGRLNTIHNLRFYQKVMSDMRDALDNDTFDKFVEAFYQQRGQSVPPLD

SEQ ID NO: 56229 - protein, 371 aa, Idiomarinaceae bacterium
  misc_feature (1)..(371): tr|A0A2E4SD08|A0A2E4SD08_9GAMM Queuine tRNA-ribosyltran sferase OS=Idiomarinaceae bacterium OX=1898113 GN=tgt P E=3 SV=1
MKFELDKTSGRARRGRMQFERGTVETPAFMPVGTLGTVKGMTPEEVKDTGAQICLGNTFHLMLRPGTQIIQQHGDLHDFMNWDKPILTDSGGFQVFSLGELRKITEEGVTFRSPINGEKILLTPEKSMQVQRELGSDIVMIFDECTPFPATQAEARSSMELSLRWAERSKKAHEGNKSALFGIIQGGMYEELRDISLKGLTDIEFDGYAIGGLSVGEPKEDMMRILEHTAPKMPEQKPRYLMGVGKPEDLVEAVRRGIDMFDCVMPTRNARNGHLFISSGVVKIRNAVHRTDTGPLDENCDCYTCKNYSRAYLHHLDKTNEMLGGRLNTIHNLRFYQKVMSDMRDALDNDTFDKFVEAFYQQRGQSVPPLD

SEQ ID NO: 56230 - protein, 374 aa, Idiomarinaceae bacterium
  misc_feature (1)..(374): tr|A0A0P7ZK07|A0A0P7ZK07_9GAMM Queuine tRNA-ribosyltran sferase OS=Idiomarinaceae bacterium HL-53 OX=1298881 GN =tgt PE=3 SV=1
MSRMSFELLSTSGKARRGRLSFPRGTVETPAFMPVGTLGTVKGMTPEELADTGAEICLGNTFHLMLRPGTSVIQQHGDLHDFMHWEKPILTDSGGFQVFSLGELRKITEEGATFRSPINGEKILLTPEKSMEVQRELGADIVMIFDECTPHPATYEQAQVSMELSLRWAERSKAAHEGNDAALFGIIQGGMYEELRTISLNGLEQIGFDGYAIGGLSVGEPKEDMMRILDHIAPLMPEQKPRYLMGVGKPEDLVEAVRRGVDMFDCVMPTRNARNGHLFTSQGVIKIRNARHRNDMSPLDDECECYTCKHYSRAYLHHLDRCNEILGARLNTIHNLFYYQTVMKGMRDALEADTFEAYVAAFYAKREMEVPVLP

SEQ ID NO: 56231 - protein, 373 aa, Ignatzschineria cameli
  misc_feature (1)..(373): tr|A0A2U2AS42|A0A2U2AS42_9GAMM Queuine tRNA-ribosyltran sferase OS=Ignatzschineria cameli OX=2182793 GN=tgt PE= 3 SV=1
MKFELLKTDGAARRGRITFERGTIETPIFMPVGTIATVKGVTPQNLKEMNAQIILGNTFHLWLRPGLDVIRAHGDLHDFMQWDKPILTDSGGFQVFSLAELRKIEEKGVTFRSPFNGEKLFLDPEKSMEIQRVLGSDIVMAFDECTPYPATYDEAKRSMELSMRWAKRSKDAFVAGENPNALFGIVQGSMYEDLREQSLDALQEIEFNGYAIGGLAVGEPKEERDRILEFLDPKMPKDKPRYLMGVGKPEDLIEGVKRGVDMFDCVIPTRNARNGHLFTRFGDIRIKNARYDLDTRPLDETCSCYTCQNFSRSYLRHLIRTKELLGAHLASIHNLHYFLWHMQQIRDHIDAGTFEQYYEQFYRERKQVDEEAL

SEQ ID NO: 56232 - protein, 373 aa, Ignatzschineria indica
  misc_feature (1)..(373): tr|A0A2U2ANY3|A0A2U2ANY3_9GAMM Queuine tRNA-ribosyltran sferase OS=Ignatzschineria indica OX=472583 GN=tgt PE=3 SV=1
MKFELLKTDGAARRGRITFKRGTIETPIFMPVGTIATVKGVTPQNLKEMNAQIILGNTFHLWLRPGLDVIRAHGDLHDFMQWDKPILTDSGGFQVFSLAELRKIEEKGVTFRSPFNGEKLFLDPEKSMEIQRVLGSDIVMAFDECTPYPATYDEAKKSMELSMRWAKRSKDAFVAGENPNALFGIVQGSMFEDLREQSLDALQEIEFNGYAIGGLAVGEPKEERDRILEFLDPKMPKDKPRYLMGVGKPEDLIEGVKRGVDMFDCVIPTRNARNGHLFTRFGDIRIKNARYDLDTRPLDETCSCYTCQNFSRSYLRHLIRTKELLGAHLASIHNLHYFLWHMQQIRDHIDAGTFDQYYEQFYRERKQVDEEAR

SEQ ID NO: 56233 - protein, 373 aa, Ignatzschineria sp.
  misc_feature (1)..(373): tr|A0A256CTG5|A0A256CTG5_9GAMM Queuine tRNA-ribosyltran sferase OS=Ignatzschineria sp. F8392 OX=1980117 GN=tgt PE=3 SV=1
MKFELLKTDGAARRGRITFERGTIETPIFMPVGTIATVKGVTPQNLKEMNAQIILGNTFHLWLRPGLDVIRAHGDLHDFMQWDKPILTDSGGFQVFSLAELRKIEEKGVTFRSPFNGEKLFLDPEKSMEIQRVLGSDIVMAFDECTPYPATYDEAKKSMELSMRWAKRSKDAFVAGENPNALFGIVQGSMFEDLREQSLDALQEVEFNGYAIGGLAVGEPKEERDRILEFLDPKMPKDKPRYLMGVGKPEDLIEGVKRGVDMFDCVIPTRNARNGHLFTRFGDIRIKNARYDLDTRPLDETCSCYTCQNFSRSYLRHLIRTKELLGAHLASIHNLHYFLWHMQQIRDHIDAGTFDQYYEQFYRERKQVDEEAR

SEQ ID NO: 56234 - protein, 373 aa, Ignatzschineria ureiclastica
  misc_feature (1)..(373): tr|A0A2U2AHQ3|A0A2U2AHQ3_9GAMM Queuine tRNA-ribosyltran sferase OS=Ignatzschineria ureiclastica OX=472582 GN=tg t PE=3 SV=1
MKFELLKTDGTARRGRITFERGTIETPIFMPVGTIATVKGVTPHNLKEMNAQIILGNTFHLWLRPGLDVIRAHGDLHDFMQWDKPILTDSGGFQVFSLAELRKIEEKGVTFRSPFNGEKLFLDPETSMEIQRVLGSDIVMAFDECTPYPATYDEARTSMELSMRWAKRSKEAFVNGGNPNALFGIVQGSMFEDQRQESLEALTEIGFNGYAIGGLAVGEPKEERDRILEFLNPRMPQDKPRYLMGVGKPEDLIEGVKRGVDMFDCVIPTRNARNGHLFTRFGDIRIKNARYDKDTRPLDETCECYTCQHFSRSYLRHLIRTKELLGAHLASIHNLHYFLWHMQQIRDHIDADTFEQYYQQFYQERAMIDEENQ

SEQ ID NO: 56235 - protein, 232 aa, Ignavibacteria bacterium
  misc_feature (1)..(232): tr|A0A3M0WPB6|A0A3M0WPB6_9BACT Queuine tRNA-ribosyltran sferase (Fragment) OS=Ignavibacteria bacterium OX=20533 06 GN=tgt PE=3 SV=1
YPCDFEYAKKSQELTTRWAVLNKEAFEESEPLYGHKQALFGIIQGSVYKELRQKSAEDLISIDFDGYSIGGLAVGEPAEKMYEIVDFTTDLIPENKPRYLMGVGRPENILEAIERGVDMFDCVMPTRNARNAYLFTSQGTVSIRNAAYKNDFSPLDRECDCYTCKNFTKAYLRHLFTAKEILGLELASIHNLTFYLKLVRDARKHIFAGDFSEWKAKTIKSITKNVNRNKEE

SEQ ID NO: 56236 - protein, 321 aa, Ignavibacteria bacterium
  misc_feature (1)..(321): tr|A0A1Q7S7C2|A0A1Q7S7C2_9BACT Queuine tRNA-ribosyltran sferase (Fragment) OS=Ignavibacteria bacterium 13_1_40C M_2_61_4 OX=1805219 GN=AUI33_07440 PE=3 SV=1
MEYQVEGRDHNARAGVLGTDHGPIHTPAFMPVGTQASVKALSPRELVEIQTSVILCNTYHLYLRPGAEVIRRSGGLHRFMGWDKPILTDSGGYQVFSLSGLRKIEEEGVQFRSHVDGSVHCFTPESVVDMQRQLGSDIVMVLDECTPYPCTEEYARNSNDLTVRWASRGLSRFADSAPLYEHNQSLFAIVQGSVYPELRERSVRALIEMNFDGYAIGGLAVGEPADAMMEIVSLCAGLLPEEKPRYLMGVGTPANLLDGIERGIDLFDCVLPTRNGRNAMIFTRTGAINLMNARFKFDLSPIDEACGCYSCGHFSRAYLRH

SEQ ID NO: 56237 - protein, 378 aa, Ignavibacteriae bacterium
  misc_feature (1)..(378): tr|A0A367ZJ18|A0A367ZJ18_9BACT Queuine tRNA-ribosyltran sferase OS=Ignavibacteriae bacterium OX=2026749 GN=tgt PE=3 SV=1
MKFILINIDNNARAGVIETDHSKIETPVFMPVGTQGAVKAIEHRELLEIDTKIILGNTYHIYLRPGVELIHRFGGLHKFIGWNQSILTDSGGYQIFSLADLNKISKDGVYFQSHIDGSKHFFTPETVIDIQRYLGSDIMLVLDECVPYPASYEYASKSQELTTDWAIRCKNQFKKTSTLYSHTQAIFGIVQGSVYPDLRRKSVNELIEVDFDGYAIGGLSVGEPKDLMYEMTKICTEKLPFEKPRYLMGVGTPEDILEGIESGVDMFDCVMPTRNGRNAMFFTRKGTLSIRNSIFKEDETSIDSNCECYTCKNFSRAYIRHLFMVKEILALQLATIHNLAFYHWLTREARKAILNKNFQEWKRSLLNQINTRITNKGE

SEQ ID NO: 56238 - protein, 376 aa, Ignavibacteriae bacterium
  misc_feature (1)..(376): tr|A0A2N1VVV8|A0A2N1VVV8_9BACT Queuine tRNA-ribosyltran sferase OS=Ignavibacteriae bacterium HGW-Ignavibacteria e-2 OX=2013809 GN=tgt PE=3 SV=1
MRFELHHTDPASKARAGKLFTDHGEIETPIFMPVGTQGTVKSINQHQLKDDINAPIILGNTYHLFLRPGTEILEEAGGLHKFMSWDRPILTDSGGFQVFSLSDLRKLKKDGVEFRSHLDGSKHFFTPQKVINIQRSIGSDIMMVLDECTPYPCDYDYAKKSKALTSAWALLNKEAFENTNPLYAHKQFLFGIIQGSVYKDLRQQSAEDLIKLDFDGYAIGGLAVGEPAKKMYEITDFTTDVMPPNKPRYLMGVGRPENILEAIERGIDMFDCVMPTRNARNAYLFTTEGILTIKNSSYKNDFTTVDKNCDCFTCRNYSKSYLRHLYNSKELLYFQLATIHNLKFYLNLVRQAREEILKNNFINWKQEIISKVTQKI

SEQ ID NO: 56239 - protein, 397 aa, Ignavibacteriales bacterium
  misc_feature (1)..(397): tr|A0A2M6YZY7|A0A2M6YZY7_9BACT Queuine tRNA-ribosyltran sferase OS=Ignavibacteriales bacterium CG07_land_8_20_1 4_0_80_59_12 OX=1974045 GN=tgt PE=3 SV=1
MGFSVQHTDGCARCGYLHTGHGVVETPAFMPIGTQGSVKAVEQRELEGIDARIILANTYHLYLRPGLEVLEKAGGLHRFMGWRNAILADSGGYQVFSLSDLRSITEDGVTFHSHIDGSKHQFTPESVVNAGRIMGPDIMMVLDECLDYPADRERALFSVDMTSRWAERSREEFAKTAARYGHEQYLFGIVQGSVYGDLRERSAERLVELDFDGYAIGGLSVGEPLEEMYRMTDVVNAILPEGKPRYLMGVGTPENLLESVERGVDLFDCVLPTRNGRNGQAFSRNGRLTLRNAVYKTDFTPIDPECSCYACRNFTRAYIRHLIQAKEVLALQLVSLHNLTFYLWLMEETRKAIREGTFAAWKSETFARLGRRGNRDVNDSATAPTSTTGRRTTCTVQ

SEQ ID NO: 56240 - protein, 379 aa, Ignavibacteriales bacterium
  misc_feature (1)..(379): tr|A0A2M7ZES2|A0A2M7ZES2_9BACT Queuine tRNA-ribosyltran sferase OS=Ignavibacteriales bacterium CG_4_9_14_3_um_f ilter_34_10 OX=1974044 GN=tgt PE=3 SV=1
MKLLLQHKDKHSKARATILNTSHGIIETPIFMPVGTQGTVKAVNQTMLAENIKAQIILGNTYHLYLRPGIDILEQAGGLHKFMNWQKPILTDSGGFQIFSLNELRKFEKNGVTFKSHLDGSKHFFSPEKVISIQRIIGSDIMMVLDECTPYPCDYEYAVKSNQLTSEWAIKNKEAFEKTMPLYGGEQFLFGIVQGSIFKNLREQSAKHLINLDFDGHAIGGLAVGEPAKDMYEIIDFTTDILPENKPRYLMGVGRPENILEAIERGIDMFDCVMPTRNARNAYLFTMNGIVTIRNAAYKNDFTPIDKTCNCYTCKNYSRAYLRHLFNAKELLAYQLATIHNLTFYLNLASEARKNIFSDTFTDWKNQIINKLSKNVQEV

SEQ ID NO: 56241 - protein, 377 aa, Ignavibacterium album
  misc_feature (1)..(377): tr|I0ALF5|I0ALF5_IGNAJ Queuine tRNA-ribosyltransferase OS=Ignavibacterium album (strain DSM 19864 / JCM 16511 / NBRC 101810 / Mat9-16) OX=945713 GN=tgt PE=3 SV=1
MLKLNLIAKDKNSKARAAWFETDHGVVETPIFMPVGTQGTVKAVNQFYLEHEIKAHIVLSNTYHLYLRPGTEILEAAGGLHKFMNWQKPILTDSGGYQVFSLTELRKLKENGVEFRSHLDGSKHFFTPEKVIQIQRSIGSDIMMVLDECAPYPCEYEYAKKSVQLTSNWAVLNKNAFYNSEPRYGHRQFLFGIIQGSVYKDLRKKSAEDLLELDFDSYAIGGLAVGEPTEMMYELVDYTTDFMPSDRPRYLMGVGRPENILESIARGVDMFDCVMPTRNARNANVFTWNGTLSMRNAKYKDDFKPLDENCNCYTCRNFTRAYLRHLFVAEEILALELASIHNLYFYLELVRIAREKIIDGSFIIWKNQVVEKISLKN

SEQ ID NO: 56242 - protein, 383 aa, Ignavigranum ruoffiae
  misc_feature (1)..(383): tr|A0A1H8ZVJ9|A0A1H8ZVJ9_9LACT Queuine tRNA-ribosyltran sferase OS=Ignavigranum ruoffiae OX=89093 GN=tgt PE=3 S V=1
MNEAKAPVWYEPLKTEKHTGARLGILHTPHGSFETPMYMPVGTLATVKSLSPEELKEMGAGVILSNTYHLWLRPGEDIVEEAGGLHQFMNWDQGILTDSGGFQVFSLSDIRQIKEEGVYFRNHISGERLFLSPEKAIHIENALGADIIMSFDECPDFHQSYDYIKNSIARTTRWAERGLQAHKHPDRQALFGICQGAGYKDLRLSHVRDMVSLDFPGYSIGGLSVGETKEEMNAVLDYLVPELPDNKPRYLMGVGSPDALIDGVIRGIDMFDCVLATRIARNGTCMTHDGRLVVKNAKYARDFKPIDSDCDCYTCQHYSRAYIRHLFKADEIFGLRLASIHNTYFLLQLMRDVRQAIRDDNLLEFRQAFFERYGYFKANAPAF

SEQ ID NO: 56243 - protein, 421 aa, Ileibacterium valens
  misc_feature (1)..(421): tr|A0A1U7NIZ5|A0A1U7NIZ5_9FIRM Queuine tRNA-ribosyltran sferase OS=Ileibacterium valens OX=1862668 GN=BO222_009 90 PE=3 SV=1
MSQTEYQNNNKFSFEIEKRMDGHLGRAGIIHTPHGDIQTPAFMCVGTHGEVRFMSMENLHEIGAQAMLANGYHLRLQSPEIAAGGGLAAWSGWNSPTLTDSGGFQVMSLGSGIGKVVSMEREKEVLNADPKERLAKVTETGIEFTDPFTGKEEFIGPKESMEIQCRIGADIHMAFDELTSLADDYDYNVEALRRTEDWAQVSLNVHNQHRYDLGYEQALYGVLQGGRWEDLRRSTARKLGSMDFDGYGLGGAFLKKDLGSILKWCNEELPENKPRHLLGLSRPDDIFVGIENGADTFDCVAPSREARHGRIESRNGHFHLNKFKDSDLLLEEGCDCPTCKAGYTRSKLREMYKSDDREVRAKFFELASMHNLRFTLRLCEEARAALLEDRFEEFREDFSRSYYKKSWQEHLLELQARDTKK

SEQ ID NO: 56244 - protein, 365 aa, Ilumatobacter fluminis
  misc_feature (1)..(365): tr|A0A4V3EJA4|A0A4V3EJA4_9ACTN Queuine tRNA-ribosyltran sferase OS=Ilumatobacter fluminis OX=467091 GN=tgt PE=3 SV=1
MHVVEFETTASDGTARAGTATTANGSYTTPLFMPVGTRGAIKYLSADDYDALGAQIVLGNTYHLMMRPGADTVAHFGGLAKFAGWSGLTLTDSGGFQVFSLEPDVDDEGVTFASTYDGTKHRFTPEKAVETQQLLGADIQMVLDVCPPLPSPPEVIRLALERTNAWAKRARDHHTRPDQALFGIVQGGVSEVMRAESAERTAALEFDGYGIGGLSVGETRDEMIPALAAAIEHLPTNRPRYLMGVGDPASIVEAVNLGVDQFDCVMQTRLGRHGTALTSEGRVNLKRQEFALSDEPIDVSCTCSVCARHSRGYIRHLFKVGEPTASRLVSLHNVAWTLRLLEQMRAAIIDGTFQDLRRDVLAVWG

SEQ ID NO: 56245 - protein, 365 aa, Ilumatobacter sp.
  misc_feature (1)..(365): tr|A0A2E3TVE6|A0A2E3TVE6_9ACTN Queuine tRNA-ribosyltran sferase OS=Ilumatobacter sp. OX=1967498 GN=tgt PE=3 SV= 1
MHRVNLDVSATHGAARTGSASTARGTYKTPLFMPVGTRGAIKYFSAADYDRLGAEIVLGNTYHLMLRPGADLIERFGGLGPFTGWDGMTLTDSGGFQVFSLDPKVDDDGVTFKSTYDGSSHRFTPEVAVTLQQQLGADIQMVLDVCPPLPSPPEVIRLAVERTHAWAQRAKAAHTRPDQALFGIVQGGVSPAMRAESAQRTVDVGFDGYGIGGLSVGESRQEMLPALASAIEHLPADQPRYLMGVGDPASLIEAVALGVDQFDCVMQTRLGRHGTALTSTGRFQAKAARNAELDEPLDEQCPCEVCARHSRGYIRHLLQVGEPTASRLLSIHNVAWTFNLMHQMRAAIADGSFDTLRRDVLDVWE

SEQ ID NO: 56246 - protein, 389 aa, Ilyobacter polytropus
  misc_feature (1)..(389): tr|E3H6V6|E3H6V6_ILYPC Queuine tRNA-ribosyltransferase OS=Ilyobacter polytropus (strain DSM 2926 / CuHBu1) OX= 572544 GN=tgt PE=3 SV=1
MSNKLPVTYKLYSKDGKARTGKITTPHGEVETPVFMPVGTQATVKTMTPEELEAIGSEIILGNTYHLFLRPGDDLVAKFGGLHKFMNWKKPILTDSGGFQVFSLGAIRKIKEEGVEFRSHIDGSKQFISPEKSIHIQNNLGSDIVMLFDECPPGMSTEEYLIPSIERTTRWAKRCVEAHKRPDEQGLFAIVQGGIYEELREKSRKGLMEMDEYFSGYAIGGLAVGEPRDDMYRVLDYIVEKLPENKPRYLMGVGEPVDMLEAVEAGVDMMDCVQPTRIGRHGTVFTKYGRLVIKNACYSEDPRPLDEGCDCYVCRNYTRGYIRHLFKSQEILGSRLATYHNLYFLIKMMKDAREAIKDKRFKEYKDEFLNNYSKRGESDWIKAQKLGEV

SEQ ID NO: 56247 - protein, 369 aa, Imhoffiella purpurea
  misc_feature (1)..(369): tr|W9UVW4|W9UVW4_9GAMM Queuine tRNA-ribosyltransferase OS=Imhoffiella purpurea OX=1249627 GN=tgt PE=3 SV=1
MEFDLVGQDGLARRGRLRFARGTVETPAFMPVGTYGTVKAMTPEELLEVGAEIVLGNTFHLMLRPGTEIIRKLGDLHDFMHWEKPILTDSGGFQVFSLGDLRKITEEGVHFQSPVDGGKVFLSPEVSMRVQRELGSDIVMIFDECTPYPADEDQARASMELSLRWAARSREAHGDNPSALFGIVQGGMHEGPRAESLEGLTRIGFDGYAIGGLSVGEPEADRLRVLDFLADKMPTDRPRYLMGVGTPEDIVAAVQRGIDMFDCVMPTRNARNGYLFTHQGIVKIRNAANRYDEGPLDPRCDCYTCRHYSRAYLHHLDKCKEILGARLATIHNLHYYQTLMRGLREAIAAGRLDAFVADFREHYRSRRPG

SEQ ID NO: 56248 - protein, 371 aa, Immundisolibacter cernigliae
  misc_feature (1)..(371): tr|A0A1B1YXR3|A0A1B1YXR3_9GAMM Queuine tRNA-ribosyltran sferase OS=Immundisolibacter cernigliae OX=1810504 GN=t gt PE=3 SV=1
MSFELLATDGPARRGRLNFARGVVDTPAFMPVGTQGTVKSLTAQEVAGTGAQILLGNTFHLMLRPGVDIVRRHGSLHGFMAWPGPILTDSGGFQVYSLKTLRKISEQGVWFRSPVDGSRVFLGPEEAIAVQHGLGSDVVMIFDECTPYPADHDTAQRSMELSLRWAARSRVAHGDHPAALFGIVQGGVHEDLRAASLAGLLEIGFDGYAIGGLSVGEPREDMLRVLDFIGPRLPTDQPRYLMGVGTPQDIVEAVRRGVDMFDCVMPTRHARHAYLFTDTGVLRLRNARYRDDTRPLQEGCACYTCQHHSRAYLRHLDQAGELLGMRLNTLHNLHYYQTLMAGLREAIASGTLAAYVAEFYARQGLPVPPVA

SEQ ID NO: 56249 - protein, 376 aa, Imperialibacter sp.
  misc_feature (1)..(376): tr|A0A5E8ATE8|A0A5E8ATE8_9BACT Queuine tRNA-ribosyltran sferase OS=Imperialibacter sp. EC-SDR9 OX=2038371 GN=tg t PE=3 SV=1
MQFKLQATDKGSKARAGQLSTGHGEIQTPIFMPVGTAGSVKGVHQRELKEDIKAQIILGNTYHLYLRPGLDILKPAGGLHGFNGWTGPILTDSGGYQVYSLADQRKITEEGVKFKSHIDGSNHLFTPENVMDIQRTIGADIIMAFDECPPFPCELDYAKKSMEMTHRWLDRCISHLQTTEPLYGHEQALFPIVQGSVDKELRTISAEYIASRGMDGNAIGGLSVGEPAEFMYEMTDLVCNILPADKPRYLMGVGTPANILECIALGVDMFDCVMPTRNARNGMLFTSEGIINIKNEKWKDDFSPIDETVGGYASTFYSRAYLRHLIMSKEMLGAQIATVHNLTFYLWLVNTAREKIIDGTFANWKEMMVKKVSHRL

SEQ ID NO: 56250 - protein, 376 aa, Imtechella halotolerans
  misc_feature (1)..(376): tr|I0WDC7|I0WDC7_9FLAO Queuine tRNA-ribosyltransferase OS=Imtechella halotolerans K1 OX=946077 GN=tgt PE=3 SV= 1
MKFELKAKDPLSQARAGIVTTDHGAIETPIFMPVGTVASVKGVHQRELKEDINPDIILGNTYHLYLRPQTEILEKAGGLHKFMNWDRNILTDSGGYQVYSLSSNRKIKEEGVKFKSHIDGSYHFFTPENVMDIQRTIGADIIMAFDECTPYPCDYRYAKRSMHMTHRWLDRCVSHFNNTSPKYGYDQTLFPIVQGSTYKDLRQQSAEYIANVGAEGNAIGGLSVGEPAEEMYAMTEVVTAILPQDKPRYLMGVGTPINILENIALGIDMFDCVMPTRNARNGMLFTAHGTINIKNKKWEADFSPIDEMGHTYVDTYYTKAYLRHLFAANEFLGKQIATIHNLGFYLWLVREARKHILAGDFREWKEKMVRQMDNRL

SEQ ID NO: 56251 - protein, 376 aa, Indibacter alkaliphilus
  misc_feature (1)..(376): tr|S2DQN6|S2DQN6_9BACT Queuine tRNA-ribosyltransferase OS=Indibacter alkaliphilus LW1 OX=1189612 GN=tgt PE=3 S V=1
MKFNLIATDPNSKARAGLIKTDHGDIASPIFMPVGTAGSVKAVHQRELTFDVKAQIILGNTYHLYLRPGLDILEKAGGLHKFNGWSKPILTDSGGYQVFSLADNRKITEEGAVFKSHIDGSKHLFSPERVMDIQRVIGADIIMAFDECPPYPCTYEYARKSMEMTHRWLKRCIDRFDSTEGKYGYSQALFPIVQGSVFKDLRRQSAEFVAACGREGNAIGGLSVGEPVEDMYEMTDMVTDILPSDKPRYLMGVGTPANILEGIALGVDMFDCVMPTRNARNGMLFTSEGIINIRNEKWKADFSPIDPHINSYVSSFYSKAYLRHLVIAKEILAAQIASIHNLSFYLWLVTRAREHIIAGDFAVWKNEMVEKVSRRL

SEQ ID NO: 56252 - protein, 375 aa, Inhella sp.
  misc_feature (1)..(375): tr|A0A437LHH5|A0A437LHH5_9BURK Queuine tRNA-ribosyltran sferase OS=Inhella sp. CCP-18 OX=2499851 GN=tgt PE=3 SV =1
MLQFELLRQEGAARRGRMTLNHGVVETPIFMPVGTYGTVKGVMPRDLNEMGAQIILGNTFHLWLRPGLKVMETFGGLHQFENWQKPILTDSGGFQVWSLGAMRKISEEGVKFASPINGDKLFLTPEVSMQIQTTLNSDIVMQFDECTPYETKGRLTTEREARASMAMSLRWAKRCQDEFARLENPNALFGIVQGGMFENLRDESAAGLVDLDFPGYAIGGLSVGEPKADMQRVLAHTAPLLPTNKPRYLMGVGTPEDLVEGVANGIDMFDCVMPTRNARNGHLFTRFGDLRLRNARYREDARPIDETCACQACAHFSRAYLHHLDRCGEMLGPMLTTIHNLAYYLNLMQEMRDALDQGRFAAWKAQFHADRARGV

SEQ ID NO: 56253 - protein, 369 aa, Inmirania thermothiophila
  misc_feature (1)..(369): tr|A0A3N1Y1W8|A0A3N1Y1W8_9GAMM Queuine tRNA-ribosyltran sferase OS=Inmirania thermothiophila OX=1750597 GN=tgt PE=3 SV=1
MRFELLATDGMARRGRIHLPRGTVETPAFMPVGTYGTVKAMTPEELRAVGAEIILGNTFHLMLRPGTEVIRRHGTLHDFMHWDGPILTDSGGFQVWSLGRLRRIREAGVTFRSPVDGAEVFLGPEESVAVQRALGSDIVMVFDECTPYPATEPEARASMALSLRWARRSREAHGDNPAALFGIVQGGVYPHLRAESLAGLMEIGFDGYAIGGLSVGEPPQARWEVVASLTPQMPAGAPRYLMGVGTPEDIVEAVLRGVDLFDCVLPTRNARNGHLFTRLGDLRIRNARYRDDTRPPDPECGCYTCRHYSRAYLRHLDRCNEILGARLNTIHNLHYYQTLMRGLREAIEAGRLAAFVAEFRALRARGPDG

SEQ ID NO: 56254 - protein, 375 aa, Inquilinus limosus
  misc_feature (1)..(375): tr|A0A211ZRN2|A0A211ZRN2_9PROT Queuine tRNA-ribosyltran sferase OS=Inquilinus limosus OX=171674 GN=tgt PE=3 SV= 1
MTEFRFEPLARDGAARTGRLHTAHGVVQTPTFMPVGTAATVKAMRPEEVAATGAQIVLGNTYHLMLRPGAERVARLGGLHRFMNWPGPILTDSGGFQVMSLSQLRRMDKDGVTFRSHLDGSEHRLSPARSTEIQHLLDATITMAFDECTPFPAEPEVAASSMRLSMGWAQRSRDAFVARPGYGQFGIVQGSVYPELRLESAAALTAIGFEGYAIGGLAVGEGQERMFAALDVTVPALPDDRPRYLMGVGKPSDLVGSVRRGVDMFDCVLPTRSGRTGQAFTRRGTVNLRNARHQDDQRPLDEECRCPACRSYSRAYLHHLVRSEEVLGLMLLTQHNLTYYQDLMAGLRGAITAGTLDAFAADFEAEQALGDISAL

SEQ ID NO: 56255 - protein, 375 aa, Inquilinus limosus
  misc_feature (1)..(375): tr|A0A0A0D320|A0A0A0D320_9PROT Queuine tRNA-ribosyltran sferase OS=Inquilinus limosus MP06 OX=1398085 GN=tgt PE =3 SV=1
MTEFRFEPLARDGAARTGRLHTAHGVVQTPTFMPVGTAATVKAMRPEEVAATGAQIVLGNTYHLMLRPGAERVARLGGLHRFMNWPGPILTDSGGFQVMSLSQLRRMDKDGVTFRSHLDGSEHRLSPARSTEIQHLLDATITMAFDECTPFPAEPEVAASSMRLSMEWAQRSRDAFVARPGYGQFGIVQGSIYPDLRLESAAALTAIGFEGYAIGGLAVGEGQERMFAALDVTVPALPDDRPRYLMGVGKPSDLVGSVRRGVDMFDCVLPTRSGRTGQAFTRRGTVNLRNARHQDDQRPLDEACRCPACRQYSRAYLHHLVRSEEVLGLMLLTQHNLTYYQDLMAGLRGAITAGTLDAFAAAFEVEQAQGDIPAL

SEQ ID NO: 56256 - protein, 376 aa, Inquilinus sp.
  misc_feature (1)..(376): tr|A0A554SID9|A0A554SID9_9PROT Queuine tRNA-ribosyltran sferase OS=Inquilinus sp. KBS0705 OX=2578108 GN=tgt PE= 3 SV=1
MKFNLTAQDPLSKARAGEVTTDHGVIQTPIFMPVGTAGTVKAVHQRELKDDIEAQIILGNTYHLYLRPGLDTLESAGGLHKFNGWEGPILTDSGGYQVYSLTEVRKIKEEGVTFRSHIDGSRHLFTPENVMDIQRIIGADIIMAFDECTPYPCDYNYAKRSIEMTHRWLKRCCDRFDSTQPKYGYTQTLFPIVQGSVYKDLRVRSAEVIASFEREGNAIGGLSVGEPAEEMYAMTEVVCNILPEQKPRYLMGVGTPVNILENIALGIDMFDCVMPTRNARNGMLFTKSGIINIKNEKWKNDFSPIEADSELFADKCYTKAYLRHLIHSGEMLGAQIATLHNLHFYIWLVKEARKKIIEGEFYNWKNTMVNRLGQRL

SEQ ID NO: 56257 - protein, 383 aa, Insolitispirillum peregrinum
  misc_feature (1)..(383): tr|A0A1N7JYN7|A0A1N7JYN7_9PROT Queuine tRNA-ribosyltran sferase OS=Insolitispirillum peregrinum OX=80876 GN=tgt PE=3 SV=1
MSASFSFTLEKTDGGARLGRITTAHGEIQTPVFMPVGTAATVKGMHPESVAATGAKIVLGNTYHLMLRPGADRIERLGGLHRFMNWPGPILTDSGGFQVMSLAKLRKLTEDGVTFQSHIDGSRHTLTPESSTEIQRKLDATITMAFDECTPFPVDRKGAAESMRLSMRWAVRSREAFVARPGYGQFGIVQGSVFPDLRAESIEALTKLDFEGYAVGGLAVGEGQELMFKTLDTTTPLMPVHKPRYLMGVGKPSDIVGAVLRGIDMFDCVMPTRSGRTAQAFTRRGTVNLRNARHMDDPRPLDEHCTCPACRNYSRAYLHHLVRAEEMLGPMLLTWHNIQYYQDLTAGLRDAIANGTTQQFVADFEAGQALGDLEEVPVYGLGK

SEQ ID NO: 56258 - protein, 373 aa, Intestinibacter bartlettii; identical to SEQ ID NO: 53938
  misc_feature (1)..(373): tr|B0A9R4|B0A9R4_9FIRM Queuine tRNA-ribosyltransferase OS=Intestinibacter bartlettii DSM 16795 OX=445973 GN=tg t PE=3 SV=1

SEQ ID NO: 56259 - protein, 373 aa, Intestinibacter bartlettii; identical to SEQ ID NO: 53938
  misc_feature (1)..(373): tr|W1UIK8|W1UIK8_9FIRM Queuine tRNA-ribosyltransferase OS=Intestinibacter bartlettii DORA_8_9 OX=1403940 GN=tg t PE=3 SV=1

SEQ ID NO: 56260 - protein, 377 aa, Intestinimonas butyriciproducens
  misc_feature (1)..(377): tr|A0A2U1CDW3|A0A2U1CDW3_9FIRM Queuine tRNA-ribosyltran sferase OS=Intestinimonas butyriciproducens OX=1297617 GN=tgt PE=3 SV=1
MFKVIKTEGCARRGEFSCAHGGVVQTPVFMNVGTQGAIKGAVSAHDLKEIGCQIELSNTYHLHLRPGDDVVRQMGGLHKFMDWDGPILTDSGGFQVFSLAGLRKITEEGVTFASHIDGRRIFMGPEESMRIQSNLGSDIAMAFDECVENPATYEYVKPSCERTLRWLERCKAEHDRLNALPGTVNPHQMLFGINQGGTYADLRIWHMKEIAKLGCDGYAVGGLAVGEPTQTMYDMIEAVEPFMPADKPRYLMGVGTPSNIIEGVARGVDFFDCVMPARNARHAKLFTWEGALNIKNEKYKLDERPIDPNCQCPACRSFSRSYIRHLFAAGEMLGMRLAVLHNLWFYNELAARIRAALDEGCFSAFREAYSRKLETRI

SEQ ID NO: 56261 - protein, 377 aa, Intestinimonas butyriciproducens
  misc_feature (1)..(377): tr|A0A0S2W412|A0A0S2W412_9FIRM Queuine tRNA-ribosyltran sferase OS=Intestinimonas butyriciproducens OX=1297617 GN=tgt PE=3 SV=1
MFKVIKTEGCARRGEFSCAHGGVVQTPVFMNVGTQGAIKGAVSAHDLKEIGCQIELSNTYHLHLRPGDDVVRQMGGLHKFMDWDGPILTDSGGFQVFSLAGLRKITEEGVTFASHIDGRRIFMGPEESMRIQSNLGSDIAMAFDECVENPATYEYVKPSCERTLRWLERCKAEHDRLNALPGTVNPHQMLFGINQGGTYADLRIWHMKEIAKLGCDGYAVGGLAVGEPTQTMYDMIDAVEPFMPADKPRYLMGVGTPSNIIEGVARGVDFFDCVMPARNARHAKLFTWEGALNIKNEKYKLDERPIDPNCQCPACRSFSRSYIRHLFAAGEMLGMRLAVLHNLWFYNELAARIRAALDEGCFSAFREAYSRKLETRI

SEQ ID NO: 56262 - protein, 371 aa, Iodobacter fluviatilis
  misc_feature (1)..(371): tr|A0A377Q6C4|A0A377Q6C4_9NEIS Queuine tRNA-ribosyltran sferase OS=Iodobacter fluviatilis OX=537 GN=tgt PE=3 SV =1
MLKFELKATSGGARRGTMTLNHGVVETPVFMPVGTYGTVKAMTPRDLKEIGAQICLGNTFHLWLRPGLEVVEQFGGLHEFMGWDKPILTDSGGFQVFSLGAMRKITEEGVTFQSPVNGDKLFLTPEESMKIQTVLNSDIVMIFDECTPYPADRKQAGDSMRMSYRWAKRSRAEFDAQQNPNALFGIVQGGMYEDLRDESIAGLLEIGFDGMAIGGLSVGEPKEYMERILAHTAPKLPVNKPRYLMGVGTPEDLVYGVSQGIDMFDCVMPTRNARNGMLFTRFGDVKIKNAKHKLDKRPLDETCTCYTCKNFSRAYLHHLFRTGEILAAQLNTIHNLHYYQVVMAEMRAAIETDQFSSHVAQFHADRARGVD

SEQ ID NO: 56263 - protein, 371 aa, Iodobacter sp.
  misc_feature (1)..(371): tr|A0A3S8ZNX3|A0A3S8ZNX3_9NEIS Queuine tRNA-ribosyltran sferase OS=Iodobacter sp. H11R3 OX=2496266 GN=tgt PE=3 SV=1
MLKFELKATSGGARRGTMTLNHGVVETPVFMPVGTYGTVKAMTPRDLKEIGAQICLGNTFHLWLRPGLEVVEQFGGLHEFMGWDRPILTDSGGFQVFSLGAMRKITEEGVTFQSPVNGDKLFLTPEESMKIQTVLNSDIVMIFDECTPYPADRKQAGDSMRMSYRWAKRSRAEFDAQQNPNALFGIVQGGMYEDLRDESIAGLLEIGFDGMAIGGLSVGEPKEDMERILAHTAPKLPVNKPRYLMGVGTPEDLVYGVSQGIDMFDCVMPTRNARNGMLFTRFGDVKIKNAKHKLDKRPLDETCSCYTCKNFSRAYLHHLFRTGEILAAQLNTIHNLHYYQVVMAEMRAAIEADQFTSHVAQFHADRARGVD

SEQ ID NO: 56264 - protein, 371 aa, Iodobacter sp.
  misc_feature (1)..(371): tr|A0A2G3JAP8|A0A2G3JAP8_9NEIS Queuine tRNA-ribosyltran sferase OS=Iodobacter sp. BJB302 OX=1506510 GN=tgt PE=3 SV=1
MLKFELKATSGGARRGTMTLNHGVVETPVFMPVGTYGTVKAMTPRDLKEIGAQICLGNTFHLWLRPGLEVVEQFGGLHEFMGWDKPILTDSGGFQVFSLGAMRKITEEGVTFQSPVNGDKLFLTPEESMKIQTVLNSDIVMIFDECTPYPADRKQAGDSMRMSYRWAKRSRAEFDAQQNPNALFGIVQGGMYEDLRDESIAGLLEIGFDGMAIGGLSVGEPKEDMERILAHTAPKLSVNKPRYLMGVGTPEDLVYGVSQGIDMFDCVMPTRNARNGMLFTRFGDVKIKNAKHKLDKRPLDETCTCYTCKNFSRAYLHHLFRTGEILAAQLNTIHNLHYYQVVMAEMRAAIEADQFTSHVAQFHADRARGVD

SEQ ID NO: 56265 - protein, 382 aa, Isobaculum melis
  misc_feature (1)..(382): tr|A0A1H9RLT0|A0A1H9RLT0_9LACT Queuine tRNA-ribosyltran sferase OS=Isobaculum melis OX=142588 GN=tgt PE=3 SV=1
MATEPAIKYRLIKTEKHTGARLGEIITPHGTFPTPMFMPVGTLASVKSIAPEELKEMGAGIILSNTYHLWLRPGEDLVEEAGGLHKFMNWDQGILTDSGGFQVFSLSDMRNITEEGVHFKNHLNGSPMFLSPEKAIQIQNKLGPDIMMSFDECPPFDESFDYVKKSIERTSRWAERGLKTHANPDRQGLFGIIQGAGYKELRKQSAKDLVSMDFPGYSIGGLSVGEPKHLMNEVLEYTTPLIPSHKPRYLMGVGSPDSLIDGVIRGVDMFDCVLPTRIARNGTCMTSKGRVVIKNAQYARDFGPIDDKCDCYTCRNYSRAYVRHLIKADETFGLRLTSYHNLYFLLNLMKNVRQAIMDDNLLEFREAFFEEYGFNKPNARNF

SEQ ID NO: 56266 - protein, 392 aa, Isosphaera pallida
  misc_feature (1)..(392): tr|E8R0B4|E8R0B4_ISOPI Queuine tRNA-ribosyltransferase OS=Isosphaera pallida (strain ATCC 43644 / DSM 9630 / I S1B) OX=575540 GN=tgt PE=3 SV=1
MIDRDGLNATDSLGRPTRFEHGAIRFEVRAADRGCSARVGRLTTPHGVVETPAFMPVGTQATVKGLMPDQLRSVGSTMLLANTYHLALRPGEAIIEELGGLHRFMAWDRPILTDSGGFQVFSLAEKAKLSESGVVFRSHLDGRRLELTPESAVRIQERLGADVAMCLDHCPALPASKETIAEATARTIRWARRCREAHTRSDQALFGITQGGPHADLRAECAQALVEIGFPGYAVGGVSVGEGPEEIRRALEGAVHPLPWNQPRYLMGVGRPEDLLDAVAAGIDLFDCVWPTRNGRNATCMTARGQVRLRNARHARDPRPIEEGCDCPACRAFSRAYLRHLFIAGEMLGPILASLHNLAFLHRLTRDMRRAISEGRYVQFQRDRLAALGSES

SEQ ID NO: 56267 - protein, 371 aa, Isosphaeraceae bacterium
  misc_feature (1)..(371): tr|A0A432MND5|A0A432MND5_9BACT Queuine tRNA-ribosyltran sferase OS=Isosphaeraceae bacterium GM2012 OX=2080755 G N=tgt PE=3 SV=1
MPAPVRFELLGVDTRSNARRGLLRTPHGTVETPVFMPVGTQATVKGVVPELLRACGSQMLLANTYHLALRPGEEVVRSLGGLHRFMAWDGPILTDSGGFQAFSLSDRATLTESGVAFRSHLDGSLLDLTPERAIAIQEALGADVAMVLDHCPALPAGKEAVAEATERTIRWARRCQRARTRDDQAVFGILQGGSHADLRSECAERLVEIGFDGYAIGGVSVGESPEEIRKALEVSTPHLPAHQARYLMGVGRPQDVLDAIAAGVDMFDCVLPTRNGRNATCLTRRGPVRMRNAAHKADPRPIEDGCDCPACSRFSRGYIRHLFLADEMLGPILASVHNLAFLHRLVRDAREAIGEGRYDRFRAEALEALGP

SEQ ID NO: 56268 - protein, 376 aa, Izhakiella australiensis
  misc_feature (1)..(376): tr|A0A1S8YG29|A0A1S8YG29_9ENTR Queuine tRNA-ribosyltran sferase OS=Izhakiella australiensis OX=1926881 GN=tgt P E=3 SV=1
MKFELDTTDGRARRGRLIFDRGVVETPAFMPVGTYGTVKGMTPEEVQETGAQIILGNTFHLWLRPGQEIMKLHGDLHDFMNWPGPILTDSGGFQVFSLGDIRKITEAGVHFRNPINGDAIFLDPEKSMEIQYDLGSDIVMIFDECTPYPAEWDYAKRSMEMSLRWAKRSRERFDALDNKNALFGIIQGSVYEDLRDVSVKGLVDIGFDGYAVGGLAVGEPKADMHRILEHVCPQIPQDKPRYLMGVGKPEDLVEGVRRGIDMFDCVMPTRNARNGHLFVTDGVVKIRNAKHKDDTSPLDAECDCYTCRNYSRAYLHHLDRCNEILGARLNTIHNLRYYQRLMAGLRKAIEEGTLERFVLGFYQRMGKTAAPLSSDN

SEQ ID NO: 56269 - protein, 376 aa, Izhakiella capsodis
  misc_feature (1)..(376): tr|A0A1I4YIF8|A0A1I4YIF8_9ENTR Queuine tRNA-ribosyltran sferase OS=Izhakiella capsodis OX=1367852 GN=tgt PE=3 S V=1
MKFELDTTDGRARRGRLIFDRGVVETPAFMPVGTYGTVKGMTPEEVQDTGAQIILGNTFHLWLRPGQEIMKLHGDLHDFMKWPGPILTDSGGFQVFSLGDIRKITEAGVHFRNPINGDAIFLDPEKSMEIQYDLGSDIVMIFDECTPYPAEWDYAKRSMEMSLRWAQRSRERFDALGNKNALFGIIQGSVYEDLRDVSVRGLVEIGFDGYAVGGLAVGEPKADMHRILEHVCPQIPQDKPRYLMGVGKPEDLVEGVRRGIDMFDCVMPTRNARNGHLFVTDGVVKIRNAKHKDDTSALDAECDCYTCRNYSRAYLHHLDRCNEILGARLNTIHNLRYYQRLMMGLRKAIEEGTLERFVFGFYQRMGKTAPPLSSDN

SEQ ID NO: 56270 - protein, 375 aa, Izhakiella sp.
  misc_feature (1)..(375): tr|A0A4V1G7L9|A0A4V1G7L9_9ENTR Queuine tRNA-ribosyltran sferase OS=Izhakiella sp. KSNA2 OX=2579935 GN=tgt PE=3 SV=1
MKFELQTTEGRARRGRLVFERGTVETPAFMPVGTYGTVKGMTPEEVEATGAQIILGNTFHLWLRPGQEIMKLHGSLHDFMQWKGPILTDSGGFQVFSLGDIRKITEEGVHFRNPINGDSIFLSPEKSMEIQYDLGSDIVMIFDECTPYPADWDYAKRSMEMSLRWAKRSRDRFDQLNNPNALFGIIQGSVYEDLRDISVKGLVEIGFDGYAVGGLAVGEPKADMHRILEHVCPQIPADKPRYLMGVGKPEDLVEGVRRGIDMFDCVMPTRNARNGHLFVTDGVVKIRNAKHKSDTSPLDPECDCYTCRHYSRAYLHHLDRCNEILGARLNTIHNLRYYQRLMAGLRQAIEEGKLEHFVADFYTRQGKPVPALSVD

SEQ ID NO: 56271 - protein, 375 aa, Jannaschia aquimarina
  misc_feature (1)..(375): tr|A0A0D1EF65|A0A0D1EF65_9RHOB Queuine tRNA-ribosyltran sferase OS=Jannaschia aquimarina OX=935700 GN=tgt PE=3 SV=1
MTRFSFDLTATDGAARTGVIHTPRGEVRTPAFMPVGTAATVKAMLPGSVRETGADILLGNTYHLMLRPTAERIDRLGGLHRFMNWDRPILTDSGGFQVMSLAELRKLTEEGVTFRSHIDGSRHTLTPERSMEIQRLLGSDIVMAFDECPALPAERDRIAASMRLSMRWAQRSRDAFGDRPGHALFGIQQGGLEPDLRAESAEALRGIGFDGYAVGGLAVGEGQEAMFGVLDYAPGQLPEDKPRYLMGVGKPDDIVGAVRRGIDMMDCVLPSRSGRTGQAFTRRGVVNIRNARHADDPRPLDEACACPACRGYSRAYLHHVSRAKEIIASMLMTWHNLHYYQELMAGMRDAIAAGSFDAWEAEFHATRALGDIDPI

SEQ ID NO: 56272 - protein, 376 aa, Jannaschia donghaensis
  misc_feature (1)..(376): tr|A0A0M6YND8|A0A0M6YND8_9RHOB Queuine tRNA-ribosyltran sferase OS=Jannaschia donghaensis OX=420998 GN=tgt PE=3 SV=1
MTDRISFHLDATDGKARTGKIQTTRGAIRTPAFMPVGTAATVKGMMPESVRATGADILLGNTYHLMLRPTAERIARLGGLHGFMNWDGPILTDSGGFQVMSLGALRKLDEDGVTFKSHIDGSKHRLTPERSMEIQALLGSDIVMCFDECPALPADRDRIATSMELSMRWAKRSKTAFGDRPGHALFGIQQGGLEQDLRAQSADALRDIGFDGYAIGGLAVGEGQAAMFDCLDYAPDQLPVDRPRYLMGVGKPDDIVGAVARGVDMMDCVLPSRSGRTGQAFTRRGVVNIRNARHADDPRPLDAECACPACSSYSRAYLHHVSRSKEMIAGMLLTWHNLHYYQDLMAGMRGAIAAGTFDAWQAVFHARRAEGDVEPI

SEQ ID NO: 56273 - protein, 376 aa, Jannaschia faecimaris
  misc_feature (1)..(376): tr|A0A1H3RT19|A0A1H3RT19_9RHOB Queuine tRNA-ribosyltran sferase OS=Jannaschia faecimaris OX=1244108 GN=tgt PE=3 SV=1
MAQDISFQLDATDGKARAGVIRTTRGDIRTPAFMPVGTAATVKGMMPESVRATGADVLLGNTYHLMLRPTAERIDRLGGLHKFMNWNGPILTDSGGFQVMSLGALRKLDEDGVTFKSHIDGSKHRLTPERSMEIQRLLGSDIVMCFDECPSLPADRDRIASSMELSMRWAARSKAAFGDRPGHALFGIQQGGLEQDLRGRSAEALREIGFDGYAVGGLAVGEGQAAMFDCLDYAPDQLPEDRPRYLMGVGKPDDIVGAVARGIDMMDCVLPSRSGRTGQGWTRRGQVNLRNARHADDPRPLDETCDCPACQNYSRAYLHHVIRAKEMIGGMLLTWHNLHYYQDLMAGMRAAIAAGTFASWQTEFHARRAEGDIEPL

SEQ ID NO: 56274 - protein, 376 aa, Jannaschia helgolandensis
  misc_feature (1)..(376): tr|A0A1H7MTA2|A0A1H7MTA2_9RHOB Queuine tRNA-ribosyltran sferase OS=Jannaschia helgolandensis OX=188906 GN=tgt P E=3 SV=1
MTQPFSFRCDATDGRARTGAISTPRGEIRTPAFMPVGTAATVKAMLPESVRATGADILLGNTYHLMLRPTAERIDRLGGLHRFMNWDGPILTDSGGFQVMSLGALRKLDEDGVTFKSHIDGSKHRLTPEHSMEIQRLLGSDIVMCFDECPSLPADRDRIATSMELSMRWAARSRAAFGDRPGHALFGIQQGGLDRDLRAQSADALRDIGFDGYAVGGLAVGEGQDAMFDVLDYAPDQLPKDKPRYLMGVGKPDDIVGAVARGIDMMDCVLPSRSGRTGQGWTRRGQVNLRNARHADDPRPLDEACTCPTCQGYSRAYLHHVIRSQEIIGSMLLTWHNLHYFQELMAGMRDAIAGATFTAWQAGFHAMRADGDIERI

SEQ ID NO: 56275 - protein, 376 aa, Jannaschia pohangensis
  misc_feature (1)..(376): tr|A0A1I3I264|A0A1I3I264_9RHOB Queuine tRNA-ribosyltran sferase OS=Jannaschia pohangensis OX=390807 GN=tgt PE=3 SV=1
MGKRFSFALGATDGQARTGVISTPRGDIRTPAFMPVGTAATVKAMLPESVAATGADILLGNTYHLMLRPTAERIDRLGGLHHFMNWDKPILTDSGGFQVMSLGALRKLDKDGVTFKSHIDGSRHRLTPERSMEIQRLLGSDIVMCFDECPALPADRDRIAASMRLSMDWAARSRAAFGDRPGHALFGIQQGGLDPELRAESAAALRAIGFEGYAIGGLAVGEGQEAMFDVLDFAPGQLPEDKPRYLMGVGKPDDIVGAVKRGVDMMDCVLPSRSGRTGQGWTRRGQVNLRNARHADDPRPLDEACGCPACTGYSRAYLHHVIRSQEMIGGMLLTWHNLHYFQQIMAEMRAAIAEGTFATWESGFHALRAAGDIEPV

SEQ ID NO: 56276 - protein, 376 aa, Jannaschia rubra
  misc_feature (1)..(376): tr|A0A0M6XS67|A0A0M6XS67_9RHOB Queuine tRNA-ribosyltran sferase OS=Jannaschia rubra OX=282197 GN=tgt PE=3 SV=1
MTQHFSFDLGVTDGGARTGLIRTPRGDIRTPAFMPVGTAATVKAMLPGSVRATGANVLLGNTYHLMLRPTAERIDRLGGLHRFMNWDRPILTDSGGFQVMSLGELRKVDSDGVTFKSHIDGSKHRLTPERSIEIQRLLGSDIVMCFDECPALPADRDRIATSMRLSMDWAERSRAAFGDRPGHALFGIQQGGLDLDLRAESAERLRAIGFDGYAIGGLAVGEGQAAMFDCLDVAPGQLPQDRPRYLMGVGKPDDIVGAVARGVDMMDCVLPSRSGRTGQAWTRRGQVNLRNARHADDPRPLDETCTCPACTGFSRAYLHHVVRAQEIIGSMLLTWHNLQYYQDLMAGMREAIGAGRFATWQKSFHATRAEGDIEPI

SEQ ID NO: 56277 - protein, 376 aa, Jannaschia seohaensis
  misc_feature (1)..(376): tr|A0A2Y9B5D5|A0A2Y9B5D5_9RHOB Queuine tRNA-ribosyltran sferase OS=Jannaschia seohaensis OX=475081 GN=tgt PE=3 SV=1
MSDRFAFSLDATDGPARTGRIETPRGTIRTPAFMPVGTAGTVKGMLPGSVAETGADVLLGNTYHLMLRPGAERIARLGGLHKFMNWPGPILTDSGGFQVMSLGALRKLDPDGVTFRSHIDGSRHRLTPERSMEIQRLLGSDIVMAFDECPALPADRARIASSMRLSMEWAARSREAFGDRPGHALFGIQQGGLEEDLRAESAEALRAIGFDGYAVGGLAVGEGQAAMFGCLDYAPEQLPADKPRYLMGVGKPDDIVGAVARGIDMMDCVLPTRSGRTGQAWTRRGQVNIRNARHADDPRPLDEHCTCPCCRGYSRAYLHHVSRAKEMIAGMLLTWHNLHYYQEIMAGMRAAIPAGRFAAWEAEFHRLRAEGDIAPL

SEQ ID NO: 56278 - protein, 377 aa, Jannaschia seosinensis
  misc_feature (1)..(377): tr|A0A0M7BCE4|A0A0M7BCE4_9RHOB Queuine tRNA-ribosyltran sferase OS=Jannaschia seosinensis OX=313367 GN=tgt PE=3 SV=1
MPAQPFAFRLDATDGRARTGAISTPRGQIRTPAFMPVGTAATVKAMLPESVRATGADILLGNTYHLMLRPTAERIDRLGGLHRFMNWDRPILTDSGGFQVMSLGALRKLDADGVTFKSHIDGSKHRLTPERSMEIQRLLGSDIVMCFDECPALPADRDRIAASMRLSMDWAARSRDAFGDRPGHALFGIQQGGLEEDLRAESAERLRSIGFEGYAVGGLAVGEGQEAMFDVLDYAPEQLPADKPRYLMGVGKPDDIVGAVKRGIDMMDCVLPSRSGRTGQAFTRRGVINIRNARHVDDPRPLDEECGCPACRGYSRAYLHHVSRSKEIIGSMLMTWHNLQYYQDLMADMRAAIAEERFEVWERDFHALRAAGDVEPV

SEQ ID NO: 56279 - protein, 376 aa, Jannaschia sp.
  misc_feature (1)..(376): sp|Q28PC5|TGT_JANSC Queuine tRNA-ribosyltransferase OS= Jannaschia sp. (strain CCS1) OX=290400 GN=tgt PE=3 SV=1
MTRASSFRLDATSGKARTGVIQTPRGDIRTPAFMPVGTAATVKAMMPESVAATGADILLGNTYHLMLRPTAERIANLGGLHSFMNWDKPILTDSGGFQVMSLADLRKLTEEGVTFRSHIDGSKHLLSPERSMEIQKLLGSDIVMCFDECPALPADRKALDDSMRLSMRWAARSKEAFGDRPGYALFGIQQGGLEEDLREESAKALREIGFDGYAVGGLAVGEGQAAMFGCLDFAPDQLPTDKPRYLMGVGKPDDIVGAVKRGIDMMDCVLPSRSGRTGQAWTRRGQVNIKNARHADDPRPLDEDCTCPACRNYSRAYLHHVFRAQEMISGMLLTWHNLHYYQELMQTMRDAIAANDFAGFEARFHADRAEGDIVPL

SEQ ID NO: 56280 - protein, 377 aa, Jannaschia sp.
  misc_feature (1)..(377): tr|A0A1B6Z359|A0A1B6Z359_9RHOB Queuine tRNA-ribosyltran sferase OS=Jannaschia sp. EhC01 OX=1849359 GN=tgt PE=3 SV=1
MTQRFSFALNATSGRARTGVIQTPRGDIRTPAFMPVGTAATVKAMMPESVAATGADILLGNTYHLMLRPTAERIARLGGLHAFMNWNKPILTDSGGFQVMSLADLRKLTEEGVTFRSHIDGSKHLLSPERSMEIQKLLGSDIVMCFDECPALPADRKALEDSMRLSLRWAARSKEAFGDRPGYALFGIQQGGLEQDLREESARALREIEFDGYAVGGLAVGEGQEAMFGCLDFVPDQLPTGKPRYLMGVGKPDDIVGAVKRGIDMMDCVLPSRSGRTGQAWTRRGQVNIKNARHADDPRPLDEHCTCPACTNYSRAYLHHVFRAQEMISGMLLTWHNLHYYQELMQGMRDAIAADDFAGFEARFHADRSQGDIEPKG

SEQ ID NO: 56281 - protein, 379 aa, Janthinobacterium agaricidamnosum
  misc_feature (1)..(379): tr|W0UZC9|W0UZC9_9BURK Queuine tRNA-ribosyltransferase OS=Janthinobacterium agaricidamnosum NBRC 102515 = DSM 9628 OX=1349767 GN=tgt PE=3 SV=1
MLDFKLLKTDTSGLTKARRGTLTLNHGVVQTPIFMPVGTYGSVKAMSPLELNEINAQIILGNTFHLWLRPGNTVMEKFGGLHDFMGWNKPILTDSGGFQVFSLGAMRKITEEGVHFNSPINGDKLFLSPEVSMQIQRVLNSDIVMQFDECTPYEIDGRPATIEEAAKSMRMSLRWAQRSKNEFHDGGNPNALFGIVQGGMFEDLRDESLARLEEIDFPGIAIGGLSVGEPKEDMMRMLAHVGPRLPANKPHYLMGVGTPEDLVAGVSNGIDMFDCVMPTRNARNGWLFTRFGDIKIKNAKYKDDKAPLDETCGCYACRNFSRAYLHHLHRSKEILGARLNTIHNLHYYLDLMRQMRVALDEDRFHAFTLQFHAERARGA

SEQ ID NO: 56282 - protein, 379 aa, Janthinobacterium agaricidamnosum
  misc_feature (1)..(379): tr|A0A3G2EFR1|A0A3G2EFR1_9BURK Queuine tRNA-ribosyltran sferase OS=Janthinobacterium agaricidamnosum OX=55508 G N=tgt PE=3 SV=1
MLEFTLLKTDTSGLTKARRGTLKLNHGVVQTPIFMPVGTYGSVKAMSPLELNEIDAQIILGNTFHLWLRPGNTVMEKFGGLHGFMGWNKPILTDSGGFQVFSLGAMRKITEEGVHFNSPINGDKLFLSPEVSMQVQRVLNSDIVMQFDECTPYEIQGRPATIEEAAKSMRMSLRWAQRSKDEFHRGENPNALFGIVQGGMFEMLRDESLAKLEEIDFPGIAIGGLSVGEPKEDMMRMLAHVGPRLPANKPHYLMGVGTPEDLVAGVSNGIDMFDCVMPTRNARNGWLFTRFGDIKIKNAKYKEDQAPLDETCSCYACRNFSRAYLHHLHRSKEILGARLNTIHNLHYYLDLMRQMREALDEDRFHAFTLQFHAERARGT

SEQ ID NO: 56283 - protein, 379 aa, Janthinobacterium lividum
  misc_feature (1)..(379): tr|A0A1S1UC13|A0A1S1UC13_9BURK Queuine tRNA-ribosyltran sferase OS=Janthinobacterium lividum OX=29581 GN=tgt PE =3 SV=1
MLEFTLLKTDTSGLTKARRGTLKLNHGVVQTPIFMPVGTYGTVKAMSPLELNEIDAQIILGNTFHLWLRPGNTVMEKFGGLHGFMGWNKPILTDSGGFQVFSLGAMRKITEEGVHFNSPINGDKLFLSPEVSMQVQRVLNSDIVMQFDECTPYEIEGRPATIEEAAKSMRMSLRWAQRSKDEFHRGENPNALFGIVQGGMFEMLRDESLAKLEEIDFPGIAIGGLSVGEPKEDMMRMLAHVGPRLPANKPHYLMGVGTPEDLVAGVSNGIDMFDCVMPTRNARNGWLFTRFGDIKIKNAKYKEDQAPLDETCSCYACRNFSRAYLHHLHRSKEILGARLNTIHNLHYYLDLMRQMREALDEDRFHAFTLQFHAERARGT

SEQ ID NO: 56284 - protein, 379 aa, Janthinobacterium lividum; identical to SEQ ID NO: 56282
  misc_feature (1)..(379): tr|A0A031GW14|A0A031GW14_9BURK Queuine tRNA-ribosyltran sferase OS=Janthinobacterium lividum OX=29581 GN=tgt PE =3 SV=1

SEQ ID NO: 56285 - protein, 375 aa, Janthinobacterium sp.
  misc_feature (1)..(375): sp|A6SUU4|TGT_JANMA Queuine tRNA-ribosyltransferase OS= Janthinobacterium sp. (strain Marseille) OX=375286 GN=t gt PE=3 SV=1
MLNFKLLKTDGNARRGQLTLNHGVIETPIFMPVGTYGSVKAMSPLELNEIDAQIILGNTFHLWLRPGNDIIAKFGGLHEFMGWNKPILTDSGGFQVFSLGEMRKITEEGVHFSSPINGDKLFLSPEVSMQIQRVLNSDIVMQFDECTPYEIDGRPATTEEAAKSMRMSLRWAKRSMDEFNREENPNALFGIVQGGMFENLRDESLAGLEELNFHGVAIGGLSVGEPKEDMMRVLEHVGPRLPANKPHYLMGVGTPEDLVAGVASGIDMFDCVMPTRNARNGWLFTRFGDIKIKNARYKDDKKPLDESCSCYACRNFSRAYLHHLHRTGEILGARLNTIHNLHYYLDLMREMREAISEGRFQLFVSQFHADRARGS

SEQ ID NO: 56286 - protein, 379 aa, Janthinobacterium sp.; identical to SEQ ID NO: 56282
  misc_feature (1)..(379): tr|A0A1E7VYR9|A0A1E7VYR9_9BURK Queuine tRNA-ribosyltran sferase OS=Janthinobacterium sp. HH106 OX=1537278 GN=tg t PE=3 SV=1

SEQ ID NO: 56287 - protein, 379 aa, Janthinobacterium svalbardensis
  misc_feature (1)..(379): tr|A0A290X3N1|A0A290X3N1_9BURK Queuine tRNA-ribosyltran sferase OS=Janthinobacterium svalbardensis OX=368607 GN =tgt PE=3 SV=1
MLEFTLLKTDTSGLTRARRGTLKLNHGVVQTPIFMPVGTYGTVKAMSPLELNEIDAQIILGNTFHLWLRPGNTVMEKFGGLHGFMGWNKPILTDSGGFQVFSLGAMRKITEEGVHFSSPINGDKLFLSPEVSMQVQRVLNSDIVMQFDECTPYEIEGRPATLEEAAKSMRMSLRWAQRSKDEFHRGENPNALFGIVQGGMFEMLRDESLAKLEEIDFPGIAIGGLSVGEPKEDMMRMLAHVGPRLPANKPHYLMGVGTPEDLVAGVSNGIDMFDCVMPTRNARNGWLFTRFGDIKIKNAKYKEDQAPLDETCSCYACRNFSRAYLHHLHRSKEILGARLNTIHNLHYYLDLMRQMREALDEDRFHAFTLQFHAERARGT

SEQ ID NO: 56288 - protein, 74 aa, Jejuia pallidilutea
  misc_feature (1)..(74): tr|A0A090VZ98|A0A090VZ98_9FLAO tRNA-guanine transglycos ylase OS=Jejuia pallidilutea OX=504487 GN=JCM19301_1 PE =4 SV=1
MCMKFELKKKDAQSKARAAKITTDHGVIETPIFMPVGTVASVKGVHQRELKNDINPDIILGNTYHLYLRPQTKF

SEQ ID NO: 56289 - protein, 294 aa, Jejuia pallidilutea
  misc_feature (1)..(294): tr|A0A090W0Q1|A0A090W0Q1_9FLAO Queuine tRNA-ribosyltran sferase OS=Jejuia pallidilutea OX=504487 GN=JCM19301_16 61 PE=3 SV=1
MNWDRNILTDSGGYQVYSLSANRKIKEEGVKFKSHIDGSYHTFTPENVMEIQRSIGADIIMAFDECTPYPCDYNYAKRSMHMTHRWLDRCINHLEKTPLKYNYNQAFFPIVQGSTYKDLRIQSAEYIANAGAVGNAIGGLSVGEPAEEMYAMTEVVCNVLPEDKPRYLMGVGTPINILENIALGIDMFDCVMPTRNARNGMLFTAYGTINIKNKKWENDFSPIDEMAITFVDTEYSKAYLKHLFSVNELLGKQIATIHNLGFYLWLVREARKHILAGDFAEWKNKMVKQMDNRL

SEQ ID NO: 56290 - protein, 376 aa, Jeongeupia sp.
  misc_feature (1)..(376): tr|A0A1D9BHX5|A0A1D9BHX5_9NEIS Queuine tRNA-ribosyltran sferase OS=Jeongeupia sp. USM3 OX=1906741 GN=tgt PE=3 S V=1
MTQQQGLQFTLHKTSGGARRGTMVLNHGVVETPVFMPVGTYGTVKAMTPRDLNEIEAQICLGNTFHLWLRPGLEVINKFGGLHRFMGWDKPILTDSGGFQVFSLGDLRKITEEGVKFQSPVNGDKLFLTPEESMRIQRALNSDIVMIFDECTPYPADRKQAADSMRMSYRWAKRSRSEFDTLENPNALFGIVQGGMYEDLRDESLAGLDDIGFHGMAIGGLSVGEPKEDMERILAHTAPRLPADKPRYLMGVGTPEDLVYGVSQGIDMFDCVMPTRNARNGMLFTRFGDIKIKNAKHRLDERPLDETCDCYACQNFSRAYLHHLFRSGEILGSQLNTIHNLRYYQVLMAEMRAAIDADAFPAFVARFHADRARGID

SEQ ID NO: 56291 - protein, 381 aa, Jeotgalibaca dankookensis
  misc_feature (1)..(381): tr|A0A1S6IN45|A0A1S6IN45_9LACT Queuine tRNA-ribosyltran sferase OS=Jeotgalibaca dankookensis OX=708126 GN=tgt P E=3 SV=1
MTEPAITYRLIKEEKHTGARLGEITTPHGTFQTPMFMPVGTLATVKTMTPEELKEMGSQIILSNTYHLWLRPGAELIEEAGGLHKFMNWDQGILTDSGGFQVFSLAKNRKITEEGVHFRNHLNGSKMFLSPEKAIDIENKLGADIIMSFDECPPFDESYDYIKASVERTSRWAERGLKAHKKADTQGLFGIIQGGGNKDLRLQSAHDLLAMDFPGYSIGGLSVGETKEEMNAVLDYITPVIPAHKPRYLMGVGAPDSLIDGVIRGVDMFDCVLPTRIARNGTCMTSQGRLVVKNSKYERDFRPLDEKCDCYTCKNYTRAYIRHLFKANELLGMRLTTYHNLHFLHNLMSNVRQAIMDDNLLEFREAFMEEYGYNKENAKLF

SEQ ID NO: 56292 - protein, 381 aa, Jeotgalibaca sp.
  misc_feature (1)..(381): tr|A0A1U7EB00|A0A1U7EB00_9LACT Queuine tRNA-ribosyltran sferase OS=Jeotgalibaca sp. PTS2502 OX=1903686 GN=tgt P E=3 SV=1
MTEPAIRYRLIKKEKHTGARLGEIITPHGTFQTPMFMPVGTLATVKSMAPEELKDMGSQIILSNTYHLWLRPGADLVEEAGGLHKFMNWDKGILTDSGGFQVFSLAENRKITEEGVHFRNHLNGSKMFLSPEKAIDIQNKLGADIIMSFDECPPFDESYDYIKRSVERTSRWAERGMKAHKKSDQQGLFGIIQGAGYKDLRMQSAKDLVGMDFPGYSIGGLSVGETKEEMNEVLDYITPVIPDHKPRYLMGVGAPDSLIDGVIRGVDMFDCVLPTRIARNGTCMTSKGRLVVKNAIYERDFRPLDENCSCYTCQNYTRAYIRHLFKADETFGLRLTSYHNLHFLINLMTQVRQAIMDDNLLEFREAFMEEYGYNQKNAKKF

SEQ ID NO: 56293 - protein, 381 aa, Jeotgalibaca sp.
  misc_feature (1)..(381): tr|A0A3S9HDJ9|A0A3S9HDJ9_9LACT Queuine tRNA-ribosyltran sferase OS=Jeotgalibaca sp. H21T32 OX=2496265 GN=tgt PE =3 SV=1
MVEPAIRYRLIKKEKHTGARLGEIITPHGTFQTPMFMPVGTLATVKSMSPEELKEMGSQIILSNTYHLWLRPGANLVEEAGGLHKFMNWDKGILTDSGGFQVFSLAENRKITEEGVHFRNHLNGAKMFLSPEKAIDIENKLGADIIMSFDECPPFNESYDYIKKSIERTSRWAERGLQAHKKPAEQGLFGIIQGGGYKDLRLQSAKDLMSMDFPGYSIGGLSVGETKEEMNAVLDYLTPVIPDEKPRYLMGVGAPDSLIDGVIRGIDMFDCVLPTRIARNGTCMTSKGRLVVKNAKFERDFRPLDENCSCYTCQNYTRAYIRHLFKADETFGLRLTSYHNLHFLINLMNQVRQAILDDNLLEFREAFIEEYGYNQKNAKNF

SEQ ID NO: 56294 - protein, 379 aa, Jeotgalibacillus alimentarius
  misc_feature (1)..(379): tr|A0A0C2VWV9|A0A0C2VWV9_9BACL Queuine tRNA-ribosyltran sferase OS=Jeotgalibacillus alimentarius OX=135826 GN=t gt PE=3 SV=1
MSAIRYEHIKTCKQTGARLGIVHTPHGSFETPTFMPVGTMATVKTMSPEDLKELNAGIILSNTYHLWLRPGHDIIKEAGGLHKFMNWDRPILTDSGGFQVFSLSKFRNIQEEGVHFRNHINGDKLFLSPEKAMEIQNALGSDIMMAFDECPPYPAEEKYMKDSVERTTRWAERCLQAHNRPEDQGLFGIVQGGEYEHLRRQSAKDLVSMDFPGYAVGGLSVGEPKDVMNRVLEFTTPWLPEDKPRYLMGVGSPDSLIDGAMRGIDMFDCVLPTRIARNGTLMTSEGRLVVKNAKYARDFSPIDPNCDCHVCKNYSRAYIRHLIKCEETFGIRLTTYHNLHFLINLMGNVRQAIKEDRLGDFREEFFEQYGFNQPNAKNF

SEQ ID NO: 56295 - protein, 379 aa, Jeotgalibacillus campisalis
  misc_feature (1)..(379): tr|A0A0C2R799|A0A0C2R799_9BACL Queuine tRNA-ribosyltran sferase OS=Jeotgalibacillus campisalis OX=220754 GN=tgt PE=3 SV=1
MTAIRYEHIKTCKQTGARLGIVHTPHGSFETPAFMPVGTMATVKTMSPEDLTELGAGIILSNTYHLWLRPGHDIIKEAGGLHKFMNWNKPILTDSGGFQVFSLSKFRDIKEEGVHFRNHINGDKLFLSPEKAMEIQNALGSDIMMAFDECPPYPAEEKYMKDSVERTTRWAERCLEAHSRPQDQGLFGIIQGGEYEALRKQSAKDLVSMDFPGYAVGGLSVGEPKDVMNRVLEFTTPWMPENKPRYLMGVGSPDSLIDGAMRGIDMFDCVLPTRIARNGTLMTSEGRLVVKNAKYARDFGPIDPNCDCHVCKNYSRAYIRHLIKCEETFGIRLTTYHNLHFLINLMGQVRKAIKEDRLGDFREEFFEQYGFNKPNAKNF

SEQ ID NO: 56296 - protein, 379 aa, Jeotgalibacillus malaysiensis
  misc_feature (1)..(379): tr|A0A0B5AUC9|A0A0B5AUC9_9BACL Queuine tRNA-ribosyltran sferase OS=Jeotgalibacillus malaysiensis OX=1508404 GN= tgt PE=3 SV=1
MSAIRYEHIKTCKQTGARHGIVHTPHGSFETPTFMPVGTMATVKTMSPEDLKELNAGIILSNTYHLWLRPGHDIIKEAGGLHKFMNWDRPILTDSGGFQVFSLSKFRNIQEEGVHFRNHINGDKLFLSPEKAMEIQNALGSDIMMAFDECPPYPAEEKYMKDSVERTTRWAERCLEAHTRPEDQGLFGIIQGGEYEHLRRQSARDLVSMDFPGYAVGGLSVGEPKDVMNRVLEFTTPWMPEDKPRYLMGVGSPDSLIDGAMRGIDMFDCVLPTRIARNGTLMTSEGRLVVKNAKYARDFSPIDPNCDCHVCKNYSRAYIRHLIKCEETFGIRLTTYHNLHFLINLMGNVRQAIKEDRLGDFREEFFEQYGFNQPNAKNF

SEQ ID NO: 56297 - protein, 381 aa, Jeotgalibacillus marinus; identical to SEQ ID NO: 52072
  misc_feature (1)..(381): tr|A0A0M0KWI2|A0A0M0KWI2_9BACL Queuine tRNA-ribosyltran sferase OS=Jeotgalibacillus marinus OX=86667 GN=tgt PE= 3 SV=1

SEQ ID NO: 56298 - protein, 379 aa, Jeotgalibacillus proteolyticus
  misc_feature (1)..(379): tr|A0A2S5GF35|A0A2S5GF35_9BACL Queuine tRNA-ribosyltran sferase OS=Jeotgalibacillus proteolyticus OX=2082395 GN =tgt PE=3 SV=1
MSAIRYEHIKTCKQTGARLGIVHTPHGSFETPAFMPVGTMATVKTMSPEDLMELNAGIILSNTYHLWLRPGHDIIKEAGGLHKFMNWDKPILTDSGGFQVFSLSKFRDIKEEGVHFKNHINGDKLFLSPEKAMEIQNALGSDIMMAFDECPPYPAEEKYMRDSVERTSRWAERCIAAHERPSDQGLFGIVQGGEYEALRKQSAKDLVSLDFPGYAVGGLSVGEPKDVMNRVLEFTTPWLPADKPRYLMGVGSPDSLIDGAIRGIDMFDCVLPTRIARNGTLMTSEGRLVVKNAKYARDFGPLDPNCECHVCKNYSRAYIRHLIKCEETFGIRLTTYHNLHFLINLMGQVRQAIKEDRLGDFREEFFEQYGFNQPNAKNF

SEQ ID NO: 56299 - protein, 379 aa, Jeotgalibacillus salarius
  misc_feature (1)..(379): tr|A0A4Y8LFP4|A0A4Y8LFP4_9BACL Queuine tRNA-ribosyltran sferase OS=Jeotgalibacillus salarius OX=546023 GN=tgt P E=3 SV=1
MSAITYEHIKTCKQTGARLGIVHTPHGSFETPTFMPVGTMATVKTMSPEDLKELNAGIILSNTYHLWLRPGHDIIKEAGGLHKFMNWDRPILTDSGGFQVFSLSKFRNIQEEGVHFRNHINGDKLFLSPEKAMEIQNALGSDIMMAFDECPPYPAEEKYMKDSVERTTRWAERCLEAHGRPEDQGLFGIVQGGEYEHLRRQSANDLVSMDFPGYAIGGLSVGEPKDVMNRVLEFTTPWLPEDKPRYLMGVGSPDSLIDGAMRGIDMFDCVLPTRIARNGTLMTSEGRLVVKNAKYARDFSPIDPNCDCHVCKNYSRAYIRHLIKCEETFGIRLTTYHNLHFLINLMGNVRQAIKEDRLGDFREEFFEQYGFNQPNAKNF

SEQ ID NO: 56300 - protein, 379 aa, Jeotgalibacillus soli
  misc_feature (1)..(379): tr|A0A0C2V6E5|A0A0C2V6E5_9BACL Queuine tRNA-ribosyltran sferase OS=Jeotgalibacillus soli OX=889306 GN=tgt PE=3 SV=1
MSAIRYEHIKSCKQTGARLGIVHTPHGSFETPTFMPVGTMATVKTMSPEDLKELEAGIILSNTYHLWLRPGHDIIKEAGGLHKFMNWDRPILTDSGGFQVFSLSKFRRIEEEGVYFRNHINGDKLFLSPEKAMEIQNALGSDIMMAFDECPPYPAEEKYMRDSVERTTRWAERCIAAHARPHDQGLFGIVQGGEYEALRKQSAQDLVAMDFPGYAVGGLSVGEPKDVMNRVLEFTTPWLPADKPRYLMGVGSPDSLIDGAIRGIDMFDCVLPTRIARNGTLMTSEGRLVVKNAAYARDFGPLDPNCDCYVCKNYSRAYIRHLIKCEETFGIRLTTYHNLHFLINLMGQVRQAIKEDRLGDFREEFFEQYGFNQPNAKNF

SEQ ID NO: 56301 - protein, 379 aa, Jeotgalibacillus sp.
  misc_feature (1)..(379): tr|A0A4R5XTY8|A0A4R5XTY8_9BACL Queuine tRNA-ribosyltran sferase OS=Jeotgalibacillus sp. S-D1 OX=2552189 GN=tgt PE=3 SV=1
MSAVRYEHIKTCKQTGARLGIVHTPHGSFETPAFMPVGTMATVKTMSPEDLKELGAGIILSNTYHLWLRPGHEIIKEAGGLHKFMNWDKPILTDSGGFQVFSLSKFRDIKEEGVHFRNHINGDKLFLSPEKAMEIQNALGSDIMMAFDECPPYPAEEKYMKDSVERTSRWAERCLSAHARPMDQGLFGIVQGGEYEALRKQSAKDLVSMDFPGYAVGGLSVGEPKDVMNRVLEFTTPWLPTDKPRYLMGVGSPDSLIDGAIRGIDMFDCVLPTRIARNGTLMTSEGRLVVKNAKYARDFGPIDPNCDCHVCKNYSRAYIRHLIKCEETFGIRLTTYHNLHFLINLMGQVRQAIKEDRLGDFREEFFEQYGFNKPNAKNF

SEQ ID NO: 56302 - protein, 379 aa, Jeotgalibacillus sp.
  misc_feature (1)..(379): tr|A0A4Y8KWK1|A0A4Y8KWK1_9BACL Queuine tRNA-ribosyltran sferase OS=Jeotgalibacillus sp. R-1-5s-1 OX=2555897 GN= tgt PE=3 SV=1
MSAIRYEHIKTCKQTGARLGIVHTPHGSFETPTFMPVGTMATVKTMSPEDLKELNAGIILSNTYHLWLRPGHDIIREAGGLHKFMNWDRPILTDSGGFQVFSLSKFRDIKEEGVHFRNHINGDKLFLSPEKAMEIQNALGSDIMMAFDECPPYPAEEKYMKDSVERTTRWAERCLEAHARPHDQGLFGIIQGGEYEHLRRQSARDLVSMDFPGYAVGGLSVGEPKDVMNRVLEFTTPWMPEDKPRYLMGVGSPDSLIDGAIRGIDMFDCVLPTRIARNGTLMTSEGRLVVKNAKYARDFGPLDPNCDCHVCKNYSRAYIRHLIKCEETFGIRLTTYHNLHFLINLMGQVRQAIREDRLGDFREEFFEQYGFNQPNAKNF

SEQ ID NO: 56303 - protein, 381 aa, Jeotgalicoccus halophilus
  misc_feature (1)..(381): tr|A0A1G9E2V3|A0A1G9E2V3_9STAP Queuine tRNA-ribosyltran sferase OS=Jeotgalicoccus halophilus OX=586411 GN=tgt P E=3 SV=1
MAIRYEHIKTCKQTGARLGKLHTPHGVIDTPIFMPVGTLATVKSMSPEELADIGSQIILSNTYHLWLRPGNDIIKEAGGLHKFMNWDKPILTDSGGFQVFSLSHRRKITEDGVHFRSHLDGSKLFLGPEGAMDIQHDLGSDIMMSFDECAAIPSTHEYVKNSVERTTRWAERGLNHHIKKGHDKHQALFGIVQGGEYKDLREQSAKDLVSMDFPGYSIGGLSVGEPKPVMYRVLEETVPLLPEDKPRYLMGIGSPDALIEGVIRGVDMFDCVLPTRIARNGTTMTSQGRVVVKNKIYERDFTPLDPNCDCYTCKNYTRAYLRHLFKANEILGLRLTTYHNLYFLLNLMEDVRTAILNDNLLDFKEAFFESYGLNTENPKNF

SEQ ID NO: 56304 - protein, 381 aa, Jeotgalicoccus halotolerans
  misc_feature (1)..(381): tr|A0A3E0B3M6|A0A3E0B3M6_9STAP Queuine tRNA-ribosyltran sferase OS=Jeotgalicoccus halotolerans OX=157227 GN=tgt PE=3 SV=1
MAIRYEHIKTCKQTGARLGKLHTPHGVIDTPIFMPVGTLATVKTMSPEELADIGSQIILSNTYHLWLRPGNDIVKEAGGLHKFMNWDKPILTDSGGFQVFSLSHRRKITEEGVHFRSHLDGSKLFLGPEGAMDIQHDLGSDIMMSFDECAAIPSTHDYVKQSVERTTRWADRGLNHHIKKGHDKHQALFGIVQGGEYKDLREQSAKDLVAMDFPGYSIGGLSVGEPKPVMYRVLEETVNLLPEDKPRYLMGIGSPDALIEGVIRGVDMFDCVLPTRIARNGTTMTSEGRVVVKNKKFERDFTPLDPNCDCYTCKNYTRAYLRHLFKANEILGLRLTTYHNLYFLLNLMEDVRTAILNDNLLDFKEAFFESYGLNTENPKNF

SEQ ID NO: 56305 - protein, 381 aa, Jeotgalicoccus nanhaiensis
  misc_feature (1)..(381): tr|A0A4Y9HME4|A0A4Y9HME4_9STAP Queuine tRNA-ribosyltran sferase OS=Jeotgalicoccus nanhaiensis OX=568603 GN=tgt PE=3 SV=1
MAIRYEHIKTCKQTGARLGKLHTPHGVIDTPIFMPVGTLATVKTMSPEELADIGSQIILSNTYHLWLRPGNDIVKEAGGLHKFMNWDKPILTDSGGFQVFSLSHRRKITEEGVHFRSHLDGSKLFLGPEGAMDIQHDLGSDIMMSFDECAAIPSTHDYVKQSVERTTRWADRGLNHHIKKGHDKHQALFGIVQGGEYKDLREQSAKDLVAMDFPGYSIGGLSVGEPKPVMYRVLEETVHLLPEDKPRYLMGIGSPDALIEGVIRGVDMFDCVLPTRIARNGTTMTSEGRVVVKNKKFERDFTPLDPNCDCYTCKNYTRAYLRHLFKANEILGLRLTTYHNLYFLLNLMEDVRTAILNDNLLDFKEAFFESYGLNTENPKNF

SEQ ID NO: 56306 - protein, 381 aa, Jeotgalicoccus saudimassiliensis
  misc_feature (1)..(381): tr|A0A078M0P3|A0A078M0P3_9STAP Queuine tRNA-ribosyltran sferase OS=Jeotgalicoccus saudimassiliensis OX=1461582 GN=tgt PE=3 SV=1
MAIRYEHIKTCKQTGARLGKLHTPHGVIDTPIFMPVGTLATVKTMSPEELADIGSQIILSNTYHLWLRPGNDIVKEAGGLHKFMNWDKPILTDSGGFQVFSLSHRRKITEEGVHFRSHLDGSKLFLGPEGAMDIQHDLGSDIMMSFDECAAIPSTHDYVKKSVERTTRWADRGLNHHIKKGHDKHQALFGIVQGGEYKDLREQSAKDLVAMDFPGYSIGGLSVGEPKPVMYRVLEETVHLLPEDKPRYLMGIGSPDALIEGVIRGVDMFDCVLPTRIARNGTTMTSQGRVVVKNKIYERDFTPLDPNCDCYTCKNYTRAYLRHLFKANETLGLRLTTYHNLYFLLNLMEDVRTAILNDNLLDFKEAFFESYGLNKENPKNF

SEQ ID NO: 56307 - protein, 381 aa, Jeotgalicoccus sp.
  misc_feature (1)..(381): tr|A0A358JSF9|A0A358JSF9_9STAP Queuine tRNA-ribosyltran sferase OS=Jeotgalicoccus sp. OX=1871619 GN=tgt PE=3 SV =1
MVIRYEHIKTCKQTGARLGKLHTPHGVIDTPIFMPVGTLATVKSMSPEELADIGSQIILSNTYHLWLRPGNDIIKEAGGLHKFMNWDKPILTDSGGFQVFSLSHRRQITEEGVHFRSHLDGSKLFLGPEGAMDIQHDLGSDIMMSFDECAAIPSTHDYVKQSVERTTRWAERGLNHHVKKGHDKHQALFGIVQGGEYKDLREQSAKDLVSMDFPGYSIGGLSVGEPKPVMYRVLEETVHLLPEDKPRYLMGIGSPDALIEGVIRGVDMFDCVLPTRIARNGTTMTSQGRVVVKNKKFERDFTPLDPNCDCYTCKNYTRAYLRHLFKANEILGLRLTTYHNLYFLLNLMEDVRTAILNDNLLDFKEAFFESYGLNKENPKNF

SEQ ID NO: 56308 - protein, 376 aa, Jhaorihella thermophila
  misc_feature (1)..(376): tr|A0A1H5W5C0|A0A1H5W5C0_9RHOB Queuine tRNA-ribosyltran sferase OS=Jhaorihella thermophila OX=488547 GN=tgt PE= 3 SV=1
MTQGFSFDLHATDGKARTGVIRTPRGEIRTPAFMPVGTAGTVKAMLPESVRETGADIILGNTYHLMLRPTAELIDRMGGLHRFMNWHGPILTDSGGFQVMSLAELRKLTERGVTFRSHIDGSRHELTPERSMEIQRLLGSDIVMAFDECPALPADRTRIAESMRLSMRWAQRSRDAFGDRPGHALFGIQQGGLERDLREESAEALKAIGFDGYAVGGLAVGEGQEAMFATLDFAPDMLPVDKPRYLMGVGKPDDIVGAVKRGIDMMDCVLPSRSGRTGQVFTRHGVLNIKNARHREDPRPLDESCTCPACRGYSRAYLHHVFRANEIISAMLLTWHNLHYFQELMAGMRAAIAEGRFAAWEAEFHARRALGDIEPL

SEQ ID NO: 56309 - protein, 378 aa, Jiella sp.
  misc_feature (1)..(378): tr|A0A4Y8RW79|A0A4Y8RW79_9RHIZ Queuine tRNA-ribosyltran sferase OS=Jiella sp. CBS5Q-3 OX=2558362 GN=tgt PE=3 SV =1
MTERFSFSLLATDGRARRGEIAMPRGIVRTPAFMPVGTAGTVKAMYLDQVRDLGADIILGNVYHLMLRPGAERVARLGGLHDFARWPHPILTDSGGFQVMSLAELRKLDETGVTFRSHVDGSVHSLTPERSIEIQGLLDSDIQMQLDECIRLPAERAEIERAMELSLRWAERCRVAFGDQPGKAMFGIVQGGDLADLRQRSAERLAAMDLKGYAVGGLAVGEPQEVMLAILDETLPVLPQEKPRYLMGVGTPDDIIKSVARGIDMFDCVMPTRAGRHGLAYTRFGKINLKNARHADDPRPLDETSDCPAARDYSRAYLHHLVKTNESLGGMLLTWNNLAYYQQLMAGIRAAIEAKRYDAFCAEVTEAWAKGDMPALAG

SEQ ID NO: 56310 - protein, 376 aa, Jiulongibacter sediminis
  misc_feature (1)..(376): tr|A0A0P7C421|A0A0P7C421_9BACT Queuine tRNA-ribosyltran sferase OS=Jiulongibacter sediminis OX=1605367 GN=tgt P E=3 SV=1
MKFELTTKDAGSKARAGKIITDHGEILTPIFMPVGTAGTVKGVHQRELKDDIKAQIILGNTYHLYLRPGLEIIQQTGGLHKFNGWDGPILTDSGGYQVFSLKEIRKITEEGVKFNSHIDGSKHLFTPENVMDIQRTIGADIIMAFDECPPYPCEYDYAENSMHLTHRWLKRCINRFNETEGKYGYSQALFPIVQGSVYKDLRKASAEFIAEQNQAGNAIGGLSVGEPAEDMYEMLEVVNNILPEEKPRYLMGVGTPANILEAIALGTDMFDCVMPTRNARNGMLFTTEGIINIRNKKWKDDFSPIDPGLDNYASNFYSKAYLKHLIKCQEMLGAQIASIHNLAFYLWLVKQAREHILAGDFTSWKNEMTKKLMQRL

SEQ ID NO: 56311 - protein, 380 aa, Johnsonella ignava
  misc_feature (1)..(380): tr|G5GH89|G5GH89_9FIRM Queuine tRNA-ribosyltransferase OS=Johnsonella ignava ATCC 51276 OX=679200 GN=tgt PE=3 SV=1
MIYKVIAKQGNAKSAHMKTVHGEVETPVFMNVGTVAAIKGAVSTEDLRDIKTQVQLSNTYHLHVRPGDEIVKKLGGLHRFMNWDRPILTDSGGFQVFSLAGLRKIKEEGVYFNSHIDGRKIFMGPEESMQIQSNLASTIAMAFDECPGALSEREYIEQSVQRTSRWLVRCKDKIDCLNKLENTINKNQLLFGINQGGIFEDIRIRHAKEISQMNLDGYAIGGLAVGESHEEMYNILDAVVPYLPYDKPTYLMGVGTPANILEAVERGIDFFDCVYPSRNGRHGHVYTDSGKLNLFNKKYELDEAPIEDGCGCMACRAHSRAYIRHLLKAGEMLGMRLCVLHNLYFYNKMMSEIRDAIRYGDFKEYKRVKLKSMYDRQDKI

SEQ ID NO: 56312 - protein, 371 aa, Jonquetella anthropi
  misc_feature (1)..(371): tr|C9M8C3|C9M8C3_9BACT Queuine tRNA-ribosyltransferase OS=Jonquetella anthropi E3_33 E1 OX=645512 GN=tgt PE=3 SV=1
MFEFKVLAECPETGARAGEFVTPHGVIPTPVFMPVGTLATVKAMSPDELKELGASIILSNTYHLWLRPGPELVEKAGGLHGFMNWDRPILTDSGGFQVFSLSSLNQITEEGVHFRSHLNGAPLFLSPELSMDIQEKLGADIAMCFDQCLKLPATREEAERATELTLKWAGRCKTAHSRSDQALFGIVQGGLFDDLRSRCADELTRLDFNGYGIGGLSVGETAQEMYACLDKLTPLLPRTKPRYLMGVGRPDNLLEGVARGVDMFDCVMPTRDGRTGTVHSSRGKYSIKASRFAEDFGPLDPDCSCYACTHFSRAYIRHLFRCGEILASRLISWHNLHFLVGLMRGARAAILDGTFPEFKARALSLMGGSYL

SEQ ID NO: 56313 - protein, 371 aa, Jonquetella anthropi; identical to SEQ ID NO: 56312
  misc_feature (1)..(371): tr|H0ULT2|H0ULT2_9BACT Queuine tRNA-ribosyltransferase OS=Jonquetella anthropi DSM 22815 OX=885272 GN=tgt PE=3 SV=1

SEQ ID NO: 56314 - protein, 376 aa, Joostella marina
  misc_feature (1)..(376): tr|I3C6F6|I3C6F6_9FLAO Queuine tRNA-ribosyltransferase OS=Joostella marina DSM 19592 OX=926559 GN=tgt PE=3 SV= 1
MEFKLSGKDAGSKARAGVVTTDHGAIETPIFMPVGTVATVKGVHQRELKEDINPDIILGNTYHLYLRPKTSIIEQAGGLHKFMNWDRNILTDSGGFQVYSLSDNRKIKEEGVKFKSHIDGSYHFFTPENVMDIQRTIGADIIMAFDECTPYPCDYNYAKRSMHMTHRWLDRCIKRFNETPDKYGYEQTLFPIVQGSTYKDLRRQSAEYIANSGAQGNAIGGLSVGEPAEEMYEMTEVVCEILPEDKPRYLMGVGTPINILENIALGIDMFDCVMPTRNARNGMLFTAHGTINIKNKKWEADFSPIDEMGITDVDTYYTKAYLRHLFAANEYLGKQIATIHNLGFYLWLVREARKHILAGDFTDWKNKMVKQMDKRL

SEQ ID NO: 56315 - protein, 376 aa, Kaistia algarum
  misc_feature (1)..(376): tr|A0A2S5TXT0|A0A2S5TXT0_9RHIZ Queuine tRNA-ribosyltran sferase OS=Kaistia algarum OX=2083279 GN=tgt PE=3 SV=1
MTDRFTFTLLGTDGMARRGEVSMPRGKIRTPAFMPVGTAGTVKAMYPGQVRELGSDIILGNTYHLMLRPGAERVAKLGGLHVFANWPHPILTDSGGFQVMSLSQLRKMNEHGVTFQSHIDGRRYELTPERSVEIQGLLDSDIQMQLDECVALPASEAEIERAMQLSLRWAERSKAAFGDQPGKAIFGIVQGGDNPRLRLESADALAAMDFKGYSIGGLAVGEPQHVMLEILSITTPRLPANKPRYLMGVGTPDDILESVARGVDMFDCVMPTRAGRHGLAFTRFGKVNLKNARHAEDHRPLDEASDCPASRDYSRAYLHHLFKANETLAAMLLTWNNLAYYQALMAGIRAAIDERRFETFRLATKEGWARGDISAL

SEQ ID NO: 56316 - protein, 293 aa, Kaistia algarum
  misc_feature (1)..(293): tr|A0A2S5TNI0|A0A2S5TNI0_9RHIZ Queuine tRNA-ribosyltran sferase (Fragment) OS=Kaistia algarum OX=2083279 GN=C39 41_28605 PE=3 SV=1
MKFEKLGQSGRARRGRLTLEHGVVETPVFMPVGTYGTVKGMLPRDIEDIKAQIILGNTFHLYLRPGLEVIKEHGGLHKFMKWDKPILTDSGGFQVFSLGAMRKIKEDGVTFRSPIDGSKVFLSPEISMDIQHTLNSDVVMIFDECTPYPATHEEAQKSLQLSLRWAKRCKTQHHDVLENKNALFGIIQGGMYEDLRDESLKGLLEVGFDGYAIGGLSVGEPKEEMIKVLDYLPEKMPADKPRYLMGVGKPEDIVEGIRRGVDMFDCVMPTRNARNGHYFVTDGLVRIRNSKYR

SEQ ID NO: 56317 - protein, 376 aa, Kaistia soli
  misc_feature (1)..(376): tr|A0A1M5GJ30|A0A1M5GJ30_9RHIZ Queuine tRNA-ribosyltran sferase OS=Kaistia soli DSM 19436 OX=1122133 GN=tgt PE= 3 SV=1
MSERFTFTLLKSDGMARRGEITMPRGTIRTPAFMPVGTAGTVKAMYPGQVRELGADIILGNTYHLMLRPGAERVAKLGGLHTFANWPHPILTDSGGFQVMSLSQLRKMDERGVTFQSHIDGRRYELTPERSVEIQGLLDSDIQMQLDECVALPASESEIERAMQLSLRWAERSKAAFGDQPGKAIFGIVQGGDNERLRAQSATALREMDFKGYSIGGLAVGEPQDVMLRILAMTTPILPTEKPRYLMGVGTPDDILESVARGVDMFDCVMPTRAGRHGLAFTRFGKVNIKNARHAEDHRPLDEASDCPASRDYSRAYLHHLFKANETLGAMLLTWNNLAYYQSLMAGIRAAIDEARFEAFRISTKEGWARGDIAAL

SEQ ID NO: 56318 - protein, 375 aa, Kaistia sp.
  misc_feature (1)..(375): tr|A0A1E4CT25|A0A1E4CT25_9RHIZ Queuine tRNA-ribosyltran sferase OS=Kaistia sp. SCN 65-12 OX=1660103 GN=tgt PE=3 SV=1
MSAFSFTVLATDGKARRGEISMPRGKIRTPAFMPVGTGGTVKAMYMDQVRGTGADIILGNTYHLMLRPGAERVARLGGLHEFARWPHPILTDSGGFQVMSLSKLRKLTEKGVTFRSHIDGAPYEMTPERSIEIQGLLDSDIQMQLDECTALPAERKEIERAMELSLRWAERCKAAFGEQPGKAMFGIVQGGDAADLRVRSAQALAAMDLKGYAVGGLAVGEPQAVMLDMLDVTCPELPAEKPRYLMGVGTPDDILKSVARGIDMFDCVMPTRAGRHGLAYTRRGKVNLRNARHADDPRPLDEESDCPAARDYSRAYLHHLVRSQEALGAMLLSWNNLSYYQHLMQAIRAAIEARDFASRAAELAQGWAQGDIPAR

SEQ ID NO: 56319 - protein, 374 aa, Kalamiella piersonii
  misc_feature (1)..(374): tr|A0A3A9J717|A0A3A9J717_9GAMM Queuine tRNA-ribosyltran sferase OS=Kalamiella piersonii OX=2364647 GN=tgt PE=3 SV=1
MKFELDTTDGRARRGRLIFDRGVVETPAFMPVGTYGTVKGMTPEEVQETGAQIILGNTFHLWLRPGQEIMKLHGDLHDFMQWKGPILTDSGGFQVFSLGDIRKITEAGVHFRNPINGDPIFLDPEKSMEIQFDLGSDIVMIFDECTPYPADWDYAKRSMEMSLRWAKRSRDRFDSLGNKNALFGIIQGSVYEDLRDVSVKGLVEIGFDGYAVGGLAVGEPKEDMHRILEHVCPQIPQDKPRYLMGVGKPEDLVEGVRRGIDMFDCVMPTRNARNGHLFVTDGVVKIRNAKHKDDTSPLDAECDCYTCRNYSRAYLHHLDRCNEILGARLNTIHNLRYYQRLMAGLRQAIEEGKLERFVSEFYQRTGKAVPPLNV

SEQ ID NO: 56320 - protein, 377 aa, Kandleria vitulina
  misc_feature (1)..(377): tr|A0A0R2HKJ8|A0A0R2HKJ8_9FIRM Queuine tRNA-ribosyltran sferase OS=Kandleria vitulina DSM 20405 OX=1410657 GN=t gt PE=3 SV=1
MKDFWYELKHVCKQTGARYGILHTPHGDVETPMFMPVGTLATVKGISPEQLKEMGSQVILSNTYHLWLRPGNDVVKKAGGLHKFMNYDGPMLTDSGGFQVFSLGKTRKIEEEGVTFKSIIDGSQLFLSPEKAIQIQEDLGADMIMSFDECAPYPASREYMEKSVARTIRWAKRGKDAHTREDQALFGIVQGGEYPDIREKCAKALVEMDFPGYSIGGTSVGEPKDVMYKMIDDTIPFLPEDKPRYLMGVGNPIDLIEAAIRGIDMYDCVLPTRVARHGALMTHYGRMNINNQKFKYDFTPIDDMCHCYTCRNYTRAYLRHLHKSDEIFGKSLLSIHNVAFLLDLAKDIREAIKEDRLGDFKEEFLDRYGRDVYERAF

SEQ ID NO: 56321 - protein, 377 aa, Kandleria vitulina; identical to SEQ ID NO: 56320
  misc_feature (1)..(377): tr|A0A1H2QIY6|A0A1H2QIY6_9FIRM Queuine tRNA-ribosyltran sferase OS=Kandleria vitulina OX=1630 GN=tgt PE=3 SV=1

SEQ ID NO: 56322 - protein, 375 aa, Kangiella geojedonensis
  misc_feature (1)..(375): tr|A0A0F6TRE2|A0A0F6TRE2_9GAMM Queuine tRNA-ribosyltran sferase OS=Kangiella geojedonensis OX=914150 GN=tgt PE= 3 SV=1
MKFDLNKTDGQARRGQLTFERGTIQTPAFMPVGTYGTVKGLTPEEIKSLGAEIILGNTFHLMLRPGTDIIEQHGDLHDFMNWDKPILTDSGGFQVFSLGKLRKITEKGVEFRSPVNGSKVFLGPEEAMEVQRKLGSDIVMIFDECTPYPATEAEARESMELSLRWAKRSKDAHEAGFTDKEPTALFGIVQGGMYPHLRKESLEGLTDIGYDGYAIGGLSVGEPKDEMLKVLNHLTPEMPDDKPRYLMGVGKPADIVEAVRRGVDMFDCVMPTRNARNGHLFTRKGVVKLRNSHNKTFTGPLDEVCECYTCKNYSRAYLHHLDKCNEMLGAKLNTIHNLHYYQDLMDGLRKAIETGTLSDFVKEFYAAQDKDVPEL

SEQ ID NO: 56323 - protein, 373 aa, Kangiella koreensis
  misc_feature (1)..(373): tr|C7RB45|C7RB45_KANKD Queuine tRNA-ribosyltransferase OS=Kangiella koreensis (strain DSM 16069 / KCTC 12182 / SW-125) OX=523791 GN=tgt PE=3 SV=1
MQFKLNTTDGMARRGEITFERGTIQTPAFMPVGTYGTVKSMTPEEIKEIGAEIILGNTFHLMLRPGTDIIEMHGDLHDFMHWDKPILTDSGGFQVFSLGKLRKITEQGVEFRSPVNGSKVFLSPEEAMEVQRKLGSDIVMIFDECTPYPATESEARESMELSMRWAKRSKVAHEAKNKAALFGIVQGGMYPHLRKESLAGLTEIGFDGYAIGGLSVGEPKDEMLNVLDNLTGEMPQDKPRYLMGVGKPEDIVEAVRRGVDMFDCVMPTRNARNGHLFTSTGVVKLRNSHNKTDTGPLDEACDCYTCTNYSRAYLHHLDKCNEILGAKLNTIHNLRYYQNLMSGLRKAIETGTLCDFVEDFYTKQGKPVPSLNK

SEQ ID NO: 56324 - protein, 373 aa, Kangiella profundi
  misc_feature (1)..(373): tr|A0A2K9AB53|A0A2K9AB53_9GAMM Queuine tRNA-ribosyltran sferase OS=Kangiella profundi OX=1561924 GN=tgt PE=3 SV =1
MQFKLNTTDGMARRGEITFERGTIQTPAFMPVGTYGTVKSMTPEELKEIGAEIILGNTFHLMLRPGTDIIEMHGDLHDFMHWDKPILTDSGGFQVFSLGKLRKITEEGVEFRSPVNGSKVFLGPEEAMEVQRKLGSDIVMIFDECTPYPATESEARDSMELSLRWAKRSKVAHEAKNAAALFGIVQGGMYPHLRKESLAGLTDIGFDGYAIGGLSVGEPKDEMLKVLDNLTGDMPQDKPRYLMGVGKPEDIVEAVRRGVDMFDCVMPTRNARNGHLFTSTGVVKLRNSHNKTDTGPLDEACDCYTCKNYSRAYLHHLDKCNEILGAKLNTIHNLRYYQNLMSGLRKAIETGTLCDFVKDFYTKQGKPVPSMSE

SEQ ID NO: 56325 - protein, 370 aa, Kangiella sediminilitoris
  misc_feature (1)..(370): tr|A0A1B3BB26|A0A1B3BB26_9GAMM Queuine tRNA-ribosyltran sferase OS=Kangiella sediminilitoris OX=1144748 GN=tgt PE=3 SV=1
MKFDLNKTDGQARRGQLTFERGTIQTPAFMPVGTYGTVKGLTPEELKTLGAEIILGNTFHLMLRPGTDIIEQHGDLHDFMNWDKPILTDSGGFQVFSLGKMRKITEKGVEFRSPVNGSKVFLGPEEAMDVQRKLGSDIVMIFDECTPYPATESEARDSMELSLRWAKRSKDAHGDNPSALFGIVQGGMYPHLRKESLAGLTEIGYDGYAIGGLSVGEPKDEMLNVLDNLTPDMPEDKPRYLMGVGKPEDIVEAVRRGVDMFDCVMPTRNARNGHLFTSKGVVKLRNSHNKTFTGPLDEACDCYTCKNYSRAYLHHLDKCNEMLGAKLNTIHNLHYYQNLMDGLRKAIETGKLSDFVEEFYEGQGKPVPKL

SEQ ID NO: 56326 - protein, 375 aa, Kangiella sp.
  misc_feature (1)..(375): tr|A0A3D8URG9|A0A3D8URG9_9GAMM Queuine tRNA-ribosyltran sferase OS=Kangiella sp. HD9-110m-PIT-SAG07 OX=2283595 GN=tgt PE=3 SV=1
MKFDLKNTDGQARRGQLTFERGTIQTPAFMPVGTYGTVKSLTPEELKGLGAEIILGNTFHLMLRPGTDIIQQHGDLHDFMHWDKPILTDSGGFQVFSLGKMRKITEKGVEFRSPVNGSKVFLGPEEAMEVQRKLGSDIVMIFDECTPYPATEAEARESMELSLRWAKRSKDSHEAGFKDKEPSALFGIVQGGMYPHLRKESLEGLTEIGYDGYAIGGLSVGEPKDEMLKVLNHLTPEMADDKPRYLMGVGKPEDIVEAVRRGVDMFDCVMPTRNARNGHLFTRKGVVKLRNSHNKTFTGPLDEACGCYTCENYSRAYLHHLDKCNEMLGAKLNTIHNLHYYQDLMDGLRKAIETGTLSDFVNEFYTAQGKDIPEL

SEQ ID NO: 56327 - protein, 373 aa, Kangiella sp.
  misc_feature (1)..(373): tr|A0A2G2KQA1|A0A2G2KQA1_9GAMM Queuine tRNA-ribosyltran sferase OS=Kangiella sp. OX=1920245 GN=tgt PE=3 SV=1
MKFKLLKTDGKARRGQLEFDRGTIETPAFMPVGTYGTVKGMSPERVKETGAEILLGNTFHLMLRPGTEIIKMHGDLHDFMNWHGPILTDSGGFQVFSLGELRKITEEGVTFRSPINGDKVFLGPEESMQVQKDLGSDIVMIFDECTPYPATFEEAETSMQLSLRWAERSKKAHGDSSAALFGIIQGGMYPELRDVSLEGLNKIDFDGYAIGGLSVGESKLEMTMILDHLAYKMPEDKPRYLMGVGKPEDLVESVRRGIDMFDCVMPTRNARNGHLFTSTGIVRLRNSPNKKNSGPVDENCECYTCKNYSRAYLHHLDKCGEMFGAELATIHNLHYYQDLMKGLRKSLETGTFDDFVQEFYEARGMDVPALDSN

SEQ ID NO: 56328 - protein, 375 aa, Kangiella spongicola
  misc_feature (1)..(375): tr|A0A318D3M5|A0A318D3M5_9GAMM Queuine tRNA-ribosyltran sferase OS=Kangiella spongicola OX=796379 GN=tgt PE=3 S V=1
MKFDLNTTDGQARRGQLTFERGTIQTPAFMPVGTYGTVKGLSPEELKDLGAEIILGNTFHLMLRPGTDIIEQHGDLHDFMHWDKPILTDSGGFQVFSLGKMRKISEKGVEFRSPVNGSKVFLGPEEAMEVQRKLGSDIVMIFDECTPYPATEAEARESMELSLRWAKRSKEAHVSGFKDKEPTALFGIVQGGMYPHLRKESLAGLTEIGYDGYAIGGLSVGEPKDEMLKVLDNLTHEMPADKPRYLMGVGKPEDIVEAVRRGVDMFDCVMPTRNARNGHLFTSKGVVKLRNSHNKTFTGPLDDACDCYTCENYSRAYLHHLDKCNEMLGGRLNTIHNLRYYQNLMDGLRQAIEKGTLSDFVKEFYEGLGKEVPAL

SEQ ID NO: 56329 - protein, 372 aa, Keratinibaculum paraultunense
  misc_feature (1)..(372): tr|A0A4V2UU78|A0A4V2UU78_9CLOT Queuine tRNA-ribosyltran sferase OS=Keratinibaculum paraultunense OX=1278232 GN= tgt PE=3 SV=1
MGIKFKVLKESTETNARLGLLETPHGIVETPIFMPVGTKATVKTMTPEEVKALGAQIILSNTYHLYLRPGHKLIEEAGGLHEFMNWHGPILTDSGGFQVFSLGDLRKITEEGVEFRSHIDGSKHFISPEKSIEIQNSLGSDIMMAFDECTHYPATYEYAKESMKRTTRWAKRCKNFHKDWERQGLFGIIQGGMYKDLRRQSVQDIVSMDFSGYAIGGLSVGEPKELMYEMLEFTTPLLPKDKPRYLMGVGTPDYLFEAVINGIDMADCVLPTRIARNGTVITSRGKLTIRNAKYSRDFSKLDPECDCYTCKNYTRAYIRHLFNVNEILGPRLTTIHNLYFLIKLMENIRKAIKEDRLLEYREEFYKKYGYTD

SEQ ID NO: 56330 - protein, 378 aa, Kerstersia gyiorum
  misc_feature (1)..(378): tr|A0A4Q7MX37|A0A4Q7MX37_9BURK Queuine tRNA-ribosyltran sferase OS=Kerstersia gyiorum OX=206506 GN=tgt PE=3 SV= 1
MTGLNFELLATDGLARRGRMTLNHGVVETPIFMPVGTYGSVKAMLPHELEEIGAQIVLGNTFHLWLRPGVEIMQKHGGLHGFMQWQRPILTDSGGFQVFSLQGMRKITEEGVRFASPIDGARLFLTPEESMRIQRGLNSDIAMVFDECTPYEIKGRPATVDEAATSMRMSLRWARRSRDAFDQLENPNALFGIVQGGMYESLRDESLAGLTDIGFHGYAIGGLSVGEPKAEMIRILQHVAPRMPQDKPRYLMGVGTPEDLVEGVANGVDMFDCVMPTRNARNGWLFTRHGDVKIRNARYRDDTRPLDMHCACHTCRQFSRAYLHHLQRANEITGARLNTLHNLHFYLQIMQEMRDAIAAGTFQSWREQFAADRARGVD

SEQ ID NO: 56331 - protein, 378 aa, Kerstersia gyiorum
  misc_feature (1)..(378): tr|A0A171KW49|A0A171KW49_9BURK Queuine tRNA-ribosyltran sferase OS=Kerstersia gyiorum OX=206506 GN=tgt PE=3 SV= 1
MTGLNFELLATDGLARRGRMTLNHGVVETPIFMPVGTYGSVKAMLPHELEEIGAQIVLGNTFHLWLRPGVEIMQKHGDLHGFMQWQRPILTDSGGFQVFSLQGMRKITEEGVRFASPIDGARLFLTPEESMRIQRGLNSDIAMVFDECTPYEIKGRPATVDEAATSMRMSLRWARRSRDAFDQLENPNALFGIVQGGMYESLRDESLAGLTDIGFHGYAIGGLSVGEPKAEMIRILQHVAPRMPQDKPRYLMGVGTPEDLVEGVANGVDMFDCVMPTRNARNGWLFTRHGDVKIRNARYRDDTRPLDMHCACHTCRQFSRAYLHHLQRANEITGARLNTLHNLHFYLQIMQEMRDAIAAGTFQSWREQFAADRARGVD

SEQ ID NO: 56332 - protein, 373 aa, Ketobacter alkanivorans
  misc_feature (1)..(373): tr|A0A2K9LHS0|A0A2K9LHS0_9GAMM Queuine tRNA-ribosyltran sferase OS=Ketobacter alkanivorans OX=1917421 GN=tgt PE =3 SV=1
MKFELTGTDAGARRGRLIFDRGVVETPAFMPVGTYGSVKAMLPRDIEAIGAHIILGNTFHLMLRPGTEIIKQHGDLHDFMQWQGPILTDSGGFQVFSLGKMRKISEEGVKFQSPVDGSPVFLTPEISMQVQRDLGSDIVMIFDECTPYPATEQQARDSMELSLRWAKRSKAAHEGNPSALFGIVQGGMYEHLRLESLSGLAEIGFDGYAIGGLSVGEPKEEMLNVLNYLRPHMPNDRPRYLMGVGKPEDIVEAVRRGVDMFDCVMPTRNARNGHLFTAKGVIKIRNSAHKTDTGPLEEGCDCYTCQNFSRAYLHHLDRCKEILSSQLNTIHNLRYYQRLMLGLRSAIETGTFERFVTEFYEQRGETAPPLESN

SEQ ID NO: 56333 - protein, 373 aa, Ketobacter sp.; identical to SEQ ID NO: 51386
  misc_feature (1)..(373): tr|A0A3L8BGG9|A0A3L8BGG9_9GAMM Queuine tRNA-ribosyltran sferase OS=Ketobacter sp. OX=2083498 GN=tgt PE=3 SV=1

SEQ ID NO: 56334 - protein, 373 aa, Ketobacter sp.
  misc_feature (1)..(373): tr|A0A3L8BFS0|A0A3L8BFS0_9GAMM Queuine tRNA-ribosyltran sferase OS=Ketobacter sp. OX=2083498 GN=tgt PE=3 SV=1
MKFELIGTDAGARRGRLIFERGTVETPAFMPVGTYGSVKAMLPRDIEAIGAHIVLGNTFHLMLRPGTEIIRQHGDLHDFMQWQGPILTDSGGFQVFSLGKMRKISEEGVKFQSPVDGSPVVLTPEISMQVQRDLGSDIVMIFDECTPYPATEQQARDSMELSLRWARRSKEAHQGNPSALFGIVQGGMYESLRRESLAGLEEIGFDGYAIGGLSVGEPKEEMMSVLNYLQPHMPKDRPRYLMGVGKPEDIVEAVRRGVDMFDCVMPTRNARNGHLFTSSGVVKIRNAAHKTDTGPLEAGCDCYTCCNFSRAYLHHLDRCKEILGAQLNTIHNLRYYQRLMLGLRTAIETGTFERFVTEFYQQRGETVPPLASN

SEQ ID NO: 56335 - protein, 376 aa, Ketogulonicigenium robustum
  misc_feature (1)..(376): tr|A0A1W6NZ32|A0A1W6NZ32_9RHOB Queuine tRNA-ribosyltran sferase OS=Ketogulonicigenium robustum OX=92947 GN=tgt PE=3 SV=1
MASGISFTLNATDGKARTGVISTPRGDIRTPAFMPVGTAATVKAMMPESVAATGADILLGNTYHLMLRPTAERIDRLGGLHRFMNWEKPILTDSGGFQVMSLSSLRKLTEEGVTFSSHVDGSRHFVSPERSMEIQKLLGSDIVMAFDECPALPATEDTVAQSMRMSMRWAQRSRDAFGDRPGHALFGIQQGGVTEALRGESAEALRAIEFDGYAIGGLAVGEGQEAMFGVLDYAPDMLPTDKPRYLMGVGKPDDIVGAVKRGVDMMDCVLPSRSGRTGQAWTHRGQVNIKNARHADDPRPLDENCSCPACSKYSRAYLHHVFRAQEMISGMLLTWHNLHYYQELMAGMRAAIAEGRFAAFEADFHAKRAQGDIDPI

SEQ ID NO: 56336 - protein, 376 aa, Ketogulonicigenium vulgare
  misc_feature (1)..(376): tr|E3F1K6|E3F1K6_KETVY Queuine tRNA-ribosyltransferase OS=Ketogulonicigenium vulgare (strain Y25) OX=880591 GN =tgt PE=3 SV=1
MASGISFTLNGTDGKARVGVISTPRGEIRTPAFMPVGTAATVKAMMPESVAATGADILLGNTYHLMLRPTAERIDRLGGLHRFMNWEKPILTDSGGFQVMSLAGLRKLTEEGVTFSSHVDGSRHFVSPERSMEIQKLLGSDIVMAFDECPALPATEETVAQSMRMSMRWAQRSRDAFGDRPGHALFGIQQGGVTESLRGESADALRAIEFDGYAIGGLAVGEGQEAMFGVLDYAPDMLPTDKPRYLMGVGKPDDIVGAVKRGVDMMDCVLPSRSGRTGQAWTHRGQVNIKNARHADDPRPLDENCTCPACSKYSRAYLHHVFRSQEMISGMLLTWHNLHYYQELMAGMRAAIAAGRFAAFEADFHAKRAQGDIDPL

SEQ ID NO: 56337 - protein, 376 aa, Ketogulonicigenium vulgare; identical to SEQ ID NO: 56336
  misc_feature (1)..(376): tr|F9Y5I3|F9Y5I3_KETVW Queuine tRNA-ribosyltransferase OS=Ketogulonicigenium vulgare (strain WSH-001) OX=75936 2 GN=tgt PE=3 SV=1

SEQ ID NO: 56338 - protein, 379 aa, Kiloniella litopenaei
  misc_feature (1)..(379): tr|A0A0M2RD91|A0A0M2RD91_9PROT Queuine tRNA-ribosyltran sferase OS=Kiloniella litopenaei OX=1549748 GN=tgt PE=3 SV=1
MSNTPKFGYTLQAKDGLARRGEVTTAHGTFQTPAFMTVGTAGTVKGLTPDQLRTTGAEVVLGNTYHLMLRPTAELVDRHGGLHKFMNWPHPILTDSGGYQVMSLSGLRKITEEGVKFQSHIDGSKHNLTPERSMEIQHLLDSNITMVLDECTPYPATHEEAAHSMRRSMRWAERCRKAFKDRDGYGLFGIVQGSTYEDLRKESAEALIDIGFEGYAVGGLAVGEGQKVMFEVLDHTMPHLPEDKPRYLMGVGKPSDLVGAVARGIDMFDCVLPTRSGRNAQAFTRRGALNMRNKRHQDDHRPVDDQCKCACCTQFSRAYLRHLFVAKEMLGPILLTIHNLAYYQELMAGMRDAIATGTFEAFQEEFYRLQDGGDIPALD

SEQ ID NO: 56339 - protein, 383 aa, Kiloniella spongiae
  misc_feature (1)..(383): tr|A0A0H2MDE0|A0A0H2MDE0_9PROT Queuine tRNA-ribosyltran sferase OS=Kiloniella spongiae OX=1489064 GN=tgt PE=3 S V=1
MSNTPKSDTKFGYELQAKDGLARRGEVTTAHGTFQTPAFMTVGTAGTVKGLTPDQLRTTGAEVVLGNTYHLMLRPTAELVDRHGGLHKFMNWPHPILTDSGGYQVMSLSGLRKITEEGVKFQSHIDGSKHNLTPERSMEIQHLLDSNITMVLDECTPYPATHEEAALSMRRSMRWAERCRKAFIDRDGYGLFGIVQGSTYEDLRKESTEALIDIGFEGYAVGGLAVGEGQKVMFEVLDHTMPHLPEDKPRYLMGVGKPADLVGAVARGIDMFDCVLPTRSGRNAQAFTRRGALNMRNKRHQDDHRPVDDQCKCACCTQFSRAYLRHLFVAKEMLGPILLTIHNLAYYQELMAGMRDAIAAGTFEAFQEEFHKQQDGGDIPALD

SEQ ID NO: 56340 - protein, 374 aa, Kineothrix alysoides
  misc_feature (1)..(374): tr|A0A4R1R393|A0A4R1R393_9FIRM Queuine tRNA-ribosyltran sferase OS=Kineothrix alysoides OX=1469948 GN=tgt PE=3 SV=1
MYKLIKQEGRAKRGELHTVHGVIQTPVFMNVGTAAAIKGAVASEDLEGIKTQVELSNTYHLHVRPGDEVIKKMGGLHKFMAWDKPILTDSGGFQVFSLASLRKIKEEGVYFQSHIDGRKIFMGPEESMRIQSNLASTIAMAFDECPSSKAEREYVQASVERTTRWLERCRAEMNRLNEAEDTINKKQMLFGINQGAIFSDIRIEHAKILSQMELDGYAVGGLAVGESHEEMYYILEETVPYLPADKPTYLMGVGTPANILEGVERGVDFFDCVYPSRNGRHGHLYTNQGKINLFNAKYELDERPIEEGCGCPACRRYSRGYIRHLLKAKEMLGMRLCVLHNLYFYNTMMEEIRDALGEGNFAAYKKKKLEGMAT

SEQ ID NO: 56341 - protein, 371 aa, Kingella denitrificans
  misc_feature (1)..(371): tr|F0EY76|F0EY76_9NEIS Queuine tRNA-ribosyltransferase OS=Kingella denitrificans ATCC 33394 OX=888741 GN=tgt P E=3 SV=1
MLNFTLHKKDGYARRGTLELNHGSIETPVFMPVGTYGSVKAMTPQNLHDINAQIILGNTYHLWLRPGLEVIEQFGGLHDFIGWNKPILTDSGGFQVFSLSNMRKLTEDGCTFKSPINGDKLFLSPEISMKIQTVLNSDIVMQLDECTPGEATHEQAKKSLQMSLRWAERSKKAFEDLHNPNALFGIIQGAMYEDLREESLRGLEDIGFKGIAIGGLSVGEPKPEMYRMLRALAPMLPERKPHYLMGVGTPEDLVYGVAHGVDMFDCVMPTRNARNGWLFTRFGDLKIRNAKHRHDKRPLDESCTCYACQHFSRSYLHHLDKVGEILGAQLCTIHNLHFYQVIMAEMREAIEQGKFADWQARFHENRARGTD

SEQ ID NO: 56342 - protein, 371 aa, Kingella kingae
  misc_feature (1)..(371): tr|F5S5S5|F5S5S5_9NEIS Queuine tRNA-ribosyltransferase OS=Kingella kingae ATCC 23330 OX=887327 GN=tgt PE=3 SV= 1
MLNFTLHKTDGYARRGTLELNHGKIETPVFMPVGTVGSVKSMTPQGLHDIKAQIILGNTYHLWLRPGLEVIEEFGGLHDFIGWNKPILTDSGGFQVFSLSELRKLTEDGCTFKSPINGDKLFLSPEISMKIQTVLNSDIVMQLDECTPGEATHAQANKSLEMSLRWAERSKKAFEDLKNPNALFGIIQGAMYEDLREKSLRGLEEIGFKGIAIGGLSVGEPKPEMYRMLRALAPMLPANKPHYLMGVGTPEDLVYGVAHGVDMFDCVMPTRNARNGWLFTRFGDLKIRNAKHRFDKRPLDESCTCYTCQNFSRSYLHHLDRAKEMLGAQLNTIHNLHFYQVIMAEMREAIEQGKFADWQAQFRANRARGTD

SEQ ID NO: 56343 - protein, 371 aa, Kingella negevensis
  misc_feature (1)..(371): tr|A0A238HFE5|A0A238HFE5_9NEIS Queuine tRNA-ribosyltran sferase OS=Kingella negevensis OX=1522312 GN=tgt PE=3 S V=1
MLNFTLHKKDGYARRGTVELNHGKVETPVFMPVGTVGSVKSMTPQGLHDIKAQIILGNTYHLWLRPGLEVIEQFGGLHDFIGWDKPILTDSGGFQVFSLTDLRKLTEDGCTFKSPINGDKLFLSPEVSMKIQTVLNSDIVMQLDECTPGEASHAQAKKSLEMSLRWAERSKKAFEDLKNPNALFGIIQGAMYEDLREQSLRVLEDIGFKGIAIGGLSVGEPKPEMYRMLRALAPMLPENKPHYLMGVGTPEDLVYGVAHGVDMFDCVMPTRNARNGWLFTRFGDLKIRNAKHRFDKRPLDESCTCYTCQNFSRSYLHHLDRAKEMLGAQLNTIHNLHFYQVIMAEMREAIEQGKFADWQAQFHENRARGTD

SEQ ID NO: 56344 - protein, 371 aa, Kingella oralis
  misc_feature (1)..(371): tr|C4GFM2|C4GFM2_9NEIS Queuine tRNA-ribosyltransferase OS=Kingella oralis ATCC 51147 OX=629741 GN=tgt PE=3 SV= 1
MLNFTLHKKDGYARRATVELNHGKIETPVFMPVGTYGSVKAMTPQNLHDINAQIILGNTYHLWLRPGLEVIEQFGGLHDFIGWNKPILTDSGGFQVFSLSDMRKLTEEGCTFKSPINGDKLFLSPEISMQIQTVLNSDIVMQLDECTEGNASHAEAQKSLQMSLRWAERSKRAFEDLRNPNALFGIIQGAMYEDLREESLRGLEDIGFKGIAIGGLSVGEPKPEMYRMLRALAPMLPENKPHYLMGVGTPEDLVYGVAHGVDMFDCVMPTRNARNGWLFTRFGDIKIKNAKHRHDKRPLDESCTCYACTHFSRAYLYHLHKVGEILGAQLNTIHNLHFYQVIMQEMRDAIDAGRFADWQAQFHENRARGTD

SEQ ID NO: 56345 - protein, 373 aa, Kingella potus
  misc_feature (1)..(373): tr|A0A377R1A2|A0A377R1A2_9NEIS Queuine tRNA-ribosyltran sferase OS=Kingella potus OX=265175 GN=tgt PE=3 SV=1
MLKFTLHTTDGRARRGTLTLNHGTIETPVFMPVGTYGSVKAMSPANLHDIKAQIILGNTYHLWLRPGLEVIGQFGGLHQFIGWDKPILTDSGGFQVFSLSDMRKLTEEGCTFKSPINGDKLFLSPEISMEIQTVLNSDIAMQLDECTPGEATHQQARQSLQMSLRWAERSKKAFEDLRNPNALFGIVQGAMYEDLREESLRGLEQFDFPGLAVGGLSVGEPKPEMYRMLRAVGPMLPAHKPHYLMGVGTPEDLVCGVANGIDMFDCVMPTRNARNGWLFTRFGDIKIKNAAHKHSTAPLDESCTCYTCRNFSRAYLHHLHRAGEILGAQLNTIHNLHFYQVIMEEMRTAIEQGGFADWRARFHELRGTRHAAA

SEQ ID NO: 56346 - protein, 386 aa, Kinneretia asaccharophila
  misc_feature (1)..(386): tr|A0A4R6NCV8|A0A4R6NCV8_9BURK Queuine tRNA-ribosyltran sferase OS=Kinneretia asaccharophila OX=582607 GN=tgt P E=3 SV=1
MLKFDLLKTEGRARRGVLTLNHGVVQTPIFMPVGTYGTVKGVMPRSLEEMGAQIILGNTFHLWMRPGLDIMKQFGGLHQFERWNKPILTDSGGFQVWSLGEMRKISEEGVKFASPVNGDKLFLTPEISMQIQTVLNSDIVMQFDECTPYETKGHITTEIEARKSMEMSLRWAKRCQDEFARLQNPNALFGIVQGGMFENLRDHSLAGLAALDLPGYAIGGLSVGEPKADMQRVLAHIGHQLPAHKPRYLMGVGTPEDLVEGVAQGVDMFDCVMPTRNARNGHLFTRYGDLRLRNSRYKADERPVDETCTCYTCKGVTNADGTVSGGFSRAYLHHLDRCGEMLGPMLTSIHNLHYYLNLMKEVREALDAGDFAGFQKKFAEDRARGV

SEQ ID NO: 56347 - protein, 386 aa, Kiritimatiella glycovorans
  misc_feature (1)..(386): tr|A0A0G3EF56|A0A0G3EF56_9BACT Queuine tRNA-ribosyltran sferase OS=Kiritimatiella glycovorans OX=1307763 GN=tgt PE=3 SV=1
MTAEAEQREGRAQAGRFEVRARDAETDARCGVLQTAHGPVHTPVFMPVGTQATVKGMTPRELEELRIEIILGNTYHLSERPGAEVIERLGGLHAFMGWNGAILTDSGGYQVFSLASLREVTEDGVRFRSHVDGAERFLGPDEAMEIQRRLGSDIAMAFDECPPDPSDRDYTCKAVQRTLDWAVRCARAPRAEGQIVFGIVQGGIFSDLREECAGRLADLGFDGYAIGGVSVGEGEELITRGVEDTARHLPPHRPRYLMGVGDPAQIVDAVARGVDMFDCVMPTRLARNGTVMTRRGRYPVKAGRFRTDPAPLEEECGCEVCARFSRAYIRHLFNTNEMLGPRLVTEHNLQVYGRLQEEMRTHIEAGTYASFARSFAAEYRGVRDDL

SEQ ID NO: 56348 - protein, 373 aa, Kiritimatiellaceae bacterium
  misc_feature (1)..(373): tr|A0A2E3TN44|A0A2E3TN44_9BACT Queuine tRNA-ribosyltran sferase OS=Kiritimatiellaceae bacterium OX=2026752 GN=t gt PE=3 SV=1
  misc_feature (9)..(9): Xaa can be any naturally occurring amino acid
  misc_feature (52)..(52): Xaa can be any naturally occurring amino acid
  misc_feature (54)..(54): Xaa can be any naturally occurring amino acid
  misc_feature (73)..(73): Xaa can be any naturally occurring amino acid
  misc_feature (76)..(76): Xaa can be any naturally occurring amino acid
  misc_feature (103)..(103): Xaa can be any naturally occurring amino acid
  misc_feature (108)..(108): Xaa can be any naturally occurring amino acid
  misc_feature (138)..(138): Xaa can be any naturally occurring amino acid
  misc_feature (157)..(157): Xaa can be any naturally occurring amino acid
  misc_feature (168)..(168): Xaa can be any naturally occurring amino acid
  misc_feature (174)..(174): Xaa can be any naturally occurring amino acid
  misc_feature (192)..(192): Xaa can be any naturally occurring amino acid
  misc_feature (204)..(204): Xaa can be any naturally occurring amino acid
  misc_feature (228)..(228): Xaa can be any naturally occurring amino acid
  misc_feature (231)..(231): Xaa can be any naturally occurring amino acid
  misc_feature (240)..(240): Xaa can be any naturally occurring amino acid
  misc_feature (256)..(256): Xaa can be any naturally occurring amino acid
  misc_feature (260)..(260): Xaa can be any naturally occurring amino acid
  misc_feature (263)..(263): Xaa can be any naturally occurring amino acid
  misc_feature (276)..(276): Xaa can be any naturally occurring amino acid
  misc_feature (280)..(280): Xaa can be any naturally occurring amino acid
  misc_feature (295)..(295): Xaa can be any naturally occurring amino acid
  misc_feature (307)..(307): Xaa can be any naturally occurring amino acid
  misc_feature (317)..(317): Xaa can be any naturally occurring amino acid
  misc_feature (343)..(343): Xaa can be any naturally occurring amino acid
  misc_feature (361)..(361): Xaa can be any naturally occurring amino acid
MIGQFEITXRCEKSSARTGKLHTIHGVIKTPAFMPVGTKATVKTMSSQDLEXLXYDVILGNTYHLNDRPGAEXIAXHGGLHNFMSWKKPILTDSGGYQVFSLXQINKXTDLGVSFRSHSDGKELFIGPHESMKIQSLXGSDIAMVFDECPPYPSDKXYVYKAVCRTIXWAKECXKYDNLKNQLVFGIIQGGXYQDLREECAKKXIELDFNGYAIGGVSVGESDNLKLXSVXDTIKFMPNXKPRYLMGVGEFHQMIXSISXGIXMFDCVMPTRQARXGTVXTMKGRYPIKSAKFKXDKRPLEEGCDCXVCKTYTRSYXRHLFNVGEILGLRLITYHNLYCYNKXIKNIRTSIEENKFELYKXNFVKNYSVVLKD

SEQ ID NO: 56349 - protein, 381 aa, Kiritimatiellaceae bacterium
  misc_feature (1)..(381): tr|A0A2D7D6Q8|A0A2D7D6Q8_9BACT Queuine tRNA-ribosyltran sferase OS=Kiritimatiellaceae bacterium OX=2026752 GN=t gt PE=3 SV=1
  misc_feature (89)..(89): Xaa can be any naturally occurring amino acid
  misc_feature (322)..(322): Xaa can be any naturally occurring amino acid
MAIGMFELVGQDAASGARRGRLHTAHGTVETPVFMPVGTQATVKGMSPLEMEELGCEILLGNTYHLNDRPGPELIDRRGGLHSFMGWDXAILTDSGGYQVFSLGARNTISDEGVSFQSHSDGRRHFIGPRESMEIQRLLGSDIAMVFDECPPYPCEKDYACQAVKRTLDWAAICRETPRAAGQLVFGIVQGGVFADLRESCAEALVKMDFEGYAIGGVSVGEPEELILRGVDDTVNHLPTMKPRYLMGVGEMAQMVESVARGVDMFDCVMPTRQARNGTVSTRRGRYPVKAAVYREDERPLEEGCSCYVCQHFTRSYVRHLXNVGEILGLRLVTMHNLHCYLEFMREMRVAIETGCFEQFRTDFHAGYQTVMKEHVQGTEE

SEQ ID NO: 56350 - protein, 375 aa, Klebsiella aerogenes
  misc_feature (1)..(375): tr|A0A0F1L3H1|A0A0F1L3H1_KLEAE Queuine tRNA-ribosyltran sferase OS=Klebsiella aerogenes OX=548 GN=tgt PE=3 SV=1
MKFELDTTDGRARRGRLVFDRGVVETPAFMPVGTYGTVKGMTPEEVEATGAQIILGNTFHLWLRPGQEIMKLHGDLHDFMQWKGPILTDSGGFQVFSLGDIRKITEQGVHFRNPINGDPIFLDPEKSMEIQYDLGSDIVMIFDECTPYPADWDYAKRSMEMSLRWAKRSRDRFDGLGNKNALFGIIQGSVYEDLRDISVKGLVEIGFDGYAVGGLAVGEPKEDMHRILEHVCPQIPADKPRYLMGVGKPEDLVEGVRRGIDMFDCVMPTRNARNGHLFVTDGVVKIRNAKHKSDTSPLDAECDCYTCRNYSRAYLHHLDRCNEILGARLNTIHNLRYYQRLMAGLRKAIEEGKLESFVTDFYQRQGRSVPPLNVD

SEQ ID NO: 56351 - protein, 375 aa, Klebsiella aerogenes
  misc_feature (1)..(375): tr|A0A377S3J4|A0A377S3J4_KLEAE Queuine tRNA-ribosyltran sferase OS=Klebsiella aerogenes OX=548 GN=tgt PE=3 SV=1
MKFELDTTDGRARRGRLVFERGVVETPAFMPVGTYGTVKGMTPEEVEATGAQIILGNTFHLWLRPGQEIMKLHGDLHDFMQWKGPILTDSGGFQVFSLGDIRKITEQGVHFRNPINGDPIFLDPEKSMEIQYDLGSDIVMIFDECTPYPADWDYAKRSMEMSLRWAKRSRDRFDSLGNKNALFGIIQGSVYEDLRDISVKGLVEIGFDGYAVGGLAVGEPKEDMHRILEHVCPQIPADKPRYLMGVGKPEDLVEGVRRGIDMFDCVMPTRNARNGHLFVTDGVVKIRNAKHKSDTAPLDAECDCYTCRNYSRAYLHHLDRCNEILGARLNTIHNLRYYQRLMAGLRKAIEEGKLESFVTDFYQRQGRTVPPLNVD

SEQ ID NO: 56352 - protein, 375 aa, Klebsiella grimontii
  misc_feature (1)..(375): tr|A0A564GMT8|A0A564GMT8_9ENTR Queuine tRNA-ribosyltran sferase OS=Klebsiella grimontii OX=2058152 GN=tgt PE=3 SV=1
MKFELDTTDGRARRGRLLFERGVVETPAFMPVGTYGTVKGMTPEEVEATGAQIILGNTFHLWLRPGQEIMKLHGDLHDFMQWKGPILTDSGGFQVFSLGDIRKITEQGVHFRNPINGDPIFLDPEKSMEIQYDLGSDIVMIFDECTPYPADWDYAKRSMEMSLRWAKRSRDRFDGLGNKNALFGIIQGSVYEDLRDISVKGLVEIGFDGYAVGGLAVGEPKEDMHRILEHVCPQIPADKPRYLMGVGKPEDLVEGVRRGIDMFDCVMPTRNARNGHLFVTDGVVKIRNAKHKSDTSPLDAECDCYTCRNYSRAYLHHLDRCNEILGARLNTIHNLRYYQRLMAGLRKAIEEGKLESFVTDFYQRQGRTVPPLNVD

SEQ ID NO: 56353 - protein, 375 aa, Klebsiella grimontii
  misc_feature (1)..(375): tr|A0A285AZM1|A0A285AZM1_9ENTR Queuine tRNA-ribosyltran sferase OS=Klebsiella grimontii OX=2058152 GN=tgt PE=3 SV=1
MKFELDTTDGRARRGRLVFERGVVETPAFMPVGTYGTVKGMTPEEVEATGAQIILGNTFHLWLRPGQEIMKLHGDLHDFMQWKGPILTDSGGFQVFSLGDIRKITEQGVHFRNPINGDPIFLDPEKSMEIQYDLGSDIVMIFDECTPYPADWDYAKRSMEMSLRWAKRSRDRFDGLGNKNALFGIIQGSVYEDLRDISVKGLVEIGFDGYAVGGLAVGEPKEDMHRILEHVCPQIPADKPRYLMGVGKPEDLVEGVRRGIDMFDCVMPTRNARNGHLFVTDGVVKIRNAKHKSDTSPLDAECDCYTCRNYSRAYLHHLDRCNEILGARLNTIHNLRYYQRLMAGLRKAIEEGKLESFVTDFYQRQGRTVPPLNVD

SEQ ID NO: 56354 - protein, 375 aa, Klebsiella michiganensis; identical to SEQ ID NO: 56353
  misc_feature (1)..(375): tr|H3N7U4|H3N7U4_9ENTR Queuine tRNA-ribosyltransferase OS=Klebsiella michiganensis OX=1134687 GN=tgt PE=3 SV=1

SEQ ID NO: 56355 - protein, 375 aa, Klebsiella michiganensis; identical to SEQ ID NO: 56352
  misc_feature (1)..(375): tr|A0A2J4VBP6|A0A2J4VBP6_9ENTR Queuine tRNA-ribosyltran sferase OS=Klebsiella michiganensis OX=1134687 GN=tgt P E=3 SV=1

SEQ ID NO: 56356 - protein, 375 aa, Klebsiella oxytoca
  misc_feature (1)..(375): tr|A0A169EH14|A0A169EH14_KLEOX Queuine tRNA-ribosyltran sferase OS=Klebsiella oxytoca OX=571 GN=tgt PE=3 SV=1
MKFELDTTDGRARRGRLVFDRGVVETPAFMPVGTYGTVKGMTPEEVEATGAQIILGNTFHLWLRPGQEIMKLHGDLHDFMQWKGPILTDSGGFQVFSLGDIRKITEQGVHFRNPINGDPIFLDPEKSMEIQYDLGSDIVMIFDECTPYPADWDYAKRSMEMSLRWAQRSRDRFDSLGNKNALFGIIQGSVYEDLRDISVKGLVDIGFDGYAVGGLAVGEPKEDMHRILEHVCPQIPADKPRYLMGVGKPEDLVEGVRRGIDMFDCVMPTRNARNGHLFVTDGVVKIRNAKHKSDTAPLDAECDCYTCRNYSRAYLHHLDRCNEILGARLNTIHNLRYYQRLMAGLRKAIEEGKLESFVTDFYQRQGRPVPPLNVD

SEQ ID NO: 56357 - protein, 375 aa, Klebsiella oxytoca
  misc_feature (1)..(375): tr|A0A168KQX1|A0A168KQX1_KLEOX Queuine tRNA-ribosyltran sferase OS=Klebsiella oxytoca OX=571 GN=tgt PE=3 SV=1
MKFELDTTDGRARRGRLVFERGVVETPAFMPVGTYGTVKGMTPEEVEATGAQIILGNTFHLWLRPGQEIMKLHGDLHDFMQWKGPILTDSGGFQVFSLGDIRKITEQGVHFRNPINGDPIFLDPEKSMEIQYDLGSDIVMIFDECTPYPADWDYAKRSMEMSLRWAKRSRDRFDGLGNKNALFGIIQGSVYEDLRDISVKGLVEIGFDGYAVGGLAVGEPKADMHRILEHVCPQIPADKPRYLMGVGKPEDLVEGVRRGIDMFDCVMPTRNARNGHLFVTDGVVKIRNAKHKSDTSPLDAECDCYTCRNYSRAYLHHLDRCNEILGARLNTIHNLRYYQRLMAGLRKAIEEGKLESFVTDFYQRQGRTVPPLNVD

SEQ ID NO: 56358 - protein, 375 aa, Klebsiella pneumoniae
  misc_feature (1)..(375): tr|A0A378E4D4|A0A378E4D4_KLEPR Queuine tRNA-ribosyltran sferase OS=Klebsiella pneumoniae subsp. rhinoscleromati s OX=39831 GN=tgt PE=3 SV=1
MKFELDTTDGRARRGRLVFERGVVETPAFMPVGTYGTVKGMTPEEVEATGAQIILGNTFHLWLRPGQEIMKLHGDLHDFMQWKGPILTDSGGFQVFSLGDIRKITEQGVHFRNPINGDPIFLDPEKSMEIQYDLGSDIVMIFDECTPYPADWDYAKRSMEMSLRWAKRSRDRFDSLGNKNALFGIIQGSVYEDLRDISVKGLVEIGFDGYAVGGLAVGEPKEDMHRILEHVCPQIPADKPRYLMGVGKPEDLVEGVRRGIDMFDCVMPTRNARNGHLFVTDGVVKIRNAKHKSDTAPLDAECYCYTCRNYSRAYLHHLDRCNEILGARLNTIHNLRYYQRLMAGLRKAIEEGKLESFVTDFYQRQGRTVPPLNVD

SEQ ID NO: 56359 - protein, 375 aa, Klebsiella pneumoniae; identical to SEQ ID NO: 56351
  misc_feature (1)..(375): sp|A6T5D8|TGT_KLEP7 Queuine tRNA-ribosyltransferase OS= Klebsiella pneumoniae subsp. pneumoniae (strain ATCC 70 0721 / MGH 78578) OX=272620 GN=tgt PE=3 SV=1

SEQ ID NO: 56360 - protein, 375 aa, Klebsiella quasipneumoniae
  misc_feature (1)..(375): tr|A0A2A5MK59|A0A2A5MK59_9ENTR Queuine tRNA-ribosyltran sferase OS=Klebsiella quasipneumoniae OX=1463165 GN=tgt PE=3 SV=1
MKFELDTTDGRARRGRLVFERGVVETPAFMPVGTYGTVKGMTPEEVEATGAQIILGNTFHLWLRPGQEIMKLHGDLHDFMQWKGPILTDSGGFQVFSLGDIRKITEQGVHFRNPINGDPIFLDPEKSMEIQYDLGSDIVMIFDECTPYPADWDYAKRSMEMSLRWAKRSRDRFDSLGNKNALFGIIQGSVYEDLRDISVKGLVEIGFDGYAVGGLAVGEPKEDMHRILEHVCPQIPADKPRYLMGVGKPEDLVEGVRRGIDMFDCVMPTRNARNGHLFVTDGVVKIRNSKHKSDTAPLDAECDCYTCRNYSRAYLHHLDRCNEILGARLNTIHNLRYYQRLMAGLRKAIEEGKLESFVTDFYQRQGRTVPPLNVD

SEQ ID NO: 56361 - protein, 375 aa, Klebsiella quasipneumoniae; identical to SEQ ID NO: 56351
  misc_feature (1)..(375): tr|A0A5C6IL39|A0A5C6IL39_9ENTR Queuine tRNA-ribosyltran sferase OS=Klebsiella quasipneumoniae subsp. similipneu moniae OX=1463164 GN=tgt PE=3 SV=1

SEQ ID NO: 56362 - protein, 375 aa, Klebsiella quasivariicola; identical to SEQ ID NO: 56351
  misc_feature (1)..(375): tr|A0A223UFD7|A0A223UFD7_9ENTR Queuine tRNA-ribosyltran sferase OS=Klebsiella quasivariicola OX=2026240 GN=tgt PE=3 SV=1

SEQ ID NO: 56363 - protein, 375 aa, Klebsiella sp.; identical to SEQ ID NO: 56351
  misc_feature (1)..(375): tr|A0A3G5D758|A0A3G5D758_9ENTR Queuine tRNA-ribosyltran sferase OS=Klebsiella sp. P1CD1 OX=2267618 GN=tgt PE=3 SV=1

SEQ ID NO: 56364 - protein, 375 aa, Klebsiella sp.
  misc_feature (1)..(375): tr|J6HZK5|J6HZK5_9ENTR Queuine tRNA-ribosyltransferase OS=Klebsiella sp. OBRC7 OX=936565 GN=tgt PE=3 SV=1
MKFELDTTDGRARRGRLVFERGVVETPAFMPVGTYGTVKGMTPEEVEATGAQIILGNTFHLWLRPGQEIMKLHGDLHDFMQWKGPILTDSGGFQVFSLGDIRKITEQGVHFRNPINGDPIFLDPEKSMEIQYDLGSDIVMIFDECTPYPADWDYAKRSMEMSLRWAKRSRDRFDGLGNKNALFGIIQGSVYEDLRDISVKGLVEIGFDGYAVGGLAVGEPKEDMHRILEHVCPQIPTDKPRYLMGVGKPEDLVEGVRRGIDMFDCVMPTRNARNGHLFVTDGVVKIRNAKHKSDTSPLDAECDCYTCRNYSRAYLHHLDRCNEILGARLNTIHNLRYYQRLMAGLRKAIEEGKLESFVTDFYQRQGRTVPPLNVD

SEQ ID NO: 56365 - protein, 155 aa, Klebsiella variicola
  misc_feature (1)..(155): tr|A0A2N5AI33|A0A2N5AI33_KLEVA tRNA guanosine(34) trans glycosylase Tgt (Fragment) OS=Klebsiella variicola OX=2 44366 GN=tgt PE=4 SV=1
MKFELDTTDGRARRGRLVFERGVVETPAFMPVGTYGTVKGMTPEEVEATGAQIILGNTFHLWLRPGQEIMKLHGDLHDFMQWKGPILTDSGGFQVFSLGDIRKITEQGVHFRNPINGDPIFLDPEKSMEIQYDLGSDIVMIFDECTPYPADWDYA

SEQ ID NO: 56366 - protein, 375 aa, Klebsiella variicola; identical to SEQ ID NO: 56351
  misc_feature (1)..(375): tr|A0A264C188|A0A264C188_KLEVA Queuine tRNA-ribosyltran sferase OS=Klebsiella variicola OX=244366 GN=tgt PE=3 S V=1

SEQ ID NO: 56367 - protein, 375 aa, Kluyvera ascorbata
  misc_feature (1)..(375): tr|A0A378GPJ4|A0A378GPJ4_9ENTR Queuine tRNA-ribosyltran sferase OS=Kluyvera ascorbata OX=51288 GN=tgt PE=3 SV=1
MKFELDTTDGRARRGRLVFDRGVVETPAFMPVGTYGTVKGMTPEEVEATGAQIILGNTFHLWLRPGQEIMKLHGDLHDFMQWKGPILTDSGGFQVFSLGDIRKITEQGVHFRNPINGDPIFLDPEKSMEIQYDLGSDIVMIFDECTPYPADWDYAKRSMEMSLRWAKRSRDRFDGIGNKNALFGIIQGSVYEDLRDISVKGLVEIGFDGYAVGGLAVGEPKEDMHRILEHVCPQIPADKPRYLMGVGKPEDLVEGVRRGIDMFDCVMPTRNARNGHLFVTDGVVKIRNAKHKSDTSTLDAECDCYTCRNYSRAYLHHLDRCNEILGARLNTIHNLRYYQRLMAGLRKAIEEGKLESFVTDFYQRQGRTVPPLNVD

SEQ ID NO: 56368 - protein, 375 aa, Kluyvera ascorbata
  misc_feature (1)..(375): tr|A0A3N2SF77|A0A3N2SF77_9ENTR Queuine tRNA-ribosyltran sferase OS=Kluyvera ascorbata OX=51288 GN=tgt PE=3 SV=1
MKFELDTTDGRARRGRLVFDRGVVETPAFMPVGTYGTVKGMTPEEVEATGAQIILGNTFHLWLRPGQEIMKLHGDLHDFMQWKGPILTDSGGFQVFSLGDIRKITEQGVHFRNPINGDPIFLDPEKSMEIQYDLGSDIVMIFDECTPYPADWDYAKRSMEMSLRWAKRSRDRFDGLGNKNALFGIIQGSVYEDLRDISVKGLVEIGFDGYAVGGLAVGEPKEDMHRILEHVCPQIPADKPRYLMGVGKPEDLVEGVRRGIDMFDCVMPTRNARNGHLFVTDGVVKIRNAKHKSDTSTLDAECDCYTCRNYSRAYLHHLDRCNEILGARLNTIHNLRYYQRLMAGLRKAIEEGKLESFVTDFYQRQGRTVPPLNVD

SEQ ID NO: 56369 - protein, 375 aa, Kluyvera cryocrescens
  misc_feature (1)..(375): tr|A0A2X3EDV4|A0A2X3EDV4_KLUCR Queuine tRNA-ribosyltran sferase OS=Kluyvera cryocrescens OX=580 GN=tgt PE=3 SV= 1
MKFELDTTDGRARRGRLVFDRGVVETPAFMPVGTYGTVKGMTPEEVEATGAQIILGNTFHLWLRPGQEIMKLHGDLHDFMQWKGPILTDSGGFQVFSLGDIRKITEQGVHFRNPINGDPIFLDPEKSMEIQYDLGSDIVMIFDECTPYPADWDYAKRSMEMSLRWAKRSRDRFDGLGNKNALFGIIQGSVYEDLRDISVKGLVDIGFDGYAVGGLAVGEPKEDMHRILEHVCPQIPADKPRYLMGVGKPEDLVEGVRRGIDMFDCVMPTRNARNGHLFVTDGVVKIRNAKHKSDTSTLDAECDCYTCRNYSRAYLHHLDRCNEILGARLNTIHNLRYYQRLMAGLRKAIEEGKLESFVTDFYQRQGRTVPPLNVD

SEQ ID NO: 56370 - protein, 375 aa, Kluyvera georgiana; identical to SEQ ID NO: 53884
  misc_feature (1)..(375): tr|A0A248KJF3|A0A248KJF3_9ENTR Queuine tRNA-ribosyltran sferase OS=Kluyvera georgiana OX=73098 GN=tgt PE=3 SV=1

SEQ ID NO: 56371 - protein, 375 aa, Kluyvera georgiana; identical to SEQ ID NO: 53884
  misc_feature (1)..(375): tr|A0A1B7JIR9|A0A1B7JIR9_9ENTR Queuine tRNA-ribosyltran sferase OS=Kluyvera georgiana ATCC 51603 OX=1354264 GN= tgt PE=3 SV=1

SEQ ID NO: 56372 - protein, 375 aa, Kluyvera intermedia
  misc_feature (1)..(375): tr|A0A1X0X5M6|A0A1X0X5M6_KLUIN Queuine tRNA-ribosyltran sferase OS=Kluyvera intermedia OX=61648 GN=tgt PE=3 SV= 1
MKFELDTTDGRARRGRLVFDRGVVETPAFMPVGTYGTVKGMTPEEVEATGAQIILGNTFHLWLRPGQEIMKLHGDLHDFMQWKGPILTDSGGFQVFSLGDIRKITEKGVHFRNPINGDPIFLDPEKSMEIQYDLGSDIVMIFDECTPYPADWDYAKRSMEMSLRWAKRSRDRFDSLENPNALFGIIQGSVYEDLRDISVKGLVEIGFDGYAVGGLAVGEPKEDMHRILEHVCPQIPADKPRYLMGVGKPEDLVEGVRRGIDMFDCVMPTRNARNGHLFVTNGVVKIRNAKYKSDTGSLDPECDCYTCRNYSLAYLHHLDRCNEILGARLNTIHNLRYYQRLMAGLRKAIEEGKLESFVTDFYQRQGRDVPPLNVA

SEQ ID NO: 56373 - protein, 375 aa, Kluyvera intermedia
  misc_feature (1)..(375): tr|A0A447MKJ2|A0A447MKJ2_KLUIN Queuine tRNA-ribosyltran sferase OS=Kluyvera intermedia OX=61648 GN=tgt PE=3 SV= 1
MKFELDTTDGRARRGRLVFDRGVVETPAFMPVGTYGTVKGMTPEEVKDTGAQIILGNTFHLWLRPGQEIMKLHGDLHDFMQWKGPILTDSGGFQVFSLGHIRKITEQGVHFRNPINGDQIFLDPEKSMEIQYDLGSDVVMIFDECTPYPADWDYAKRSMEMSLRWAKRSRDRFDDLGNKNALFGIIQGGVYEDLRDISVKGLVDIGFDGYAVGGLAVGEPKADMHRILEHVCPQIPADKPRYLMGVGKPEDLVEGVRRGIDMFDCVMPTRNARNGHLFVTDGVVKIRNAKHKSDTSTLDAECDCYTCRNYSRAYLHHLDRCNEILGARLNTIHNLRYYQRLMAGLRKAIEEGKLESFVTDFYQRQGRTVPPLNVD

SEQ ID NO: 56374 - protein, 375 aa, Kluyvera sp.
  misc_feature (1)..(375): tr|A0A2T3XBM9|A0A2T3XBM9_9ENTR Queuine tRNA-ribosyltran sferase OS=Kluyvera sp. Nf5 OX=2116543 GN=tgt PE=3 SV=1
MKFELDTTDGRARRGRLVFDRGVVETPAFMPVGTYGTVKGMTPEEVEATGAQIILGNTFHLWLRPGQEIMKLHGDLHDFMQWKGPILTDSGGFQVFSLGDIRKITEKGVHFRNPINGDPIFLDPEKSMEIQYDLGSDIVMIFDECTPYPADWDYAKRSMEMSLRWAKRSRDRFDSLENPNALFGIIQGSVYEDLRDISVKGLVEIGFDGYAVGGLAVGEPKADMHRILEHVCPQIPADKPRYLMGVGKPEDLVEGVRRGIDMFDCVMPTRNARNGHLFVTNGVVKIRNAKYKSDTGSLDPECDCYTCRNYSLAYLHHLDRCNEILGARLNTIHNLRYYQRLMAGLRKAIEEGKLESFVTDFYQRQGRDVPPLNVA

SEQ ID NO: 56375 - protein, 432 aa, Kocuria flava
  misc_feature (1)..(432): tr|A0A2N4T188|A0A2N4T188_9MICC Queuine tRNA-ribosyltran sferase OS=Kocuria flava OX=446860 GN=tgt PE=3 SV=1
MCSSPQTAPALPSARSAFGFEVGHRLEDTAAVPGERAAANGGRFGGRTGTITTPHGTIATPAFVPVGTQATVKAVLPEAMKELGAQALLANAYHLYLQPGAEVLDAAGGLGAFMNWDGPTFTDSGGFQVMSLGAGFKKVIDMSGAGAAGDDDVAAGKERLAHVDDDGVTFKSHLNGDLHRFTPEISMQVQHRLGADVMFAFDELTTLHNSRGYQEASLERTRRWALRCAAEHARLTRERAGKPYQALFGVVQGAQYEDLRRRACRDLAAMDFDGYGIGGALEKENLGTIVRWCTEELPEDRPRHLLGISEPDDIFTALENGVDTFDCVSPTRVGRTGAVYTPDGRFNVNTARFRTDFSPVFEGCDCYTCTHYTRAYLHHLFKAKERLSATLTSIHNERFIVRMVDGARAAMADGTYFDYRDEVLGRYYAGRA

SEQ ID NO: 56376 - protein, 432 aa, Kocuria flava
  misc_feature (1)..(432): tr|A0A0U3G5S4|A0A0U3G5S4_9MICC Queuine tRNA-ribosyltran sferase OS=Kocuria flava OX=446860 GN=tgt PE=3 SV=1
MSSSPQTAPALPSARSAFGFEVGHRLEDTAAVPGERAAANGGRFGGRTGTITTPHGTIATPAFVPVGTQATVKAVLPEAMKELGAQALLANAYHLYLQPGAEVLDAAGGLGAFMNWDGPTFTDSGGFQVMSLGAGFKKVIDMSGAGAAGDDDVAAGKERLAHVDDDGVTFKSHLNGDLHRFTPEISMQVQHRLGADVMFAFDELTTLHNSRGYQEASLERTRRWALRCVAEHARLTGERAGKPYQALFGVVQGAQYEDLRRRACRDLAAMDFDGYGIGGALEKENLGTIVRWCTEELPEDRPRHLLGISEPDDIFTALENGVDTFDCVSPTRVGRTGAVYTPDGRFNVNTARFRTDFSPVFEGCDCYTCTHYTRAYLHHLFKAKERLSATLTSIHNERFIVRMVDGARAAMADGTYFDYRDEVLGRYYAGRA

SEQ ID NO: 56377 - protein, 437 aa, Kocuria indica
  misc_feature (1)..(437): tr|A0A1X7EEJ0|A0A1X7EEJ0_9MICC Queuine tRNA-ribosyltran sferase OS=Kocuria indica OX=1049583 GN=tgt PE=3 SV=1
MVSSTESPSPFTFRLHTRLRDSPVPQQRIRDNGGQFQARTGTITTPHGPIRTPAFIPVATQAAVKAVLPESMAAEGAQAMLANAYHLFLEPGDDILDAAGGLGTFMNWPGPTFTDSGGFQVMSLGSGLGKVIDMSALTPSPGGAQPAPGHKRMARVDDDGVWFRSYLNGDLHRFTPEVSMRVQHNIGADIMFAFDELTTLHDSREYQEDALERTRKWALRCVAEHCRLTEARADKPYQALFGVIQGAQYEDLRRMACRDLAEMGFDGFGIGGALEKRQLGTIVRWCTEELPEETPKHLLGISEPDDIFTAIDNGVDTFDCVSPTRVARSSAVYSPDGRFNLTNIRFKRDFTPISDTCPCYTCAHYTRAYLRHLFKAKERNAATLASIHNERFILDLVSGARDAIDAGTYFDYRDDFLARYYGAPSTSTVPSETGGPR

SEQ ID NO: 56378 - protein, 436 aa, Kocuria indica
  misc_feature (1)..(436): tr|A0A4P6RNB0|A0A4P6RNB0_9MICC Queuine tRNA-ribosyltran sferase OS=Kocuria indica OX=1049583 GN=tgt PE=3 SV=1
MSSTESPSPFTFRLHTRLRDSPVPQQRIRDNGGQFQARTGTITTPHGPIRTPAFIPVATQAAVKAVLPESMAAEGAQAMLANAYHLFLEPGDDILEAAGGLGTFMNWPGPTFTDSGGFQVMSLGSGLGKVIDMSAFTPSPGGAQPAPGHKRMARVDDDGVWFRSYLNGDLHRFTPEVSMRVQHNIGADIMFAFDELTTLHDSREYQEDALERTRKWALRCVAEHCRLTEARADKPYQALFGVIQGAQYEDLRRMACRDLAEMGFDGFGIGGALEKRQLGTIVRWCTEELPEETPKHLLGISEPDDIFTAIDNGVDTFDCVSPTRVARSSAVYSPDGRFNLTNIRFKRDFTPISDTCPCYTCAHYTRAYLRHLFKAKERNAATLASIHNERFILDLVSGARDAIDAGTYFDYRDDFLARYYGAPSTSTVPSETGGPR

SEQ ID NO: 56379 - protein, 440 aa, Kocuria palustris
  misc_feature (1)..(440): tr|A0A0X3QCQ3|A0A0X3QCQ3_9MICC Queuine tRNA-ribosyltran sferase OS=Kocuria palustris OX=71999 GN=tgt PE=3 SV=1
MDSEQTPAPKPHPLSGRDSFSFRVRTRLTETVAQPPRTDPHGDPEPPWLGRTGEITTPHGTIRTPAFIPVATAATVKAVLPEAMKELGAQALLANAYHLYLRPGHDLLDEAGGLGRFMNWDGPTFTDSGGFQVMSLGSGFKKVIDMDGPSPKGPVGDDDVAEGKERLANVDDDGVTFISHLNGDKHRFTPEVSMQVQHGIGADIMFAFDELTTLHNSRGYQERALERTRLWALRCLEEHDRLTRARQHRPYQALFGVIQGAQYEDLRRQASRDLGAMDFDGYGIGGALEKKNLGTIVGWCAEELPEDRPRHLLGISEPDDIFVALEAGADTFDCVSPTRVARTGACYHPKGRFNLPAARFKRDFRPIDEDCDCYTCAHYTRAYIHHLFKAKERVAATLASIHNERFTVRLVDRAREAMEDGSYLAYRDATLADYYSGDHP

SEQ ID NO: 56380 - protein, 440 aa, Kocuria palustris
  misc_feature (1)..(440): tr|M2XXA4|M2XXA4_9MICC Queuine tRNA-ribosyltransferase OS=Kocuria palustris PEL OX=1236550 GN=tgt PE=3 SV=1
MDSEQTPAPKPHPLSGRDSFSFRVRTRLTETVAQPPRTDPHGDPEPPWLGRTGEITTPHGTIRTPAFIPVATAATVKAVLPEAMKELGAQALLANAYHLYLRPGHDLLDEAGGLGRFMNWDGPTFTDSGGFQVMSLGSGFKKVIDMDGPSPKGPVGDDDVAEGKERLANVDDDGVTFISHLNGDKHRFTPEVSMQVQHGIGADIMFAFDELTTLHNSRGYQERALERTRLWALRCLEEHDRLTRARPHRPYQALFGVIQGAQYEDLRRQASRGLGAMDFDGYGIGGALEKKNLGTIVGWCAEELPEDRPRHLLGISEPDDIFVALEAGADTFDCVSPTRVARTGACYHPKGRFNLPAARFKRDFRPIDEDCDCYTCTHYTRAYVHHLFKAKERVAATLASIHNERFTVRLVDRAREAMEDGSYLAYRDATLADYYSGGHP

SEQ ID NO: 56381 - protein, 426 aa, Kocuria polaris
  misc_feature (1)..(426): tr|A0A0A6VQ36|A0A0A6VQ36_9MICC Queuine tRNA-ribosyltran sferase OS=Kocuria polaris OX=136273 GN=tgt PE=3 SV=1
MLPAAARSDFGFAVEHRLAETATIAGGRLEANGGPFLGRTGTITTPHGTIRTPAFVPVGTAATVKAVLPESMAELGAQALLANAYHLYLQPGADVLDAAGGLGAFMNWSGPTFTDSGGFQVMSLGSGFRKVIDMSTVAASAAGDDDVATGKERMARVDDDGVTFTSHINGDVHRFTPEISMQVQHRLGADIMFAFDELTTLHNSRGYQETSLERTRRWALRCVAEHARLTEERADRPYQALFGVIQGAQYEDLRRKACRDLGAMDFDGFGIGGALEKENLGTIVRWCNEELPEDRPRHLLGISEPDDIFTALENGADTFDCVSPTRVARTGAVYAPDGRFTVSNARFRTDLAPIDSGCDCYTCAHYTRAYLHHLFKAKERLSATLTSIHNERFVVRMVDGAREAMADGTYFEYRDEVLGRYYAGRS

SEQ ID NO: 56382 - protein, 430 aa, Kocuria polaris
  misc_feature (1)..(430): tr|A0A0W8IJK8|A0A0W8IJK8_9MICC Queuine tRNA-ribosyltran sferase OS=Kocuria polaris OX=136273 GN=tgt PE=3 SV=1
MPAPEKTLPPTAARAAFGFEPEHRLADTAPAPRGRAGGGGPFLGRTGTITTPHGTIRTPAFVPVGTAATVKAVLPESMAELGAQALLANAYHLYLQPGADVLDAAGGLGSFMNWSGPTFTDSGGFQVMSLGSGFRKVIDMSTAATAGDDDVATGKERLARVDDDGVTFRSHINGDVHRFTPEISMQVQHRLGADVMFAFDELTTLHNSRGYQESSLERTRRWAQRCVTEHVRLTEERADRPYQALFGVIQGAQYEDLRRKACRDLGAMDFDGFGIGGALEKENLGTIVRWCSEELPEDRPRHLLGISEPDDIFTALENGVDTFDCVSPTRVARSGTVYAPDGRFTVSNARFRTDLAPIDAGCDCYTCTHYTRAYLHHLFKAKERLSATLTSIHNERFVVRMVDGAREAMADGTWVEYRDEVLGRYYAGRS

SEQ ID NO: 56383 - protein, 428 aa, Kocuria rhizophila
  misc_feature (1)..(428): tr|A0A2I1P0Y8|A0A2I1P0Y8_KOCRH Queuine tRNA-ribosyltran sferase OS=Kocuria rhizophila OX=72000 GN=tgt PE=3 SV=1
MPISDPTPPFSFELHTRLRDSPSLPEERVRENGGQFQARTGTITTPHGQIQTPAFIPVATQAAMKAVLPESMAAEGAQAMLANAYHLFLEPGDDVLDEAGGLSTFMNWPGPTFTDSGGFQVMSLGSGLGKVIDMSTVANPLGDSQMAPGQKRMARVDDDGVWFRSYLNGDLHRFTPEVSMRVQHNIGADIMFAFDELTTLHNTREYQETALERTRKWALRCVAEHRRLTEERAHKPYQALFGVIQGAQYEDLRRRACRDLSEMGFDGFGIGGALEKSQLGTIVRWCTEELPENTPKHLLGISEPDDIFTAIDNGVDTFDCVSPTRVARSSAVYTPTGRVNLTNIRFKRDFTPISDTCPCYTCTHYTRAYLRHLFKSKERNAATLASIHNERFVLDLVAGARAAIEADTYFEYRDEFLGTYYGTVQPTA

SEQ ID NO: 56384 - protein, 454 aa, Kocuria rhizophila
  misc_feature (1)..(454): tr|B2GFG5|B2GFG5_KOCRD Queuine tRNA-ribosyltransferase OS=Kocuria rhizophila (strain ATCC 9341 / DSM 348 / NBR C 103217 / DC2201) OX=378753 GN=tgt PE=3 SV=1
MAPSGVVPASARARDPCGRRTRHNGRVPTTDSVPPFSFELHTRLRDSPTLPEERVRENGGQFQARTGTITTPHGQIRTPAFIPVATQAAMKAVLPESMAAEGAQAMLANAYHLFLEPGDDVLDEAGGLGTFMNWPGPTFTDSGGFQVMSLGSGLGKVIDMSTVANPLGDSQMAPGQKRMARVDDDGVWFRSYLNGDLHRFTPEVSMRVQHNIGADIMFAFDELTTLHNTREYQETALERTRKWALRCVAEHRRLTEERAHKPYQALFGVIQGAQYEDLRRQACRDLSEMGFDGFGIGGALEKSQLGTIVRWCTEELPENTPKHLLGISEPDDIFTAIDNGVDTFDCVSPTRVARSSAVYSPTGRFNLTNIRFKRDFTPISDTCPCYTCTHYTRAYLRHLFKSKERNAATLASIHNERFVLDLVAGARAAIETDTYFEYRDEFLGTYYGTARPTA

SEQ ID NO: 56385 - protein, 439 aa, Kocuria rosea
  misc_feature (1)..(439): tr|A0A543P656|A0A543P656_KOCRO Queuine tRNA-ribosyltran sferase OS=Kocuria rosea OX=1275 GN=tgt PE=3 SV=1
MTHNGRVPAPEETLLPAAARSDFGFAVEHRLAETATIAGGRLEANGGPFLGRTGTITTPHGTIRTPAFVPVGTAATVKAVLPESMAELGAQALLANAYHLYLQPGADVLDAAGGLGAFMNWSGPTFTDSGGFQVMSLGSGFRKVIDMSTVAASAAGDDDVATGKERMARVDDDGVTFTSHINGDVHRFTPEISMQVQHRLGADIMFAFDELTTLHNSRGYQETSLERTRRWALRCVAEHARLTEERADRPYQALFGVIQGAQYEDLRRKACRDLGAMDFDGFGIGGALEKENLGTIVRWCNEELPEDRPRHLLGISEPDDIFTALENGADTFDCVSPTRVARTGTVYAPDGRFTVSNARFRTDLAPIDSGCDCYTCAHYTRAYLHHLFKAKERLSATLTSIHNERFVVRMVDGAREAMADGTYFEYRDEVLGRYYAGRS

SEQ ID NO: 56386 - protein, 439 aa, Kocuria rosea
  misc_feature (1)..(439): tr|A0A378GX25|A0A378GX25_KOCRO Queuine tRNA-ribosyltran sferase OS=Kocuria rosea OX=1275 GN=tgt PE=3 SV=1
MTHNGRVPAPEETLLPAAARSDFGFAVEHRLAETATIAGGRLEANGGPFLGRTGTITTPHGTIRTPAFVPVGTAATVKAVLPESMAELGAQALLANAYHLYLQPGADVLDAAGGLGAFMNWSGPTFTDSGGFQVMSLGSGFRKVIDMSTVAASAAGDDDVATGKERMARVDDDGVTFTSHINGDVHRFTPEISMQVQHRLGADIMFAFDELTTLHNSRGYQETSLERTRRWALRCVAEHARLTEERADRPYQALFGVIQGAQYEDLRRKACRDLGAMDFDGFGIGGALEKENLGTIVRWCNEELPEDRPRHLLGISEPDDIFTALENGADTFDCVSPTRVARTGAVYAPDGRFTVSNARFRTDLAPIDSGCDCYTCAHYTRAYLHHLFKAKERLSATLTSIHNERFVVRMVDGAREAMADGTYFEYRDEVLGRYYAGRS

SEQ ID NO: 56387 - protein, 437 aa, Kocuria sp.
  misc_feature (1)..(437): tr|A0A1A0JH45|A0A1A0JH45_9MICC Queuine tRNA-ribosyltran sferase OS=Kocuria sp. ICS0012 OX=1834155 GN=tgt PE=3 S V=1
MVSSTESPSPFTFRLHTRLRDSPVPQQRIRDNGGQFQARTGTITTPHGPIRTPAFIPVATQAAVKAVLPESMAAEGAQAMLANAYHLFLEPGDDILDAAGGLGTFMNWPGPTFTDSGGFQVMSLGSGLGKVIDMSALTPSPGGAQPAPGHKRMARVDDDGVWFRSYLNGDLHRFTPEVSMRVQHNIGADIMFAFDELTTLHDSREYQEDALERTRKWALRCVAEHCRLTEARAEKPYQALFGVIQGAQYEDLRRMACRDLAKMGFDGFGIGGALEKRQLGTIVRWCTEELPEETPKHLLGISEPDDIFTAIDNGVDTFDCVSPTRVARSSAVYSPDGRFNLTNIRFKRDFTPISDTCPCYTCTHYTRAYLRHLFKAKERNAATLASIHNERFILDLVSGARDAIDAGTYFDYRDDFLARYYGAPSTSPVPSETGGPR

SEQ ID NO: 56388 - protein, 441 aa, Kocuria sp.
  misc_feature (1)..(441): tr|A0A433GXY8|A0A433GXY8_9MICC Queuine tRNA-ribosyltran sferase OS=Kocuria sp. HSID16901 OX=2419505 GN=tgt PE=3 SV=1
MGRVPNTTFPNPQFGFTVGSRLSETAGNDSSRAARSRNDGGEFLGRTGVMTTPHGEIQTPAFIPVGTKATVKAVLPEAMSQLGSQALLANAYHLYLQPGPDVLDAAGGLGRFMNWNGPTFTDSGGFQVMSLGSGFKKVIDMGTVSGATGADGRPVGDDDVAAGKERMAHIDDDGVTFKSHLNGDLHRFSPEVSMSVQHRIGADVMFAFDELTTLYNSRGYQEQALERTRLWALRCIDEHQRLTQERSDKPYQALFGVIQGAQYEDLRRKACRDLGDMEFDGFGLGGALEKENLGTIVRWCNEELPDNKPRHLLGISEPDDIFVALENGADTFDCVSPTRVARTAAVYSPDGRFNVSNARFKTDFTPIYEGCDCYTCTHYTKAYLHHLFKAKERLAATLASIHNERFIVRMVDTARDTIASGEYFQYRDEFLGRYYAGKAKK

SEQ ID NO: 56389 - protein, 437 aa, Kocuria turfanensis
  misc_feature (1)..(437): tr|A0A512IA36|A0A512IA36_9MICC Queuine tRNA-ribosyltran sferase OS=Kocuria turfanensis OX=388357 GN=tgt PE=3 SV =1
MPTPAPSSPSAPPSSAGRAAFGFEVEHRLEETTRATGSRVAADGGPFLGRTGTISTPHGQIRTPAFVPVGTAATVKAVLPESMAELGAQALLANAYHLYLQPGAEVLDAAGGLGAFMNWDGPTFTDSGGFQVMSLGSGFKKVIDMSTAASSAAGDDDVVTGKERMARVDDDGVTFTSHINGDVHRFTPEISMQVQHRLGADIMFAFDELTTLHNSRGYQETSLERTRRWARRCVAEHARLTEERADRPYQALFGVIQGAQYEDLRRKACRDLGAMDFDGFGIGGALEKENLGTIVRWCSEELPEDRPRHLLGISEPDDIFTALENGVDTFDCVSPTRVARTGAVYGPDGRFTVSNARFRTDFSPVQEGCDCYTCTHYTRAYLHHLFKAKERLSATLASIHNERFVVRMVDGARQAMADGTYVEYRDEVLGRYYAHRG

SEQ ID NO: 56390 - protein, 428 aa, Kocuria tytonicola
  misc_feature (1)..(428): tr|A0A3L9L588|A0A3L9L588_9MICC Queuine tRNA-ribosyltran sferase OS=Kocuria tytonicola OX=2055946 GN=tgt PE=3 SV =1
MPTTEPTPPFSFELHTRLRDSPSVPPERVAENGGQFQARTGTITTPHGQIRTPAFIPVATQAAVKAVLPESMAAEGAQAMLANAYHLFLEPGDDVLDEAGGLSTFMNWPGPTFTDSGGFQVMSLGSGLGKVIDMSTVASPLGDSQMAPGQKRMARVDNDGVWFRSYLNGDLHRFTPEVSMRVQHNIGADIMFAFDELTTLHNTREYQEIALERTRQWALRCVAEHRRLTEERATKPYQALFGVIQGAQYEDFRRKACRDLSEMGFDGFGIGGALEKSQLGTIVRWCTEELPENTPKHLLGISEPDDIFTAIDNGVDTFDCVSPTRVARSSAVYTPTGRFNLTNIRFKRDFTPISDTCPCYTCTHYTRAYLRHLFKSKERNAATLASIHNERFVLDLVAGARTAIEAGDYFEYRDAFLGTYYGTTEPGA

SEQ ID NO: 56391 - protein, 428 aa, Kocuria varians
  misc_feature (1)..(428): tr|A0A4Y4D4E7|A0A4Y4D4E7_KOCVA Queuine tRNA-ribosyltran sferase OS=Kocuria varians OX=1272 GN=tgt PE=3 SV=1
MPISDPASPFRFELHTRLRDSPSVTAERVADNGGQFQARTGTITTPHGQIQTPAFIPVATQAAMKAVLPESMAAEGAQAMLANAYHLFLEPGDDVLDEAGGLGTFMNWPGPTFTDSGGFQVMSLGSGLGKVIDMSTVSGPLGDNHQAPGVKRMARVDDDGVWFRSYLNGDLHRFTPEVSMQVQHNIGADIMFAFDELTTLHNSREYQETALERTRQWALRCVAEHRRLTEERAAKPYQALFGVVQGAQYEDLRRKACRDLSGMGFDGFGIGGALEKAQLGTIVRWCTEELPERTPKHLLGISEPDDIFTAIDNGVDTFDCVSPTRVARSSAVYSPTGRFNLTNIRFKKDFTPISETCRCYTCTHYTRAYLRHLFKSKERNAATLASIHNERFVLDLVAGARAAIEAGDYFEYRDEFLGAYYGVAQPSS

SEQ ID NO: 56392 - protein, 386 aa, Komagataeibacter cocois
  misc_feature (1)..(386): tr|A0A365YZP8|A0A365YZP8_9PROT Queuine tRNA-ribosyltran sferase OS=Komagataeibacter cocois OX=1747507 GN=tgt PE =3 SV=1
MTAFRWRAQARSGHARAGYLDTAHGTVATPTFMPVGTVGTVKAMTMDAVRSTGAGIVLGNTYHLMLRPGAERVRALGGLHRFMDWPGPILTDSGGFQVMSLGPLRRLDADGVTFRSHIDGSEHRLTPERSTDIQHALDATISMCFDECPALPAPAEAIARSMRMSMRWAERCRAAFVPRPGYAQYGIIQGGTEPELRAESVRALTDIGFEGYAIGGLAVGEGQELMFSTLDVTVGLIPDDAPRYLMGVGTPDDLLGAVERGVDMFDCVMPTRAGRTARAYTERGTLNMRNARHATDSRPISPHCDCPACSRHSRAYLHHLFRTNEILGPMLLTWHNLSYYQRLMRGIRAAIVDGTLPEHAAHLRAQWAMEDWSPDEMPFPDIPPVP

SEQ ID NO: 56393 - protein, 386 aa, Komagataeibacter europaeus
  misc_feature (1)..(386): tr|A0A0M0EGC4|A0A0M0EGC4_KOMEU Queuine tRNA-ribosyltran sferase OS=Komagataeibacter europaeus OX=33995 GN=tgt P E=3 SV=1
MTTFRWRPEARAGHARAGWLDTAHGSVPTPTFMPVGTVGTVKAMTMDSVRSTGAGIVLGNTYHLMLRPGAERVRALGGLHRFMDWPGPILTDSGGFQVMSLGPLRKLDQDGVTFRSHIDGSKHRLTPERSTDIQYALDATISMCFDECPALPAAPDVIAKSMRMSMRWAERCRTAFVQRPGYAQYGIIQGGTEPELRAESVKALTGIGFEGYAIGGLAVGEGQELMFSTLESTVPLIPDASPRYLMGVGTPDDLLGAVERGVDMFDCVMPTRAGRTARAYTERGTLNLRNARHATDSRPISPHCDCLACSRHSRAYLHHLFRANEILGPMLLTWHNLAYYQRLMRGMRAAIVDGAFTAHADHLRAQWAMDDWSGDEMPFPDIPPVA

SEQ ID NO: 56394 - protein, 386 aa, Komagataeibacter europaeus; identical to SEQ ID NO: 56393
  misc_feature (1)..(386): tr|A0A0D6Q0S8|A0A0D6Q0S8_KOMEU Queuine tRNA-ribosyltran sferase OS=Komagataeibacter europaeus NBRC 3261 OX=1234 669 GN=tgt PE=3 SV=1

SEQ ID NO: 56395 - protein, 386 aa, Komagataeibacter hansenii
  misc_feature (1)..(386): tr|A0A318PY57|A0A318PY57_KOMHA Queuine tRNA-ribosyltran sferase OS=Komagataeibacter hansenii OX=436 GN=tgt PE=3 SV=1
MTAFRWRAQARSGQARAGYLETAHGTVPTPTFMPVGTVGTVKAMTMDAVRSTGAGIVLGNTYHLMLRPGAERVRALGGLHRFMDWPGPILTDSGGFQVMSLGPLRKLDADGVTFRSHIDGSRHRLTPERSTDIQHALDATISMCFDECPALPAPPETIAQSMRMSMRWAERCRTAFVARPGYAQYGIIQGGTEPELRAESVRALTDIGFEGYAIGGLAVGEGQELMFATLDATVGLIPQDAPRYLMGVGTPDDLLGAVERGVDMFDCVMPTRAGRTARAYTERGTLNLRNARHAADSRPISAHCDCLACSRHSRAYLHHLFRANEILGPMLLTWHNLAYYQRLMRGIRAAIVGDTLPEHAAHLRAQWAMEDWSPDEMPFPDIPPVP

SEQ ID NO: 56396 - protein, 386 aa, Komagataeibacter hansenii
  misc_feature (1)..(386): tr|D5QBB8|D5QBB8_KOMHA Queuine tRNA-ribosyltransferase OS=Komagataeibacter hansenii ATCC 23769 OX=714995 GN=tg t PE=3 SV=1
MTAFRWRAQARSGQARAGYLETAHGTVPTPTFMPVGTVGTVKAMTMDAVRSTGAGIVLGNTYHLMLRPGAERVRALGGLHRFMDWPGPILTDSGGFQVMSLGPLRKLDADGVTFRSHIDGSKHRLTPERSTDIQHALDATISMCFDECPALPAPPETIAQSMRMSMRWAERCRTAFVARPGYAQYGIIQGGTEPELRAESVRALTDIGFEGYAIGGLAVGEGQELMFSTLDATVGLIPQDAPRYLMGVGTPDDLLGAVERGVDMFDCVMPTRAGRTARAYTERGTLNLRNARHAADSRPISAHCDCLACSRHSRAYLHHLFRANEILGPMLLTWHNLAYYQRLMRGIRAAIVEDTLPEHAAHLRAQWAMEDWSPDEMPFPDIPPVP

SEQ ID NO: 56397 - protein, 386 aa, Komagataeibacter intermedius
  misc_feature (1)..(386): tr|A0A0N0MFX1|A0A0N0MFX1_9PROT Queuine tRNA-ribosyltran sferase OS=Komagataeibacter intermedius AF2 OX=1458464 GN=tgt PE=3 SV=1
MTTFRWRPEARAGHARAGWLDTAHGSVPTPTFMPVGTAGTVKAMTMDSVRATGAGIVLGNTYHLMLRPGAERVRALGGLHRFMDWPGPILTDSGGFQVMSLGPLRKLDQDGVTFRSHIDGSRHRLTPERSTDIQHALDATITMCFDECPALPAAPDVIAKSMRMSMRWAERCRTAFIQRPGYAQYGIIQGGTEPELRAESVRALTGIGFEGYAIGGLAVGEGQELMFATLDATVPLIPDASPRYLMGVGTPDDLLGSVERGVDMFDCVMPTRAGRTARAYTERGTLNLRNARHATDSRPISPHCDCLACSRHSRAYLHHLFRANEILGPMLLTWHNLAYYQRLMRGMRAAIVDGAFAAHADHLRAQWAMDDWSGDEMPFPDIPPVA

SEQ ID NO: 56398 - protein, 386 aa, Komagataeibacter maltaceti
  misc_feature (1)..(386): tr|A0A2S3W2N1|A0A2S3W2N1_9PROT Queuine tRNA-ribosyltran sferase OS=Komagataeibacter maltaceti OX=1203393 GN=tgt PE=3 SV=1
MTAFRWRAQARSGRARAGFLDTAHGTVATPTFMPVGTVGTVKAMTMDAVRSTGAGIVLGNTYHLMLRPGAERVRALGGLHRFMDWPGPILTDSGGFQVMSLGPLRKLDADGVTFRSHIDGSKHRLTPERSTDIQHALDATISMCFDECPALPAPPEVIAQSMRMSMRWAERCRTAFVARPGYAQYGIIQGGTEPDLRAESVRALTDIGFEGYAIGGLAVGEGQELMFSTLDVTVGLIPDDAPRYLMGVGTPDDLLGAVERGVDMFDCVMPTRAGRTARAYTERGTLNLRNARHATDSRPISPHCDCLACSRHSRAYLHHLFRANEILGPMLLTWHNLAYYQRLMRGIRAAIVDGTLPEHAAHLRAQWAMEDWSPDEMPFPDIPPVP

SEQ ID NO: 56399 - protein, 386 aa, Komagataeibacter medellinensis
  misc_feature (1)..(386): tr|G2I0K5|G2I0K5_KOMMN Queuine tRNA-ribosyltransferase OS=Komagataeibacter medellinensis (strain NBRC 3288 / B CRC 11682 / LMG 1693 / Kondo 51) OX=634177 GN=tgt PE=3 SV=1
MTAFRWRPEARNGHARAGWLDTAHGSVATPTFMPVGTVGTVKAMTMDSVRATGAGIVLGNTYHLMLRPGAERVRALGGLHRFMDWPGPILTDSGGFQVMSLGPLRKLDPDGVTFRSHIDGSKHRLTPERSTDIQHALDATISMCFDECPALPAAPEVIARSMRMSMRWAERCRTAFIQRPGYAQYGIIQGGTEPELRAESVRALTGIGFEGYAIGGLAVGEGQELMFATLDSTVPLIPDASPRYLMGVGTPDDLLGAVERGVDMFDCVMPTRAGRTARAYTERGTLNLRNARHATDSRPISPHCDCLACSRHSRAYLHHLFRANEILGPMLLTWHNLAYYQCLMRGMRATIVDGTFAAHAEHLRTQWAMDDWSGDEMPYPDFPPVP

SEQ ID NO: 56400 - protein, 386 aa, Komagataeibacter nataicola
  misc_feature (1)..(386): tr|A0A1U9RM17|A0A1U9RM17_9PROT Queuine tRNA-ribosyltran sferase OS=Komagataeibacter nataicola OX=265960 GN=tgt PE=3 SV=1
MTTFRWRPEARSGHARAGWLDTAHGTVATPTFMPVGTVGTVKAMTMDSVRSTGAGIVLGNTYHLMLRPGAERVRALGGLHRFMDWPGPILTDSGGFQVMSLGPLRKLDQDGVTFRSHIDGSKHRLTPERSTDIQYALDATISMCFDECPALPAAPEVIAKSMRMSMRWAGRCREAFVQRPGYAQYGIIQGGTEPELRAESVKALTGIGFEGYAIGGLAVGEGQELMFSTLEATVPLIPDGSPRYLMGVGTPDDLLGAVERGVDMFDCVMPTRAGRTARAYTERGTLNIRNARHASDSRPISPHCDCLACSRHSRAYLHHLFRANEMLGPMLLTWHNIAYYQRLMRGMRAAIVDGGFEAHATHLRAQWAMDDWSGDEMPFPDIPPVA

SEQ ID NO: 56401 - protein, 386 aa, Komagataeibacter oboediens
  misc_feature (1)..(386): tr|A0A318R066|A0A318R066_9PROT Queuine tRNA-ribosyltran sferase OS=Komagataeibacter oboediens OX=65958 GN=tgt P E=3 SV=1
MTTFRWRPEARAGHARAGWLDTAHGSVPTPTFMPVGTVGTVKAMTMDSVRSTGAGIVLGNTYHLMLRPGAERVRELGGLHRFMDWPGPILTDSGGFQVMSLGPLRKLDQDGVTFRSHIDGSKHRLTPERSTDIQHALDATITMCFDECPALPAAPEVIAKSMRMSMRWAERCRTVFIQRPGYAQYGIIQGGTEPELRAESVRALTGIGFEGYAIGGLAVGEGQELMFSTLESTVPLIPDASPRYLMGVGTPDDLLGSVERGVDMFDCVMPTRAGRTARAYTERGTLNLRNARHATDSRPISPHCDCLACSRHSRAYLHHLFRANEILGPMLLTWHNLAYYQRLMRGMRAAIVDGAFGAHADHLRAQWAMDDWSGDEMPFPDIPPVA

SEQ ID NO: 56402 - protein, 386 aa, Komagataeibacter pomaceti
  misc_feature (1)..(386): tr|A0A318QFQ7|A0A318QFQ7_9PROT Queuine tRNA-ribosyltran sferase OS=Komagataeibacter pomaceti OX=2021998 GN=tgt PE=3 SV=1
MTAFRWRAQARSGHARAGYLDTAHGTVATPTFMPVGTVGTVKAMTMDAVRSTGAGIVLGNTYHLMLRPGAERVRALGGLHRFMDWPGPILTDSGGFQVMSLGPLRRLDADGVTFRSHIDGSEHRLTPERSTDIQHALDATISMCFDECPALPAPAEAIARSMRMSMRWAERCRAAFVPRPGYAQYGIIQGGTEPELRAESVRALTDIGFEGYAIGGLAVGEGQDLMFSTLDVTVGLIPDDAPRYLMGVGTPDDLLGAVERGVDMFDCVMPTRAGRTARAYTERGTLNMRNARHATDSRPISPDCDCPACSRHSRAYLHHLFRTNEILGPMLLTWHNLAYYQRLMRGIRAAIVDGTLPEHAAHLRAQWAMEDWSPDEMPFPDIPPVP

SEQ ID NO: 56403 - protein, 386 aa, Komagataeibacter rhaeticus; identical to SEQ ID NO: 55696
  misc_feature (1)..(386): tr|A0A181C6X8|A0A181C6X8_9PROT Queuine tRNA-ribosyltran sferase OS=Komagataeibacter rhaeticus OX=215221 GN=tgt PE=3 SV=1

SEQ ID NO: 56404 - protein, 386 aa, Komagataeibacter rhaeticus; identical to SEQ ID NO: 55696
  misc_feature (1)..(386): tr|A0A070A370|A0A070A370_9PROT Queuine tRNA-ribosyltran sferase OS=Komagataeibacter rhaeticus AF1 OX=1432055 GN =tgt PE=3 SV=1

SEQ ID NO: 56405 - protein, 386 aa, Komagataeibacter saccharivorans
  misc_feature (1)..(386): tr|A0A347W9W3|A0A347W9W3_9PROT Queuine tRNA-ribosyltran sferase OS=Komagataeibacter saccharivorans OX=265959 GN =tgt PE=3 SV=1
MTSFRWRPEARAGHARAGWLDTAHGSVPTPTFMPVGTVGTVKAMTMDNVRSTGAGIVLGNTYHLMLRPGAERVRELGGLHRFMDWPGPILTDSGGFQVMSLGPLRKLDADGVTFRSHIDGSKHRLSPERSTDIQHALDATISMCFDECPALPAEADVIAKSMRLSMRWAERCRDAFVQRPGYAQYGIIQGGTEPELRAESVKALTGIGFEGYAIGGLAVGEGQELMFSTLDVTVPLIPDASPRYLMGVGTPDDLLGAVERGVDMFDCVMPTRAGRTARAYTERGTLNLRNARHATDSRPISPHCDCLACSRHSRAYLHHLFRANEILGPMLLTWHNLAYYQRLMRGMRAAIVDGGFTAHATHLRAQWALDDWSGDEMPFPDIPPVA

SEQ ID NO: 56406 - protein, 386 aa, Komagataeibacter sp.
  misc_feature (1)..(386): tr|A0A4P5P128|A0A4P5P128_9PROT Queuine tRNA-ribosyltran sferase OS=Komagataeibacter sp. MSKU15 OX=1932664 GN=tg t PE=3 SV=1
MTTFRWRPEARAGHARAGWLDTAHGSVPTPTFMPVGTVGTVKAMTMDSVRSTGAGIVLGNTYHLMLRPGAERVRALGGLHRFMDWPGPILTDSGGFQVMSLGPLRKLDQDGVTFRSHIDGSKHRLTPERSTDIQYALDATISMCFDECPALPAAPDVIAKSMRMSMRWAERCRTAFVQRPGYAQYGIIQGGTEPELRAESVKALTGIGFEGYAIGGLAVGEGQELMFSTLEATVPLIPDASPRYLMGVGTPDDLLGAVERGVDMFDCVMPTRAGRTARAYTERGTLNLRNARHATDSRPISPHCDCLACSRHSRAYLHHLFRANEILGPMMLTWHNLAYYQRLMRGMRAAIVDGAFAAHADHLRAQWAMDDWSGDEMPFPDIPPVA

SEQ ID NO: 56407 - protein, 386 aa, Komagataeibacter sp.; identical to SEQ ID NO: 56406
  misc_feature (1)..(386): tr|A0A4P5NVI8|A0A4P5NVI8_9PROT Queuine tRNA-ribosyltran sferase OS=Komagataeibacter sp. MSKU9 OX=1932662 GN=tgt PE=3 SV=1

SEQ ID NO: 56408 - protein, 386 aa, Komagataeibacter sucrofermentans
  misc_feature (1)..(386): tr|A0A318QFX5|A0A318QFX5_9PROT Queuine tRNA-ribosyltran sferase OS=Komagataeibacter sucrofermentans OX=1053551 GN=tgt PE=3 SV=1
MTTFSWRPEARCGHARAGWLDTAHGTVATPTFMPVGTVGTVKAMTMDSVRSTGAGIVLGNTYHLMLRPGAERVRELGGLHRFMDWPGPILTDSGGFQVMSLGPLRKLDPDGVTFRSHIDGSKHRLTPERSTDIQHALDATISMCFDECPALPAAPEVIAKSMRMSMRWAERCRTAFVQRPGYAQYGIIQGGTEPELRAESVKALTGIGFEGYAIGGLAVGEGQELMFSTLEATVPLIPDGSPRYLMGVGTPDDLLGAVERGVDMFDCVMPTRAGRTARAYTERGTLNIRNARHASDSRPISPHCDCLACSRHSRAYLHHLFRANEMLGPMLLTWHNIAYYQRLMRGMRAAIVDGTFEAHAAHLRAQWAMDDWSGDEMPFPDIPPVA

SEQ ID NO: 56409 - protein, 386 aa, Komagataeibacter swingsii
  misc_feature (1)..(386): tr|A0A2V4SD12|A0A2V4SD12_9PROT Queuine tRNA-ribosyltran sferase OS=Komagataeibacter swingsii OX=215220 GN=tgt P E=3 SV=1
MTTFRWRPEARAGHARAGWLDTAHGSVPTPTFMPVGTVGTVKAMTMDSVRSTGAGIVLGNTYHLMLRPGAERVRALGGLHRFMDWPGPILTDSGGFQVMSLGPLRKLDQDGVTFRSHIDGSKHRLTPERSTDIQHALDATISMCFDECPALPAAPDVIAKSMRMSMRWAERCRTAFVQRPGYAQYGIIQGGTEPELRAESVRALTGIGFEGYAIGGLAVGEGQDLMFSTLDSTVPLIPDSSPRYLMGVGTPDDLLGAVERGVDMFDCVMPTRAGRTARAYTERGTLNLRNARHATDSRPISPHCDCLACSRHSRAYLHHLFRANEILGPMLLTWHNLAYYQRLMRGMRAAIVDGAFTAHAGHLRAEWAMDDWSGDEMPFPDIPPVA

SEQ ID NO: 56410 - protein, 386 aa, Komagataeibacter xylinus
  misc_feature (1)..(386): tr|A0A318PLM8|A0A318PLM8_KOMXY Queuine tRNA-ribosyltran sferase OS=Komagataeibacter xylinus OX=28448 GN=tgt PE= 3 SV=1
MTTFRWRPEARSGHARAGWLDTAHGTVATPTFMPVGTVGTVKAMTMDSVRSTGAGIVLGNTYHLMLRPGAERVRQLGGLHRFMDWPGPILTDSGGFQVMSLGPLRKLDQDGVTFRSHIDGSKHRLTPERSTDIQHALDATISMCFDECPALPAAPEVIAQSMRMSMRWAERCRTAFVQRPGYAQYGIIQGGTEPELRAESVKALTGIGFEGYAIGGLAVGEGQELMFSTLDSTVSLIPDGSPRYLMGVGTPDDLLGAVERGVDMFDCVMPTRAGRTARAYTERGTLNMRNARHASDSRPISPHCDCLACSRHSRAYLHHLFRANEMLGPMLLTWHNIAYYQRLMRGMRAAIVDGTFEAHAAHLRAEWEMDDWSGDEMPFPDIPPVP

SEQ ID NO: 56411 - protein, 386 aa, Komagataeibacter xylinus
  misc_feature (1)..(386): tr|A0A143WF77|A0A143WF77_KOMXY Queuine tRNA-ribosyltran sferase OS=Komagataeibacter xylinus OX=28448 GN=tgt PE= 3 SV=1
MTAFRWRAQARSGQARAGYLETAHGTVPTPTFMPVGTVGTVKAMTMDAVRSTGAGIVLGNTYHLMLRPGAERVRALGGLHRFMDWPGPILTDSGGFQVMSLGPLRKLDADGVTFRSHIDGSKHRLTPERSTDIQHALDATISMCFDECPALPAPPETIAQSMRMSMRWAERCRTAFVARPGYAQYGIIQGGTEPELRAESVRALTDIGFEGYAIGGLAVGEGQELMFSTLDATVGLIPQDAPRYLMGVGTPDDLLGAVERGVDMFDCVMPTRAGRTARAYTERGTLNLRNARHAADSRPISAHCDCLACSRHSRAYLHHLFRANEILGPMLLTWHNLAYYQRLMRGIRAAIVGDTLPEHAAHLRAQWAMEDWSPDEMPFPDIPPVP

SEQ ID NO: 56412 - protein, 376 aa, Kordia algicida
  misc_feature (1)..(376): tr|A9E5K1|A9E5K1_9FLAO Queuine tRNA-ribosyltransferase OS=Kordia algicida OT-1 OX=391587 GN=tgt PE=3 SV=1
MKFELQGKDPLSKARAATLTTDHGTIETPIFMPVGTIGTVKGVHQRELKEDINPDIILGNTYHLYLRPQTEILEKAGGLHKFINWDRNILTDSGGYQVYSLSANRKIKEEGVKFKSHIDGSYHFFTPENVMEIQRTIGADIIMAFDECTPYPCDYRYAKRSMHMTHRWLDRCIAHLEKTPYKYDYSQTFFPIVQGSTYKDLRKQSAEFIASREAEGNAIGGLSVGEPAEEMYAMTDVVCSILPEDKPRYLMGVGTPINILENIALGVDMFDCVMPTRNARNGMLFTAHGTINIKNKKWADDFSPIDEMGITYVDLEYSKAYVRHLFTVNELLGKQIATIHNLGFYLWLVREARKHILAGDFDAWKNKMVKQMDKRL

SEQ ID NO: 56413 - protein, 376 aa, Kordia periserrulae
  misc_feature (1)..(376): tr|A0A2T6BUR9|A0A2T6BUR9_9FLAO Queuine tRNA-ribosyltran sferase OS=Kordia periserrulae OX=701523 GN=tgt PE=3 SV =1
MKFDLKGKDPQSKARAGVLTTDHGTIETPIFMPVGTVGTVKGVHQRELKEDINPDIILGNTYHLYLRPQTEILEKAGGLHKFINWDRNILTDSGGYQVYSLSANRKIKEEGVKFKSHIDGSYHFFTPENVIEIQRTIGADIIMAFDECTPYPCDYRYAKRSMHMTHRWLDRCLAHLEKTPFKYDYRQAFFPIVQGSTYKDLRKQSAEFIASREAEGNAIGGLSVGEPAEEMYAMTDVVCEILPEDKPRYLMGVGTPINILENIALGVDMFDCVMPTRNARNGMLFTAHGTINIKNKKWADDFSPIDEMGITYVDLEYSKAYVRHLFTVNELLGKQIATIHNLGFYLWLVREARKHILAGDFYEWKNKMVKQMDKRL

SEQ ID NO: 56414 - protein, 376 aa, Kordia sp.
  misc_feature (1)..(376): tr|A0A501HW73|A0A501HW73_9FLAO Queuine tRNA-ribosyltran sferase OS=Kordia sp. TARA_039_SRF OX=2530203 GN=tgt PE =3 SV=1
MKFDLKGKDPQSKARAGVLKTDHGTIETPIFMPVGTIGTVKGVHQRELKEDINPDIILGNTYHLYLRPQTEILEKAGGLHKFINWDRNILTDSGGYQVYSLSANRKIKEEGVKFKSHIDGSYHFFTPENVMEIQRTIGADIIMAFDECTPYPCDYRYAKRSMHMTHRWLDRCLAHLEKTPYKYDYSQAFFPIVQGSTYKDLRKQSAEFIASREAEGNAIGGLSVGEPAEEMYAMTDVVCEILPEDKPRYLMGVGTPINILENIALGVDMFDCVMPTRNARNGMLFTAHGTINIKNKKWADDFSPIDEMGITYVDLEYSKAYVRHLFTVNELLGKQIATIHNLGFYLWLVREARKHILAGDFYEWKNKMVKQMDKRL

SEQ ID NO: 56415 - protein, 376 aa, Kordia sp.
  misc_feature (1)..(376): tr|A0A345H2T2|A0A345H2T2_9FLAO Queuine tRNA-ribosyltran sferase OS=Kordia sp. SMS9 OX=2282170 GN=tgt PE=3 SV=1
MKFELQGKDPQSKARAATLTTDHGTIETPIFMPVGTIGTVKGVHQRELKEDINPDVILGNTYHLYLRPQTEILEKAGGLHKFINWDRNILTDSGGYQVYSLSANRKIKEEGVKFKSHIDGSYHFFTPENVMEIQRTIGADIIMAFDECTPYPCDYRYAKRSMHMTHRWLDRCIAHLEKTPYKYDYSQTFFPIVQGSTYKDLRRQSAEFIASCEAEGNAIGGLSVGEPAEEMYAMTDVVCEILPEDKPRYLMGVGTPINILENIALGVDMFDCVMPTRNARNGMLFTAHGSINIKNKKWADDFSPIDEMGITYVDLEYSKAYVRHLFTVNELLGKQIATIHNLGFYLWLVREARKHILAGDFYEWKNKMVKQMDKRL

SEQ ID NO: 56416 - protein, 378 aa, Kordiimonadales bacterium
  misc_feature (1)..(378): tr|A0A5A7NE73|A0A5A7NE73_9PROT Queuine tRNA-ribosyltran sferase OS=Kordiimonadales bacterium JCM 17843 OX=12369 65 GN=tgt PE=3 SV=1
MTRFSFDVHKTDGKARRGTITMQRGEIRTPAFMPVGTAATVKAMLPESVRQTGADIILGNTYHLMLRPGAERIAELGGLHQFMNWDRPILTDSGGFQVMSLAKLRKLTEEGVAFQSHIDGSRHMLTPERSIEIQRFLGSDIIMCFDECTPFPATYEQAKESKDLSMRWARRSREAFDSSAQQSGKSALFGIQQGSVFEDLREQSSKSLADIGFDGYAVGGLAVGEGQEAMFSTLDFCAPMLPAEKPRYLMGVGKPDDIVGAVMRGIDMFDCVMPTRSGRTAQAFTWRGPINLRNARHKDDPRPLDPDVPSPATHYSRAYLHHLVRCEEILAPMLVTWHNIAFYQALMQRLRDAIEQGCLADFAAQFLETYRGGDIDPL

SEQ ID NO: 56417 - protein, 378 aa, Kordiimonadales bacterium
  misc_feature (1)..(378): tr|A0A5A7MVL4|A0A5A7MVL4_9PROT Queuine tRNA-ribosyltran sferase OS=Kordiimonadales bacterium JCM 17845 OX=12369 67 GN=tgt PE=3 SV=1
MTRFSFDVHKTDGKARRGTITMQRGEIRTPAFMPVGTAATVKAMLPESVRQTGADIILGNTYHLMLRPGAERIAELGGLHQFMNWDRPILTDSGGFQVMSLAKLRKLTEEGVAFQSHIDGSRHMLTPERSIEIQRFLGSDIVMCFDECTPFPATYEQAKESKDLSMRWARRSREAFDSSAQQSGKSALFGIQQGSVFEDLREQSSKALADIGFDGYAVGGLAVGEGQEAMFSTLDFCAPMLPAEKPRYLMGVGKPDDIVGAVMRGIDMFDCVMPTRSGRTAQAFTWRGPINLRNARHKDDPRPLDPDVPSPATHYSRAYLHHLVRCEEILAPMLVTWHNIAFYQALMQRLRDAIEQGCLADFAAQFLETYRGGDIDPL

SEQ ID NO: 56418 - protein, 380 aa, Kordiimonas lacus
  misc_feature (1)..(380): tr|A0A1G6WMP7|A0A1G6WMP7_9PROT Queuine tRNA-ribosyltran sferase OS=Kordiimonas lacus OX=637679 GN=tgt PE=3 SV=1
MRERFKYDIHATDGAARTGTIQMMRGDIRTPAFMPVGTAGTVKAMMPESVRSTGADILLGNTYHLMLRPTAERVHKLGGLHKFMNWDRPILTDSGGFQVMSLTQLRKMSEEGVTFQSHLDGSKILLTPERSMEIQRLLGSDIMMCFDECTPYPATEDQARQSMELSMRWAQRSRDGFDSGTDHAARSALFGIVQGSVYEDLRFRSIDALQEIGFDGYAVGGLAVGEGQEMMFRVLDFTMPRMPKETPRYLMGVGKPDDIVGAVERGIDMFDCVMPTRSGRTGQGFTWRGAINMKNARHKDDMRPIQEGCACPACTQYSRAYVHHLIRAGEILGAMLLTWHNLQFYQDLMAGLRQAISDGRLTEHANNFRETYALGDIDPL

SEQ ID NO: 56419 - protein, 381 aa, Kordiimonas sp.
  misc_feature (1)..(381): tr|A0A2E1CXX0|A0A2E1CXX0_9PROT Queuine tRNA-ribosyltran sferase OS=Kordiimonas sp. OX=1970157 GN=tgt PE=3 SV=1
MNNAYHLNINATDGAARTGILRTPRGDIRTPAFMPVGTAATVKAMKPATVRQTGADIILGNTYHLMLRPTAERIHNLGGLHKFMDWDRPILTDSGGFQVMSLAQLRKITEEGVSFRSHIDGSKHLLTPERSMEIQKLLGADIIMAFDECTPYPATKAETDKSMRLSMRWAKRSYEAFENIDLPTAKSSAIFGIVQGGVYRDLREESLKSLTDIPFDGYAIGGLAVGEGQDVMFEVLDFTMPHMPTDKPRYLMGVGKPDDIVGAVARGIDMFDCVLPTRSGRNAQAFTRRGTVNLKNARHQDDPRPLDDQCACNACQRYSRAYLSHLIRSGEILGAMLLTEHNLQYYQDLMSGLRNAIEQQKLSNFINDFHKLREVGDIPPL

SEQ ID NO: 56420 - protein, 384 aa, Koribacter versatilis
  misc_feature (1)..(384): sp|Q1IVF1|TGT_KORVE Queuine tRNA-ribosyltransferase OS= Koribacter versatilis (strain Ellin345) OX=204669 GN=tg t PE=3 SV=1
MSMSFSFQVEATQGAARAGRMITPHGEVETPVFMPVGTVATVKGIPQDLLEELGVQILLNNTYHLYLRPGVEQIRKLGGTHKFMSWDRSILTDSGGFQVFSLSELRKVTEEGVSFRSHLDGSSHLFSPESAMASQIGIGADIIMAFDECTEYPAERTRTERSMELTLRWAERSKNAFEAHKHEVPWFAERGKKSQALFGIVQGGMFPNLRKESAERTVEIGFPGYALGGFSVGEPREKTAELVANTVPLLPENKPRYLMGVGYPEEIVQYARMGIDMMDCVLPTRAARHGLLFTSEGRLTIKNQRFASDEGPLDPNCSCKVCKRYSRAYLRHLYASNEVLAQVLNTTHNLSYYLDTMRRVRQAIILGENSVSLPVVRSPHLSAT

SEQ ID NO: 56421 - protein, 375 aa, Kosakonia arachidis
  misc_feature (1)..(375): tr|A0A1I6XSD6|A0A1I6XSD6_9ENTR Queuine tRNA-ribosyltran sferase OS=Kosakonia arachidis OX=551989 GN=tgt PE=3 SV =1
MKFELDTTDGRARRGRLVFERGVVETPAFMPVGTYGTVKGMTPEEVEATGAQIILGNTFHLWLRPGQEIMKLHGDLHDFMQWKGPILTDSGGFQVFSLGDIRKITESGVHFRNPINGDPIFLDPEKSMEIQYDLGSDIVMIFDECTPYPADWDYAKRSMEMSLRWAKRSRDRFDGLGNKNALFGIIQGSVYEDLRDISVKGLVEIGFDGYAVGGLAVGEPKEDMHRILEHVCPQIPADKPRYLMGVGKPEDLVEGVRRGIDMFDCVMPTRNARNGHLFVTNGVVKIRNAKYKSDTGPLDAECDCYTCRNYSLAYLHHLDRCNEILGARLNTIHNLRYYQRLMAGLRKAIEEGKLESFVADFYQRQGRLVPPLNVD

SEQ ID NO: 56422 - protein, 375 aa, Kosakonia cowanii
  misc_feature (1)..(375): tr|A0A3R5XMX8|A0A3R5XMX8_9ENTR Queuine tRNA-ribosyltran sferase OS=Kosakonia cowanii OX=208223 GN=tgt PE=3 SV=1
MKFELDTTDGRARRGRLVFERGVVETPAFMPVGTYGTVKGMTPEEVEATGAQIILGNTFHLWLRPGQEIMKLHGDLHDFMQWKGPILTDSGGFQVFSLGDIRKITEAGVHFRNPINGDPIFLDPEKSMEIQYDLGSDIVMIFDECTPYPADWDYAKRSMEMSLRWAKRSRDRFDGLGNKNALFGIIQGSVYEDLRDISVKGLVEIGFDGYAVGGLAVGEPKEDMHRILEHVCPQIPADKPRYLMGVGKPEDLVEGVRRGIDMFDCVMPTRNARNGHLFVTNGVVKIRNAKYKSDTSPLDAECDCYTCRNYSLAYLHHLDRCNEILGARLNTIHNLRYYQRLMAGLRKAIEEGKLESFVADFYQRQGRPVPPLNVD

SEQ ID NO: 56423 - protein, 375 aa, Kosakonia oryzae
  misc_feature (1)..(375): tr|A0A1T5FV42|A0A1T5FV42_9ENTR Queuine tRNA-ribosyltran sferase OS=Kosakonia oryzae OX=497725 GN=tgt PE=3 SV=1
MKFELDTTDGRARRGRLVFERGVVETPAFMPVGTYGTVKGMTPEEVEATGAQIILGNTFHLWLRPGQEIMKLHGDLHDFMQWKGPILTDSGGFQVFSLGDIRKITESGVHFRNPINGDPIFLDPEKSMEIQYDLGSDIVMIFDECTPYPADWDYAKRSMEMSLRWAKRSRDRFDGLGNKNALFGIIQGSVYEDLRDISVKGLVEIGFDGYAVGGLAVGEPKEDMHRILEHVCPQIPADKPRYLMGVGKPEDLVEGVRRGIDMFDCVMPTRNARNGHLFVTNGVVKIRNAKYKSDTSPLDAECDCYTCRNYSLAYLHHLDRCNEILGARLNTIHNLRYYQRLMAGLRKAIEEGKLERFVADFYQRQGRPVPPLNVD

SEQ ID NO: 56424 - protein, 375 aa, Kosakonia oryzendophytica
  misc_feature (1)..(375): tr|A0A1C4AQ92|A0A1C4AQ92_9ENTR Queuine tRNA-ribosyltran sferase OS=Kosakonia oryzendophytica OX=1005665 GN=tgt PE=3 SV=1
MKFELDTTDGRARRGRLVFERGVVETPAFMPVGTYGTVKGMTPEEVEATGAQIILGNTFHLWLRPGQEIMKLHGDLHDFMQWKGPILTDSGGFQVFSLGDIRKITEAGVHFRNPINGDPIFLDPEKSMEIQYDLGSDIVMIFDECTPYPADWDYAKRSMEMSLRWAKRSRERFDGLGNKNALFGIIQGSVYEDLRDISVKGLVEIGFDGYAVGGLAVGEPKEDMHRILEHVCPQIPADKPRYLMGVGKPEDLVEGVRRGIDMFDCVMPTRNARNGHLFVTNGVVKIRNAKYKSDTGPLDPECDCYTCRNYSLAYLHHLDRCNEILGARLNTIHNLRFYQRLMAGLRKAIEEGKLESFVADFYQRQGRPVPPLNVD

SEQ ID NO: 56425 - protein, 375 aa, Kosakonia oryziphila
  misc_feature (1)..(375): tr|A0A1C4DD03|A0A1C4DD03_9ENTR Queuine tRNA-ribosyltran sferase OS=Kosakonia oryziphila OX=1005667 GN=tgt PE=3 SV=1
MKFELDTTDGRARRGRLVFERGVVETPAFMPVGTYGTVKGMTPEEVEATGAQIILGNTFHLWLRPGQEIMKLHGDLHDFMQWKGPILTDSGGFQVFSLGDIRKITESGVHFRNPINGDPIFLDPEKSMEIQYDLGSDIVMIFDECTPYPADWDYAKRSMEMSLRWAKRSRERFDGLGNKNALFGIIQGSVYEDLRDISVKGLVEIGFDGYAVGGLAVGEPKEDMHRILEHVCPQIPADKPRYLMGVGKPEDLVEGVRRGIDMFDCVMPTRNARNGHLFVTNGVVKIRNAKYKSDTGPLDVECDCYTCRNYSLAYLHHLDRCNEILGARLNTIHNLRYYQRLMAGLRKAIEEGKLESFVADFYQRQGRPVPPLNVD

SEQ ID NO: 56426 - protein, 375 aa, Kosakonia radicincitans; identical to SEQ ID NO: 56423
  misc_feature (1)..(375): tr|A0A1V0LI09|A0A1V0LI09_9ENTR Queuine tRNA-ribosyltran sferase OS=Kosakonia radicincitans DSM 16656 OX=1177180 GN=tgt PE=3 SV=1

SEQ ID NO: 56427 - protein, 375 aa, Kosakonia radicincitans; identical to SEQ ID NO: 56423
  misc_feature (1)..(375): tr|A0A5C1PEX7|A0A5C1PEX7_9ENTR Queuine tRNA-ribosyltran sferase OS=Kosakonia radicincitans OX=283686 GN=tgt PE= 3 SV=1

SEQ ID NO: 56428 - protein, 375 aa, Kosakonia sp.; identical to SEQ ID NO: 54972
  misc_feature (1)..(375): tr|A0A4R0HGM6|A0A4R0HGM6_9ENTR Queuine tRNA-ribosyltran sferase OS=Kosakonia sp. WCHEs120001 OX=2529380 GN=tgt PE=3 SV=1

SEQ ID NO: 56429 - protein, 375 aa, Kosakonia sp.
  misc_feature (1)..(375): tr|A0A368ZVP7|A0A368ZVP7_9ENTR Queuine tRNA-ribosyltran sferase OS=Kosakonia sp. AG348 OX=2183906 GN=tgt PE=3 S V=1
MKFELDTTDGRARRGRLVFDRGVVETPAFMPVGTYGTVKGITPEEVEATGAQIILGNTFHLWLRPGQEIMKLHGDLHDFMQWKGPILTDSGGFQVFSLGDIRKITEAGVHFRNPINGDPIFLDPEKSMEIQYDLGSDIVMIFDECTPYPADWDYAKRSMEMSLRWAKRSRERFDGLGNKNALFGIIQGSVYEDLRDISVKGLVEIGFDGYAVGGLAVGEPKEDMHRILEHVCPQIPADKPRYLMGVGKPEDLVEGVRRGIDMFDCVMPTRNARNGHLFVTNGVVKIRNAKYKSDTGPLDSECDCYTCRNYSLAYLHHLDRCNEILGARLNTIHNLRYYQRLMAGLRKAIEEGKLESFVADFYQRQGRSVPPLNVD

SEQ ID NO: 56430 - protein, 375 aa, Kosmotoga arenicorallina
  misc_feature (1)..(375): tr|A0A176JZY9|A0A176JZY9_9BACT Queuine tRNA-ribosyltran sferase OS=Kosmotoga arenicorallina S304 OX=1453497 GN= tgt PE=3 SV=1
MVEYTLIKKDPNSRARLGKLKTRRGIIDTPIFMPVGTNATVKGIWQHQLEEIGAQIILGNAFHLYLKPGLEIIREFGGLHRFMGWDKPILTDSGGFQVFSIKNKKVSDDGVMFKSPIDGSKIFMTPELSMEIQMTLGSDIAMAFDECVAPEMSREYAEKSVKRTTEWAKRCLAYHDGSQALFGIVQGAFDKSLREQSAAEITSMDFDGFAVGGLSVGEPFPITKEILEYTVDLLPEDKPRYLMGIGSPDLIITAVENGIDMFDCVLPTRIGRHGTALTWNGKINLKAAKFKHSKEPIDNECSCKVCQHYSRGYIYHLFSRDEMLGKLLVSYHNIHFLLEFTGKIREAIASDTFKEFKEECYNSGLIKKEVLLPEL

SEQ ID NO: 56431 - protein, 377 aa, Kosmotoga olearia
  misc_feature (1)..(377): tr|C5CFG6|C5CFG6_KOSOT Queuine tRNA-ribosyltransferase OS=Kosmotoga olearia (strain ATCC BAA-1733 / DSM 21960 / TBF 19.5.1) OX=521045 GN=tgt PE=3 SV=1
MVKFTVTKKDPVTSARTGKLETKHGVFETPVFMPVGTNATVKGLWQEQLKELGARIILGNAFHLYLKPGLEVIRSFGGLHSFMNWNNSILTDSGGFQVFSLKDKKVLDEGVLFKSPIDGSKIMMTPELSMEIQMTLGSDIAMAFDECVAPELDRTYAQESVERTTRWAEKCLAYHDRSQALFGIVQGAFYKDLREKSAREITAMDFDGFAVGGLSVGEPFEVTRDILEFTTKLLPEDKPRYLMGIGTPDMIIMAVENGIDMFDCVLPTRMGRHGTALTWSGKINLKAARHKFSKEPIDPECNCKVCRSYSKGYIYHLFSRDELLGKMMLSYHNVHFLLDFTDRLRNAIREERFLEFKELCTRKQLIKNDTGVNVSEG

SEQ ID NO: 56432 - protein, 374 aa, Kosmotoga pacifica
  misc_feature (1)..(374): tr|A0A0G2Z4K6|A0A0G2Z4K6_9BACT Queuine tRNA-ribosyltran sferase OS=Kosmotoga pacifica OX=1330330 GN=tgt PE=3 SV =1
MVEYKLLNKDRYSRARLGKLQTRRGVIDTPIFMPVGTNATVKGIWQHQLEEMGAQIILGNAFHLYLKPGLEVMREFGGLHAFMNWEKPILTDSGGFQVFSIKDKKVTDEGVLFRSPIDGSKIMMTPELSMEIQMTLGSDIAMAFDECVAPGMSREYAEESVTRTTEWAKRCISYHDRSQALFGIVQGAFYKDLRKKSAAEITSMDFDGFAIGGLSVGEPFQVTKEILEYTVDLLPEDKPRYLMGIGSPDLIVTAVENGIDMFDCVLPTRIGRHGTALTWNGKINLKAAKFKYSKDPIDEECRCRVCQTYSRGYIQHLFSRDEMLGKILVSYHNIHFLLKFTERIREALATDSFKEFKEECYNRGLIKEALISES

SEQ ID NO: 56433 - protein, 373 aa, Kosmotoga sp.
  misc_feature (1)..(373): tr|A0A5D0RJM2|A0A5D0RJM2_9BACT Queuine tRNA-ribosyltran sferase OS=Kosmotoga sp. OX=1955248 GN=tgt PE=3 SV=1
MLEFEVLSRDKKSLARRGRIITRKGNIETPVFMPVGTNGTVKGLWQHQLLEIDTQIILGNAFHLYLKPGLDVLKHFKGLHNFMNWSKPILTDSGGFQIFSIGEKKVTDDGVTIKSPLDGSWKEITPEFSMKIQQIIDSDIVMVLDECLPPGINRDYVEESVNRTTSWAIRCLKVHDKERAIFGIVQGGFYEELREKSAREITSLNFDGFAIGGLSVGEDFECTSRIMSFTVKILPDNKPRYVMGIGSPDLIINAVDNGIDMFDCVLPTRIGRHGTALTWDGKVNLKAARYKYDDNPVDPQCDCRVCRTYSRAYLHHLFRREELLGKLALSYHNTAFLNEFTRRIRNAIESNQYNEFKNDCIKRELIGSGVIKN

SEQ ID NO: 56434 - protein, 372 aa, Kosmotogaceae bacterium
  misc_feature (1)..(372): tr|A0A3B8NE51|A0A3B8NE51_9BACT Queuine tRNA-ribosyltran sferase OS=Kosmotogaceae bacterium OX=2053567 GN=tgt PE =3 SV=1
MLSYEIISNSSTSRARVGRLNTSHGEILTPAFMPVGTNGTVKSLWQHELIEIGSQIILGNAFHLYLRPGLDVIEHFGGLHDFISWKGPILTDSGGFQVFSIRNKVVEDDGVRFRSPLDGSKLFITPELSMEIQMTLGSDIAMAFDECVEPGVSREYIEESVARTSVWARRCLNSHSGKQALFGIVQGGFFEDLRARSAEEICSMPFDGFAIGGLSVGEKFAITKDMLSFTVTFLPEDRPRYVMGIGSPEMIVVAVENGVDMFDCVLPTRIGRHGTALTSRGKVNLKAAKWRYDKDPIDKECGCKVCNTYSRGYIFHLFSRSEALGRSMVSYHNIFFLNEYVRKIRESIQRDCFEEFKEECLDKGLIGECVST

SEQ ID NO: 56435 - protein, 371 aa, Kouleothrix aurantiaca
  misc_feature (1)..(371): tr|A0A0P9DIA3|A0A0P9DIA3_9CHLR Queuine tRNA-ribosyltran sferase (Fragment) OS=Kouleothrix aurantiaca OX=186479 GN=SE17_31590 PE=3 SV=1
FMPVGTRGTVKSLTPGEVRDAGAQIILGNTYHLYLQPGHELIARMGGLHRFMGWDGPILTDSGGFQVFSLVYGGIADEVKGRRPSQQAQLKPGMVKVTENGVIFRSYIDGSKHLFTPERSIEIQKGIGADIILCFDELPPFRAGYDYTARSLERTHRWEARCLQFHQNTLGGQNLSFAAPNLDQSLFGIVHGGVFENLRRASAEYIGTLGFDGLCIGGSLGKDKQQINEVVDMTVPHMPDALPRHLLGIGDVDDLLEGVARGIDMFDCVSPTRLGRHGAALVRDAARKWRLNVQNASLRNDDAPLDAQCRCYTCQHYSRAYIHHLFRAQELLGIRLVSVHNVAFLCDLMAEVRDSIREGRFAALRREWLGE

SEQ ID NO: 56436 - protein, 386 aa, Kozakia baliensis
  misc_feature (1)..(386): tr|A0A1D8UUY4|A0A1D8UUY4_9PROT Queuine tRNA-ribosyltran sferase OS=Kozakia baliensis OX=153496 GN=tgt PE=3 SV=1
MNDMRWIAEATCGQARAGHLHTAHGVVPTPTFMPVGTAGTVKAMTMDAVRSTGAGIVLGNTYHLMLRPGPERVRKMGGLHKMMDWSGPILTDSGGFQVMSLGALRKLDQDGVTFNSHIDGSKHRLTPEISTEIQHALDATITMCFDECPALPATPERIEQSMALSMRWAARSREAFIARPGYGQFGIVQGGTERELRERSVKALTEIGFEGYAIGGLAVGEGQELMFSTLDYTTPLLPDSHARYLMGVGTPDDLLGAVERGVDMFDCVMPTRAGRTARAYTERGTLNMRNARHADDLRPISPHCDCLACSRHSRAYLHHLFRSNEILGPMLLTWHNLAYYQRLMRTIRAAIVAGNLPETAAKLRADWAAGDWSEDEFPQPKMPPVP

SEQ ID NO: 56437 - protein, 392 aa, Kriegella aquimaris
  misc_feature (1)..(392): tr|A0A1G9SDP9|A0A1G9SDP9_9FLAO Queuine tRNA-ribosyltran sferase OS=Kriegella aquimaris OX=192904 GN=tgt PE=3 SV =1
MLCSLVGYICDFKINILKFTLNQTDSQSKARAGTMVTDHGVIETPIFMPVGTVASVKSVHQRELKEDIKPDIILGNTYHLFLRPKTDILKQAGGLHKFMGWDSNILTDSGGYQVYSLSANRKIKEEGVKFKSHIDGSMHMFTPENVMEIQREIGADIIMAFDECTPYPCDYNYAKRSMHMTHRWLDRCISHLDKVPYSYDYSQSFFPIVQGSTYKDLRKQSAEYIANAGAEGNAIGGLSVGEPAEEMYAMAEIVCDILPEDKPRYLMGVGTPINILENIALGVDMFDCVMPTRNARNGMLFTAHGTINIKNKKWEDDFSPVDEMGITFVDTEYSKAYLRHLFAANEYLGKQIATIHNLGFYLWLVREARKHILAGDFASWKTMMVKQMDKRL

SEQ ID NO: 56438 - protein, 378 aa, Kroppenstedtia eburnea
  misc_feature (1)..(378): tr|A0A1N7M720|A0A1N7M720_9BACL Queuine tRNA-ribosyltran sferase OS=Kroppenstedtia eburnea OX=714067 GN=tgt PE=3 SV=1
MALRYELIKTCKQSGARLGRLHTPHGTVDTPVFMPVGTLATVKTMSPEELTEMGSGIILSNTYHLFLRPGHDVVREAGGLHRFMNWDRAILTDSGGFQVFSLSDLREITEEGVSFRSHLNGEPLFLSPEKSMEIQNALGADIIMAFDECPPYPADREYVKNSMDRTHRWLQRCATAHRRKEEQALFGIIQGGMYRDLREESARQITSVDLPGYAIGGLSVGEPKEMMYDALEWTTPLMPKEKPRYLMGVGSPDALVEGVVRGVDMFDCVLPTRIARNGTTMTSRGRVVVRNAKYARDFSPLDPECDCYTCRNYSRAYLRHLIKAEETFGLRLTTYHNLHFLLKLMEKVRQAIREDRLLDFRAHFFEEYYGSTRPTRNF

SEQ ID NO: 56439 - protein, 400 aa, Kroppenstedtia sanguinis
  misc_feature (1)..(400): tr|A0A482TYK0|A0A482TYK0_9BACL Queuine tRNA-ribosyltran sferase OS=Kroppenstedtia sanguinis OX=1380684 GN=D1G38 _002405 PE=3 SV=1
MTSGLGRTGVISTPHGDIATPAFIPVGTKATVKTVVPEAVAELGAQAVLANAYHLYLQPGPGIIDAAGGLGAFMNWPGPTYTDSGGFQVMSLGVGFKKVIEMSAGHAPDDGKIADGKERLANVDDDGVTFKSHLDGSAHRFTPELSMQIQHQLGADIIFAFDELTTLMNTRDYQENSLERTRLWAIRCLAEHNRLSVERSHRPQQSLWGVIQGAQYEDLRRKAARDLAALGARDEAEGGKGFGGFGIGGALEKENLGTIVGWVNSELPQDKPKHLLGISEPDDVFVAIENGVDTFDCVSPTRVARNGAIYTRDGRINITNARFRDDFAPLDAELTNYTSQYSRAYLHHLFRAKEGLGPTLATLHNLSFTIEMVDGARRAIEEGRYEDYRDDFLGRYYAKR

SEQ ID NO: 56440 - protein, 393 aa, Ktedonobacter racemifer
  misc_feature (1)..(393): tr|D6TNK4|D6TNK4_9CHLR Queuine tRNA-ribosyltransferase OS=Ktedonobacter racemifer DSM 44963 OX=485913 GN=tgt P E=3 SV=1
MSQFTFTIDAECSESWARAGTIQTPHGTIQTPIFMPVGTQATVKSVSPEELREVGAQIILSNTYHLMLRPGSELIDSFGGLHSFMRWDGPILTDSGGFQVWSLGHLRKLSEEGVLFKSHLDGSPQFLTPESVMRIEAELGSDIILPLDICAPFPCTPKEAREAMERTHRWEERALVAKERYRPEQTLFGIVQGAFEPELRQESARVIGSMPFPGLSIGGLSVGEPKTKMWEMLRATTPALPREKPRHLLGVGSPEDLVECVGLGMDMFDCVLPTRVARHGGLFTRDGRVNIKSARFKRATGPIEEGCDCHTCRNYSAAYVHHLIRAEEQLYYRLGTIHNLRFMLRLAADLRASILDGSYPVFREAFLARYQPASETVREQQREKWKAARERQS

SEQ ID NO: 56441 - protein, 370 aa, Ktedonobacter sp.
  misc_feature (1)..(370): tr|A0A1Q6ZAZ4|A0A1Q6ZAZ4_9CHLR Queuine tRNA-ribosyltran sferase OS=Ktedonobacter sp. 13_2_20CM_53_11 OX=1805233 GN=AUH05_01105 PE=3 SV=1
MEQSTTSDNLEVTNPYGSLKLPYGQVSMPVFMPDATLGVVRAVDATDLLDCQVQAVVMNTFHLMQRPGSSTIHALGGLHRMSAWPRPIVTDSGGFQAYSLIQQNPKFGTINDDGITFKPESAERKFHLTPEKTIQLQMSYGADVVICLDECTHVDASYEMQETSVKRTIAWARRCKKEFLHQVNQKRLPPEQRPLLFAVIQGGGSLELRKRCADELLEIGFDGFGYGGWPMDGQGHLLTDLIAYTRELVPPQFPMHALGIGHPTNVVDCTKMGYGIFDSAMPTRDARHSRLYTFTSAAGLEDKWLSYTYINDDKHIKSNAPVSSYCDCLCCTNYSLGYLHHLFKINDTLFFRLATIHNLRFMTQLTERLR

SEQ ID NO: 56442 - protein, 395 aa, Ktedonobacter sp.
  misc_feature (1)..(395): tr|A0A1Q7WY01|A0A1Q7WY01_9CHLR Queuine tRNA-ribosyltran sferase OS=Ktedonobacter sp. 13_1_20CM_3_54_15 OX=18052 24 GN=tgt PE=3 SV=1
MSSGSFSFAIDAECSDTWARAGTIHTPHGTVRTPIFMPVGTQATVKSVSPEELRAAGTQIILANTYHLMLRPGSELVASLGGLHSFMHWDGPILTDSGGFQVFSLGHLRKLSEEGAAFKSHLDGSSHVLTPENVMHIEAELGADIVLPLDICAAYPCSFLEAKESMERTHRWAERALIAKEEYRAEQALFGIVQGAFDAELRRESANFVGSLPFPGLSIGGLSVGEPKQLMWEMLHEVTLALPREKPRHLLGVGSPEDFVVGVGLGMDMFDCALPTRVARHGGLFTPYGRVNIKSARFRTERGPIEDGCDCYTCQNYSAAYVHHLARTEEQLYFRLGTIHNIRFMLRLASQLRETIIAGTYAAFRDDFIARYQPAPEKVREEQRVKWKAARTRIV

SEQ ID NO: 56443 - protein, 383 aa, Ktedonobacterales bacterium
  misc_feature (1)..(383): tr|A0A4P6JVU1|A0A4P6JVU1_9CHLR Queuine tRNA-ribosyltran sferase OS=Ktedonobacterales bacterium SCAWS-G2 OX=2509 675 GN=tgt PE=3 SV=1
MDQALSKTPHEATATQQQYGSLQLPHGQLQLPVYMPDATLGVVRSIDSSDLERHAVQAVVMNTFHLMQHPGSSTVQALGGLHTMSSWPHPIVTDSGGFQAYSLIQQNARFGSLDADGISFKPEGAERKFHLTPEKAVQLQMSYDTDVVMCLDYCTHVDAPFATQEEAVLRTIAWAKRCKSEFVRLVEQKRLAPEKRPHLFGVIQGGGSHELRKRCAEALLEIGFDGYGYGGWPLDAQGKLLTDIIGYTRELIPAQFPMHALGVGHPDNVVECTRLGYGMFDSAMPTRDARHARLYVFNRQASEIEGKGKWFSYVYINDDKYIKDSAPISNLCDCLSCTRYTRAYLRHLFKVNDSLFFRLATIHNLRFMTMLTQRLREGYYARG

SEQ ID NO: 56444 - protein, 399 aa, Ktedonobacterales bacterium
  misc_feature (1)..(399): tr|A0A4P6K0Y5|A0A4P6K0Y5_9CHLR Queuine tRNA-ribosyltran sferase OS=Ktedonobacterales bacterium SCAWS-G2 OX=2509 675 GN=tgt PE=3 SV=1
MPAFKFTIDAESPETWARAGTIQTPHGIIHTPIYMPVGTQATVKSVSPEELRAAGAEIILANTYHLMLRPGSPLIDTLGGLHTFMHWDGPILTDSGGFQVWSLGHLRKLTEDGATFKSHLDGSEHVLTPERVMQIEAELGSDIILPLDICSPYPCSPQEARQAMEQTHRWEERALVAKERYRPEQTLFGIVQGAFEPELRAESARIIGNMPFPGLSIGGLSVGEPKEQMWEMLRHVTPALPRDKPRHLLGVGSPEDVVIGTGLGMDMFDCVLPTRVARHGGLFTQYGRVNIKSARFRTVAGPIEEGCDCYTCRNYSAAYVHHLIRTEEQLYYRLGSIHNIHFMLRLARQLRASIIDGSYPIFRDEFLARYVPASEQVRTDQREKWKAARARQNDIISLK

SEQ ID NO: 56445 - protein, 368 aa, Kuenenia stuttgartiensis
  misc_feature (1)..(368): tr|Q1Q058|Q1Q058_KUEST Queuine tRNA-ribosyltransferase OS=Kuenenia stuttgartiensis OX=174633 GN=Tgt PE=3 SV=1
MFFKVLATDKQTKARRGELHLAGQIIPTPVFMPVGTQGTVKTLTPLQIKETGAEIILCNAYHLCLRPGAEIIKQLGGLHRFMGWKGAIITDSGGFQVFSLSKLTKISSNGVEFQSPIDGSKLFLTPEKVIKIQNDIGANIIMAFDECVPYPCEKDMASVAVERTLNWAARCLDSHNNEDQALFGIVQGSVFEELRIECAKHLEKMNFQGYAIGGLSVGEGSLLMNEVMDYTVEYLPPGKPRYLMGVGFPEDILHAVERGVDMFDCVIPTRNGRNGCAFTHLGKVKILNSRYKEDTGPLDEMCDCYTCKNFSRAYLRHLFVAKETLGLTLLSLHNIFYFQRLMQQIRDSIERGEFRSFKEQFFSAYKNN

SEQ ID NO: 56446 - protein, 368 aa, Kuenenia stuttgartiensis
  misc_feature (1)..(368): tr|A0A2C9CEY8|A0A2C9CEY8_KUEST Queuine tRNA-ribosyltran sferase OS=Kuenenia stuttgartiensis OX=174633 GN=tgt PE =3 SV=1
MFFKVLATDKQTKARRGELHLAGQIIPTPVFMPVGTQGTVKTLTPLQIKETGAEIILCNAYHLCLRPGAEIIKQLGGLHRFMGWKGAIITDSGGFQVFSLSKLTKISNNGVEFQSPIDGSKLLLTPEKVIKIQNDIGANIIMAFDECVPYPCEKDMASVAVERTLNWAARCLDSHNNEDQALFGIVQGSVFEELRIECAKHLEKMNFQGYAIGGLSVGEGSLLMNEVMDYTVEYLPPGKPRYLMGVGFPEDILHAVERGVDMFDCVIPTRNGRNGCAFTHLGKVKILNSRYKEDTGPLDEMCDCYTCKNFSRAYLRHLFVAKETLGLTLLSLHNIFYFQRLMQQIRDSIERGEFRSFKEQFFSAYKNN

SEQ ID NO: 56447 - protein, 381 aa, Kurthia sibirica
  misc_feature (1)..(381): tr|A0A2U3AIK2|A0A2U3AIK2_9BACL Queuine tRNA-ribosyltran sferase OS=Kurthia sibirica OX=202750 GN=tgt PE=3 SV=1
MSQEAIRYELIKQDKQTGARLGIVHTPHGSFETPAFMPVGTQATVKTVAPEEIKEMGAGILLSNTYHLWLRPGNDIIKEAGGLHKFMNWDRAILTDSGGFQVFSLSDMRKITEEGVHFRNHLNGSKMFLSPEKAMEIQNDLGSDIMMAFDECPPFPATFDYMKASVERTSRWAERCLEAHARPQDQGLFGIIQGGEFEELRKQSARDLVSLDFPGYAIGGLSVGEPKPIMNRMLEYTTPLMPADKPRYLMGVGSPDSLIDGSIRGIDMFDCVLPTRIARNGTCMTSEGRVVIKNAKFARDFGPLDPKCGCYTCKNYSRAYIRHLIKADETFGIRLTSIHNLHFLQDLMRNVRQAIREDRLLDFKEEFFEAYGFNKPNAKNF

SEQ ID NO: 56448 - protein, 381 aa, Kurthia sp.
  misc_feature (1)..(381): tr|A0A433RRV2|A0A433RRV2_9BACL Queuine tRNA-ribosyltran sferase OS=Kurthia sp. 3B1D OX=1562256 GN=tgt PE=3 SV=1
MSQQPIRYELIKKCKQTGARLGIVHTPHGSFETPAFMPVGTQATVKTMAPEEIKAMGANIILSNTYHLWLRPGHELIKEAGGLHKFMNWDGAILTDSGGFQVFSLSDMRKITEEGVHFRNHLNGSKMFLSPEKAMEIQNALGSDIMMAFDECPPFPATFEYMKASVERTTRWAERCLKAHARPDEQGLFGIIQGGEFEELRKQSARDLVAMDFPGYAIGGLSVGEPKPIMNRMLEYTTPLMPENKPRYLMGVGSPDSLIDGSIRGIDMFDCVLPTRIARNGTCMTSQGRVVVKNAKFAKDFTPIDPECDCYTCKNYTKAYIRHLIKADETFGIRLTSTHNLHFLQNLMRQVREAIREDRLGDFREEFFEKYGFNKPNAKNF

SEQ ID NO: 56449 - protein, 381 aa, Kurthia sp.
  misc_feature (1)..(381): tr|A0A0X1RW16|A0A0X1RW16_9BACL Queuine tRNA-ribosyltran sferase OS=Kurthia sp. 11kri321 OX=1750719 GN=tgt PE=3 SV=1
MSEQPIRYELIKTCKQTGARLGIVHTPHGSFETPAFMPVGTQATVKTMAPEEIKEMGAGIILSNTYHLWLRPGHEIIKEAGGLHKFMNWDRAILTDSGGFQVFSLSDMRKITEEGVHFRNHLNGSKMFLSPEKAMEIQNALGSDIMMAFDECPPFPATYEYMKASVERTSRWAERCLEAHERPQDQGLFGIVQGGEFEELRKQSARDLVSMDFPGYAIGGLSVGEPKPIMNRMLEYTTPLLPSHKPRYLMGVGSPDSLIDGAIRGIDMFDCVLPTRIARNGTCMTSQGRVVVKNAKYAKDFTPLDPECDCYTCKNYTKAYIRHLIKADETFGIRLTSTHNLHFLQNLMRQVRQAIREDRLGDFREEFFEQYGFNKPNAKNF

SEQ ID NO: 56450 - protein, 381 aa, Kurthia zopfii
  misc_feature (1)..(381): tr|A0A2U3AHK0|A0A2U3AHK0_9BACL Queuine tRNA-ribosyltran sferase OS=Kurthia zopfii OX=1650 GN=tgt PE=3 SV=1
MSEQPIRYELIKTCKQTGARLGIVHTPHGSFETPAFMPVGTQATVKTMAPEEIKAMGAGIILSNTYHLWLRPGNEIIKEAGGLHKFMNWDRAILTDSGGFQVFSLSDMRKITEEGVHFRNHLNGSKMFLSPEKAMEIQNDLGSDIMMAFDECPPFPATFEYMKASVERTSRWAERCLEAHARPQDQGLFGIVQGGEFEELRKQSAKDLVSMDFPGYAIGGLSVGEPKPIMNRMLEYTTPLLPDNKPRYLMGVGSPDSLIDGSIRGIDMFDCVLPTRIARNGTCMTSQGRVVLKNAKFAKDFTPIDPECDCYTCKNYTKAYIRHLIKADETFGIRLTSTHNLHFLQNLMRQVRQAIQEDRLGDFREEFFEQYGFNKPNAKNF

SEQ ID NO: 56451 - protein, 378 aa, Kushneria avicenniae
  misc_feature (1)..(378): tr|A0A1I1L0N4|A0A1I1L0N4_9GAMM Queuine tRNA-ribosyltran sferase OS=Kushneria avicenniae OX=402385 GN=tgt PE=3 S V=1
MRQDCFMRFERMATDGRARRGRLTFPRGSVETPAFMPVGTYGTVKGMTPKDVEAIGAEIILGNTFHLWLRPGTEVIEAHGDLHDFAQWHKPILTDSGGFQVFSLGEMRKITEAGVHFRSPVDGARIFMGPEESMAVQRSLGSDIVMIFDECTPYPATHEEAEKSMELSLRWAQRSLDAHGDSPSALFGIIQGGMYPDLRERSLKGLEQISFDGLAIGGLSVGEPKEEMIRVLDYLPTWMPDDKPRYLMGVGKPEDLVEGVRRGVDMFDCVMPTRNARNGHLFTFDGVIRIRNATHRHDTRPLEEGCDCYTCQNFSRSYLHHLDRCGEMLGAQLNTIHNLRHYQQLMSGLRGAIEAGTLADFVAAFYARRGQAVPPLEA

SEQ ID NO: 56452 - protein, 378 aa, Kushneria indalinina
  misc_feature (1)..(378): tr|A0A3D9DSV8|A0A3D9DSV8_9GAMM Queuine tRNA-ribosyltran sferase OS=Kushneria indalinina DSM 14324 OX=1122140 GN =tgt PE=3 SV=1
MRQDCFMRFERMATDGRARRGRLTFPRGSVETPAFMPVGTYGTVKGMTPRDVEATGADIILGNTFHLWLRPGTEVIEVHGDLHDFAQWHKPILTDSGGFQVFSLGDMRKITEAGVHFRSPVDGAKIFMGPEESMAVQRSLGSDIVMIFDECTPYPATFEEAKTSMELSLRWAQRSLDAHGDSPSALFGIIQGGMYRELRERSLEGLEQIGFDGLAIGGLSVGEPKEEMIKVLDYLPGLMPDDKPRYLMGVGRPEDLVEGVRRGVDMFDCVMPTRNARNGHLFTFDGVIRIRNATHRHDTRPLEEGCDCYTCQNFSRSYLHHLDRCGEMLGAQLNTIHNLRHYQQLMSGLRGAIEAGTLADFVAAFYARRGLEVPPLEA

SEQ ID NO: 56453 - protein, 378 aa, Kushneria konosiri
  misc_feature (1)..(378): tr|A0A2Z2H6W1|A0A2Z2H6W1_9GAMM Queuine tRNA-ribosyltran sferase OS=Kushneria konosiri OX=698828 GN=tgt PE=3 SV= 1
MRQDCFMRFERMATDGRARRGRLTFPRGSIETPAFMPVGTYGTVKGMTPKDVEAIGAEIILGNTFHLWLRPGTEVIEAHGDLHDFAQWHKPILTDSGGFQVFSLGDMRKITEQGVHFRSPVDGAKVFMGPEESMAVQRSLGSDIVMIFDECTPYPATFDEARTSMELSLRWAQRSLDAHGDSPSALFGIIQGGMYRELRERSLEGLENIGFDGLAIGGLSVGEPKEEMIKVLDYLPGLMPDDKPRYLMGVGRPEDLVEGVRRGVDMFDCVMPTRNARNGHLFTFDGVIRIRNAVHRHDTRPLEEGCDCYTCQNFSRSYLHHLDRCGEMLGAQLNTIHNLRHYQQLMSGLRGAIEAGTLADFVAAFYARRGLEVPPLEA

SEQ ID NO: 56454 - protein, 378 aa, Kushneria marisflavi
  misc_feature (1)..(378): tr|A0A240UN37|A0A240UN37_9GAMM Queuine tRNA-ribosyltran sferase OS=Kushneria marisflavi OX=157779 GN=tgt PE=3 S V=1
MRQDCFMRFERMATDGRARRGRLTFPRGSVETPAFMPVGTYGTVKGMTPKDVEATGADIILGNTFHLWLRPGTEVIEAHGDLHDFAQWHKPILTDSGGFQVFSLGDMRKITEAGVHFRSPVDGVKIFMGPEESMAVQRSLGSDIVMIFDECTPYPATFEEARTSMELSLRWAQRSFDAHGDSPSALFGIIQGGMYRELRERSLEGLEQIGFDGLAIGGLSVGEPKEEMIKVLDYLPGLMPDDKPRYLMGVGRPEDLVEGVRRGVDMFDCVMPTRNARNGHLFTFDGVVRIRNATHRHDTRPLEEGCDCYTCQNFSRSYLHHLDRCGEMLGAQLNTIHNLRHYQQLMSGLRGAIEAGTLADFVAAFYARRGQTVPPLEA

SEQ ID NO: 56455 - protein, 378 aa, Kushneria phyllosphaerae
  misc_feature (1)..(378): tr|A0A2R8CR55|A0A2R8CR55_9GAMM Queuine tRNA-ribosyltran sferase OS=Kushneria phyllosphaerae OX=2100822 GN=tgt P E=3 SV=1
MRQDCFMRFERMATDGRARRGRLTFPRGSIETPAFMPVGTYGTVKGMTPKDVEAIGAEIILGNTFHLWLRPGTEVIEAHGDLHDFAQWHKPILTDSGGFQVFSLGDMRKITEQGVHFRSPVNGAKVFMGPEESMAVQRSLGSDIVMIFDECTPYPATFEEAKTSMELSLRWAQRSLDAHGDSPSALFGIIQGGMYRELRERSLEGLEQIGFDGLAIGGLSVGEPKEEMIKVLDYLPGLMPDDKPRYLMGVGRPEDLVEGVRRGVDMFDCVMPTRNARNGHLFTFDGVIRIRNAAHRHDTRALEEGCDCYTCQNFSRAYLHHLDRCGEMLGAQLNTIHNLRHYQQLMSGLRGAIEAGTLADFVAAFYARRGLEVPPLEA

SEQ ID NO: 56456 - protein, 378 aa, Kushneria sinocarnis
  misc_feature (1)..(378): tr|A0A420X028|A0A420X028_9GAMM Queuine tRNA-ribosyltran sferase OS=Kushneria sinocarnis OX=595502 GN=tgt PE=3 S V=1
MRNDCFMKFEPLATDGRARRGRLSFPRGTVETPAFMPVGTYGTVKGMTPGAVEEIGAEIILGNTFHLWLRPGTEIVSAHGDLHDFAQWQRPILTDSGGFQVFSLGEMRKITEQGVHFRSPVDGAKVFMGPEESMAVQRALGSDVVMIFDECTPYPATFEEAERSMELSLRWAARSREAHGDSPAALFGIIQGGMYRDLRERSLAGLQEIGFDGLAIGGLSVGEPKEEMMGVLDYLPGLMPESSPRYLMGVGKPEDLVEGVRRGVDMFDCVMPTRNARNGHLFTDEGVIRLRNARHRTDTRPLEATCDCYTCQNFSRAYLHHLDRCGEMLGAQLNTIHNLRHYQRLMAGLRGAIEAGTLADFVARFYARRGLEVPPLAG

SEQ ID NO: 56457 - protein, 372 aa, Kushneria sp.
  misc_feature (1)..(372): tr|A0A1S1NRV9|A0A1S1NRV9_9GAMM Queuine tRNA-ribosyltran sferase OS=Kushneria sp. YCWA18 OX=657387 GN=tgt PE=3 S V=1
MNFERLATDGRARRGRLSFPRGTVETPAFMPVGTYGTVKGMTPGAVEEIGAEIILGNTFHLWLRPGTEIVAAHGDLHDFAQWHRPILTDSGGFQVFSLGEMRKITEEGVHFRSPVDGAKVFMGPEESMAVQRALGSDVVMIFDECTPYPATFEEAERSMELSLRWAARSREAHGDSPAALFGIIQGGMYRELRERSLKDLLDIGFDGLAIGGLSVGEPKDEMMGVLDYLPELMPDHSPRYLMGVGKPEDLVEGVRRGVDMFDCVMPTRNARNGHLFTDDGVIRLRNARHRTDTRPLEEACDCYTCRNFSRAYLHHLDRCGEMLGAQLNTIHNLRHYQRLMAGLRGAIEAGTLADFVARFYARRGLEVPPLTG

SEQ ID NO: 56458 - protein, 378 aa, Kushneria sp.
  misc_feature (1)..(378): tr|A0A5C0ZUR9|A0A5C0ZUR9_9GAMM Queuine tRNA-ribosyltran sferase OS=Kushneria sp. YCWA18 OX=657387 GN=tgt PE=3 S V=1
MRNDCFMNFERLATDGRARRGRLSFPRGTVETPAFMPVGTYGTVKGMTPGAVEEIGAEIILGNTFHLWLRPGTEIVAAHGDLHDFAQWHRPILTDSGGFQVFSLGEMRKITEEGVHFRSPVDGAKVFMGPEESMAVQRALGSDVVMIFDECTPYPATFEEAERSMELSLRWAARSREAHGDSPAALFGIIQGGMYRELRERSLKDLLDIGFDGLAIGGLSVGEPKDEMMGVLDYLPELMPDHSPRYLMGVGKPEDLVEGVRRGVDMFDCVMPTRNARNGHLFTDDGVIRLRNARHRTDTRPLEEACDCYTCRNFSRAYLHHLDRCGEMLGAQLNTIHNLRHYQRLMAGLRGAIEAGTLADFVARFYARRGLEVPPLTG

SEQ ID NO: 56459 - protein, 380 aa, Kyrpidia spormannii
  misc_feature (1)..(380): tr|A0A2K8N7V2|A0A2K8N7V2_9BACL Queuine tRNA-ribosyltran sferase OS=Kyrpidia spormannii OX=2055160 GN=tgt PE=3 S V=1
MAVQFHLIKTDPSSRARRGRLYTRHGSVETPVFMPVGTQASVKTMSPHELLDIGVEMILSNTYHLFLRPGHDLIREAGGLHRFMAWSKSVLTDSGGFQVFSLSPLRRISEEGVTFRSHLSGETFFLSPERATEVQNALGADVIMAFDECPPYPAERSYVEESLERTLRWARRCQAAHRRPEDQGLFGIVQGGMEFDLRRHAVESLAEMDFPGYAVGGLSVGEPKEKMYDVLEYTTELLPVDKPRYLMGVGAPEDLIEGVWRGVDMFDCVLPTRIARNGTVWTRRGKLVVRNGAYARDFQPLDPECSCYTCRHFTRAYIRHLLKADEILGLRLTTYHNLYFLVHLMQDIRRAIEEDRFAEFRTVFYRTFEIRKSEDAEGGR

SEQ ID NO: 56460 - protein, 380 aa, Kyrpidia tusciae
  misc_feature (1)..(380): tr|D5WWM5|D5WWM5_KYRT2 Queuine tRNA-ribosyltransferase OS=Kyrpidia tusciae (strain DSM 2912 / NBRC 15312 / T2) OX=562970 GN=tgt PE=3 SV=1
MAVQFHLIKTDPSSRARRGRLYTRHGSVETPVFMPVGTQASVKTMSPHELLDIGVEMILSNTYHLFLRPGHDLIREAGGLHRFMAWPKSVLTDSGGFQVFSLSPLRRISEEGVTFRSHLSGETFFLSPERATEVQNALGADVIMAFDECPPYPAERSYVEESLERTLRWARRCQAAHRRPEDQGLFGIVQGGMELDLRRHAVESLAEMDFPGYAVGGLSVGEPKEKMYDVLEYTTELLPVDKPRYLMGVGAPEDLIEGVRRGVDMFDCVLPTRIARNGTVWTRRGKLVVRNGAYARDYRPLDPECSCYTCRHFTRAYIRHLLKADEILGLRLTTYHNLYFLVHLMQDIRRAIEEDRFAEFRSAFYRTFEIRKSEDAEGGR

SEQ ID NO: 56461 - protein, 376 aa, Labilibaculum antarcticum
  misc_feature (1)..(376): tr|A0A1Y1CKU0|A0A1Y1CKU0_9BACT Queuine tRNA-ribosyltran sferase OS=Labilibaculum antarcticum OX=1717717 GN=tgt PE=3 SV=1
MDFKLLNTDPKSSARTGELTTDHGKIQTPIFMPVGTLGSVKGVHQRELRDDINAEIILGNTYHLYLRPGLDVLEKAGGLHKFNGWERPILTDSGGFQVFSLADNRKLSEEGAMFRSHIDGSKHFFTPENVMDTQRTIGADIIMAFDECPPGTSTYEYAKNSLELTQRWLERCVKRFDETEPKYGYSQTLFPIIQGCVYNDLRVKSAEHAASLDRDGYAIGGLAVGEPVEDMYSMIEVVNKVLPEDKPRYLMGVGTPVNILEAISRGVDMFDCVMPTRNGRNGMMFTSEGTINIKNKKWHDDFSPIDPNGTSYVDQAYSKAYVRHLVHSGELLGSQICSIHNLAFYLWLVREAREHIIAGTFSTWKEIMVKKLAVRL

SEQ ID NO: 56462 - protein, 376 aa, Labilibaculum filiforme
  misc_feature (1)..(376): tr|A0A2N3HQP8|A0A2N3HQP8_9BACT Queuine tRNA-ribosyltran sferase OS=Labilibaculum filiforme OX=1940526 GN=tgt PE =3 SV=1
MDFKLLNTDPKSSARTGELTTDHGKIQTPIFMPVGTLGSVKGVHQRELRDDINAEIILGNTYHLYLRPGLDVLEKAGGLHKFNGWERPILTDSGGFQVFSLAENRKLTEEGAMFRSHIDGSKHFFTPENVMDTQRTIGADIIMAFDECPPGTSTYEYSKNSLELTQRWLERCVKRFDETEPKYGYSQTLFPIVQGCVYNDLRIKAAEHAASLNREGYAIGGLAVGEPVEDMYSMIEVVNEVLPKDKPRYLMGVGTPVNILEAISRGVDMFDCVMPTRNGRNGMIFTSEGTINIKNKKWYDDFSPIDPNGTSYVDQNYSKAYVRHLIHSGELLGSQICSIHNLAFYLWLVREAREHINAGTFASWKEIMVKKLATRL

SEQ ID NO: 56463 - protein, 376 aa, Labilibaculum manganireducens
  misc_feature (1)..(376): tr|A0A2N3HWJ6|A0A2N3HWJ6_9BACT Queuine tRNA-ribosyltran sferase OS=Labilibaculum manganireducens OX=1940525 GN= tgt PE=3 SV=1
MDFKLLNTDTKSSARTGELTTDHGKIQTPIFMPVGTLGSVKGVHQRELRDDINAEIILGNTYHLYLRPGLDVLEKAGGLHKFNGWDRPILTDSGGFQVFSLAENRKLSEEGAMFRSHIDGSKHFFTPENVMDIQRTIGADIIMAFDECPPGTSTYEYAKTSLELTQRWLERCVKRFDETESKYGYSQTLFPIIQGCVYNDLRIKAAEHAASLNREGYAIGGLAVGEPVEDMYSMIEVVNEVLPKDKPRYLMGVGTPVNILEAISRGVDMFDCVMPTRNGRNGMIFTSEGIINIKNKKWHDDFSPIDPNGTSYVDQAYSKAYVRHLIHSGELLGSQICSIHNLAFYLWLVREAREHINAGTFASWKEIMVKKLAARL

SEQ ID NO: 56464 - protein, 390 aa, Labilithrix luteola
  misc_feature (1)..(390): tr|A0A0K1QCH6|A0A0K1QCH6_9DELT Queuine tRNA-ribosyltran sferase OS=Labilithrix luteola OX=1391654 GN=tgt PE=3 S V=1
MAGPRTEGFSFRVLATSGHARRTVLTTPHGEVDTPTFMPVGTQGSVKGLTPEEVAQTGARIVLGNTYHLWLRPGPDIVSKMKGLHGFSRWPHAMLTDSGGFQAFSLGANGGKKPGESLVKLDEQGVTFRSHLDGSKQHLSPEEAVRVQGLLGADIQMQLDICPPGDSPRPVVEAAVKQTTRWAKRALATPRPPKQALFGIIQGACFADLRRAHAEELAALDPGFDGLALGGFSVGEPIPKMYETLHEMAHLVDPERPRYLMGVGTPRDLLEGIDAGIDMFDCVLPTRNARNGQALTRFGRVVVKQARHREDERPIDPECTCPCCKGGYSRAYLRHLYIAGEMTVLRLLSVHNLHFYGELVAGARAAIQDGTWPAYKAAAIARMSSGEDQE

SEQ ID NO: 56465 - protein, 384 aa, Labrenzia aggregata
  misc_feature (1)..(384): tr|A0NQV0|A0NQV0_LABAI Queuine tRNA-ribosyltransferase OS=Labrenzia aggregata (strain ATCC 25650 / DSM 13394 / JCM 20685 / NBRC 16684 / NCIMB 2208 / IAM 12614) OX=38 4765 GN=tgt PE=3 SV=1
MTEETGKTFSFKLITTDGAARRGEITTPHGVVRTPAFMPVGTQATVKAMYPEQVRETGADVVLGNTYHLMLRPTAERVAKLGGLHTFMNWPHTILTDSGGFQVMSLAQLRKLDEDGVRFQSHIDGQKYHLTPERSVEIQGLLGSDIQMQLDECIKLPSPREEVQRAMELSLRWAERSRKQFEAMGGPGKGQGLYGIVQGGDQPDLRVRSAEELGKMPFEGYSVGGLAVGEPQDVMLSMLDITTPVMPVNKPRYLMGVGTPDDLLESVKRGIDQFDCVMPTRAGRHGLAYTRYGKVNLKNARHQEDPRPLDEASTCPASSVYSRAYLHHLVRAGEGLAGMLLTWNNIAYYQFLMQGMRDAIEAGRFEDFYAKTKEDWARGDIAAL

SEQ ID NO: 56466 - protein, 384 aa, Labrenzia aggregata
  misc_feature (1)..(384): tr|A0A0M6XZ51|A0A0M6XZ51_9RHOB Queuine tRNA-ribosyltran sferase OS=Labrenzia aggregata OX=187304 GN=tgt PE=3 SV =1
MTEKTGKTFSFKLITTDGAARRGEITTPHGVVRTPAFMPVGTQATVKAMYPEQVRETGADVVLGNTYHLMLRPTAERVARLGGLHTFMNWPHTILTDSGGFQVMSLAQLRKLDEDGVRFQSHIDGQKYHLTPERSVEIQGLLGSDIQMQLDECIKLPSPREEVQRAMELSLRWAERSRNQFEAMGGPGKGQGLYGIVQGGDQPDLRIRSAEELGKMPFEGYSVGGLAVGEPQDVMLSMLDITTPVMPVDKPRYLMGVGTPDDLLESVKRGIDQFDCVMPTRAGRHGLAYTRYGKVNLKNARHQDDPRPLDEASTCPASSVYSRAYLHHLVRAGEGLAGMLLTWNNIAYYQYLMQGMRDAIGAGSFEDFYSKTKEDWARGDIAAL

SEQ ID NO: 56467 - protein, 383 aa, Labrenzia alba
  misc_feature (1)..(383): tr|A0A0M6YV51|A0A0M6YV51_9RHOB Queuine tRNA-ribosyltran sferase OS=Labrenzia alba OX=311410 GN=tgt PE=3 SV=1
MSDNNKKFGFKLIKTDGMARRGEISTPHGIVNTPVFMPVGTQGTVKAMYPEQVRQTGADVVLGNTYHLMLRPTAERVARLGGLHKFMNWPHTILTDSGGFQVMSLAQLRKLDEDGVRFQSHIDGSKHHLTPERSIEIQGLLGSDIQMQLDECIKLPSPKEEIQRAMELSLRWAERSRRQFEEMNGPLKGQGLYGIVQGGDQPDLRIRSAEELGKMPFEGYSVGGLAVGEPQEVMLRMLDITTPVMPTGKPRYLMGVGTPDDLLESVKRGIDQFDCVMPTRAGRHGLAYTRYGKVNLKNARHQDDPRSLDEGNDCPATSTYSRAYLHHLVRAGEGLAGMLLTWNNLAYYQQLMLGMREAIEQGRFEDFYAQTKADWAKGDIPAL

SEQ ID NO: 56468 - protein, 383 aa, Labrenzia alba
  misc_feature (1)..(383): tr|A0A0M7AUT2|A0A0M7AUT2_9RHOB Queuine tRNA-ribosyltran sferase OS=Labrenzia alba OX=311410 GN=tgt PE=3 SV=1
MSETAKKFNFKLIATDGMARRGEITTPHGVVRTPAFMPVGTQATVKAMYPGQVRETGADVVLGNTYHLMLRPTAERVDRLGGLHTFMNWPHTILTDSGGFQVMSLAQLRKLDEEGVRFQSHIDGRKYHLTPERSVEIQGLLGSDIQMQLDECIKLPSPKEEIQRAMELSLRWAERSRTQFEAMGGPAKGQGLYGIVQGGDQPDLRIRSAESLGKLPFEGFSVGGLAVGEPQDVMLQMLDIATPVMPVDKPRYLMGVGTPDDLLESVKRGIDQFDCVMPTRAGRHGLAYTKFGKVNLKNARHQDDARPLDAENQCPASSVYSRAYLHHLVRAGEGLAGMLLTWNNIAYYQQLMQGMRDAIEEGRFDEFYARTKEDWARGDIAAL

SEQ ID NO: 56469 - protein, 382 aa, Labrenzia alexandrii
  misc_feature (1)..(382): tr|A0A0M7AL13|A0A0M7AL13_9RHOB Queuine tRNA-ribosyltran sferase OS=Labrenzia alexandrii OX=388408 GN=tgt PE=3 S V=1
MTETKKFGFKLITTDGMARRGEINTPHGVVHTPAFMPVGTQATVKAMFTDHVRETGADVVLGNTYHLMLRPTAERVDRLGGLHKFMNWPHTILTDSGGFQVMSLAQLRKLDEDGVRFQSHIDGSKHHLTPERSVEIQGLLGSDIQMQLDECIKLPSPREEVQRAMELSLRWAERSRTQFEKMRGPGKGQGLYGIVQGGDVPELRIRSAEELAKLPMEGYSVGGLAVGEPQEVMLKMLDITTPVMPVDKPRYLMGVGTPDDLLESVKRGIDQFDCVMPTRAGRHGLAYTRFGKVNLKNARHQDDPRPLDEESACPATSTYSRAYLHHLFRAGEALSGMLLTWNNIAYYQTLMQGMRDAIEESRFEEFYAKTKEDWARGDIAAL

SEQ ID NO: 56470 - protein, 382 aa, Labrenzia alexandrii
  misc_feature (1)..(382): tr|A0A5E8GWW6|A0A5E8GWW6_LABAD Queuine tRNA-ribosyltran sferase OS=Labrenzia alexandrii (strain DSM 17067 / NCI MB 14079 / DFL-11) OX=244592 GN=tgt PE=3 SV=1
MTETKKFGFKLITTDGMARRGEINTPHGVVHTPAFMPVGTQATVKAMFTDHVRETGADVVLGNTYHLMLRPTAERVDRLGGLHKFMNWPHTILTDSGGFQVMSLAQLRKLDEDGVRFQSHIDGSKHHLTPERSVEIQGLLGSDIQMQLDECIKLPSPREEVQRAMELSLRWAERSRTQFDKMRGPGKGQGLYGIVQGGDVPELRIRSAEELAKLPMEGYSVGGLAVGEPQEVMLKMLDITTPVMPVDKPRYLMGVGTPDDLLESVKRGIDQFDCVMPTRAGRHGLAYTRFGKVNLKNARHQDDPRPLDEESACPATSTYSRAYLHHLFRAGEALSGMLLTWNNIAYYQTLMQGMRDAIEESRFEEFYAKTKEDWARGDIAAL

SEQ ID NO: 56471 - protein, 383 aa, Labrenzia marina
  misc_feature (1)..(383): tr|A0A2S3UP18|A0A2S3UP18_9RHOB Queuine tRNA-ribosyltran sferase OS=Labrenzia marina OX=281252 GN=tgt PE=3 SV=1
MSENEKTFKFKLITTDGNARRGEISTPHGIVRTPAFMPVGTQATVKAMYPDQVRETGADVVLGNTYHLMLRPTAERVARLGGLHTFMNWPHTILTDSGGFQVMSLAQLRKLDEDGVRFQSHIDGSKHHLTPERSVEIQGLLGSDIQMQLDECIRLPSPKEEVQRAMELSLRWAERSRAQFERMGGPGKGRGLYGIVQGGDQPDLRIRSAQELGEMPFEGYSVGGLAVGEPQDVMLAMLDITTPVMPADKPRYLMGVGTPDDLLESVKRGIDQFDCVMPTRAGRHGLAYTRFGKVNLKNARHQDDPRPLDGENSCPAASIYSRAYLHHLVRAGEGLAGMLLTWNNIAYYQQLMQGMRDAIEAGGFEDFYARTKEDWARGDIPVL

SEQ ID NO: 56472 - protein, 383 aa, Labrenzia sp.
  misc_feature (1)..(383): tr|A0A222F2L8|A0A222F2L8_9RHOB Queuine tRNA-ribosyltran sferase OS=Labrenzia sp. VG12 OX=2021862 GN=tgt PE=3 SV =1
MSQDQNTFGFKLITTDGTARRGEITTPHGIVRTPAFMPVGTQATVKAMYPEQVRETGADVVLGNTYHLMLRPTAERVAKLGGLHKFMNWPHTILTDSGGFQVMSLAQLRKLDEDGVRFQSHIDGQKYHLTPERSVEIQGLLGSDIQMQLDECIKLPSPKEEVQRAMELSLRWAERSRRQFEAMGGPVKGQGLYGIVQGGDQPDLRIRSAEELGKMPFEGYSVGGLAVGEPQEVMLKMLDITTPVMPVDKPRYLMGVGTPDDLLESVKRGIDQFDCVMPTRAGRHGLAYTRFGKVNLKNARHQEDPRPLDAEAECPAASIYSRAYLHHLVRAGEGLAGMLLTWNNIAYYQFLMQGMRDAIEAGRFEDFYAETKENWARGDIPAL

SEQ ID NO: 56473 - protein, 383 aa, Labrenzia sp.
  misc_feature (1)..(383): tr|A0A4Y6RZH5|A0A4Y6RZH5_9RHOB Queuine tRNA-ribosyltran sferase OS=Labrenzia sp. PHM005 OX=2590016 GN=tgt PE=3 SV=1
MTDTQKKFGFKLIATDGLARRGEITTPHGVVRTPAFMPVGTQATVKAMFTDHVRETGADVVLGNTYHLMLRPTAERVDRLGGLHKFMNWPHTILTDSGGFQVMSLAQLRKLDEDGVRFQSHIDGSKHHLTPERSIEIQGLLGSDIQMQLDECIKLPSPKEEVQRAMELSLRWAARSRAQFESMGGPSKGQGLYGIVQGGDVPDLRVRSAEELGKMPFEGYSVGGLAVGEPQEVMLKMLDITTPVMPVDKPRYLMGVGTPDDLLESVKRGIDQFDCVMPTRAGRHGLAYTRFGKVNLKNARHQDDPRPLDEEAACPATSTYSRAYLHHLFRAGEALSGMLLTWNNIAYYQTLMQGMRDAIEEGRFEDFYAKTKEDWARGDIEAL

SEQ ID NO: 56474 - protein, 383 aa, Labrenzia suaedae
  misc_feature (1)..(383): tr|A0A1M7KFH6|A0A1M7KFH6_9RHOB Queuine tRNA-ribosyltran sferase OS=Labrenzia suaedae OX=735517 GN=tgt PE=3 SV=1
MSASAKPFSFKLIKTDGMARRGEISTPHGTVQTPAFMPVGTQATVKAMFMDDVEQTGAEVVLGNTYHLMLRPTAERVDRLGGLHKFMNWPHTILTDSGGFQVMSLAQLRKLDEDGVKFQSHIDGQRYHLTPERSIEIQGLLGSDIQMQLDECIKLPSPPEEVKRAMELSLRWAERSRRQFETMGGPGKGQGLYGIVQGGDVPDLRIRSAEELGKMPFEGYSVGGLAVGEPQDVMLRMLDITTPVMPVDKPRYLMGVGTPDDLLESVKRGIDQFDCVMPTRAGRHGLAYTRFGKVNLKNARHADDPRPLDEEAACPATSTYSRAYLHHLVRCGEGLAAMLLTWNNIAYYQTLMKGMRDAIEAGTFEAFYQKTKEDWARGDIAAL

SEQ ID NO: 56475 - protein, 384 aa, Labrys okinawensis
  misc_feature (1)..(384): tr|A0A2S9QCK5|A0A2S9QCK5_9RHIZ Queuine tRNA-ribosyltran sferase OS=Labrys okinawensis OX=346911 GN=tgt PE=3 SV= 1
MLKTPETTTAGEVSFAIHATEGTARTGALHLGRGSVRTPAFMPVGTAGTVKAMYVDQVKDLGADIILGNTYHLMLRPGAERVAALGGLHEFSRWQGPILTDSGGFQVMSLAGLRKLDKNGVTFRSHIDGSHHRLTPERSVEIQTLLDSDIIMQLDECVRLPSTRKDIERAMRLSLDWAERSKSAFGTQPGKAIFGIVQGGDIPDLRIASAEALSSMNFPGYAIGGLAVGEPQAVMLDMIETVEPHLPREKPRYLMGVGTPDDLIESVSRGIDMFDCVMPTRAGRHGLAYSRFGKVNLKNARHAEDPRPLDEASSCPAARDYSRAYLHHLTKANEILGMMLLTWINLAYYQDLMAGMRAAIAEGRFADFKAKTKENWARGDIAKL

SEQ ID NO: 56476 - protein, 391 aa, Laceyella sacchari
  misc_feature (1)..(391): tr|A0A2I7SRE0|A0A2I7SRE0_LACSH Queuine tRNA-ribosyltran sferase OS=Laceyella sacchari OX=37482 GN=tgt PE=3 SV=1
MVISDANLVGGNILAVRYELIKTCKQSGARLGRLHTPHGTIETPIFMPVGTQATVKTMSPEELKEMNAQIILSNTYHLFLRPGHDIVKEAGGLHSFMNWDRPILTDSGGFQVFSLSQLRNITEEGVTFRSHLSGEKLFISPEKAMEIQNALGADIIMAFDECPPHPAEKAYVKASTERTYRWLKRCIKAHARPHDQALFGIVQGGMHQDLREESAKQLVELDLPGYAVGGLSVGEPKEVMYEVLSYTTPHLPVHKPRYLMGVGSPDALIQGAILGIDMFDCVLPTRIARNGTTMTSQGRLVVRNAKFARDYTPLDPACDCYTCRNYTRAYLRHLIKADETFGLRLTTYHNLYFLLKLMEQVRQAIREDRLLDFRDEFMMKYYGSLSPNAAF

SEQ ID NO: 56477 - protein, 378 aa, Laceyella sacchari
  misc_feature (1)..(378): tr|A0A4R4ANL0|A0A4R4ANL0_LACSH Queuine tRNA-ribosyltran sferase OS=Laceyella sacchari OX=37482 GN=tgt PE=3 SV=1
MAVRYELIKTCKQSGARLGRLHTPHGTIETPIFMPVGTQATVKTMSPEELKEMNAQIILSNTYHLFLRPGHDIVKEAGGLHSFMNWDRPILTDSGGFQVFSLSQLRNITEEGVTFRSHLSGEKLFISPEKAMEIQNALGADIIMAFDECPPHPAEKAYVKASTERTYRWLERCIKAHARPHDQALFGIVQGGMHQDLREESAKQLVELDLPGYAVGGLSVGEPKEVMYEVLSYTTPHLPVHKPRYLMGVGSPDALIQGAILGIDMFDCVLPTRIARNGTTMTSQGRLVVRNAKFARDYTPLDPACDCYTCRNYTRAYLRHLIKADETFGLRLTTYHNLYFLLKLMEQVRQAIREDRLLDFRDEFMMKYYGSLNPNAAF

SEQ ID NO: 56478 - protein, 378 aa, Laceyella sediminis
  misc_feature (1)..(378): tr|A0A2T0YKK5|A0A2T0YKK5_9BACL Queuine tRNA-ribosyltran sferase OS=Laceyella sediminis OX=573074 GN=tgt PE=3 SV =1
MAVRYELIKTCKQSGARLGRLHTPHGTIETPIFMPVGTQATVKTMSPEELKEMNAQIILSNTYHLFLRPGHDIVKEAGGLHSFMNWDRPILTDSGGFQVFSLSQLRNITEEGVTFRSHLSGEKLFISPEKAMEIQNALGADIIMAFDECPPHPAEKAYVKASTERTYRWLKRCIKAHARPHDQALFGIVQGGMHQDLREESAKQLVELDLPGYAVGGLSVGEPKEVMYEVLSYTTPHLPEHKPRYLMGVGSPDALIQGAILGIDMFDCVLPTRIARNGTTMTSQGRLVVRNAKFARDYTPLDPACDCYTCRNYTRAYLRHLIKADETFGLRLTTYHNLYFLLKLMEQVRQAIREDRLLDFRDEFMMKYYGSLNPNAAF

SEQ ID NO: 56479 - protein, 376 aa, Lachnoanaerobaculum orale
  misc_feature (1)..(376): tr|A0A3P3Q4X7|A0A3P3Q4X7_9FIRM Queuine tRNA-ribosyltran sferase OS=Lachnoanaerobaculum orale OX=979627 GN=tgt P E=3 SV=1
MKYEIKALDKKAKSATMETVHGTVETPLFMNVGTVAAIKGAVSTDDLKEIGCQVELSNTYHLHVRTGDKLIKEFGGLHEFMHWDRPILTDSGGFQVFSLAKLRKIKEEGVNFNSHIDGRKIFMGPEESMQIQSNLGSTIAMAFDECPPALAERKYIEASVARTTRWLQRCKTEMDRLNSLEDTVNKEQLLFAINQGGIIDDIRISHAKEISEMDLDGYAIGGLAVGESHDEMYHILDVTVEHLPQNKPTYLMGVGTPINILEAVERGVDFFDCVYPSRNGRHGHVYTNHGKLNLFNKKFELDKRPIEEGCNCPACRSYSRGYIRHLLKANEMLGMRLCVLHNLYFYNTMMSEIRTAIREGRYTEYKNNKIRTMLEG

SEQ ID NO: 56480 - protein, 376 aa, Lachnoanaerobaculum saburreum
  misc_feature (1)..(376): tr|E6LQG7|E6LQG7_9FIRM Queuine tRNA-ribosyltransferase OS=Lachnoanaerobaculum saburreum DSM 3986 OX=887325 GN= tgt PE=3 SV=1
MKYEIKAFDKKAKSATMETVHGTVETPLFMNVGTVAAIKGAVSTDDLKEIGCQVELSNTYHLHVRTGDKLIKEFGGLHEFMHWDRPILTDSGGFQVFSLAKLRKIKEEGVNFNSHIDGRKIFMGPEESMQIQSNLGSTIAMAFDECPPALAERKYIETSVARTTRWLQRCKTEMDRLNSLEDTVNKEQLLFAINQGGIIDDIRISHAKDISEMNLDGYAIGGLAVGESHEEMYHILDVTVEHLPQNKPTYLMGVGTPINILEAVDRGVDFFDCVYPSRNGRHGHVYTNHGKLNLFNKKFELDKRPIEEGCTCPACRSYSRGYIRHLLKANEMLGMRLCVLHNLYFYNTMMSEIRTAIREGRYTEYKNNKIRTMLEG

SEQ ID NO: 56481 - protein, 376 aa, Lachnoanaerobaculum saburreum
  misc_feature (1)..(376): tr|A0A133ZYG6|A0A133ZYG6_9FIRM Queuine tRNA-ribosyltran sferase OS=Lachnoanaerobaculum saburreum OX=467210 GN=t gt PE=3 SV=1
MKYEIKALDKKAKSATMETVHGTVETPLFMNVGTVAAIKGAVSTDDLKEIGCQVELSNTYHLHVRTGDKLIKEFGGLHEFMHWDRPILTDSGGFQVFSLAKLRKIKEEGVNFNSHIDGRKIFMGPEESMQIQSNLGSTIAMAFDECPPALAERKYIEASVARTTRWLQRCKTEMERLNSLEDTINKEQLLFAINQGGILDDIRIAHAKEISEMDLDGYAIGGLAVGESHEEMYHILDVTVEHLPQNKPTYLMGVGTPINILEAVERGVDFFDCVYPSRNGRHGHVYTNHGKLNLFNKKFELDKRPIEEGCNCPACRSYSRGYIRHLLKANEMLGMRLCVLHNLYFYNTMMSEIRTAIREGRYTEYKNNKIRTMLEG

SEQ ID NO: 56482 - protein, 378 aa, Lachnoanaerobaculum sp.
  misc_feature (1)..(378): tr|A0A3P3QZP1|A0A3P3QZP1_9FIRM Queuine tRNA-ribosyltran sferase OS=Lachnoanaerobaculum sp. KCOM 2030 OX=2490855 GN=tgt PE=3 SV=1
MKYEIKAVDNRAKSATMETVHGTVETPLFMNVGTVAAIKGAVSTDDLKEIGCQVELSNTYHLHVRTGDKLIKEFGGLHEFMHWDRPILTDSGGFQVFSLAKLRKIKEEGVAFNSHIDGRKIFMGPEESMQIQSNLGSTIAMAFDECPPALAERKYIEESVARTTRWLQRCKVEMDRLNSLEDTINKEQLLFGINQGGIIDDIRISHAKAISEMNLDGYAIGGLAVGESHEEMYHILDVTVEHLPKDKPTYLMGVGTPINILEAVDRGVDFFDCVYPSRNGRHGHVYTNCGKLNLFNKKYELDKRPIEEGCNCPACRSYSRGYIRHLLKANEMLGMRLCVLHNLYFYNTMMSEIRTAIRENRYTEYKNNKIRTMLEGSK

SEQ ID NO: 56483 - protein, 378 aa, Lachnoanaerobaculum sp.
  misc_feature (1)..(378): tr|K0Y377|K0Y377_9FIRM Queuine tRNA-ribosyltransferase OS=Lachnoanaerobaculum sp. OBRC5-5 OX=936595 GN=tgt PE= 3 SV=1
MKYEIKAVDNRAKSATMETVHGTVETPLFMNVGTVAAIKGAVSTDDLKEIGCQVELSNTYHLHVRTGDKLIKEFGGLHEFMHWDRPILTDSGGFQVFSLAKLRKIKEEGVAFNSHIDGRKIFMGPEESMQIQSNLGSTIAMAFDECPPALAERRYIEESVARTTRWLQRCKVEMDRLNSLEDTINKEQLLFGINQGGVIDDIRISHAKEISEMNLDGYAIGGLAVGESHEEMYHILDVTVEHLPKDKPTYLMGVGTPINILEAVDRGVDFFDCVYPSRNGRHGHVYTNYGKLNLFNKKYELDKRPIEEGCNCPACRSYSRGYIRHLLKANEMLGMRLCVLHNLYFYNTMMSEIRTAIRENRYTEYKNNKIRTMLEGSK

SEQ ID NO: 56484 - protein, 378 aa, Lachnoanaerobaculum umeaense
  misc_feature (1)..(378): tr|A0A385Q2Q3|A0A385Q2Q3_9FIRM Queuine tRNA-ribosyltran sferase OS=Lachnoanaerobaculum umeaense OX=617123 GN=tg t PE=3 SV=1
MKYEIKAVDKRAKSATMETVHGTVETPLFMNVGTVAAIKGAVSTDDLKEIGCQIELSNTYHLHVRTGDKLIKEFGGLHEFMNWDRPILTDSGGFQVFSLAKLRKIKEEGVAFNSHIDGRKIFMGPEESMQIQSNLGSTIAMAFDECPPALAERKYIEDSVARTTRWLLRCKTEMDRLNSLEDTINKEQLLFGINQGGVIDDIRISHAKAISEINLDGYAIGGLAVGESHEEMYHILDVTVEHLPKDKPTYLMGVGTPINILEAVDRGVDFFDCVYPSRNGRHGHLYTNYGKLNLFNKKYELDKRPIEEGCKCPACRSYSRGYIRHLLKANEMLGMRLCVLHNLYFYNTMMSEIRTAIRENRYTEYKNNKIRTMLEGSK

SEQ ID NO: 56485 - protein, 386 aa, Lachnobacterium bovis
  misc_feature (1)..(386): tr|A0A1H3HM49|A0A1H3HM49_9FIRM Queuine tRNA-ribosyltran sferase OS=Lachnobacterium bovis DSM 14045 OX=1122142 G N=tgt PE=3 SV=1
MAKYELLKQEGRAKRGVFHTIHGDIQTPVFMNVGTVAAIKGAVSTNDLKNIKCQVELSNTYHLHVRTGDKLIKEVGGLHKFMNWDRPILTDSGGFQVFSLAGLRKIKEEGVYFNSHIDGRKIFMGPEESMQIQSNLGSTIAMAFDECPPALAERRYVSDSVARTTRWLERCKKEMARLNSLEDTVNKEQLLFGINQGAVYDDIRIDHAKRISEMDLDGYAVGGLAVGESHEQMYGVLDAVVPHLPVNKPTYLMGVGTPANILEGVERGIDFFDCVYPSRNGRHGHVYTNQGKINLFNKKYEKDMRPIEEGCGCPACQSYSRAYIRHLLKAKEMLGMRLCVLHNLYFYNTMMEEIRTSLEEGRFKSYKEEKLYNMGQINREKEQENG

SEQ ID NO: 56486 - protein, 386 aa, Lachnobacterium bovis
  misc_feature (1)..(386): tr|A0A1H9RJ69|A0A1H9RJ69_9FIRM Queuine tRNA-ribosyltran sferase OS=Lachnobacterium bovis OX=140626 GN=tgt PE=3 SV=1
MAKYELLKQEGRAKRGVFHTTHGDIQTPVFMNVGTVAAIKGAVSTNDLKNIKCQVELSNTYHLHVRTGDKLIKEVGGLHKFMNWDRPILTDSGGFQVFSLAQLRKIKEEGVYFNSHIDGRKIFMGPEESMQIQSNLGSTIAMAFDECPPALAERKYVIDSVARTTRWLERCKKEMARLNSLEDTVNKEQLLFGINQGAVYDDIRIDHAKRISEMDLDGYAVGGLAVGESHEQMYSVLDAVVPHLPVNKPTYLMGVGTPANILEGVERGIDFFDCVYPSRNGRHGHVYTNQGKINLFNKKYEKDMRPIEEGCSCPACQSYSRAYIRHLLKAKEMLGMRLCVLHNLYFYNTMMEEIRTSLEEGRFKSYKEEKLYNMGQINREKEQENN

SEQ ID NO: 56487 - protein, 378 aa, Lachnoclostridium phytofermentans
  misc_feature (1)..(378): sp|A9KHU4|TGT_LACP7 Queuine tRNA-ribosyltransferase OS= Lachnoclostridium phytofermentans (strain ATCC 700394 / DSM 18823 / ISDg) OX=357809 GN=tgt PE=3 SV=1
MYKLICKDGNAKRGEFTTVHGKIQTPVFMNVGTAAAIKGAVSTMDLQEIGTQVELSNTYHLHVRPGDEVVKKLGGLHKFMVWDKPILTDSGGFQVFSLAGLRKIKEEGVYFNSHIDGKKIFMGPEESMRIQSNLASTIAMAFDECPPHPATREYMEDSVARTTRWLLRCKNEMNRLNTLEDTINKHQMLFGINQGGTYTDIRVEHAKRISELDLDGYALGGLAVGESHSEMYRIIEETVPYLPEAKPTYLMGVGTPANILEAVERGVDFFDCVYPARNGRHGHAYTNHGKMNLLNAKYELDDRPIEEGCGCPVCKNYSRGYIRHLLKAKEMLGLRFLVTHNLYFYNKMMEEIREAIENQNFASYKKKKLEGFAAEQGN

SEQ ID NO: 56488 - protein, 378 aa, Lachnoclostridium phytofermentans
  misc_feature (1)..(378): tr|A0A3D2X7U7|A0A3D2X7U7_9FIRM Queuine tRNA-ribosyltran sferase OS=Lachnoclostridium phytofermentans OX=66219 G N=tgt PE=3 SV=1
MYKLICKDGNAKRGEFSTVHGKIQTPVFMNVGTAAAIKGAVSTMDLQEIKTQVELSNTYHLHVRPGDEVIKKLGGLHKFMVWDKPILTDSGGFQVFSLSGLRKIKEEGVYFNSHVDGRKIFMGPEESMRIQSNLASTIAMAFDECPPHPATREYMEDSVARTTRWLLRCKNEMNRLNTLEDTINKHQMLFGINQGGTYTDIRIEHAKRISELDLDGYALGGLAVGESHSEMYRIIEETVPYLPEAKPTYLMGVGTPANILEAVERGVDFFDCVYPARNGRHGHAYTNHGKMNLLNAKYELDDRPIEEGCACPVCKTYSRGYIRHLLKAKEMLGLRFLVTHNLYFYNKMMEEIREAIENQNFASYKKKKLEGFAAEQGN

SEQ ID NO: 56489 - protein, 377 aa, Lachnoclostridium sp.
  misc_feature (1)..(377): tr|A0A2T3FPF3|A0A2T3FPF3_9FIRM Queuine tRNA-ribosyltran sferase OS=Lachnoclostridium sp. SNUG30099 OX=2126738 G N=tgt PE=3 SV=1
MKDFWYELKHVCKQSGARYGILHTPHGDVETPMFMPVGTLATVKGIAPEMLKEMGSQVILSNTYHLWLRPGEDIVAKAGGLHKFMNYDGPMLTDSGGFQVFSLGKTRKIKEEGVYFKSIIDGKSLFLSPEKAIDIQNKLGADMIMSLDECAPYPATYDYMKHSVERTIRWAKRGKEAHHNEKQALFGIVQGGEYPDLREKCAKALVEMDFPGYSIGGTSVGEPKDVMYKMVEDAIQWLPEDKPRYLMGVGNPIDLIEAAIRGIDMYDCVLPTRVARHGALMTHHGRMNINNEKFKEDFTPIDPECDCYTCRNYTRAYLRHLHKSDELFGKTLLSIHNVRFLLQLSEDIRKAIQEDRLLDFKEEFLDKYGRDVYKRAF

SEQ ID NO: 56490 - protein, 376 aa, Lachnoclostridium sp.
  misc_feature (1)..(376): tr|A0A1Y4SBF0|A0A1Y4SBF0_9FIRM Queuine tRNA-ribosyltran sferase OS=Lachnoclostridium sp. An131 OX=1965555 GN=tg t PE=3 SV=1
MYRIVKKDGNAKHAEFTTVHGTVQTPVFMNVGTAAAIKGAVATSDLEQIGTQIELSNTYHLHVRPGDQIVKKLGGLHKFMSWDKPILTDSGGFQVFSLSSLRKIKEEGVYFNSHVDGRKIFMGPEESMQIQSNLASTIAMAFDECAPALADRGYVERSVARTTRWLARCKAEMKRLNALPDTINPDQLLFGINQGAVYEDIRIEHAKQITEMELDGYAIGGLAVGETHEQMYQIIEAVVPHLPEDKPTYLMGVGTPANILEAVDRGVDFFDCVYPSRNGRHGHLYTNYGKINLFNAKYELDERPIEIGCQCPACRRYSRAYIRHLLKAKEMLGMRLCVLHNLYFYNTMMVEIRDAIDAGRYQAYKKEKLEKMRSGS

SEQ ID NO: 56491 - protein, 380 aa, Lachnospira multipara
  misc_feature (1)..(380): tr|A0A1H5UTN0|A0A1H5UTN0_9FIRM Queuine tRNA-ribosyltran sferase OS=Lachnospira multipara OX=28051 GN=tgt PE=3 S V=1
MYKILATSGNAKRAEFTTVHGTVQTPVFMNVGTVAAIKGAVATTDLQEIGTQIELSNTYHLHVRTGDKLIKELGGLHKFMNWDKPILTDSGGFQVFSLAGLRKIKEEGVTFQSHIDGHKIFMGPEESMQIQSNLGSTIAMAFDECAPAKADRNYVEKSVARTTRWLERCKKEMDRLNSLEDTVNPHQMLFGINQGAVYDDIRIEHAKRITEMDLDGYAVGGLAVGETHEEMYHVLDKVVPYLPKEKPTYLMGVGTPANILEAVDRGIDFFDCVYPSRNGRHGHVYTKFGKINLFNAKYEKDLAPIEEGCNCPACRNYSRAYIRHLLKAKEMLGMRLCVLHNLYFYNHLMTDIRGAIEAGNYKSFKDERLYLLKTYDKDKK

SEQ ID NO: 56492 - protein, 378 aa, Lachnospira pectinoschiza
  misc_feature (1)..(378): tr|A0A174YIA8|A0A174YIA8_9FIRM Queuine tRNA-ribosyltran sferase OS=Lachnospira pectinoschiza OX=28052 GN=tgt PE =3 SV=1
MYKILKTDGRAKRAEFTTVHGTVQTPVFMNVGTVAAIKGAVATTDLQEIGTQIELSNTYHLHVRPGDKLIKELGGLHKFMNWNKPILTDSGGFQVFSLAGLRKIKEEGVTFQSHIDGHKIFMGPEESMQIQSNLGSTIAMAFDECAPAKADRKYIINSVERTTRWLERCKKEMNRLNSLEDTINKSQMLFGINQGAIYDDIRIDHAKRISELDLDGYAVGGLAVGETHEEMYHVLDEVVPYLPQNKPTYLMGVGTPANILESVDRGIDFFDCVYPSRNGRHGHVYTKFGKINLFNAKYEKDTAPIEEGCQCPACRNYSRAYIRHLLKAKEMLGMRLCVLHNLYFYNHLMEDIRGAIDAGNYKSFKDERLYLLKTYDKK

SEQ ID NO: 56493 - protein, 380 aa, Lachnospira pectinoschiza; identical to SEQ ID NO: 56491
  misc_feature (1)..(380): tr|A0A1G9Z642|A0A1G9Z642_9FIRM Queuine tRNA-ribosyltran sferase OS=Lachnospira pectinoschiza OX=28052 GN=tgt PE =3 SV=1

SEQ ID NO: 56494 - protein, 371 aa, Lachnospiraceae bacterium
  misc_feature (1)..(371): tr|F7JS93|F7JS93_9FIRM Queuine tRNA-ribosyltransferase OS=Lachnospiraceae bacterium 2_1_58FAA OX=658082 GN=tgt PE=3 SV=1
MYELIKKDGRAKRGRFHTVHGTIETPVFMNVGTAAAIKGAVSTDDLRGIKTQVELSNTYHLHVRPGDEVVKKMGGLHKFMNWDKPILTDSGGFQVFSLAGLRKIKEEGVHFNSHIDGRKIFMGPEESMQIQSNLASTIAMAFDECPSSVADRVYMRDSVARTTRWLKRCKAEMDRLNTLQDTINPHQMLFGINQGGIYEDIRIEHAKQIVDLDLDGYAVGGLAVGESHEEMYRILDAVVPYLPEQKPTYLMGVGTPINILEAVDRGVDFFDCVYPSRNGRHGHVYTNHGKLNLFNAKYELDDRPIEEGCQCPACRSYSRGYIRHLLKAKEMLGMRLCVLHNLYFYNTMMEEIRAAIEAGEYQVYKKKKSKE

SEQ ID NO: 56495 - protein, 380 aa, Lachnospiraceae bacterium
  misc_feature (1)..(380): tr|A0A352CNE0|A0A352CNE0_9FIRM Queuine tRNA-ribosyltran sferase OS=Lachnospiraceae bacterium OX=1898203 GN=tgt PE=3 SV=1
MNRYTLLKKDGRARRGRLDTVHGTVETPVFMNVGTVGAIKGAVSTEDLKEIGCQIELSNTYHLHVRTGDEVIRRLGGLHSFMVWDRPILTDSGGFQVFSLAGLRRIKEEGVTFASHIDGHRIFMGPEESMRIQSNLGSTIAMAFDECPDARSSRDYVVDSVRRTERWLVRCREELDRLNSLPDTLNREQMLFGINQGAVFDDIRIENADMISEMGLDGYAIGGLAVGETHEEMYHVLDVTVPHLPEDKPIYLMGVGTPVNIVEAVYRGVDFFDCVYPSRNARHGQLYTHRGKLNIKNAAYEEDIRPIEEGCCCPACRRYSRAYIRHLIKAGEMLGLRLCVLHNLYFYNHLMEEIREAIEEDRYGQFRDDFISGFGESPVD

SEQ ID NO: 56496 - protein, 378 aa, Lachnospiraceae oral
  misc_feature (1)..(378): tr|F3B0V9|F3B0V9_9FIRM Queuine tRNA-ribosyltransferase OS=Lachnospiraceae oral taxon 107 str. F0167 OX=575593 GN=tgt PE=3 SV=1
MKYEIKAVDKRAKSATMETVHGTVETPLFMNVGTVAAIKGAVSTDDLKEIGCQVELSNTYHLHVRTGDKLIKEFGGLHEFMHWDRPILTDSGGFQVFSLAKLRKIKEEGVAFNSHIDGRKIFMGPEESMQIQSNLGSTIAMAFDECPPALAERKYIEDSVARTTRWLQRCKVEMDRLNSLEDTINKEQLLFGINQGGIIDDIRISHAKTISEMNLDGYAIGGLAVGESHEEMYHILDMTVEHLPKDKPTYLMGVGTPINILEAVDRGVDFFDCVYPSRNGRHGHVYTNYGKLNLFNKKYELDKRPIEEGCNCPTCRSYSRGYIRHLLKANEMLGMRLCVLHNLYFYNTMMSEIRTAIRENRYTEYKNNKIRTMLEGSK

SEQ ID NO: 56497 - protein, 383 aa, Lachnotalea glycerini
  misc_feature (1)..(383): tr|A0A255I7F4|A0A255I7F4_9FIRM Queuine tRNA-ribosyltran sferase OS=Lachnotalea glycerini OX=1763509 GN=tgt PE=3 SV=1
MYKLIKQEGRAKRGEFHTVHGVIQTPVFMNVGTVAAIKGAVSTQDLYEIKTQVELSNTYHLHVRTGDKLIKQFGGLHKFMVWNKPILTDSGGFQVFSLAGLRKIKEEGVYFNSHIDGHKIFMGPEESMQIQSNLASTIAMAFDECPSSVAERKYIQASVERTTRWLHRCKKEMSRLNALEDTINKKQMLFGINQGGTFEDIRIEHAKIISELDMDGYAIGGLAVGESHSEMYRIIEETVPYLPVDKPTYLMGVGTPANILEAVERGVDFFDCVYPSRNGRHGHLYTRKGKINLFNVKYELDEKPIEEGCQCPACRTYSRAYIRHLLKAKEMLGMRLCVLHNLYFYNTMMEEIRQALDEGRFIEYKKAKLEGFLENDKPNITSF

SEQ ID NO: 56498 - protein, 378 aa, Lachnotalea sp.
  misc_feature (1)..(378): tr|A0A416EPS1|A0A416EPS1_9FIRM Queuine tRNA-ribosyltran sferase OS=Lachnotalea sp. AF33-28 OX=2292046 GN=tgt PE =3 SV=1
MYKLLKKDGRAKRAEFHTVHGVIQTPVFMNVGTVAAIKGAVSTADLEEIGTQVELSNTYHLHVRPGDHIVRQLGGLHKFMSWDRPILTDSGGFQVFSLAGLRKIKEEGVTFQSHIDGHKIFMGPEESMQIQSNLASTIAMAFDECAPHPCTREYMQNSVERTTRWLLRCKAEMDRLNSLPDTINRQQMLFGINQGGTFEDIRIWHAKEISQLKLDGYAVGGLAVGESHEEMYHILDVTVPFLPEDKPTYLMGVGTPANILEAVDRGVDFFDCVYPTRNGRHGHVYTNYGKLNLFNAKYELDDRPIEEGCQCPTCRRYSRAYIRHLLKAKEMLGMRLCVLHNLYFYNHLMEEIRGAIDAGCYGEFKQQKLAGFAMGGQK

SEQ ID NO: 56499 - protein, 379 aa, Lacibacter cauensis
  misc_feature (1)..(379): tr|A0A562SRL6|A0A562SRL6_9BACT Queuine tRNA-ribosyltran sferase OS=Lacibacter cauensis OX=510947 GN=tgt PE=3 SV =1
MAALQFQLQHTDPQSKARAGEITTDHGTIQTPIFMPVGTVGSVKSLTVEQLKSEVKAEIILGNTYHLYLRPGTEVLEAAGGLHKFNGWDRPILTDSGGYQVFSLAGNRKIKEEGVVFQSHIDGSKHLFTPESVMDIQRSIGADIVMAFDECPPYPSDYTYAKKSMELTHRWLERCIKHFHNTPDKYGYTQNLFPIVQGSTYKDLRTASSQFVANTNLTGCAIGGLSVGEPEEMMYEFTELCCDELPIQKPRYLMGVGTPWNILECIALGVDMFDCVMPTRNGRNAMLFTSKGVINIDNKKWEKDFSPLDDGIDCHISNYYSKAYLRHLIKAKEITGLTLASVHNLAFYLWLVKEARKHVLAGDFVSWKNELVPVLKTRL

SEQ ID NO: 56500 - protein, 379 aa, Lacibacter sp.
  misc_feature (1)..(379): tr|A0A4Q1CFA3|A0A4Q1CFA3_9BACT Queuine tRNA-ribosyltran sferase OS=Lacibacter sp. TTM-7 OX=2508719 GN=tgt PE=3 SV=1
MAALQFQLQYTDTQSKARAGEITTDHGTIQTPIFMPVGTVGSVKSLTVEQLKREVKAEIILGNTYHLYLRPGTDVLEAAGGLHKFNGWDKPILTDSGGYQVFSLAGNRKIKEEGVVFQSHIDGSKHLFTPENVMDVQRSIGADIVMAFDECPPYPSDYKYAHKSMELTHRWLDRCIKHFASTPDKYGYTQNLFPIIQGSTYKDLRKASSQFVANTNLTGCAIGGLSVGEPEEMMYEFTELCCDELPTQKPRYLMGVGTPWNILECIALGVDMFDCVMPTRNGRNAMLFTSKGVINIDNKKWEKDFSPLDDGIDCHISNYYSKAYLRHLIKAKEITGLTLASVHNLAFYLWLVKEARKHILAGDFTGWKNEMVPVLKTRL

SEQ ID NO: 56501 - protein, 372 aa, Lacimicrobium alkaliphilum
  misc_feature (1)..(372): tr|A0A0U2QNY7|A0A0U2QNY7_9ALTE Queuine tRNA-ribosyltran sferase OS=Lacimicrobium alkaliphilum OX=1526571 GN=tgt PE=3 SV=1
MKFEVLATDGKARRGRLEFERGTVETPAFMPVGTYGTVKGMTPEELENTGAEICLGNTFHLMLRPGTEIMKMHGDLHDFMHWQKPILTDSGGFQVFSLGDLRKISEEGVTFRSPINGEKIMLTPEKSMQVQRDLGADIVMIFDECTPYPATYEEARTSMELSLRWAGRSKSEHGDNPSALFGIVQGGMYEDLRQLSLEGLEKIGFDGYAIGGLSVGEPKEDMIRILDHTAHRIPADKPRYLMGVGKPEDIVEAVRRGIDMFDCVMPTRNARNGHLFVTGGVVKIRNARHKTDTAPLDEKCDCYTCKNYSRSYLHHLDKCNEILGARLNTIHNLRYYQRVMEGLRNAIAAGTLDDFVAQFYAAKEMDMPALGE

SEQ ID NO: 56502 - protein, 376 aa, Lacinutrix sp.
  misc_feature (1)..(376): tr|A0A4U0EKX5|A0A4U0EKX5_9FLAO Queuine tRNA-ribosyltran sferase OS=Lacinutrix sp. CAU 1491 OX=2565367 GN=tgt PE =3 SV=1
MIFKLEGKDSQSKARAGSITTDHGKIETPIFMPVGTVASVKGVHQRELKNDINPDIILGNTYHLYLRPQTTILEKAGGLHKFMNWGRNILTDSGGYQVYSLSANRKIKEEGVKFKSHIDGSYHTFTPENVMEIQRAIGADIIMAFDECTPYPCDYNYAKRSMHMTHRWLDRCINHLEKTPLKYDYNQAFFPIVQGSTYKDLRMQSAEYIANSGAVGNAIGGLSVGEPAEEMYTMTDVVCNILPEDKPRYLMGVGTPINILENIALGVDMFDCVMPTRNARNGMLFTAHGTINIKNKKWEDDFSPVDEMGITYVDTDYTKAYLRHLFSVNERLGAQIATIHNLGFYLWLVREARKHILAGDFRTWKDNMVKQMDKRL

SEQ ID NO: 56503 - protein, 376 aa, Lacinutrix sp.
  misc_feature (1)..(376): tr|A0A2K8XGE3|A0A2K8XGE3_9FLAO Queuine tRNA-ribosyltran sferase OS=Lacinutrix sp. Bg11-31 OX=2057808 GN=tgt PE= 3 SV=1
MTFELKGKDAQSSARAGVLTTDHGVIETPIFMPVGTVASVKGVHQRELKNDINPDIILGNTYHLYLRPQIDVLEKAGGLHKFMNWDRNILTDSGGYQVYSLSANRKIKEEGVKFKSHIDGSYHTFTPESVMEIQRSIGADIIMAFDECTPYPCDYNYAKRSMKMTHRWLDRCINHLEKVPFKYDYSQAFFPIVQGSCYKDLRVQSAEYIANSGAVGNAIGGLSVGEPAEEMYAMTEIVTAILPEDKPRYLMGVGTPINILENIALGVDMFDCVMPTRNARNGMLFTAHGSINIKNLKWRDDFSALDEMAITWVDTDYSKAYVRHLFTVNERLAAQIATIHNLGFYMWLVREARKHILAGDFRTWKDMMVKQMDKRL

SEQ ID NO: 56504 - protein, 376 aa, Lacinutrix venerupis
  misc_feature (1)..(376): tr|A0A420ZHE7|A0A420ZHE7_9FLAO Queuine tRNA-ribosyltran sferase OS=Lacinutrix venerupis OX=1486034 GN=tgt PE=3 SV=1
MTFDLKAKDAQSSARAGVITTDHGVIETPIFMPVGTVASVKGVHQRELKNDINPDIILGNTYHLYLRPQIETLEKAGGLHKFMNWDRNILTDSGGYQVYSLSSRRKIKEEGVKFKSHIDGSYHTFTPENVMEIQRSIGADIIMAFDECTPYPCDYNYAKRSMKMTHRWLDRCINHLEKVPFKYDYSQAFFPIVQGSTYKDLRMQSAEYIANAGAVGNAIGGLSVGEPAEEMYAMTEVVTDILPEDKPRYLMGVGTPINILENIALGVDMFDCVMPTRNARNGMLFTAHGSINIKNLKWKDDFSPLDDMGITWVDTDYSKAYVRHLFSVNERLAAQIATIHNLGFYMWLVREARKHILAGDFRTWKDMMVKQMDKRL

SEQ ID NO: 56505 - protein, 381 aa, Lactobacillus acidifarinae
  misc_feature (1)..(381): tr|A0A0R1LD89|A0A0R1LD89_9LACO Queuine tRNA-ribosyltran sferase OS=Lactobacillus acidifarinae DSM 19394 OX=1423 715 GN=tgt PE=3 SV=1
MEPAIKYHLIKTEKHTGARLGEVITPHGTFQTPMFMPVGTQAAMKGAVSPEELAEMGSQVVLANTYHLWLQPGPDLVAEAGGLHQFMNWHKGILTDSGGFQVFSLAKHRKLTEEGVHFRNEINGDKLFLSPEKAINIQNKLGPDIMMSLDECPPFFESYDYVKHSVERTSRWAERGLKAHAHPDYQGLFGIVQGAGYEDLRRQSARDLVSLDFPGYSIGGLSVGESKPEMNRILELTTPLLPTNKPRYLMGVGTADSLIDGVIRGIDMFDCVLPTRIARKGTCMTSHGRLVVKNAAFAHDFRPIDPECDCYTCRHYTRAYLRHLFKADEDFGRRLTSYHNLYFLHHLMKRVRQAILDDHLLELREEVFEKYGYNAEHPKNF

SEQ ID NO: 56506 - protein, 381 aa, Lactobacillus acidipiscis
  misc_feature (1)..(381): tr|A0A0R2KBK2|A0A0R2KBK2_9LACO Queuine tRNA-ribosyltran sferase OS=Lactobacillus acidipiscis OX=89059 GN=tgt PE =3 SV=1
MSEAAIKYRLIKKEKHTGARLGEITTPHGTIQTPIFMPVGTQATVKSLSPEELKEMNAQIILSNTYHLWERPGDDLVAEAGGLHKFMNWDRPILTDSGGFQVFSLAKLRDISEEGVHFRSNLNGAKLFLSPEKAIHIENNLGADIMMSFDECPPFFESYDYIKKSVERTSRWAERGLLAHQNPSSQGLFGIVQGGGHKELRKQSARDLTSMDFAGYSIGGLSVGESKAEMNHVLEFTTPLLPENKPRYLMGVGSPDALIDGALRGVDMFDCVLPTRIARNGTCMTSHGRLVVKNAKFARDFRPIDENCHCYTCRNFTRAYVRHLFKTDETFGLRLTSYHNLYFLLDLMKQVREAIKNDELLDFKEAFFEQYGLNKANAKNF

SEQ ID NO: 56507 - protein, 381 aa, Lactobacillus agilis
  misc_feature (1)..(381): tr|A0A231QN87|A0A231QN87_9LACO Queuine tRNA-ribosyltran sferase OS=Lactobacillus agilis OX=1601 GN=tgt PE=3 SV= 1
MTTPAVTYNLIKKDKHTGARLGQITTPHGTFDTPMFMPVGTQASVKAMAPEELKEMGAGVILANTYHLWLRPGEDLVEEAGGLHQFMNWDQGILTDSGGFQVFSLAELRNITEEGVHFKNHLNGQKLFLSPEKAIAIENALGADIMMSFDECPPFFESYDYIKKSIERTSRWAERGLRAHKNPQTQALFGIVQGGGHKALREQSARDLVSLDFPGYSIGGLSVGESKAEMNHVLDFTTPLLPENKPRYLMGVGSPDALIDGVIRGVDMFDCVLPTRIARNGTCMTSKGRLVVKNAKYARDFRPLDEKCNCYACRNYTRAYIRHLLKTDEIFGLRLTSYHNLYFLLDLMRKIRAAIKEDRLLDFRAEFFEEYGLNKENRKNF

SEQ ID NO: 56508 - protein, 381 aa, Lactobacillus agilis; identical to SEQ ID NO: 56507
  misc_feature (1)..(381): tr|A0A0R2A928|A0A0R2A928_9LACO Queuine tRNA-ribosyltran sferase OS=Lactobacillus agilis DSM 20509 OX=1423718 GN =tgt PE=3 SV=1

SEQ ID NO: 56509 - protein, 381 aa, Lactobacillus algidus
  misc_feature (1)..(381): tr|A0A0R1HP32|A0A0R1HP32_9LACO Queuine tRNA-ribosyltran sferase OS=Lactobacillus algidus DSM 15638 OX=1423719 G N=tgt PE=3 SV=1
MVEPAIKYRLIKKDKRTGARLGEIITPHGTFPTPMFMPVGTLASVKSMAPEELDELGANIILSNTYHLWLRPGEDIVQEAGGLHKFMNWDKGILTDSGGFQVFSLAKMRDISEEGVKFKSHLNGANLFLSPEKAIHVENALGADIMMSFDECPPFSESYDYISKSVDRTSRWAERGLKAHLNPKEQALFGIVQGGGHRNLRERSARDLVSMDFPGYSIGGLSVGESKAEMNRVLDFTTPLLPEDKPRYLMGVGSADALIDGVLRGIDMFDCVLPTRIARNGTTMTSMGRVVVKNAKYERDFRPLDENCDCYTCKNYTRAYLRHLIKADETFGIRLTSYHNLYFLTHLMADVRQAIMDDNLLEFREAFFEQYGFYDKNPKNF

SEQ ID NO: 56510 - protein, 381 aa, Lactobacillus algidus; identical to SEQ ID NO: 56509
  misc_feature (1)..(381): tr|A0A2C8ESF2|A0A2C8ESF2_9LACO Queuine tRNA-ribosyltran sferase OS=Lactobacillus algidus OX=105612 GN=tgt PE=3 SV=1

SEQ ID NO: 56511 - protein, 380 aa, Lactobacillus alimentarius
  misc_feature (1)..(380): tr|A0A2N9YJN8|A0A2N9YJN8_9LACO Queuine tRNA-ribosyltran sferase OS=Lactobacillus alimentarius DSM 20249 OX=1423 720 GN=tgt PE=3 SV=1
MESAIKYTLIKKEKHTGARLGLLETPHGTFETPMFMPVGTEASVKNMAPEDLEKIGASIILANTYHLWLRPGEDIVKEAGGLHKFMNWDKGILTDSGGFQVFSLAKMRDITEVGVHFRNHLNGRQEFLSPEKAIKIENYLGPDIMMSLDECPPFFESYDYIKRSVARTSRWAERGLKAHRNPDWQALFGIVQGGGFEDLRKQSAKDLVSMDFPGYSIGGLSVGESKGEMNRVLGFTTPMLPENKPRYLMGVGTADSLIDGVIRGIDMFDCVLPTRIARNGTCMTSHGRLVVKNAKYAHDFTPLDDNCDCYVCRNYSRAYIRHLINANELFGIHLTSYHNLYFLLNLMKGVRQAIRDDNLLEFREHVFEDYGFNKKNAKKF

SEQ ID NO: 56512 - protein, 380 aa, Lactobacillus allii
  misc_feature (1)..(380): tr|A0A1P8PZS1|A0A1P8PZS1_9LACO Queuine tRNA-ribosyltran sferase OS=Lactobacillus allii OX=1847728 GN=tgt PE=3 S V=1
MEPAVKYTLIKKEKHTGARLGMLETPHGTFETPMFMPVGTEASVKNMAPEDLEKIGASIILANTYHLWLRPGEDIVKEAGGLHKFMNWDKGILTDSGGFQVFSLANTRDITEAGVHFRNHLNGRREFLSPEKAMKIENYLGPDIMMSLDECPPFFESYDYIKKSVARTSRWAERGLKAHRNPDWQALFGIVQGAGFEDLRKQSVEDLTSMDFPGYSIGGLSVGESKEEMNHVLDFTAPLLPENKPRYLMGVGSTDALVDGVIRGIDMFDCVLPTRIARNGTCMTTKGRLVVKNAKYARDFRPIDEDCDCYVCRNYSRAYIRHLINANELFGTHLTSYHNLYYLLNLMKNVRQAIRDDNLLEFREHVFEEYGLNKENARNF

SEQ ID NO: 56513 - protein, 379 aa, Lactobacillus amylophilus
  misc_feature (1)..(379): tr|A0A4Y4JR36|A0A4Y4JR36_9LACO Queuine tRNA-ribosyltran sferase OS=Lactobacillus amylophilus OX=1603 GN=tgt PE= 3 SV=1
MSSPLTYKLIHQDKKTGARLGEITTPHGTFQTPMFMPVGTQASVKTLAPEELKEMGAGVILANTYHLWQRPGPEIVKEAGGLHKFMNWDQAILTDSGGFQVFSLAQMRDIKEEGVTFKSHISGAKMFLSPEKAIGIENDLGPDIMMSLDECPPYFSDFEYLQKSVARTSRWAERGLKAHRNPDTQALFGIVQGGPHEELRRQSAQDLVSLDFPGYSIGGLSVGESKEEMNRMLEFTTPLLPQNKPRYLMGVGSPDALIDGVIRGIDMFDCVLPTRIARNGTVMTSHGRLVVKNAKYAHDFTPMDPECDCYACRNYTRAYIRHLIKADETFGIRLTSYHNVYFLLNLMKKVRAAIMNDELLEFRADFFEKYGYNDSSRDF

SEQ ID NO: 56514 - protein, 379 aa, Lactobacillus amylophilus; identical to SEQ ID NO: 56513
  misc_feature (1)..(379): tr|A0A0R1YQA7|A0A0R1YQA7_9LACO Queuine tRNA-ribosyltran sferase OS=Lactobacillus amylophilus DSM 20533 = JCM 11 25 OX=1423721 GN=tgt PE=3 SV=1

SEQ ID NO: 56515 - protein, 379 aa, Lactobacillus amylotrophicus; identical to SEQ ID NO: 56513
  misc_feature (1)..(379): tr|A0A0R1GUA8|A0A0R1GUA8_9LACO Queuine tRNA-ribosyltran sferase OS=Lactobacillus amylotrophicus DSM 20534 OX=14 23722 GN=tgt PE=3 SV=1

SEQ ID NO: 56516 - protein, 381 aa, Lactobacillus animalis
  misc_feature (1)..(381): tr|A0A0R2A754|A0A0R2A754_9LACO Queuine tRNA-ribosyltran sferase OS=Lactobacillus animalis KCTC 3501 = DSM 20602 OX=930942 GN=tgt PE=3 SV=1
MTEPAIKYRLIKKEKHTGARLGEIITPHGTFPTPMFMPVGTQATVKAMSPEELKAMGAGIILSNTYHLWLRPGEDLVKEAGGLHKFMNWDQGILTDSGGFQVFSLADMRNITEEGVHFKSHLNGAPLFLSPEKAIQIENALGSDIMMSFDECPPFYESYDYIKKSVERTSRWAERGLKAHQNPEKQALFGIVQGGGHEDLRKLSARDLVSLDFPGYSIGGLSVGESKAEMNRVLDFTTPLLPEDKPRYLMGVGSPDALIDGVLRGVDMFDCVLPTRIARNGTCMTSHGRLVVKNAKYARDFSPIDDNCDCYTCRNYTRAYVRHLFKADETFGLRLTSYHNLYFLLNLMKQVRQAIMDDNLLEFKEHFFEEYGLNVKNPKNF

SEQ ID NO: 56517 - protein, 381 aa, Lactobacillus animalis; identical to SEQ ID NO: 56516
  misc_feature (1)..(381): tr|A0A062XAV3|A0A062XAV3_9LACO Queuine tRNA-ribosyltran sferase OS=Lactobacillus animalis OX=1605 GN=tgt PE=3 S V=1

SEQ ID NO: 56518 - protein, 367 aa, Lactobacillus antri
  misc_feature (1)..(367): tr|C8P761|C8P761_9LACO tRNA-guanine transglycosylase OS =Lactobacillus antri DSM 16041 OX=525309 GN=HMPREF0494_ 1155 PE=4 SV=1
MRESSMKSKLEFEIQAQSGLARCGQLRCGHRQAATPLLVQTGAVTAILTSSELAAAGTHAVKQSALDYWLRAAGQPDQLGVTDLHDYLRWPGIIVGTPGATQAYRWAKPRGRKPTGVSFHDPATRQQKLYTPQLAQQWQQLLGCDLQVGFARWENYYAPVDELQAAARQTTAWLETVEWPANTLAPVVGGGLKRVRRASAAAAQAVQPGGYALLGIDPAVKLAEQRRILGELTALLPEAGVRYLPTCGALEQVLVAIAQGMDIIDSDCAATTALHGGAYVGTKRLHLTKEHLAGDSRVLVPGCQCPTCQAGYSRAYLHQLLQEQSPVGVRLLIVHNLFVLNRLVDQLRQAIRADRLAEFMADLAIDC

SEQ ID NO: 56519 - protein, 381 aa, Lactobacillus apodemi
  misc_feature (1)..(381): tr|A0A0R1TSC0|A0A0R1TSC0_9LACO Queuine tRNA-ribosyltran sferase OS=Lactobacillus apodemi DSM 16634 = JCM 16172 OX=1423724 GN=tgt PE=3 SV=1
MVEPAIKYRLIKKEKHTGARLGEIITPHGTFPTPMFMPVGTQATVKSISPEELKAMGAGIILSNTYHLWLRPGEDLVKEAGGLHKFMNWDQGILTDSGGFQVFSLADMRNITEEGVHFKSHLNGAPLFLSPEKAIQIENALGSDIMMSFDECPPFFESYDYIKKSVERTSRWAERGLKAHQNPETQALFGIVQGGGHEDLRKLSARDLVSLDFPGYSIGGLSVGESKEEMNRVLDFTTPLLPENKPRYLMGVGSPDALIDGVLRGVDMFDCVLPTRIARNGTCMTSHGRLVVKNAKYARDFSPIDDNCDCYTCRNFTRAYVRHLFKADETFGLRLTSYHNLYFLINLMKQVRQAIMDDNLLEFKEHFFDEYGLNVKNPKNF

SEQ ID NO: 56520 - protein, 397 aa, Lactobacillus aquaticus
  misc_feature (1)..(397): tr|A0A0R2CWJ1|A0A0R2CWJ1_9LACO Queuine tRNA-ribosyltran sferase OS=Lactobacillus aquaticus DSM 21051 OX=1423725 GN=tgt PE=3 SV=1
MRCLLSSIINKEWRILMTEPAIKYHLIKKEKHTGARLGEIITPHGRFPTPMFMPVGTQASVKSLAPEELDAMGANIILSNTYHLWLRPGEDIVKEAGGLHKFMNWDKGILTDSGGFQVFSLAKMRDITEEGVHFKSHLSGEKLFLSPEKAIQIENALGADIMMSFDECPPFFESYDYIKKSVERTSRWAERGLRAHQNAETQGLFGIVQGGGHKELRAQSAHDLVSMDFPGYSIGGLSVGESKSEMNHVLSFTTPMLPENKPRYLMGVGSADALIDGVIRGIDMFDCVLPTRIARNGSCMTSHGRLVVKNAVYARDFRPIDDNCNCYTCRNFSRAYIRHLIKADETFGLRLTSYHNLYFLIHLMQQVRQAIMDDNLLEFRENFFEEYGFNNENSRNF

SEQ ID NO: 56521 - protein, 381 aa, Lactobacillus aviarius
  misc_feature (1)..(381): tr|A0A510WUE0|A0A510WUE0_9LACO Queuine tRNA-ribosyltran sferase OS=Lactobacillus aviarius subsp. aviarius OX=14 7810 GN=tgt PE=3 SV=1
MSEPAIKYRLIKKEKHTGARLGEIITPHGTFPTPIFMPVGTQATVKAMSPEELDELGADIILSNTYHLWLRPGEDLVREAGGLHKFMNWHKGILTDSGGFQVFSLAELRNITEEGVHFKNHLNGHQMFLSPEKAIHIENALGADIMMSFDECPPFFESYDYIKKSVERTSRWAERGLKAHQNPETQALFGIVQGGGHKDLRQQSARDLVAMDFPGYSIGGLSVGESKAEMNHVLDFTTPLLPENKPRYLMGVGSPDALIDGVIRGVDMFDCVLPTRIARNGTCMTSHGRLVVKNAQYEHDFGPIDDQCDCYACRNYTRAYVRHLLKVNETMGIRLTSYHNLYFLTHLMQKIRQAILDDNLLEFREDFFDQYGLNVKNPKNF

SEQ ID NO: 56522 - protein, 381 aa, Lactobacillus aviarius
  misc_feature (1)..(381): tr|A0A179CJT0|A0A179CJT0_9LACO Queuine tRNA-ribosyltran sferase OS=Lactobacillus aviarius OX=1606 GN=tgt PE=3 S V=1
MSEPAIKYRLIKKEKHTGARLGEIITPHGTFPTPIFMPVGTQATVKAMSPEELEELGADIILSNTYHLWLRPGEDLVREAGGLHKFMNWHKGILTDSGGFQVFSLAELRNITEEGVHFKNHLNGHQMFLSPEKAIHIENALGADIMMSFDECPPFFESYDYIKKSVERTSRWAERGLKAHQNPETQALFGIVQGGGHKDLRQQSARDLVAMDFPGYSIGGLSVGESKAEMNHVLDFTTPLLPENKPRYLMGVGSPDALIDGVIRGVDMFDCVLPTRIARNGTCMTSHGRLVVKNAQYEHDFGPIDDQCDCYACRNYTRAYVRHLLKVNETMGIRLTSYHNLYFLTHLMQKIRQAILDDNLLEFREDFFDQYGLNVKNPKNF

SEQ ID NO: 56523 - protein, 380 aa, Lactobacillus backii
  misc_feature (1)..(380): tr|A0A192H1C7|A0A192H1C7_9LACO Queuine tRNA-ribosyltran sferase OS=Lactobacillus backii OX=375175 GN=tgt PE=3 S V=1
MEPAIKYRLIKKEKHTGARLGEITTPHGTFQTPMFMPVGTNASVKTMAPEELDTMGAGIILANTYHLWLRPGEDIVKEAGGLHRFMNWDKGILTDSGGFQVFSLANTRNITEEGVHFKNHLNGAAMFLSPEKAMQIENDLGPDIMMSLDECPPFFESYEYVKHSVARTSRWAERGLKAHRNPETQGLFGIVQGAGFKDLREQSAKDLVSLDFPGYSIGGLSVGESKAEMNHVLDFTAPLLPENKPRYLMGVGSADALIDGAIRGIDMFDCVLPTRIARNGTVMTSHGRLVVKNAQYAHDFGPLDDNCQCYACRNYSRAYIRHLIKANEIFGIHLTSYHNLYFLLHLMKQVRQAIMDDNLLEFREAFFESYGFNQENARNF

SEQ ID NO: 56524 - protein, 380 aa, Lactobacillus backii
  misc_feature (1)..(380): tr|A0A2G9VL44|A0A2G9VL44_9LACO Queuine tRNA-ribosyltran sferase OS=Lactobacillus backii OX=375175 GN=tgt PE=3 S V=1
MEPAIKYRLIKKEKHTGARLGEITTPHGTFQTPMFMPVGTNASVKTMAPEELDTMGAGIILANTYHLWLRPGEDIVKEAGGLHRFMNWDKGILTDSGGFQVFSLANTRNITEEGVHFKNHLNGAAMFLSPEKAMQIENDLGPDIMMSLDECPPFFESYEYVKHSVARTSRWAERGLKAHLNPETQGLFGIVQGAGFKDLREQSAKDLVSLDFPGYSIGGLSVGESKAEMNHVLDFTAPLLPENKPRYLMGVGSADALIDGAIRGIDMFDCVLPTRIARNGTVMTSHGRLVVKNAQYAHDFGPLDDNCQCYACRNYSRAYIRHLIKANEIFGIHLTSYHNLYFLLHLMKQVRQAIMDDNLLEFREAFFESYGFNQENARNF

SEQ ID NO: 56525 - protein, 380 aa, Lactobacillus bambusae
  misc_feature (1)..(380): tr|A0A2V1MWY2|A0A2V1MWY2_9LACO Queuine tRNA-ribosyltran sferase OS=Lactobacillus bambusae OX=2024736 GN=tgt PE= 3 SV=1
MEPAISYRLIKTEKHTGARLGEITTPHGTFKTPMFMPVGTNASVKGISPEQLDEMGSQIILANTYHLWLQPGSGLVKEAGGLHRFMNWKKGILTDSGGFQVWSLAKDRQISEEGVHFRNPVNGDKLFLSPEKAIHIENDLGPDIMMSLDECPPFFESYDYIKKSVERTSRWAERGLEAHRNPATQGIFGIVQGAGYEDLRRQSATDLVSMDFPGYSIGGLSVGESKAEMNHVLEFTTPMLPTDKPRYLMGVGSPDALIDGVIRGIDMFDCVLPTRIARKGTCMTSHGRLVVKNAAYEHDFNPIDDQCQCYTCRNYSRAYIRHLFKADEAFGRTLTSYHNLYFLNHLMAEVRQAIMDDNLPDFRERVFESYGYNQKGAKNF

SEQ ID NO: 56526 - protein, 380 aa, Lactobacillus bifermentans
  misc_feature (1)..(380): tr|A0A0R1HAY0|A0A0R1HAY0_9LACO Queuine tRNA-ribosyltran sferase OS=Lactobacillus bifermentans DSM 20003 OX=1423 726 GN=tgt PE=3 SV=1
MEPAIKYRLIKKEKHTGARLGELITPHGTFPTPMFMPVGTNASVKTMAPEELDEMGAGVILANTYHLWLRPGEEIVKEAGGLHKFMNWDKGILTDSGGFQVFSLANMRDITEEGVHFKNHLNGAKMFLSPEKAMQIENDLGPDIMMSLDECPPFFETYDYVKKSVARTSRWAERGLKAHRNPATQGLFGIVQGAGFQDLREQSAKDLVSLDFPGYSIGGLSVGESKAEMNHVLDFTTPLLPEHKPRYLMGVGSADALIDGAIRGIDMFDCVLPTRIARNGTVMTSHGRLVVKNAKYAHDFGPLDDNCHCYACRNYSRAYIRHLIKANEIFGIHLTSYHNLYFLLHLMRQVRQAIRDDNLLEFREQFFEMYGFNQENARNF

SEQ ID NO: 56527 - protein, 380 aa, Lactobacillus bombi
  misc_feature (1)..(380): tr|A0A347SQ92|A0A347SQ92_9LACO Queuine tRNA-ribosyltran sferase OS=Lactobacillus bombi OX=1303590 GN=tgt PE=3 S V=1
MVQPIRYRLIKKEKHTGARLGELITPHGTFPTPIFMPVGTQASVKTMAPEELKEMGASVILANTYHLWLRPGSPLVKEAGGLHQFMNWDRGILTDSGGFQVFSLAKRRGISEEGVTFKSHLDGQKMFLSPEKAIHIENDLGPDIMMSLDECPPFFESYNYLKASVERTSRWAERGLKAHRNPDTQGIFGIVQGGGYQDLRQQSAHDLTSLDFAGYSIGGLSVGESKAEMNHVLDFTTPLLPENKPRYLMGVGTADSLIDGVIRGIDMFDCVLPTRIARNGTCMTSQGRLVVKNAQYAHDFTPLDPECDCYACRNYTRAYIRHLLQVDETFGIHLTSYHNLYYLIHLMAQVRQAIVDDNLLELRDQVFEKYGFNQKNAKNF

SEQ ID NO: 56528 - protein, 380 aa, Lactobacillus bombi
  misc_feature (1)..(380): tr|A0A417ZII7|A0A417ZII7_9LACO Queuine tRNA-ribosyltran sferase OS=Lactobacillus bombi OX=1303590 GN=tgt PE=3 S V=1
MVQPIRYRLIKKEKHTGARLGELITPHGTFPTPIFMPVGTQASVKTMAPEELKEMGASVILANTYHLWLRPGSPLVKEAGGLHQFMNWDRGILTDSGGFQVFSLAKRRGISEEGVTFKSHLDGQKMFLSPEKAIHIENDLGPDIMMSLDECPPFFESYDYLKASVERTSRWAERGLKAHRNPDTQGIFGIVQGGGYQDLRQQSAHDLTSLDFAGYSIGGLSVGESKAEMNHVLDFTTPLLPENKPRYLMGVGTADSLIDGVIRGIDMFDCVLPTRIARNGTCMTSQGRLVVKNAQYAHDFTPLDPECDCYACRNYTRAYIRHLLQVDETFGIHLTSYHNLYYLIHLMAQVRQAIVDDNLLELRDQVFEKYGFNQKNAKNF

SEQ ID NO: 56529 - protein, 380 aa, Lactobacillus brantae
  misc_feature (1)..(380): tr|A0A0R2AXE0|A0A0R2AXE0_9LACO Queuine tRNA-ribosyltran sferase OS=Lactobacillus brantae DSM 23927 OX=1423727 G N=tgt PE=3 SV=1
MEPAVKYRLIHQDKHSGARLGEIITPHGTFPTPMFMPVGTLASVKTMAPEELDEMGANIILANTYHLWLRPGEELIEEAGGLHKFMNWDKGILTDSGGFQVFSLAEMRNISEEGVRFKNHLNGAKMFLSPEKAIAIENALGPDIMMSFDECPPFFESYDYVKKSVERTSRWAERGLKAHQNPDWQALFGIVQGAGFKDLRQQSARDLVSMDFPGYSIGGLSVGESKEEMNHVLDFTTPLLPENKPRYLMGVGSADALIDGALRGIDMFDCVLPTRIARNGTVMTSHGRLVVKNAKYAHDFGPLDDNCNCYTCRNYSRAYVRHLIHSDEAFGMRLATYHNLYFLLNLMKNVREAIANDQLLEFREAFFEEYGYNAANAKNF

SEQ ID NO: 56530 - protein, 380 aa, Lactobacillus brevis
  misc_feature (1)..(380): tr|C2D483|C2D483_LACBR Queuine tRNA-ribosyltransferase OS=Lactobacillus brevis subsp. gravesensis ATCC 27305 O X=525310 GN=tgt PE=3 SV=1
MQPAISYRLIKKEKHTGARLGEITTPHGTFRTPIFMPVGTQATVKTLAPEELNDMGATIILANTYHLWLRPGEDIVKEAGGLHKFMNWDHGILTDSGGFQVFSLAKNRDITEKGVTFKNEINGDRMFLSPEKAIQIENDLGPDIMMSLDECPPFFETYDYVKKSVERTSRWAERGLKAHRNPDTQGLFGIVQGAGFEDLRKQSAQDLVSLDFPGYSIGGLSVGESKAEMNRILETTTPLLPETKPRYLMGVGATDSLIDGVIRGIDMFDCVLPTRIARNGTVMTSHGRLVVKNAQYARDFRPLDDQCNCYTCRNYSRAYIRHLIKSGETFGLRLASYHNLYYLIHLMKRVQQAIMNDNLLDLRAEVFEQYGYNKANAKNF

SEQ ID NO: 56531 - protein, 381 aa, Lactobacillus brevis
  misc_feature (1)..(381): tr|U2QQF1|U2QQF1_LACBR Queuine tRNA-ribosyltransferase OS=Lactobacillus brevis ATCC 14869 = DSM 20054 OX=64975 8 GN=tgt PE=3 SV=1
MEPAIKYHLIKTEKHTGARLGELITPHGTFKTPMFMPVGTQAAIKGAISPEELDEMGSQVILANTYHLWLQPGPDLVQEAGGLHKFMNWDKGILTDSGGFQVFSLAKHRKLTEEGVHFRNELNGDRLFLSPEKAIDIQNKLGPDIMMSLDECPPFFESYDYVKHSLERTSRWAERGLRAHANPATQGLFGIVQGAGFEDLRRQSAKDLVSLDFPGYSIGGLSVGESKAEMNRVLDFTTPLLPTNKPRYLMGVGTADSLIDGVMRGVDMFDCVLPTRIARKGTCMTTHGRLVVKNAAYAHDFRPLDPDCDCYTCRNYTRAYLRHLFKADEAFGQRLASYHNLYFLHQLMKRVRQAIMDDNLTELREEVFETYGYNAEHPKNF

SEQ ID NO: 56532 - protein, 380 aa, Lactobacillus buchneri
  misc_feature (1)..(380): tr|A0A4R5NN56|A0A4R5NN56_LACBU Queuine tRNA-ribosyltran sferase OS=Lactobacillus buchneri DSM 20057 OX=1423728 GN=tgt PE=3 SV=1
MQPAISYRLIKKEKHTGARLGEITTPHGTFKTPMFMPVGTQATVKTLAPEELEQMGSTIILANTYHLWLRPGEDIVKEAGGLHKFMNWHKGILTDSGGFQVFSLAKNRDITEEGVTFKNEINGSKMFLSPEKAIQIENDLGPDIMMSLDECPPFFESYDYVKKSVERTSRWAERGLKAHRNPDWQGLFGIVQGAGFEDLRKQSARDLVSLDFPGYSIGGLSVGESKQEMNRILESTSPLLPENKPRYLMGVGATDSLIDGVIRGIDMFDCVLPTRIARNGTVMTSHGRLVVKNAKYARDFTPLDDHCDCYTCRNYTRAYIRHLMKTDESFGMRLCSYHNLYYLIHLMKRVQQAIMDDNLLDLRAEVFEQYGYNKPNPKNF

SEQ ID NO: 56533 - protein, 380 aa, Lactobacillus buchneri; identical to SEQ ID NO: 56532
  misc_feature (1)..(380): tr|A0A4U0D1J6|A0A4U0D1J6_LACBU Queuine tRNA-ribosyltran sferase OS=Lactobacillus buchneri OX=1581 GN=tgt PE=3 S V=1

SEQ ID NO: 56534 - protein, 381 aa, Lactobacillus cacaonum
  misc_feature (1)..(381): tr|A0A0R2CF82|A0A0R2CF82_9LACO Queuine tRNA-ribosyltran sferase OS=Lactobacillus cacaonum DSM 21116 OX=1423729 GN=tgt PE=3 SV=1
MTEPAIKYRLIKKEKHTGARLGEIITPHGTFPTPMFMPVGTQASVKSLAPEELDEMGANIILSNTYHLWLRPGEKLVEEAGGLHQFMNWKKGILTDSGGFQVFSLAKMRDITEQGVHFKSHLSGEKLFLSPEKAIHIQNALGSDIMMSFDECPPFFESYDYIKKSVERTSRWAQRGLEAHLHADRQGLFGIVQGGGHKDLRELSARQLVGMDFPGYSIGGLSVGESKAEMNHVLDFTTPLLPENKPRYLMGVGSADALIDGVIRGVDMFDCVLPTRIARNGTCMTSSGRLVVKNAVYAHDFRPLDEKCDCYTCRNFTRAYIRHLIKADEIFGLRLASYHNLYFLLNLMKNVRQAIMDDNLLEFKESFFEEYGFNAKDARNF

SEQ ID NO: 56535 - protein, 379 aa, Lactobacillus camelliae
  misc_feature (1)..(379): tr|A0A0R2FDG2|A0A0R2FDG2_9LACO Queuine tRNA-ribosyltran sferase OS=Lactobacillus camelliae DSM 22697 = JCM 1399 5 OX=1423730 GN=tgt PE=3 SV=1
MPALEYHLKHIDKHSGARLGEIVTPHGTFPTPMFMPVGTQATVKTLAPEELKTMGAGVILANTYHLWLRPGEDIVEEAGGLHKFMNWDRGLLTDSGGFQVFSLAKNRDITEEGVTFRNHLNGAKMFLSPEKAIGIENALGPDIMMSLDECPPFFESYDYVKASVARTSRWAERGLKAHQHPDRQALFGIVQGAGFRDLRAQSAKDLVSLDFPGYSIGGLSVGESKQEMNHVLDFTVPMLPANKPRYLMGVGSPDALIDGVLRGIDMFDCVLPTRIARKGTVMTSYGRLVVKNAQYARDFTPLDDNCDCYTCRNYSRAYIRHLLKANESFGERLTSYHNVYFLLHLMKQVREAIAEDALNDFRQDFFARYGYFKPNAKNF

SEQ ID NO: 56536 - protein, 381 aa, Lactobacillus capillatus
  misc_feature (1)..(381): tr|A0A0R1MFB8|A0A0R1MFB8_9LACO Queuine tRNA-ribosyltran sferase OS=Lactobacillus capillatus DSM 19910 OX=142373 1 GN=tgt PE=3 SV=1
MTEPAIKYRLIKKEKHTGARLGEIITPHGAFPTPMFMPVGTQASVKSLAPEELDAMGANIILSNTYHLWLRPGEELVKEAGGLHKFMNWPKGILTDSGGFQVFSLAKMRDITEEGVHFRSHLSGEKLFLSPEKAIQIENALGADIMMSFDECPPFFETYDYIKKSVERTSRWAERGLKAHQNEATQGLFGIVQGGGHKALRAQSAHDLVSMDFPGYSIGGLSVGESKAEMNHVLSFTTPMLPENKPRYLMGVGSADALIDGVIRGVDMFDCVLPTRIARNGTCMTSHGRLVVKNAVYAHDFRPIDDRCNCYTCRNFSRAYIRHLIKADETFGLRLTSYHNLYFLIHLMQQVRQAIKDDNLLEFRESFFEEYGFNSKNPRNF

SEQ ID NO: 56537 - protein, 380 aa, Lactobacillus casei
  misc_feature (1)..(380): tr|A0A125U605|A0A125U605_LACCD Queuine tRNA-ribosyltran sferase OS=Lactobacillus casei (strain BD-II) OX=998820 GN=tgt PE=3 SV=1
MEPAVKYRLIHQDKHSGARLGELITPHGTFPTPMFMPVGTQASVKTMAPEELDTMGATVILANTYHLWLRPGPELIEEAGGLHKFMNWHKGILTDSGGFQVFSLADTRHITEEGVTFKNHLNGAKMFLSPEKAIAIENALGPDIMMSLDECPPFFESYDYVKKSVARTSRWAERGLQAHKNPDWQALFGIVQGAGFKDLREQSAKDLVSMDFPGYSIGGLSVGESKDEMNHVLDFTTPLLPENKPRYLMGVGSADALIDGALRGIDMFDCVLPTRIARNGTCMTSRGRIVIKNAKYAHDFGPLDPNCDCYTCRNYSRAYIRHLIHVGEAFGIRLTTYHNLYFLLHLMQQVREAIANDDLLAFREDFFEAYGYNKEKAKNF

SEQ ID NO: 56538 - protein, 380 aa, Lactobacillus casei
  misc_feature (1)..(380): tr|A0A510WS19|A0A510WS19_LACCA Queuine tRNA-ribosyltran sferase OS=Lactobacillus casei OX=1582 GN=tgt PE=3 SV=1
MEPAVKYRLIHQDKHSGARLGELITPHGTFPTPMFMPVGTQASVKTMAPEELDTMGATVILANTYHLWLRPGPELIEEAGGLHKFMNWHKGILTDSGGFQVFSLADTRHITEEGVTFKNHLNGAKMFLSPEKAIAIENALGPDIMMSLDECPPFFESYDYVKKSVARTSRWAERGLQAHKNPDWQALFGIVQGAGFKDLREQSAKDLVSMDFPGYSIGGLSVGESKDEMNHVLDFTTPLLPENKPRYLMGVGSADALIDGALRGIDMFDCVLPTRIARNGTCMTSRGRLVIKNAKYAHDFGPLDPNCDCYTCRNYSRAYIRHLIHVGEAFGIRLTTYHNLYFLLHLMQQVREAIANDDLLAFREDFFEAYGYNKEKAKNF

SEQ ID NO: 56539 - protein, 381 aa, Lactobacillus ceti
  misc_feature (1)..(381): tr|A0A0R2KI20|A0A0R2KI20_9LACO Queuine tRNA-ribosyltran sferase OS=Lactobacillus ceti DSM 22408 OX=1122146 GN=t gt PE=3 SV=1
MTEPAIKYRLIKKEKHTGARLGEIITPHGTFPTPIFMPVGTQATVKAISPEELKAMGADIILSNTYHLWLRPGEDLVEEAGGLHKFMNWDKGILTDSGGFQVFSLAQMRDITEEGVHFKSHLSGEKLFLSPEKAIGIENALGADVMMSFDECPPFYETYDYIQKSVARTSRWAERGLKAHKNPDTQGLFGIVQGAGYEDLRRQSAQDLVSLDFPGYSIGGLSVGESKDEMNRVLDFTTPMLPENKPRYLMGVGSPDALIDGVIRGVDMFDCVLPTRIARNGTCMTSQGRVVVKNAKYARDFGPLDPKCDCYTCKNFSRAYIRHLFKADETFGLRLTSYHNLHFLINLMKDVRQAIMDDNLLEFREAFFEEYGYNADNKRNF

SEQ ID NO: 56540 - protein, 380 aa, Lactobacillus chiayiensis
  misc_feature (1)..(380): tr|A0A4Q1TXA8|A0A4Q1TXA8_9LACO Queuine tRNA-ribosyltran sferase OS=Lactobacillus chiayiensis OX=2100821 GN=tgt PE=3 SV=1
MEPAVKYRLIHQDKHSGARLGELITPHGTFPTPMFMPVGTQASVKTMAPEELDTMGATVILANTYHLWLRPGPELIEEAGGLHRFMNWQKGILTDSGGFQVFSLADTRHITEDGVTFKNHLNGAKMFLSPEKAIAIENALGPDIMMSLDECPPFFESYDYVKKSVARTSRWAERGLKAHKNPDWQALFGIVQGAGFRDLREQSAKDLVSMDFPGYSIGGLSVGESKEEMNHVLDFTTPLLPQDKPRYLMGVGSADALIDGALRGIDMFDCVLPTRIARNGTCMTSRGRLVIKNAKYAHDFGPLDPNCDCYACRNYSRAYIRHLIHVGEAFGIRLTTYHNLYFLLHLMQQVREAIANDDLLAFREDFFEAYGYNKAKAKNF

SEQ ID NO: 56541 - protein, 355 aa, Lactobacillus coleohominis
  misc_feature (1)..(355): tr|C7XWK3|C7XWK3_9LACO tRNA-guanine transglycosylase OS =Lactobacillus coleohominis 101-4-CHN OX=575594 GN=HMPR EF0501_01006 PE=4 SV=1
MKNQFKILASRSEKEQLRRGELITDHGSIQTPAVIPFAKREAVSPLTTTELASLECQALVIPALPFFVQLGEKAMQKLGSLQRFMNWSRPLMSLVAEFGPMQKVKKNAGELGVRYEEPFTKAHKRLTSYQANQFQIMGKADIQFPIYQVPDYYSPVDDLKTAVELNLTWQKQINSEWGVVVGAGLRALRSHCITELGDKCGYLIADLPDEPEEWSRIVKETCELLPKDRPRMIIASDSWQIFAALRLGVDIVITASPMETAHRGELYTATGSCRIGHEKYQDDSRLITVHATTQVTYAYLHYLNHQRDPLADHYLGLNNWSWINSFAKQLRDAIQAENSVKINDLWRIAKYYTKA

SEQ ID NO: 56542 - protein, 380 aa, Lactobacillus collinoides
  misc_feature (1)..(380): tr|A0A166H5D6|A0A166H5D6_LACCL Queuine tRNA-ribosyltran sferase OS=Lactobacillus collinoides OX=33960 GN=tgt PE =3 SV=1
MEPAIKYRLIKTEKHTGARLGELITPHGTFPTPMFMPVGTQATVKSLAPEELDEMGAGVILANTYHLWLQPGEDLVKEAGGLHKFMNWQKPILTDSGGFQVFSLADNRNITEEGVHFRNPSNGDKLFLSPEKAMQIENDLGPDIMMSLDECPPFFESYDYIKHSVERTSRWAERGLKAHSNPDWQGLFGIVQGAGYEDLRRQSANDLVSMDFPGYSIGGLSVGESKAEMNQVLSFTTPMLPTNKPRYLMGVGSPDSLIDGVMRGIDMFDCVLPTRIARRGTCMTSHGRVTVKNAKYERDFGPIDDNCDCYACRNYSRAYIRHLFKADESFGLRLTSYHNLYFLLHLMKQVRQAIMDDNLLDFKENFFEAYGYNVPNPKNF

SEQ ID NO: 56543 - protein, 380 aa, Lactobacillus collinoides; identical to SEQ ID NO: 56542
  misc_feature (1)..(380): tr|A0A0R2B6G4|A0A0R2B6G4_LACCL Queuine tRNA-ribosyltran sferase OS=Lactobacillus collinoides DSM 20515 = JCM 11 23 OX=1423733 GN=tgt PE=3 SV=1

SEQ ID NO: 56544 - protein, 380 aa, Lactobacillus composti
  misc_feature (1)..(380): tr|X0PEI9|X0PEI9_9LACO Queuine tRNA-ribosyltransferase OS=Lactobacillus composti DSM 18527 = JCM 14202 OX=1423 734 GN=tgt PE=3 SV=1
MTAAITYRLIKQDKHTGARLGEITTPHGTFKTPMFMPVGTLASVKTMAPEELKDMGAGIILSNTYHLWLRPGEEIVKEAGGLHKFMNWDRGVLTDSGGFQVFSLADSRNITEEGVTFKNHLNGAKMFLSPEKALQIENDLGADIIMSLDECPPFFESYDYVKKSVARTTRWAARGLEAHAHPDTQGLFGIVQGAGFEDLRTQSAKDLVSLDFPGYSIGGLSVGESKAEMNRVLDFTTPLLPENKPRYLMGVGSPDALIDGVIRGIDMFDCVLPTRIARNGTVMTSQGRLVVKNAKYAKDFTPLDPNCDCYACRNYTRAYIRHLIKADEIFGIHLTSYHNLYFLLHLMQQVQQAIMDDDLLAFRQDFFETYGFNKEKARNF

SEQ ID NO: 56545 - protein, 380 aa, Lactobacillus concavus
  misc_feature (1)..(380): tr|A0A0R1W7R5|A0A0R1W7R5_9LACO Queuine tRNA-ribosyltran sferase OS=Lactobacillus concavus DSM 17758 OX=1423735 GN=tgt PE=3 SV=1
MTSPIQYRLIKKEKHTGARLGELITPHGTFPTPMFMPVGTQASVKSLAPEELDEMGAGVILANTYHLWLRPGQEIVKEAGGLHKFMNWPKGILTDSGGFQVFSLAKIRDITEEGVHFRSHLSGEKLFLSPEKAIGIENDLGPDIMMSFDECPPYYESHDYVKKSIERTTRWAERGLKAHRNPDTQGLFGIVQGAGFKDLRKQSAADLVSMDFPGYSIGGLSVGESKPEMNEMLEFTTPLLPENKPRYLMGVGSADSLIDGVIRGVDMFDCVLPTRIARNGTCMTSHGRLVVKNAIYAHDFRPIDDQCNCYTCRNFSRAYVRHLIKADETFGLRLTSYHNLYFLLNVMKQVRQAIMDDNLLDFREAFFESYGFNKENAKNF

SEQ ID NO: 56546 - protein, 380 aa, Lactobacillus coryniformis
  misc_feature (1)..(380): tr|J2Z5X3|J2Z5X3_9LACO Queuine tRNA-ribosyltransferase OS=Lactobacillus coryniformis subsp. coryniformis CECT 5711 OX=1185325 GN=tgt PE=3 SV=1
MEPAIKYHLIKKEKHTGARLGEIITPHGTFPTPMFMPVGTNASVKTMAPEELDKMGANIILANTYHMWLRPGEEIVKEAGGLHKFMNWDKGILTDSGGFQVFSLAKMRDITEEGVHFKNHLNGAKMFLSPEKAMQIENDLGPDIMMSLDECPPFFESYDYVKKSVARTSRWAERGLKAHRNPATQGLFGIVQGAGFKDLREQSARDLVSLDFPGYSIGGLSVGESKAEMNHVLDFTTPLLPENKPRYLMGVGSADALIDGAIRGIDMFDCVLPTRIARNGTVMTSHGRLVVKNAKYAHDFGPLDDNCDCYACRNYSRAYIRHLIKADEIFGIHLTSYHNLYFLLHLMQQVRQAIMDDNLLEFREAFFESYGFNQKNARNF

SEQ ID NO: 56547 - protein, 380 aa, Lactobacillus coryniformis; identical to SEQ ID NO: 56546
  misc_feature (1)..(380): tr|A0A0R1F039|A0A0R1F039_9LACO Queuine tRNA-ribosyltran sferase OS=Lactobacillus coryniformis subsp. coryniform is KCTC 3167 = DSM 20001 OX=913848 GN=tgt PE=3 SV=1

SEQ ID NO: 56548 - protein, 380 aa, Lactobacillus crustorum
  misc_feature (1)..(380): tr|A0A1L7ICG4|A0A1L7ICG4_9LACO Queuine tRNA-ribosyltran sferase OS=Lactobacillus crustorum OX=392416 GN=tgt PE= 3 SV=1
MEPAVKYTLLKKEKHTGARLGLLETPHGTFETPIFMPVGTEASVKNMAPEDLDKIGATIILANTYHLWLRPGEDIVKEAGGLHKFMNWDKGILTDSGGFQVFSLANTRDITEAGVHFRNHLNGRREFLSPEKAMKIENYLGPDIMMSLDECPPFFESYDYIKKSVARTSRWAERGLKAHRNPDWQALFGIVQGAGFEDLRKQSARDLVSMDFPGYSIGGLSVGESKSEMNRVLNFTTPMLPENKPRYLMGVGTADSLIDGVIRGIDMFDCVLPTRIARNGTCMTSHGRLVVKNGKYARDFGPLDDNCDCYVCRNYSRAYIRHLINANELFGTHLTSYHNLYFLLNLMKGVRQAIRDDNLLEFREHVFEDYGFNQENAKNF

SEQ ID NO: 56549 - protein, 380 aa, Lactobacillus crustorum
  misc_feature (1)..(380): tr|A0A512GTN1|A0A512GTN1_9LACO Queuine tRNA-ribosyltran sferase OS=Lactobacillus crustorum OX=392416 GN=tgt PE= 3 SV=1
MEPAVKYTLLKKEKHTGARLGLLETPHGTFETPIFMPVGTEASVKNMAPEDLDKIGATIILANTYHLWLRPGEDIVKEAGGLHKFMNWDKGILTDSGGFQVFSLANTRDITEAGVHFRNHLNGRREFLSPEKAMKIENYLGPDIMMSLDECPPFFESYDYIKKSVARTSRWAERGLKAHRNPDWQALFGIVQGAGFEDLRKQSARDLVSMDFPGYSIGGLSVGESKSEMNRVLNFTTPMLPENKPRYLMGVGTADSLIDGVIRGIDMFDCVLPTRIARNGTCMTSHGRLVVKNGKYARDFGPLDDNCACYVCRNYSRAYIRHLINANELFGTHLTSYHNLYFLLNLMKGVRQAIRDDNLLEFREHVFEDYGFNQENAKNF

SEQ ID NO: 56550 - protein, 49 aa, Lactobacillus curieae
  misc_feature (1)..(49): tr|A0A401FMY8|A0A401FMY8_9LACO tRNA-guanine transglycos ylase OS=Lactobacillus curieae OX=1138822 GN=NBRC111893 _1886 PE=4 SV=1
MRLCSLHNLHYLINLMKRVQQAIIDDNLLDLRAEVFEQYGYNEANPKNF

SEQ ID NO: 56551 - protein, 380 aa, Lactobacillus curieae
  misc_feature (1)..(380): tr|A0A1S6QKR0|A0A1S6QKR0_9LACO Queuine tRNA-ribosyltran sferase OS=Lactobacillus curieae OX=1138822 GN=tgt PE=3 SV=1
MQPAITYRLIKKEKHTGARLGEITTPHGTFRTPIFMPVGTQATVKTLAPEELDDMGATIILANTYHLWVRPGEDIVEEAGGLHKFMNWDKGILTDSGGFQVFSLAKNRDITEDGVTFKNEINGSKMFLSPEKAMAIENALGPDIMMSLDECPPYFESYDYVKKSVERTSRWAERGLKAHKNPDWQGLFGIVQGAGFEDLRKQSAEDLVSLDFPGYSIGGLSVGESKQEMNRVLDFTAPLLPEDKPRYLMGVGATDSLIDGVIRGVDMFDCVLPTRIARNGTVMTSHGRLVVKNAKYARDFTPMDDQCDCYACRNYTRAYIRHLMKTDEAFGMRLCSIHNLHYLIHLMKRVQQAIIDDNLLDLRAEVFEQYGYNKPNPKNF

SEQ ID NO: 56552 - protein, 271 aa, Lactobacillus curvatus
  misc_feature (1)..(271): tr|A0A0B2XLN5|A0A0B2XLN5_LACCU Queuine tRNA-ribosyltran sferase (Fragment) OS=Lactobacillus curvatus OX=28038 G N=OA78_1704 PE=3 SV=1
SGYADKFVQKFGLNLQSTLSPEKAIQVENALGADIMMSFDECPPFFESYDYVKKSVERTSRWAERGLIAHQNPATQGLFGIVQGAGFEDLRRQSARDLVGMDFPGYSIGGLSVGESKGEMNRVLDFTTPMLPEDKPRYLMGVGSPDALIDGVIRGVDMFDCVLPTRIARNGTTMTSQGRLVVKNAKYSEDFRPLDPKCDCYVCKNYTRAYIRHLIKADETFGIHLTSYHNLYFLINLMHQVQDAIEQDNLLEFREAFFEEYGYNEKNTRNF

SEQ ID NO: 56553 - protein, 380 aa, Lactobacillus curvatus
  misc_feature (1)..(380): tr|A0A1X7QMA2|A0A1X7QMA2_LACCU Queuine tRNA-ribosyltran sferase OS=Lactobacillus curvatus OX=28038 GN=tgt PE=3 SV=1
MEPAIKYRLIKKEKHTGARLGEIVTPHGTFKTPMFMPVGTQASVKTMAPEELKEMGAGIILSNTYHLWLRPGEDIVEKAGGLHKFMNWDRGVLTDSGGFQVFSLAKLRDISEEGVAFKSHLSGEKLFLSPEKAIQVENALGADIMMSFDECPPFFESYDYVKKSVERTSRWAERGLIAHQNPATQGLFGIVQGAGFEDLRRQSARDLVGMDFPGYSIGGLSVGESKGEMNRVLDFTTPMLPEDKPRYLMGVGSPDALIDGVIRGVDMFDCVLPTRIARNGTTMTSQGRLVVKNAKYSEDFRPLDPKCDCYVCKNYTRAYIRHLIKADETFGIHLTSYHNLYFLINLMHQVQDAIEQDNLLEFREAFFEEYGYNEKNTRNF

SEQ ID NO: 56554 - protein, 380 aa, Lactobacillus dextrinicus
  misc_feature (1)..(380): tr|A0A0R2BEY7|A0A0R2BEY7_9LACO Queuine tRNA-ribosyltran sferase OS=Lactobacillus dextrinicus DSM 20335 OX=14237 38 GN=tgt PE=3 SV=1
MTEPIRYHLIKKEKHTGARLGELITPHGTFPTPMFMPVGTQASVKSIAPEELDEMGAGVILANTYHLWLRPGQEIVKEAGGLHKFMNWDKGILTDSGGFQVFSLAKIRDITEEGVHFRSHLSGEKLFLSPEKAIEIENDLGPDIMMSFDECPPYYESYDYVKKSIERTSRWAERGLKAHRNPDTQGLFGIVQGAGFKDLRKQSAAELTAMDFPGYSIGGLSVGESKAEMNEMLEFTTPLLPETKPRYLMGVGSPDALIDGVIRGIDMFDCVLPTRIARNGTCMTSHGRLVVKNAAYAHDFGPIDDNCDCYTCRNFSRAYVRHLIKADETFGLRLTSYHNLYFLLHTMKQVRQAIMDDNLLDFRAEFFENYGFNKPNARNF

SEQ ID NO: 56555 - protein, 380 aa, Lactobacillus dextrinicus; identical to SEQ ID NO: 56554
  misc_feature (1)..(380): tr|A0A5J6USX2|A0A5J6USX2_9LACO tRNA guanosine(34) trans glycosylase Tgt OS=Lactobacillus dextrinicus OX=51664 G N=tgt PE=4 SV=1

SEQ ID NO: 56556 - protein, 380 aa, Lactobacillus diolivorans
  misc_feature (1)..(380): tr|A0A0R1SKD9|A0A0R1SKD9_9LACO Queuine tRNA-ribosyltran sferase OS=Lactobacillus diolivorans DSM 14421 OX=14237 39 GN=tgt PE=3 SV=1
MQPAITYRLIKKEKHTGARLGEITTPHGTFRTPIFMPVGTQATVKTLAPEELDKMGATIVLANTYHLWLRPGEDIVQQAGGLHKFMNWNKGILTDSGGFQVFSLAKNRDITEKGVTFKNEINGAKMFLSPEKAIQIENALGPDIMMSLDECPPFFESYDYVKKSVERTSRWAERGLKAHQNPDWQGLFGIVQGAGFEDLRKQSANDLVSLDFPGYSIGGLSVGESKSEMNRILEATTPLLPENKPRYLMGVGVTDSLIDGVIRGVDMFDCVLPTRIARNGTVMTSHGRLVVKNAAYARDFRPLDDHCNCYACRNYSRAYIRHLVKSNETFGLRLCSYHNLYYLIHLMKRVQQAILDDNLLDLRAEVFEQYGYNQPNAKNF

SEQ ID NO: 56557 - protein, 380 aa, Lactobacillus fabifermentans
  misc_feature (1)..(380): tr|W6T6K0|W6T6K0_9LACO Queuine tRNA-ribosyltransferase OS=Lactobacillus fabifermentans T30PCM01 OX=1400520 GN= tgt PE=3 SV=1
MEPAIKYRLIKKEKHTGARLGELITPHGTFPTPMFMPVGTQASVKSLAPEELDAMGAGVILSNTYHLWLRPGEEIVEEAGGLHQFMNWKKGILTDSGGFQVFSLAKNRDITEEGVHFKDHLSGAKRFLSPEKAIHVENALGPDIMMSLDECPPFFESYDYVRKSVARTSRWAERGLKAHQHPDYQGLFGIVQGAGFKDLREQSAKDLVAMDFPGYSIGGLSVGESKAEMNHVLDFTTPLLPENKPRYLMGVGSADALIDGAIRGVDMFDCVLPTRIARNGTCMTSHGRLVVKNAKYAHDFTPLDDNCDCYTCRNFTRAYIRHLIKADETFGLRLTSYHNLYFLLHLMQQVRQAIMDDNLLEFRENFFEMYGFNKKNAKNF

SEQ ID NO: 56558 - protein, 380 aa, Lactobacillus fabifermentans; identical to SEQ ID NO: 56557
  misc_feature (1)..(380): tr|A0A0R2NZJ8|A0A0R2NZJ8_9LACO Queuine tRNA-ribosyltran sferase OS=Lactobacillus fabifermentans DSM 21115 OX=14 13187 GN=tgt PE=3 SV=1

SEQ ID NO: 56559 - protein, 380 aa, Lactobacillus farciminis
  misc_feature (1)..(380): tr|A0A4R5NEH9|A0A4R5NEH9_9LACO Queuine tRNA-ribosyltran sferase OS=Lactobacillus farciminis OX=1612 GN=tgt PE=3 SV=1
MEPAVKYTLIKKEKHTGARLGMLETPHGTFETPIFMPVGTEASVKNMAPEDLEKIGATIVLANTYHLWLRPGEDIVKEAGGLHKFMNWDKGILTDSGGFQVFSLANTRDITEAGVHFRNHLNGRREFLSPEKAIKIENYLGPDIMMSLDECPPFFESYDYIKKSVARTSRWAERGLKAHRNPDWQALFGIVQGAGFEDLRKQSAEDLVSMDFPGYSIGGLSVGESKSEMNRVLDFTTPLLPENKPRYLMGVGTADSLIDGVIRGIDMFDCVLPTRIARNGTCMTTHGRLVVKNAKYARDFGPIDPDCDCYVCRNYSRAYIRHLINANELFGTHLTSYHNLYFLLNLMKGVRQAIKDDNLLEFREHVFEDYGFNKENAKNF

SEQ ID NO: 56560 - protein, 380 aa, Lactobacillus farciminis
  misc_feature (1)..(380): tr|A0A0H4LPF9|A0A0H4LPF9_9LACO Queuine tRNA-ribosyltran sferase OS=Lactobacillus farciminis OX=1612 GN=tgt PE=3 SV=1
MEPAVKYTLIKKEKHTGARLGMLETPHGTFETPIFMPVGTEASVKNMAPEDLEKIGATIVLANTYHLWLRPGEDIVKEAGGLHKFMNWDKGILTDSGGFQVFSLAKTRDITEAGVHFRNHLNGRREFLSPEKAIKIENYLGPDIMMSLDECPPFFESYDYIKKSVARTSRWAERGLKAHRNPDWQALFGIVQGAGFEDLRKQSAKDLVSMDFPGYSIGGLSVGESKSEMNRVLDFTTPLLPENKPRYLMGVGTADSLIDGVIRGIDMFDCVLPTRIARNGTCMTTHGRLVVKNAKYARDFGPIDPDCDCYVCRNYSRAYIRHLINANELFGTHLTSYHNLYFLLNLMKGVRQAIKDDNLLEFREHVFEDYGFNKENAKNF

SEQ ID NO: 56561 - protein, 247 aa, Lactobacillus farraginis
  misc_feature (1)..(247): tr|X0P969|X0P969_9LACO Queuine tRNA-ribosyltransferase OS=Lactobacillus farraginis DSM 18382 = JCM 14108 OX=14 23743 GN=JCM14108_84 PE=3 SV=1
MQPAISYRLIKKEKHTGARLGEITTPHGTFRTPIFMPVGTQATVKTLAPEELDEMGATIILANTYHLWLRPGEDIVKQAGGLHKFMNWDHGILTDSGGFQVFSLAKNRDISEKGVTFKNEINGDRMFLSPEKAIQIENDLGPDIMMSLDECPPFFETYDYVKKSVERTSRWAERGLKAHRNPQTQGLFGIVQGAGFEDLRKQSASDLVSMDFPGYSIGGLSVGESKAEMNRILEVTTPLLPENKPVI

SEQ ID NO: 56562 - protein, 380 aa, Lactobacillus farraginis
  misc_feature (1)..(380): tr|A0A0R1VWV1|A0A0R1VWV1_9LACO Queuine tRNA-ribosyltran sferase OS=Lactobacillus farraginis DSM 18382 = JCM 141 08 OX=1423743 GN=tgt PE=3 SV=1
MQPAISYRLIKKEKHTGARLGEITTPHGTFRTPIFMPVGTQATVKTLAPEELDEMGATIILANTYHLWLRPGEDIVKQAGGLHKFMNWDHGILTDSGGFQVFSLAKNRDISEKGVTFKNEINGDRMFLSPEKAIQIENDLGPDIMMSLDECPPFFETYDYVKKSVERTSRWAERGLKAHRNPQTQGLFGIVQGAGFEDLRKQSASDLVSMDFPGYSIGGLSVGESKAEMNRILEVTTPLLPENKPRYLMGVGVTDSLIDGVIRGIDMFDCVLPTRIARNGTVMTSHGRLVVKNAEYARDFGPLDDQCSCYTCRNYSRAYIRHLIKSGETFGLRLASYHNLYYLIHLMKRVQQAILDDNLLDLRAEVFEQYGYNKPNAKSF

SEQ ID NO: 56563 - protein, 313 aa, Lactobacillus fermentum
  misc_feature (1)..(313): tr|A0A158SLA4|A0A158SLA4_LACFE K00773 queuine tRNA-ribo syltransferase OS=Lactobacillus fermentum OX=1613 GN=LF ER_728 PE=4 SV=1
MTMTSYPLTVPMPVLKLPLLTTDPLTAGELFSHCGVRIVALPLAPAMDAPGAATLGEVGGLGAWLKWEGLTVALPGFGQPLTKVKKNSERVGVHYQLPHGGAKKTVNGAEYEEWLKAAHASVALPLSQAPDHYAPVDDIVRSVAVNAAWGTQTPTGWGVVQGAGLKAARQESIAYLVEQNITNFYLGGFGQPLEDEEWQRSLEMTTDLLPPNGLVMVEAATPFRIQAAIEAGVHLIISDLPLTLARHHRYLQEDLSDVPVEEGAPHGLPKQAWPYLTERHVGLATRLLTKANVKNWTAYFAKKTPGNVKLTGI

SEQ ID NO: 56564 - protein, 378 aa, Lactobacillus floricola
  misc_feature (1)..(378): tr|A0A0R2DUI8|A0A0R2DUI8_9LACO Queuine tRNA-ribosyltran sferase OS=Lactobacillus floricola DSM 23037 = JCM 1651 2 OX=1423744 GN=tgt PE=3 SV=1
MAAIEYKLLHVDKQTGARLGEVKTPHGTFQTPIFMPVGTQATVKTMSPEDLEKVGAQIILANNYHLWLRPGEEIVKEAGGLHKFMNWNHPILTDSGGFQAFSLTEHVKFNEEGISFKSHLSGEPLFLSPEKAIQVENDLGADIIMSLDMLTDFHNDYAEMQKAVNRTTRWAERGLKAHKNPDTQALFGIVQGGGYEDLRKQSARDLVSLDFPGYSIGGLSVGETKEEMNQVLDYTVPELPENKPRYLMGVGTPDALIDGVIRGIDMFDCVLPTRIARNGTVMTSEGRLVIKNAAYARDFGPLDKNCDCYTCRNYSRAYIRHLLKAKESFGIHLTSYHNLYFLLDLMKQVREAIKNDRLADFRAEFFESYGYNSKHMNF

SEQ ID NO: 56565 - protein, 380 aa, Lactobacillus formosensis; identical to SEQ ID NO: 56549
  misc_feature (1)..(380): tr|A0A2P4R9G8|A0A2P4R9G8_9LACO Queuine tRNA-ribosyltran sferase OS=Lactobacillus formosensis OX=1617889 GN=tgt PE=3 SV=1

SEQ ID NO: 56566 - protein, 380 aa, Lactobacillus fuchuensis
  misc_feature (1)..(380): tr|A0A0R1RMB4|A0A0R1RMB4_9LACO Queuine tRNA-ribosyltran sferase OS=Lactobacillus fuchuensis DSM 14340 = JCM 112 49 OX=1423747 GN=tgt PE=3 SV=1
MEPAIKYRLIKKEKHTGARLGEIITPHGTFKTPMFMPVGTQASVKTMAPEDLKEMGAGIILSNTYHLWLRPGEDIVEKAGGLHKFMNWDRGVLTDSGGFQVFSLAKLRDISEDGVAFRSHLSGEKLFLSPEKAIQVENALGADIMMSFDECPPFFESYDYVKKSVERTSRWAERGLIAHQNPATQGLFGIVQGAGFEDLRKQSARDLVGMDFPGYSIGGLSVGESKGEMNRVLDFTTPMLPEEKPRYLMGVGSPDALIDGVIRGIDMFDCVLPTRIARNGTTMTSQGRLVVKNAKYSEDFRPLDPKCNCYVCKNYTRAYIRHLIKANETFGIHLTSYHNLYFLINLMHQVQDAIEQDNLLEFRAAFFEEYGYNNDNGRNF

SEQ ID NO: 56567 - protein, 380 aa, Lactobacillus fuchuensis; identical to SEQ ID NO: 56566
  misc_feature (1)..(380): tr|A0A2N9DTR4|A0A2N9DTR4_9LACO Queuine tRNA-ribosyltran sferase OS=Lactobacillus fuchuensis OX=164393 GN=tgt PE =3 SV=1

SEQ ID NO: 56568 - protein, 380 aa, Lactobacillus futsaii
  misc_feature (1)..(380): tr|A0A5B7T0C3|A0A5B7T0C3_9LACO Queuine tRNA-ribosyltran sferase OS=Lactobacillus futsaii OX=938155 GN=tgt PE=3 SV=1
MEPAVKYTLIKKEKHTGARLGMLETPHGTFETPIFMPVGTEASVKNMAPEDLEKIGATIVLANTYHLWLRPGEDIVKEAGGLHKFMNWNKGILTDSGGFQVFSLANTRDITEAGVHFRNHLNGRREFLSPEKAIKIENYLGPDIMMSLDECPPFFESYDYIKKSVARTSRWAERGLKAHRNPDWQALFGIVQGAGFEDLRKQSAKDLVSMDFPGYSIGGLSVGESKSEMNRVLDFTTPLLPENKPRYLMGVGTADSLIDGVIRGIDMFDCVLPTRIARNGTCMTTHGRLVVKNAKYARDFGPIDPDCDCYVCRNYSRAYIRHLINANELFGTHLTSYHNLYFLLNLMKGVRQAIKDNNLLEFREHVFEDYGFNKANAKNF

SEQ ID NO: 56569 - protein, 381 aa, Lactobacillus ghanensis
  misc_feature (1)..(381): tr|A0A0R1VLI0|A0A0R1VLI0_9LACO Queuine tRNA-ribosyltran sferase OS=Lactobacillus ghanensis DSM 18630 OX=1423750 GN=tgt PE=3 SV=1
MTEPAIKYHLLKKEAHTAARLGKLQTPHGTYPTPMFMPVGTQATVKTLTPEELESMGAGVILSNTYHLWLRPGEKIVEEAGGLHHFMNWKRGILTDSGGFQVFSLAKIRDITEEGVHFRSHLSGEKLFLSPEKAIQIQNALGSDIMMSFDECPPFFESYDYIKRSIERTTRWAERGLKAHQHPERQGLFGIVQGGGHLDLRQQSARDLVSLDFPGYSIGGLSVGESKAEMNHVLENTTPLLPENKPRYLMGVGSPDALIDGVIRGVDMFDCVLPTRIARNGTCMTSHGRLVVKNATYAHDFTPLDDNCDCYVCQNYTRAYLRHLFKADEILGLRLASYHNLYFLLNLMKQIRQAIEDDNLLDFRAEFFENYGFNQKNPRNF

SEQ ID NO: 56570 - protein, 381 aa, Lactobacillus ginsenosidimutans
  misc_feature (1)..(381): tr|A0A0H4QIT0|A0A0H4QIT0_9LACO Queuine tRNA-ribosyltran sferase OS=Lactobacillus ginsenosidimutans OX=1007676 G N=tgt PE=3 SV=1
MPNPAVKYTLLKKEKHTGARLGLIETPHGTFETPMFMPVGTEATVKNMAPEDLEKIGATIILSNTYHLWLRPGEDIVKEAGGLHKFMNWNKGILTDSGGFQVFSLAKTRDITEAGVHFRNHLNGRREFLSPEKAIQIENDLGPDIMMSLDECPPFFESYDYIKDSVARTSRWAERGLQAHRNPDWQALFGIVQGAGYEDLRKQSAQDLVSMDFPGYSIGGLSVGESKEEMNHVLDFTTPMLPENKPRYLMGVGSADALIDGVIRGIDMFDCVLPTRIARNGTCMTTHGRLVVKNAKYARDFRPIDEDCDCYVCRNYTRAYIRHLINANELFGTHLTSYHNLYFLLKLMADVRQSIKDDNLLEFREHVFEQYGFNKKNAKNF

SEQ ID NO: 56571 - protein, 380 aa, Lactobacillus graminis
  misc_feature (1)..(380): tr|A0A0R1XAI2|A0A0R1XAI2_9LACO Queuine tRNA-ribosyltran sferase OS=Lactobacillus graminis DSM 20719 OX=1423752 GN=tgt PE=3 SV=1
MEPAIKYRLIKKEKHTGARLGEIVTPHGTFKTPMFMPVGTQASVKTMAPEELKAIGAGIILSNTYHLWLRPGEDIVEKAGGLHKFMNWDRGVLTDSGGFQVFSLAKLRDISEDGVAFRSHLSGEKLFLSPEKAIQVENALGADIMMSFDECPPFFESYDYVKKSVERTSRWAERGLIAHQNPATQGLFGIVQGAGFEDLRRQSARDLVGMDFPGYSIGGLSVGESKGEMNRVLDFTTPLLPTDKPRYLMGVGSPDALIDGVIRGVDMFDCVLPTRIARNGTTMTSQGRLVVKNAQYAEDFRPLDPKCNCYVCKNYTRAYIRHLIKADETFGIHLTSYHNLYFLINLMHQVQNAIEQDNLLEFREAFFEEYGYNEKNSRNF

SEQ ID NO: 56572 - protein, 380 aa, Lactobacillus graminis; identical to SEQ ID NO: 56571
  misc_feature (1)..(380): tr|A0A5J6Z666|A0A5J6Z666_9LACO tRNA guanosine(34) trans glycosylase Tgt OS=Lactobacillus graminis OX=60519 GN=t gt PE=4 SV=1

SEQ ID NO: 56573 - protein, 380 aa, Lactobacillus harbinensis
  misc_feature (1)..(380): tr|A0A0R1X207|A0A0R1X207_9LACO Queuine tRNA-ribosyltran sferase OS=Lactobacillus harbinensis DSM 16991 OX=11221 47 GN=tgt PE=3 SV=1
MTAPVRYRLIKTEKHTGARLGELITPHGTFPTPMFMPVGTQASVKLMSPEELKEMGAGVILSNTYHLWLRPGPEIVKEAGGLHKFMNWDQGILTDSGGFQVFSLAENRDITEEGVHFRSHLSGEKMFLSPEKAIQIENDLGPDIMMSLDECPPFFESYEYVRDSVARTSRWAERGLKAHCNPDTQGLFGIVQGAGFQDLREQSAKDLVSLDFPGYSIGGLSVGESKAEMNHVLDFTTPLLPENKPRYLMGVGSPDALIDGVIRGIDMFDCVLPTRIARNGTVMTHHGRLIVKNAKYAHDFTPLDPDCDCYTCTHYSRAYIRHLIKADETFGLRLTTYHNLYFLIHLMADVRQAIMDDNLIEFRQNLFDEYGYSDATTKNF

SEQ ID NO: 56574 - protein, 380 aa, Lactobacillus harbinensis
  misc_feature (1)..(380): tr|A0A510TXY3|A0A510TXY3_9LACO Queuine tRNA-ribosyltran sferase OS=Lactobacillus harbinensis OX=304207 GN=tgt P E=3 SV=1
MTAPVRYRLIKTEKHTGARLGELITPHGTFPTPMFMPVGTQASVKLMSPEELKEMGAGVILSNTYHLWLRPGPEIVKEAGGLHKFMNWDQGILTDSGGFQVFSLAENRDITEEGVHFRSHLSGEKMFLSPEKAIQIENDLGPDIMMSLDECPPFFESYEYVRDSVARTSRWAERGLKAHRNPDTQGLFGIVQGAGFQDLREQSAKDLVSLDFPGYSIGGLSVGESKAEMNHVLDFTTPLLPENKPRYLMGVGSPDALIDGVIRGIDMFDCVLPTRIARNGTVMTHHGRLIVKNAKYAHDFTPLDPDCDCYTCTHYSRAYIRHLIKADETFGLRLTTYHNLYFLIHLMADVRQAIMDDNLIEFRQNLFDEYGYSDATTKNF

SEQ ID NO: 56575 - protein, 380 aa, Lactobacillus hayakitensis
  misc_feature (1)..(380): tr|A0A0R1WN80|A0A0R1WN80_9LACO Queuine tRNA-ribosyltran sferase OS=Lactobacillus hayakitensis DSM 18933 = JCM 1 4209 OX=1423755 GN=tgt PE=3 SV=1
MTEPAIKYRLIKTDKHTGARLGEIITPHGTFPTPMFMPVGTLASVKAMAPEELDEMGANIILSNTYHLWLRPGEDLVEQAGGLHKFMNWDKGILTDSGGFQVFSLAELRNIKEEGVYFRNHLNGDKLFLSPEKAIHIENALGADIMMSFDECPPFFESYDYIKKSVERTSRWAERGLKAHKNPDRQGLFGIVQGGGYKDLRQQSARDLVSMDFPGYSIGGLSVGESKEEMNRVLDFTTPMLPENKPRYLMGVGSPDALIDGVIRGVDMFDCVLPTRIARNGTCMTSQGRLVVKNKKYERDFSPIDPKCNCYTCRNYTRAYVRHLIHADETFGLRLTSYHNLYFLLNLMKDVREAIMNDNLLEFREAFFEEYGYNNSKRNF

SEQ ID NO: 56576 - protein, 380 aa, Lactobacillus heilongjiangensis
  misc_feature (1)..(380): tr|A0A0K2LAQ5|A0A0K2LAQ5_9LACO Queuine tRNA-ribosyltran sferase OS=Lactobacillus heilongjiangensis OX=1074467 G N=tgt PE=3 SV=1
MEPAVKYTLLKKEKHTGARLGLLETPHGTFETPIFMPVGTEASVKNMAPEDLEKIGATIVLANTYHLWLRPGEDIVQEAGGLHKFMNWNKGILTDSGGFQVFSLANNRDITEAGVHFKNHLNGRREFLSPEKAIKIENYLGPDIMMSLDECPPFFESYDYIKKSVARTSRWAERGLAAHRNPDWQALFGIVQGAGFEDLRKQSAQDLVSMDFPGYSIGGLSVGESKDEMNRVLDFTTPMLPENKPRYLMGVGTADSLIDGVIRGIDMFDCVLPTRIARNGTCMTTHGRLVVKNAKYARDFGPIDADCDCYVCRNYSRAYIRHLINANELFGTHLTSYHNLYFLLNLMKGVRQAIRDDNLLEFREHVFEDYGFNQENAKKF

SEQ ID NO: 56577 - protein, 380 aa, Lactobacillus hilgardii
  misc_feature (1)..(380): tr|C0XLD3|C0XLD3_LACHI Queuine tRNA-ribosyltransferase OS=Lactobacillus hilgardii DSM 20176 = ATCC 8290 OX=142 3757 GN=tgt PE=3 SV=1
MQPAISYRLIKKEKHTGARLGEITTPHGTFRTPIFMPVGTQATVKTLAPEELNDMGATIILANTYHLWLRPGEDIVKEAGGLHKFMNWDHGILTDSGGFQVFSLAKNRDITEKGVTFKNEINGARMFLSPEKAIQIENDLGPDIMMSLDECPPFFETYDYVKKSVERTSRWAERGLKAHRNPDTQGLFGIVQGAGFEDLRKQSAQDLVSLDFPGYSIGGLSVGESKAEMNRILETTTPLLPETKPRYLMGVGATDSLIDGVIRGIDMFDCVLPTRIARNGTVMTSHGRLVVKNAQYARDFRPLDDQCNCYTCRNYSRAYIRHLIKSGETFGLRLASYHNLYYLIHLMKRVQQAIMDDDLLDLRAEVFEQYGYNKANAKNF

SEQ ID NO: 56578 - protein, 380 aa, Lactobacillus hokkaidonensis
  misc_feature (1)..(380): tr|A0A0A1GVN2|A0A0A1GVN2_9LACO Queuine tRNA-ribosyltran sferase OS=Lactobacillus hokkaidonensis JCM 18461 OX=12 91742 GN=tgt PE=3 SV=1
MEPAIKYRLIKKDKHTGARMGELITPHGTFPTPMFMPVGTQATVKSIAPDELDAMGAGVILANTYHLWLQPGEQIVEEAGGLHKFMNWDKGILTDSGGFQVFSLAKHRDIKEEGVTFRDPVSGSKMFLSPEKAMQIENALGPDIMMSFDECPPYFETYDYIKKSVERTSRWAQRGLEAHQNPDWQGLFGIVQGAGFKKLRQQSARDLVSMDFPGYSVGGLSVGESKEEMNRVLEFTTPLLPENKPRYLMGVGTADSLIDGVMRGIDMFDCVLPTRIARNGTCMTSHGRLVIKNAQYAHDFGPLDDECDCYVCRNYSRAYIRHLIHVNETFGIRLTSYHNLYFLIHLMQDLRQAIADDEVLEFREMVFEKYGFNQLNARNF

SEQ ID NO: 56579 - protein, 381 aa, Lactobacillus hordei
  misc_feature (1)..(381): tr|A0A0R1MRP8|A0A0R1MRP8_9LACO Queuine tRNA-ribosyltran sferase OS=Lactobacillus hordei DSM 19519 OX=1423759 GN =tgt PE=3 SV=1
MTEPAIKYRLIKKEKHTGARLGEIITPHGTFPTPMFMPVGTQASVKSLAPEELDEMGANIILSNTYHLWLRPGEDLVEEAGGLHQFMNWKKGILTDSGGFQVFSLAKMRDITEEGVHFRSHLSGEKLFLSPEKAIHIQNALGSDIMMSFDECPPFFESYDYIKKSVERTSRWAERGLNAHLHPNRQGLFGIVQGGGHKDLRELSARQLVSLDFPGYSIGGLSVGESKAEMNHVLDFTTPLLPENKPRYLMGVGSADALIDGVIRGVDMFDCVLPTRIARNGTCMTSHGRLVVKNAAYARDFRPLDENCDCYTCRNFTRAYIRHLIKADEIFGLRLASYHNLYFLLNLMKNVRQAIMDDNLLEFKEAFFEEYGFNEENARNF

SEQ ID NO: 56580 - protein, 381 aa, Lactobacillus hordei; identical to SEQ ID NO: 56579
  misc_feature (1)..(381): tr|A0A3Q8CJZ6|A0A3Q8CJZ6_9LACO Queuine tRNA-ribosyltran sferase OS=Lactobacillus hordei OX=468911 GN=tgt PE=3 S V=1

SEQ ID NO: 56581 - protein, 380 aa, Lactobacillus kefiri
  misc_feature (1)..(380): tr|A0A511DQQ5|A0A511DQQ5_LACKE Queuine tRNA-ribosyltran sferase OS=Lactobacillus kefiri OX=33962 GN=tgt PE=3 SV =1
MQPAITYRLIKKEKHTGARLGEITTPHGTFRTPMFMPVGTQATVKTLAPEELDDMGATIILANTYHLWLRPGEDIVKEAGGLHKFMNWNKGILTDSGGFQVFSLAKNRDITEEGVTFKNEINGSKMFLSPEKAIQIENDLGPDIMMSLDECPPFFESYDYVKKSVERTSRWAERGLKAHKNPDWQGLFGIVQGAGFEDLRKQSAKDLVSLDFPGYSIGGLSVGESKQEMNRILESTSPLLPENKPRYLMGVGATDSLIDGVIRGIDMFDCVLPTRIARNGTVMTSHGRLVVKNAKYARDFTPLDDQCNCYTCRNYTRAYIRHLVKTDETFGLRLCSYHNLYYLIHLMKRVQQAIMDDNLLDLRAEVFEQYGYNKPNPKNF

SEQ ID NO: 56582 - protein, 380 aa, Lactobacillus kimchicus
  misc_feature (1)..(380): tr|A0A0R1HWL7|A0A0R1HWL7_9LACO Queuine tRNA-ribosyltran sferase OS=Lactobacillus kimchicus JCM 15530 OX=1302272 GN=tgt PE=3 SV=1
MEPAIKYRLIKTEKHTGARLGELITPHGTFPTPMFMPVGTQATVKAMAPEELDDMGAGVILANTYHLWLQPGEDLVKEAGGLHKFMNWHKPILTDSGGFQVFSLAEIRNITEEGVHFKNPLNGDRLFLSPEKAMQIENDLGPDIMMSLDECPPFFESYDYIKKSVERTSRWAERGLKAHQNPDWQGLFGIVQGAGYEDLRRQSAADLVGLDFPGYSIGGLSVGESKAEMNHVLEFTTPLLPSTKPRYLMGVGSPDALIDGVIRGVDMFDCVLPTRIARNGTMMTHHGRLNVKNAKYERDFGPVDDKCECYTCRNYSRAYIRHLFKADETFGLRLTSYHNLYFLLNLMKEIRQAIMDDELLEYREQLFEMYGYNQPNAKNF

SEQ ID NO: 56583 - protein, 380 aa, Lactobacillus kimchiensis
  misc_feature (1)..(380): tr|A0A0R2L813|A0A0R2L813_9LACO Queuine tRNA-ribosyltran sferase OS=Lactobacillus kimchiensis OX=993692 GN=tgt P E=3 SV=1
MEPAVKYTLLKKEKHTGARLGLLETPHGTFETPMFMPVGTEASVKNMSPEDLEKIGSTIILANTYHLWLRPGEDIVKEAGGLHKFMNWDKGILTDSGGFQVFSLANNRDITEAGVHFKNHLNGRREFLSPEKAMQIENDLGPDIMMSLDECPPFFESYDYIKRSVARTSRWAERGLAAHRNPDWQALFGIVQGAGFEDLRKQSAQDLVSMDFPGYSIGGLSVGESKGEMNRVLDFTTPFLPENKPRYLMGVGTADSLIDGVIRGIDMFDCVLPTRIARNGTCMTSHGRLVVKNAKYARDFGPIDDNCDCYVCRNYSRAYVRHLINADELFGTHLTSYHNLYFLLNLMKGVRQAIRDDNLLEFREHVFEDYGFNQENAKKF

SEQ ID NO: 56584 - protein, 380 aa, Lactobacillus kisonensis
  misc_feature (1)..(380): tr|H1LJN6|H1LJN6_9LACO Queuine tRNA-ribosyltransferase OS=Lactobacillus kisonensis F0435 OX=797516 GN=tgt PE=3 SV=1
MQPAITYRLIKKEKHTGARLGEITTPHGTFRTPIFMPVGTQATVKTLAPEELDQMGSTIILANTYHLWLRPGEDIVKEAGGLHKFMNWDKGILTDSGGFQVFSLAKNRDITEEGVTFKNEINGARMFLSPEKAIQIENDLGPDIMMSLDECPPFFESYDYVKKSVARTSRWAERGLKAHRNPDSQGLFGIVQGAGFEDLRQQSAKDLVSLDFPGYSIGGLSVGESKVEMNRILEATTPLLPENKPRYLMGVGVTDSLIDGVIRGVDMFDCVLPTRIARNGTVMTSHGRLVVKNAKYARDFTPLDDQCDCYACRNYTRAYIRHLVKSNETFGLRLCSYHNLYYLIHLMKRVQQAIIDDNLLDLRAEVFEQYGYNKPNAKNF

SEQ ID NO: 56585 - protein, 380 aa, Lactobacillus kisonensis; identical to SEQ ID NO: 56584
  misc_feature (1)..(380): tr|A0A0R1NNM8|A0A0R1NNM8_9LACO Queuine tRNA-ribosyltran sferase OS=Lactobacillus kisonensis DSM 19906 = JCM 150 41 OX=1423766 GN=tgt PE=3 SV=1

SEQ ID NO: 56586 - protein, 380 aa, Lactobacillus malefermentans
  misc_feature (1)..(380): tr|A0A4R5NIS4|A0A4R5NIS4_9LACO Queuine tRNA-ribosyltran sferase OS=Lactobacillus malefermentans OX=176292 GN=tg t PE=3 SV=1
MDPAIKYRLIKKDKHTGARLGELITPHGTFPTPMFMPVGTQATVKSLAPEELDEMGAGVILSNTYHLWLQPGEDLVKEAGGLHKFMNWDKGILTDSGGYQVFSLAKNRKLTEEGVHFRNPSNGDKLFLSPEKAIQIENDLGPDIMMSLDECPPYYESYDYIKSSVERTSRWAERGLRAHQHADYQGLFGIVQGAGYEDLRKQSAKDLTSLDFPGYSIGGLSVGEPKKEMNRVLDFTTPLLPENKPRYLMGVGTADSLIDGVIRGIDMFDCVLPTRIARNGTCMTSHGRLVVKNAVYARDFSPIDDNCDCYTCRNYTRAYIRHLFKADESFGMRLTSYHNLYYLLNLMKRVREAIMNDQLLDLRAEVFENYGFNKPNAKNF

SEQ ID NO: 56587 - protein, 381 aa, Lactobacillus mali
  misc_feature (1)..(381): tr|J1F4F5|J1F4F5_9LACO Queuine tRNA-ribosyltransferase OS=Lactobacillus mali KCTC 3596 = DSM 20444 OX=1046596 GN=tgt PE=3 SV=1
MTEPAIKYRLIKKEKHTGARLGEIITPHGTFPTPMFMPVGTQASVKSLAPEELDKMGANIILSNTYHLWLRPGEDIVEEAGGLHQFMNWKKGILTDSGGFQVFSLAKMRDITERGVHFKSHLSGEKLFLSPEKAIHIQNALGSDIMMSFDECPPFFESYDYIKKSVERTSRWAERGLNAHLHPDRQGLFGIVQGGGHKELRELSARQLTSLDFPGYSIGGLSVGESKAEMNHVLDFTTPLLPENKPRYLMGVGSADALIDGVIRGVDMFDCVLPTRIARNGTCMTSHGRLVVKNAAYAHDFGPLDDNCDCYTCRNFTRAYIRHLIKADEIFGLRLASYHNLYFLLNLMKNVRQAIMDDNLLEFRESFFEEYGFNEKNARNF

SEQ ID NO: 56588 - protein, 381 aa, Lactobacillus mali
  misc_feature (1)..(381): tr|A0A0R2FT58|A0A0R2FT58_9LACO Queuine tRNA-ribosyltran sferase OS=Lactobacillus mali OX=1618 GN=tgt PE=3 SV=1
MTEPAIKYRLIKKEKHTGARLGEIITPHGTFPTPMFMPVGTQASVKSLAPEELDKMGANIILSNTYHLWLRPGEDIVEEAGGLHQFMNWKKGILTDSGGFQVFSLAKMRDITERGVHFKSHLSGEKLFLSPEKAIHIQNALGSDIMMSFDECPPFFETYDYIKKSVERTSRWAERGLNAHLHPDRQGLFGIVQGGGHKELRELSARQLTSLDFPGYSIGGLSVGESKAEMNHVLDFTTPLLPENKPRYLMGVGSADALIDGVIRGVDMFDCVLPTRIARNGTCMTSHGRLVVKNAAYAHDFRPLDDNCDCYTCRNFTRAYIRHLIKADEIFGLRLASYHNLYFLLNLMKNVRQAIMDDNLLEFRESFFEEYGFNEKNARNF

SEQ ID NO: 56589 - protein, 380 aa, Lactobacillus manihotivorans
  misc_feature (1)..(380): tr|A0A0R1QB43|A0A0R1QB43_9LACO Queuine tRNA-ribosyltran sferase OS=Lactobacillus manihotivorans DSM 13343 = JCM 12514 OX=1423769 GN=tgt PE=3 SV=1
MEPAVTYHLKHVDKHTGARLGELVTPHGTFPTPMFMPVGTLASVKTMAPEELDEMGAGVILANTYHLWLRPGEDIVEQAGGLHKFMNWDKGILTDSGGFQVFSLAELRDIQEEGVHFKNHLDGSKMFLSPEKAIAIENALGPDIMMSFDECPPFFESYDYVAKSVARTSRWAERGLKAHKNPDWQALFGIVQGAGFKDLRQQSARDLVSLDFPGYSIGGLSVGESKEEMNHVLEFTTLLLPEHKPRYLMGVGSPDALIDGAMRGIDMFDCVLPTRIARNGTTMTSNGRVVIKNAKYARDFTPLDPNCNCYTCRNYTRAYIRHLIHTDEAFGIRLTSYHNLYFLLHLMQQVREAIANDQLLDFREAFFEQYGYNKPDAKSF

SEQ ID NO: 56590 - protein, 380 aa, Lactobacillus mellifer
  misc_feature (1)..(380): tr|A0A0F4LW82|A0A0F4LW82_9LACO Queuine tRNA-ribosyltran sferase OS=Lactobacillus mellifer OX=1218492 GN=tgt PE= 3 SV=1
MEQPIQYRLIKKEKHTGARLGELITPHGTFSTPIFMPVGTQATVKTMAPEELKTIGASVILANTYHLWLRPGSQLVRAAGGLHQFMHWDQGILTDSGGFQVFSLAHRRGISEEGVTFKSHLDGQPMFLSPEKAIHIENDLGSDIMMSLDECPPFFESHAYLKASVERTSRWAQRGLQAHRHPDRQGIFGIVQGGGYHDLRRQSARDLTSLDFAGYSIGGLSVGESKAEMNHVLDFTTPWLPENKPRYLMGVGTADSLLDGVIRGIDMFDCVLPTRIARNGTCMTSQGRLVVKNAQYAQDFTPLDPQCDCYTCRNYTRAYIRHLIHVNETFGIHLTSYHNLYYLVHLMARIRQAIRDDNLLDLRAEVFDQYGFNEKNAKNF

SEQ ID NO: 56591 - protein, 380 aa, Lactobacillus mellis
  misc_feature (1)..(380): tr|A0A0F4KTW7|A0A0F4KTW7_9LACO Queuine tRNA-ribosyltran sferase OS=Lactobacillus mellis OX=1218508 GN=tgt PE=3 SV=1
MEQPIRYHLIKKEKHTGARLGELITPHGTFPTPIFMPVGTQASVKTMAPEELQEMGATVILANTYHLWLRPGSPLVKEAGGLHQFMNWKQGILTDSGGFQVFSLAKRRGITEEGVTFKSHLDGRLMFLSPEKAIHIENDLGPDIMMSLDECPPFFESYDYLKASVARTSRWAQRGLQAHRNPNSQGIFGIVQGGGYEDLRRQSAQDLTSLDFAGYSIGGLSVGESKAEMNHVLEFTTPLLPENKPRYLMGVGTADSLIDGVIRGIDMFDCVLPTRIARNGTCMTSQGRLVVKNAQYAHDFTPLDPNCNCYACRNYSRAYIRHLLQVNETFGIHLTSYHNLYYLIHLMSQIRQAIQDDNLLDLRAQVFEQYGFNQKNAKNF

SEQ ID NO: 56592 - protein, 380 aa, Lactobacillus mindensis
  misc_feature (1)..(380): tr|A0A0R1QS49|A0A0R1QS49_9LACO Queuine tRNA-ribosyltran sferase OS=Lactobacillus mindensis DSM 14500 OX=1423770 GN=tgt PE=3 SV=1
MEPAVKYTLLKKEKHTGARLGLLETPHGTFETPIFMPVGTEATVKNMSPEDLDKIGATIILANTYHLWLRPGEDIVQEAGGLHKFMNWDKGILTDSGGFQVFSLANSRDITEAGVHFKNHLNGRREFLSPEKAIKIENYLGPDIMMSLDECPPFFESYDYIKKSVARTSRWAERGLEAHRNPDWQALFGIVQGAGFKDLRKQSAQDLVSMDFPGYSIGGLSVGESKDEMNRVLDFTTPFLPENKPRYLMGVGTADSLIDGVIRGVDMFDCVLPTRIARNGTCMTSHGRLVVKNASYARDFGPIDDNCDCYVCRNYSRAYIRHLLNADELFGTHLTTYHNLYFLLNLMKGVRQAIKDDNLLEFREHVFEDYGFNKENAKKF

SEQ ID NO: 56593 - protein, 380 aa, Lactobacillus mixtipabuli
  misc_feature (1)..(380): tr|A0A1Z5IBL8|A0A1Z5IBL8_9LACO Queuine tRNA-ribosyltran sferase OS=Lactobacillus mixtipabuli OX=1435342 GN=tgt PE=3 SV=1
MEPAIKYRLIKTEKDTGARLGELITPHGTFPTPMFMPVGTQATVKSLAPEELDEMGAGVILANTYHLWLQPGEDLVKEAGGLHQFMNWQKPILTDSGGFQVFSLAENRNITEEGVHFKNPSNGDRLFLSPEKAMQIENDLGPDIMMSLDECPPFFESYEYIKHSVERTSRWAERGLKAHANPNWQGLFGIVQGAGYEDLRRQSAHDLVSMDFPGYSIGGLSVGESKAEMNRVLDFTTPMLPSNKPRYLMGVGSPDSLIDGVMRGVDMFDCVLPTRIARRGTCMTSHGRLTVKNAKYARDFTPIDDRCDCYTCRNYTRAYIRHLFKADESFGLRLTSYHNLYFLLHLMKDVRAAIMADNLVDFRANFFEEYGYNQPNPKNF

SEQ ID NO: 56594 - protein, 363 aa, Lactobacillus mucosae
  misc_feature (1)..(363): tr|A0A508YKS7|A0A508YKS7_LACMC Queuine tRNA-ribosyltran sferase OS=Lactobacillus mucosae OX=97478 GN=tgt PE=4 S V=1
MKFDFKLQHHAETARAAQLTIGRQTLETPSLIMPAPALTVHDLAPAEVKRSQIKGLSIDESIISQNPGTETVRDLGGLHRFMAWDGLVIAKPGDFRHLPLVKKNHLTKDGVRFHDVKTGAVRLMTPQTVIESQTELQPDIMLMLSQTPSYYAPYDYVEKAVAINSTWAAAAIQKLTADSPALFGVMQGAGFAQLRKQSIEALAKMDFSGYVIGGLSDIDNDKEFDRVLKLSVDLLPADKARMVVDIQSSAQLVSALKNGIDLIETSLPTHWGRYGKALTAQGLLPIKKARFAADPQPLAEDCHCPVCEQYSRAYLRHLLHMDNSVGPRLISQHNLWYLRQLVSQARLAIIHDQPITAIFENLI

SEQ ID NO: 56595 - protein, 381 aa, Lactobacillus murinus; identical to SEQ ID NO: 56516
  misc_feature (1)..(381): tr|A0A4S2EQQ3|A0A4S2EQQ3_9LACO Queuine tRNA-ribosyltran sferase OS=Lactobacillus murinus OX=1622 GN=tgt PE=3 SV =1

SEQ ID NO: 56596 - protein, 381 aa, Lactobacillus murinus
  misc_feature (1)..(381): tr|A0A2Z4VYK8|A0A2Z4VYK8_9LACO Queuine tRNA-ribosyltran sferase OS=Lactobacillus murinus OX=1622 GN=tgt PE=3 SV =1
MTEPAIKYRLIKKEKHTGARLGEIITPHGTFPTPMFMPVGTQATVKAMSPEELKAMGAGIILSNTYHLWLRPGEDLVKEAGGLHKFMNWDQGILTDSGGFQVFSLADMRNITEEGVHFKSHLNGAPLFLSPEKAIQIENALGSDIMMSFDECPPFYESYDYIKKSVERTSRWAERGLKAHQDPEKQALFGIVQGGGHEDLRKLSARDLVSLDFPGYSIGGLSVGESKAEMNRVLDFTTPLLPEDKPRYLMGVGSPDALIDGVLRGVDMFDCVLPTRIARNGTCMTSHGRLVVKNAKYARDFSPIDDNCDCYTCRNYTRAYVRHLFKADETFGLRLTSYHNLYFLLNLMKQVRQAIMDDNLLEFKEHFFEEYGLNVKNPKNF

SEQ ID NO: 56597 - protein, 381 aa, Lactobacillus nagelii
  misc_feature (1)..(381): tr|A0A3S6QTZ5|A0A3S6QTZ5_9LACO Queuine tRNA-ribosyltran sferase OS=Lactobacillus nagelii OX=82688 GN=tgt PE=3 S V=1
MTEPAIKYHLLKKESHTAARLGKLQTPHGTFPTPMFMPVGTQATVKTLTPEELESMGAGVILSNTYHLWLRPGEKIVEEAGGLHHFMNWPKGILTDSGGFQVFSLAKIRDITEEGVHFRSHLSGEKLFLSPEKAIQIQNALGSDIMMSFDECPPFFESYDYIKSSIERTTRWAERGLRAHQNPEKQGLFGIVQGGGHLDLRRQSARDLVSLDFPGYSIGGLSVGESKVEMNHVLENTTPLLPENKPRYLMGVGSPDALIDGVIRGVDMFDCVLPTRIARNGTCMTSHGRLVVKNAKYAHDFTPLDENCNCYVCQNYTRAYLRHLFKADEILGPRLASYHNLYFLLNLMKQIRQAIENDNLLDFRAEFFENYGLNQKNPRNF

SEQ ID NO: 56598 - protein, 381 aa, Lactobacillus nagelii; identical to SEQ ID NO: 56597
  misc_feature (1)..(381): tr|A0A0R1QIX8|A0A0R1QIX8_9LACO Queuine tRNA-ribosyltran sferase OS=Lactobacillus nagelii DSM 13675 OX=1122150 G N=tgt PE=3 SV=1

SEQ ID NO: 56599 - protein, 380 aa, Lactobacillus nantensis
  misc_feature (1)..(380): tr|A0A0R1WN09|A0A0R1WN09_9LACO Queuine tRNA-ribosyltran sferase OS=Lactobacillus nantensis DSM 16982 OX=1423774 GN=tgt PE=3 SV=1
MEPAVKYTLLKKEKHTGARLGLLETPHGTFETPMFMPVGTEASVKNMAPEDLDKIGASIILANTYHLWLRPGEDIVQEAGGLHKFMNWDKGILTDSGGFQVFSLANTRDITEAGVHFKNHLNGRREFLSPEKAIKIENYLGPDIMMSLDECPPFFESYDYIKKSVARTSRWAERGLEAHRNPDWQALFGIVQGAGFEDLRKQSAQDLVSMDFPGYSIGGLSVGESKDEMNRVLDFTTPMLPENKPRYLMGVGTADSLIDGVIRGIDMFDCVLPTRIARNGTCMTSHGRLVVKNAKYARDFSPLDDNCDCYVCRNYSRAYIRHLINANELFGTHLTSYHNLYFLLNLMKGVRQAIRDDNLLEFREHVFEDYGFNQENAKKF

SEQ ID NO: 56600 - protein, 380 aa, Lactobacillus nasuensis
  misc_feature (1)..(380): tr|A0A0R1JP42|A0A0R1JP42_9LACO Queuine tRNA-ribosyltran sferase OS=Lactobacillus nasuensis JCM 17158 OX=1291734 GN=tgt PE=3 SV=1
MQPAVTYHLKHVDKHTGARLGEIVTPHGTFPTPMFMPVGTQASVKTLSPEELDTMGAGIILANTYHLWLRPGEDLIEEAGGLHQFMNWHKGLLTDSGGFQVFSLADMRNITEEGVHFKNHLNGANMFLSPEKAIAIENALGPDIMMSFDECPPFFESYDYVAKSVARTSRWAERGLAAHQHPDYQALFGIVQGAGFKDLRQQSARDLVSLDFPGYSIGGLSVGESKEEMNHVLDFTTPLLPADKPRYLMGVGSPDALIDGVIRGIDMFDCVLPTRIARNGTTMTSHGRVVIKNAKYARDFTPLDPDCDCYTCRNYTRAYIRHLIHTDEAFGIRLTSYHNLYFLLHLMQQVRDAIAHDDLAAFREDFFERYGYNRADAKSF

SEQ ID NO: 56601 - protein, 380 aa, Lactobacillus nodensis
  misc_feature (1)..(380): tr|A0A0R1K842|A0A0R1K842_9LACO Queuine tRNA-ribosyltran sferase OS=Lactobacillus nodensis DSM 19682 = JCM 14932 = NBRC 107160 OX=1423775 GN=tgt PE=3 SV=1
MEPAVKYTLIKKEKHTGARLGKLETPHGTFETPMFMPVGTEASVKNMAPEDLEKIGASIILANTYHLWLRPGEDIVKEAGGLHKFMNWDKGILTDSGGFQVFSLANTRDITEAGVHFKNHLNGRREFLSPEKAIKIENYLGPDIMMSLDECPPFFESYDYIKKSVARTSRWAERGLEAHRNPDWQALFGIVQGAGFEDLRKQSAADLTSMDFPGYSIGGLSVGESKEEMNHVLDFTAPLLPENKPRYLMGVGSTDALIDGAIRGIDMFDCVLPTRIARNGTCMTTKGRLVVKNAKYARDFRPIDEDCDCYVCRNYSRAYIRHLINANELFGTHLTSYHNLYYLLNLMKGVRQAIRDDNLLEFRENVFEEYGLNEANARNF

SEQ ID NO: 56602 - protein, 380 aa, Lactobacillus nuruki
  misc_feature (1)..(380): tr|A0A2N7ASI5|A0A2N7ASI5_9LACO Queuine tRNA-ribosyltran sferase OS=Lactobacillus nuruki OX=1993540 GN=tgt PE=3 SV=1
MEPAVKYTLLKKEKHTGARLGLLETPHGTFETPIFMPVGTEASVKNMSPEDLDKIGATIVLANTYHLWLRPGEDIVKEAGGLHKFMNWNKGILTDSGGFQVFSLANTRDITEAGVHFRNHLNGRREFLSPEKAIKIENYLGPDIMMSLDECPPFFESYDYIQKSVARTSRWAERGLKAHRNPDWQALFGIVQGAGFEDLRKQSARDLVSMDFPGYSIGGLSVGESKGEMNRVLDFTTPLLPEDKPRYLMGVGTADSLIDGVIRGIDMFDCVLPTRIARNGTCMTSHGRLVVKNAKYARDFGPLDDNCDCYVCRNYSRAYIRHLINANELFGTHLTSYHNLYFLLNLMKGVRQAIKDDNLLEFREHVFEDYGFNRENAKNF

SEQ ID NO: 56603 - protein, 380 aa, Lactobacillus odoratitofui
  misc_feature (1)..(380): tr|A0A0R1LY45|A0A0R1LY45_9LACO Queuine tRNA-ribosyltran sferase OS=Lactobacillus odoratitofui DSM 19909 = JCM 1 5043 OX=1423776 GN=tgt PE=3 SV=1
MEPAIKYRLIKTEKDTGARLGELITPHGTFPTPMFMPVGTQATVKSLAPEELDQMGAGVILANTYHLWLQPGEDLVKEAGGLHKFMNWQKPILTDSGGFQVFSLAENRNITEEGVHFRNPANGDKLFLSPEKAMQIENDLGPDIMMSLDECPPFFESYDYIKHSVERTSRWAERGLKAHANPDWQGLFGIVQGAGYEDLRRQSAQDLVSMDFPGYSIGGLSVGESKAEMNRVLEFTTPMLPTTKPRYLMGVGSPDSLIDGVIRGIDMFDCVLPTRIARRGTCMTSHGRLTVKNAQFARDFNPIDDNCDCYTCRNYSRAYIRHLFKADESFGLRLTSYHNLYFLLHLMGDVRQAIMDDRLLDFKEQFFEAYGYNVPNPKNF

SEQ ID NO: 56604 - protein, 386 aa, Lactobacillus oeni
  misc_feature (1)..(386): tr|A0A0R1M9Y1|A0A0R1M9Y1_9LACO Queuine tRNA-ribosyltran sferase OS=Lactobacillus oeni DSM 19972 OX=1423777 GN=t gt PE=3 SV=1
MEKVQMTEPAINYHLIKKEKHTGARLGEIVTPHGTFKTPMFMPVGTQATVKSLAPEELDRMGADIILSNTYHLWLRPGEEIVQKAGGLHKFMNWNKGILTDSGGFQVFSLAKIRDITEKGVHFRSHLSGEKLFLSPEKAIHIQNALGSDIMMSFDECPPFFESYDYIKKSVERTSRWAERGLSAHLNPKMQGLFGIVQGGGHKDLRELSARQLVAMDFPGYSIGGLSVGESKAEMNHVLEFTTPMLPENKPRYLMGVGSADALIDGVIRGVDMFDCVLPTRIARNGTCMTSHGRVVIKNAAYARDFTPLDDNCDCYTCRNFTRAYIRHLFKADETFGLRLASYHNLYFLLHLMQNVRQAIQEDNLLEFRESFFEEYGFNKENARNF

SEQ ID NO: 56605 - protein, 380 aa, Lactobacillus oligofermentans
  misc_feature (1)..(380): tr|A0A0R1RLM0|A0A0R1RLM0_9LACO Queuine tRNA-ribosyltran sferase OS=Lactobacillus oligofermentans DSM 15707 = LM G 22743 OX=1423778 GN=tgt PE=3 SV=1
MEPAIKYRLIHQDKYTGARTGEIITPHGTFPTPMFMPVGTQASVKSIAPEELDEMGAGIILANTYHLWLQPGEDLVEQAGGLHKFMNWDKGILTDSGGFQVFSLAKHRDIKEEGVTFKDPSSGRTMFLSPEKAIQVENALGPDIMMSFDECPPYFETYDYIKKSVERTSRWAERGLKAHQNPTNQGLFGIVQGAGFKALRQQSARDLVSMDFPGYSVGGLSVGESKEEMNRVLEFTTPLLPENKPRYLMGVGTADSLIDGVIRGIDMFDCVLPTRIARNGTCMTSHGRLVVKNSQYARDFNPLDDNCDCYVCRNYTRAYIRHLIHVNETFGIRLTSYHNLYFLIHLMEDMREAIKNDQVLEFREMVFEQYGFNEENARNF

SEQ ID NO: 56606 - protein, 362 aa, Lactobacillus oris
  misc_feature (1)..(362): tr|E3CAB6|E3CAB6_9LACO tRNA-guanine transglycosylase OS =Lactobacillus oris PB013-T2-3 OX=908339 GN=HMPREF9265_ 0906 PE=4 SV=1
MESKLKFNIQAESGNARTGHLQLGSRTATTPMLVQTGMVPAILTSGELTALGTQAIKQSALEYWLRAQGQPEQLGFADIHEHLRWPGIVVGASGADHAYRWAKPRGRKKTGVSFHEPATGQQKMYTPQLAQQWQRLLGCDLLVGFARWEDYYAPVDDLQAAAQQTAEWLGMDKQSLNTLAPVVGGGLKRVRQASVAAAQATHPCGYALLGIDGAVKLAEQRRVIGEIVAMLPTEGLRYLPACGALEQVLIAIAQGMDIVDSDCAATTALHGTAYLGTKRLHLTQEHLAGDSRTLVPGCQCPTCQAGYSRAYLHQLLQEQSPVGVRLLTAHNLYVLNQLVDRFRQAIAAGRLAELMADLAIDY

SEQ ID NO: 56607 - protein, 380 aa, Lactobacillus oryzae
  misc_feature (1)..(380): tr|A0A081BJ22|A0A081BJ22_9LACO Queuine tRNA-ribosyltran sferase OS=Lactobacillus oryzae JCM 18671 OX=1291743 GN =tgt PE=3 SV=1
MEPAIKYRLIKKDKHTGARLGELITPHGTFPTPMFMPVGTNATVKSMAPEELDEMGAGVILANTYHMWLQPGESLVKEAGGLHKFMNWDKGILTDSGGFQVFSLAENRKLTEEGVHFRNPANGDKMFLSPEKAIQIENDLGPDIMMSLDECPPYFETYDYIKNSVERTSRWAERGLRAHQNPETQGLFGIVQGAGFEDLRKQSVQDLTSLDFPGYSIGGLSVGEPKEEMNRVLEFTTPMLPEDKPRYLMGVGSADSLIDGVIRGVDMFDCVLPTRIARKGTLMTSHGRLVVKNAAYAHDFSPVDDNCNCYTCRNYTRAYLRHLFKADEIFGMRLASYHNLYFLLNLMKRVREAIMNDQLLELREEVFESYGYNLPNAKNF

SEQ ID NO: 56608 - protein, 380 aa, Lactobacillus otakiensis
  misc_feature (1)..(380): tr|S4NB78|S4NB78_9LACO Queuine tRNA-ribosyltransferase OS=Lactobacillus otakiensis DSM 19908 = JCM 15040 OX=14 23780 GN=tgt PE=3 SV=1
MQPAITYRLIKTEKHTGARLGEITTPHGTFKTPMFMPVGTQATVKTLAPEELDQMGSTIILANTYHLWLRPGEDIVKEAGGLHKFMNWHKGILTDSGGFQVFSLAKNRDITEEGVTFKNEINGSKMFLSPEKAMQIENDLGPDIMMSLDECPPFFESYDYVKKSVERTSRWAERGLKAHKNPDWQALFGIVQGAGFEDLRKQSAQDLVSLDFPGYSIGGLSVGESKQEMNRILESTTPLLPENKPRYLMGVGTTDSLIDGVIRGIDMFDCVLPTRIARNGTVMTSHGRLVVKNAKYARDFTPLDDQCNCYTCRNYTRAYIRHLIKTDESFGMRLCSYHNLYYLIHLMKRVQQAIMDDNLLDLRAEVFEQYGYNKPNPKNF

SEQ ID NO: 56609 - protein, 380 aa, Lactobacillus parabuchneri
  misc_feature (1)..(380): tr|A0A1X1FC37|A0A1X1FC37_9LACO Queuine tRNA-ribosyltran sferase OS=Lactobacillus parabuchneri OX=152331 GN=tgt PE=3 SV=1
MQPAITYRLIKKEKHTGARLGEITTPHGTFRTPIFMPVGTQATVKTLAPEELDEMGSTIILANTYHLWLRPGEDIVKEAGGLHKFMNWDKGILTDSGGFQVFSLAKNRDITEDGVTFKNEINGAKMFLSPEKAIQIENDLGPDIMMSLDECPPFFESYDYVKKSVERTSRWAERGLKAHQNPDWQGLFGIVQGAGFEDLRKQSAQDLVSLDFPGYSIGGLSVGESKQEMNRILETTAPLLPENKPRYLMGVGATDSLIDGVIRGIDMFDCVLPTRIARNGTVMTSHGRLVVKNAKYARDFTPLDDQCNCYTCRNYTRAYIRHLCKTDETFGMRLCSYHNLYYLIHLMKRVQQAIMDDNLLDLRAEVFEQYGYNKPNPKNF

SEQ ID NO: 56610 - protein, 380 aa, Lactobacillus parabuchneri; identical to SEQ ID NO: 56609
  misc_feature (1)..(380): tr|A0A0R1Z7A3|A0A0R1Z7A3_9LACO Queuine tRNA-ribosyltran sferase OS=Lactobacillus parabuchneri DSM 5707 = NBRC 1 07865 OX=1423784 GN=tgt PE=3 SV=1

SEQ ID NO: 56611 - protein, 380 aa, Lactobacillus paracasei
  misc_feature (1)..(380): tr|A0A1V0Q5B5|A0A1V0Q5B5_LACPA Queuine tRNA-ribosyltran sferase OS=Lactobacillus paracasei OX=1597 GN=tgt PE=3 SV=1
MEPAVKYRLIHQDKHSGARLGELITPHGTFPTPMFMPVGTQASVKTMAPEELDTMGATVILANTYHLWLRPGPELIEEAGGLHNFMNWHKGILTDSGGFQVFSLADTRHITEEGVTFKNHLNGAKMFLSPEKAIAIENALGPDIMMSLDECPPFFESYDYVKKSVARTSRWAERGLQAHKNPDWQALFGIVQGAGFKDLREQSAKDLVSMDFPGYSIGGLSVGESKDEMNHVLDFTTPLLPENKPRYLMGVGSADALIDGALRGIDMFDCVLPTRIARNGTCMTSRGRLVIKNAKYAHDFGPLDPNCDCYTCRNYSRAYIRHLIHVGEAFGIRLTTYHNLYFLLHLMQQVREAIANDDLLAFREDFFEAYGYNKEKAKNF

SEQ ID NO: 56612 - protein, 380 aa, Lactobacillus paracasei; identical to SEQ ID NO: 56538
  misc_feature (1)..(380): tr|A0A0K1KY93|A0A0K1KY93_LACPA Queuine tRNA-ribosyltran sferase OS=Lactobacillus paracasei OX=1597 GN=tgt PE=3 SV=1

SEQ ID NO: 56613 - protein, 380 aa, Lactobacillus paracollinoides
  misc_feature (1)..(380): tr|A0A0R1TCI6|A0A0R1TCI6_9LACO Queuine tRNA-ribosyltran sferase OS=Lactobacillus paracollinoides DSM 15502 = JC M 11969 OX=1423785 GN=tgt PE=3 SV=1
MEPAIKYRLIKTEKHTGARLGELITPHGTFPTPMFMPVGTQATVKSLAPEELDEMGAGVILANTYHLWLQPGEDLVKEAGGLHKFMNWQKPILTDSGGFQVFSLAENRNITEEGVHFRNPSNGDKLFLSPEKAMQIENDLGPDIMMSLDECPPFFESYDYIKHSVERTSRWAERGLNAHRNPDWQGLFGIVQGAGYEELRRQSANDLVSMDFPGYSIGGLSVGESKAEMNQVLEFTTPMLPTNKPRYLMGVGSPDSLIDGVMRGIDMFDCVLPTRIARRGTCMTSHGRVTVKNAQYERDFSPIDDNCDCYACRNYTRAYIRHLFKADESFGLRLTSYHNLYFLLHLMKQVRQAIMDDNLLEFRENFFEAYGYNVPNPKNF

SEQ ID NO: 56614 - protein, 380 aa, Lactobacillus paracollinoides; identical to SEQ ID NO: 56613
  misc_feature (1)..(380): tr|A0A1B2J1W5|A0A1B2J1W5_9LACO Queuine tRNA-ribosyltran sferase OS=Lactobacillus paracollinoides OX=240427 GN=t gt PE=3 SV=1

SEQ ID NO: 56615 - protein, 380 aa, Lactobacillus parafarraginis
  misc_feature (1)..(380): tr|G9ZT44|G9ZT44_9LACO Queuine tRNA-ribosyltransferase OS=Lactobacillus parafarraginis F0439 OX=797515 GN=tgt PE=3 SV=1
MQPAITYRLIKKEKHTGARLGEITTPHGTFRTPVFMPVGTQATVKTLAPEELEDMGAGIILANTYHLWLRPGEDIIKQAGGLHKFMNWDHPILTDSGGFQVFSLAKNRDITEQGVTFKNEINGDRMFLSPEKAMQIENDLGPDIMMSLDECPPFFESYDYVKKSVERTSRWAERGLKAHRNPDSQGLFGIVQGAGFEDLRKQSAKDLVSLDFPGYSIGGLSVGESKAEMNRILETTAPLLPENKPRYLMGVGVTDSLIDGVIRGIDMFDCVLPTRIARNGTVMTSHGRLVVKNAAYARDFGPLDDQCDCYACRNYSRAYIHHLIRADETFGMRLASYHNLYYLIHLMKRVQQAILDDNLLDLRQEVFEQYGYNKPNPKNF

SEQ ID NO: 56616 - protein, 380 aa, Lactobacillus parafarraginis; identical to SEQ ID NO: 56615
  misc_feature (1)..(380): tr|A0A0R1YT68|A0A0R1YT68_9LACO Queuine tRNA-ribosyltran sferase OS=Lactobacillus parafarraginis DSM 18390 = JCM 14109 OX=1423786 GN=tgt PE=3 SV=1

SEQ ID NO: 56617 - protein, 380 aa, Lactobacillus parakefiri
  misc_feature (1)..(380): tr|A0A269YM75|A0A269YM75_9LACO Queuine tRNA-ribosyltran sferase OS=Lactobacillus parakefiri OX=152332 GN=tgt PE =3 SV=1
MQPAITYRLIKKEKHTGARLGEITTPHGTFKTPMFMPVGTQATVKTLAPEELDQMGSTIILANTYHLWLRPGEDIVKEAGGLHKFMNWHKGILTDSGGFQVFSLAKNRDITEEGVTFKNEINGSKMFLSPEKAIQIENDLGPDIMMSLDECPPFFESYDYVKKSVERTSRWAERGLKAHRNADWQGLFGIVQGAGFEDLRKQSAKDLVSLDFPGYSIGGLSVGESKQEMNRILEATSPLLPENKPRYLMGVGATDSLIDGVIRGIDMFDCVLPTRIARNGTVMTSHGRLVVKNAKYARDFTPLDDQCGCYTCRNYTRAYIRHLMKTDESFGMRLCSYHNLYYLIHLMKRVQQAIIDDNLLDLRAEVFEQYGYNKPNPKNF

SEQ ID NO: 56618 - protein, 380 aa, Lactobacillus parakefiri
  misc_feature (1)..(380): tr|A0A4R5NZJ3|A0A4R5NZJ3_9LACO Queuine tRNA-ribosyltran sferase OS=Lactobacillus parakefiri OX=152332 GN=tgt PE =3 SV=1
MQPAITYRLIKKEKHTGARLGEITTPHGTFKTPMFMPVGTQATVKTLAPEELDQMGSTIILANTYHLWLRPGEDIVEEAGGLHKFMNWHKGILTDSGGFQVFSLAKNRDITEEGVTFKNEINGSKMFLSPEKAIQIENDLGPDIMMSLDECPPFFESYDYVKKSVERTSRWAERGLKAHRNADWQGLFGIVQGAGFEDLRKQSAKDLVSLDFPGYSIGGLSVGESKQEMNRILEATSPLLPENKPRYLMGVGATDSLIDGVIRGIDMFDCVLPTRIARNGTVMTSHGRLVVKNAKYARDFTPLDDQCGCYTCRNYTRAYIRHLMKTDESFGMRLCSYHNLYYLIHLMKRVQQAIIDDNLLDLRAEVFEQYGYNKPNPKNF

SEQ ID NO: 56619 - protein, 380 aa, Lactobacillus paralimentarius
  misc_feature (1)..(380): tr|A0A0R1KPM6|A0A0R1KPM6_9LACO Queuine tRNA-ribosyltran sferase OS=Lactobacillus paralimentarius DSM 19674 OX=1 423788 GN=tgt PE=3 SV=1
MESAIKYTLIKKEKHTGARLGLLETPHGTFETPMFMPVGTEASVKNMAPEDLEKIGASIILANTYHLWLRPGEDIVQEAGGLHKFMNWDKGILTDSGGFQVFSLANMRDITEAGVHFRNHLNGRQEFLSPEKAIKIENYLGPDIMMSLDECPPFFESYDYIKKSVARTSRWAERGLQAHRNPDWQALFGIVQGGGFEDLRKQSARDLVSMDFPGYSIGGLSVGESKGEMNRVLDFTTPMLPENKPRYLMGVGTADSLIDGVIRGIDMFDCVLPTRIARNGTCMTSHGRLVVKNSKYAHDFTPLDDNCDCYVCRNYTRAYIRHLINANELFGTHLTSYHNLYFLLNLMKGVRQAIRDDNLLEFREHVFEEYGFNKKDAKKF

SEQ ID NO: 56620 - protein, 380 aa, Lactobacillus paralimentarius; identical to SEQ ID NO: 56619
  misc_feature (1)..(380): tr|A0A0R1I271|A0A0R1I271_9LACO Queuine tRNA-ribosyltran sferase OS=Lactobacillus paralimentarius DSM 13961 = JC M 10707 OX=1423765 GN=tgt PE=3 SV=1

SEQ ID NO: 56621 - protein, 380 aa, Lactobacillus paraplantarum
  misc_feature (1)..(380): tr|A0A098R1M9|A0A098R1M9_9LACO Queuine tRNA-ribosyltran sferase OS=Lactobacillus paraplantarum OX=60520 GN=tgt PE=3 SV=1
MEPAIKYRLIKKEKHTGARLGELITPHGTFPTPMFMPVGTQASVKSLAPEELDAMGAGVILSNTYHLWLRPGEQIVKEAGGLHQFMNWKKGILTDSGGFQVFSLAKNRDITEEGVHFKNHLNGSKMFLSPEKAIQIENDLGPDIMMSLDECPPFFESYDYVSKSVARTSRWAERGLKVHQHPDYQGLFGIVQGAGFKDLREQSAKDLVSLDFPGYSIGGLSVGESKAEMNHVLDFTTPLLPENKPRYLMGVGSADALIDGAIRGVDMFDCVLPTRIARNGTCMTSHGRLVVKNAAYAHDFTPLDDNCDCYTCRNFTRAYIRHLIKADETFGLRLTSYHNLYFLLHLMKQVRQAIMDDNLLEFRQNFFEMYGFNEKNPKNF

SEQ ID NO: 56622 - protein, 380 aa, Lactobacillus pentosiphilus
  misc_feature (1)..(380): tr|A0A1Z5IPU3|A0A1Z5IPU3_9LACO Queuine tRNA-ribosyltran sferase OS=Lactobacillus pentosiphilus OX=1714682 GN=tg t PE=3 SV=1
MEPAIKYRLIKTEKHTGARLGELITPHGTFPTPMFMPVGTQATVKSLAPEELDEMGAGVILANTYHLWLQPGEGLVKEAGGLHQFMNWHKPILTDSGGFQVFSLAENRNITEEGVHFRNPSNGDQLFLSPEKAMQIENDLGPDIMMSLDECPPFFESYEYIKHSVERTSRWAERGLKAHANPDWQGLFGIVQGAGYEDLRSQSAHDLVSMDFPGYSIGGLSVGESKAEMNRVLDFTAPMLPTNKPRYLMGVGSPDSLIDSVMRGIDMFDCVLPTRIARRGTCMTSHGRLTVKNAKYARDFSPIDDQCDCYTCRNYTRAYIRHLFKADESFGLRLTSYHNLYFLLHLMKKVREAIMADNLLDFRANFFEEYGYNQPNPKNF

SEQ ID NO: 56623 - protein, 380 aa, Lactobacillus pentosiphilus
  misc_feature (1)..(380): tr|A0A1Z5IUE7|A0A1Z5IUE7_9LACO Queuine tRNA-ribosyltran sferase OS=Lactobacillus pentosiphilus OX=1714682 GN=tg t PE=3 SV=1
MEPAIKYRLIKTEKHTGARLGELITPHGTFPTPMFMPVGTQATVKSLAPEELDEMGAGVILANTYHLWLQPGEDLVKEAGGLHQFMNWHKPILTDSGGFQVFSLAENRNITEEGVHFRNPSNGDQLFLSPEKAMQIENDLGPDIMMSLDECPPFFESYEYIKHSVERTSRWAERGLKAHANPDWQGLFGIVQGAGYEDLRRQSAHDLVSMDFPGYSIGGLSVGESKAEMNRVLGFTAPMLPTNKPRYLMGVGSPDSLIDGVMRGIDMFDCVLPTRIARRGTCMTSHGRLTVKNAKYARDFSPIDDQCDCYTCRNYTRAYIRHLFKADESFGLRLTSYHNLYFLLHLMKKVREAIMADNLLDFRANFFEEYGYNQPNPKNF

SEQ ID NO: 56624 - protein, 380 aa, Lactobacillus pentosus
  misc_feature (1)..(380): tr|G0M186|G0M186_LACPE Queuine tRNA-ribosyltransferase OS=Lactobacillus pentosus IG1 OX=1042160 GN=tgt PE=3 SV =1
MEPAIKYRLIKKEKHTGARLGELITPHGTFPTPMFMPVGTQASVKSLAPEELDAMGAGVILSNTYHLWLRPGEQIVKEAGGLHQFMNWKKGILTDSGGFQVFSLAKNRDITEEGVHFKNHLNGSKMFLSPEKAIQIENDLGPDIMMSLDECPPFFESYDYVSKSVARTSRWAERGLKVHQHPDYQGLFGIVQGAGFKDLREQSAKDLVSLDFPGYSIGGLSVGESKAEMNHVLDFTTPLLPENKPRYLMGVGSADALIDGAIRGVDMFDCVLPTRIARNGTCMTSHGRLVVKNAAYAHDFTPLDDNCDCYTCRNFTRAYIRHLIKADETFGLRLTSYHNLYFLLHLMQQVRQAIMDDNLLEFRQNFFEMYGFNEKNPKNF

SEQ ID NO: 56625 - protein, 380 aa, Lactobacillus pentosus; identical to SEQ ID NO: 56624
  misc_feature (1)..(380): tr|I9KZY6|I9KZY6_LACPE Queuine tRNA-ribosyltransferase OS=Lactobacillus pentosus KCA1 OX=1136177 GN=tgt PE=3 S V=1

SEQ ID NO: 56626 - protein, 380 aa, Lactobacillus perolens
  misc_feature (1)..(380): tr|A0A0R1MXH8|A0A0R1MXH8_9LACO Queuine tRNA-ribosyltran sferase OS=Lactobacillus perolens DSM 12744 OX=1423792 GN=tgt PE=3 SV=1
MTVPVRYHLIKKEKHTGARLGELITPHGTFPTPMFMPVGTQASVKLMSPEELKEMGAGVILSNTYHLWLRPGPEIVKEAGGLHQFMNWDQGILTDSGGFQVFSLANNRDLTEEGVHFRSHLSGEKMFLSPEKAIQIENDLGPDIMMSLDECPPFFESYEYVRDSVARTSRWAERGLKAHRNPDTQGLFGIVQGAGFQDLREQSARDLVSLDFPGYSIGGLSVGESKAEMNHVLDFTTPLLPENKPRYLMGVGSPDALIDGVIRGIDMFDCVLPTRIARNGTVMTHHGRLVVKNAQYAHDFTPLDADCDCYTCTHYTRAYIRHLIKADETFGLRLTTYHNLYFLIHLMADVRQAIMDDNLLEFRENLFEQYGYDDVHAKNF

SEQ ID NO: 56627 - protein, 380 aa, Lactobacillus plantarum
  misc_feature (1)..(380): sp|Q88V05|TGT_LACPL Queuine tRNA-ribosyltransferase OS= Lactobacillus plantarum (strain ATCC BAA-793 / NCIMB 88 26 / WCFS1) OX=220668 GN=tgt PE=3 SV=1
MEPAIKYRLIKKEKHTGARLGELITPHGTFPTPMFMPVGTQASVKSLAPEELDAMGAGVILSNTYHLWLRPGEQIVKEAGGLHQFMNWKKGILTDSGGFQVFSLAKNRDITEEGVHFKNHLNGSKMFLSPEKAIQIENDLGPDIMMSLDECPPFFESYDYVSKSVARTSRWAERGLKVHQHPDYQGLFGIVQGAGFKDLREQSAKDLVSLDFPGYSIGGLSVGESKAEMNHVLDFTTPLLPENKPRYLMGVGSADALIDGAIRGVDMFDCVLPTRIARNGTCMTSHGRLVVKNAAYAHDFTPLDDNCDCYTCRNFTRAYIRHLIKADETFGLRLTSYHNLYFLLHLMKQVRQAIMDDNLLEFRQNFFEMYGFNDKNPKNF

SEQ ID NO: 56628 - protein, 380 aa, Lactobacillus plantarum; identical to SEQ ID NO: 56621
  misc_feature (1)..(380): tr|A0A199QHF5|A0A199QHF5_LACPN Queuine tRNA-ribosyltran sferase OS=Lactobacillus plantarum OX=1590 GN=tgt PE=3 SV=1

SEQ ID NO: 56629 - protein, 381 aa, Lactobacillus pobuzihii
  misc_feature (1)..(381): tr|A0A0R2L3T0|A0A0R2L3T0_9LACO Queuine tRNA-ribosyltran sferase OS=Lactobacillus pobuzihii OX=449659 GN=tgt PE= 3 SV=1
MSEAAIKYRLIKKEKHTGARLGEITTPHGTIQTPIFMPVGTQATVKSLSPEELKEMNAQIILSNTYHLWERPGDDLVAEAGGLHKFMNWDRPILTDSGGFQVFSLAKLRDINEQGVNFRSNLNGAKLFLSPEKAIHIENNLGADIMMSFDECPPFFESYDYIKKSVERTSRWAERGLNAHRNPKTQGLFGIVQGGGHKQLRQQSARDLTAMDFAGYSIGGLSVGESKSEMNHVLEFTTPMLPENKPRYLMGVGSPDALIDGAIRGVDMFDCVLPTRIARNGTCMTSHGRLVVKNAKFARDFRPIDENCNCYTCRNFTRAYVRHLFKADETFGLRLTSYHNLYFLINLMKQVREAIKNDELLDFKEAFFEQYGLNVANPKNF

SEQ ID NO: 56630 - protein, 380 aa, Lactobacillus rapi
  misc_feature (1)..(380): tr|A0A512PJW9|A0A512PJW9_9LACO Queuine tRNA-ribosyltran sferase OS=Lactobacillus rapi OX=481723 GN=tgt PE=3 SV= 1
MQPAITYRLIKKEKHTGARLGEITTPHGTFRTPIFMPVGTQATVKTLAPEELDKMGATIVLANTYHLWLRPGEDIVKEAGGLHKFMNWHKGLLTDSGGFQVFSLAKNRDITEQGVTFKNELNGSRMFLSPEKAIQIENDLGPDIMMSLDECPPFFESYDYVKKSVERTSRWAERGLKAHRNPDTQGLFGIVQGAGFEDLRQQSAKDLVSLDFPGYSIGGLSVGESKTEMNRILEATTPLLPENKPRYLMGVGVTDSLIDGVIRGIDMFDCVLPTRIARNGTVMTSHGRLVVKNAQFARDFTPLDDQCDCYTCRNYTRAYIRHLIKADETFGLRLCSYHNLYYLIHLMKRVQQAIMDDNLLDLRAEVFEQYGYNKPNAKNF

SEQ ID NO: 56631 - protein, 399 aa, Lactobacillus rennini
  misc_feature (1)..(399): tr|A0A0R2CWV0|A0A0R2CWV0_9LACO Queuine tRNA-ribosyltran sferase OS=Lactobacillus rennini DSM 20253 OX=1423796 G N=tgt PE=3 SV=1
MVKYDSQFKLNLNANEGVFMKPAIQYHLIKKEKHTGARLGEIITPHGTFPTPMFMPVGTNASVKTMAPEELAKMGATIILANTYHMWLRPGEQIVKEAGGLHQFMNWPQGILTDSGGFQVFSLAKMRDITEEGVHFKNHLNGAKMFLSPEKAIQIENDLGPDIMMSLDECPPFFQSYDYVRHSVARTSRWAERGLKAHRHPDTQGLFGIVQGAGFKDLRVQSARDLVSMDFPGYSIGGLSVGESKAEMNHVLEFTTPLLPENKPRYLMGVGSADALIDGALRGVDMFDCVLPTRIARNGTVMTSHGRLVVKNARYAHDFGPLDDNCDCYACRNYSRAYIRHLIKANEIFGIHLTSYHNLYFLLHLMQQVRQAIRMDNLLDFRAHFFEQYGFNQKNARNF

SEQ ID NO: 56632 - protein, 380 aa, Lactobacillus rennini
  misc_feature (1)..(380): tr|A0A1K2I7L9|A0A1K2I7L9_9LACO Queuine tRNA-ribosyltran sferase OS=Lactobacillus rennini OX=238013 GN=tgt PE=3 SV=1
MKPAIQYHLIKKEKHTGARLGEIITPHGTFPTPMFMPVGTNASVKTMAPEELAKMGATIILANTYHMWLRPGEQIVKEAGGLHQFMNWPQGILTDSGGFQVFSLAKMRDITEEGVHFKNHLNGAKMFLSPEKAIQIENDLGPDIMMSLDECPPFFQSYDYVRHSVARTSRWAERGLKAHRHPDTQGLFGIVQGAGFKDLRVQSARDLVSMDFPGYSIGGLSVGESKAEMNHVLEFTTPLLPENKPRYLMGVGSADALIDGALRGVDMFDCVLPTRIARNGTVMTSHGRLVVKNARYAHDFGPLDDNCDCYACRNYSRAYIRHLIKANEIFGIHLTSYHNLYFLLHLMQQVRQAIRMDNLLDFRAHFFEQYGFNQKNARNF

SEQ ID NO: 56633 - protein, 362 aa, Lactobacillus reuteri
  misc_feature (1)..(362): tr|B3XRC7|B3XRC7_LACR1 tRNA-guanine transglycosylase OS =Lactobacillus reuteri (strain DSM 17509 / CIP 109821 / 100-23) OX=349123 GN=Lreu23DRAFT_3589 PE=4 SV=1
MSKLEFTINQSDRQARTGLLQVNGRQIETPALVASGDELAKLSPSQLNLAGVSAVKTSGLKRWLKYDSVTEKLGDLHQLFQWDGLLFVDLETEEAYRLAKPRGKKHDGVRFHDPATGQLKFWQPETALQIQEVLGADIFQSFDQATDYYAPVDDLKAGVKQTSDWLSVVKLQKGQSLGSIVGGGLRDLRTASIEAVDEAGLSGYRLSGIPNNLDDQEFRRIINEITPKLAEQKLRYLPAALSFAQLIAAILAGVDLIDSNLAAQKAANGVALVNQGVTVLHLDRQHFSFDSQVLDRQCACATCRAGYSRALLHSLINNRSFYGEQLLLQHNLFTLNKLMGGLRQAIKNHQTKKFVQELLQNQ

SEQ ID NO: 56634 - protein, 362 aa, Lactobacillus reuteri
  misc_feature (1)..(362): tr|A5VIX3|A5VIX3_LACRD tRNA-guanine transglycosylase OS =Lactobacillus reuteri (strain DSM 20016) OX=557436 GN= Lreu_0529 PE=4 SV=1
MCKLEFTINQSDHQARTGLLQVNGRQIETPALAASGDELAKLSPIQLNQAGVSVVKTSGLKRWLKYDSMTEKLGDLHRFFQWDGLLLVDLETEEAYHLAKPRGKKHDGVRFHDPATRQLKFWQPETALQVQEALGADIFQSFDQATDYYAPVDDLKAGVKQTSDWLSVVKPQKGQSLGSIGGGGLKDLRTASIKAVDEAELSGYRLSGIPNNLDDQEFSRIINEITPKLEEEKLRYLPAALSFDQMIEAILAGVDLIDSNLAAKKAANGIALVNQGATVLHLDRQHFSFDSEVLDRQCACATCRAGYSRALLHSLITNHSFYGEQLLLQHNLFTLNKLMSSLRQAIKYHQTKKFVQELLQNQ

SEQ ID NO: 56635 - protein, 380 aa, Lactobacillus rhamnosus
  misc_feature (1)..(380): tr|A0A249N7W5|A0A249N7W5_LACRH Queuine tRNA-ribosyltran sferase OS=Lactobacillus rhamnosus DSM 14870 OX=1380361 GN=tgt PE=3 SV=1
MEPAVKYRLIHQDKHSGARLGELITPHGTFPTPMFMPVGTQASVKTMAPEELDTMGATVILANTYHLWLRPGPDLIEEAGGLHRFMNWHKGILTDSGGFQVFSLADTRHITEDGVTFKNHLNGAKMFLSPEKAIAIENALGPDIMMSLDECPPFFESYDYVKKSVARTSRWAERGLKAHKNPDWQALFGIVQGAGFKDLREQSAKDLVSMDFPGYSIGGLSVGESKDEMNHVLDFTTPLLPEDKPRYLMGVGSADALIDGALRGIDMFDCVLPTRIARNGTCMTSRGRLVIKNAKYAHDFGPLDPNCDCYACRNYSRAYIRHLIHVGEAFGIRLTTYHNLYFLLHLMQQVREAIANDDLLAFREDFFEAYGYNKEKAKNF

SEQ ID NO: 56636 - protein, 380 aa, Lactobacillus rhamnosus
  misc_feature (1)..(380): tr|K8QUK6|K8QUK6_LACRH Queuine tRNA-ribosyltransferase OS=Lactobacillus rhamnosus LRHMDP2 OX=1203258 GN=tgt PE =3 SV=1
MEPAVKYRLIHQDKHSGARLGELITPHGTFPTPMFMPVGTQASVKTMAPEELDTMGATVILANTYHLWLRPGPDLIEEAGGLHRFMNWHKGILTDSGGFQVFSLADTRHITEDGVTFKNHLNGAKMFLSPEKAIAIENALGPDIMMSLDECPPFFESYEYVKKSVARTSRWAERGLKAHKNPDWQALFGIVQGAGFKDLREQSAKDLVSMDFPGYSIGGLSVGESKDEMNHVLDFTTPLLPADKPRYLMGVGSADALIDGALRGIDMFDCVLPTRIARNGTCMTSRGRLVIKNAKYAHDFGPLDPNCDCYACRNYSRAYIRHLIHVGEAFGIRLTTYHNLYFLLHLMQQVREAIANDDLLAFREDFFEAYGYNKEKAKNF

SEQ ID NO: 56637 - protein, 381 aa, Lactobacillus ruminis
  misc_feature (1)..(381): tr|A0A1I2QBH4|A0A1I2QBH4_9LACO Queuine tRNA-ribosyltran sferase OS=Lactobacillus ruminis DSM 20403 = NBRC 10216 1 OX=1423798 GN=tgt PE=3 SV=1
MSEPAVKYRLIKKEKHTGARLGELITPHGTFPTPMFMPVGTQATVKSMSPEELKEMGAGVILSNTYHLWLRPGEDLVKEAGGLHKFMNWDRGILTDSGGFQVFSLAEMRNITEEGVHFRSHLSGEPLFLSPEKAIHIENCLGSDIMMSFDECPPFFESYDYIKKSIERTSRWAERGLRAHENPETQALFGIIQGGGHKELREQSARDLVSLDFPGYSIGGLSVGESKAEMNHVLDFTTPLIPENKPRYLMGVGSPDALIDGAIRGIDMFDCVLPTRIARNGTCMTSHGRLVVKNAKYARDFSPIDDNCNCYTCRNYTRAYVRHLFKADETFGLRLTSYHNLYFLLNLMKQVRQAIMDDNLLEFRQDFFERYGLNVANPKNF

SEQ ID NO: 56638 - protein, 381 aa, Lactobacillus ruminis
  misc_feature (1)..(381): tr|A0A0G8G5B8|A0A0G8G5B8_9LACO Queuine tRNA-ribosyltran sferase OS=Lactobacillus ruminis OX=1623 GN=tgt PE=3 SV =1
MSEPAVKYRLIKKEKHTGARLGELITPHGTFPTPMFMPVGTQATVKSMSPEELKEMGAGVILSNTYHLWLRPGEDLVKEAGGLHKFMNWNRGILTDSGGFQVFSLAEMRNITEEGVHFRSHLSGEPLFLSPEKAIHIENCLGSDIMMSFDECPPFFESYDYIKKSIERTSRWAERGLRAHENPETQALFGIIQGGGHKNLREQSARDLVSLDFPGYSIGGLSVGESKAEMNHVLDFTTPLIPENKPRYLMGVGSPDALIDGAIRGIDMFDCVLPTRIARNGTCMTSHGRLVVKNAKYARDFSPIDDNCNCYTCRNYTRAYVRHLFKADETFGLRLTSYHNLYFLLNLMKQVRQAIMDDNLLEFRQDFFERYGLNVANPKNF

SEQ ID NO: 56639 - protein, 381 aa, Lactobacillus saerimneri
  misc_feature (1)..(381): tr|M5J566|M5J566_9LACO Queuine tRNA-ribosyltransferase OS=Lactobacillus saerimneri 30a OX=1227363 GN=tgt PE=3 SV=1
MTEPAVKYHLKKKEKHTGARLGTLETPHGTFPTPMFMPVGTQATVKAISPRELKEMGAGIILSNTYHLWLRPGEELVAEAGGLHHFMNWDQGILTDSGGFQVFSLAQMRDITEKGVHFKSHLDGRNLFLSPEKAIAVENALGADIIMSFDECPPFFESYDYIKKSVERTSRWAERGLKAHKHPDRQALFGIVQGGGHKDLRELSAKALVSLDFPGYSIGGLSVGESKAEMNHVLDFTTPLLPENKPRYLMGVGSPDALIDGVIRGVDMFDCVLPTRIARNGTCMTSHGRVVIKNAVYAHDFNPLDDNCDCYVCQNYTRAYLRHLFKAQETLGLRLASYHNLYFLLHLMKQIRQAIADDNLLDFREQFFEEYGYNKQNSRNF

SEQ ID NO: 56640 - protein, 381 aa, Lactobacillus saerimneri
  misc_feature (1)..(381): tr|A0A0R1SXI5|A0A0R1SXI5_9LACO Queuine tRNA-ribosyltran sferase OS=Lactobacillus saerimneri DSM 16049 OX=112215 3 GN=tgt PE=3 SV=1
MTEPAVKYHLKKKEKHTGARLGTLETPHGTFPTPMFMPVGTQATVKAISPRELKEMGAGIILSNTYHLWLRPGEELVAEAGGLHHFMNWDQGILTDSGGFQVFSLAQMRDITEKGVHFKSHLDGRNLFLSPEKAIAVENALGADIIMSFDECPPFFESYDYIKKSVERTSRWAERGLKAHKHPDRQALFGIVQGGGHKDLRELSAKALVSLDFPGYSIGGLSVGESKAEMNHVLDFTTPLLPENKPRYLMGVGSPDALIDGVIRGVDMFDCVLPTRIARNGTCMTSHGRVVIKNAVYAHDFNPLDDNCDCYVCQNYTRAYLRHLFKAQETLGLRLASYHNLYFLLHLMKQIRQAIADDNLLDFREQFFEEYGYNRQNSRNF

SEQ ID NO: 56641 - protein, 380 aa, Lactobacillus sakei
  misc_feature (1)..(380): tr|A0A512KGX7|A0A512KGX7_LACSK Queuine tRNA-ribosyltran sferase OS=Lactobacillus sakei subsp. carnosus OX=21432 5 GN=tgt PE=3 SV=1
MEPAIKYRLIKKEKHTGARLGEIVTPHGTFKTPMFMPVGTQASVKTMAPEDLKEMGAGIILSNTYHLWLRPGEDIVEKAGGLHKFMNWDRGVLTDSGGFQVFSLAKLRDISEEGVAFKSHLNGEKLFLSPEKAIHVENALGADIMMSFDECPPFFESYDYVKKSVERTSRWAERGLIAHQNPATQGLFGIVQGAGFEDLRRQSARDLVGMDFPGYSIGGLSVGESKGEMNRVLDFTTPMLPEDKPRYLMGVGSPDALIDGVIRGVDMFDCVLPTRIARNGTTMTSQGRLVVKNAKYSEDFRPLDPKCDCYVCKNYTRAYIRHLIKADETFGIHLTSYHNLYFLINLMHQVQDAIEQDNLLEFREAFFEEYGYNENNGRNF

SEQ ID NO: 56642 - protein, 380 aa, Lactobacillus sakei; identical to SEQ ID NO: 56641
  misc_feature (1)..(380): sp|Q38YP9|TGT_LACSS Queuine tRNA-ribosyltransferase OS= Lactobacillus sakei subsp. sakei (strain 23K) OX=314315 GN=tgt PE=3 SV=1

SEQ ID NO: 56643 - protein, 381 aa, Lactobacillus salivarius
  misc_feature (1)..(381): tr|F7QSK8|F7QSK8_9LACO Queuine tRNA-ribosyltransferase OS=Lactobacillus salivarius GJ-24 OX=1041521 GN=tgt PE= 3 SV=1
MAAEPAIKYRLIKKEKHTGARLGEIMTPHGTFPTPMFMPVGTQASVKSIAPEELDAMGANIILSNTYHLWLRPGEDLVEEAGGLHKFMNWDKGILTDSGGFQVFSLADLRNIKEEGVYFRNHLNGQKLFLSPEKAINIENALGADIIMSFDECPPFFESYDYIKKSVERTSRWAERGLKAHKYPDRQGLFGIVQGGGHKDLRQQSARDLVSLDFPGYSIGGLSVGESKAEMNNVLEFTTPLLPENKPRYLMGVGSPDALIDGVIRGVDMFDCVLPTRIARNGTCMTSHGRLVVKNAKYARDFTPIDDNCNCYTCRNFTRAYVRHLLKADETFGLRLTSYHNLYFLINLMKQVREAIMNDNLLEFREHFFEEYGYNESKRNF

SEQ ID NO: 56644 - protein, 381 aa, Lactobacillus salivarius
  misc_feature (1)..(381): tr|A0A2U2M921|A0A2U2M921_9LACO Queuine tRNA-ribosyltran sferase OS=Lactobacillus salivarius OX=1624 GN=tgt PE=3 SV=1
MAAEPAIKYRLIKKEKHTGARLGEIITPHGTFPTPMFMPVGTQASVKSIAPEELDAMGANIILSNTYHLWLRPGEDLVEEAGGLHKFMNWNKGILTDSGGFQVFSLADLRNIKEEGVYFRNHLNGQKLFLSPEKAINIENALGADIIMSFDECPPFFESYDYIKKSVERTSRWAERGLKAHKYPDRQGLFGIVQGGGHKDLRQQSARDLVSLDFPGYSIGGLSVGESKAEMNNVLEFTTPLLPENKPRYLMGVGSPDALIDGVIRGVDMFDCVLPTRIARNGTCMTSHGRLVVKNAKYARDFTPIDDNCNCYTCCNFTRAYVRHLLKADETFGLRLTSYHNLYFLINLMKQVREAIMNDNLLEFREYFFEEYGYNESKRNF

SEQ ID NO: 56645 - protein, 380 aa, Lactobacillus saniviri
  misc_feature (1)..(380): tr|A0A0R2MX03|A0A0R2MX03_9LACO Queuine tRNA-ribosyltran sferase OS=Lactobacillus saniviri JCM 17471 = DSM 24301 OX=1293598 GN=tgt PE=3 SV=1
MEPAIKYRLIHQDKHSGARLGEIITPHGTFPTPMFMPVGTLASVKTMAPEELDEMGAGIILANTYHLWLRPGEDLIEEAGGLHKFMNWDKGILTDSGGFQVFSLAGMRDIKEEGVHFKNHLNGAPMFLSPEKAIAIENALGPDIMMSFDECPPFFESYDYVKKSVARTSRWAERGLEAHKNPDYQALFGIVQGAGFQDLREQSAKDLVSMDFPGYSIGGLSVGESKDEMNRVLDFTTPLLPENKPRYLMGVGSADALIDGALRGIDMFDCVLPTRIARNGTVMTSHGRLVVKNAKYARDFSPLDDNCNCYACRNFTRAYIRHLIHTDEAFGMRLTTYHNLYFLLHLMQQVREAIANDALLDFKESFFEEYGYNTANAKNF

SEQ ID NO: 56646 - protein, 381 aa, Lactobacillus satsumensis
  misc_feature (1)..(381): tr|A0A0R1UW95|A0A0R1UW95_9LACO Queuine tRNA-ribosyltran sferase OS=Lactobacillus satsumensis DSM 16230 = JCM 12 392 OX=1423801 GN=tgt PE=3 SV=1
MTEPAIKYRLLKKEKHTGARLGEIITPHGTFPTPMFMPVGTQATVKSLAPEELEEMGANIVLSNTYHLWLRPGEEIVEQAGGLHRFMNWNKGILTDSGGFQVFSLAKIRDITEKGVHFRSHLSGEKLFLSPEKAIHIQNSLGADIMMSFDECPPFFESYDYIKKSVERTSRWAERGLKAHLNPERQGLFGIVQGGGHQDLRQLSARQLVAMDFPGYSIGGLSVGESKTEMNHVLDFTTPLLPENKPRYLMGVGSADALIDGVIRGVDMFDCVLPTRIARNGTCMTSHGRIVIKNATYARDFSPLDDRCNCYTCRNFTRAYLRHLFKADETFGLRLASYHNLYFLLHLMQNVRQAIKDDHLLEFREAFFEEYGFNKKNARNF

SEQ ID NO: 56647 - protein, 380 aa, Lactobacillus selangorensis
  misc_feature (1)..(380): tr|A0A0R2FS87|A0A0R2FS87_9LACO Queuine tRNA-ribosyltran sferase OS=Lactobacillus selangorensis OX=81857 GN=tgt PE=3 SV=1
MESPIQYHLIKKEKHTGARLGEIVTPHGTFPTPMFMPVGTQATVKAMSPEQLAEMGAGIILANTYHLWLRPGPEIVEEAGGLHPFMNWPKGILTDSGGFQVFSLAKMRDITEEGVHFKNHLNGAKMFLSPEKAIHIENALGPDIMMSFDECPPFFESYDYVKKSVARTSRWAERGLKAHRNPDKQGLFGIVQGAGFKDLREQSAKDLVSMDFPGYSIGGLSVGESKAEMNHVLDFTTPLLPENKPRYLMGVGSPDALIDGVLRGIDMFDCVLPTRIARNGTVMTSHGRLVVKNAKYAHDFGPMDDNCDCYACRNYSRAYIRHLIKSDETFGIHLTTYHNLYFLIHLMGDVRQAIMDDNLLEFRQDFFERYGLNQENARNF

SEQ ID NO: 56648 - protein, 380 aa, Lactobacillus senioris
  misc_feature (1)..(380): tr|A0A0R2D247|A0A0R2D247_9LACO Queuine tRNA-ribosyltran sferase OS=Lactobacillus senioris DSM 24302 = JCM 17472 OX=1423802 GN=tgt PE=3 SV=1
MEPAIKYRLIKTEKHTGARLGEIITPHGTFPTPMFMPVGTQATVKTLAPEELDEMGAGIILANTYHLWLRPGEDIVEQAGGLHKFMNWDKGILTDSGGFQVFSLASNRNITEEGVTFKNEINGSKMFLSPEKAIQIENALGPDIMMSFDECPPYFESYDYVKHSVERTSRWAERGLKSHQNPDWQALFGIVQGAGFEDLRKQSAADLVSLDFPGYSIGGLSVGESKEEMNRVLEFTTPLLPTNKPRYLMGVGTTDSLIDGVIRGVDMFDCVLPTRIARNGTVMTSHGRLVVKNAKYARDFTPLDDQCNCYTCRNYTRAYIRHLMKTDESFGMRLASYHNLYYLLNLMKRVRQAIMDDNLLELREEVFEQYGYNLPNAKNF

SEQ ID NO: 56649 - protein, 380 aa, Lactobacillus shenzhenensis
  misc_feature (1)..(380): tr|U4TKV7|U4TKV7_9LACO Queuine tRNA-ribosyltransferase OS=Lactobacillus shenzhenensis LY-73 OX=1231336 GN=tgt PE=3 SV=1
MTPPIQYRLIKKEKHTGARLGELITPHGTFPTPMFMPVGTQASVKLMSPEELKEMGAGVILSNTYHLWLRPGPEIVKEAGGLHQFMNWDQGILTDSGGFQVFSLAENRDLTEEGVHFKSHLSGAKMFLSPEKAIAIENDLGPDIMMSLDECPPFFASYEYVRDSVARTSRWAERGLKAHRNPDTQGLFGIVQGAGFQDLREQSAKDLVSLDFPGYSIGGLSVGESKAEMNHVLDFTTPLLPEHKPRYLMGVGSPDALVDGVIRGIDMFDCVLPTRIARNGTVMTHHGRLVVKNAQYAHDFTPLDPDCDCYTCTHYTRAYIRHLIKADETFGLRLTTYHNLYFLIHLMADVRQAIMDDNLLEFRQNLFDEYGYTGATAKNF

SEQ ID NO: 56650 - protein, 380 aa, Lactobacillus silagei
  misc_feature (1)..(380): tr|A0A1Z5IK75|A0A1Z5IK75_9LACO Queuine tRNA-ribosyltran sferase OS=Lactobacillus silagei JCM 19001 OX=1302250 G N=tgt PE=3 SV=1
MEPAIKYRLIKTEKDTGARLGELITPHGTFPTPMFMPVGTQATVKSLAPEELDEMGAGVILANTYHLWLQPGEDLIKEAGGLHQFMNWHKPILTDSGGFQVFSLAENRNIMEEGVHFRNPSNGDQLFLSPEKAMQIENDLGPDIMMSLDECPPFFESYDYIKHSVERTSRWAERGLKAHANPDWQGLFGIVQGAGYEDLRRQSAHDLVSMDFPGYSIGGLSVGESKAEMNRVLDFTAPMLPTNKPRYLMGVGSPDSLIDGVMRGIDMFDCVLPTRIARRGTCMTSHGRLTVKNAKYARDFTPIDDQCDCYTCRNYTRAYIRHLFKADESFGLRLTSYHNLYFLLHLMGKVREAIMNDNLVDFRAQFFEEYGYNQPNPKNF

SEQ ID NO: 56651 - protein, 380 aa, Lactobacillus silagincola
  misc_feature (1)..(380): tr|A0A1Z5J3S8|A0A1Z5J3S8_9LACO Queuine tRNA-ribosyltran sferase OS=Lactobacillus silagincola OX=1714681 GN=tgt PE=3 SV=1
MEPAIKYRLIKTEKDTGARLGELITPHGTFPTPMFMPVGTQATVKSLAPEELDEMGAGVILANTYHLWLQPGEDLVKEAGGLHKFMNWHKPILTDSGGFQVFSLAENRNITEEGVHFRNPSNGDRMFLSPEKAMQIENDLGPDIMMSLDECPPFFESYDYIKHSVERTSRWAERGLKAHANPDWQGLFGIVQGAGYEDLRRQSAHDLVSMDFPGYSIGGLSVGESKAEMNRVLDFTAPMLPTNKPRYLMGVGSPDSLIDGVMRGIDMFDCVLPTRIARRGTCMTSHGRLTVKNAKYARDFSPIDDQCDCYTCRNYTRAYIRHLFKADESFGLRLTSYHNLYFLLHLMQKVREAIMADNLLDFRANFFEEYGYNQPNPKNF

SEQ ID NO: 56652 - protein, 380 aa, Lactobacillus similis
  misc_feature (1)..(380): tr|A0A0R2EX27|A0A0R2EX27_9LACO Queuine tRNA-ribosyltran sferase OS=Lactobacillus similis DSM 23365 = JCM 2765 O X=1423804 GN=tgt PE=3 SV=1
MEPAVKYRLIKTEKHTGARLGELITPHGTFPTPMFMPVGTQATVKAIAPEELDEMGAGVILANTYHLWLQPGEDLIKEAGGLHKFMNWQKPILTDSGGFQVFSLAENRNITEEGVKFKNPINGDRLFLSPEKAMQIENDLGPDIMMSLDECPPFFESYDYIKHSVERTSRWAERGLKAHQNPDWQALFGIVQGAGYEDLRRQSAQDLVSLDFPGYSIGGLSVGESKAEMNRVLDFTTPMLPTNKPRYLMGVGSPDSLIDGVMRGVDMFDCVLPTRIARNGTCMTSRGRLAVKNAKFARDFRPLDEKCDCYTCRHYSRAYIRHLFKADETFGLRLTSYHNLYFLLNLMRQIRQAIMDDSLLDFKQDFFEEYGYNLPNAKNF

SEQ ID NO: 56653 - protein, 380 aa, Lactobacillus sp.
  misc_feature (1)..(380): tr|A0A351DJI8|A0A351DJI8_9LACO Queuine tRNA-ribosyltran sferase OS=Lactobacillus sp. OX=1591 GN=tgt PE=3 SV=1
MTAPVRYRLIKTEKHTGARLGELITPHGTFPTPMFMPVGTQASVKLMSPEELKEMGAGVILSNTYHLWLRPGPEIVKEAGGLHKFMNWDQGILTDSGGFQVFSLAENRDITEEGVHFRSHLSGEKMFLSPEKAIQIENDLGPDIMMSLDECPPFFESYEYVRDSVARTSRWAERWLNAHRKPDAQGRFGIVQGAGFQDLREQSAKDLVSLDFPGYSIGGLSVGESKAEMNHVLDFTTPLLPENKPRYLMGVGSPDALIDGVIRGIDMFDCVLPTRIARNGTVMTHHGRLIVKNAKYAHDFTPLDPDCDCYTCTHYSRAYIRHLIKADETFGLRLTTYHNLYFLIHLMADVRQAIMDDNLIEFRQNLFDEYGYSDATTKNF

SEQ ID NO: 56654 - protein, 381 aa, Lactobacillus sp.
  misc_feature (1)..(381): tr|A0A401ISW3|A0A401ISW3_9LACO Queuine tRNA-ribosyltran sferase OS=Lactobacillus sp. YK43 OX=2163553 GN=tgt PE= 3 SV=1
MSEAAVKYRLIKKDKHTGARLGEVTTPHGTFQTPIFMPVGTQATVKSIAPEELKEMNAGIILSNTYHLWERPGDDIVAEAGGLHKFMNWDRSILTDSGGFQVFSLAKLRDISEEGVHFRSNLNGAPLFLSPEKAIQIENNLGADIMMSFDECPPFFESYDYIKKSVERTSRWAERGLKAHQRPNDQGLFGIVQGGGHKDLRQLSARALTSMDFAGYSIGGLSVGESKAEMNHVLEFTTPMLPENKPRYLMGVGSPDALIDGAIRGIDMFDCVLPTRIARNGTCMTSHGRLVVKNAKFARDFRPLDENCNCYTCRNYTRAYLRHLFKTNETFGLRLTSYHNLYFLLDLMRQVREAIKNDELLDFKEAFFEQYGLNRENPKNF

SEQ ID NO: 56655 - protein, 381 aa, Lactobacillus suantsaii
  misc_feature (1)..(381): tr|A0A4Q0VL61|A0A4Q0VL61_9LACO Queuine tRNA-ribosyltran sferase OS=Lactobacillus suantsaii OX=2292255 GN=tgt PE =3 SV=1
MEPAIKYRLIKTEKHTGARLGELMTPHGTFATPMFMPVGTQAAMKGAISPEELDEMGSQVILANTYHLWLQPGADLIAEAGGLHRFMNWPKGILTDSGGFQVFSLAKNRRLTEEGVHFRNAVNGDRLFLSPEKAIHIQNQLGPDIMMSLDECPPFFESYDYVKHSVERTSRWAERGLKAHAHPDYQGLFGIVQGAGYEDLRRESARDLVSLDFPGYSIGGLSVGESKDEMNRILALTTPLLPTSKPRYLMGVGTADSLIDGVIRGVDMFDCVLPTRIARKGTCMTTHGRLVVKNAKYARDFRPIDPDCDCYTCQHYSRAYLRHLFKADEDFGLRLASYHNLYFLHHLMKRVRQAIQNDSLLDLRAEVFDTYGYNAEHPKNF

SEQ ID NO: 56656 - protein, 381 aa, Lactobacillus sucicola
  misc_feature (1)..(381): tr|A0A023CVX2|A0A023CVX2_9LACO Queuine tRNA-ribosyltran sferase OS=Lactobacillus sucicola DSM 21376 = JCM 15457 OX=1423806 GN=tgt PE=3 SV=1
MTEPAIKYRLIKKEKHTGARLGEIVTPHGTFPTPMFMPVGTQASVKSLAPEELDAMGANIILSNTYHLWLRPGEDIVKEAGGLHKFMNWKKGILTDSGGFQVFSLAKMRDITEEGVHFRSHLSGEKLFLSPEKAIQIENALGADIMMSFDECPPFFETYDYIKKSVERTSRWAERGLKAHQNKGTQGLFGIVQGGGHKDLRAQSARDLVSMDFPGYSIGGLSVGESKAEMNHVLSFTTPMLPENKPRYLMGVGSADALIDGVIRGIDMFDCVLPTRIARNGSCMTSHGRLVVKNAIYARDFRPIDDNCNCYTCRNFSRAYIRHLIKADETFGLRLTSYHNLYFLINLMKQVRQAIMDDNLLEFRESFFEEYGFNRENHRNF

SEQ ID NO: 56657 - protein, 380 aa, Lactobacillus suebicus
  misc_feature (1)..(380): tr|A0A0R1W7N1|A0A0R1W7N1_9LACO Queuine tRNA-ribosyltran sferase OS=Lactobacillus suebicus DSM 5007 = KCTC 3549 OX=1423807 GN=tgt PE=3 SV=1
MEPAVKYRLIKKDKHTGARAGELITPHGTFKTPMFMPVGTQATVKSIAPEELDEMGAGVILANTYHLWLQPGEKLVEEAGGLHKFMNWDKGILTDSGGFQVFSLAEHRNIKEDGVRFRDPVSGSTMFLSPEKAIQIENALGPDIMMSFDECPPYFETYDYIKASVERTSRWAERGLKAHQNPDWQGLFGIVQGAGFKKLRQQSAHDLVSMDFPGYSVGGLSVGESKEEMNRVLEMTTPFLPEDKPRYLMGVGTADSLIDGVMRGIDMFDCVLPTRIARNGTCMTSHGRLVVKNAEYAHDFNPIDPECNCYACRNYSRAYIRHLLHVNETFGLRLTSYHNLYFLIHLMQDLREAILEDRVLDFREMVFEKYGFNKENARNF

SEQ ID NO: 56658 - protein, 380 aa, Lactobacillus sunkii
  misc_feature (1)..(380): tr|A0A1E7XDF9|A0A1E7XDF9_9LACO Queuine tRNA-ribosyltran sferase OS=Lactobacillus sunkii OX=481719 GN=tgt PE=3 S V=1
MQPAITYRLIKKEKHTGARLGEITTPHGTFRTPMFMPVGTQATVKTLAPEELDQMGSTIILANTYHLWLRPGEDIVKEAGGLHKFMNWDKGILTDSGGFQVFSLAKNRDITEEGVTFKNEINGSKMFLSPEKAIQIENDLGPDIMMSLDECPPFFESYDYVKKSVERTSRWAERGLKAHKNPDWQGLFGIVQGAGFEDLRKQSAQDLVSLDFPGYSIGGLSVGESKQEMNRILESTSPLLPENKPRYLMGVGATDSLIDGVIRGIDMFDCVLPTRIARNGTVMTSHGRLVVKNAKYARDFTPLDDQCNCYTCRNYTRAYIRHLVKTDETFGLRLCSYHNLYYLIHLMKRVQQAIMDDNLLDLRAEVFEQYGYNKPNAKNF

SEQ ID NO: 56659 - protein, 380 aa, Lactobacillus sunkii; identical to SEQ ID NO: 56658
  misc_feature (1)..(380): tr|A0A0R1L075|A0A0R1L075_9LACO Queuine tRNA-ribosyltran sferase OS=Lactobacillus sunkii DSM 19904 OX=1423808 GN =tgt PE=3 SV=1

SEQ ID NO: 56660 - protein, 380 aa, Lactobacillus tucceti
  misc_feature (1)..(380): tr|A0A0R1IXY4|A0A0R1IXY4_9LACO Queuine tRNA-ribosyltran sferase OS=Lactobacillus tucceti DSM 20183 OX=1423811 G N=tgt PE=3 SV=1
MEPAVKYTLLKKEKHTGARLGLLETPHGTFETPMFMPVGTEASVKNMAPEDLDKIGASIILANTYHLWLRPGEDIVKEAGGLHKFMNWDKGILTDSGGFQVFSLANTRDITEAGVHFRNHLNGRREFLSPEKAIKIENYLGPDIMMSLDECPPFFESYDYIKKSVARTSRWAERGLEAHRNPDWQALFGIVQGAGFEDLRKQSAHDLVSMDFPGYSIGGLSVGESKEEMNNVLDFTTPLLPENKPRYLMGVGSTDALIDGVIRGIDMFDCVLPTRIARNGTCMTTKGRLVVKNAKYARDFRPLDENCDCYVCRNYSRAYIRHLINANELFGTHLTSYHNLYYLLNLMKGVRQAIKDDNLIEFREHVFEEYGLNKENARNF

SEQ ID NO: 56661 - protein, 381 aa, Lactobacillus uvarum
  misc_feature (1)..(381): tr|A0A0R1Q2D0|A0A0R1Q2D0_9LACO Queuine tRNA-ribosyltran sferase OS=Lactobacillus uvarum DSM 19971 OX=1423812 GN =tgt PE=3 SV=1
MTEPAIKYHLIKKEKHTGARLGEIITPHGTFPTPMFMPVGTQASVKSLAPEELDAMGANIILSNTYHLWLRPGEEIVKEAGGLHKFMNWNKGILTDSGGFQVFSLAKMRDITEEGVHFRSHLSGEKLFLSPEKAIQIENALGADIMMSFDECPPFFESYDYIKKSVERTSRWAERGLKAHQNAEKQGLFGIVQGGGHKELRAQSAHDLVSMDFPGYSIGGLSVGESKSEMNHVLSFTTPMLPENKPRYLMGVGSADALIDGVIRGIDMFDCVLPTRIARNGSCMTSHGRLVVKNAVYAHDFRPIDDNCNCYTCRNFSRAYIRHLIKADETFGLRLTSYHNLYFLIHLMQQVRQAIMDDNLLEFRENFFEEYGFNSENSRNF

SEQ ID NO: 56662 - protein, 380 aa, Lactobacillus vaccinostercus
  misc_feature (1)..(380): tr|A0A0R2A0Y7|A0A0R2A0Y7_9LACO Queuine tRNA-ribosyltran sferase OS=Lactobacillus vaccinostercus DSM 20634 OX=14 23813 GN=tgt PE=3 SV=1
MEPAIKYRLIKKDKHTGARAGELITPHGTFKTPMFMPVGTQATVKSIAPEELDEMGAGVILANTYHLWLQPGEKLVEEAGGLHKFMNWDKGILTDSGGFQVFSLAKHRNIKENGVTFKDPVSGQTMFLSPEKAIQIENALGPDIMMSFDECPPYFETYDYIKASVERTSRWAERGLKAHQNPDWQGLFGIVQGAGFKKLRQQSARDLVSMDFPGYSVGGLSVGESKEEMNRVLEMTTPFLPENKPRYLMGVGTADSLIDGVMRGIDMFDCVLPTRIGRNGTCMTSHGRLVVKNAQYTHDFGPLDDECNCYVCRNYTRAYIRHLLHVNETFGIRLTSYHNLYFLIHLMHDMRQAILDDQVLEFREMVFEKYGFNKENAGNF

SEQ ID NO: 56663 - protein, 346 aa, Lactobacillus vaginalis
  misc_feature (1)..(346): tr|C2ETT8|C2ETT8_9LACO tRNA-guanine transglycosylase OS =Lactobacillus vaginalis DSM 5837 = ATCC 49540 OX=14238 14 GN=tgt PE=4 SV=1
MRVAMNRYFKINRTEDGLRTGKLVVNGLELRTPLLVHSENVIRYLRPEQVRATNTKALYYDPIVLAEKLDKRDLADLPDLHRVLGWQGVFFTTSGAAEIGKLAKPRGYKTNGINFRLPNQGQLISLSPKKAIQLQEQLGADITEQLYRDVNYYAPVDDLAAAVELTGRWYLTNQNELFPITGGGLKKLHRQSVDSVTGQQPFGYFITQTEQIDSLAEIERNLSAIIKLLPFESLRVTKTRANFEQLTTVIRSGIDVVYSDVAVHEAVMGNALVDNGKRLNFTRESFSNDWEAIDPECQCPVCTSHYSRAYLHYLARINSPQYISLILEHNLFWLNQFVANLSSKIK

SEQ ID NO: 56664 - protein, 381 aa, Lactobacillus versmoldensis
  misc_feature (1)..(381): tr|A0A0R1S999|A0A0R1S999_9LACO Queuine tRNA-ribosyltran sferase OS=Lactobacillus versmoldensis DSM 14857 = KCTC 3814 OX=1423815 GN=tgt PE=3 SV=1
MTEPAIKYKLIQKEKHTGARLGLIETPHGTFETPMFMPVGTEATVKNMAPEDLEKIGATIILSNTYHLWLRPGEDIVKEAGGLHKFMNWNKGILTDSGGFQVFSLANTRDITEAGVHFRNHLNGRREFLSPEKAIQIENDLGPDIMMSLDECPPFFESYDYIKDSVARTSRWAERGLRAHRNPDWQALFGIVQGAGYEDLRKQSAQDLVSMDFPGYSIGGLSVGESKSEMNHVLDFTAPLLPENKPRYLMGVGSADALIDGVIRGIDMFDCVLPTRIARNGTCMTTHGRLVVKNAKYARDFRPLDEDCDCYVCRNYSRAYIRHLINANELFGTHLTSYHNLYFLLKLMADVRQSIKDDNLLEFREHVFEQYGFNKKNAKNF

SEQ ID NO: 56665 - protein, 381 aa, Lactobacillus vini
  misc_feature (1)..(381): tr|A0A0R2CAQ7|A0A0R2CAQ7_9LACO Queuine tRNA-ribosyltran sferase OS=Lactobacillus vini DSM 20605 OX=1133569 GN=t gt PE=3 SV=1
MSQPAVRYRLIKEEKHTGARLGELITPHGTFPTPMFMPVGTQATVKTLTPEELKAMGAGVILSNTYHLWLRPGEKIVQEAGGLHRFMNWPRGILTDSGGFQVFSLAKIRDITEAGVHFRSHLSGEKLFLSPEKSIQIQNALGADIIMSFDECPPFFESYSYIKHSVERTSRWAERGLKAHQHPDRQALFGIIQGGGHQALRQQSARDLVAMDFPGYSIGGLSVGESKAEMNHVLDFTTPLLPTNKPRYLMGVGSADSLIDGVIRGIDMFDCVLPTRIARNGSCMTSHGRVVIKNASYAHDFGPLDDHCDCYVCQNYSRAYLRHLFKAGETLGLRLASYHNLYFLLHLMQNIRQAILADNLLEFRENFFEEYGFNRSNHRNF

SEQ ID NO: 56666 - protein, 380 aa, Lactobacillus wasatchensis
  misc_feature (1)..(380): tr|A0A0D1A8V5|A0A0D1A8V5_9LACO Queuine tRNA-ribosyltran sferase OS=Lactobacillus wasatchensis OX=1335616 GN=tgt PE=3 SV=1
MEPAIKYRLIKKDKHTGARLGELITPHGTFPTPMFMPVGTQATVKSISPDELDEMGAGVILANTYHLWLQPGEDLIEQAGGLHKFMNWDKGILTDSGGFQVFSLAKHRDIKEEGVTFRDPVSGSKMFLSPEKAIQVENALGPDIMMSFDECPPYFETYDYIKKSVERTSRWAQRGLEAHQNPAWQGLFGIVQGAGFKSLRQQSARDLVSMDFPGYSVGGLSVGESKEEMNRVLEFTTPLLPENKPRYLMGVGTADSLIDGVMRGIDMFDCVLPTRIARNGTCMTSHGRLVIKNAQYARDFGPLDDECDCYVCCNYSRAYIRHLIHVNETFGIRLTSYHNLYFLIHLMQDLRQAIADDQVLEFREMVFEKYGFNELNARNF

SEQ ID NO: 56667 - protein, 380 aa, Lactobacillus xiangfangensis
  misc_feature (1)..(380): tr|A0A0R2M1S1|A0A0R2M1S1_9LACO Queuine tRNA-ribosyltran sferase OS=Lactobacillus xiangfangensis OX=942150 GN=tg t PE=3 SV=1
MEPAIKYRLIKKEKHTGARLGELITPHGTFPTPMFMPVGTQASVKSLAPEELDAMGAGVILSNTYHLWLRPGEQIVKEAGGLHKFMNWNKGILTDSGGFQVFSLAKNRDITEEGVHFKNHLNGSKMFLSPEKAIQIENDLGPDIMMSLDECPPFFESYDYVSKSVARTSRWAERGLKVHQHPDYQGLFGIVQGAGFKDLREQSAKDLVSLDFPGYSIGGLSVGESKAEMNHVLDFTTPLLPENKPRYLMGVGSADALIDGAIRGVDMFDCVLPTRIARNGTCMTSHGRLVVKNAAYAHDFSPLDDNCDCYTCRNFSRAYIRHLIKADETFGLRLTSYHNLYFLLNVMKQVRQAILDDNLLEFRQDFFEMYGFNEKNPKNF

SEQ ID NO: 56668 - protein, 380 aa, Lactobacillus zeae
  misc_feature (1)..(380): tr|A0A0R1ETS7|A0A0R1ETS7_LACZE Queuine tRNA-ribosyltran sferase OS=Lactobacillus zeae DSM 20178 = KCTC 3804 OX= 1423816 GN=tgt PE=3 SV=1
MEPAVKYRLIHQDKHSGARLGELITPHGTFPTPMFMPVGTQASVKTMAPEELDTMGATVILANTYHLWLRPGPELIEEAGGLHKFMNWHKGILTDSGGFQVFSLADTRHITEDGVTFKNHLNGAKMFLSPEKAIAIENALGPDIMMSLDECPPFFESYDYVKKSVARTSRWAERGLKAHKNPDWQALFGIVQGAGFRDLREQSAKDLVSMDFPGYSIGGLSVGESKDEMNHVLDFTTPLLPENKPRYLMGVGSADALIDGALRGIDMFDCVLPTRIARNGTCMTSRGRLVIKNAKYAHDFGPLDPNCDCYACRNYSRAYIRHLIHVGEAFGIRLTTYHNLYFLLHLMQEVREAIANDDLLAFREDFFEAYGYNKEKAKNF

SEQ ID NO: 56669 - protein, 381 aa, Lactobacillus zymae
  misc_feature (1)..(381): tr|A0A1Y6JXF4|A0A1Y6JXF4_9LACO Queuine tRNA-ribosyltran sferase OS=Lactobacillus zymae OX=267363 GN=tgt PE=3 SV =1
MEPAIKYQLIKTEKHTGARLGEVITPHGTFQTPMFMPVGTQAAMKGALSPEELDEMGSQVVLANTYHLWLQPGPDLVAEAGGLHQFMNWPKGILTDSGGFQVFSLAKHRKLTEAGVHFRNELNGDKLFLSPEKAINIQNKLGPDIMMSLDECPPFFESYDYVKHSVERTSRWAERGLKAHAHPDYQGLFGIVQGAGYADLRRQSAHDLVSLDFPGYSIGGLSVGESKSEMNRILELTTPLLPTNKPRYLMGVGTADSLIDGVIRGVDMFDCVLPTRIARRGTCMTSHGRLVVRNAAYAHDFRPIDSECDCYTCRHYTRAYLRHLFKADEDLGRRLTSYHNLYFLHHLMKRVRQAILDDNLLDLRAKVFEKYGYNAEHPKNF

SEQ ID NO: 56670 - protein, 381 aa, Lactobacillus zymae
  misc_feature (1)..(381): tr|A0A0R1MRL6|A0A0R1MRL6_9LACO Queuine tRNA-ribosyltran sferase OS=Lactobacillus zymae DSM 19395 OX=1423817 GN= tgt PE=3 SV=1
MEPAIKYQLIKTEKHTGARLGEVITPHGTFQTPMFMPVGTQAAMKGALSPEELDEMGSQVVLANTYHLWLQPGPDLVAEAGGLHQFMNWPKGILTDSGGFQVFSLAKHRKLTEAGVHFRNELNGDKLFLSPEKAINIQNKLGPDIMMSLDECPPFFESYDYVKHSVERTSRWAERGLKAHAHPDYQGLFGIVQGAGYADLRRQSAHDLVSLDFPGYSIGGLSVGESKSEMNRILELTTPLLPTNKPRYLMGVGTADSLIDGVIRGVDMFDCVLPTRIARRGTCMTSHGRLVVRNAAYAHDFRPIDSECDCYTCRHYTRAYLRHLFKADEDLGRRLTSYHNLYFLHHLMKRVRQAILDDNLLDLRAEVFEKYGYNAEHPKNF

SEQ ID NO: 56671 - protein, 432 aa, Lactococcus chungangensis
  misc_feature (1)..(432): tr|A0A1K2HDJ6|A0A1K2HDJ6_9LACT Queuine tRNA-ribosyltran sferase OS=Lactococcus chungangensis CAU 28 = DSM 22330 OX=1122154 GN=tgt PE=3 SV=1
MTQNKEALTFDIKRKIPNTLARSGTISTPHGDIQTPAYIGAATAATMKTLTNAEIDALGAQSILANTYHLMLRPGADLLEKAGGIHKFMNYHKPMYTDSGGFQVYSLGMAFKKGLDATSHTTRGSSENAVMSADQLTKVEKEGVWFKSHLNGDKIYMTPEYSMELQHQIAADIHMAFDELTSPLAGREQIKSALDTTHAWAERSLRRHAELNTLHAEKGELQQALFGVVQGAREEDYRRESASFLGNLTLENGEQFDGFGIGGTFQPEELPDVLTWINETLPEEKPRHLLGMGAQPADLFLGVESGCDTFDCVAPTRQARNGAIFTYDGRINIKNKKFEDDFTPLDRDCDCYTCENHTKAYLRHLFKANEVTGMVLASIHNERFVVRTVEEIRQKLNDSEPAFWAYKRDFLVRYYGEERARDFLYTSPTEWQ

SEQ ID NO: 56672 - protein, 382 aa, Lactococcus fujiensis
  misc_feature (1)..(382): tr|A0A2A5RML0|A0A2A5RML0_9LACT Queuine tRNA-ribosyltran sferase OS=Lactococcus fujiensis JCM 16395 OX=1291764 G N=tgt PE=3 SV=1
MTDHAIKYRLIKKEKHTGARLGEIITPHGTFPTPMFMPVGTQATVKTQSPEELKEIGSGIILSNTYHLWNRPGDELIAEAGGLHKFMNWDQPILTDSGGFQVYSLVQNKKNINEEGVKFKSHLDGRNLFMSPETSIGIQNNLGSDIMMSFDECPQFYQPYDYVKNSIERTTRWAERGMKAHRRWNDQGLFGIVQGAGFKDLREQSARDLTSMDFSGYSIGGLAVGESHQEMNDVLDFTTPLLPEDKPRYLMGVGAPDSLIDGVIRGVDMFDCVLPTRIARNGTLMTHFGRVNIKNAKFERDFTPLDPMCDCYTCTHYTRAYLRHLIKADETFGLRLCSYHNLYFLVNLMKDVRQAIINDNLLEFREDFCERYGYNLPNAKDF

SEQ ID NO: 56673 - protein, 382 aa, Lactococcus garvieae
  misc_feature (1)..(382): tr|F9VG74|F9VG74_LACGL Queuine tRNA-ribosyltransferase OS=Lactococcus garvieae (strain Lg2) OX=420890 GN=tgt P E=3 SV=1
MTEHAIKYRLIKKEKHTGARLGEIITPHGTFPTPMFMPVGTQATVKTQSPEELKEMGSGIILANTYHLWLRPGDELVAQAGGLHKFMNWDQPILTDSGGFQVYSLVQNKKNISEEGVKFKSHLDGRELFLNPEKAISIQNNLGSDIMMSFDECPPFYQPYDYVKASVERTSRWAERGLKAHQRPHDQGLFGIVQGAGFEDLRRQSARDLVSMDFPGYSIGGLAVGESHAEMNAVLDFTTPLLPEDKPRYLMGVGAPDSLIDGVIRGVDMFDCVLPTRIARNGTAMTSFGRVNIKNAKYELDFTPLDPECDCYCCSNYTRAYLRHLFKADETFGLRLLSYHNLHFLINLMTNVRQAIMDDNLLEFREDFCEKYGYNKPNAKNF

SEQ ID NO: 56674 - protein, 382 aa, Lactococcus garvieae; identical to SEQ ID NO: 56673
  misc_feature (1)..(382): tr|A0A098CQN7|A0A098CQN7_9LACT Queuine tRNA-ribosyltran sferase OS=Lactococcus garvieae OX=1363 GN=tgt PE=3 SV= 1

SEQ ID NO: 56675 - protein, 382 aa, Lactococcus lactis
  misc_feature (1)..(382): sp|Q9CJ54|TGT_LACLA Queuine tRNA-ribosyltransferase OS= Lactococcus lactis subsp. lactis (strain IL1403) OX=272 623 GN=tgt PE=3 SV=1
MTEHAIKYRLIKKEKHTGARLGEIITPHGTFPTPMFMPVGTQATVKTMSPEELKTLGSGIILSNTYHLWLRPGDELVAEAGGLHKFMNWDQPILTDSGGFQVYSLVQNKKNITEEGVKFKSHLDGRELFLNPEKAISIQNNLGSDIMMSFDECPPFYQPYDYVKASVERTSRWAERGLNAHRRPNDQGLFGIVQGAGFEDLRRQSARDLTSMDFAGYSIGGLAVGESHKEMNAVLDFTTPMLPEDKPRYLMGVGAPDSLIDGVIRGVDMFDCVLPTRIARNGTLMTHFGRVNIRNAKYEHDFTPLDPMCDCYTCTNYTRAYLRHLIKADETFGLRLCSYHNLHFLVNLMKDVRGAIMDDNLLEFREDFCERYGYNQPNAKDF

SEQ ID NO: 56676 - protein, 382 aa, Lactococcus lactis
  misc_feature (1)..(382): sp|A2RHN5|TGT_LACLM Queuine tRNA-ribosyltransferase OS= Lactococcus lactis subsp. cremoris (strain MG1363) OX=4 16870 GN=tgt PE=3 SV=1
MTEHAIKYRLIKKEKHTGARLGEIITPHGTFPTPMFMPVGTQATVKTMSPEELKTLGSGIILSNTYHLWLRPGDELVAEAGGLHKFMNWDQPILTDSGGFQVYSLVQNKKNITEEGVKFKSHLDGRELFLNPEKAISIQNNLGSDIMMSFDECPPFYQPYDYVKASVERTSRWAERGLNAHRRPNDQGLFGIVQGAGFEDLRRQSASDLTSMDFAGYSIGGLAVGESHKEMNAVLDFTTPMLPEDKPRYLMGVGAPDSLIDGVIRGVDMFDCVLPTRIARNGTLMTHFGRVNIRNAKYEYDFTPLDPMCDCYTCTNYTRAYLRHLIKADETFGLRLCSYHNLHFLVNLMKDVRQAIMDDNLLEFREDFCERYGYNQPNAKDF

SEQ ID NO: 56677 - protein, 382 aa, Lactococcus petauri; identical to SEQ ID NO: 56673
  misc_feature (1)..(382): tr|A0A252CB77|A0A252CB77_9LACT Queuine tRNA-ribosyltran sferase OS=Lactococcus petauri OX=1940789 GN=tgt PE=3 S V=1

SEQ ID NO: 56678 - protein, 448 aa, Lactococcus piscium
  misc_feature (1)..(448): tr|A0A0D6DW51|A0A0D6DW51_9LACT Queuine tRNA-ribosyltran sferase OS=Lactococcus piscium MKFS47 OX=297352 GN=tgt PE=3 SV=1
MIARPSATCQDIKKVKMTQNKQALTFDIKRKIPNTLARSGTISTPHGDIQTPAYIGAATAATMKTLTNAEIDALGAQSILSNTYHLMLRPGADLMEKAGGIHKFMNYHKPMYTDSGGFQVYSLGMAYKKGLDATSHTTKGSSENAVMSADQLTKVDKEGVWFKSHLNGDKIFMTPEYSMELQHQIAADIHMAFDELTSPLSGREQIKSALDTTHAWAERSLRRHVALNAVHAEKGENQQALFGVVQGAREEDFRYESAGFLGGLTLETGEQFDGFGIGGTFQPEELPDVLTWINETLPEGKPRHLLGMGAQPADLFLGVEFGCDTFDCVAPTRQGRNGAIFTYDGRINITNKRFEDDFTPIDSECDCYTCLTHTKAYMRHLFKANEVTGMVLASIHNERFVVKTVEDIRQKLNESDAAFWAYKRDFLVRYYGQERAQDFLYTSPTDWQ

SEQ ID NO: 56679 - protein, 448 aa, Lactococcus piscium
  misc_feature (1)..(448): tr|A0A1C3SUT6|A0A1C3SUT6_9LACT Queuine tRNA-ribosyltran sferase OS=Lactococcus piscium OX=1364 GN=tgt PE=3 SV=1
MIARPSATCQDIKKVKMTQNKQALTFDIKRKIPNTLARSGTISTPHGDIQTPAYIGAATAATMKTLTNAEIDALGAQSILSNTYHLMLRPGADLMEKAGGIHKFMNYNKPMYTDSGGFQVYSLGMAYKKGLDATSHTTKGSSENAVMSADQLTKVDKEGVWFKSHLNGDKIFMTPEYSMELQHQIAADVHMAFDELTSPLSGREQIKSALDTTHAWAERSLRRHVALNAVHSEKGENQQALFGVVQGAREEDFRYESAGFLGGLTLETGEQFDGFGIGGTFQPEELPDVLTWINETLPEGKPRHLLGMGAQPADLFLGVEFGCDTFDCVAPTRQGRNGAIFTYDGRINITNKRFEDDFTPIDSECDCYTCLNHTKAYIRHLFKANEVTGMVLASIHNERFVVKTVEDIRQKLNESDAAFWAYKRDFLVRYYGQERAQDFLYTSPKDWQ

SEQ ID NO: 56680 - protein, 432 aa, Lactococcus plantarum
  misc_feature (1)..(432): tr|A0A2A5S3C3|A0A2A5S3C3_9LACT Queuine tRNA-ribosyltran sferase OS=Lactococcus plantarum OX=1365 GN=tgt PE=3 SV =1
MTQHTPPLTFDIKRKLPDTLARTGVISTPHGDIQTPAYIGAATAATMKTLTNAEIDELGAQSILSNTYHLMLRPGADLLAKAGGIHKFMNYHKPMYTDSGGFQVFSLGMAYKKGLDATSHTTKGSSDNAVMSSDQLTKVNKEGVWFKSHLNGDKIFMTPEYSMELQHKIAADIHMAFDELTSPLSGREQIKSALDTTHAWAERSLKRHVELNRLHAEKGEHQQALFGVVQGAREEDFRYESAGFLGGLTLETGEQFDGFGIGGTFQPEELPDVLTWINETLPEGKPRHLLGMGAQPADLFLGVEFGCDTFDCVAPTRQGRNGAIFTYDGRINIKNKKFEDDFTPIDQDCDCYTCLNHTKAYMRHLFKANEVTGMVLASIHNERFVIRTVEEIRQKLNESDAAFWAYKRDFLIRYYGQERAQDFLYTSPKDWQ

SEQ ID NO: 56681 - protein, 432 aa, Lactococcus raffinolactis
  misc_feature (1)..(432): tr|A0A290Q0S4|A0A290Q0S4_9LACT Queuine tRNA-ribosyltran sferase OS=Lactococcus raffinolactis OX=1366 GN=tgt PE= 3 SV=1
MTQNKEALSFDIKRKIPNTLARSGTISTPHGDIQTPAYIGAATAATMKTLTNAEIDALGAQSILSNTYHLMLRPGADLLAKAGGIHKFMNYHKPMYTDSGGFQVYSLGMAFKKGLDATSHTTKGSAENAVMSADQLTKVEKEGVWFKSHLNGDKIYMTPEYSMELQHQIAADIHMAFDELTSPLAGREQIKSALDTTHAWAERSLRRHAELNTVHTEKGERQQALFGVVQGAREEDYRRESAGFLGGLTLENGEQFDGFGIGGTFQPEELPDVLTWINETLPEGKPRHLLGMGAQPADLFLGVEYGCDTFDCVAPTRQARNGAIFTYDGRINIKNKKFEDDFTPLDRECDCYTCENHTKAYLRHLFKANEVTGMVLASIHNERFVVRTVEEIRQKLNDSDHAFWAYKRDFLVRYYGEERARDFLYTSPAEWQ

SEQ ID NO: 56682 - protein, 432 aa, Lactococcus raffinolactis
  misc_feature (1)..(432): tr|I7KHN8|I7KHN8_9LACT Queuine tRNA-ribosyltransferase OS=Lactococcus raffinolactis 4877 OX=1215915 GN=tgt PE= 3 SV=1
MTRNKEALTFDIKRKIPNTLARSGTISTPHGDIQTPAYIGAATAATMKTLTNAEIDALGAQSILSNTYHLMLRPGADLLAKAGGIHKFMNYHKPMYTDSGGFQVYSLGMAFKKGLDATSHTTKGSAENAVMSADQLTKVEKEGVWFKSHLNGDKIYMTPEYSMELQHQIAADIHMAFDELTSPLAGREQIKSALDTTHAWAERSLRRHAELNALHAEKGELQQALFGVVQGAREEDYRRESASFLGGLTLENGEQFDGFGIGGTFQPEELPDVLTWINETLPEEKPRHLLGMGAQPADLFLGVEYGCDTFDCVAPTRQARNGAIFTYDGRINIKNKKFEDDFTPLDSECDCYTCENHTKAYLRHLFKANEVTGMVLASIHNERFVVRTVEEIRQKLNVSENAFWAYKRDFLVRYYGEERALDFLYTSQAEWQ

SEQ ID NO: 56683 - protein, 432 aa, Lactococcus reticulitermitis
  misc_feature (1)..(432): tr|A0A224XB40|A0A224XB40_9LACT Queuine tRNA-ribosyltran sferase OS=Lactococcus reticulitermitis OX=2025039 GN=t gt PE=3 SV=1
MTQNKEALSFAIKRQIPNTLARSGTISTPHGEIQTPAYIGAATAATMKTLTNAEIDALGAQSILSNTYHLMLRPGADLLAKAGGIHKFMNYHKPMYTDSGGFQVYSLGMAFKKGLDATSHTTKGAAENAVMSADQLTKVEKEGVWFKSHLNGDKIFMTPEYSMELQHKIAADIHMAFDELTSPLAGREQIKSALDTTHAWAERSLRRHAELNAIHAEKNECQQALFGVVQGAREADYRRESASFLGSLTLENGEQFDGFGIGGTFQPEELPDVLTWINETLPEGKPRHLLGMGAQPADLFLGVEYGCDTFDCVAPTRQARNGAIFTYDGRINIKNKKFEEDFTPLDRDCDCYTCENHTKAYLRHLFKANEVTGMVLASIHNERFVVRTVEEIRQKLNESDAAFWAYKRDFLVRYYGEERARDFLYTSPAEWQ

SEQ ID NO: 56684 - protein, 382 aa, Lactococcus sp.
  misc_feature (1)..(382): tr|A0A387BCA7|A0A387BCA7_9LACT Queuine tRNA-ribosyltran sferase OS=Lactococcus sp. 1JSPR-7 OX=2419773 GN=tgt PE =3 SV=1
MVEHAIKYRLVKKEKHTGARLGEIITPHGTFPTPMFMPVGTQATVKTMSPEELKQLGSGIILSNTYHLWLRPGDELVAKAGGLHKFMNWDQPILTDSGGFQVYSLVQNKKNITEEGVKFKSHLDGRELFLNPEKAIGIQNNLGSDIMMSFDECPPFYQPYDYVKASVERTSRWAERGLNAHRRAHDQGLFGIVQGAGFEDLRRQSANDLTSMDFAGYSIGGLAVGESHKEMNAVLDFTTPMLPENKPRYLMGVGAPDSLIDGVIRGVDMFDCVLPTRIARNGTLMTHFGRVNIRNAKYEHDFTPLDPMCNCYTCTNYTRAYLRHLIKADETFGLRLCSYHNLHFLVNLMKDVRQAIIDDNLLEFREDFCERYGYNKPDAKDF

SEQ ID NO: 56685 - protein, 382 aa, Lactococcus sp.
  misc_feature (1)..(382): tr|A0A5C8JJS7|A0A5C8JJS7_9LACT Queuine tRNA-ribosyltran sferase OS=Lactococcus sp. dk310 OX=2603289 GN=tgt PE=3 SV=1
MTEHAIKYRLIKKEKHTGARLGEIITPHGTFPTPMFMPVGTQATVKTQSPEELKEIGSGIILSNTYHLWNRPGDELIAEAGGLHKFMNWDQPILTDSGGFQVYSLVQNKKNITEEGVTFKSHLDGRKLFMAPETSIGIQNNLGSDIMMSFDECPQFYQPYDYVKNSIERTSRWAERGMEAHKRWHDQGLFGIVQGAGFEDLRKQSARDLTSMDFSGYSIGGLAVGETHKEMNAVLDFTTPLLPKDKPRYLMGVGAPDSLIDGVIRGVDMFDCVLPTRIARNGTLMTHFGRINIKNAKFEHDFTTLDPMCDCYTCTHYTRAYLRHLIKADETFGLRLCSYHNLYFLVNLMKDVRQAIINDNLLEFREDFCERYGYNLPNAKDF

SEQ ID NO: 56686 - protein, 382 aa, Lactococcus termiticola
  misc_feature (1)..(382): tr|A0A2R5HIM5|A0A2R5HIM5_9LACT Queuine tRNA-ribosyltran sferase OS=Lactococcus termiticola OX=2169526 GN=tgt PE =3 SV=1
MTEPAIKYRLIKKEKHTGARLGEIITPHGTFPTPMFMPVGTQATVKTMAPEELKEMGSGIILANTYHLWLRPGDELVAEAGGLHKFMNWDQPILTDSGGFQVYSLVENKKNITEEGVTFKSHLNGDRLFLSPEKAIQIQNNLGSDIMMSFDECPPFHQPYDYVKASVERTSRWAERGLKAHQRPHDQGLFGIVQGAGFKDLREQSARDLVSMDFPGYSIGGLAVGESHAEMNAVLDFTTPMLPEDKPRYLMGVGAPDSLIDGVIRGIDMFDCVLPTRIARNGTLMTSYGRVNIRNAQYEHDFTALDPECDCYTCRNYSRAYLRHLIKADETFGMRLCSYHNLYFLVNLMKRTRQAIMDDNLLEFREDFCEKYGYNKPNAKDF

SEQ ID NO: 56687 - protein, 373 aa, Lactonifactor longoviformis
  misc_feature (1)..(373): tr|A0A1M4ZYY0|A0A1M4ZYY0_9CLOT Queuine tRNA-ribosyltran sferase OS=Lactonifactor longoviformis DSM 17459 OX=112 2155 GN=tgt PE=3 SV=1
MYKILKKDGKAKRAEFTTVHGTIQTPVFMNVGTAAAIKGAVATTDLREIGTQVELSNTYHLHVRPGDEVVKKMGGLHKFMNWDRPILTDSGGFQVFSLAGLRKIKEEGVYFQSHIDGRKIFMGPEESMQIQSNLASTIAMAFDECPSSVASREYVQASVDRTTRWLRRCRTEMDRLNQKEDTINRHQLLFGINQGAVYEDIRIAHAREIADMDLDGYAVGGLAVGESHEEMYRILDAVVPCLPEEKPTYLMGVGTPANILEAVDRGVDFFDCVYPSRNGRHGHVYTNQGKLNLFNAKFELDSRPIEEGCQCPACRNYSRAYIRHLLKAKEMLGMRLCVLHNLYFYNKMMEEIREAIEQGTYQDYKKQKLEGFL

SEQ ID NO: 56688 - protein, 680 aa, Lacunisphaera limnophila
  misc_feature (1)..(680): tr|A0A1D8AYS3|A0A1D8AYS3_9BACT Queuine tRNA-ribosyltran sferase OS=Lacunisphaera limnophila OX=1838286 GN=tgt_2 PE=3 SV=1
MSRLAFTLEKESPGSKARAAHFTTAHGEVRTPVFMPVGTQATVKNMTVDGLKAVDAQVLLANTYHLLLRPGPEVFRKFGGIHRFMDWDRPVLTDSGGFQIFSLPESRVMTEAGAQFRSYVDGAVHFLSPESSIAMQRAIGSDIMMVLDQCIPSTASHAETETAMHLTHRWAVRSLEARGDSPQALFGIVQGACHRDLRQQSAEFLRALPFDGLAIGGLAVGETHEQRYEFCGLATDHLPKNLPRYLMGVGTPIDILESVHRGVDMFDCIIPTQLAQRGTAFTSHGRIHCRRGIYKFAETPLDAACPCPTCTRYSRAYLHHLTKSDEVLGWHLLSIHNLSFYTRLMAEIRASILAGDFLAYYERQRVALVREDEANPSVPTSKPRAKANPHRGDYEIQTSPQGFSSIRQRSSGEVMHSVSAPEDEANRLYIEQSRLAHRLRRRSPEDTAPLVVWDVGLGAASNAMAAIHRLEAELAAAGPDALRPLHLISFERDLDPLLLAARHASHFPHLRHGAPHGLLHKSRWGHASGLIDWRLLRGDFLEHLEGAPPPDLIYYDPFSAKTDTGLWVPEVFARIHRHVAARPAELYTYAAGTGVRAALLSAGFFVAEGVGTGPKATTTVAFTHRDTRADDPAAPKLLGADWIARWRRSDAKFPAGLTEAQQAAFAAKIESHPQFAGMMK

SEQ ID NO: 56689 - protein, 382 aa, Lacunisphaera limnophila
  misc_feature (1)..(382): tr|A0A1D8AR76|A0A1D8AR76_9BACT Queuine tRNA-ribosyltran sferase OS=Lacunisphaera limnophila OX=1838286 GN=tgt_1 PE=3 SV=1
MSSHFQLLKTDTGTAARRGRLQTLHGPIETPIFMPVGTQGTVKSLTPAQIKETGAQIILGNTYHLNLRPGSELVRDLGGLHQFMGWDGPILTDSGGFQVFSLAKLRDIRDDGIAFSSHLDGSKLFLGPREVMTIQANLGSDIAMVIDECPPWPCTREACRDAVDRSYRWAQQCKQIATDNGFLAGGHHVFAIAQGSTFDDLRREAAESLAALDFPGYAVGGVSVGEPEPEMLKQVGATTPFMPADKPRYTMGLGTPPQILKMIALGVDMFDCVHPTRVARNGAAFTPDGLINLRNERYRADPAPLVEGLDNYTCRKFTRAYLRHLVMANEILACTLLTLHNLHFYLDLMAQARAHIEAGDFGPWHRAWVERFEAGEAAAQRK

SEQ ID NO: 56690 - protein, 379 aa, Lacunisphaera sp.
  misc_feature (1)..(379): tr|A0A4Q1C435|A0A4Q1C435_9BACT Queuine tRNA-ribosyltran sferase OS=Lacunisphaera sp. TWA-58 OX=2508720 GN=tgt P E=3 SV=1
MPSHFQLLKTDTATAARRGRLQTLHGVIETPIFMPVGTQGTVKAVTPVQLREVGAQIILGNTYHLNLRPGSELVRDMGGLHKFMGWDGPILTDSGGFQVFSLSKLRNIQDDGIAFQSHLDGAKLFLGPREVMTIQANLGSDIAMVIDECPPWPCTRDECRAAVDRSYRWAKLCKQIATDNGFLAGGHHVFAIAQGSTYDDLRREAAESLAELDFPGYAVGGVSVGEPEPEMLKQVAATTPFMPAGKPRYTMGLGTPSQILKMIGLGVDMFDCVHPTRVSRNGAAFTPDGMINLRNERYRADSSPLVEGLDNYTCRQFSRAYLRHLVMANEILASTLLTIHNLHFYLDLVAQARARIEAGDFAAWSKAWISRYEAGEASG

SEQ ID NO: 56691 - protein, 680 aa, Lacunisphaera sp.
  misc_feature (1)..(680): tr|A0A4Q1CBM0|A0A4Q1CBM0_9BACT Queuine tRNA-ribosyltran sferase OS=Lacunisphaera sp. TWA-58 OX=2508720 GN=tgt P E=3 SV=1
MSRLAFTLERESPGSKARAARFTTLHGPVRTPVFMPVGTQATVKNLDVEDLKAVDAQVLLANTYHLLLRPGPEVFRKFGGIHRFMNWDRPVLTDSGGFQIFSLPDSRVMTEAGAQFRSYVDGQVHFLSPESSIAMQRDIGSDIMMVLDQCIASTASHAETEMAMHLTHRWAERSLAARGDSAQALFGIIQGACHRDLRLRSAEFLRALPFDGLAIGGLAVGETHAQRYEFTGLVTDQLPAHLPRYLMGVGTPLDILEAVHRGVDMFDCIIPTQLAQRGTAYTSHGRIHCRRGIYKFSEEPLDAACSCPTCAKYSRAYLHHLNKADEVLGWQLLSIHNLAFYTRLMAEIRAAILGGEFLAYYERQRLVLGREDEANPSVLRTKPRPKSAPHRGDYEIQTSPQGFSSIRQRSSGEVMHSVSAPADEANRLYIDQSRLALRLRRRTPEDDQPLVVWDVGLGAASNAMAAIHRLEAELSAVGAAALRPLQLISFERDLDPLILAARHASHFPHLRHGAPHDLLNLGRWAHASGLIEWRLLRGDFLDHLEGAPTPDLIYYDPFSAKTDTALWQPGVFARLHQHCRSRPAELYTYAAGTGVRAAMLSAGFFVAEGVGTGPKATTTVACTHPASQPDDPAGPRLLAAEWLARWRRSEAKFPTGLDDAAKAAFEQRIESHPQFAGLQG

SEQ ID NO: 56692 - protein, 390 aa, Lampropedia cohaerens
  misc_feature (1)..(390): tr|A0A0U1PY60|A0A0U1PY60_9BURK Queuine tRNA-ribosyltran sferase OS=Lampropedia cohaerens OX=1610491 GN=tgt PE=3 SV=1
MLQFDLITTDSASHARRARLTLNHGVVQTPIFMPVGTYGTVKGVMPRSLEEMGAQIILGNTFHLWMRPGLDVMRSFGGLHAFEQWDKPILTDSGGFQVWSLGEMRKITEEGVHFASPVNGDKLFMSPEVSMQIQTVLNSDIVMQLDECTPYETKGHITTEAEARQSMEMSLRWARRSQEEFARLQNPNALFGIVQGGMFEHLREESLQQLVAMDFPGYAIGGVSVGEPKEEMRRIMAHTPHRLPQDKPRYLMGVGTPEDLVEGVACGVDMFDCVMPTRNARNGTVFTRYGDLKIRNARHRSDHQPLDPSCTCYTCAGTSGVSWENGGRGGFSRAYLHHLDRCGEMLGPMLTTIHNLHYYLNLMQEIRTALEQACFGAFRTAFAEQRARGV

SEQ ID NO: 56693 - protein, 390 aa, Lampropedia hyalina
  misc_feature (1)..(390): tr|A0A1M4ZSB4|A0A1M4ZSB4_9BURK Queuine tRNA-ribosyltran sferase OS=Lampropedia hyalina DSM 16112 OX=1122156 GN= tgt PE=3 SV=1
MLQFDLLQTDPSSHARRGQLTLNHGVVQTPIFMPVGTYGTVKGVMPRSLEEMGAQIILGNTFHLWMRPGLDVMQSFGGLHGFEQWHKPILTDSGGFQVWSLGDMRKITEEGVHFASPVNGDKLFMSPEVSMQIQTVLNSDIVMQLDECTPYETKGHLTTEAEARQSMEMSIRWARRSQAEFARLENPNALFGIVQGGMFEHLRQESLEQLVELDFPGYAVGGVSVGEPKDEMRRIMAHTPHRLPAHKPRYLMGVGTPEDLVEGVTQGVDMFDCVMPTRNARNGTIFTRYGDLKIRNARHRDDHQPLDVTCTCHACAGTSGVSWENGGRGGFSRAYLHHLDRCGEMLGPMLTTIHNLHYYLNLMQEIRHALDAGTFTALRQQFATDRARGV

SEQ ID NO: 56694 - protein, 390 aa, Lampropedia puyangensis
  misc_feature (1)..(390): tr|A0A4S8F5C9|A0A4S8F5C9_9BURK Queuine tRNA-ribosyltran sferase OS=Lampropedia puyangensis OX=1330072 GN=tgt PE =3 SV=1
MLQFDLLATDASSHARRGQLTLNHGVVQTPIFMPVGTYGTVKGVMPRSLEEMGAQIILGNTFHLWMRPGLDVMASFGGLHAFEQWHKPILTDSGGFQVWSLGDMRKITEEGVHFASPVNGDKLFMSPEVSMQIQTALNSDIVMQLDECTPYETKGHITTEDEARRSMEMSIRWAKRSQNEFARLNNPNALFGIVQGGMFEHLRQESLEQLVALDFPGYAVGGVSVGEPKEDMRRIMAHTPHRLPAHKPRYLMGVGTPEDLVEGVASGVDMFDCVMPTRNARNGTVFTRYGDLKVRNARHKQDHQPLDTSCSCHACAGVSGISWDKGGRAGFSRAYLHHLDRCGEMLGPMLTTIHNLHYYLNLMQEVRDALEHNRFSAFRQQFATDRSRGI

SEQ ID NO: 56695 - protein, 390 aa, Lampropedia sp.
  misc_feature (1)..(390): tr|A0A4S5BPU7|A0A4S5BPU7_9BURK Queuine tRNA-ribosyltran sferase OS=Lampropedia sp. YIM MLB12 OX=2562762 GN=tgt PE=3 SV=1
MLQFDLLATDSSSHARRGQLTLNHGVVQTPIFMPVGTYGTVKGVMPRSLEEMGAQIILGNTFHLWMRPGQDVMSSFGGLHAFEQWHKPILTDSGGFQVWSLGDMRKITEEGVHFASPVNGDKLFMSPEVSMQIQTTLNSDIAMQLDECTPYELKGHITTADEARRSMEMSIRWAKRSQNEFHRLNNPNALFGIVQGGMFEHLRQESLEQLVELDFPGYAVGGVSVGEPKEDMRRIMAHTPHRLPANKPRYLMGVGTPEDLVQGVASGVDMFDCVMPTRNARNGTVFTRYGDLKLRNARHKQDHQPLDTSCTCHACAGTSGVSWDQGGRGGFSRAYLHHLDRCGEMLGPMLTTIHNLHYYLNLMQDVRNALDNNRFAEFRQQFATERARGV

SEQ ID NO: 56696 - protein, 370 aa, Laribacter hongkongensis
  misc_feature (1)..(370): sp|C1DDA7|TGT_LARHH Queuine tRNA-ribosyltransferase OS= Laribacter hongkongensis (strain HLHK9) OX=557598 GN=tg t PE=3 SV=1
MLEFTLHKTSGHARRGTLRLNHGTIETPVFMPVGTYGAVKAMTPDRLDETGAQIILGNTFHLWLRPGLDVIGTFGGLHDFTGWHKPILTDSGGFQVFSLGDLRKITEEGVHFQSPINGDKLFLSPEKSMEIQTVLNSDIVMQLDECTPGQVDHATAKASMQMSLRWAERSRRAFDDYRNPNALFGIVQGNLYLDLREESLKGLTDIGFDGIAVGGLSVGEPKPEMYRVLREVGPMLPADKPHYLMGVGTPEDLVEGVANGIDMFDCVMPTRNARNGWLFTRWGDVKIKNARYKDDTRPLDEQCSCYTCRHFSRGYLHHLHRTGEITGAMLNTVHNLHYYQELMADMRAAIEADSFAGFQQEFHAQRARGA

SEQ ID NO: 56697 - protein, 370 aa, Laribacter hongkongensis
  misc_feature (1)..(370): tr|A0A248LLG4|A0A248LLG4_9NEIS Queuine tRNA-ribosyltran sferase OS=Laribacter hongkongensis OX=168471 GN=tgt PE =3 SV=1
MLEFTLHKTSGHARRGTLRLNHGTIETPAFMPVGTYGAVKAMTPDRLDETGAQIILGNTFHLWLRPGLDVIGTFGGLHDFIGWHKPILTDSGGFQVFSLGDLRKITEEGVHFQSPINGDKLFLSPEKSMEIQTVLNSDIVMQLDECTPGQVDHATAKASMQMSLRWAERSRRAFDNYRNPNALFGIVQGNLYLDLREESLKGLTDIGFDGIAVGGLSVGEPKPEMYRVLREVGPMLPADKPHYLMGVGTPEDLVEGVANGIDMFDCVMPTRNARNGWLFTRWGDVKIKNARYKDDTRPLDEQCSCYTCRHFSRGYLHHLHRTGEITGAMLNTVHNLHYYQELMAGIRAAIEADSFAGFQQEFHAQRARGA

SEQ ID NO: 56698 - protein, 376 aa, Larkinella arboricola
  misc_feature (1)..(376): tr|A0A327WW96|A0A327WW96_9BACT Queuine tRNA-ribosyltran sferase OS=Larkinella arboricola OX=643671 GN=tgt PE=3 SV=1
MQFTIQATDPESKARTGVLSTDHGLIETPIFMPVGTAGTVKAVHQRELVEDVRAEIILGNTYHLYLRPGLDVIGKAGGLHRFNGWKRPILTDSGGYQVYSLSNTRKIKEDGVTFKSHIDGSKHIFTPEGVMDIQRTIGADIIMAFDECTPYPCEYGYARASMDMTHRWLTRCIERFDSTPAKYGYEQTLFPIVQGSTYKDLRQQSAEFVAEQRREGNAIGGLAVGEPAEEMYKTIELVNAILPSDKPRYLMGVGTPENILEAIALGVDMFDCVMPTRNARHGIVFTTQGIINIKNERWKDDFSPIDEELGGYASTFYSKAYLRHLMRSEEILGAQIASLQNLTFYLWLVKQARKEIVAGNFAKWKGIMTKKLMQRL

SEQ ID NO: 56699 - protein, 376 aa, Larkinella knui
  misc_feature (1)..(376): tr|A0A3P1CQT1|A0A3P1CQT1_9BACT Queuine tRNA-ribosyltran sferase OS=Larkinella knui OX=2025310 GN=tgt PE=3 SV=1
MQFTIQSADPHSKARTGLLTTDHGLIETPIFMPVGTAGTVKAVHQRELVADVKAEIILGNTYHLYLRPGLDVLEKAGGLHRFNGWERPILTDSGGYQVYSLSNTRKIKEEGVTFKSHIDGSKHIFTPEGVMDIQRSIGADIMMAFDECTPYPCEYGYARDSMEMTHRWLIRCLNRFDTTENKYGYRQTLFPIVQGSTYKDLRQQSAEFVAEQQREGNAIGGLAVGEPADEMYGMIEHVNAILPSDKPRYLMGVGTPENILEAIALGIDMFDCVMPTRNARHGFVFTSQGIINIKNEKWKDDFSPIDEELGGYAGTCYSKAYLRHLIKSEEILGAQIASLQNLTFYLWLVKQARQQINLGNFMKWKSSMSKKLMQRL

SEQ ID NO: 56700 - protein, 376 aa, Larkinella rosea
  misc_feature (1)..(376): tr|A0A3P1BDP8|A0A3P1BDP8_9BACT Queuine tRNA-ribosyltran sferase OS=Larkinella rosea OX=2025312 GN=tgt PE=3 SV=1
MQFTIQSADSQSKARTGLITTDHGLIETPIFMPVGTAGTVKAVHQRELVSDVKAEIILGNTYHLYLRPGLDVLEKAGGLHRFNGWERPILTDSGGYQVYSLSNTRKIKEEGVTFKSHIDGSKHVFTPEGVMDIQRIIGADIIMAFDECTPYPCEYGYARASMEMTHRWLTRCIDRFDATEGKYGYQQTLFPIVQGSTYKDLRQQSAEFVARQERDGNAIGGLAVGEPAEEMYGMIDHVNAILPSDKPRYLMGVGTPENILEAIALGIDMFDCVMPTRNARHGLLFTSQGIINIKNEKWKEDFSPIDEELGGYVGLCYSKAYLRHLIRSEEILGAQIASLQNLTFYLWLVKEARRQINAGNFSSWKRIMTKKLMQRL

SEQ ID NO: 56701 - protein, 376 aa, Larkinella sp.
  misc_feature (1)..(376): tr|A0A4R8D4P1|A0A4R8D4P1_9BACT Queuine tRNA-ribosyltran sferase OS=Larkinella sp. BK230 OX=2512173 GN=tgt PE=3 SV=1
MQFTIQATDPQSKARTGLLATDHGLIETPIFMPVGTAGTVKAVHQRELVEDVKAEIILGNTYHLYLRPGLDVLEKAGGLHRFNGWNRPILTDSGGYQVYSLSNTRKIKEEGVTFKSHIDGSKHIFTPEGVMDIQRIIGADIIMAFDECTPYPCEYGYARASMDMTHRWLTRCINRFDSTPAKYGYQQTLFPIVQGSTYKDLRRQSAEFVAEQQRDGNAIGGLAVGEPAEEMYETIEHVNAILPSDKPRYLMGVGTPENILEAIALGIDMFDCVMPTRNARHGIVFTTQGIINIKNEKWKDDFSPVDEELGGYASTIYSKAYLRHLMRSEEILGAQIASLQNLTFYLWLVKEARQQINTGNFMKWKGSMTKKLMQRL

SEQ ID NO: 56702 - protein, 376 aa, Larkinella sp.
  misc_feature (1)..(376): tr|A0A368JQ95|A0A368JQ95_9BACT Queuine tRNA-ribosyltran sferase OS=Larkinella sp. ZZJ9 OX=2315727 GN=tgt PE=3 S V=1
MQFTLQATDPHSKARTGLLTTDHGLIETPIFMPVGTAGTVKAVHQRELVADVKAEIILGNTYHLYLRPGLDTLEKAGGLHRFNGWERPILTDSGGYQVYSLSNTRKIKEEGVTFKSHIDGSKHVFTPESVMDIQRIIGADIIMAFDECTPYPCEYGYARASMEMTHRWLTRCIDRFDATEGKYGYQQTLFPIVQGSTYKDLRQQSAEFVAEQQRDGNAIGGLAVGEPAEEMYTTIEQVNAILPSDKPRYLMGVGTPENILEAIALGIDMFDCVMPTRNARHGVLYTTQGIINIKNERWKDDFSPIDAELGGYAGTCYSKAYLRHLIKSEEILGAQIASLQNLTFYLWLVKEARQEINTGNFVKWKANMTKKLMQRL

SEQ ID NO: 56703 - protein, 378 aa, Latescibacteria bacterium
  misc_feature (1)..(378): tr|A0A0S7XBK8|A0A0S7XBK8_9BACT Queuine tRNA-ribosyltran sferase OS=Latescibacteria bacterium DG_63 OX=1703781 G N=tgt PE=3 SV=1
MEFQLEKRDKDSNARAGVIVTARGDVETPVFMPVGTQATVKTLSPHELEEIGAQIVLANTYHLYLRPGHSLIHELGGLHEFMNWKRPILTDSGGFQVFSLSDLRVVRKEGVVFRSHLDGSEHFISPELAVEIQDSLGSDLVTTLDQCVGFPADLPLAKRALKNTLDWARRSKLAWQDAHSSGNAALFGIVQGSTYENLRRQCAKALVEMDFDGYAIGGLSVGEPKSATFDITSLTIAELPEGRPRYLMGVGFPNDIIEAVMRGVDMFDCVMPTRNARNGTVFTSRGKLVVKNIEYAKDRRPLDEDCDCYACRNFSRAYLRHLFQAGELLGPRLATLHSLRFFFRMMAAMRESIIDDRFAGWREDFLQKYQSGEGINGQ

SEQ ID NO: 56704 - protein, 377 aa, Lautropia mirabilis
  misc_feature (1)..(377): tr|E7RY56|E7RY56_9BURK Queuine tRNA-ribosyltransferase OS=Lautropia mirabilis ATCC 51599 OX=887898 GN=tgt PE=3 SV=1
MLHYTLNHTDGLARQGTLRLNHGEIETPIFMPVGTYGAVKGMSPADLEAVGARIILGNTFHLWLRPGTTVMEKLGGLHGFNGWHRPILTDSGGFQVWSLGDLRKISEEGVRFASPINGDKLFLTPEVSMQVQRALNSDIAMVFDECTPIEIDGRPTTHEEAARSMQLSLRWARRSRDEFLRGENPNALFGIVQGGMFEDLRDESLAGLTDIGFEGYAVGGLSVGEPKEDMLRILDHIGHRLPADRPRYLMGVGTPEDLLDGIARGIDMFDCVMPTRNARNGWLFTRFGDLKIRNARWRDDERPLDPTCQCSTCRHHSRAYLHHLQRVGEMLGAHLATVHNLHFYLDLMAQARQAIAEGRFAAFHAAFLKDRQRGLDG

SEQ ID NO: 56705 - protein, 380 aa, Lautropia sp.
  misc_feature (1)..(380): tr|A0A426FQB2|A0A426FQB2_9BURK Queuine tRNA-ribosyltran sferase OS=Lautropia sp. KCOM 2505 OX=2490857 GN=tgt PE =3 SV=1
MLEYTLHHTDDLARHGTLKLNHGAFQTPMFMPVGTYGAVKGMSPDDLEAVGARIILGNTFHLWLRPGTTVMEKLGGLHGFNGWHRPILTDSGGFQVWSLGELRKISEEGVRFASPINGDRLFLTPEISMQVQRALNSDIAMVFDECTPYEVDGRPTTRDEAAQSMQLSLRWARRSRNEFLDGKNPNALFGIVQGGMFEDLRDESLAGLKEIGFEGYAIGGLSVGEPKADMLRILDHVGHRLPADRPRYLMGVGTPEDLLDGIARGIDLFDCVMPTRNARNGWLFTRFGDLKIRNARWRDDERPLDPTCLCSTCRKHSRAYLHHLNRVGEMLGAHLATVHNLHFYLNLMGEAREAIAEGRFAAFKAQFEADRQRGLDEGQS

SEQ ID NO: 56706 - protein, 320 aa, Lautropia sp.
  misc_feature (1)..(320): tr|A0A3B8R8H2|A0A3B8R8H2_9BURK Queuine tRNA-ribosyltran sferase (Fragment) OS=Lautropia sp. OX=2053568 GN=DCE31 _03735 PE=3 SV=1
LGNTFHLWLRPGTEVIEKLGGLHGFNAWNDPILTDSGGFQVWSLAELRNISEEGVRFASPINGDRLFLTPEVSMRIQTALNADVVMIFDECTPYEVKGRIIQKDEAAASMQRSLRWAKRSKDAFEALKNHNALFGIVQGGMHEALRLESLQALAEMNFHGYAIGGLSVGEPKEDMQRVLAYTAPRLPHHKPRYLMGVGTPEDLVEGVRQGVDMFDCVMPTRNARNGSLFTRRGDLRLRNARYKDDEKPIDPGCSCYCCRDFSRAYLHHLQRVDEMLGAQLATIHNLHFYLDIMRQMREAIEEGRFQAWRDEFLAIRLEGV

SEQ ID NO: 56707 - protein, 452 aa, Lawsonella clevelandensis
  misc_feature (1)..(452): tr|A0A5E3ZWH4|A0A5E3ZWH4_9ACTN Queuine tRNA-ribosyltran sferase OS=Lawsonella clevelandensis OX=1528099 GN=tgt PE=3 SV=1
MFTAQGHKAGVVVSLIYNVCMTVDQQPRTPFTLGAYLSEPTSGEPITRRHTGEPLGRTGTIHTPHGDIHTPAFIPVGTRATVKTLTPEQIRSTGAQAVLGNAYHLYLQPGPDIVDEAGGIATFMNWDGPTYTDSGGFQVLSLGSGFKKVLAAEFAGTDRDGEVRKGKERMANVDDDGVTFRSHLDGSLHRFTPEVSMQIQHHLGADIIFAFDELTTLLNSRGYQEEALERTRLWAERCLAEHSRLTAERTHCPPQALWGVIQGAQYEDLRRKACRDLQQLSLESEERGGVGFGGFGIGGALQKENLGTIVGWCNQELPEDKPRHLLGISEPDDIFTAVENGADTFDCVAPSRLGRHGGVYTKDGRMNLVAAKYKRDFRPIDPELASYTSQNYSRAYLRHLLKSGEKLGQTLCTIHNLFFIVQLVDGIREAMENGTYWEYKAEVLGRYYGGTR

SEQ ID NO: 56708 - protein, 443 aa, Lawsonella clevelandensis
  misc_feature (1)..(443): tr|A0A2W5K9C6|A0A2W5K9C6_9ACTN Queuine tRNA-ribosyltran sferase OS=Lawsonella clevelandensis OX=1528099 GN=tgt PE=3 SV=1
MAVHQQPATPFTLGTHLSEPTGAHASAYGTITRRTTGEPLGRTGTIHTPHGDIHTPAFIPVGTRATVKTLTPEQIRSTGAQAVLGNAYHLYLQPGADIVDEAGGIAEFMNWHGPTYTDSGGFQVLSLGSGFKKVLAAEFAGTDRDGEVRRGKERMANVDDEGVTFRSHLDGSRHRFTPEVSMQIQHQLGADIIFAFDELTTLLNSRGYQEEALERTRLWAERCLVEHSRLTVERAHRPPQALWGVIQGAQYEDLRRKACRDLQQLSLESEERGGVGFGGFGIGGALQKENLGTIVGWCNQELPEDKPRHLLGISEPDDIFTAVENGADTFDCVAPSRLGRHGGVYTKDGRMNLAAAKYKRDFRPIDPELASYTSQNYSRAYIRHLLKAGEKLGQTLCTIHNLFFIVQLVDGIRASMEDGTYWDYKAEVMGRYYANGGRNMIDR

SEQ ID NO: 56709 - protein, 371 aa, Lawsonia intracellularis
  misc_feature (1)..(371): sp|Q1MPU5|TGT_LAWIP Queuine tRNA-ribosyltransferase OS= Lawsonia intracellularis (strain PHE/MN1-00) OX=363253 GN=tgt PE=3 SV=1
MNPPGTFHITATDGSARTGVLYTAHGIVNTPIFMPVGTVGSVKAIAPDDLEAISAEIILGNTYHLYLRPGDELIARRGGLHVFNAWEKPILTDSGGFQIFSLSSLRKLHKDGVIFRSHIDGSKHVFTPERVITIQRNLNSDIMMVLDECVAANADYTYTAQSLDLTIHWAKRSRDVYPKGEGDNLLFGIVQGGMFKSLRHSSVSQLIDLDFDGYAIGGLSVGEPKEIMMELLYDTAPLLPKTKPRYLMGVGTPLDILKGIEAGVDMFDCVLPTRNARNGTLYTSQGKLNIKRKEYAEDDLPLDENCSCYTCQTFSRAYLRHLFHSQELLAFRLNSIHNLTYFLNIIFGARKAIHGGYFFNYKQQVEQLYCN

SEQ ID NO: 56710 - protein, 377 aa, Lawsonibacter asaccharolyticus
  misc_feature (1)..(377): tr|A0A2P2FBA8|A0A2P2FBA8_9FIRM Queuine tRNA-ribosyltran sferase OS=Lawsonibacter asaccharolyticus OX=2108523 GN =tgt PE=3 SV=1
MFQILKTEGRARRGVFTCAHGTAQTPVFMNVGTQGAIKGAVSSHDLKTLGCQIELSNTYHLHLRPGDGVVRQLGGLHRFMDWDGPILTDSGGFQVFSLSGLRKITEEGVTFASHIDGRRIFMGPEESMQIQSNLGSDIAMAFDECIENPAPFDYVEASCARTYRWLERCVAEHQRLNRQPGCVNPQQMLFGINQGGTYPELRVRHMEQIAQLPCDGFAIGGLAVGEPTQTMYDIIDAVEPHMPREKPRYLMGVGTPSNIIEGVARGIDFFDCVMPARNARHGKLFTWEGTINIKNEKYKLDDRPIDPACTCPTCAAFSRAYVRHLLAAGEMLAMRLAVMHNLHFYNELMARIRQALDEGRFEAFRAEYSEKLGRPAP

SEQ ID NO: 56711 - protein, 376 aa, Leadbetterella byssophila
  misc_feature (1)..(376): tr|E4RSI7|E4RSI7_LEAB4 Queuine tRNA-ribosyltransferase OS=Leadbetterella byssophila (strain DSM 17132 / KACC 1 1308 / 4M15) OX=649349 GN=tgt PE=3 SV=1
MIFEIHSTDPGSFARAGKLQTDHGEILTPIFMPVGTAGTVKGVHQRELLDDIEAQIILGNTYHLYLRPGLDILRKAGGLHKFNGWSKPILTDSGGYQVFSLKEIRKITEEGVYFNSHIDGSKHLFTPEYVMDIQRVIGGDIIMAFDECPPYPCDYKYAEKSMHLTHRWLKRCVERIQTTEPLYGHHQSLFPIVQGSVFPDLRVQSAEYIASQEQDGNAIGGLSVGEPAEEMYKMIEVVNAILPKDKPRYLMGVGTPENILEGIALGIDMFDCVMPTRNARNGMLFTTEGIINIRNKKWEDDFTPIDPGLGGYVSTFYSKAYLKHLMKCQELLGAQIASIHNLRFYLWLVGEARKHILAGDYASWKDQAVKKLMTRL

SEQ ID NO: 56712 - protein, 373 aa, Lebetimonas natsushimae
  misc_feature (1)..(373): tr|A0A292YD30|A0A292YD30_9PROT Queuine tRNA-ribosyltran sferase OS=Lebetimonas natsushimae OX=1936991 GN=tgt PE =3 SV=1
MEFKIDATDGRARAATIKTVHSEIKTPIFMPVGTAAAVKSLDAIDLMDVLDAKIILANTYHLYLRPGDEVVKSFGGLHGFSGYKRSFLTDSGGFQAFSLGDNVKINDNGIWFKSHIDGSSHFFSPEKVIDIEYNLNSDIMMVLDDLIALPNTKERIKKSIERTTQWAKRSLVHHIEKGAKNNLFAIVQGGTDFEFRKISAESLVGIEVEGKTFDGFAIGGLSVGEENQLMYDTIEFTTPFLPENKPRYLMGVGTPEDIIEAIERGVDMFDCVMPTRNARNGYLFTTFGTLRIKNAKYKLDDKPIDENCSCYTCRHFSRGYLNHLFKAKELTYFRLATIHNLHYYLNLVKEAREAIIDKRFNEFKKEFYSKRIN

SEQ ID NO: 56713 - protein, 375 aa, Leclercia adecarboxylata
  misc_feature (1)..(375): tr|A0A3E1ZZF2|A0A3E1ZZF2_9ENTR Queuine tRNA-ribosyltran sferase OS=Leclercia adecarboxylata OX=83655 GN=tgt PE= 3 SV=1
MKFELDTTDGRARRGRLVFDRGVVETPAFMPVGTYGTVKGMTPEEVEATGAQIILGNTFHLWLRPGQEVMKLHGDLHDFMQWKGPILTDSGGFQVFSLGDIRKITEKGVHFRNPINGDPIFLDPEKSMEIQYDLGSDIVMIFDECTPYPADWDYAKRSMEMSLRWAKRSRDRFDGLGNKNALFGIIQGSVYEDLRDISVKGLVEIGFDGYAVGGLAVGEPKEDMHRILEHVCPQIPTDKPRYLMGVGKPEDLVEGVRRGIDMFDCVMPTRNARNGHLFVTDGVVKIRNAKHKSDTSTLDAECDCYTCRNYSRAYLHHLDRCNEILGARLNTIHNLRYYQRLMAGLRKAIEEGKLESFVTDFYQRQGREVPPLNVD

SEQ ID NO: 56714 - protein, 375 aa, Leclercia adecarboxylata
  misc_feature (1)..(375): tr|A0A514VE98|A0A514VE98_9ENTR Queuine tRNA-ribosyltran sferase OS=Leclercia adecarboxylata OX=83655 GN=tgt PE= 3 SV=1
MKFELDTTDGRARRGRLVFDRGVVETPAFMPVGTYGTVKGMTPEEVEATGAQIILGNTFHLWLRPGQEVMKLHGDLHDFMQWKGPILTDSGGFQVFSLGDIRKITEKGVHFRNPINGDPIFLDPEKSMEIQYDLGSDIVMIFDECTPYPADWDYAKRSMEMSLRWAKRSRDRFDGLGNKNALFGIIQGSVYEDLRDISVKGLVEIGFDGYAVGGLAVGEPKEDMHRILEHVCPQIPTDKPRYLMGVGKPEDLVEGVRRGIDMFDCVMPTRNARNGHLFVTDGVVKIRNAKHKSDTSTLDAECDCYTCRNYSRAYLHHLDRCNEILGARLNTIHNLRYYQRLMAGLRKAIEEGKLESFVTDFYQRQGRDVPPLNVD

SEQ ID NO: 56715 - protein, 375 aa, Leclercia sp.
  misc_feature (1)..(375): tr|A0A345CDY9|A0A345CDY9_9ENTR Queuine tRNA-ribosyltran sferase OS=Leclercia sp. W17 OX=2282309 GN=tgt PE=3 SV= 1
MKFELDTTDGRARRGRLVFDRGVVETPAFMPVGTYGTVKGMTPEEVEATGAQIILGNTFHLWLRPGQEIMKLHGDLHDFMQWKGPILTDSGGFQVFSLGDIRKITEKGVHFRNPINGDPIFLDPEKSMEIQYDLGSDIVMIFDECTPYPADWDYAKRSMEMSLRWAKRSRDRFDSLGNKNALFGIIQGSVYEDLRDISVKGLVEIGFDGYAVGGLAVGEPKEDMHRILEHVCPQIPTDKPRYLMGVGKPEDLVEGVRRGIDMFDCVMPTRNARNGHLFVTDGVVKIRNAKHKSDTSPLDAECDCYTCRNYSRAYLHHLDRCNEILGARLNTIHNLRYYQRLMAGLRKAIEEGKLESFVTDFYQRQGRDVPPLNVD

SEQ ID NO: 56716 - protein, 375 aa, Leclercia sp.; identical to SEQ ID NO: 54949
  misc_feature (1)..(375): tr|A0A0J6MCY0|A0A0J6MCY0_9ENTR Queuine tRNA-ribosyltran sferase OS=Leclercia sp. LK8 OX=1628210 GN=tgt PE=3 SV= 1

SEQ ID NO: 56717 - protein, 376 aa, Leeuwenhoekiella aequorea
  misc_feature (1)..(376): tr|A0A4Q0P3A0|A0A4Q0P3A0_9FLAO Queuine tRNA-ribosyltran sferase OS=Leeuwenhoekiella aequorea OX=283736 GN=tgt P E=3 SV=1
MQFNLLNTDAGSQARAGTITTNHGTIETPIFMPVGTVGTVKGVHQRELKEDINPDIILGNTYHLYLRPQIDILEKAGGLHKFMNWDRNILTDSGGYQVYSLSANRKIKEEGVKFKSHIDGSVHLFTPERVMEIQRSIGADIIMAFDECTPYPCDYNYAKRSMHMTHRWLDRCINHLDKTPVKYGYDQAFFPIVQGSTYKDLRQQSAEYIANSGAVGNAIGGLSVGEPAEEMYAMTEIVTAILPKEKPRYLMGVGTPINILENIALGIDMFDCVMPTRNGRNGTLFTQHGSINIKNKKWEADFSPLDPDGTTWVDNAYSKAYVRHLFSVNEILGRQIGTIHNLGFYMWLVREARKHIIAGDFYSWKEKMVKQMDKRL

SEQ ID NO: 56718 - protein, 376 aa, Leeuwenhoekiella blandensis
  misc_feature (1)..(376): tr|A3XJ99|A3XJ99_LEEBM Queuine tRNA-ribosyltransferase OS=Leeuwenhoekiella blandensis (strain CECT 7118 / CCUG 51940 / MED217) OX=398720 GN=tgt PE=3 SV=1
MQFNLVTKDAASKARAGAITTDHGTIETPIFMPVGTVATVKGVHQRELEQDINPDIILGNTYHLYLRPQTEILEKAGGLHKFMNWDRNILTDSGGYQVYSLSANRKIKEEGVKFKSHIDGSFHMFTPERVMEIQRSIGADIIMAFDECTPYPCDYNYAKRSMHMTHRWLDRCIDHLAKTPVKYGYDQAFFPIVQGSTYKDLRKQSAEYIANSGAVGNAIGGLSVGEPAEEMYAMTEIVTDILPEDKPRYLMGVGTPINILENIALGVDMFDCVMPTRNGRNGTLFTQHGTINIKNKKWEDDFSPLDPDGTTWVDTAYSKAYVRHLFSVNEILGRQIGTIHNLGFYMWLVREARKHIIAGDFYTWKEKMVKQMDKRL

SEQ ID NO: 56719 - protein, 376 aa, Leeuwenhoekiella marinoflava
  misc_feature (1)..(376): tr|A0A4Q0PKL5|A0A4Q0PKL5_9FLAO Queuine tRNA-ribosyltran sferase OS=Leeuwenhoekiella marinoflava OX=988 GN=tgt P E=3 SV=1
MQFNLVTKDAASKARAGAITTDHGTIETPIFMPVGTVATVKGVHQRELEQDISPDIILGNTYHLYLRPQTEILEKAGGLHKFMNWDRNILTDSGGYQVYSLSANRKIKEEGVKFKSHIDGSFHMFTPERVMEIQRSIGADIIMAFDECTPYPCDYNYAKRSMHMTHRWLDRCINHLEKTPVKYGYDQAFFPIVQGSTYKDLRKQSAEYIANSGAVGNAIGGLSVGEPAEEMYAMTEIVTEILPEEKPRYLMGVGTPINILENIALGVDMFDCVMPTRNGRNGTLFTQHGTINIKNKKWEDDFSPLDPDGTTWVDAAYSKAYVRHLFTVSEALGRQIGTLHNLGFYMWLVREARKHIIAGDFYTWKEKMVKQMDKRL

SEQ ID NO: 56720 - protein, 376 aa, Leeuwenhoekiella nanhaiensis
  misc_feature (1)..(376): tr|A0A2G1VRC2|A0A2G1VRC2_9FLAO Queuine tRNA-ribosyltran sferase OS=Leeuwenhoekiella nanhaiensis OX=1655491 GN=t gt PE=3 SV=1
MQFELVSTDAASKARAGTLTTDHGTIETPIFMPVGTVGTVKGVHQRELTQDIDPDIILGNTYHLYLRPQTTILEKAGGLHKFMNWDRNILTDSGGYQVYSLSANRKIKEEGVKFKSHIDGSFHMFTPERVMEIQRSIGADIIMAFDECTPYPCDYNYAKRSMHMTHRWLDRCIKHLAKTPVKYGYDQAFFPIVQGSTYKDLRKQSAEYIANSGAVGNAIGGLSVGEPAEEMYAMTEIVTDILPFEKPRYLMGVGTPINILENIALGVDMFDCVMPTRNGRNGTLFTQHGTINIKNKKWEDDFSPLDPDGTTWVDTAYSKAYVRHLFSVNEILGRQIGTIHNLGFYMWLVREARKHIIAGDFNAWKEKMVKQMDKRL

SEQ ID NO: 56721 - protein, 376 aa, Leeuwenhoekiella palythoae
  misc_feature (1)..(376): tr|A0A1M5ZHV4|A0A1M5ZHV4_9FLAO Queuine tRNA-ribosyltran sferase OS=Leeuwenhoekiella palythoae OX=573501 GN=tgt PE=3 SV=1
MLFNLVTKDAASKARAGAITTDHGTIETPIFMPVGTVATVKGVHQRELEQDINPDIILGNTYHLYLRPQTEILEKAGGLHKFMNWDRNILTDSGGYQVYSLSANRKIKEEGVKFKSHIDGSFHMFTPERVMEIQRSIGADIIMAFDECTPYPCDYNYAKRSMHMTHRWLDRCINHLAKTPVKYGYDQAFFPIVQGSTYKDLRKQSAEYIANSGAVGNAIGGLSVGEPAEEMYAMTEVVTEILPEDKPRYLMGVGTPINILENIALGIDMFDCVMPTRNGRNGTLFTQHGTINIKNKKWEADFSALDPDGTTWVDTAYSKAYVRHLFSVNEILGRQIGTIHNLGFYMWLVREARKHIIAGDFYSWKEKMVKQMDKRL

SEQ ID NO: 56722 - protein, 376 aa, Leeuwenhoekiella polynyae
  misc_feature (1)..(376): tr|A0A4V1KRY8|A0A4V1KRY8_9FLAO Queuine tRNA-ribosyltran sferase OS=Leeuwenhoekiella polynyae OX=1550906 GN=tgt PE=3 SV=1
MRFNLVTKDAASKARAGAIITDHGTIDTPIFMPVGTVATVKGVHQRELEQDINPDIILGNTYHLYLRPQTEILEKAGGLHKFMNWDRNILTDSGGYQVYSLSANRKIKEEGVKFKSHIDGSFHMFTPERVMEIQRTIGADIIMAFDECTPYPCDYNYAKRSMHMTHRWLDRCISHLEKTPVKYGYDQAFFPIVQGSTYKDLRKQSAEYIANSGAVGNAIGGLSVGEPAEEMYAMTEIVTEILPEDKPRYLMGVGTPINILENIALGVDMFDCVMPTRNGRNGTLFTQHGTINIKNKKWEDDFSPLDPDGTTWVDAAYSKAYVRHLFTVSEALGRQIGTLHNLGFYMWLVREARKHIIAGDFYTWKEKMVKQMDKRL

SEQ ID NO: 56723 - protein, 376 aa, Leeuwenhoekiella sp.
  misc_feature (1)..(376): tr|A0A2E5GQU6|A0A2E5GQU6_9FLAO Queuine tRNA-ribosyltran sferase OS=Leeuwenhoekiella sp. OX=1977054 GN=tgt PE=3 SV=1
MQFNLVTKDAASKARAGAITTDHGTIETPIFMPVGTVATVKGVHQRELEQDINPDIILGNTYHLYLRPQTEILEKAGGLHKFMNWDRNILTDSGGYQVYSLSANRKIKEEGVKFKSHIDGSFHMFTPERVMEIQRSIGADIIMAFDECTPYPCDYNYAKRSMHMTHRWLDRCVNHLAKTPVKYGYDQAFFPIVQGSTYKDLRKQSAEYIANSGAVGNAIGGLSVGEPAEEMYAMTEVVTEILPEDKPRYLMGVGTPINILENIALGIDMFDCVMPTRNGRNGTLFTQHGTINIKNKKWEADFSALDPDGTTWVDTAYSKAYVRHLFSVNEILGRQIGTIHNLGFYMWLVREARKHIIAGDFYSWKEKMVKQMDKRL

SEQ ID NO: 56724 - protein, 376 aa, Leeuwenhoekiella sp.
  misc_feature (1)..(376): tr|A0A4Q0NWA0|A0A4Q0NWA0_9FLAO Queuine tRNA-ribosyltran sferase OS=Leeuwenhoekiella sp. R-50232 OX=2249425 GN=t gt PE=3 SV=1
MLFNLVTKDAASKARAGAITTDHGTIETPIFMPVGTVATVKGVHQRELEQDINPDIILGNTYHLYLRPQTEILEKAGGLHKFMNWDRNILTDSGGYQVYSLSANRKIKEEGVKFKSHIDGSFHMFTPERVMEIQRTIGADIIMAFDECTPYPCDYNYAKRSMHMTHRWLDRCINHLAKTPVKYGYDQAFFPIVQGSTYKDLRKQSAEYIANSGAVGNAIGGLSVGEPAEEMYAMTEIVTEILPEDKPRYLMGVGTPINILENIALGVDMFDCVMPTRNGRNGTLFTQHGTINIKNKKWEDDFSPLDPDGTTWVDTAYSKAYVRHLFTVSEALGRQIGTLHNLGFYMWLVREARKHIIAGDFYIWKEKMVKQMDKRL

SEQ ID NO: 56725 - protein, 265 aa, Legionella adelaidensis
  misc_feature (1)..(265): tr|A0A0W0R1I1|A0A0W0R1I1_9GAMM Queuine tRNA-ribosyltran sferase OS=Legionella adelaidensis OX=45056 GN=tgt PE=4 SV=1
MSIIPIITSKEGASLTFANWLEAGVEKVACYLSDLLIKPGIQLLKERPLKQYISWPGEIALNLDGLKANDEGVIKIRSPYDGSIISTTTSEILALVISLKPEKVIIPERFCNKMNDFLEQIPKEIFVYVSEKCLPINSKKTYGIYLRYQHQDFTEFLEVIKSYRDYSCYVSGDFDFYALERLKEKKVSIETDFLAKEGVQGFVISQGNLVDLKDEAYSLDFEKIDNACQCPSCNLNFTKAYLHHLYFNTPLLCHRLLIQHNAWNL

SEQ ID NO: 56726 - protein, 386 aa, Legionella adelaidensis
  misc_feature (1)..(386): tr|A0A0W0R607|A0A0W0R607_9GAMM Queuine tRNA-ribosyltran sferase OS=Legionella adelaidensis OX=45056 GN=tgt PE=3 SV=1
MSIFRSEILYRCKYNSARVTKITTAHGEFLTPVFMPVGTRAGVNNMTPLELKTAGSQIILGGNTYHMLCAPGMEVIKKAGGMHLFMGWDGPMLTDSGGFQVFSLSKNKEICFIDEKGAHFRLPNSSTLIHMTPEMSIETQKIIGADIIMAFDQCTPDSCSREEVQHIMQRTHRWLKQSVAYHQDHPLSSYGYPQALFGIVQGGIYEDLRQESADFVSTMNTDGVAIGGETVGFDMPKTVELLRWIQKSLPENKPRYSMGVGMSPQDLLDVVAWGVDMFDCVAPTRNARHGALYAGEVIKKNNWLVFQSEHPDCRLQIKKAQYANDLSPIMAECKCYTCLNYSRSYLHHLFKQKATAFTALASIHNIHVLHDVCAKMRSFIIENPQD

SEQ ID NO: 56727 - protein, 386 aa, Legionella anisa
  misc_feature (1)..(386): tr|A0A2Z3KSU5|A0A2Z3KSU5_9GAMM Queuine tRNA-ribosyltran sferase OS=Legionella anisa OX=28082 GN=DLD14_01485 PE= 3 SV=1
MKTFSCDVLYKHSATQARVTRVTTAHGEFITPVFMPVGTRAGVNNMTPVELHDAHSQIILGGNTYHMLCAPGMDVIEKAGGMHSFMGWHGPMLTDSGGFQVFSLSKNKEICTIDEEGAHFRLPNSGRLIHMTPEMSLETQKIIGADIIMAFDQCTPDSCTKDEVNHIMTRTHRWLKQSMQYHQQYPNSRYGYEQALFGIIQGGTFKDLRRESADFVSSMNTEGIAIGGETIGFDMKTTVEVIRWVRDYLPENKPRYTMGVGMSPQDLLDVVAEGVDMFDCVAPTRNARHGALYCGQLIQDGNWLRFVSEYENERIQIKKSCFADDMSPIMAQCSCYTCLNYSRSYLHQLAKQKTNLFTALASIHNVHVMHDVCDKMRELIMSDSLN

SEQ ID NO: 56728 - protein, 282 aa, Legionella beliardensis
  misc_feature (1)..(282): tr|A0A378I346|A0A378I346_9GAMM Queuine tRNA-ribosyltran sferase OS=Legionella beliardensis OX=91822 GN=NCTC1331 5_01892 PE=4 SV=1
MQQRQGTLVPVLTSQAGSCLTFANWQDASVTTIAYQLDALMIKPGVAFLKKLIQLRDYISWPGTIVLNAVLPPANSNGIYLIRSTYDGQLVQLSIQELASLIAELKPNKVLLPLDSLTFFNEFWQTLVTETDIELYFPQGEPSHLNLDHLNYYGIYKQQSFKDFFNDVQKLDKPMYLLGDFNLAQMQELLENKHTVETNRPALDGMMGLFYSREKDEQLTIIAQEMSMDYQTLDNSCQCKTCSAQLTRAYLHHLLGQTPLLAQRYLVQHNLYFCQNYIINQN

SEQ ID NO: 56729 - protein, 384 aa, Legionella beliardensis
  misc_feature (1)..(384): tr|A0A378I3W7|A0A378I3W7_9GAMM Queuine tRNA-ribosyltran sferase OS=Legionella beliardensis OX=91822 GN=tgt PE=3 SV=1
MTNFACQVIYKHKYTHARVTKVSTAHGDFITPAFMPVGTRAGVNNMTSAELIAAGSQIILGGNTYHMLCAPGMEIIRQAGGMHPFMGWQGPMLTDSGGFQVFSLSKNKEICIIDEEGAHFKLPDTNRIIHMTPEMSLATQKIIGADIIMAFDQCTPDDCSREEVERIMVRTHRWLKQSIHYHQEHPHSIYGFPQALFGIVQGGIHRDLRRESAQYIVSMNLDGIAIGGETIGFDMKKTVEIIHWIREFLPTNKPRYTMGVGMSPQDLLDVVAEGIDMFDCVAPTRNARHGALYCGEIIKENNWLRFASEFDNHRLQIKKAVFADDLSPIMATCTCYTCKHYSRAALHHLFKQKTNLFTALASIHNIHVMHNVCVKMRDLIATNC

SEQ ID NO: 56730 - protein, 386 aa, Legionella birminghamensis
  misc_feature (1)..(386): tr|A0A378ID11|A0A378ID11_9GAMM Queuine tRNA-ribosyltran sferase OS=Legionella birminghamensis OX=28083 GN=tgt_2 PE=3 SV=1
MSTFQCEVLAEYPHNKARIIRVNTPHGSFTSPVFMPVGTRAGVNNMTPWELQEAGSQIILGGNTYHMLCAPGMEVIEQAGGMHPFMGWQGPMLTDSGGFQVFSLSKNREICRIDEEGAHFQLPGGSRLIHMTPEMSLETQKIIGADIIMAFDQCTPDASSYEEVVHIMERTHRWLQQSMDYHQQYPCSRYGAKQALFGIVQGGIFEELRCESAKFVASMDLDGVAIGGETVGFDMKKTVEIIQWVRQYLPENKPRYTMGVGMSPQDLLDVVAEGIDMFDCVAPTRNARHGALYSGQIVKEGHWLRFASDYENHRLQIKKSCFANDLAPVMESCLCYTCKTHSRAYLHHLFKQKSNVFTALASIHNIHVMHEVCTQMRNLIFQATNH

SEQ ID NO: 56731 - protein, 279 aa, Legionella birminghamensis
  misc_feature (1)..(279): tr|A0A378I7K1|A0A378I7K1_9GAMM Queuine tRNA-ribosyltran sferase OS=Legionella birminghamensis OX=28083 GN=tgt_1 PE=4 SV=1
MSGNNQFIPVITTAAGTCLTMANWKAAGVSQITFYLDELLMKPGLAFFEGMNVSLQSYCGWSGDIVLNLSSLQIKNDQIVIRSHYDGQIIRIDLPVLAGLISTLNPAYLVLPITNGSLEVLWRDLPASIKTISSSKENADSRHHSSYLQFSDSQCFEAFYNIAQASKQPLYIAGRFNWQQFQRLAQLPLHTLESDQPASDALLGQVYTESLVLDIQDETMRDDHQPIDRNCGCEACRQGLTRAYFHHLLQHTPLLCQRFLIQHNIHYCLHHLPEQQITI

SEQ ID NO: 56732 - protein, 383 aa, Legionella brunensis
  misc_feature (1)..(383): tr|A0A0W0SPE6|A0A0W0SPE6_9GAMM Queuine tRNA-ribosyltran sferase OS=Legionella brunensis OX=29422 GN=tgt PE=3 SV =1
MSNQFKCEIIKRHSHTQARVTRVSTPHGTFVTPSFMPVGTRAGVNNMTPNELLQAGSQIILGGNTYHMLCAPGMKVIEEAGGMHPFMGWHGPMLTDSGGFQVFSLSKNKEICVIDEEGAHFKLPDSERLIHMTPEMSLETQKIIGADIIMAFDQCTPDNCSRDEVQKIMTRTHRWLRQSVAYHQQFPTSRYGAHQALFGIIQGGIYEDLRRESAEFIASMNTDGIAIGGETIGFNMETTVEVIRWVRSFLPENKPRYTMGVGMSPQDLLEVVAEGIDMFDCVAPTRNARHGALYCGEVAKVGNWLKFESPYENERIQIKKACFAEDLEPVMANCSCYTCKHYSRASLHHLCKQKANVFTALASIHNIHVMHDVCAKMRDLMMA

SEQ ID NO: 56733 - protein, 277 aa, Legionella busanensis
  misc_feature (1)..(277): tr|A0A378JKW9|A0A378JKW9_9GAMM Queuine tRNA-ribosyltran sferase OS=Legionella busanensis OX=190655 GN=tgt_1 PE= 4 SV=1
MQENAVSHYIPLLSSQAGSCLTFANWQNAGAKIVAYQLDELLVKPGLPVLQKLTHLQDYLAWSGDLVLNALLKPVNAKGVYEIRSSYDGQLVQISVLELSSLIKTLKPNKVLLPLGSAPYFKQFWQPLLAEIELYLHFEEAKDDITTTGYYYSFTEQPFDYLYKNLPKFNKLYLIGAFQLHEMQLLLQNNYSVQSNLPAEDGMQGVFYDEKEKFNILEQTFEQDYQTLKHNCQCETCNRQLTRAYLHHLLQHTPLLAQRYLIQHNVYYCQNYLINQN

SEQ ID NO: 56734 - protein, 384 aa, Legionella busanensis
  misc_feature (1)..(384): tr|A0A378JQP6|A0A378JQP6_9GAMM Queuine tRNA-ribosyltran sferase OS=Legionella busanensis OX=190655 GN=tgt_2 PE= 3 SV=1
MTRFTCQVLHNHQHTKARITKIKTAHGDFITPTFMPVGTRAGVNNMTIPELTAAGSQIILGGNTYHMLCAPGMDIIKQAGGMHPFMGWHGPMLTDSGGFQVFSLSKNKEICTIDEEGAHFKLPRVERIIHMTPEMSLATQKIIGADIIMAFDQCTPDDCSRDEVQRIMTRTHRWLKQSLNYHQEHPNSIYGFPQALFGIVQGSIHQDLRRESAQYVASMNTDGIAIGGETIGFDMVKTVEVIRWVREFLPENKPRYTMGVGMSPQDLLDVVAEGIDMFDCVAPTRNARHGALYCGEVIKENNWLRFASDYTNHRLQIKKASFADDLSPVMPTCTCYTCKNYSRAALHHLFKQRSNLFTALASIHNIHVMHDVCAKMRDLIASNV

SEQ ID NO: 56735 - protein, 386 aa, Legionella cherrii
  misc_feature (1)..(386): tr|A0A0W0SKJ0|A0A0W0SKJ0_9GAMM Queuine tRNA-ribosyltran sferase OS=Legionella cherrii OX=28084 GN=tgt PE=3 SV=1
MNTFSCTVLHKHAATQARVTRVTTAHGEFITPVFMPVGTRAGVNNMTPAELRDAHSQIILGGNTYHMLCAPGMEIIEKAGGMHPFMGWHGPMLTDSGGFQVFSLSKNKEICTIDEQGAHFTLPGSQRLIHMTPEMSLETQKIIGADIIMAFDQCTPDSCTKDEVQHIMNRTHRWLKQSIQYHHQHPNSRYGYQQALFGIIQGGTFKDLRRESADFISSMNTDGIAIGGETIGFDMKTTVEVIRWVREYLPENKPRYTMGVGMSPQDLLDVVAEGIDMFDCVAPTRNARHGSLYCGELIREGNWLRFASEYENERIQIKKSCFAEDMSPIMAQCSCYTCQNYSRSYLHQLAKQKTNLFTALASIHNVHVMHDVCDKMRELIINERSN

SEQ ID NO: 56736 - protein, 277 aa, Legionella cincinnatiensis
  misc_feature (1)..(277): tr|A0A378IMF0|A0A378IMF0_9GAMM Queuine tRNA-ribosyltran sferase OS=Legionella cincinnatiensis OX=28085 GN=tgt_2 PE=4 SV=1
MFAVTQNFIPILTSEAGLCLTAKNWQEVNVSAASYSLESLLYKPGMDVLKKITDIGRYLAWPGYIIFNGMSLVVNKEGLFVLKSPYDGSKIKFTLVDLLELIQHLNPTAIMLPKNIMNDFPQFWDHWNCSIFPFFHENDVEKQNTNQSYGVYFNVEASKLDWQQLAHWSNIPRYVIGNFEPRLIQELRHQGVAFIETDEPAKAALQGKVYTQSGTIDLTDLNIQMQFEPIDAKCICPTCSQQFSRAYLHHLLQHTPLLCQRFLIQHNVFYLQNASCN

SEQ ID NO: 56737 - protein, 386 aa, Legionella cincinnatiensis
  misc_feature (1)..(386): tr|A0A378IEV1|A0A378IEV1_9GAMM Queuine tRNA-ribosyltran sferase OS=Legionella cincinnatiensis OX=28085 GN=tgt_1 PE=3 SV=1
MKTFSCQVLHKHSATQARVTRIVTAHGEFITPVFMPVGTRAGVNNMTPIELHEAHSQIILGGNTYHMLCAPGMKVIEQAGGMHPFMGWHGPMLTDSGGFQVFSLSKNNEICTIDEEGAHFRLPGSQGLIHMTPEMSLETQKIIGADIIMAFDQCTPDSCTRDEVSHIMTRTHRWLKQSMEYHRQYPNSRYGYAQALFGIIQGGTFKDLRRESADFVASMNPEGIAIGGETIGFNMATTVEVIRWVRDYLPENKPRYTMGVGMSPQDLLDVVAEGIDMFDCVAPTRNARHGSLYCGELVREGNWMRFVSEYENERIQIKKSCFADDMSPIMAQCTCYTCRHYSRAYLHQLSKQKTNLFTALASIHNVHVMHDVCDKMRDLIMNEGVT

SEQ ID NO: 56738 - protein, 272 aa, Legionella clemsonensis
  misc_feature (1)..(272): tr|A0A222P3Y5|A0A222P3Y5_9GAMM Queuine tRNA-ribosyltran sferase OS=Legionella clemsonensis OX=1867846 GN=tgt_2 PE=4 SV=1
MNQRIVMPMYIPTLTTEAGSCLTLANWQEVGVRAVSYHLEALLLKPGISLLKSLPHLKAYIPWQGSIVLNAALPPAKQGQYTVRSPYDGSVMQISQDEVACLVEKLQPDIVVLPIDFDPGLMRSFTKTSQIFTIPELHVEQQFGWYLPYEPSLSFIALQEKIKRYNTTPIYLAGDFDLQQLAALTQYDSLMIESNLPAQHAFSGKVYYEGGVLDLCADEIAHQQVVIDRHCKCPTCEQQLTRAYLHHLINQTPLLCQRLLIQHNAYYYQNCY

SEQ ID NO: 56739 - protein, 383 aa, Legionella clemsonensis
  misc_feature (1)..(383): tr|A0A222NZN7|A0A222NZN7_9GAMM Queuine tRNA-ribosyltran sferase OS=Legionella clemsonensis OX=1867846 GN=tgt_1 PE=3 SV=1
MTNQFHCEVLKRHTYTQARVTRVSTPHGDFITPSFMPVGTRAGVNNMTPQELLRAGSQIILGGNTYHMLCAPGMKVIEEAGGMHAFMGWHGPMLTDSGGFQVFSLSKNKEICVIDEEGAHFKLPGSNRLIHMTPEMSLETQKIIGADIIMAFDQCTPDSCARDEVQHIMTRTHRWLKQSVAYHQQFPTSRYGARQALFGIIQGGIYEDLRRESAEFIASMDTDGLAIGGETIGFNMDTTVEVIRWIREFLPENKPRYTMGVGMSPQDLLDVVAEGIDMFDCVAPTRNARHGALYCGEIVKKGHWLKFESPYENERMQIKKACFAQDLQPIMESCSCYTCTHYSRAFLYHLSKQKANLFTALASIHNIHVMHEVCARMRDLIMA

SEQ ID NO: 56740 - protein, 384 aa, Legionella donaldsonii
  misc_feature (1)..(384): tr|A0A378J092|A0A378J092_9GAMM Queuine tRNA-ribosyltran sferase OS=Legionella donaldsonii OX=45060 GN=tgt_1 PE= 3 SV=1
MTNKFHCEVLKNYPFNKARVTRVNTPHGDFVTPVFMPVGTRAGVNNMTPCELLEAGSQIILGGNTYHMLCAPGMQIIEQAGGMHRFMGWQGPMLTDSGGFQVFSLSKNKEICTIDEEGAHFKLPGTQRLIHMTPEMSLETQKIIGADIIMAFDQCTPDSCSREEVQKIMVRTHRWLKQSIAYHERYPNSRYGASQALFGIVQGGIYEELRRESADFVSSMHTDGIAIGGETVGFDMPTTVEIIRWVREYLPENKPRYTMGVGMSPQDLLDVVAEGIDMFDCVAPTRNARHGALYCGELLPEGQWLRFVSSYENQRIQIKKACFADDTSPVMASCLCYTCRNYTRAFLHHLSKQKANLFTALASIHNIHVMHDVCAKMRDLILAS

SEQ ID NO: 56741 - protein, 282 aa, Legionella donaldsonii
  misc_feature (1)..(282): tr|A0A378J2A5|A0A378J2A5_9GAMM Queuine tRNA-ribosyltran sferase OS=Legionella donaldsonii OX=45060 GN=tgt_2 PE= 4 SV=1
MINKKQGLGLTPVLTAEAGNCLTLANWQEVGIKAGAYYLDALLMKPGVVCLKKLAPLSHYTGWQGITVLNASLLTARNGVYTIRSCYDGSRIITDQNELTSLISLLQADRVVLPYGILNNSNLKVWQTLAETSRLFVSVDEHAPIYPDWLLGRYLRYDCTKPFSDFMQELRQHADAPLYLSGEFTSEQLHELARYPVWHVESDKPARDAMEGRVYNKEGIIDILDSQQAEDYRPIADCSCPTCQQSLTRAYLHHLLGHTPLLCQRFLIQHNVHYYQQLLLPS

SEQ ID NO: 56742 - protein, 341 aa, Legionella drancourtii
  misc_feature (1)..(341): tr|G9ESI0|G9ESI0_9GAMM Queuine tRNA-ribosyltransferase OS=Legionella drancourtii LLAP12 OX=658187 GN=LDG_8254 PE=3 SV=1
MTPNELHAAHSQIILGGNTYHMLCAPGMEVIEQAGGMHPFMGWHGPMLTDSGGFQVFSLSKNKEICTIDEEGAHFKLPGSQGLIHMTPEMSLETQKIIGADIIMAFDQCTPDSCTKDEVGQIMTRTHRWLKQSLQYHQQHPSSRYGYQQALFGIIQGGIFKDLRRESADFVSSMQTDGIAIGGETVGFDMKTTVEVIRWVRDYLPENKPRYTMGVGMSPQDLLDVVAEGIDMFDCVAPTRNARHGALYCGEVVQEGNWLRFASEHENERIQIKKSCFADDPSPIMAHCTCYTCCNYSRSYLHQLFKQKANLFTALASIHNIHVMHDVCDKMRELVINSQEI

SEQ ID NO: 56743 - protein, 383 aa, Legionella drozanskii
  misc_feature (1)..(383): tr|A0A0W0SVE1|A0A0W0SVE1_9GAMM Queuine tRNA-ribosyltran sferase OS=Legionella drozanskii LLAP-1 OX=1212489 GN=t gt_1 PE=3 SV=1
MKKFHSELIKNHAFTKARVTRVSTPHGDFITPVFMPVGTRAGVNNMTPRELVAAGSQIILGGNTYHMLCAPGMEVIEKAGGMHSFMGWHGPMLTDSGGFQVFSLSRNKEICTIDEEGAHFRLPGTTRLIHMTPEMSLETQKIIGADIIMAFDQCTPDSCSREEVQHIMRRTHRWLKQSINYHRQYPNSRYGASQALFGIVQGGIYEDLRQESAEFVASMNTDGIAIGGETVGFDMKMTVNIIRWIKDYLPENKPRYTMGVGMSPQDLLDVVAEGIDMFDCVAPTRNARHGALYCGEIVKDGNWLRFASPYENERIQIKKACFANDFSPIMPSCTCYTCQHHSRAFLHHLSKQKANLFTALATIHNIHVMHEVCAKMRDLILNS

SEQ ID NO: 56744 - protein, 390 aa, Legionella erythra
  misc_feature (1)..(390): tr|A0A0W0TQ83|A0A0W0TQ83_LEGER Queuine tRNA-ribosyltran sferase OS=Legionella erythra OX=448 GN=tgt PE=3 SV=1
MSSFHCEVLRAYPHNKARVTRVKTAHGELITPVFMPVGTRAGVNNMMPEELIEAGSQIILGGNTYHMLCAPGMDVIEKAGGMHPFMNWHGPMLTDSGGFQVFSLSRNKEICTIDEEGAHFKLPMGDRIIHMTPEMSLETQKIIGADIIMAFDQCTPDALSFEEAEQIMTRTHRWLKQSIAYHQQHPASRYGYSQALFGIIQGGIYEDLRRESAAFVSAVNTDGVAIGGETVGFDMEKTVEIVRWVHAFLPENKPRYTMGVGMSPQDLLDVVKEGIDMFDCVAPTRNARHGALYCGEVIKEGHWLKFDSPHENQRIQIKKAQYAHDDNPIMPDCQCYTCRHYSRAFLHHLFKQKAVLFTALASIHNIHVMHDVCAKMRDLILSSSNDERHV

SEQ ID NO: 56745 - protein, 279 aa, Legionella fallonii
  misc_feature (1)..(279): tr|A0A098G513|A0A098G513_9GAMM Queuine tRNA-ribosyltran sferase OS=Legionella fallonii LLAP-10 OX=1212491 GN=tg t PE=4 SV=1
MLDREQSYIPIMTSEAGLCLTSANWQEAKINTMSFHLDSLLLKPGYDFLKKIHDLAQYLGWSGGLILNATKCVANKGGVFTLVSPYDGSKIKLSYEQLVELIQHIKPDAVLLPLKIIREFPQLWDNWNDAIIPFIAAEDLSQQELQRQHGVYFNINHSSSNALADELRKWSALPRYIIGHGDLANLDELKKDESLWIESDAPAAMAMRGIVFSQQGNLHLIEDVYAMQFTTIDAACACPSCSQRFTKAYLHHLYLHTPLLCQRFLIQHNVYYAQNYVRN

SEQ ID NO: 56746 - protein, 383 aa, Legionella fallonii
  misc_feature (1)..(383): tr|A0A098G1F0|A0A098G1F0_9GAMM Queuine tRNA-ribosyltran sferase OS=Legionella fallonii LLAP-10 OX=1212491 GN=tg t PE=3 SV=1
MKSFSCEVLYRHSGTNARVTRVTTSHGEFITPVFMPVGTRAGVNNMTPTELQAAGSQIILGGNTYHMLCAPGMSVIEKAGGMHHFMGWHGPMLTDSGGFQVFSLSKNKEICTIDEEGAHFKLPGNQRLIHMTPEMSLETQKIIGADIIMAFDQCTPDSCTKDEVRLIMTRTHRWLKQSVAYHQQHPNSRYDYPQALFGIVQGGVFEDLRRESADFVSSMDTDGIAIGGETIGFDMDTTVEVIRWVRDYLPEYKPRYTMGVGMSPQDLLDVVAEGIDMFDCVAPTRNARHGALYCGELVTDGSWLRFASEYDNERIQIKKSCFANDLSPVMKTCRCYTCLNYSRACLHHLSKQKANLFTALASIHNVHVLHDVCAKMRDLIMSS

SEQ ID NO: 56747 - protein, 282 aa, Legionella feeleii
  misc_feature (1)..(282): tr|A0A378IVY8|A0A378IVY8_9GAMM Queuine tRNA-ribosyltran sferase OS=Legionella feeleii OX=453 GN=tgt_1 PE=4 SV=1
MINKKQGSGLTPVLTSEAGSCLTLASWHEVGIKAAAYYLDALLMKPGVACLKKLAPLSNYAGWQGITVLNASLLTARNGVYTIRSCYDGSRIITDQNELTSLIGLLQADRVVLPYGILNNSNLKVWQTLAETSMLFVSVDEHPPIYPDWLLGRYMRYDCTKRFSDFMQELRQYADAPLYLSGEFTSEQLQELARYPVWHVESDKPARDAMEGRVYNKESVINILDSQQAEDYRPIADCSCPTCQQSLTRAYLHHLLGHTPLLCQRFLIQHNVHYYQHLLLPS

SEQ ID NO: 56748 - protein, 286 aa, Legionella feeleii
  misc_feature (1)..(286): tr|A0A0W0TUD4|A0A0W0TUD4_9GAMM Queuine tRNA-ribosyltran sferase OS=Legionella feeleii OX=453 GN=tgt PE=4 SV=1
MINKKQGSGLTPVLTTEAGSCLTLANWHEVGIKAAAYYLDALLMKPGVACLEKLAPLSNYAGWQGITVLNASLLTARNGVYTIRSCYDGSRIIIDQSELTSLISLLQADRVVLPYGILNNSNLKVWQTLAETSMLFVSVDEHPPIYPDWLLGRYLRYDCTKPFSDFMQELRQYADAPLYLSGEFTSEQLQELARYPVWHVESDKPARDAMEGRVYNKESVINILDSQQAEDYRPIADCSCPTCQQSLTRAYLHHLLGHTPLLCQRFLIQHNVHYYQHLLLPSLQTS

SEQ ID NO: 56749 - protein, 391 aa, Legionella geestiana
  misc_feature (1)..(391): tr|A0A0W0U2V2|A0A0W0U2V2_9GAMM Queuine tRNA-ribosyltran sferase OS=Legionella geestiana OX=45065 GN=tgt PE=3 SV =1
MPAFRCEVLCVHAHTRARVTRVHTPHGTFDTPVFMPVGTRAGVNNMTPGELRAAGSQIILGGNTYHMLCAPGMDVIRGAGGMHQLMGWNGPMLTDSGGFQVFSLSKNQEICTINETGAHFVIPETGRHIHMTPEMSLATQKTIGADIIMAFDQCTPDAATRDEAQHILTRTHRWLMQSIAYQEAHPCSDYGLEQALFGIIQGGQFADLRRESAEFVAHSGVDGVAIGGETVGFNMPATVDVLRAVHDLLPAHTSRYTMGVGMSPQDLLDVVAEGVDMFDCVAPTRNARHGALYSGRLVADGNWLRFASDFDQGRLHIKKACFASDKDPIMPGCTCYTCTHYSRACLHQLFKQKAIAFSALASIHNVHVLHAVCTGMRELILKNPQPSEEHP

SEQ ID NO: 56750 - protein, 386 aa, Legionella gratiana
  misc_feature (1)..(386): tr|A0A378J1B1|A0A378J1B1_9GAMM Queuine tRNA-ribosyltran sferase OS=Legionella gratiana OX=45066 GN=tgt_1 PE=3 S V=1
MKTFSCEVLYKHSATQARVTRVITAHGEFITPVFMPVGTRAGVNNMTPSELHEAHSQIILGGNTYHMLCAPGMKVIEQAGGMHPFMGWHGPMLTDSGGFQVFSLSKNNEICTIDEEGAHFRLPGSQGLIHMTPEMSLETQKIIGADIIMAFDQCTPDRCTKDEVSHIMTRTHRWLKQSMDYHQQHPNSRYGYEQALFGIIQGGTFNDLRRESADFVSSMNPEGIAIGGETIGFNMETTVEVIRWVRDYLPDNKPRYTMGVGMSPQDLLEVVAEGIDMFDCVAPTRNARHGSLYCGELVREGNWMRFVSEYENERIQIKKSCFAEDMSPIMAQCTCYTCRHYSRSYLHQLSKQKTNLFTALASIHNVHVMHYVCDKIRDLIMNERVT

SEQ ID NO: 56751 - protein, 274 aa, Legionella gratiana
  misc_feature (1)..(274): tr|A0A378J5N8|A0A378J5N8_9GAMM Queuine tRNA-ribosyltran sferase OS=Legionella gratiana OX=45066 GN=tgt_2 PE=4 S V=1
MFAVTQNFIPILTSEAGLCLTAKNWQEVKISAASYSLEHLLYKPGKDILKKITDIGHYLACPGFIIFNALSLVANREGFFVLKSPYDGSKIKFTFFDLLELIQHLNPKAVILPKNIINDFPAFWDHWNHSIFPFLHADDVEKQSISQLHGVYFNAEASKLNWEQFDQWSNVPRYVIGNFEPELIQHFRDKGIEFIETDEPAKAALQGKVYNRSGTIDLTDLNTQMQFEAIDAECICPTCSQQFTRAYLHHLLQHTPLLCQRFLIQHNVFYVQNT

SEQ ID NO: 56752 - protein, 383 aa, Legionella hackeliae
  misc_feature (1)..(383): tr|A0A0A8UXB7|A0A0A8UXB7_LEGHA Queuine tRNA-ribosyltran sferase OS=Legionella hackeliae OX=449 GN=tgt PE=3 SV=1
MTNRFSCEVLKRHAHSKARVTRVSTPHGYFITPAFMPVGTRAGVNNMMPHELLQAGSQIILGGNTYHMLCAPGMKVIEEAGGMHPFMGWHGPMLTDSGGFQVFSLSKNKEICVIDEEGAHFKLPGSERLIHMTPEMSLETQKIIGADIIMAFDQCTPDHCSRDEVQLIMTRTHRWLKQSVAYHQQFPTSRYGAVQALFGIIQGGVYEDLRRESAAFIASMNTDGLAIGGETIGFNMETTVEVIRWVREFLPENKPRYTMGVGMSPQDLLDVVAEGIDIFDCVAPTRNARHGALYCGEVVKTGNWLKFESPYENERIQIKKACFAHDLQPIMASCSCYTCKHYSRSFLHHLCKQKSNLFTALASIHNIHVMHDVCAKMRDLVMA

SEQ ID NO: 56753 - protein, 386 aa, Legionella israelensis
  misc_feature (1)..(386): tr|A0A0W0V298|A0A0W0V298_9GAMM Queuine tRNA-ribosyltran sferase OS=Legionella israelensis OX=454 GN=tgt PE=3 SV =1
MNRFQCKILHRHALTQARVTEITTPHGQFLTPAFMPVGTRAGVNNMTPAELRQAGSQIILGGNTYHMLCAPGMKVIEAAGGMHPFMGWDGPMLTDSGGFQIFSLSKNSEICRIDEQGAHFKLPNSGGIIHMTPEMSMETQKIIGADIIMAFDQCTPDDSTRKEVRHIMNRTHRWLRQSMAYHQKNPLSRYGHQQALFGIIQGGIYEELRCESAEFIASMNTDGIAIGGETIGFNMPATVDVIRWVRRYLPEDKPRYTMGVGMSPQDLLDVVAEGIDMFDCVAPTRNARHGALYCGEVVSDGHWLRFDSPYKHQRIQIKKASFADDLSPIMSGCQCYTCRHYSRAFLHQLIKQKAELFTALACIHNVHVLHDLCAKMRAKLENQSIY

SEQ ID NO: 56754 - protein, 386 aa, Legionella israelensis
  misc_feature (1)..(386): tr|A0A516MWU3|A0A516MWU3_9GAMM Queuine tRNA-ribosyltran sferase OS=Legionella israelensis OX=454 GN=tgt PE=3 SV =1
MNRFQCKILHRHALNQARVTEITTPHGQFLTPAFMPVGTRAGVNNMTPAELRQAGSQIILGGNTYHMLCAPGMKVIEAAGGMHPFMGWDGPMLTDSGGFQIFSLSKNSEICRIDEQGAHFKLPNSGGIIHMTPEMSMETQKIIGADIIMAFDQCTPDDSTRKEVRHIMNRTHRWLRESMAYHQKNPKSRYGHQQALFGIIQGGIYEELRCESAEFIASMNTDGIAIGGETIGFNMPATVDVIRWVRRYLPEDKPRYTMGVGMSPQDLLDVVAEGIDMFDCVAPTRNARHGALYCGEVVSDGHWLRFDSAYKHQRIQIKKASFADDLSPIMSGCQCYTCRHYSRAFLHQLIKQKAELFTALACIHNVHVLHDLCAKMRAKLENQSIY

SEQ ID NO: 56755 - protein, 384 aa, Legionella jordanis
  misc_feature (1)..(384): tr|A0A0W0VBQ5|A0A0W0VBQ5_9GAMM Queuine tRNA-ribosyltran sferase OS=Legionella jordanis OX=456 GN=tgt_1 PE=3 SV= 1
MNKPFSCEVLKSHAASKARVTQVTTPHGAFITPTFMPVGTRAGVNNMTPKELKEAGSQIILGGNTYHMLCAPGMEVIKEAGGMHEFMAWHGPMLTDSGGFQVFSLSKNKEICSIDEEGAHFRLPGSERLIHMTPEMSLETQKIIGADIIMAFDQCTPDDCSRDEVQKIMARTHRWLKQSVAYHQQHPTSLYGLPQALFGIIQGGIYEDLRKESAHFIASMNTDGLAIGGETIGFDMKKTVEVISWVRPFLPENKVRYSMGVGMSPQDLLDVVAEGIDIFDCVAPTRNARHGALYCGEVVRDGKWLKFESPFENERIQIKKACFAHDLEPIMASCLCYTCQHYSRAFLHHLSKQKANLFTALASIHNIHVMHDVCAKMRDLILAE

SEQ ID NO: 56756 - protein, 385 aa, Legionella lansingensis
  misc_feature (1)..(385): tr|A0A0W0VQJ3|A0A0W0VQJ3_9GAMM Queuine tRNA-ribosyltran sferase OS=Legionella lansingensis OX=45067 GN=tgt_2 PE =3 SV=1
MSNTFRCEVVKNHSRTQSRVVRVTTPHGVFLTPTFMPVGTRAGVNNMMPQELLAAGSQIILGGNTYHMLCSPGMKVIQEAGGMHPFMGWHGPMLTDSGGFQVFSLSKNKEICTIDEEGAHFKLPGGERLIHMTPEMSMETQKIIGADIIMAFDQCTPDHCSRDEVQHIMARTHRWLKQSVAYHQQYPTSHYGLPQALFGIIQGGVFADLRRESAEFIASMNTDGIAIGGETIGFNMETTVEVIRWVRSVLPENKVRYTMGVGMSPQDLLAVVAEGIDIFDCVAPTRNARHGALYCGEIVKHGNWLKFESPYENERIQIKKACFANDLEPVMANCLCYTCKNYSRAFLHHLAKQKASSFTALASIHNIHVMHDVCAKMRDLILTEI

SEQ ID NO: 56757 - protein, 385 aa, Legionella londiniensis
  misc_feature (1)..(385): tr|A0A0W0VSG0|A0A0W0VSG0_9GAMM Queuine tRNA-ribosyltran sferase OS=Legionella londiniensis OX=45068 GN=Llon_028 8 PE=3 SV=1
MNVFRCEVLCRHKHTRARVTKVTTPHGAFVTPVFMPVGTRAGVNNMMPGELIDAGSQIILGGNTYHMLCAPGMEIIKKARGMHEFMGWHGPMLTDSGGFQVFSLSKNKEICTIDEEGAHFRLPDSGHMIHMTPEMSMETQKIIGADIIMAFDQCTPDSADREMARHIMTRTHRWLKQSLAYHSQHPTSVYGKQQALFGIVQGGIYQDMRRESADFVASLSLDGIAVGGETIGFDMMKTVEVIRWIHEFLPEHKPRYSMGVGMSPQDLLDVVAEGIDMFDCVAPTRNARHGALYCGKTVNEGNWLKFVSEHDNGRIQIKKACYANDLDPIMADCSCYTCLHYTRAYLHHLCKQKTTLFTALASIHNIHVLHDVCAKMRNLIMTHSK

SEQ ID NO: 56758 - protein, 386 aa, Legionella longbeachae
  misc_feature (1)..(386): tr|D3HP46|D3HP46_LEGLN Queuine tRNA-ribosyltransferase OS=Legionella longbeachae serogroup 1 (strain NSW150) O X=661367 GN=tgt PE=3 SV=1
MKTFSCQVLHKHSATKARVTRVVTAHGEFITPVFMPVGTRAGVNNMTPVELHEAHSQIILGGNTYHMLCAPGMKVIEQAGGMHPFMGWHGPMLTDSGGFQVFSLSKNNEICTIDEEGAHFKLPGSQGLIHMTPEMSLETQKIIGADIIMAFDQCTPDSCTRDEVSHIMTRTHRWLKQSMDYHRQYPNSLYGYEQALFGIIQGGTFKDLRRESADFVTSMNPDGIAIGGETIGFNMVTTVEVIRWVHDYLPENKPRYTMGVGMSPQDLLDVVAEGVDMFDCVAPTRNARHGSLYCGELVREGNWLRFASEYENERIQIKKSCFADDMSPIMAQCTCYTCRHYSRAYLHQLSKQKTNLFTALASIHNVHVMHDVCDKMRDLIINESAL

SEQ ID NO: 56759 - protein, 385 aa, Legionella longbeachae
  misc_feature (1)..(385): tr|A0A378KN14|A0A378KN14_LEGLO Queuine tRNA-ribosyltran sferase OS=Legionella longbeachae OX=450 GN=tgt_1 PE=3 SV=1
MNTFHCEVIHRHKHTAARITKVITPHGEFITPVFMPVGTRAGVNNMMPSELRAAGSQIILGGNTYHMLCAPGMAVIEQAGGMHAFMGWHGPMLTDSGGFQVFSLSKNKEICTIDETGAHFLLPGSQRVIHMTPEMSLQTQKIIGADIIMAFDQCTPDHCSPAEAHQIMCRTHRWLRQSMTYHQEHPVSRYGARQALFGIVQGGIYRDLRRESADFVASMNMDGFAIGGETIGFDMEKTVEVIRWIKEFLPENKPRYTMGVGMSPQDLLDVVAEGIDMFDCVAPTRNARHGALYCGEIVKAGNWLKFASEHQNARLQIKKSCYAEDLSPIMENCACYTCRHYSRAYLHHLVKRKANLFTVLASIHNVHVLQDVCAKMRAVITEDCS

SEQ ID NO: 56760 - protein, 383 aa, Legionella maceachernii
  misc_feature (1)..(383): tr|A0A0W0W0S6|A0A0W0W0S6_9GAMM Queuine tRNA-ribosyltran sferase OS=Legionella maceachernii OX=466 GN=tgt_2 PE=3 SV=1
MNKFSSELIKHHTFTKARVTRISTPHGDFLTPVFMPVGTRAGVNNMTPRELLAAGSQIILGGNTYHMLCAPGMSVIEKAGGMHPFMGWQGPMLTDSGGFQVFSLSKNKEICTIDEKGAHFRLPGTTRLIHMTPEMSLETQKIIGADIIMAFDQCTPDQCSRDEVQHIMKRTHRWLKQSIDYHQQHPTSHYGAAQALFGIVQGGIYEDLRRESADFISSMNPDGIAIGGETIGFNMKTTIDIIRWINEYLPENKPRYTMGVGMSPQDLLDVVAEGIDMFDCVAPTRNARHGSLYCGEVVKEGNWLRFASSYENARLQIKKACFANDLSPIMSTCTCYTCQHHSRAFLHHLSKQRANLFTVLASIHNVHVMNEVCARMRDLILNS

SEQ ID NO: 56761 - protein, 394 aa, Legionella massiliensis
  misc_feature (1)..(394): tr|A0A078L1M4|A0A078L1M4_9GAMM Queuine tRNA-ribosyltran sferase OS=Legionella massiliensis OX=1034943 GN=tgt PE =3 SV=1
MNRFSTEVIKNHSYTQARVTRVSTPHGDFLTPVFMPVGTRAGVNNMTPNELQVAGSQIILGGNTYHMLCAPGMQIIEQAGGMHPFMGWHGPMLTDSGGFQVFSLSKNKEICTIDEEGAHFKLPGTERLIHMTPEMSLETQKIIGADIIMAFDQCTPDSCSRDEVQKIMTRTHRWLGQSTAYHQQHPNSRYGAAQALFGIIQGGIYQDLRQESADFVASMNTDGIAIGGETIGFNMETTIEVIRWVRQYLPQNKPRYTMGVGMSPQDLLEVVAEGIDMFDCVAPTRNARHGALYCGEVIKDGNWLRFASSYENERIQIKRACFADDLSPVMESCSCYTCQNHSRAFLHHLSKQKANLFTALASIHNVHVMHDVCAKMRNLILGSVGNWRQDQKPS

SEQ ID NO: 56762 - protein, 384 aa, Legionella moravica
  misc_feature (1)..(384): tr|A0A378JZ45|A0A378JZ45_9GAMM Queuine tRNA-ribosyltran sferase OS=Legionella moravica OX=39962 GN=tgt_2 PE=3 S V=1
MNKFSCEVLHRHAGTKARVTRVTTPHGEFITPVFMPVGTRAGVNNMTPGELLAAGSQIILGGNTYHMLCAPGMNVIEKAGGMHPFMGWHGPMLTDSGGFQVFSLSKNKEICTIDEEGAHFKLPGSQGLIHMTPEMSLETQKIIGADIIMAFDQCTPDSCTKDEVAHIMSRTHRWLKQSVNYHLEHPASRYGNQQALFGIVQGGIFEDLRRECADFVASMNTDGIAIGGETIGFDMKTTVEVIRWVRDFLPEHKPRYTMGVGMSPQDLLDVVAEGIDMFDCVAPTRNARHGALYCGELVQEGNWLRFSSEYENERIQIKKSCFADDLSPVMASCSCYTCLNYSRSYLHHLFKRKANLFTALASIHNIHVLHDVCAKMRALVINCS

SEQ ID NO: 56763 - protein, 277 aa, Legionella moravica
  misc_feature (1)..(277): tr|A0A378JVZ8|A0A378JVZ8_9GAMM Queuine tRNA-ribosyltran sferase OS=Legionella moravica OX=39962 GN=tgt_1 PE=4 S V=1
MSGKVNHYVPVVTTEAGSCLTSANWQQAKATAVACYLDDLLLKPGVNLLKKIDGLAGYLGWPSTVILNASRLSANKEGVFVLVSPFDGARIKINYAELFELVNALKPDVFLMPEHALNDAPDLWETLNDSILPFIPVTDLINQGCQKRHGVYFKYEQEDHQSLTQSMSKWSHLPRYLCGTLDLNLIHNLCDAGIDYIESDEPAHAAYQGRVYSGAETVDLTNSSTELQFDVIDPDCQCPTCSQRLTKAYLHHLYLHTPLLCQRFLIQHNVFQAQCST

SEQ ID NO: 56764 - protein, 383 aa, Legionella nautarum
  misc_feature (1)..(383): tr|A0A0W0WLX5|A0A0W0WLX5_9GAMM Queuine tRNA-ribosyltran sferase OS=Legionella nautarum OX=45070 GN=tgt_2 PE=3 S V=1
MKKFHFELIKNHAFTKARVTRVSTPHGDFITPVFMPVGTRAGVNNMTPRELLAAGSQIILGGNTYHMLCAPGMEVIEKAGGMHPFMGWHGPMLTDSGGFQVFSLSKNKEICTIDEEGAHFRLPGTTRLIHMTPEMSLETQKIIGADIIMAFDQCTPDNCSREEVQHIMTRTHRWLKQSINYHQQYPSSRYGANQALFGIVQGGIYQDLRQESAEFVASMDTDGIAIGGETVGFDMKMTVNIIRWVKDYLPENKPRYTMGVGMSPQDLLDVVAEGIDMFDCVAPTRNARHGALYCGEVVKEGNWLRFASPYENERIQIKKACFANDFSPIMSSCTCYTCQHHSRAFLHHLSKQKTNLFTALATIHNIHVMHEVCAKMRDLILNS

SEQ ID NO: 56765 - protein, 385 aa, Legionella oakridgensis; identical to SEQ ID NO: 56759
  misc_feature (1)..(385): tr|A0A0W0XH69|A0A0W0XH69_9GAMM Queuine tRNA-ribosyltran sferase OS=Legionella oakridgensis OX=29423 GN=Loak_037 7 PE=3 SV=1

SEQ ID NO: 56766 - protein, 284 aa, Legionella oakridgensis
  misc_feature (1)..(284): tr|W0BDW8|W0BDW8_9GAMM Queuine/archaeosine tRNA-ribosyl transferase OS=Legionella oakridgensis ATCC 33761 = DSM 21215 OX=1268635 GN=Loa_01058 PE=4 SV=1
MGKISQENHFAGLVPILTTTAGSTLTAENWQDVGVTTMSCSLASLLVKPGYEVLKQLPNLGCYIGWSGQIVLNASSLNADEHGVYTLRSPYDGSYIRHSMDDVLTLIAQLQPHFVILSQDVMQKKPFAWQSLPDAIFPFLPMNTLSHREVVKPYGFYLDDDKVDVRQQQRKQCKSRPYYVAGELSLPQMQAYVADGACYLESDKPAMDGIQGRVYSHEGDFSLTELSEATRFEVIDNKCQCPVCQQQLTRAYLHHLLAQTPLLCQRFLIQHNIFYCQEILAGQR

SEQ ID NO: 56767 - protein, 386 aa, Legionella parisiensis
  misc_feature (1)..(386): tr|A0A1E5JR96|A0A1E5JR96_9GAMM Queuine tRNA-ribosyltran sferase OS=Legionella parisiensis OX=45071 GN=tgt_1 PE= 3 SV=1
MKTFSCDVLHKHTATQARVTRVTTAHGEFITPVFMPVGTRAGVNNMTPAELRDAHSQIILGGNTYHMLCAPGMEVIEKAGGMHPFMGWHGPMLTDSGGFQVFSLSKNKEICTIDEEGAHFRLPGSGRLIHMTPEMSLETQKIIGADIIMAFDQCTPDSCTKDEVNHIMTRTHRWLKQSMQYHQQYPNSRYGYEQALFGIIQGGTFQDLRRESADFVSSMNTEGIAIGGETIGFDMKTTVEVIRWVRNYLPENKPRYTMGVGMSPQDLLDVVAEGIDMFDCVAPTRNARHGSLYCGELIREGNWLRFASEHENERIQIKKSCFADDMSPIMTHCSCYTCLNYSRSYLHQLAKQKTNLFTALASIHNVHVMHDVCDKMRELIMSERSN

SEQ ID NO: 56768 - protein, 388 aa, Legionella pneumophila
  misc_feature (1)..(388): tr|Q5ZRZ3|Q5ZRZ3_LEGPH Queuine tRNA-ribosyltransferase OS=Legionella pneumophila subsp. pneumophila (strain Ph iladelphia 1 / ATCC 33152 / DSM 7513) OX=272624 GN=tgt PE=3 SV=1
MPFLRMNTFSCEVLYQHSGTKARVTRVVTPHGEFITPVFMPVGTRAGVNNMMPSELSAAGTQIILGGNTYHMLCAPGMKVIENAGGMHRFMGWHGPMLTDSGGFQVFSLSKNKEICSIDESGAHFKLPGSKGIIHMTPEMSLETQKIIGADIIMAFDQCTPDSCSKDEVSQIMLRTHRWLKQSIDYHQQYPNSRYGYKQALFGIVQGGVFQDLRRESADFVSAMNTDGIAIGGETVGFDMDTTVEVIRWVYEYLPGNKPRYTMGVGMSPQDLLDVVAEGIDMFDCVAPTRNARHGALYCGKLVREGNWLKFQSEHENGRIQIKKSCFADDLAPVMESCSCYTCLNYSRSYLHHLSKQKANLFTALASIHNVHVLHDVCNHMRHLIINS

SEQ ID NO: 56769 - protein, 277 aa, Legionella pneumophila
  misc_feature (1)..(277): tr|Q5ZU05|Q5ZU05_LEGPH Queuine tRNA-ribosyltransferase OS=Legionella pneumophila subsp. pneumophila (strain Ph iladelphia 1 / ATCC 33152 / DSM 7513) OX=272624 GN=tgt PE=4 SV=1
MLSTNQNFVPVLNTEAGLCLTAANWQEIKITIASCYLDLLLLKPGYSLLKNITDFTKYLGWSGHLILNASRLVSDKNGMVILISPYDGSRIKLTNSELVHLILHIKPVAVLLPETIMNGFSGLWEQWDDTILPFLSAKQLETLQVPGKHGVYFNFSEAKYNDDFLSQLQKWSEFPLYVSGPIGADLIEDLNRKKSILIESDEPAKNAMRGIVYGREGNVDLTDESQAFNFQLIDENCSCPTCSAQLTRAYLHHLLANTPLLCQRFLIQHNAYYVQGN

SEQ ID NO: 56770 - protein, 383 aa, Legionella quateirensis
  misc_feature (1)..(383): tr|A0A378L0N7|A0A378L0N7_9GAMM Queuine tRNA-ribosyltran sferase OS=Legionella quateirensis OX=45072 GN=tgt_2 PE =3 SV=1
MNKFSCEVLYRHAGTKARVTRVTSPHGEFITPVFMPVGTRAGVNNMTPRELLSAGSQIILGGNTYHMLCAPGMNVIEKAGGMHPFMGWHGPMLTDSGGFQVFSLSKNKEICTIDEEGAHFKLPGSQGLIHMTPEMSLETQKIIGADIIMAFDQCTPDSCSKDEVAHIMSRTHRWLKQSVNYHLEHPDSRYGNQQALFGIVQGGIFEDLRRECADFVASMNTDGIAIGGETIGFDMKTTVDVIRWVRDFLPENKPRYTMGVGMSPQDLLDVVAEGIDMFDCVAPTRNARHGALYCGELVQEGNWLRFSSEYENERIQIKKSCFSDDLSPVMASCSCYTCLNYSRSYLHHLFKRKANLFTALASIHNIHVLHDVCAKMRALVINS

SEQ ID NO: 56771 - protein, 278 aa, Legionella quateirensis
  misc_feature (1)..(278): tr|A0A378KUL4|A0A378KUL4_9GAMM Queuine tRNA-ribosyltran sferase OS=Legionella quateirensis OX=45072 GN=tgt_1 PE =4 SV=1
MSGKVQQYVPVVTTEAGSCLTSANWHEVNVKTVACYLDDLLLKPGADLLKKIDNLAAYLGWPGTVILNASRLLANKEGIFTLISPFDGARIKFNYSELFELVNNLKPDVFLVPKNAINDAPELWETLDNSIIPYIPINDLVNQACHKPHGVYFNFVDEHTNQSVTEYLSRWSHLPSYMSGKIPLNLIHSLRDLGVEYIESDEPALSAFQGTVYSGSDTVDLIDSSTELQFDVIDPDCDCPTCSQQLTKAYLHHLYLHTPLLCQRFLIQHNVFQAQRST

SEQ ID NO: 56772 - protein, 386 aa, Legionella quinlivanii
  misc_feature (1)..(386): tr|A0A364LGF0|A0A364LGF0_9GAMM Queuine tRNA-ribosyltran sferase OS=Legionella quinlivanii OX=45073 GN=tgt PE=3 SV=1
MSTFNCEVIARYSRNKARIIRVSTPHGEFISPVFMPVGTRAGVNNMMPLELKEAGSQIILGGNTYHMLCAPGMEVIEQAGGMHPFMGWDGPMLTDSGGFQVFSLSKNKEICRIDEEGAHFQLPGDSRLIHMTPEMSLETQKIIGADIIMAFDQCTPDASSFEEVRQIMERTHRWLLQSIDYHQQYPASRYGARQALFGIIQGGIFQELRSESAKFVASMDLDGIAIGGETVGFDMKKTVEIIQWVREYLPENKPRYTMGVGMSPQDLLDVVAQGIDMFDCVAPTRNARHGALYSGKIVKDGHWLRFASEYDNHRLQIKKSCFANDLAPIMEDCLCYTCKTHSRAYLHHLFKQKSNVFTALASIHNVHVMHEVCTQMRNLILNETRN

SEQ ID NO: 56773 - protein, 386 aa, Legionella quinlivanii
  misc_feature (1)..(386): tr|A0A0W0XYH0|A0A0W0XYH0_9GAMM Queuine tRNA-ribosyltran sferase OS=Legionella quinlivanii OX=45073 GN=Lqui_1951 PE=3 SV=1
MSTFNCEVIARYSRNNARIVRVSTPHGEFISPVFMPVGTRAGVNNMMPLELKEAGSQIILGGNTYHMLCAPGMDVIEQAGGMHPFMGWHGPMLTDSGGFQVFSLSKNKEICRIDEEGAHFQLPGDSRLIHMTPEMSLETQKIIGADIIMAFDQCTPDASSFEEVRHIMERTHRWLLQSIDYHQQYPASRYGARQALFGIIQGGIFQELRSESAKFVASMDLDGIAIGGETVGFDMKKTVEIIQWVRQYLPENKPRYTMGVGMSPQDLLDVVAQGIDMFDCVAPTRNARHGALYSGKIVRDGHWLRFASEYDNHRLQIKKSCFANDLAPIMEDCFCYTCKTHSRAYLHHLFKQKSNVFTALASIHNVHVMHEVCTQMRNLILNEAHN

SEQ ID NO: 56774 - protein, 390 aa, Legionella rubrilucens
  misc_feature (1)..(390): tr|A0A0W0XZY4|A0A0W0XZY4_9GAMM Queuine tRNA-ribosyltran sferase OS=Legionella rubrilucens OX=458 GN=tgt_1 PE=3 SV=1
MSSFHCEVLHAYPHNKARVTRVKTAHGEFITPVFMPVGTRAGVNNMMPDELTEAGSQIILGGNTYHMLCAPGMTVIEKAGGMHPFMNWHGPMLTDSGGFQVFSLSRNKEICTIDEEGAHFKLPDGDRVIHMTPEMSLETQKIIGADIIMAFDQCTPDALSREEAQHIMTRTHRWLKQSIAYHQEHPDSRYGYSQALFGIIQGGIYEDLRRESAAFVSSVTTDGVAIGGETVGFDMEKTVEIIRWVHAFLPENKPRYTMGVGMSPQDLLDVVKEGVDMFDCVAPTRNARHGALYCGEVIKEGHWLKFDSPHENQRIQIKKAQYAKDDSPIMPGCQCYTCRHYSRAFLHHLFKQKATLFTALASIHNIHVMHDVCAKMRDLILSSSNDERHV

SEQ ID NO: 56775 - protein, 386 aa, Legionella sainthelensi
  misc_feature (1)..(386): tr|A0A447SUL2|A0A447SUL2_9GAMM Queuine tRNA-ribosyltran sferase OS=Legionella sainthelensi OX=28087 GN=tgt_1 PE =3 SV=1
MKTFSCQVLHKHSATQARVTRVVTAHGEFITPVFMPVGTRAGVNNMTPIELHEAHSQIILGGNTYHMLCAPGMKVIEQAGGMHPFMGWHGPMLTDSGGFQVFSLSKNNEICTIDEEGAHFKLPGSQGLIHMTPEMSLETQKIIGADIIMAFDQCTPDSCTRDEVSQIMTRTHRWLKQSMDYHHQYPHSRYGYEQALFGIIQGGTFKDLRRESADFVSSMNPEGIAIGGETIGFNMATTVEVIRWVRDYLPDNKPRYTMGVGMSPQDLLEVVAEGIDMFDCVAPTRNARHGSLYCGELVREGNWMRFVSEYENERIQIKKACFADDMSPIMAQCTCYTCRHYSRAYLHQLSKQKTNLFTALASIHNVHVMHDVCDKMRDLIINESAI

SEQ ID NO: 56776 - protein, 386 aa, Legionella sainthelensi
  misc_feature (1)..(386): tr|A0A0W0YNK2|A0A0W0YNK2_9GAMM Queuine tRNA-ribosyltran sferase OS=Legionella sainthelensi OX=28087 GN=tgt PE=3 SV=1
MKTFSCQVLHKHSATQARVTRVVTAHGEFMTPVFMPVGTRAGVNNMTPIELREAHSQIILGGNTYHMLCAPGMKVIEQAGGMHPFMGWHGPMLTDSGGFQVFSLSKNNEICTIDEEGAHFKLPGSQGLIHMTPEMSLETQKIIGADIIMAFDQCTPDSCTRDEVSQIMTRTHRWLKQSMDYHRQYPHSRYGYEQALFGIIQGGTFKDLRRESADFVSSMNPEGIAIGGETIGFNMATTVEVIRWVRDYLPENKPRYTMGVGMSPQDLLEVVAEGIDMFDCVAPTRNARHGSLYCGELVREGNWMRFVSEYENERIQIKKACFADDMSPIMAQCTCYTCRHYSRAYLHQLSKQKTNLFTALASIHNVHVMHDVCDKMRDLIINESAI

SEQ ID NO: 56777 - protein, 386 aa, Legionella santicrucis
  misc_feature (1)..(386): tr|A0A0W0ZCE3|A0A0W0ZCE3_9GAMM Queuine tRNA-ribosyltran sferase OS=Legionella santicrucis OX=45074 GN=tgt PE=3 SV=1
MKTFSCQVLHKHSATQARVTRVITAHGEFITPVFMPVGTRAGVNNMTPIELHEAHSQIILGGNTYHMLCAPGMKIIEQAGGMHPFMGWHGPMLTDSGGFQVFSLSKNNEICTIDEEGAHFRVPGSQSLIHMTPEMSLETQKIIGADIIMAFDQCTPDNCSRDEVSHIMARTHRWLKQSMNYHRQYPNSRYGYEQALFGIIQGGTFKDLRRESADFVASMNPEGIAIGGETIGFNMATTVEVIRWVRDYLPENKPRYTMGVGMSPQDLLEVVAEGIDMFDCVAPTRNARHGSLYCGELVREGNWMRFISEYENERIQIKKSCFADDMSPIMAQCTCYTCRHYSRSYLHQLSKQKTNLFTALASIHNVHVMHDVCDKMRELIINESAA

SEQ ID NO: 56778 - protein, 389 aa, Legionella shakespearei
  misc_feature (1)..(389): tr|A0A0W0YTH8|A0A0W0YTH8_9GAMM Queuine tRNA-ribosyltran sferase OS=Legionella shakespearei DSM 23087 OX=1122169 GN=tgt_2 PE=3 SV=1
MTTFSCEVLYRHSATKARVTRVTTPHGEFITPVFMPVGTRAGVNNMTAKELQEAGSQIILGGNTYHMLCAPGMRVIEKAGGMHPFMDWHSPMLTDSGGFQVFSLSKNKEICTIDEEGAHFKLPGSQGLIHMTPEMSLETQKIIGADIIMAFDQCTPDSCSKEEVQHIMTRTHRWLRQSMNYHQQHPLSRYGYQQALFGIVQGGIFEDLRQESADFVASMNTDGIAIGGETIGFDMKTTVDVIRWVRDYLPENKPRYTMGVGMSPQDLLEVVAEGIDMFDCVAPTRNARHGALYCGGLVPDGDWLRFKSDYENERIQIKKSCFADDLSPVMASCTCYTCRNYSRSCLHHLFKRKANLFTALASIHNIHVLHDVCDKMRALVINSSQSSYS

SEQ ID NO: 56779 - protein, 384 aa, Legionella sp.
  misc_feature (1)..(384): tr|A0A433K8V7|A0A433K8V7_9GAMM Queuine tRNA-ribosyltran sferase OS=Legionella sp. km535 OX=2498107 GN=ELY21_094 25 PE=3 SV=1
MNKFSCEVLYRHAGTKARVTRVTTPHGEFITPVFMPVGTRAGVNNMTPGELLAAGSQIILGGNTYHMLCAPGMNVIEKAGGMHPFMGWHGPMLTDSGGFQVFSLSKNKEICTIDEEGAHFKLPGSQGLIHMTPEMSLETQKIIGADIIMAFDQCTPDSCTKDEVAHIMSRTHRWLKQSVNYHLEHPASRYGNQQALFGIVQGGIFEDLRRECADFVASMNTDGIAIGGETIGFDMNTTVEVIRWVRDFLPEHKPRYTMGVGMSPQDLLDVVAEGIDMFDCVAPTRNARHGALYCGELVQEGNWLRFSSEYENERIQIKKSCFADDLSPVMASCSCYTCLNYSRSYLHHLFKRKANLFTALASIHNIHVLHDVCAKMRALVINCS

SEQ ID NO: 56780 - protein, 386 aa, Legionella sp.
  misc_feature (1)..(386): tr|A0A1Q3TTH0|A0A1Q3TTH0_9GAMM Queuine tRNA-ribosyltran sferase OS=Legionella sp. 39-23 OX=1895902 GN=BGO44_134 65 PE=3 SV=1
MKTFSCNVLHKHSATQARVTRVTTAHGEFITPVFMPVGTRAGVNNMTPIELRDAHSQIILGGNTYHMLCAPGMDVIEKAGGMHPFMGWHGPMLTDSGGFQVFSLSKNEEICTIDEEGAHFKLPGSQRLIHMTPEMSLETQKIIGADIIMAFDQCTPDSCTKDEVSHIMERTHRWLKQSMHYHQQHPNSRYGYEQALFGIIQGGTFKDLRRESADFITSMNTDGIAIGGETIGFDMKTTVEVIRWVRDYLPENKPRYTMGVGMSPQDLLDVVAEGIDMFDCVAPTRNARHGSLYCGELIREGNWLRFASEYENERIQIKKSCFADDMSPIMAQCSCYTCQNYSRSYLHQLAKQKTNLFTALASIHNVHVMHDVCDKMRELIINESSN

SEQ ID NO: 56781 - protein, 390 aa, Legionella spiritensis
  misc_feature (1)..(390): tr|A0A0W0Z6A2|A0A0W0Z6A2_LEGSP Queuine tRNA-ribosyltran sferase OS=Legionella spiritensis OX=452 GN=tgt PE=3 SV =1
MTAFQCEVLHHYPHNKARLTRVTTPHGVFTTPVFMPVGTRAGVNNMIPDELREAGSSIILGGNTYHMLCAPGMAIIEKAGGMHPFMGWQGPMLTDSGGFQVFSLSKNKEICTIDEEGAHFRLPDDKRLIHMTPEMSLETQKIIGADIIMAFDQCTPDQSSRDEVRHIMTRTHRWLKQSIDYHQNHPTSRYGCRQALFGIIQGGIYEDLRCESADFVAGMDTDGIAIGGETVGFNMKMTIDIIRWVRDHLPPEKPRYTMGVGMSPQDLLDVVAQGVDMFDCVAPTRNARHGALYCGEVVRTGDWLKFDSPYDNHRISIKKTCFARDESPIMPGCLCYTCKNHTRAFLHQLSKQKANLFTALASIHNIHVMNDVCAKMRDLIISSINTQETK

SEQ ID NO: 56782 - protein, 386 aa, Legionella steelei; identical to SEQ ID NO: 56780
  misc_feature (1)..(386): tr|A0A0W0ZH10|A0A0W0ZH10_9GAMM Queuine tRNA-ribosyltran sferase OS=Legionella steelei OX=947033 GN=tgt PE=3 SV= 1

SEQ ID NO: 56783 - protein, 274 aa, Legionella steigerwaltii
  misc_feature (1)..(274): tr|A0A378LA49|A0A378LA49_9GAMM Queuine tRNA-ribosyltran sferase OS=Legionella steigerwaltii OX=460 GN=tgt_1 PE= 4 SV=1
MLTAVQNFIPVLTSEAGLCLTTANWQEAEITAASYSLERLLYKPGQDGLKKITNLSHYLVWPGVLVLNAVSLVVNKEGIYTLKSPYDGSKIKFTLADLLGLIQHLKPNAVILPQKIVQDFPQIWDNWNDAIVPFMHVNDLEKHKVDKHHGIYFNVLHELDWEQLNRWSHVPRYIMGRFDPELIWRLRDKGIGFIETDEPAHAALQGKVYSRAGDVDLMDSKTQMQFELIDADCVCPTCSQQFTRAYLHHLLQHTPLLCQRFLIQHNVFYVQKRK

SEQ ID NO: 56784 - protein, 386 aa, Legionella steigerwaltii
  misc_feature (1)..(386): tr|A0A378LEW4|A0A378LEW4_9GAMM Queuine tRNA-ribosyltran sferase OS=Legionella steigerwaltii OX=460 GN=tgt_2 PE= 3 SV=1
MKTFSCNVLHKHAATQARVTRVTTAHGEFITPVFMPVGTRAGVNNMTPTELRDAHSQIILGGNTYHMLCAPGMEVIEKAGGMHPFMGWHGPMLTDSGGFQVFSLSKNKEICTIDEEGAHFKLPSSQRLIHMTPEMSLETQKIIGADIIMAFDQCTPDSCTKDEVSHIMTRTHRWLRQSMQYHLQHPNSRYGYEQALFGIIQGGTFKDLRRESADFISSMNTDGIAIGGETIGFDMKTTVEVIRWVRDYLPEDKPRYTMGVGMSPQDLLDVVAEGIDMFDCVAPTRNARHGSLYCGELIREGNWLRFASEYENERIQIKKSCFAEDMSPIMAQCSCYTCQNYSRSYLHQLAKQKTNLFTALASIHNVHIMHDVCDKMRELIINESSN

SEQ ID NO: 56785 - protein, 390 aa, Legionella taurinensis
  misc_feature (1)..(390): tr|A0A3A5L3L9|A0A3A5L3L9_9GAMM Queuine tRNA-ribosyltran sferase OS=Legionella taurinensis OX=70611 GN=D6J04_086 60 PE=3 SV=1
MSSFHCEVLHAYPHNKARVTRVKTAHGEFITPVFMPVGTRAGVNNMMPEELIQAGSQIILGGNTYHMLCAPGMTVIEKAGGMHPFMNWHGPMLTDSGGFQVFSLSRNKEICTIDEEGAHFKLPDGDRVIHMTPEMSLETQKIIGADIIMAFDQCTPDALSREEARQVMTRTHRWLEQSIAYHQAHPHSRYGYSQALFGIIQGGIYEELRRESAAFVSSVTTDGVAIGGETVGFDMEKTVEIIRWVHEFLSENKPRYTMGVGMSPQDLLDVVKEGIDMFDCVAPTRNARHGALYCGEVIKEGHWLKFDSPYENQRIQIKKSHYAKDDNPVMPGCQCYTCRHYSRAFLHHLFKQKATLFTALASIHNIHVMHDVCAKMRDLILSSSNDERHV

SEQ ID NO: 56786 - protein, 386 aa, Legionella tucsonensis
  misc_feature (1)..(386): tr|A0A0W0ZQH0|A0A0W0ZQH0_9GAMM Queuine tRNA-ribosyltran sferase OS=Legionella tucsonensis OX=40335 GN=tgt PE=3 SV=1
MKTFSCDVLYKHSATQARVTRVATAHGEFITPVFMPVGTRAGVNNMTPVELHDAHSQIILGGNTYHMLCAPGMEVIEKAGGMHPFMGWHGPMLTDSGGFQVFSLSKNKKICTIDEDGAHFRLPGNERLIHMTPEMSLETQKIIGADIIMAFDQCTPDSCTKDEVNHIMTRTHRWLKQSIQYHQQYPNSRYGYEQALFGIIQGGTFKDLRCESADFVSSMNTEGIAIGGETIGFDMKTTVEVIRWVRDYLPENKPRYTMGVGMSPQDLLDVVAEGIDMFDCVAPTRNARHGSLYCGELIREGDWLRFTSEYENERIQIKKSCFADDLSPIMAQCSCYTCLNYSRSYLHQLAKQKTNLFTALASIHNVHVMHDVCDKMRELIMSECAN

SEQ ID NO: 56787 - protein, 386 aa, Legionella wadsworthii
  misc_feature (1)..(386): tr|A0A378LM51|A0A378LM51_9GAMM Queuine tRNA-ribosyltran sferase OS=Legionella wadsworthii OX=28088 GN=tgt_1 PE= 3 SV=1
MKTFSCDVLHRHTHTQARVTRITTAHGEFITPVFMPVGTRAGVNNMTPEELHQAHSQIILGGNTYHMLCAPGMDVIEKAGGMHPFMGWHGPMLTDSGGFQVFSLSKNKEICTIDEEGAHFKIPTNQRLIHMTPEMSLETQKIIGADIIMAFDQCTPDSCTKDEVSHIMDRTHRWLKQSIQYHQKYPNSQYGYQQALFGIIQGGTFKDLRRESADFVASMNTDGIAIGGETIGFDMKTTVEVVRWVRDYLPENKPRYTMGVGMSPQDLLDVVAEGIDMFDCVAPTRNARHGSLYCGELIREGNWLRFFSEYENERIQIKKSCFANDMSPIMAQCSCYTCMNYSRSYLHQLAKQKTNLFTALASIHNVHVMHDVCDKMRQLIINESSN

SEQ ID NO: 56788 - protein, 288 aa, Legionella wadsworthii
  misc_feature (1)..(288): tr|A0A378LP74|A0A378LP74_9GAMM Queuine tRNA-ribosyltran sferase OS=Legionella wadsworthii OX=28088 GN=tgt_2 PE= 4 SV=1
MLTAVHNFIPVLTSEAGLCLTKENWQEAKVTATSYSMEQLLYKPGREVLENIVALTEYLACPGELIINAMSLVSNKEKRYVLKSPFDGSKSTFTVEELVHLIHHLNPKAVLLPPNITRDFPRIWDNWNENIEPFIHVADVEKSGIPKHHGVYFNILKEVDWEQLDRWSHLNRYVVGNFDPQQILDFQNNGISLIETDAPSQEAMLGRVYSREGTLDLTEPKTEMQFATIDAECVCPTCSQQLTRAYLHHLFAHTPLLCQRFLIQHNVFYTQSFMTLGEIKEIRTLKSI

SEQ ID NO: 56789 - protein, 383 aa, Legionella waltersii
  misc_feature (1)..(383): tr|A0A0W1ADA9|A0A0W1ADA9_9GAMM Queuine tRNA-ribosyltran sferase OS=Legionella waltersii OX=66969 GN=Lwal_1402 P E=3 SV=1
MNTFACEVLHQHTSNKARVTRVTTPHGQFTTPVFMPVGTRAGVNNMTPLELKAAGSQIILGGNTYHMLCEPGMEIIKKSGGMHQFMGWHGPMLTDSGGFQVFSLSKNKEICTIDEFGAHFKLPGNKDLIHMTPEMSLETQKIIGADIIMAFDQCTPDACPKDEVRQIMTRTHRWLGQSKIYHQQHPESCYGFKQALFGIIQGGIYEDLRKESADFVTSMQTDGVAIGGETIGFNMETTVNVIRWIYNYLPVNKPRYTMGVGMSPQDLLDVVAEGIDMFDCVAPTRNARHGALYCGELVKEGNWLKFSSDYPNERIQIKKACFAEDYSPIMESCTCYTCKNYSRSFLHHLSKQKANVFTALASIHNVHVLHDVCANIRQAVIHS

SEQ ID NO: 56790 - protein, 383 aa, Legionella worsleiensis
  misc_feature (1)..(383): tr|A0A0W1AK03|A0A0W1AK03_9GAMM Queuine tRNA-ribosyltran sferase OS=Legionella worsleiensis OX=45076 GN=Lwor_041 6 PE=3 SV=1
MNKFSCEVLYRHAGSKARVTRVTTPHGEFITPVFMPVGTRAGVNNMTPGELLDAGSQIILGGNTYHMLCAPGMSVIEKAGGMHPFMGWHGPMLTDSGGFQVFSLSKNKEICTIDEEGAHFKLPGNQRLIHMTPEMSLETQKIIGADIIMAFDQCTSDSCSKDDVAHIMSRTHRWLKQSVNYHLEHPMSRYGNQQALFGIVQGGIFEDLRRECADFVASMNTDGIAIGGETIGFDMKTTVEVIRWVRDFLPENKPRYTMGVGMSPQDLLDVVAEGIDMFDCVAPTRNARHGALYCGELVQEGNWLRFSSEYENERIQIKKSCFADDLAPVMASCSCYTCRNYSRSHLHHLFKRKANLFTALASIHNIHVLHDVCAKMRTLVINS

SEQ ID NO: 56791 - protein, 384 aa, Legionellaceae bacterium
  misc_feature (1)..(384): tr|A0A2E5YAL0|A0A2E5YAL0_9GAMM Queuine tRNA-ribosyltran sferase OS=Legionellaceae bacterium OX=2026753 GN=CMF38 _08205 PE=3 SV=1
MSSFSCKVVHRHRYSEARITQISTPHGLITTPVFMPVGTRAGVNNLTIAELLATKSQIILGGNTYHMLCSPGMKVIEAAGGMHPFMGWHGPMLTDSGGFQVFSLAKNQCTIDDKGAHFKLPAQDNLIHMTPEMSLQTQKIIGADIIMAFDQCTPDTADFNEAKLIMQRTHRWLRQSLEYHQRYPTSRYGHKQALFGIIQGGAHLDLRLESTKFVTSLDLDGIAIGGESVGFNMPVTIKIIQEVMNHLPVNKPRYTMGVGMSPQDLIDVVKEGIDMFDCVAPTRNARHGALYCGEIVVDNHWLRFESIYPNARIQIKKAVFAKDDTPIMAHCRCYTCLHHSRAYLHYLFKKQASAFTALASIHNIHVMHEVCNRMRELIMHQSLI

SEQ ID NO: 56792 - protein, 368 aa, Legionellaceae bacterium
  misc_feature (1)..(368): tr|A0A2E2WNY0|A0A2E2WNY0_9GAMM Queuine tRNA-ribosyltran sferase OS=Legionellaceae bacterium OX=2026753 GN=tgt P E=3 SV=1
MKFTLIKQSGRARLGQMQFDRGVVDTPAFMPVGTYGAVKTLSPEEVKSIGAQIILGNTFHLMLRPGTEIIKKHGDLHDFMRWQGPILTDSGGFQVFSLTELRKLSEKGVEFRSPLNGDKVFLSPEKSMQVQRDLGSDIVMIFDECTPYPATLTQAAESMRLSLGWAKRSKDAHADNPNALFGIVQGSVYPELREESLAGLMSIEFDGYAIGGLAVGEPKDERDKILEFLDPRMPVDKPRYLMGVGKPEDLVEGVRRGVDMFDCVMPTRNARNGHLFTSTGVLRIRNSEHRESLLPLDEQCDCYTCQNYTRSYLYHLDKGHETLGARLNTIHNLRYYQRLMQQIREAIAADRFEAFADEFYLAFGSSSR

SEQ ID NO: 56793 - protein, 384 aa, Legionellales bacterium
  misc_feature (1)..(384): tr|A0A1G0X0H7|A0A1G0X0H7_9GAMM Queuine tRNA-ribosyltran sferase OS=Legionellales bacterium RIFCSPHIGHO2_12_FULL _37_14 OX=1798568 GN=A3F18_07140 PE=3 SV=1
MRVELIAEDNKTRARVIKFYTEHGAVTTPVFMPVGTRAGVNNLTIDELKACQSQIILGGNTYHMCCAPQMDIIKTAGGMHQFMGWDGPMLTDSGGFQIFSLSKNSKLCQIDEDGAHFTIPETATKFYMTPQVSMEVQKIIGADIIMAFDQCTPSDASHAKANEIMTRTHRWLEQSLDYHQANPNSCYAYKQALFGIVQGGIYEDLRHKSMEFIVNADLDGIALGGEMIGFDMEKTVATIRSVYANFPVLKPRYTMGVGMFPQDLLDVIKEGIDMFDCVAPTRNARHGALYAGKVIAQGDWLEFSSQYEQGRLQIKKAEFAEDNRPIMEECTCLTCKLHTRSYLHYLFKEKSPVFTAYACIHNVHVMHEVCAKAREKILTSRVVR

SEQ ID NO: 56794 - protein, 378 aa, Legionellales bacterium
  misc_feature (1)..(378): tr|A0A2E2TXW2|A0A2E2TXW2_9GAMM Queuine tRNA-ribosyltran sferase OS=Legionellales bacterium OX=2026754 GN=tgt PE =3 SV=1
MKPPYFHYELIHQSTRSRARVGRVHTPHGIIDTPNFVAVGTNGTLKALDNAVVDTLGLQLMFCNTYHLLLQPGPEVVAKAGGLHQFIGRRQPIITDSGGFQVFSLAYGGVADEIKSRGTKKHEGAVSKITERGVIFRSYRDGRKILLTPESTVEVQKDLGADIIIPLDELPPYHIDDKALRASLARTHRWEARSLETHLANPKQQAMYAVIHGGTDPKLRARSCEVLTELPFDGFAIGGSMGRTRDEMIETVRVTTPNLPEDKPNHLLGIGDLYSIDRCVVHGIDTFDSAYPTRAARHGTLFTSHGPIKIKSGRWAECFEPIEKDCPCPTCEVHSLAFLHHLFKASEPSAAMLASYHNVAYMVKHMRQLREAILENKI

SEQ ID NO: 56795 - protein, 376 aa, Leisingera aquaemixtae
  misc_feature (1)..(376): tr|A0A0P1HE64|A0A0P1HE64_9RHOB Queuine tRNA-ribosyltran sferase OS=Leisingera aquaemixtae OX=1396826 GN=tgt PE= 3 SV=1
MATLFNFEMKATDGKARTGVIQTPRGEIRTPAFMPVGTAATVKAMMPESVRATGADILLGNTYHLMLRPTAERIDRLGGLHKFMNWERPILTDSGGFQVMSLAGLRKLTEKGVTFKSHIDGSRHELTPERSMEIQRLLGSDIVMCFDECPALPADRDRIAESMRLSMRWAERSRETFGDRPGHALFGIQQGGLERDFREESAEALKAIGFDGYAVGGLAVGEGQEAMFGCLDFAPDMLPEDKPRYLMGVGKPDDIVGAVARGIDMMDCVLPSRSGRTGQAFTRYGVVNIKNARHQDDPRPLDEQCSCPACSNYSRAYLHHVFRSNEMISGMLLTWHNLHYFQEIMGGMREAIAAGTFDAWQKDFHDTRAQGDIERL

SEQ ID NO: 56796 - protein, 376 aa, Leisingera methylohalidivorans
  misc_feature (1)..(376): tr|V9VWH9|V9VWH9_9RHOB Queuine tRNA-ribosyltransferase OS=Leisingera methylohalidivorans DSM 14336 OX=999552 G N=tgt PE=3 SV=1
MAELFNFELKATDGKARTGVINTPRGEIRTPAFMPVGTAATVKAMLPESVRATGADILLGNTYHLMLRPTAERIDRLGGLHKFMNWERPILTDSGGFQVMSLAGLRKLTEKGVTFKSHIDGSKHELTPERSMEIQRLLGSDIVMCFDECPALPADRKRIAESMQLSMRWAERSRDAFGDRPGHALFGIMQGGLEQDLREESAEALKKTGFEGYAVGGLAVGEGQEAMFDCLDYAPGFLPEDKPRYLMGVGKPDDIVGAVARGIDMMDCVLPSRSGRTGQAFTRHGVVNIKNARHQDDPRPLDEQCSCPACSSYSRAYLHHVFRSNEMISGMLLTWHNLHYFQDIMQGMRDAIAAGIFEAWQADFHETRAQGDIERL

SEQ ID NO: 56797 - protein, 376 aa, Leisingera sp.
  misc_feature (1)..(376): tr|A0A0C1GB40|A0A0C1GB40_9RHOB Queuine tRNA-ribosyltran sferase OS=Leisingera sp. ANG-M7 OX=1577902 GN=tgt PE=3 SV=1
MAELFNFELKATDGKARTGVINTPRGDIRTPAFMPVGTAATVKAMMPESVRATGADILLGNTYHLMLRPTAERIDRLGGLHKFMNWERPILTDSGGFQVMSLAGLRKLTEKGVTFKSHVDGSKHELTPERSMEIQRLLGSDIVMCFDECPALPADRDRIAESMRLSMRWAERSREAFGDRPGHALFGIMQGGLEQDLREESAEALKKIGFEGYAVGGLAVGEGQEAMFDCLDYAPGFLPEDKPRYLMGVGKPDDIVGAVARGIDMMDCVLPSRSGRTGQAFTRYGVVNIKNARHQDDPRPLDEHCSCPACSNYSRAYLHHVFRSNEMISGMLLTWHNLHYFQEIMGGMREAIAAGTFEAWQKDFHDTRAQGDIERL

SEQ ID NO: 56798 - protein, 376 aa, Leisingera sp.
  misc_feature (1)..(376): tr|A0A481PMM5|A0A481PMM5_9RHOB Queuine tRNA-ribosyltran sferase OS=Leisingera sp. NJS204 OX=2508307 GN=tgt PE=3 SV=1
MAELFNFELKATDGTARTGVINTPRGEIRTPAFMPVGTAATVKAMMPESVRATGADILLGNTYHLMLRPTAERIDRLGGLHKFMNWERPILTDSGGFQVMSLAGLRKLTEKGVTFKSHIDGSKHELTPERSMEIQRLLGSDIVMCFDECPALPADRDRIAESMRLSMRWAERSREAFGDRPGHALFGIMQGGLEQDLREESAEALKKIGFEGYAVGGLAVGEGQEAMFDCLDYAPGFLPEDKPRYLMGVGKPDDIVGAVARGIDMMDCVLPSRSGRTGQAFTRYGVVNIKNARHQDDPRPLDEQCSCPACSSYSRAYLHHVFRSNEMISGMLLTWHNLHYFQEIMQGMREAIAAGSFEAWQKDFHDTRAQGDIEPL

SEQ ID NO: 56799 - protein, 375 aa, Lelliottia amnigena; identical to SEQ ID NO: 54971
  misc_feature (1)..(375): tr|A0A3S5XXJ5|A0A3S5XXJ5_LELAM Queuine tRNA-ribosyltran sferase OS=Lelliottia amnigena OX=61646 GN=tgt PE=3 SV= 1

SEQ ID NO: 56800 - protein, 375 aa, Lelliottia amnigena
  misc_feature (1)..(375): tr|A0A1A9F8P4|A0A1A9F8P4_LELAM Queuine tRNA-ribosyltran sferase OS=Lelliottia amnigena OX=61646 GN=tgt PE=3 SV= 1
MKFELDTTDGRARRGRLVFDRGVVETPAFMPVGTYGTVKGMTPEEVEATGAQIILGNTFHLWLRPGQEVMKLHGDLHDFMQWKGPILTDSGGFQVFSLGDIRKITEKGVHFRNPINGDPIFLDPEKSMEIQYDLGSDIVMIFDECTPYPADWDYAKRSMEMSLRWAKRSRDRFDSLENKNALFGIIQGSVYEDLRDISVKGLVEIGFDGYAVGGLAVGEPKEDMHRILEHVCPQIPADKPRYLMGVGKPEDLVEGVRRGIDMFDCVMPTRNARNGHLFVTDGVVKIRNAKHKNDTSTLDAECDCYTCRHYSRAYLYHLDRCNEILGARLNTIHNLRYYQRLMAGLRKAIEEGKLESFVTDFYQRQGRDVPPLNVD

SEQ ID NO: 56801 - protein, 375 aa, Lelliottia nimipressuralis; identical to SEQ ID NO: 54949
  misc_feature (1)..(375): tr|A0A1J5VUM4|A0A1J5VUM4_9ENTR Queuine tRNA-ribosyltran sferase OS=Lelliottia nimipressuralis OX=69220 GN=tgt P E=3 SV=1

SEQ ID NO: 56802 - protein, 375 aa, Lelliottia nimipressuralis; identical to SEQ ID NO: 53611
  misc_feature (1)..(375): tr|A0A4Q0WA97|A0A4Q0WA97_9ENTR Queuine tRNA-ribosyltran sferase OS=Lelliottia nimipressuralis OX=69220 GN=tgt P E=3 SV=1

SEQ ID NO: 56803 - protein, 375 aa, Lelliottia sp.
  misc_feature (1)..(375): tr|A0A2S5C3U7|A0A2S5C3U7_9ENTR Queuine tRNA-ribosyltran sferase OS=Lelliottia sp. 7254-16 OX=2080842 GN=tgt PE= 3 SV=1
MKFELDTTDGRARRGRLVFDRGVVETPAFMPVGTYGTVKGMTPEEVEATGAQIILGNTFHLWLRPGQEVMKLHGDLHDFMQWKGPILTDSGGFQVFSLGDIRKITEQGVHFRNPINGDPIFLDPEKSMEIQYDLGSDIVMIFDECTPYPADWDYAKRSMEMSLRWAKRSRDRFDGLENKNALFGIIQGSVYEDLRDISVKGLVEIGFDGYAVGGLAVGEPKEDMHRILEHVCPQIPEDKPRYLMGVGKPEDLVEGVRRGIDMFDCVMPTRNARNGHLFVTDGVVKIRNAKHKNDTSTLDAECDCYTCRHYSRAYLYHLDRCNEILGARLNTIHNLRYYQRLMAGLRKAIEEGKLESFVTDFYQRQGRDVPPLNVD

SEQ ID NO: 56804 - protein, 377 aa, Leminorella grimontii
  misc_feature (1)..(377): tr|A0A085HHL7|A0A085HHL7_9GAMM Queuine tRNA-ribosyltran sferase OS=Leminorella grimontii ATCC 33999 = DSM 5078 OX=1005999 GN=tgt PE=3 SV=1
MKFELQKKDGRARRGRLVFDRGVVETPAFMPVGTYGTVKGMTPEEVKATGAQIILGNTFHLWLRPGQEIMRQHGDLHGFMNWDGPILTDSGGFQVFSLGDIRKITEEGVHFRNPINGDAIFLSPEKSMEIQYDLGSDIVMIFDECTPYPADWDYAKRSMEMSLRWAKRSRERFNSLDNKNALFGIIQGSVYEDLRDVSVKGLVDIGFDGYAVGGLAVGEPKEDMHRILEHVCPQIPEDKPRYLMGVGKPEDLVEGVRRGIDMFDCVMPTRNARNGHLFVTGGVVKIRNAKYKDDTSALDEHCDCYTCRHYSRAYLHHLDRCNEILGARLNTIHNLRYYQRLMAGLREAIEQGTLEHFVADFYGRREKPVPPLTHSSQ

SEQ ID NO: 56805 - protein, 377 aa, Leminorella grimontii; identical to SEQ ID NO: 56804
  misc_feature (1)..(377): tr|A0A485AVG6|A0A485AVG6_9GAMM Queuine tRNA-ribosyltran sferase OS=Leminorella grimontii OX=82981 GN=tgt PE=3 S V=1

SEQ ID NO: 56806 - protein, 378 aa, Leminorella richardii
  misc_feature (1)..(378): tr|A0A2X4V129|A0A2X4V129_9GAMM Queuine tRNA-ribosyltran sferase OS=Leminorella richardii OX=158841 GN=tgt PE=3 SV=1
MKFELQKKDGRARRGRLVFERGSVETPAFMPVGTYGTVKGMTPEEVKETGAQIILGNTFHLWLRPGQEIMRQHGDLHGFMNWHGPILTDSGGFQVFSLGDIRKITEEGVHFRNPINGDAIFLSPEKSMEIQYDLGSDIVMIFDECTPYPADWDYAKRSMEMSLRWAKRSRDRFDSLNNKNALFGIIQGSVYEDLRDVSVKGLVDIGFDGYAVGGLAVGEPKEDMHRILEHVCPQIPEDKPRYLMGVGKPEDLVEGVRRGIDMFDCVMPTRNARNGHLFVTDGVVKIRNAKYKDDTSALDAHCDCYTCRNYSRAYLHHLDRCNEILGARLNTIHNLRYYQRLMAGLREAIEQGTLEHFVTDFYGRMGKPVPPLLANSSQ

SEQ ID NO: 56807 - protein, 379 aa, Lentibacillus amyloliquefaciens
  misc_feature (1)..(379): tr|A0A0U3NN57|A0A0U3NN57_9BACI Queuine tRNA-ribosyltran sferase OS=Lentibacillus amyloliquefaciens OX=1472767 G N=tgt PE=3 SV=1
MTAITYEHIKTCQQTGARLGKVHTPHGSFDTPAFMPVGTLATVKTMSPEELQEMNANIILSNTYHLWLRPGEDIIEEAGGLHRFMNWDGAILTDSGGFQVFSLSDMRDIKEEGVHFRNHLSGEKLFLSPEKAMSIQNSLGSDIMMAFDECPPYPASHDYMKASVERTSRWAERCLKAHERPSEQGLFGIVQGGEYDDLRKQSAKDLVSLDFPGYAIGGLSVGEPKDIMNRMLEFTTPILPADKPRYLMGVGSPDSLVDGAIRGIDMFDCVLPTRIARNGTCMTSGGRLVVRNAKYARDFSPIDENCDCHVCKNYTRAYIRHLVKCNETFGFRLTTYHNLYFLIELMKQVRTAISEDRLGDFKEAFFEQYGFNQENAKNF

SEQ ID NO: 56808 - protein, 379 aa, Lentibacillus halodurans
  misc_feature (1)..(379): tr|A0A1I0UYR9|A0A1I0UYR9_9BACI Queuine tRNA-ribosyltran sferase OS=Lentibacillus halodurans OX=237679 GN=tgt PE =3 SV=1
MTAITYEHIKTCKQTGARLGKVHTPHGSFDTPAFMPVGTLATVKTMSPEELKEMGTNIILSNTYHLWLRPGEDIIKEAGGLHQFMNWDGVILTDSGGFQVFSLSDMRDIKEEGVHFRNHLSGEKLFLSPEKAMSIQNALGSDIMMAFDECPPYPASHDYMKASVERTSRWAERCINAHERASDQGLFGIIQGGEYEDLRKQSVRDLVSLDFPGYAIGGLSVGEPKDIMNQMLEFTTPLLPSDKPRYLMGVGSPDSLIDGAIRGIDMFDCVLPTRIARNGTCMTSVGRLVVRNAKFARDFSPIDENCDCHVCKNYTRAYIRHLVKCNETFGFRLTTYHNLYFLLKLMEQVRDSIAEDRLGDFKEAFFEQYGFNKQNAKNF

SEQ ID NO: 56809 - protein, 379 aa, Lentibacillus persicus
  misc_feature (1)..(379): tr|A0A1I1TGC8|A0A1I1TGC8_9BACI Queuine tRNA-ribosyltran sferase OS=Lentibacillus persicus OX=640948 GN=tgt PE=3 SV=1
MTAITYEHIKTCKQTGARLGKVHTPHGSFDTPAFMPVGTLATVKTMSPEELKEMNANIILSNTYHLWLRPGEDIIEEAGGLHQFMNWDGAILTDSGGFQVFSLSDMRDIKEEGVHFRNHLSGEKLFLSPEKAMHIQNSLGSDIMMAFDECPPYPASHDYMKASVERTSRWAERCLKAHDRPSEQGLFGIIQGGEHEDLRKQSAEDLVSMDFPGYAIGGLSVGEPKDIMNRMLEYTTPLLPSGKPRYLMGVGSPDSLIEGAIRGIDMFDCVLPTRIARNGTCMTSNGRLVVRNAKYSRDFRPIDENCDCHVCRNYTRAYIRHLVKCNETFGFRLTTYHNLYFLLKLMEQVRTAIMDDRLGDFKEAFFEQYGFNKENAKNF

SEQ ID NO: 56810 - protein, 379 aa, Lentibacillus salicampi
  misc_feature (1)..(379): tr|A0A4Y9AFZ9|A0A4Y9AFZ9_9BACI Queuine tRNA-ribosyltran sferase OS=Lentibacillus salicampi OX=175306 GN=tgt PE= 3 SV=1
MTAVTYEHIKTCKQTGARLGKVHTPHGSFDTPAFMPVGTLATVKTMSPDELKEMNANMILSNTYHLWLRPGEDIIQEAGGLHQFMNWDGAILTDSGGFQVFSLSDMRNIKEEGVHFRNHLSGEKLFLSPEKAMTIQNALGSDIMMAFDECPPYPASHDYMKASVERTSRWAERCLNAHERPSEQGLFGIVQGGEYKDLRKQAAEELVSLDFPGYAIGGLSVGEPKDTMNRVLEFTTPLLPADKPRYLMGVGSPDSLIDGAIRGIDMFDCVLPTRIARNGTCMTSNGRLVVRNAKYARDFNPIDENCDCHVCQNYTRAYIRHLIKCNETFGFRLTTYHNLYFLLKLMEQVRAAIAEDRLADFREAFFEQYGFNKQNAKNF

SEQ ID NO: 56811 - protein, 379 aa, Lentibacillus sp.
  misc_feature (1)..(379): tr|A0A549YLQ0|A0A549YLQ0_9BACI Queuine tRNA-ribosyltran sferase OS=Lentibacillus sp. NKC851-2 OX=2584959 GN=tgt PE=3 SV=1
MTAITYEHIKTCRQTGARLGRVHTPHGSFDTPAFMPVGTLATVKTMSPEELREMNANIILSNTYHLWLRPGEDIIQEAGGLHQFMNWDGAILTDSGGFQVFSLSDMRDIKEEGVHFRNHLSGEKLFLSPEKAMRIQNALGSDIMMAFDECPPYPASHAYMKASVERTLRWAERCLRAHDRPTEQGLFGIVQGGEYEDLRRQSAKDLVSLDFPGYAIGGLSVGEPKDVMNRMLASTTPLLPFNKPRYLMGVGSPDSLIDGAIRGVDMFDCVLPTRIARNGTCMTSIGRLVVRNAKYARDFRPLDENCNCYTCRNYTRAYIRHLVKCNETFGFRLTTYHNLYFLLKLMEQVRTAISEDRLGDFKEAFFEQYGFNKENAQNF

SEQ ID NO: 56812 - protein, 379 aa, Lentibacillus sp.
  misc_feature (1)..(379): tr|A0A4Q3XBZ4|A0A4Q3XBZ4_9BACI Queuine tRNA-ribosyltran sferase OS=Lentibacillus sp. SSKP1-9 OX=2510307 GN=tgt PE=3 SV=1
MTAITYEHIKTCSQTGARLGRVHTPHGSFDTPAFMPVGTLATVKTMSPEELQEMNAGIILSNTYHLWLRPGEDIIREAGGLHQFMNWDGAILTDSGGFQVFSLSDMRDIKEEGVHFRNHLSGEKLFLSPEKAMTIQNALGSDIMMAFDECPPYPASHDYMKASVERTSRWAERCLQAHERPEEQGLFGIIQGGEYEDLRKQSAQDLVSLDFPGYAVGGLSVGEPKDVMNQMLESTTPLMPFHKPRYLMGVGSPDSLIDGAIRGIDMFDCVLPTRIARNGTCMTSNGRLVVRNAKYARDFSPLDENCDCYTCRNYSRAYIRHLVKCNETFGFRLTTYHNLHFLLKLMQQVRTAIAEDRLGDFKEAFFEQYGFNEKDAKNF

SEQ ID NO: 56813 - protein, 376 aa, Lentibacter algarum
  misc_feature (1)..(376): tr|A0A1H3GSM2|A0A1H3GSM2_9RHOB Queuine tRNA-ribosyltran sferase OS=Lentibacter algarum OX=576131 GN=tgt PE=3 SV =1
MTQEFSFSLAATSGKARTGTISTPRGDIRTPAFMPVGTAATVKAMMPESVRATGADILLGNTYHLMLRPTAERIAALGGLHKFMNWDRPILTDSGGFQVMSLADLRKLTEEGVAFKSHIDGSKHMLSPERSMEIQRLLGSDIVMCFDECPALPATRDDIAKSMELSMRWAKRSRTAFGERPGYALFGIQQGGLEEDLRAQSAEALQDIGFEGYAVGGLAVGEGQEAMFNTLEFAPDQLPKDKPRYLMGVGKPDDIVGAVARGIDMMDCVLPSRSGRTGQVFTRLGVLNIKNARHQDDPRPLDENCGCPACKNYSRAYLHHVFRSQEIISSMLLTWHNLHYYQDLMAGMRAAITEDRFTEFERDFHSTRAQGDIDPL

SEQ ID NO: 56814 - protein, 376 aa, Lentimicrobiaceae bacterium
  misc_feature (1)..(376): tr|A0A2E2XXT5|A0A2E2XXT5_9BACT Queuine tRNA-ribosyltran sferase OS=Lentimicrobiaceae bacterium OX=2026756 GN=tg t PE=3 SV=1
MQFKLEVTDIKSSARAGEISTDHGKIETPIFMPVGTAGTVKGVHIKDVRDDIKADIILGNTYHLYLRPGLDVIEQSGGLHKFNGWDRPMLTDSGGYQVYSLSDRRKLDENGVIFQSHIDGSRHNFTPENVMDIQRVIGADIIMAFDECTPYPCDYDYAKKSMGITHRWLDRCINRFSETSPKYDYDQTLFPIVQGSTFRDLRKESAEYIASKGAEGNAIGGLSVGEPHDMMYEMTELVCGILPEDKPRYLMGVGTPANILESIALGVDMFDCVMPTRNGRNGMLFTKNGIINIKNEKWKNDFTSIDEEGDSFVDLAYSKAYLRHLFIAKELLGGMIASQHNLSFYLWLVREARKHIMEGDFAVWKNSMSERVARRL

SEQ ID NO: 56815 - protein, 376 aa, Lentimicrobium saccharophilum
  misc_feature (1)..(376): tr|A0A0S7BPX4|A0A0S7BPX4_9BACT Queuine tRNA-ribosyltran sferase OS=Lentimicrobium saccharophilum OX=1678841 GN= tgt PE=3 SV=1
MDFRLTHTDSRSNARAGLITTDHGEIATPVFMPVGTAGTVKAVHIRDVDEDVKARIILGNTYHLYLRPGLDILREAGGLHKFNGWKKPILTDSGGYQVYSLTDRRKMKEEGVVFQSHIDGSKHMFSPERVMDIQRIIGADIIMAFDECTPYPCDYNYAVKSMELTHRWLDRCIARFNETEDLYGYRQTLFPIVQGSVYKDLRIRSAEKIASCNAGGNAIGGLAVGEPVETMYEFTELVCSILPHDKPRYLMGVGTPVNILEGISQGVDMFDCVMPTRNGRNGMIFTSQGIINLKNEKWKADFSPLDPEGTSFVDSAYSRAYVRHLFVAGEILGPMIASQHNIAFYLWLVDEARRKIEAGTFSTWKDEMVKRLGQRI

SEQ ID NO: 56816 - protein, 403 aa, Lentisphaera araneosa
  misc_feature (1)..(403): tr|A6DS39|A6DS39_9BACT Queuine tRNA-ribosyltransferase OS=Lentisphaera araneosa HTCC2155 OX=313628 GN=tgt PE=3 SV=1
MSFTLHKKDGEARLGTLKTSHGDVPTPIFMPVGTVGSVKTMDSEDMMELDAKIILGNTYHLYLRPGLRIIDEAGDLHKFINWDRPILTDSGGYQVFSLAKLRKLKYDGVEFRSHIDGEKIFIGPKESMEIQKSLGSDIVMIFDECTPYPATYEQAKESLEITQRWGDECAKQELHPHQMLFGIVQGSTYEDLRIESARYLADMDLPGYAIGGLSVGEPEEEMLKTLDWVLPELPEDKPRYLMGVGTPPQLVESVARGVDMFDCVLPTRVARHGTAYTSSGQVQIKASKWRNDFGPIDDECDCKVCKGYSRAYVRHLLSTNEFSGMRLMTYHNLHFYLRLMERIREAIAEDRFEEFRQDFHAKYQRGQGEREERQVKRNKALDKEILDEKRARKKMRTQPKKKD

SEQ ID NO: 56817 - protein, 366 aa, Lentisphaerae bacterium
  misc_feature (1)..(366): tr|A0A1G0W8N4|A0A1G0W8N4_9BACT Queuine tRNA-ribosyltran sferase OS=Lentisphaerae bacterium GWF2_38_69 OX=179857 0 GN=tgt PE=3 SV=1
MKLKYTLLKKDFASKARLGIIETAHGKINTPIFMPVGTRASVKAMSPDELKDLGAEIILGNTYHLFLKPGMEIIKMAGGLHKFMNWNRPILTDSGGFQVFSLANLRKMTQDGVEFASHIDGSRFFLGPKESMSIQRDLGSDIVMCFDECTPYPCSYEEAKKSLDITLRWEKIARDEKLQNHQNLFGIVQGSTYKDLREHSASELVKVDFEGYSIGGLSVGEPEETMLECIDYVTPVLPETKPRYLMGSGTPRQIVESVARGIDMFDCVMPTRMARHGSAFIGKGETLPVKAGRYSKDFSPIEEGCQCYACKNFTRAYIRHLMNVGEILGLRLLTIHNLYYFLNLMKNIRVSIENGTFSELRKSFSS

SEQ ID NO: 56818 - protein, 407 aa, Lentisphaerae bacterium
  misc_feature (1)..(407): tr|A0A1V6FLW4|A0A1V6FLW4_9BACT Queuine tRNA-ribosyltran sferase OS=Lentisphaerae bacterium ADurb.Bin082 OX=1852 899 GN=tgt PE=3 SV=1
MKRQASAPGSWNSTCATEPATLTAKEIPTRMAFTILQKDPGSLARRGMLTTAHGQVQTPVFMPVGTQATVKAMTPKELVDMGAEIILGNTYHLNLRPGMDIVTAAGGLHRFMGWNRAILTDSGGFQVFSLSRLGKKTQDGVFFQSHLDGSRLFMGPVESMAIQRQLGSDIAMVFDECTAWPATWDEANRSLDLTLRWAAVSREQPAAPGQLRFGIVQGSTFPDLREKATRAIIDLDFDGIALGGVSVGEPEREMVKVLKFCAPLLPPALPHYLMGVGTPRQLILGVLNGIDMFDCVLPTRMGRNGSAFTMTGTMPVKAAIYKEDFRPIQEDCQCYACRHFTRAYIRHLLNANEILGARLMTIHNLHFFLELMRQARQHLENGTFGPFAQNVLELYPEAQAGEKEQPE

SEQ ID NO: 56819 - protein, 374 aa, Lentisphaerales bacterium
  misc_feature (1)..(374): tr|A0A524MZF2|A0A524MZF2_9BACT Queuine tRNA-ribosyltran sferase OS=Lentisphaerales bacterium OX=2448604 GN=tgt PE=3 SV=1
MNQPGQFEIIATDEGSSARLGRLQTAHGFIETPVFMPVGSKGAIKTMNPAELEGLGTSMLLGNTYHLMIRPGVEVVEKCGGLHSFMGWERGILTDSGGFQAFSLARLRKITDEGVEFNSHYDGARLFLGPVEAMEIQRRMASDIAMVLDECAPYPCDHNYACQAVERTLTWAFLCSRQPRAEGQLVFGIVQGGEYEDLRLSCANRLVEMNFDGYAVGGVSVGEPKDVLRRSVEFGVAGLPPEKPRYLMGVGIMSQIVDAVADGIDMFDCVIPTRFARNGTAFTRRGRFPVKAGEYRLDTGPIEAGCECYACRRFSRAYLRHLLNIDEVLGIHMLSLHNMHCYMQFMEEMRGSLRNGTFGDFRRKTKAERGEEER

SEQ ID NO: 56820 - protein, 245 aa, Lentisphaeria bacterium
  misc_feature (1)..(245): tr|A0A354UAI6|A0A354UAI6_9BACT Queuine tRNA-ribosyltran sferase (Fragment) OS=Lentisphaeria bacterium OX=205356 9 GN=tgt PE=3 SV=1
MNNFELLYQDPSSDARLGRLTTAHGVVNTPVFMPVGTRATVKAMSPRELEELNVQIILGNTYHLFLRPGPELIEKAGGLHQFEDWHHPILTDSGGFQVFSLSNLRKMKPDGVEFASHIDGTRFFLGPRESMAIQRALGSDIVMSFDECTPYPCKYEDAAKSLDVTLRWELMSREQKLKDHQQLFGIVQGSTYRDLRERSAKELVKIGYDGYSIGGLSVGESEEMMFECLEWVTPLLPKDKPRYLM

SEQ ID NO: 56821 - protein, 368 aa, Lentisphaeria bacterium
  misc_feature (1)..(368): tr|A0A3D3JWI5|A0A3D3JWI5_9BACT Queuine tRNA-ribosyltran sferase OS=Lentisphaeria bacterium OX=2053569 GN=tgt PE =3 SV=1
MSFSLIATDSATGARLGRLETAHGGIDTPCFMPVGTQGTVKAMTPDELVALGAQVILGNAYHLNLRPGMEVIRAAGGLHAFSNWSRPILTDSGGYQVFSLAKLRKIRPDGVEFQSHIDGRALFLGPVEAMAIQRDLGSDIAMAFDECTPYPCEHDAARTSLELTIDWARTCRDQPRAAGQLVFGIVQGSMYEDLRLESIERLIEIGFDGYAIGGLSVGEPDTEMFKVVDWTVPAMPAAMPRYLMGVGTPPQIVDAVRHGIDMFDCVLPTRMGRHGCAYTATGVVQAKAGRLKDDFAPLEEGCPCYTCTNFTRAYIRHLLNVQEILGMRLVTIHNLDFYLRLMRQIREHLQAGTLAAFSERFIAGYSAT

SEQ ID NO: 56822 - protein, 371 aa, Leptolinea tardivitalis
  misc_feature (1)..(371): tr|A0A0P6X9I4|A0A0P6X9I4_9CHLR Queuine tRNA-ribosyltran sferase OS=Leptolinea tardivitalis OX=229920 GN=tgt PE= 3 SV=1
MSSQFSYTRIAVDGSARAGIYHTPHGDIPTPIFAPVGTQATVKSVTPAQLHELGASLVLSNTYHLYLRPGADLVAEMGGLHSFMQWPNPILTDSGGFQVFSLAGIRKIDADGATFKSHIDGSMHRLTPEKSIDIQQKLGADIIMAFDECAPPHDRAYNEQALERTTAWAQRCLQTKTRDDQALFGIVQGGVFDDLRIKSAEWTASQPFDGLAIGGLSVGESKTEMHAVMDKVVPLLPQDKPRYLMGVGSPEDLVNGILRGIDIFDCVLPTRLARHQSAMTLTGRINMLNAIHTHDPNPIDETCSCYTCQHFSRAYIRHLISAREMLSSTLISIHNLYTLLRLVRLCREAILEQRFTSFAQDFLSQYNHPVK

SEQ ID NO: 56823 - protein, 380 aa, Leptolyngbya antarctica
  misc_feature (1)..(380): tr|A0A2W4VQH9|A0A2W4VQH9_9CYAN Queuine tRNA-ribosyltran sferase OS=Leptolyngbya antarctica OX=268115 GN=tgt PE= 3 SV=1
MTQAFSFSCDARCSHTQARAGTFTTPHGPVHTPRFMPVGTLANVKTVTPAQLATTGAQMVLSNTYHLHLQPGEDIVAEAGGLHRFMGWDGPMLTDSGGFQVFSLSQMRTITEDGVTFKSPKDGRIINIRPETSIQIQNDLGADVIMAFDECPPYPCSREAVKASTDRTWRWLLRCVEAHQRPDQALFGIVQGGVYPDLRTEAAKQLATLDLPGYAIGGVSVGEPPALIETIVKATAPCLPEHKPRYLMGVGTYREMAQAIAAGVDLFDCVIPTRLARHGAALVAGERWNLKNKQFRRDYTPIDAACPCYTCQNFTRAYLCHLIHAKEMLAFTLISIHNITELVRFTQRIREAILGDRFTDEFAHWLAPNPAATPVDDPSP

SEQ ID NO: 56824 - protein, 368 aa, Leptolyngbya boryana
  misc_feature (1)..(368): tr|A0A1Z4JL88|A0A1Z4JL88_LEPBY Queuine tRNA-ribosyltran sferase OS=Leptolyngbya boryana NIES-2135 OX=1973484 GN =tgt PE=3 SV=1
MNQFSYQCQARCTHTHARAGVFHTPHGIVETPRFMPVGTLANVKTITPDQLEATGAQMVLSNTYHLHLQPGEDIVERAGGVHRFMGWSKPMLTDSGGFQVFSLSEMRSITDEGVTFRSPRDGQMIKITPEKSIQIQNALGADVIMAFDECPPPGVGREATEKATSRTYDWLKRCIEAHGRSDQALFGIVQGGEFLDLRAEAVRQLADLDLPGYAIGGVSVGEAPEIIDRVVQATTPLLPDNKPRYLMGVGTYREIARAIAAGMDLFDCVIPTRLARHGAALVQGDRWNLKNAKFREDFQPIDETCPCYTCQNFSRAYISHLLRSQELLAYTLISIHNITELIRFTTQIRAAIFNGTFHTEFAKWLTPL

SEQ ID NO: 56825 - protein, 366 aa, Leptolyngbya foveolarum
  misc_feature (1)..(366): tr|A0A2W4U6N9|A0A2W4U6N9_9CYAN Queuine tRNA-ribosyltran sferase OS=Leptolyngbya foveolarum OX=47253 GN=tgt PE=3 SV=1
MSDFSYQLQAQCSCTQARAGIFHTPHGPVHTPRFMPVGTLANVKTVTPAQLKDCNAEMVLANTYHLHLQPGENLVAEAGGLHRFMNWNGPILTDSGGFQVFSLSEMRKVTDEGATFRSPRDGRIIEMPPERSIEIQNQLGADVIMAFDECPPYPATKEAVIAATDRTYRWLKRCISAHDRSDQALFGIIQGGVHLDLRSSAARAIAELDLPGYAIGGVSVGEPPELIEKIVKATTPLLPADKPRYLMGVGTYKEMAQAIASGIDLFDCVIPTRLARHGAALVQGERWNLKNARFRRDLTPVDETCTCYTCQNFTRAYLCHLLHAKELLAYTLISIHNITELIRFTTDIRTAILQDRFQQDYAHWLA

SEQ ID NO: 56826 - protein, 371 aa, Leptolyngbya frigida
  misc_feature (1)..(371): tr|A0A2T1E016|A0A2T1E016_9CYAN Queuine tRNA-ribosyltran sferase OS=Leptolyngbya frigida ULC18 OX=2107698 GN=tgt PE=3 SV=1
MTTGFSFTCQALCCKTKARAGIFATPHGLVETPRFMPVGTLANVKTVTPEQLRATGAQLVLANTYHLHLQPGEDIVARAGGLHRFMAWDGPILTDSGGFQVFSLSEMRTIAEEGVTFRSPRDGQMIHLTPERSIAIQNALGADVIMAFDECPPYPASYDNVMDSTERTYRWLKRCLAEHQRSDQALFGIVQGGVYPELRHNAAAQLAQLDLPGYAIGGVSVGEPAELIEAIVQATTPLLPPDKPRYLMGVGTYREMVQAIAAGVDLFDCVIPTRLARHGNALVQGDRWNLRNAKFREDFTALDASCACYTCQNFSRAYLSHLLRSQELLAYTLLSIHNITELVQFTQAIRRAIFNGSFTAEFGHWLSASTY

SEQ ID NO: 56827 - protein, 374 aa, Leptolyngbya sp.
  misc_feature (1)..(374): tr|K9F220|K9F220_9CYAN Queuine tRNA-ribosyltransferase OS=Leptolyngbya sp. PCC 7375 OX=102129 GN=tgt PE=3 SV=1
MVTDHFSFEHQASCCHTKARAGIFHTPHGPVHTPRFMPVGTLANVKTITPAQLKDTGAQMVLSNTYHLHLQPGEDLVAEAGGLHKFMGWSGPMLTDSGGFQVFSLSKIRTISEEGVTFRSPRDGSVIHMPPEESIRIQNQLGADVIMAFDECPPYPATREAVEAATQRTYRWLTRCIEAHQRNDQALFGIVQGGVHLDLRQAAAEQLVKLDLPGYAIGGVSVGEPPELIEKIVQATTPLLPPDKPRYLMGVGTYREMAQAIAAGMDLFDCVIPTRLARHGAALVQGERWNLKNQKFRRDLTPLDSTCTCYTCENFTRAYLCHLIHAHELLAYTLLSIHNITELIRFTQAIRKAILQNQFVAKFQQWLEPSTSSS

SEQ ID NO: 56828 - protein, 369 aa, Leptolyngbya sp.
  misc_feature (1)..(369): tr|A0A0S3UDP8|A0A0S3UDP8_9CYAN Queuine tRNA-ribosyltran sferase OS=Leptolyngbya sp. NIES-3755 OX=1752064 GN=tgt PE=3 SV=1
MNQFSFQCQAHCKHTHARAGVFHTPHGIVETPRFMPVGTLANVKTITPAQLEETGAQMVLSNTYHLHLQPGEDIVEKAGGVHRFMNWSKPMLTDSGGFQVFSLSEMRSITDEGVTFRSPRDGQMIKITPEKSIEIQNALGADVIMAFDECPPSGVGRDATEKATSRTYEWLKRCVEAHKRPDQALFGIVQGGEFLDLRAEAVRQLADLNLPGYAIGGVSVGEAPEIIDRVVQATTPLLPEDKPRYLMGVGTYREMARAIAAGMDLFDCVIPTRLARHGAALVQGERWNLKNARFREDFTSIDETCPCYTCQNFSRAYVSHLLRSQELLAYTLISIHNITELIRFTQRIRAAIFNGTFHTEFAHWITPVE

SEQ ID NO: 56829 - protein, 368 aa, Leptolyngbya valderiana
  misc_feature (1)..(368): tr|A0A166TPR7|A0A166TPR7_9CYAN Queuine tRNA-ribosyltran sferase OS=Leptolyngbya valderiana BDU 20041 OX=322866 GN=tgt PE=3 SV=1
MEFSLLHKDGAARRGRLTFERGTVETPAFMPVGTYGTVKAMTPEELRALGAEIILGNTFHLMLRPGTEVISAHGDLHDFMGWSGPILTDSGGFQVWSLAELRKMTEEGVTFASPVDGSRVFLGPEESMAVQRALGSDIVMIFDECTPWPASHEQAAESMRRSLRWAQRSKDAHGESEAALFGIVQGGMYADLRHESAEGLTGIGFDGYAIGGLSVGEPEDERNRVLDATCPHLPEDRPRYLMGVGRPEDLLAAVERGVDMFDCVMPTRNARNGHLFTSAGVLKIRNARYEKDTRPIDEHCDCYTCSHYSRAYVKHLQKCNEILGHRLATIHNLHYYQTLMRQIRDAIEDDRFADLAAECRSAWEAGIP

SEQ ID NO: 56830 - protein, 373 aa, Leptonema illini
  misc_feature (1)..(373): tr|H2CF09|H2CF09_9LEPT Queuine tRNA-ribosyltransferase OS=Leptonema illini DSM 21528 OX=929563 GN=tgt PE=3 SV= 1
MSFFEVTATDGQARTGLLRFANCTVPTPIFMPVGTRATVKSLWQEQLEEIGYELILGNTYHLYLRPGRLIERMGGLKRFMSWDHAVLTDSGGFQVFSLAQMTKFQEDGVLFQSHIDGSRHLFTPESVLETQLWLGSDIMMVLDDCPPGDADERRMADALNRTHCWAKQAMTEYERRADRGDFDPSVQRLFGIVQGGIHESLRLESLGVISELPFAGIALGGLSVGESREDMYRILQAIGPRMDATRPRYLMGVGTIPDFLEAIRNGIDMFDCVLPTRNARNGQALTSNGALNLRNATHAESSLPVDENCSCRVCRRYSRAYIRHLFQTGEMLGPELLTYHNLAFFYGFFAEARESIHNGTFPAFFEKWNRIPY

SEQ ID NO: 56831 - protein, 687 aa, Leptonema illini
  misc_feature (1)..(687): tr|H2CGY8|H2CGY8_9LEPT Queuine tRNA-ribosyltransferase OS=Leptonema illini DSM 21528 OX=929563 GN=tgt PE=3 SV= 1
MSRLDFQIQAKAGRARAATFRTLHGVIETPLFMPVGTNATVKGLRVEDLKTVGSQILLANTYHLLLRPGAEVFERMGGIHRMMNWSGSVLTDSGGFQIFSLPHSRNMTEEGALFRSYVDGATILLTPEMSIGMQKAIGSDIMMALDQCIPSTADYKTAEEAMHLTHRWAKRSLEARGDSEQALFGIIQGALFRDLRRQSAETLSALEFDGFAIGGLAVGETKDEREEFTSFTTDLMPENRPRYLMGVGTPIDLLEAVNAGVDMFDCIIPSALAQQSVAYTSRGRMRLERSVYKFADEPVDPDCDCYTCAHYGKAYIHHLHKADEILGWQLLSIHNLRFYHRLMASMRRHILAGSFESLYKEQREILANPDTDRPPGPPPVRTRNKREFIESIGAFCLHESRDGFVRIQHAPSGEVMHPGSEPDVEARRLYVEQSELIRRLGSSPLTVWDVGLGAAYNAMATIRAYEAGIHALSHSKTHNNARSESASAIDAATLPELRIISFENDLDALRLALTHVDRFPHLKHAGPHVLLRDGFWQSKHSPISWQLVQGDFLETMSEADRPDLIFYDPYSYKTNGPLWSLAAFRSMYRICGEHDAELFTYSAATRVRATLLAAGFFVAAGTGTGLKSDTTMALTEQAVQRRGTSALLDGRWLERWTRSDARFPDDVDEGERSHFAQLIEGHRQFAL

SEQ ID NO: 56832 - protein, 681 aa, Leptospira adleri
  misc_feature (1)..(681): tr|A0A5F2CQQ2|A0A5F2CQQ2_9LEPT Queuine tRNA-ribosyltran sferase OS=Leptospira adleri OX=2023186 GN=tgt PE=3 SV= 1
MPRLNFILEAEAPHTNARAATFTTLHGPVQTPIFMPVGTQATVRAQTVDSLKAMGSRVLLANTYHLLLRPGAEVFRKIGGIHKFMNWDSPVLTDSGGFQIFSLPNSRKMTEEGALFRSYVDGQMILLSPERSVDMQKAIGSDIMMVLDQCIPSTADYAKAKDAMEITHRWAKRSLDARGDSLQSMFGIVQGACFPDLRKESAKVLTQMHFDGFAIGGLAVGETKEERNDFCEISASLLPKNLPRYLMGVGTPVDLLEAVHRGVDMFDCTIPTELAQHGVAYTSAGKLQIHRTIYKFEDSKLDENCECPCCQNYSRSYLHHLIKTSEILGWHLIAMHNLNFYHRLMAEMRARIFEGNFASYYDHKKEELTRSDNVDPSLHKRRTPRAQRKRILGDYEIRENKEGKYWSVRQRSSGEVMHSVNDPSEEAKSLYVIQSGLSEKLSDRLRDSKESKAANPFVIWDVGLGAATNSMAAIRCYEEVDSPIPMNMISFECDLDPFRLAMRNIGCFPHLFHKAPRSILEKGNWTSVSGGLQWDLVEGDFEKTFSTQKIPDLVYYDPFSFKTDSKLWQPDFLKKLFLFLQGDPKNTMLITYSASTAVRSSLIFAGFWVGKGAGTGPKSETTVAYTKPPESKEEFSRLLGGEWLGRRQRSHARFRTDWNENENKIWEETILSHPQFETLPR

SEQ ID NO: 56833 - protein, 374 aa, Leptospira adleri
  misc_feature (1)..(374): tr|A0A2M9YKF2|A0A2M9YKF2_9LEPT Queuine tRNA-ribosyltran sferase OS=Leptospira adleri OX=2023186 GN=tgt PE=3 SV= 1
MIFKTTSEDPHTRARTGVLDLNGVKLNTPIFMPVGTRGVVKTLDTEDLEELEYSLILGNTYHLYLRPGTSVLDRFGGLKKFMTWKGALLTDSGGYQVFSLNSLFKYETDGVRFQSHIDGSRHYFTPGSVIDVQRSIGSDIMMVLDDCAPFDSSAERLRQSLDRTHRWAEMSVEHWEKNKNSQHLFGIFQGGIDLDSRLESLKAIASLPFDGIAIGGLSVGEPRKDFIRILDGISSHTDRSRPLYLMGVGTVPDILDGVKNGVDMFDCVLPTRNARNGQVFTSLGKVNLRNEKWKNSEAPMDPNCQCKVCKRYSIGYIRHLHHVGEITAFSLSTFHNLFFMKNFLSEIQKSIQAGEFLETYARWKNLYEKPEFSG

SEQ ID NO: 56834 - protein, 374 aa, Leptospira alexanderi
  misc_feature (1)..(374): tr|V6I905|V6I905_9LEPT Queuine tRNA-ribosyltransferase OS=Leptospira alexanderi serovar Manhao 3 str. L 60 OX= 1049759 GN=tgt PE=3 SV=1
MIFQTTSEDLRTRARTGILNLNGVTLETPVFMPVGTRGVVKTLSTDDLEELEYSLILGNTYHLYLRPGTSVLERFGGLKKFSTWKRALLTDSGGYQVFSLNSLFKYEQDGVRFQSHIDGSRHYFTPNSVIDIQRSIGSDIMMVLDDCAPFDSSPERLRQSLDRTHRWAEMSVEYWEKNKNSSHLFGIFQGGIDLGLRLESLQKIVSLPFDGVAIGGLSVGEPRKDFIRILEGVSAYTDRNRPLYLMGVGTVPDILDGVKNGVDMFDCVLPTRNARNGQVFTSLGKINLRNEKWKSSDAPMDPHCGCKVCKRYSIGYIRHLHHVGEITAFSLSTYHNLYFMKNFLSEIQKSIQAGEFLKIYAKWKNLYEKPEFSG

SEQ ID NO: 56835 - protein, 374 aa, Leptospira alstonii
  misc_feature (1)..(374): tr|T0FYP2|T0FYP2_9LEPT Queuine tRNA-ribosyltransferase OS=Leptospira alstonii serovar Pingchang str. 80-412 OX =1218564 GN=tgt PE=3 SV=1
MIFQTVSEDPHTRARTGILNLNGVKLETPVFMPVGTRGVVKTLSADDLEELEYSLILGNTYHLYLRPGTSVLDRFGGLKNFSTWKKALLTDSGGYQVFSLNSLFKYEQDGVRFQSHIDGSRHYFTPGSVIDIQRSIGSDIMMVLDDCAPFDSSPERLRQSLERTSRWAEMSVEYWEKDKNSQHLFGIFQGGVDLDLRLESLNTITSLPFDGIAIGGLSVGEPRKDFIRILNGISTYTDRNRPLYLMGVGTVPDILDGVKNGVDMFDCVLPTRNARNGQVFTSLGKINLRNEKWKNSDAPMDPNCGCKVCKRYSIGYIRHLHHVGEITAFSLSTYHNLYFMKSFLSEIQKSIQAGRFLEIYAKWKNLYEKPEFSG

SEQ ID NO: 56836 - protein, 374 aa, Leptospira alstonii; identical to SEQ ID NO: 56835
  misc_feature (1)..(374): tr|M6CXM6|M6CXM6_9LEPT Queuine tRNA-ribosyltransferase OS=Leptospira alstonii serovar Sichuan str. 79601 OX=12 18565 GN=tgt PE=3 SV=1

SEQ ID NO: 56837 - protein, 379 aa, Leptospira andrefontaineae
  misc_feature (1)..(379): tr|A0A4R9H820|A0A4R9H820_9LEPT Queuine tRNA-ribosyltran sferase OS=Leptospira andrefontaineae OX=2484976 GN=tgt PE=3 SV=1
MSEQKMIYRSRVSDTHSFARTGVLSLNGIEIPTPVFMPVGTRGAVKSLDSDDIDELGYELILGNTYHLYLRPGTEVLEKFGGLKNFVSYKKALLTDSGGFQVFSLNSLVKFKQEGVEFRSHIDGSPHFFTPQKVIDIQRAIGSDIMMVLDDCPPGDGTVSRIKDALDRTHRWAEEAVNYWEKDKRNQFLFGIFQGGTNLDLRLESLDKIRSLPFSGIAIGGLSVGEPRPDFIRTMEGISSYTDRTRPLYLMGVGTVPDILEGVRNGVDMFDCVLPTRNARNGQVFTSQGKVNLRNEKWKLLDQPMDPECECKVCKRYSIGYIRHLHHVKELSAFSLSTYHNLHFMKKFMKELRHSIEVGNFSEFFVKWKNLYETPEISR

SEQ ID NO: 56838 - protein, 371 aa, Leptospira bandrabouensis
  misc_feature (1)..(371): tr|A0A4Z1B279|A0A4Z1B279_9LEPT Queuine tRNA-ribosyltran sferase OS=Leptospira bandrabouensis OX=2484903 GN=tgt PE=3 SV=1
MSSIFKEKSKDPGSYARTGTLILNGVQIETPIFMPVGTRGSIKSLSSSDIDELGYNLILANTYHLYLKPGKEVLDHFHGLKNFMSYKRALLTDSGGFQVFSLASLFKFEDDGVRFQSHIDGSHHKFTPSSVIDMQRSIGSDIMMVLDDCAPYGSDLKRLELALERTHRWALESYHYWMEKPNGQNVFPIVQGGVNESLRKRSLDTLQNIDFPGIAIGGLSVGEPRPEYIRILECMAPFFDNARPRYLMGVGTVVDILEGVKNGIDMFDCVLPTRNARNGQVFTSQGKINLRNESHRLSESPIDPECGCKVCKTYSLGYIRHLHKVKELTAFSLSTYHNLYFMQSFMEKMRKSIEIGNFQGFYDHWKNLFGS

SEQ ID NO: 56839 - protein, 374 aa, Leptospira barantonii
  misc_feature (1)..(374): tr|A0A5F2B658|A0A5F2B658_9LEPT Queuine tRNA-ribosyltran sferase OS=Leptospira barantonii OX=2023184 GN=tgt PE=3 SV=1
MIFQTTSEDSRTRARTGILELNGVKLETPVFMPVGTRGVVKTLSMDDLEELEYSLILGNTYHLYLRPGTSVLDSFGGLKKFSTWKKALLTDSGGYQVFSLNSLFKYEQDGVRFQSHIDGSRHYFTPSSVIDIQRSIHSDIMMVLDDCAPFDSSPERLRQSLDRTHRWAEMSVEYWEKNKNSQHLFGIFQGGIDLDSRLESLKAITSLPFDGIAIGGLSVGEPRKDFIRILDGISTHTDRTRPLYLMGVGTVPDILDGVKNGVDMFDCVLPTRNARNGQVFTSLGKINLRNEKWKNSDAPMDPNCGCKVCKRYSIGYIRHLHHVGEITAFSLSTYHNLFFMKSFIAEIQKSIQAGEFLETYARWKNLYEKPEFSG

SEQ ID NO: 56840 - protein, 374 aa, Leptospira barantonii
  misc_feature (1)..(374): tr|A0A2M9YVF1|A0A2M9YVF1_9LEPT Queuine tRNA-ribosyltran sferase OS=Leptospira barantonii OX=2023184 GN=tgt PE=3 SV=1
MIFQTTSEDSRTRARTGILELNGVKLETPVFMPVGTRGVVKTLSMDDLEELEYSLILGNTYHLYLRPGTSVLDSFGGLKKFSTWKKALLTDSGGYQVFSLNSLFKYEQDGVRFQSHIDGSRHYFTPSSVIDIQRSIRSDIMMVLDDCAPFDSSPERLRQSLDRTHRWAEMSVEYWEKNKNSQHLFGIFQGGIDLDSRLESLKAIASLPFDGIAIGGLSVGEPRKDFIRILDGISTHTDRTRPLYLMGVGTVPDILDGVKNGVDMFDCVLPTRNARNGQVFTSLGKINLRNEKWKNSDAPMDPNCGCKVCKRYSIGYIRHLHHVGEITAFSLSTYHNLYFMKSFIAEIQKSIQAGEFLETYARWKNLYEKPEFSG

SEQ ID NO: 56841 - protein, 371 aa, Leptospira biflexa
  misc_feature (1)..(371): sp|B0SKS9|TGT_LEPBP Queuine tRNA-ribosyltransferase OS= Leptospira biflexa serovar Patoc (strain Patoc 1 / ATCC 23582 / Paris) OX=456481 GN=tgt PE=3 SV=1
MSSIFKEGIYDTGSYARTGTLDLNGIQIQTPIFMPVGTRGSIKSLTSEDIDELGYNLILANTYHLYLKPGKEVFDHFQGLKNFMSYKKALLTDSGGFQVFSLASLFKFEDDGVRFQSHIDGSHHKFTPASVIDMQRSIGSDIMMVLDDCAPYGSDTKRLELALDRTHRWAKESFAYWMENPGGQNVFPIVQGGVNETLRLRSLETLQKIDFPGIAIGGLSVGEPRPEYIRILECMAPHLDKSRPRYLMGVGTVVDILEGVKNGIDMFDCVLPTRNARNGQVFTSKGKINLRNESHRLSDSPIDPQCECKVCKTYSLGYIRHLHKVKELTAFSLSTYHNLFFMQSFMEKMRKSIEIGNFQGFYDHWKNLFGS

SEQ ID NO: 56842 - protein, 371 aa, Leptospira biflexa; identical to SEQ ID NO: 56841
  misc_feature (1)..(371): sp|B0SCA8|TGT_LEPBA Queuine tRNA-ribosyltransferase OS= Leptospira biflexa serovar Patoc (strain Patoc 1 / Ames ) OX=355278 GN=tgt PE=3 SV=1

SEQ ID NO: 56843 - protein, 374 aa, Leptospira borgpetersenii
  misc_feature (1)..(374): tr|M6BUY1|M6BUY1_LEPBO Queuine tRNA-ribosyltransferase OS=Leptospira borgpetersenii serovar Hardjo-bovis str. Sponselee OX=1303729 GN=tgt PE=3 SV=1
MIFQTTSEDLRTRARTGILNLNGVKLETPVFMPVGTRGVVKTISADDLEELEYSLILGNTYHLYLRPGTAVLERFGGLKKFSTWKRALLTDSGGYQVFSLNSLFKYEQDGVRFQSHIDGSRHYFTPNSVIDIQRTIGSDIMMVLDDCAPFDSSQERLRQSLDRTHRWAEMSVEYWEKNKNSSHLFGIFQGGIDLGLRLESLQKIVSLPFDGIAIGGLSVGEPRKDFIRILEGVSAYTDRSRPLYLMGVGTVPDILDGVKNGVDMFDCVLPTRNARNGQVFTSLGKINLRNEKWKSSDVPIDPHCGCKVCKRYSIGYIRHLHHVGELTAFSLSTYHNLYFMKNFLSEIRKSIQAGEFLKIYAKWKNLYEKPEFSG

SEQ ID NO: 56844 - protein, 374 aa, Leptospira borgpetersenii; identical to SEQ ID NO: 56843
  misc_feature (1)..(374): sp|Q04UC6|TGT_LEPBJ Queuine tRNA-ribosyltransferase OS= Leptospira borgpetersenii serovar Hardjo-bovis (strain JB197) OX=355277 GN=tgt PE=3 SV=1

SEQ ID NO: 56845 - protein, 371 aa, Leptospira bourretii
  misc_feature (1)..(371): tr|A0A4R9IIX3|A0A4R9IIX3_9LEPT Queuine tRNA-ribosyltran sferase OS=Leptospira bourretii OX=2484962 GN=tgt PE=3 SV=1
MSSIFKEKSKDPGSYARTGTLHLNGIQIETPIFMPVGTRGSIKSLSSSDIDELGYNLILANTYHLYLRPGKEVLDHFHGLKNFMSYKRALLTDSGGFQVFSLASLFKFEEDGVRFQSHIDGSHHKFTPSSVIDMQRSIGSDIMMVLDDCAPYGSDLGRLELALDRTHRWAKESYNYWMENPGGQNVFPIVQGGVNESLRKRSLDTLQNINFPGIAIGGLSVGEPRPEYIRILECMAPFFDAARPRYLMGVGTVVDILEGVKNGIDMFDCVLPTRNARNGQVFTSLGKINLRNESHRLSDGPIDPECGCKVCVTYSLGYIRHLHKVKELTAFSLSTYHNLFFMQSFMEKMRKSIEIGNFQGFYDHWKNLFGS

SEQ ID NO: 56846 - protein, 371 aa, Leptospira bouyouniensis
  misc_feature (1)..(371): tr|A0A4R9HRR6|A0A4R9HRR6_9LEPT Queuine tRNA-ribosyltran sferase OS=Leptospira bouyouniensis OX=2484911 GN=tgt P E=3 SV=1
MSPIFKEGIYDTGSYARTGTLDLGGIQIQTPIFMPVGTRGSIKSLTSEDIDELGYKLILANTYHLYLKPGKEVFDHFQGLKNFMSYKKALLTDSGGFQVFSLASLFKFEDDGVRFQSHIDGSYHKFTPASVIDMQRSIGSDIMMVLDDCAPYGSDTKRLELALDRTHRWAKESYEYWMENPNGQNVFPIVQGGVNETLRLRSLETLQKIDFPGIAIGGLSVGEPRPEYIRILECMAPHLDKSRPRYLMGVGTVVDILEGVKNGIDMFDCVLPTRNARNGQVFTSNGKINLRNESHRLSESPIDPDCECKVCKTYSLGYIRHLHKVKELTAFSLSTYHNLFFMQSFMEKMRKSIEIGNFQGFYDHWKNLFGS

SEQ ID NO: 56847 - protein, 371 aa, Leptospira brenneri
  misc_feature (1)..(371): tr|A0A2M9Y0J3|A0A2M9Y0J3_9LEPT Queuine tRNA-ribosyltran sferase OS=Leptospira brenneri OX=2023182 GN=tgt PE=3 S V=1
MPSIFKEKSKDPGSYARTGTLELNGIQIETPIFMPVGTRGSIKSLSSSDIDELGYNLILANTYHLYLKPGKEVLDHFHGLKNFMSYKRALLTDSGGFQVFSLASLFKFEEDGVRFQSHIDGSYHKFTPASVIEMQRSIGSDIMMVLDDCAPYGSDLKRLELALERTHRWAKESYEYWMERPGGQNVFPIVQGGVNESLRKRSLDTLQNIDFPGIAIGGLSVGEPRPEYIRILECMAPFFDQARPRYLMGVGTVVDILEGVKNGIDMFDCVLPTRNARNGQVFTSLGKINLRNESHRLAEGPIDPECGCKVCTTYSLGYIRHLHKVKELTAFSLSTYHNLYFMQSFMEKMRKSIEIGNFQGFYDHWKNLFGS

SEQ ID NO: 56848 - protein, 374 aa, Leptospira broomii
  misc_feature (1)..(374): tr|T0GIU4|T0GIU4_9LEPT Queuine tRNA-ribosyltransferase OS=Leptospira broomii serovar Hurstbridge str. 5399 OX= 1049789 GN=tgt PE=3 SV=1
MIFREETRDPQSFARTGTLALNGIEIPTPVFMPVGTRGAIKSLDSDDIDELGFELILGNTYHLYLRPGTEVLQSFGGLKNFISYKKALLTDSGGFQVFSLNSLFKFETDGVAFRSHIDGSSHFFTPEKVVDIQRTIGSDIMMVLDDCPPGEASVARIKESLDRTHRWAETAVRYWEKDKNGQHLFGIVQGGTNVELRLESLSYLNGLPFSGIALGGLSVGEPRPDFIRTLEGIAPHVDRNRPLYLMGVGTVPDILDGVRNGVDMFDCVLPTRNARNGQVFTSKGKINLRNEKWKFSDEPLDSECECRVCKRYSVGYLRHLHHVKELTAFSLSTFHNLSFMKKFMFELRRSIKEGKFDRFSAKWKNLYERPEISR

SEQ ID NO: 56849 - protein, 371 aa, Leptospira congkakensis
  misc_feature (1)..(371): tr|A0A4Z1A4V2|A0A4Z1A4V2_9LEPT Queuine tRNA-ribosyltran sferase OS=Leptospira congkakensis OX=2484932 GN=tgt PE =3 SV=1
MSSIFKERSKDPGSYARTGTLHLNGIQVETPIFMPVGTRGSIKSLSSSDIDELGYNLILANTYHLYLKPGKEVMDHFHGLKNFMSYKRALLTDSGGFQVFSLASLFKFEEDGVRFQSHIDGSHHKFTPASVIDMQRSIGSDIMMVLDDCAPYGSDLKRLELALDRTHRWAKESYEYWMENPNGQNVFPIVQGGVNESLRKRSLDTLQNINFPGIAIGGLSVGEPRPEYIRILECMAPFFDSVRPRYLMGVGTVVDILEGVKNGIDMFDCVLPTRNARNGQVFTSLGKINLRNESHRLAEGPIDPECGCKVCKTYSLGYIRHLHKVKELTAFSLSTYHNLYFMQSFMEKMRKSIEIGNFQGFYDHWKNLFGS

SEQ ID NO: 56850 - protein, 374 aa, Leptospira dzianensis
  misc_feature (1)..(374): tr|A0A5F2E276|A0A5F2E276_9LEPT Queuine tRNA-ribosyltran sferase OS=Leptospira dzianensis OX=2484905 GN=tgt PE=3 SV=1
MIFKTLSEDSKTRARTGILNLNGVELETPVFMPVGTRGVVKTLTMDDLEELEYSLILGNTYHLYLRPGTDVLDKFGGLKKFSTWKKALLTDSGGYQVFSLNSLFKYEQDGVRFQSHIDGSRHYFTPSSVIDVQRSIGSDIMMVLDDCAPFDSTPERLRQSLDRTHRWAEMSVEYWEKRKNSQHLFGIFQGGIDLDFRLESLQAITSLPFDGVAIGGLSVGEPRKDFIRILEGISKYTDRNRPLYLMGVGTVPDILDGVKNGVDMFDCVLPTRNARNGQVFTSLGKINLRNEKWKNSDAPMDPNCGCKVCKRYSIGYIRHLHHVGEITAFSLSTYHNLYFMKSFLAEIRKSIQAGEFLETYARWKNLYEKPEFSG

SEQ ID NO: 56851 - protein, 374 aa, Leptospira dzianensis
  misc_feature (1)..(374): tr|A0A5F2ANH0|A0A5F2ANH0_9LEPT Queuine tRNA-ribosyltran sferase OS=Leptospira dzianensis OX=2484905 GN=tgt PE=3 SV=1
MIFKTLSEDSKTRARTGILNLNGVELETPVFMPVGTRGVVKTLAMDDLEELEYSLILGNTYHLYLRPGTDVLDKFGGLKKFSTWKKALLTDSGGYQVFSLNSLFKYEQDGVRFQSHIDGSRHYFTPGSVIDIQRSIGSDIMMVLDDCAPFDSTPERLRQSLDRTHRWAEMSVEYWEKRKNSQHLFGIFQGGIDLDFRLESLQAITSLPFDGVAIGGLSVGEPRKDFIRILEGISKYTDRNRPLYLMGVGTVPDILDGVKNGVDMFDCVLPTRNARNGQVFTSLGKINLRNEKWKNSDAPMDPNCGCKVCKRYSIGYIRHLHHVGEITAFSLSTYHNLYFMKSFLAEIRKSIQAGEFLETYARWKNLYEKPEFSG

SEQ ID NO: 56852 - protein, 379 aa, Leptospira dzoumogneensis
  misc_feature (1)..(379): tr|A0A4Z1AJQ7|A0A4Z1AJQ7_9LEPT Queuine tRNA-ribosyltran sferase OS=Leptospira dzoumogneensis OX=2484904 GN=tgt PE=3 SV=1
MSEQKMIYRSRVSDPNSFARTGTLSLNGIEIPTPVFMPVGTRGAVKSLDSDDIDELGYELILGNTYHLYLRPGTEVLEKFGGLKNFVSYKKALLTDSGGFQVFSLNSLVKFKQEGVEFRSHIDGSPHFFTPQKVIDIQRAIGSDIMMVLDDCPPGDGTVSRIKDALDRTHRWAEEAVNYWMKDKRNQFLFGIFQGGTNLDLRLESLDKIRSLPFSGIAIGGLSVGEPRPDFIRTMEGISSYTDRTRPLYLMGVGTVPDILEGVRNGVDMFDCVLPTRNARNGQVFTSQGKVNLRNEKWKLLDEPMDPECECKVCKRYSIGYIRHLHHVKELSAFSLSTYHNLHFMKKFMKELRHSIEVGNFSEFFVKWKNLYERPEISR

SEQ ID NO: 56853 - protein, 371 aa, Leptospira ellinghausenii
  misc_feature (1)..(371): tr|A0A2P2DAD8|A0A2P2DAD8_9LEPT Queuine tRNA-ribosyltran sferase OS=Leptospira ellinghausenii OX=1917822 GN=tgt PE=3 SV=1
MTSIFKEGVYDPGSYARTGTLTLGGIQIPTPIFMPVGTRGSIKSLTSEDINELGYELILANTYHLYLKPGKEVLDHFAGLKNFMSYKKALLTDSGGFQVFSLASLFKFEDDGVRFQSHIDGSYHKFTPASVIDVQRSIGSDIMMVLDDCAPYGSDTKRLELALERTHRWAKESYQYWMENPNGQNVFPIVQGGVNESLRLKSLETLQNIAFPGIAIGGLSVGEPRPEYIRILECMASYLDKQRPHYLMGVGTVVDILEGVKNGIDMFDCVLPTRNARNGQVFTSRGKINLRNESHRLSELPIDPECECKVCKTYSLGYIRHLHKVKELTAFSLSTYHNLFFMQSFMEKMRKSIETGNFRPFYDHWKNLFGS

SEQ ID NO: 56854 - protein, 374 aa, Leptospira elllisii
  misc_feature (1)..(374): tr|A0A2N0B6F7|A0A2N0B6F7_9LEPT Queuine tRNA-ribosyltran sferase OS=Leptospira elllisii OX=2023197 GN=tgt PE=3 S V=1
MIFQTTFEDPNTRARTGILELNGTKLETPVFMPVGTRGVVKTLRSEDLEELEYSLILGNTYHLYLRPGTSVLDRFGGLKKFMTWKKALLTDSGGYQVFSLNSLFKYEHDGVKFQSHIDGSRHYFTPSSVIDIQRSIGSDVMMVLDDCAPFDSSPERLRQSLERTHRWAEMSVDHWEKNKNSQHLFGIFQGGIDLEARMESLKAITSLPFDGIAIGGLSVGEPRKDFIRILEGIGPHTDRNRPLYLMGVGTVSDILDGVRNGVDMFDCVLPTRNARNGQVFTSNGKINLRNEKWKNSDEPMDPNCGCRVCKRYSLGYIRHLHHVGEITAFSLSTFHNLFFMKTFLAEIRKSIQEGEFMKTYAKWKNLYEKPEFSG

SEQ ID NO: 56855 - protein, 374 aa, Leptospira fainei
  misc_feature (1)..(374): tr|S3V6H5|S3V6H5_9LEPT Queuine tRNA-ribosyltransferase OS=Leptospira fainei serovar Hurstbridge str. BUT 6 OX= 1193011 GN=tgt PE=3 SV=1
MIFREETRDPQSFARTGTLALNGVEIPTPVFMPVGTRGAIKSLDSDDIDELGFELILGNTYHLYLRPGEEVLKRFGGLKNFISYKKALLTDSGGFQVFSLNSLFKFEADGVAFRSHIDGSAHFFTPEKVVDIQRTIGSDIMMVLDDCPPGDASVARIKESLDRTHRWAETAVEHWEKDKNGQHLFGIVQGGTNVELRLESLSYLNGLPFSGIALGGLSVGEPRPDFIRTLEGIAPYSDRNRPLYLMGVGTVPDILDGVRNGVDMFDCVLPTRNARNGQVFTSKGKINLRNEKWKFSDEPLDSECECRVCKRYSVGYLRHLHHVKELTAFSLSTFHNLSFMKKFMFELRRSIQEGKFDQFSAKWKNLYERPEISR

SEQ ID NO: 56856 - protein, 374 aa, Leptospira fletcheri
  misc_feature (1)..(374): tr|A0A4R9GEE9|A0A4R9GEE9_9LEPT Queuine tRNA-ribosyltran sferase OS=Leptospira fletcheri OX=2484981 GN=tgt PE=3 SV=1
MIFREKTRDPHSQARTGTLILNGMEIETPVFMPVGTRGAVKSLDSGDIDELGFDLILGNTYHLYLRPGTEVLERFGGLKNFISYNRALLTDSGGFQVFSLNSLFKFEKDGVQFRSHIDGSPHTFTPEKVIDIQRVIGSDIMMVLDDCPPGDASPIRIRESLERTHRWAEMAVNHWQKRTNGQHLFGIVQGGTNLDLRLESLGVLNSLPFSGIAIGGLSVGEPRPDFIRTLEGISRFTDRNRPLYLMGVGTVPDILEGVRNGVDMFDCVLPTRNARNGQVFTSKGKINLRNEKWKFSDEPLDLECKCKVCKRYSIGYLRHLHHVKELTAFSLSTFHNLSFMKKFMFELRSSIQVGKFDEFFSKWKILYERPEISR

SEQ ID NO: 56857 - protein, 374 aa, Leptospira fluminis
  misc_feature (1)..(374): tr|A0A4R9GQ05|A0A4R9GQ05_9LEPT Queuine tRNA-ribosyltran sferase OS=Leptospira fluminis OX=2484979 GN=tgt PE=3 S V=1
MIFREKTRDPHSQARTGTLLLNGIEIETPVFMPVGTRGAVKSLDSGDIDELGFDLILGNTYHLYLRPGMEVLERFGGLKNFISYRRALLTDSGGFQVFSLNSLFKFERDGVQFRSHIDGSPHTFTPEKVIDIQRVIGSDIMMVLDDCPPGDASLVRIRESLDRTHRWAEVAVNHWQKRTNGQHLFGIVQGGTNLDLRLESLGVLNSLPFSGIAIGGLSVGEPRPDFIRTLEGISRFTDRNRPLYLMGVGTVPDILEGVRNGVDMFDCVLPTRNARNGQVFTSKGKINLRNEKWKFSDEPLDTECECKVCKRYSIGYLRHLHHVKELTAFSLSTFHNLSFMKKFMSELRSSIQVGKFDEFFTKWKILYERPEISR

SEQ ID NO: 56858 - protein, 374 aa, Leptospira gomenensis
  misc_feature (1)..(374): tr|A0A5F1YAV8|A0A5F1YAV8_9LEPT Queuine tRNA-ribosyltran sferase OS=Leptospira gomenensis OX=2484974 GN=tgt PE=3 SV=1
MIFQTTFEDPNTLARTGILELNGTKLETPVFMPVGTRGVVKTLRSEDLEELEYSLILGNTYHLYLRPGTSVLDRFGGLKKFMTWKKALLTDSGGYQVFSLNSLFKYEQDGVKFQSHIDGSRHYFTPGSVIDIQRSIGSDIMMVLDDCAPFDSSPERLRQSLERTHRWAEMSVDHWQKNKNSQHLFGIFQGGIDLEARMESLNAITSLPFDGIAIGGLSVGEPRRDFIRILEGIGPHTDRNRPLYLMGVGTVPDILDGVRNGVDMFDCVLPTRNARNGQVFTSKGKINLRNEKWKNSDEPMDPNCGCRVCERYSIGYIRHLHHVGEITAFSLSTFHNLFFMKSFLSEIRKSIQSGEFMKTYAKWKNLYEKPEFSG

SEQ ID NO: 56859 - protein, 379 aa, Leptospira haakeii
  misc_feature (1)..(379): tr|A0A2N0BXS9|A0A2N0BXS9_9LEPT Queuine tRNA-ribosyltran sferase OS=Leptospira haakeii OX=2023198 GN=tgt PE=3 SV =1
MSEQKMIYRSRVSDPNSFARTGTLSLNGIEIPTPVFMPVGTRGAIKSLDSDDIDELGYELILGNTYHLYLRPGTEVLEKFGGLKNFVSYKKALLTDSGGFQVFSLNSLVKFKKEGVEFRSHIDGSPHFFTPEKVIDIQRAIGSDIMMVLDDCPPGDGTVARIKDALDRTHRWAEEAVNYWAKDKRNQFLFGIFQGGTNLDLRLESLDKIRSLPFSGIAIGGLSVGEPRPDFIRTMEGISSYTDRTRPLYLMGVGTVPDILEGVRNGVDMFDCVLPTRNARNGQVFTSQGKVNLRNEKWKFRDEPMDPECECKVCKRYSIGYIRHLHHVKELSAFSLSTYHNLHFMKKFMKELRHSIEVGNFSEFFVKWKNLYETPEISR

SEQ ID NO: 56860 - protein, 371 aa, Leptospira harrisiae
  misc_feature (1)..(371): tr|A0A2N0AIH6|A0A2N0AIH6_9LEPT Queuine tRNA-ribosyltran sferase OS=Leptospira harrisiae OX=2023189 GN=tgt PE=3 SV=1
MSSIFKERSKDPGSYARTGNLNLNGIQIETPIFMPVGTRGSIKSLSSSDIDELGYNLILANTYHLYLRPGKEVLDHFQGLKNFMAYKRALLTDSGGFQVFSLASLFKFEEDGVRFQSHIDGSHHKFTPASVIDMQRSIGSDIMMVLDDCAPYGSDLGRLELALDRTHRWALESYNYWMEKPNGQNVFPIVQGGVNESLRKRSLDTLQNINFPGIAIGGLSVGEPRPEYIRILECMAPYFDQARPRYLMGVGTVVDILEGVKNGIDMFDCVLPTRNARNGQVFTSRGKINLRNESHRLSDTPIDPECGCKVCVTYSLGYIRHLHKVKELTAFSLSTYHNLFFMQSFMEKMRKSIEIGNFQGFYDHWKNLFGS

SEQ ID NO: 56861 - protein, 379 aa, Leptospira hartskeerlii
  misc_feature (1)..(379): tr|A0A2M9XCX2|A0A2M9XCX2_9LEPT Queuine tRNA-ribosyltran sferase OS=Leptospira hartskeerlii OX=2023177 GN=tgt PE =3 SV=1
MSEQKMIYRSRVEDPHSFARTGTLSLNGIEIPTPVFMPVGTRGAVKSLDSDDIDELGYELILGNTYHLYLRPGTEVLEKFGGLKNFVSYKKALLTDSGGFQVFSLNSLVKFKKEGVEFRSHIDGSPHFFTPEKVIDIQRSIGSDIMMVLDDCPPGDGTVSRIKEALDRTHRWAEEAVNYWEKDKRNQFLFGIFQGGTNLDLRLESLEKIRSLPFSGIAIGGLSVGEPRPDFIRTMEGISSYTDRTRPLYLMGVGTVPDILEGVRNGVDMFDCVLPTRNARNGQVFTSRGKVNLRNEKWKLVDEPMDPECECKVCKRYSIGYIRHLHHVKELSAFSLSTYHNLHFMKKFMRELRHSIEVGNFSEFFVKWKNLYERPEISR

SEQ ID NO: 56862 - protein, 371 aa, Leptospira idonii
  misc_feature (1)..(371): tr|A0A4R9LX95|A0A4R9LX95_9LEPT Queuine tRNA-ribosyltran sferase OS=Leptospira idonii OX=1193500 GN=tgt PE=3 SV= 1
MPLRFQSVASDKQSFARSGKLRLGEIEVNTPVFMPVGTRGSVKSLSSEDILELGYQLILGNTYHLYLKPGKEVLDHFGGLKKFMAYPNALLTDSGGFQVFSLSGLFKFEEDGVRFQSHIDGSHHKFTPESVIDMQRSIGSDIMMVLDDCAPYGSSVERLKQALDRTHRWAKQSVEYWQKNENGQNLFCIVQGGVNEALRAESLHYLQSLPFPGIALGGLSVGEPREEYVRILESLAPSLDPARPRYLMGVGTVLDILEGVRNGIDMFDCVLPTRNARNGQVFTSKGKVNLRNESHRLSTGPIDPECSCKVCKTYSLGYIRHLHKVKELSAFSLSTYHNLYFMKQFMDSLRISIENQEFGTFYTHWKKLYAS

SEQ ID NO: 56863 - protein, 672 aa, Leptospira idonii
  misc_feature (1)..(672): tr|A0A4R9LWW0|A0A4R9LWW0_9LEPT Queuine tRNA-ribosyltran sferase OS=Leptospira idonii OX=1193500 GN=tgt PE=3 SV= 1
MSRLDFILEKEASGSKARAARFTTLHGEVKTPIFMPVGTQATVKSQTVETLKAAGSNVLLANTYHLLLRPGPEVFQKLGGIHKFMNWDRPVLTDSGGFQIFSLPNARKMTEEGAVFRSYVNGQNVLLSPEISIGMQKAIGSDIMMVLDECVPSTVEYSKAKSAMEVTHRWAKRSLDARGDSPQSMFGIVQGACFPDLRKRSAEVLTQLPFDGFAIGGLAVGETKEERNDFCELSASLLPRNLPRYLMGVGTPLDLLEAVHRGVDMFDCTIPTELAQRGVAFTSKGKLQIHRTVYKFEDQILDPDCDCPCCCSYSRAYLHHLTKTEEVLGWHLLGIHNLYFYHKLMKDMREEILSDTFASFYERKKEELDRTDNVNPSFHRLKPSKANRKKSLGDYELIENPAGEYWSVRQKSSGEVMHSVNDPYLESKQLYIEQSGLSEILRSSSDTAPLVIWDVGLGAATNAMMAVRCFEEIEVPRTLKIISFESDLDPLRLALKNNGKFPHLFHKAPWELLKYNVWKSDSKNLIWELVEGDFAVHFVQKEIPDLIFYDPFSFKTDSSLWTHTFFEQLFDRLRNSSRLVRLYTYSASTAVRSSLLHSGFWVGRGLGSGPKSETTVAYSGKPNTESELSGLLGKEWLSRWEKSDARYPKNLDPAQRKEWVERILSHPQFVSK

SEQ ID NO: 56864 - protein, 687 aa, Leptospira ilyithenensis
  misc_feature (1)..(687): tr|A0A4R9LN87|A0A4R9LN87_9LEPT Queuine tRNA-ribosyltran sferase OS=Leptospira ilyithenensis OX=2484901 GN=tgt P E=3 SV=1
MSRLNFILEAEAPGTKARAGRFTTLHGEVSTPIFMPVGTQATVKAQNVETLKSVGSRVLLANTYHLLLRPGAEVFRKLGGIHRFMNWDGPVLTDSGGFQIFSLPNARKMTEEGAVFRSYVDGQNVMLSPEISIEMQKAIGSDIMMVLDECVPSTVEHWEAKRAMEVTHRWAKRSLNARGDSLQSMFGIVQGACFEDLRKQSAEVLTQLPFDGFAIGGLAVGETKEERNDFCELSASFLPKNLPRYLMGVGTPLDLLEAVHRGVDMFDCTIPTELAQRGVAFTSIGKLQLHRAVYKFEDSVLDENCDCICCKDYSKAYLHHLIKSDEVLGWQLLAIHNLYFYHRLMSEMRSSIFNGKFLSYYTEKKDSLSQSDNVNPSHHILKPSKAVRKRSLGDYEIIENEEKGYWSVRQKSSGEVMHSVNSPVEEAKKLYIDQSNLRQRISSDSSDPEKSAFLYNDETDPIVIWDVGLGAATNAMAALGCFEELANPKPMRLISFESDLDPLRLALKNNGRFPHLFHKAPKEVLEKSFWKSDSENFTWKLVLGDFATTFSREESPDVVFYDPFSFKTDSILWKPEFFSMLFSYFQTREKTVSLYTYSAATGVRAALLSVGFWVGRGVGSGPKSETTIAYSKCPEGIEEKEGLLGKEWLGRWERSDARYPAELSNENKADWDNRILIHPQFHKDLYL

SEQ ID NO: 56865 - protein, 371 aa, Leptospira ilyithenensis
  misc_feature (1)..(371): tr|A0A4R9LQB4|A0A4R9LQB4_9LEPT Queuine tRNA-ribosyltran sferase OS=Leptospira ilyithenensis OX=2484901 GN=tgt P E=3 SV=1
MPLSFIQTSKDPNSFARGGILSLGDIEVETPVFMPVGTRGSVKALSSEDILELGYKLILGNTYHLYLKPGKEVMETFGGLKNFMAYPNALLTDSGGFQVFSLSGLFKFEEDGVRFQSHIDGSHHKFTPESVIDMQRAIGSDIMMVLDDCAPYGSSTERLKESLERTHRWAKQSVAYWQNNPNNQNLFCIVQGGVNEALRLESLQTLQNMDFPGIALGGLSVGEPREEYVRILEALSPHLDTKRPRYLMGVGTVVDILDGVKNGIDMFDCVLPTRNARNGQVFTSKGKINLRNESHRLSTEPIDPLCECKVCKTYSLGYLRHLHKVKEILAFTLSTYHNLYFMKQFMDNLRKSIEKGEFQTYYDHWKKLFTP

SEQ ID NO: 56866 - protein, 374 aa, Leptospira inadai
  misc_feature (1)..(374): tr|V6HE43|V6HE43_9LEPT Queuine tRNA-ribosyltransferase OS=Leptospira inadai serovar Lyme str. 10 OX=1049790 GN =tgt PE=3 SV=1
MIFREETRDPHSFARTGTLALNGVEIPTPVFMPVGTRGAIKSLDSDDIDELGFELILGNTYHLYLRPGTEVLQSFGGLKNFISYKKALLTDSGGFQVFSLNSLFKFQADGVGFRSHIDGSSHFFTPEKVVDIQRMIGSDIMMVLDDCPPGDASAARIKESLDRTHRWAEMAVRYWEKDKNGQHLFGIVQGGTNVELRLESLSYVNGLPFSGIALGGLSVGEPRPDFIRTLEAVAPHSDRNRPLYLMGVGTVPDILDGVRNGVDMFDCVLPTRNARNGQVFTSKGKINLRNEKWKFSDEPLDSECECRVCKRYSVGYLRHLHHVKELTAFSLSTFHNLSFMKKFMFELRRSIKEGKFDQFSAKWKNLYERPEISR

SEQ ID NO: 56867 - protein, 374 aa, Leptospira interrogans
  misc_feature (1)..(374): sp|Q8CXS3|TGT_LEPIN Queuine tRNA-ribosyltransferase OS= Leptospira interrogans serogroup Icterohaemorrhagiae se rovar Lai (strain 56601) OX=189518 GN=tgt PE=3 SV=1
MIFQTTSEDTLTKARTGILNLNGIELKTPVFMPVGTRGVVKTLSADDLEELEYSLILGNTYHLYLRPGTSVLDRFGGLKKFSTWKKALLTDSGGYQVFSLNSLFKYEQDGVRFQSHIDGSRHYFTPNSVIDIQRSIGSDIMMVLDDCAPFDSGPERLKQSLDRTHRWAEMSVQYWEKNKNSQHLFGIFQGGIDLDFRLESLNTITSLPFDGIAIGGLSVGEPRKDFIRILDGISAHTDRNRPLYLMGVGTVPDILDGVKNGVDMFDCVLPTRNARNGQVFTTLGKINLRNEKWKSSDTPMDPNCTCKVCKRYSIGYIRHLHHVGEITAFSLSTYHNLHFMKNFLTEIQNSIQKGEFLEIYAKWKNLYEKPEFSG

SEQ ID NO: 56868 - protein, 374 aa, Leptospira interrogans; identical to SEQ ID NO: 56867
  misc_feature (1)..(374): sp|Q72TL3|TGT_LEPIC Queuine tRNA-ribosyltransferase OS= Leptospira interrogans serogroup Icterohaemorrhagiae se rovar copenhageni (strain Fiocruz L1-130) OX=267671 GN= tgt PE=3 SV=1

SEQ ID NO: 56869 - protein, 371 aa, Leptospira jelokensis
  misc_feature (1)..(371): tr|A0A5F2BH86|A0A5F2BH86_9LEPT Queuine tRNA-ribosyltran sferase OS=Leptospira jelokensis OX=2484931 GN=tgt PE=3 SV=1
MPSIFKEGTYDSGSYARTGTLSLNGIQIETPIFMPVGTRGSIKSLTSEDINELGYNLILANTYHLYLKPGKEVFDHFHGLKNFMSYKKALLTDSGGFQVFSLASLFKFEDDGVRFQSHIDGSYHKFTPSSVIDMQRSIGSDIMMVLDDCAPYGSDTKRLELALDRTHRWAKESYEYWMQNPKGQNVFPIVQGGVNEALRLKSLESLQKIDFPGIAIGGLSVGEPRPEYIRILECMAPHLDKARPRYLMGVGTVVDILEGVKNGIDMFDCVLPTRNARNGQVFTSKGKLNLRNESHRLSESPIDSECSCKVCQTYSLGYIRHLHKVKELTAFSLSTYHNLFFMQSFMEKMRKSIEIGNFRAFYEHWKNLFGS

SEQ ID NO: 56870 - protein, 371 aa, Leptospira jelokensis
  misc_feature (1)..(371): tr|A0A4Z1A6Q5|A0A4Z1A6Q5_9LEPT Queuine tRNA-ribosyltran sferase OS=Leptospira jelokensis OX=2484931 GN=tgt PE=3 SV=1
MPSIFKEGTYDSGSYARTGTLSLNGIQIETPIFMPVGTRGSIKSLTSEDINELGYNLILANTYHLYLKPGKEVFDHFHGLKNFMSYKKALLTDSGGFQVFSLASLFKFEDDGVRFQSHIDGSYHKFTPSSVIDMQRSIGSDIMMVLDDCAPYGSDTKRLELALDRTHRWAKESYEYWMENPNGQNVFPIVQGGVNEALRLKSLETLQKIDFPGIAIGGLSVGEPRPEYIRILECMAPHLDKARPRYLMGVGTVVDILEGVKNGIDMFDCVLPTRNARNGQVFTSKGKINLRNESHRLSESPIDSECSCKVCQTYSLGYIRHLHKVKELTAFSLSTYHNLFFMQSFMEKMRKSIEIGNFRAFYEHWKNLFGS

SEQ ID NO: 56871 - protein, 374 aa, Leptospira johnsonii
  misc_feature (1)..(374): tr|A0A2P2D0J4|A0A2P2D0J4_9LEPT Queuine tRNA-ribosyltran sferase OS=Leptospira johnsonii OX=1917820 GN=tgt PE=3 SV=1
MIFRSRVSDPNSFARTGTLNLNGIEIPTPVFMPVGTRGAVKSLDSDDLDELGYELILGNTYHLYLRPGTEVLEKFGGLKNFVSYKKALLTDSGGFQVFSLNSLVKFKQEGVEFRSHIDGSPHFFTPEKVIDIQRAIGSDIMMVLDDCPPGDGTVSRIKDALDRTHRWAEEAVNYWEKDKRNQFLFGIFQGGTNLDLRLESLEKIRSLPFSGIAIGGLSVGEPRPDFIRTMEGISSFTDRTRPLYLMGVGTVPDILEGVRNGVDMFDCVLPTRNARNGQVFTSRGKVNLRNEKWKFSDEPMDPECECKVCKRYSIGYIRHLHHVKELSAFSLSTYHNLYFMKKFMKELRHSIEVGNFSEFFVKWKNLYERAEISR

SEQ ID NO: 56872 - protein, 371 aa, Leptospira kanakyensis
  misc_feature (1)..(371): tr|A0A4R9HLJ9|A0A4R9HLJ9_9LEPT Queuine tRNA-ribosyltran sferase OS=Leptospira kanakyensis OX=2484968 GN=tgt PE= 3 SV=1
MSSIFKEKSKDSGSYARTGTLHLNGIQIETPIFMPVGTRGSIKSLSSSDIDELGYNLILANTYHLYLRPGKEVLDHFHGLKNFMSYKRALLTDSGGFQVFSLASLFKFEEDGVRFQSHIDGSHHKFTPASVIEMQRSIGSDIMMVLDDCAPFGSDLGRLELALDRTHRWAKESYDYWMENPGGQNVFPIVQGGVNESLRKRSLDTLQNINFPGIAIGGLSVGEPRPDYIRILECMAPFFDQARPRYLMGVGTVVDILEGVKNGIDMFDCVLPTRNARNGQVFTSLGKINLRNESHRLAEGPIDPECGCKVCSTYSLGYIRHLHKVKELSAFSLSTYHNLYFMQSFMEKMRKSIEIGNFQSFYDHWKNLFGS

SEQ ID NO: 56873 - protein, 371 aa, Leptospira kemamanensis
  misc_feature (1)..(371): tr|A0A4R9JQW7|A0A4R9JQW7_9LEPT Queuine tRNA-ribosyltran sferase OS=Leptospira kemamanensis OX=2484942 GN=tgt PE =3 SV=1
MTSIFKEGTHDTGSYARTGTLILNGIEIQTPIFMPVGTRGSIKSLTSEDIDELGYNLILANTYHLYLKPGKEVFDHFHGLKNFMSYKKALLTDSGGFQVFSLASLFKFEEDGVRFQSHIDGSYHKFTPTSVIDMQRSIGSDIMMVLDDCAPYGSDTKRLELALDRTHRWAKESYAYWMENPNGQNVFPIVQGGVNETLRLRSLETLQKINFPGIAIGGLSVGEPRPEYIRILECMAPHLDKARPRYLMGVGTVVDILEGVKNGIDMFDCVLPTRNARNGQVFTSNGKLNLRNESHRLSDAPIDPECGCKVCKTYSLGYIRHLHKVKELTAFSLSTYHNLFFMQSFMEKMRKSIEIGNFRDFYAHWKNLFGS

SEQ ID NO: 56874 - protein, 374 aa, Leptospira kirschneri
  misc_feature (1)..(374): tr|M6IJG6|M6IJG6_9LEPT Queuine tRNA-ribosyltransferase OS=Leptospira kirschneri serovar Bim str. 1051 OX=10499 41 GN=tgt PE=3 SV=1
MIFQTTSEDTLTRARTGILNLNGIELKTPVFMPVGTRGVVKTLSADDLEELEYSLILGNTYHLYLRPGTSVLDRFGGLKKFSTWKKALLTDSGGYQVFSLNSLFKYEQDGVRFQSHIDGSRHYFTPNSVIDIQRSIGSDIMMVLDDCAPFDSGPERLKQSLDRTHRWAEMSVQYWEKNKNSQHLFGIFQGGIDLDFRLESLNAITSLPFDGIAIGGLSVGEPRKDFIRILNGIATYTDRNRPLYLMGVGTVPDILDGVKNGVDMFDCVLPTRNARNGQVFTTLGKINLRNEKWKNSDFPIDSNCTCKVCKRYSIGYIRHLHHVGEITAFSLSTYHNLHFMKNFLTEIQNSIQKGEFLEIYAKWKNLYEKPEFSG

SEQ ID NO: 56875 - protein, 374 aa, Leptospira kirschneri; identical to SEQ ID NO: 56874
  misc_feature (1)..(374): tr|M6XBD5|M6XBD5_9LEPT Queuine tRNA-ribosyltransferase OS=Leptospira kirschneri str. 200801925 OX=1193046 GN=t gt PE=3 SV=1

SEQ ID NO: 56876 - protein, 374 aa, Leptospira kmetyi
  misc_feature (1)..(374): tr|A0A5F1XUZ0|A0A5F1XUZ0_9LEPT Queuine tRNA-ribosyltran sferase OS=Leptospira kmetyi OX=408139 GN=tgt PE=3 SV=1
MIFKTTSEDSQTRARTGILELNGVKLETPVFMPVGTRGVVKTLSMDDLEELEYSLILGNTYHLYLRPGTDVLDQFGGLKKFSTWKKALLTDSGGYQVFSLNSLFKYEQDGVRFQSHIDGSRHYFTPGSVIDIQRSIGSDIMMVLDDCAPFDSSPERLRQSLDRTHRWAEMSVEYWEKNKNSQHLFGIFQGGIDLDSRLESLKAIASLPFDGIAIGGLSVGEPRKDFIRILDGISTHTDRTRPLYLMGVGTVPDILDGVKNGVDMFDCVLPTRNARNGQVFTTLGKINLRNEKWKNSDAPMDPNCGCKVCKRYSIGYIRHLHHVGEITAFSLSTYHNLYFMKSFLSEIQKSIQAGEFLETYTRWKNLYEKPEFSG

SEQ ID NO: 56877 - protein, 374 aa, Leptospira kmetyi
  misc_feature (1)..(374): tr|A0A2M9XKQ6|A0A2M9XKQ6_9LEPT Queuine tRNA-ribosyltran sferase OS=Leptospira kmetyi OX=408139 GN=tgt PE=3 SV=1
MIFKTTSEDSQTRARTGILELNGVKLETPVFMPVGTRGVVKTLSMDDLEELEYSLILGNTYHLYLRPGTDVLDQFGGLKKFSTWKKALLTDSGGYQVFSLNSLFKYEQDGVRFQSHIDGSRHYFTPGSVIDIQRSIGSDIMMVLDDCAPFDSSPERLRQSLDRTHRWAEMSVEYWEKNKNSQHLFGIFQGGIDLDSRLESLKAIASLPFDGIAIGGLSVGEPRKDFIRILDGISTHTDRTRPLYLMGVGTVPDILDGVKNGVDMFDCVLPTRNARNGQVFTTLGKINLRNEKWKNSDAPMDPNCGCKVCKRYSIGYIRHLHHVGEITAFSLSTYHNLYFMKSFLSEIQKSIQAGEFLETYARWKNLYEKPEFSG

SEQ ID NO: 56878 - protein, 371 aa, Leptospira kobayashii
  misc_feature (1)..(371): tr|A0A2P2DLG9|A0A2P2DLG9_9LEPT Queuine tRNA-ribosyltran sferase OS=Leptospira kobayashii OX=1917830 GN=tgt PE=3 SV=1
MPLSFIQTSKDPNSFARGGILTLGGVEVETPVFMPVGTRGSVKALSSEDILELGYKLILGNTYHLYLKPGKEVMETFGGLKKFMAYPNALLTDSGGFQVFSLSGLFKFEEDGVRFQSHIDGSHHKFTPESVIDMQRAIGSDIMMVLDDCAPYGSSTERLKESLERTHRWAKQSVEYWQKNPNDQNLFCIVQGGVNEALRLESLQTLQNMDFPGIALGGLSVGEPREEYVRILECLSPHLDPKRPRYLMGVGTVVDILDGVKNGIDMFDCVLPTRNARNGQVFTSKGKINLRNESHRLSTEPIDPLCQCKVCKTYSLGYLRHLHKVKEILAFSLSTYHNLYFMKQFMDNLRKSIEKGEFQTYYDHWKKLYAP

SEQ ID NO: 56879 - protein, 685 aa, Leptospira kobayashii
  misc_feature (1)..(685): tr|A0A2P2DME1|A0A2P2DME1_9LEPT Queuine tRNA-ribosyltran sferase OS=Leptospira kobayashii OX=1917830 GN=tgt PE=3 SV=1
MSRLNFILEAEAPGTKARAGRFTTLHGEVSTPIFMPVGTQATVKAQNVETLKSVGSRVLLANTYHLLLRPGAEVFRKLGGIHKFMNWDGPVLTDSGGFQIFSLPNARKITEDGAVFRSYVDGQNVVLSPEVSIEMQKAIGSDIMMVLDECVPSTVEHKEAKRAMEVTHRWAKRSLNARGESLQSMFGIVQGACFEDLRKQSAEVLTQLPFDGFAIGGLAVGETKEERNDFCELSASFLPKNLPRYLMGVGTPLDLLEAVHRGVDMFDCTIPTELAQRGVAFTSIGKLQLHRTLYKFEDSVLDENCDCICCKNYSKAYLHHLTKSNEVLGWQLLAIHNLYFYHRLMSEMRSSIFQGNFLSYYTEKKDSLSQSDNVYPSHHILKPSKAIRKRSLGDYEIIENEAKGYWSVRQKSSGEVMHSVNSPMEEANRLYIDQSNLKKRISFSDNTFEKYTPSSHEEMNPIIIWDVGLGAATNAMSAIHSFEEIVNPNAMHLISFESDLDPLRLALKNNGRFPHLFHKAPKEVLEKSVWASDSGNLTWKLVLGDFAATFSGEEIPDIVFYDPFSFKTDSILWKPEFFRLLFSYFQTQEKTVSLYTYSAATAVRAALLSVGFWVGRGVGSGPKSETTIAYSRSPEGIGEKEGLLGKEWIGRWERSDARYPVDLGEGNKADWDKRILTHPQFQKNL

SEQ ID NO: 56880 - protein, 379 aa, Leptospira koniamboensis
  misc_feature (1)..(379): tr|A0A4R9J471|A0A4R9J471_9LEPT Queuine tRNA-ribosyltran sferase OS=Leptospira koniamboensis OX=2484950 GN=tgt P E=3 SV=1
MSEQKMIYRSRVEDPNSFARTGTLSLNGIEIPTPVFMPVGTRGAIKSLDSDDIDELGYELILGNTYHLYLRPGTEVLEKFGGLKNFVSYKKALLTDSGGFQVFSLNSLVKFKKEGVEFRSHIDGSPHFFTPEKVIDIQRAIGSDIMMVLDDCPPGDGTVSRIKDALDRTHRWAEEAVNYWEKDKRNQFLFGIFQGGTNLDLRLESLEKIRSLPFSGIAIGGLSVGEPRPDFIRTMEGISSYTDRTRPLYLMGVGTVPDILEGVRNGVDMFDCVLPTRNARNGQVFTSQGKVNLRNEKWKFRDEPMDPECECKVCKRYSIGYIRHLHHVKELSAFSLSTYHNLHFMKKFMKELRHSIEVGNFSEFFVKWKNLYETPEISR

SEQ ID NO: 56881 - protein, 379 aa, Leptospira langatensis
  misc_feature (1)..(379): tr|A0A5F1ZY08|A0A5F1ZY08_9LEPT Queuine tRNA-ribosyltran sferase OS=Leptospira langatensis OX=2484983 GN=tgt PE= 3 SV=1
MSQQEMIFRSGISDPNSHARTGTLHLNGIEIPTPVFMPVGTRGAVKSLDSDDLDELGFELILGNTYHLYLRPGMDVLQKFGGLKNFISYKKALLTDSGGFQVFSLNSLVKFKKEGVEFRSHIDGSPHFFTPEKVIDIQRTIGSDIMMVLDDCPPGDADTARIKESLDRTHRWAEAAVSYWEKEKGKQNLFGIFQGGTNLDLRLESLSKIAALPFSGIAIGGLSVGEPRPDFIRTMEGIAPHTDKSRPLYLMGVGTVPDILEGVRNGVDMFDCVLPTRNARNGQVFTSKGKMNLRNEKWKFSEEPMDPECDCKVCKRYSVGYIRHLHHVKELSAFSLSTYHNLHFMKKFMKELRLSIEVGKFSEFFVKWKNLYERPEISR

SEQ ID NO: 56882 - protein, 371 aa, Leptospira levettii
  misc_feature (1)..(371): tr|A0A5F2DC10|A0A5F2DC10_9LEPT Queuine tRNA-ribosyltran sferase OS=Leptospira levettii OX=2023178 GN=tgt PE=3 S V=1
MTSIFKEGVYDTGSYARTGTLTLGGIQIPTPIFMPVGTRGSIKSLTSEDISELGYELILANTYHLYLKPGKEVLDHFAGLKNFMSYKKALLTDSGGFQVFSLASLFKFEDDGVRFQSHIDGSYHKFTPASVIDVQRSIGSDIMMVLDDCAPYGSDTKRLELALERTHRWAKESYQYWMENPNGQNVFPIVQGGVNESLRLRSLETLQNIAFPGIAIGGLSVGEPRPEYIRILECMAPYLDKQRPHYLMGVGTVVDILEGVKNGIDMFDCVLPTRNARNGQVFTSRGKINLRNESHRLSELPIDPECECKVCKTYSLGYIRHLHKVKELTAFSLSTYHNLFFMQSFMEKLRKSIEIGNFRPFYDHWKNLFGS

SEQ ID NO: 56883 - protein, 371 aa, Leptospira levettii
  misc_feature (1)..(371): tr|A0A2N0B1H3|A0A2N0B1H3_9LEPT Queuine tRNA-ribosyltran sferase OS=Leptospira levettii OX=2023178 GN=tgt PE=3 S V=1
MTSIFKEGVYDTGSYARTGTLTLGGIQIPTPIFMPVGTRGSIKSLTSEDISELGYELILANTYHLYLKPGKEVLDHFAGLKNFMSYKKALLTDSGGFQVFSLASLFKFEDDGVRFQSHIDGSYHKFTPASVIDVQRSIGSDIMMVLDDCAPYGSDTKRLELALERTHRWAKESYQYWMENPNGQNVFPIVQGGVNESLRLRSLETLQNIAFPGIAIGGLSVGEPRPEYIRILECMAPYLDKQRPHYLMGVGTVVDILEGVKNGIDMFDCVLPTRNARNGQVFTSRGKINLRNESHRLSELPIDPECECKVCKTYSLGYIRHLHKVKELTAFSLSTYHNLFFMQSFMEKLRKSIEIGNFRPFYEHWKNLFGS

SEQ ID NO: 56884 - protein, 379 aa, Leptospira licerasiae
  misc_feature (1)..(379): tr|A0A5F2DU82|A0A5F2DU82_9LEPT Queuine tRNA-ribosyltran sferase OS=Leptospira licerasiae OX=447106 GN=tgt PE=3 SV=1
MSEQKMIYRSRVSDPHSFARTGTLSLNGIEIPTPVFMPVGTRGAVKSLDSDDIDELGYELILGNTYHLYLRPGTEVLEKFGGLKNFVSYKKALLTDSGGFQVFSLNSLVKFKQEGVEFRSHIDGSPHFFTPQKVIDIQRAIGSDIMMVLDDCPPGDGTVSRIKDALDRTHRWAEEAVNYWEKDKRNQFLFGIFQGGTNLDLRLESLEKIRSLPFSGIAIGGLSVGEPRPDFIRTMEGISSFTDRTRPLYLMGVGTVPDILEGVRNGVDMFDCVLPTRNARNGQVFTSRGKVNLRNEKWKLSDEPMDPECECKVCKRYSIGYIRHLHHVKELSAFSLSTYHNLYFMKKFMKELRHSIEVGNFSEFFVKWKNLYERPEISR

SEQ ID NO: 56885 - protein, 379 aa, Leptospira licerasiae; identical to SEQ ID NO: 56884
  misc_feature (1)..(379): tr|I0XPP8|I0XPP8_9LEPT Queuine tRNA-ribosyltransferase OS=Leptospira licerasiae serovar Varillal str. VAR 010 OX=1049972 GN=tgt PE=3 SV=1

SEQ ID NO: 56886 - protein, 371 aa, Leptospira macculloughii
  misc_feature (1)..(371): tr|A0A2N0C383|A0A2N0C383_9LEPT Queuine tRNA-ribosyltran sferase OS=Leptospira macculloughii OX=2023202 GN=tgt P E=3 SV=1
MSSIFKENSKDPGSYARTGTLELNGIQIETPIFMPVGTRGSIKSLSSSDIDELGYNLILANTYHLYLKPGKEVLDHFHGLKNFMSYKRALLTDSGGFQVFSLASLFKFEEDGVRFQSHIDGSHHKFTPSSVIDMQRSIGSDIMMVLDDCAPYGSDLGRLELALDRTHRWAKESYNYWMENPNGQNVFPIVQGGVNESLRKRSLDTLQNINFPGIAIGGLSVGEPRPEYIRILECLAPFFDEARPRYLMGVGTVVDILEGVKNGIDMFDCVLPTRNARNGQVFTSQGKINLRNEAHRLSDGPIDPECGCKVCVTYSLGYIRHLHKVKELTAFSLSTYHNLFFMQSFMEKMRKSIEIGNFQGFYDHWKNLFGS

SEQ ID NO: 56887 - protein, 374 aa, Leptospira mayottensis
  misc_feature (1)..(374): tr|A0A3Q9DVC1|A0A3Q9DVC1_9LEPT Queuine tRNA-ribosyltran sferase OS=Leptospira mayottensis 200901116 OX=1192864 GN=tgt PE=3 SV=1
MIFQTTSEDLQTRARTGILNLNGVKLETPVFMPVGTRGVVKTLSTDDLEELEYSLILGNTYHLYLRPGTSVLESFGGLKKFSTWKRALLTDSGGYQVFSLNSLFKYEQDGVRFQSHIDGSRHYFTPNSVIDIQRSIGSDIMMVLDDCAPFDSSPERLRQSLDRTHRWAEMSVEYWEKNKNSSHLFGIFQGGIDLGLRLESLQKVASLPFDGIAIGGLSVGEPRKDFIRILEGVSTDTDRSRPLYLMGVGTVPDILDGVKNGVDMFDCVLPTRNARNGQVFTSLGKINLRNEKWKSSDLPMDPHCGCKVCKRYSIGYIRHLHHVGEITAFSLSTYHNLYFMKNFLSEIQRSIQAGEFLKIYAKWKNLYEKPEFSG

SEQ ID NO: 56888 - protein, 374 aa, Leptospira mayottensis; identical to SEQ ID NO: 56887
  misc_feature (1)..(374): tr|A0A5F2EKI5|A0A5F2EKI5_9LEPT Queuine tRNA-ribosyltran sferase OS=Leptospira mayottensis OX=1137606 GN=tgt PE= 3 SV=1

SEQ ID NO: 56889 - protein, 371 aa, Leptospira meyeri
  misc_feature (1)..(371): tr|A0A5F2CPM3|A0A5F2CPM3_LEPME Queuine tRNA-ribosyltran sferase OS=Leptospira meyeri OX=29508 GN=tgt PE=3 SV=1
MSSIFKENSKDPGSYARTGTLELNGIQIETPIFMPVGTRGSIKSLSSSDIDELGYNLILANTYHLYLKPGKEVLDHFHGLKNFMSYKRALLTDSGGFQVFSLASLFKFEEDGVRFQSHIDGSHHKFTPSSVIDMQRSIGSDIMMVLDDCAPYGSDLRRLELALDRTHRWAKESYNYWMENPNGQNVFPIVQGGVNESLRKRSLDTLQNINFPGIAIGGLSVGEPRPEYIRILECLAPFFDEARPRYLMGVGTVVDILEGVKNGIDMFDCVLPTRNARNGQVFTSQGKINLRNEAHRLSDGPIDPECGCKVCVTYSLGYIRHLHKVKELTAFSLSTYHNLFFMQSFMEKMRKSIEIGNFQGFYDHWKNLFGS

SEQ ID NO: 56890 - protein, 371 aa, Leptospira meyeri; identical to SEQ ID NO: 56886
  misc_feature (1)..(371): tr|A0A5F1ZGV3|A0A5F1ZGV3_LEPME Queuine tRNA-ribosyltran sferase OS=Leptospira meyeri OX=29508 GN=tgt PE=3 SV=1

SEQ ID NO: 56891 - protein, 371 aa, Leptospira montravelensis
  misc_feature (1)..(371): tr|A0A4Z0ZF86|A0A4Z0ZF86_9LEPT Queuine tRNA-ribosyltran sferase OS=Leptospira montravelensis OX=2484961 GN=tgt PE=3 SV=1
MSSIFKEKSKDPGSYARTGTLILNGVQIETPIFMPVGTRGSIKSLSSSDIDELGYNLILANTYHLYLKPGKEVLDHFHGLKNFMSYKRALLTDSGGFQVFSLASLFKFEEDGVRFQSHIDGSHHKFTPASVIDMQRSIGSDIMMVLDDCAPYGSDLKRLELALDRTHRWALESYQYWMEKPNGQNVFPIVQGGVNESLRKRSLDTLQNIDFPGIAIGGLSVGEPRPEYIRILECMAPFFDKARPRYLMGVGTVVDILEGVKNGVDMFDCVLPTRNARNGQVFTSLGKINLRNESHRLSDSPIDPECGCKVCQTYSLGYIRHLHKVKELTAFSLSTYHNLFFMQSFMEKMRKSIEIGNFQGFYDHWKNLFGS

SEQ ID NO: 56892 - protein, 371 aa, Leptospira mtsangambouensis
  misc_feature (1)..(371): tr|A0A5F2DHU5|A0A5F2DHU5_9LEPT Queuine tRNA-ribosyltran sferase OS=Leptospira mtsangambouensis OX=2484912 GN=tg t PE=3 SV=1
MSSIFKEKSKDPGSYARTGTLNLNGIQIETPIFMPVGTRGSIKSLSSSDIDELGYNLILANTYHLYLRPGKEVLDHFHGLKNFMSYKRALLTDSGGFQVFSLASLFKFEEDGVRFQSHIDGSHHKFTPSSVIDMQRSIGSDIMMVLDDCAPYGSDLGRLELALDRTHRWAKESYNYWMENPGGQNVFPIVQGGVNESLRKRSLDTLQNINFPGIAIGGLSVGEPRPEYIRILECMAPFFDAARPRYLMGVGTVVDILEGVKNGIDMFDCVLPTRNARNGQVFTSLGKINLRNESHRLSDGPIDPECGCKVCVTYSLGYIRHLHKVKELTAFSLSTYHNLFFMQSFMEKMRKSIEIGNFQGFYDHWKNLFGS

SEQ ID NO: 56893 - protein, 379 aa, Leptospira neocaledonica
  misc_feature (1)..(379): tr|A0A2M9ZYX7|A0A2M9ZYX7_9LEPT Queuine tRNA-ribosyltran sferase OS=Leptospira neocaledonica OX=2023192 GN=tgt P E=3 SV=1
MSEQKMIFRSRASDPNSFARTGTLSLNGIEIPTPVFMPVGTRGAIKSLDSDDIDELGYELILGNTYHLYLRPGTEVLEKFGGLKNFVSYKKALLTDSGGFQVFSLNSLVKFKREGVEFRSHIDGSPHFFTPEKVIDIQRAIGSDIMMVLDDCPPGDGTVSRIKDALDRTHRWAEEAVNYWEKDKRNQFLFGIFQGGTNLDLRLESLEKIRSLPFSGIAIGGLSVGEPRPDFIRTMEGISSYTDRNRPLYLMGVGTVPDILEGVRNGVDMFDCVLPTRNARNGQVFTSQGKVNLRNEKWKFSDAPMDPECECKVCKRYSIGYIRHLHHVKELSAFSLSTYHNLYFMKKFMKELRHSIEVGNFSEFFVKWKNLYERAEISR

SEQ ID NO: 56894 - protein, 374 aa, Leptospira noguchii
  misc_feature (1)..(374): tr|A0A540UGL6|A0A540UGL6_9LEPT Queuine tRNA-ribosyltran sferase OS=Leptospira noguchii OX=28182 GN=tgt PE=3 SV= 1
MIFQTTSEDSLTRARTGILNLNGIKLETPVFMPVGTRGVVKTLSADDLEELEYSLILGNTYHLYLRPGTSVLDSFGGLKKFSTWKKALLTDSGGYQVFSLNSLFKYEQDGVRFQSHIDGSRHYFTPNSVIDIQRSIGSDIMMVLDDCAPFDSGPERLKQSLDRTHRWAEMSVQYWEKNKNSQHLFGIFQGGIDLDFRLESLNAITSLPFDGIAIGGLSVGEPRKDFIRILNGIATYTDRNRPLYLMGVGTVPDILDGVKNGVDMFDCVLPTRNARNGQVFTTLGKINLRNERWKNSDSPMDPNCTCKVCKRYSIGYIRHLHHVGEITAFSLSTYHNLHFMKNFLTEIQNSIQKGEFLEIYAKWKNLYEKPEFSG

SEQ ID NO: 56895 - protein, 374 aa, Leptospira noguchii
  misc_feature (1)..(374): tr|T0FPU6|T0FPU6_9LEPT Queuine tRNA-ribosyltransferase OS=Leptospira noguchii serovar Panama str. CZ214 OX=100 1595 GN=tgt PE=3 SV=1
MIFQTTSEDSLTKARTGILNLNGIKLETPVFMPVGTRGVVKTLSADDLEELEYSLILGNTYHLYLRPGTSVLNSFGGLKKFSTWKKALLTDSGGYQVFSLNSLFKYEQDGVRFQSHIDGSRHYFTPNSVIDIQRSIGSDIMMVLDDCAPFDSGPERLKQSLDRTHRWAEMSVQYWEKNKNSQHLFGIFQGGIDLDFRLESLNAITSLPFDGIAIGGLSVGEPRKDFIRILNGIATYTDRNRPLYLMGVGTVPDILDGVKNGVDMFDCVLPTRNARNGQVFTTLGKINLRNERWKNSDSPMDPNCTCKVCKRYSIGYIRHLHHVGEITAFSLSTYHNLHFMKNFLTEIQNSIQKGEFLEIYAKWKNLYEKPEFSG

SEQ ID NO: 56896 - protein, 371 aa, Leptospira noumeaensis
  misc_feature (1)..(371): tr|A0A4V3JKU2|A0A4V3JKU2_9LEPT Queuine tRNA-ribosyltran sferase OS=Leptospira noumeaensis OX=2484964 GN=tgt PE= 3 SV=1
MSSIFKEKTKDSGSYARTGTLHLNGIQIETPIFMPVGTRGSIKSLSSSDIDELGYNLILANTYHLYLKPGKEVLDHFHGLKNFMSYKRALLTDSGGFQVFSLASLFKFEEDGVRFQSHIDGSHHKFTPASVIEMQRSIGSDIMMVLDDCAPFGSDLKRLELALDRTHRWAKESYDYWMENPGGQNVFPIVQGGVNESLRKRSLDTLQNIDFPGIAIGGLSVGEPRPDYIRILECMAPFFDQARPRYLMGVGTVVDILEGVKNGIDMFDCVLPTRNARNGQVFTSLGKINLRNESHRLAEGPIDPECGCKVCTTYSLGYIRHLHKVKELTAFSLSTYHNLYFMQSFMEKMRKSIEIGNFQGFYEHWKNLFGS

SEQ ID NO: 56897 - protein, 675 aa, Leptospira ognonensis
  misc_feature (1)..(675): tr|A0A4R9JZG3|A0A4R9JZG3_9LEPT Queuine tRNA-ribosyltran sferase OS=Leptospira ognonensis OX=2484945 GN=tgt PE=3 SV=1
MSRLNFKLEKVASHSHARASTFTTLHGDVQTPIFMPVGTQATVRTLNVDTLETVGSNVLLANTYHLLLRPGAEVFRKLGGIHKFMNWDRPVLTDSGGFQIFSLPNARKMTEDGAIFRSYVDGENILLSPEISIEMQKAIGSDIMMVLDECVPSTVDFSRAKSAMEITHRWAKRSLKARGESSQSMFGIVQGACFPELRKESAKALTDMPFDGYAIGGLAVGETKAERNDFCELSASLLPQNLPRYLMGVGTPLDLLEAVHRGVDMFDCTIPVELAQRGVAFTSEGKFQIHRSIYKFLDEALDQKCDCRCCKHYSKAYLHHLIKAGEILGWQLIAEHNLTYYHKLMNDMRLSILDDTFFRFYSEKKTELLKSDNVNPPFTLKSAKKDRRRSLGDYEVVESKTGNYYSIRQKSSGEVMHSVNSPIEEADTLYIKQSHLGMLLEKSDTIPLVVWDVGLGAATNAMAAISAHERSSSSRKLTLISFENDLTPLKLALRNHGRFPHLFHKAPMALLKNGHWISDEKGIEWKLMEGDFQKVYKNAEAPDLIYFDPFSYETDSELWSYDFFCDFYSHLKEFQNQISLYTYSASTRVRSAMLGAGFLVARGAGSGPKSETTIAFTKENFSEEIQKQLLDRRWLERWMRSDAKYPENLLMDREKWTSLILSHPQFQPSILLDNL

SEQ ID NO: 56898 - protein, 371 aa, Leptospira ognonensis
  misc_feature (1)..(371): tr|A0A4R9K083|A0A4R9K083_9LEPT Queuine tRNA-ribosyltran sferase OS=Leptospira ognonensis OX=2484945 GN=tgt PE=3 SV=1
MPFHFAVNTEDKTSFARSGTLEINGNVVQTPVFMPVGTRGSVKSLTSEDLYEIGYNLILGNTYHLYLKPGTDVLDHFGGLKNFMSYQRALLTDSGGFQVFSLSGLFKFEDDGVRFQSHIDGSRHKFTPESVIDVQRSIGSDIMMVLDDCAPYGSSVERLKESLERTHRWAKISVDYWLERPGDQSLFGIVQGGTKADLRLESLQYLQSLPFPGIALGGLSVGEPRPEYVRILEAVAPHLDPARPHYLMGVGTVVDILDGVKNGIDMFDCVLPTRNARNGQVFTSYGKVNLRNESHRLSTQPIDPECQCKVCNNYSLGYLRHLHKVKELSAFSLSTYHNLYFMKKFMSELRESIENKEFSSFSEHWKKLYAS

SEQ ID NO: 56899 - protein, 371 aa, Leptospira perdikensis
  misc_feature (1)..(371): tr|A0A4R9JG62|A0A4R9JG62_9LEPT Queuine tRNA-ribosyltran sferase OS=Leptospira perdikensis OX=2484948 GN=tgt PE= 3 SV=1
MSSIFKESSKDPGSYARTGTLHLNGIQIETPIFMPVGTRGSIKSLSSSDIDELGYHLILANTYHLYLKPGKEVLDHFHGLKNFMSYKRALLTDSGGFQVFSLASLFKFEEDGVRFQSHIDGSHHKFTPASVIDMQRSIGSDIMMVLDDCAPYGSDLRRLELALDRTHRWAKESYEYWMERPNGQNVFPIVQGGVNESLRKRSLDTLQNINFPGIAIGGLSVGEPRPEYIRILECMAPYFDQARPRYLMGVGTVVDILEGVKNGVDMFDCVLPTRNARNGQVFTSFGKLNLRNESHRLADGPIDPECGCKVCTTYSLGYIRHLHKVKELTAFSLSTYHNLYFMQSFMEKMRKSIKIGNFQGFYDHWKNLFGS

SEQ ID NO: 56900 - protein, 374 aa, Leptospira perolatii
  misc_feature (1)..(374): tr|A0A2M9ZN89|A0A2M9ZN89_9LEPT Queuine tRNA-ribosyltran sferase OS=Leptospira perolatii OX=2023191 GN=tgt PE=3 SV=1
MIFQEECKDSSTFARTGTLNLNGIQIPTPVFMPVGTRGTIKALDSEDIDELEFDLILANTYHLYLRPGEEVLNQFGGLKKFSSYNRALLTDSGGFQVFSLGSLFKFERDGVTFKSHIDGSSHFFSPEKVIDLQRMIGSDVMMVLDDCPPGNADTKRIKESLERTHRWAEASVNYWEKRKNSQNLFGIFQGGINLELRLESLSFLNSLPFSGIAIGGLSVGEPRPDFVRIMEGIAPNTDKKRPLYLMGVGTVPDILDGVRNGVDMFDCVLPTRNARNGQVFTSTGKLNLRNEKWKLSDAPLDSECSCKVCKRYSVGYLRHLHHVGELTAFSLSTYHNLHFMKNFMKELRLSIQDGKFAEFSSKWKNLYERSEISR

SEQ ID NO: 56901 - protein, 679 aa, Leptospira putramalaysiae
  misc_feature (1)..(679): tr|A0A4R9L177|A0A4R9L177_9LEPT Queuine tRNA-ribosyltran sferase OS=Leptospira putramalaysiae OX=2484984 GN=tgt PE=3 SV=1
MSRLNFVLEAEAPQTSARATTFTTLHGQVQTPIFMPVGTQATVRAQTVDSLKAMGSRVLLANTYHLLLRPGAEVFRKIGGIHKFMNWDFPVLTDSGGFQIFSLPNSRKMTEEGAHFRSYVDGKMILLSPELSIDMQRAIGSDIMMVLDQCIPSTADYAKAKDAMEITHRWAKRSLDARGDSPQSIFGIVQGACFSDLRKESAKVLTQMPFDGFAIGGLAVGETKEERNDFCELSASLLPKNLPRYLMGVGTPIDLLEAVHRGVDMFDCTIPTELAQHGVAYTSAGKLQIHRTIYKFADSKLDENCDCPCCQNYSRSYLHHLIKTSEILGWHLIAQHNLNFYHRLMAEMRAKIFEGSFASYYARKKEELIRSDNVDPSLNKKRTPKAQRKRILGDYEIRENKEGKYWSVRQRSSGETMHSVNNPSEEAKSLYVVQTKLSEKLSGCNDSAEPESTNPFVIWDVGLGAATNSMAAIRCYEEIDSPVPMNMISFECDLDPFRLAMRNIGRFPHLFHTAPRSILEKGNWTSPSGTLGWDLVIGDFENTFLSQKIPDLVFYDPFSFKTDSKLWQPEFLKRLFLFFQDHSKNTMFVTYSASTAVRSSLLFAGFWVGKGKGSGPKSETTIAFTKRPENVEESTQLLGSDWLGRRERSHARFREEWDETKNRTWEETILCHPQFLFSP

SEQ ID NO: 56902 - protein, 374 aa, Leptospira putramalaysiae
  misc_feature (1)..(374): tr|A0A4R9L1N0|A0A4R9L1N0_9LEPT Queuine tRNA-ribosyltran sferase OS=Leptospira putramalaysiae OX=2484984 GN=tgt PE=3 SV=1
MIFKTTSEDPNTRARTGILDLNGVKLNTPVFMPVGTRGVVKTLDTEDLEELEYSLILGNTYHLYLRPGTSVLDQFGGLKKFMTWKGALLTDSGGYQVFSLNSLFKYETDGVRFQSHIDGSRHYFTPGSVIDVQRSIGSDIMMVLDDCAPFDSSPERLRQSLERTHRWAEMSVEHWEKKKNSQHLFGIFQGGIDLDSRLESLKAIASLPFDGIAIGGLSVGEPRKDFIRILNGISSHTDRSRPLYLMGVGTVPDILDGVKNGVDMFDCVLPTRNARNGQVFTSLGKVNLRNEKWKNSDAPMDPNCQCKVCKRYSIGYIRHLHHVGEITAFSLSTFHNLFFMKNFLSEIQNSIQAGEFLETYARWKNLYEKPEFSG

SEQ ID NO: 56903 - protein, 371 aa, Leptospira ryugenii
  misc_feature (1)..(371): tr|A0A2P2DYM3|A0A2P2DYM3_9LEPT Queuine tRNA-ribosyltran sferase OS=Leptospira ryugenii OX=1917863 GN=tgt PE=3 S V=1
MSLRFQVLGNDPTSFARLGKLSLGNVEVETPVFMPVGTRGSIKSLDSDDIREIGYKLILGNTYHLYLKPGTEVLDHFGGLKPFMSYSEALLTDSGGFQVFSLASLFRFEEDGVRFQSHVDGSYHKFTPESVIDIQRSIRSDIMMVLDDCAPYGSSTERLELALDRTHRWAKNSIEYWQKDPQNQNLFCIVQGGTEESLRLKSLTELQAMDFPGIAIGGLSVGEPRKEFQKTIQFLAPHMAVNKPHYLMGVGTVPDILESVKQGIDMFDCVLPTRNARNGQVFTSRGKINLRNESHRLSTAPIDPNCKCKVCQTYSLGYIRHLHKVKELTAFSLSTYHNLYFMYQFMAELRASLSANEFPQFYAHWKKLYGV

SEQ ID NO: 56904 - protein, 663 aa, Leptospira ryugenii
  misc_feature (1)..(663): tr|A0A2P2DYG3|A0A2P2DYG3_9LEPT Queuine tRNA-ribosyltran sferase OS=Leptospira ryugenii OX=1917863 GN=tgt PE=3 S V=1
MRISNFTLEKIATGSRARATSFETMHGKVQTPIFMPVGTQATVKTLNVETLKNVGSNVLLANTYHLFIRPGKEVFDHCGGIHSFMNWDRPVLTDSGGFQIFSLPNARKITEEGARFRSYLDGKEILLSPEVSIQMQRSIGSDIMMVLDECVPSTVSHSEAKRAMELTHRWAKRSLKAREDSKQALFAIVQGACFEDLRKESAKVLLDMSFDGYAIGGLAVGETREEREHFAEFVADLLPREKPRYLMGVGTPLDLLEAVHRGVDLFDCTIPVELAQRGVAFTSQGKIQIHRSRYRFANESLDVECACRTCKHYSKAYLHHLIKASEVLGWQLLAEHNLVYYHNLMSDMRSAILNGTFLSYYANKKEEVLQSDNTNASFSRIIGKKEKKLSLGNYFLLENVEKHIFSIQHTVSGEVMHSIHSPDEEANALYIRHSQLENRLREGKEREIVVWDVGLGAAHNAMAALLLSKQEDLGKLSVESFENDLDPLRLALRHQGRFPHLFHKAPKQLLESGIFIGENVEWKLHLGNIQDTFQKAKLPDVIFYDPFSYKTNAELWDFSWFLQLNRYLKGANKQIQLLTYSQSTLVRSALLAAGFYVCKAETLGENRECTIAYTRKEPMISGQILGEEWLGRWKRSDAKYPNSYQNRKEEWERLVLSHPQFTE

SEQ ID NO: 56905 - protein, 379 aa, Leptospira saintgironsiae
  misc_feature (1)..(379): tr|A0A2M9YC24|A0A2M9YC24_9LEPT Queuine tRNA-ribosyltran sferase OS=Leptospira saintgironsiae OX=2023183 GN=tgt PE=3 SV=1
MSEQKMIYRSRVSDTHSFARTGTLSLNGIEIPTPVFMPVGTRGAVKSLDSDDIDELGYELILGNTYHLYLRPGTEVLEKFGGLKNFVSYKKALLTDSGGFQVFSLNSLVKFKQEGVEFRSHIDGSPHFFTPQKVIDIQRAIGSDIMMVLDDCPPGDGTVSRIKDALDRTHRWAEEAVNYWEKDKRNQFLFGIFQGGTNLDLRLESLDKIRSLPFSGIAIGGLSVGEPRPDFIRTMEGISSYTDRTRPLYLMGVGTVPDILEGVRNGVDMFDCVLPTRNARNGQVFTSQGKVNLRNEKWKLREEPMDPECECKVCKRYSIGYIRHLHHVKELSAFSLSTYHNLHFMKKFMKELRHSIEVGNFSEFFVKWKNLYERPEISR

SEQ ID NO: 56906 - protein, 374 aa, Leptospira santarosai
  misc_feature (1)..(374): tr|A0A0E2BKN5|A0A0E2BKN5_9LEPT Queuine tRNA-ribosyltran sferase OS=Leptospira santarosai str. MOR084 OX=1049984 GN=tgt PE=3 SV=1
MIFQTTSEDPRTKARTGILNLNGTELETPVFMPVGTRGVVKTLSTEDLEELEYSLILGNTYHLYLRPGTSVLERFGGLKKFSTWKRALLTDSGGYQVFSLNSLFKYEQDGVRFQSHIDGSRHYFTPNSVIDIQRSIGSDIMMVLDDCAPFDSGPERLRQSLDRTHLWAEMSVEYWEKNKNSQHLFGIFQGGVDLGFRLESLQKIVSLPFDGIAIGGLSVGEPRQDFIRILEGISAYTDRSRPLYLMGVGTVPDILDGVKNGVDMFDCVLPTRNARNGQVFTSLGKINLRNEKWKSSDAPIDPHCGCKVCKRYSIGYIRHLHHVGEITAFSLSTYHNLYFMKNFLSEIQKSIQAGEFLKIYAKWKNLYEKPEFSG

SEQ ID NO: 56907 - protein, 374 aa, Leptospira santarosai
  misc_feature (1)..(374): tr|A0A2P1QQH6|A0A2P1QQH6_9LEPT Queuine tRNA-ribosyltran sferase OS=Leptospira santarosai OX=28183 GN=tgt PE=3 S V=1
MIFQTTSEDPRTKARTGILNLNGTELETPVFMPVGTRGVVKTLSTEDLEELEYSLILGNTYHLYLRPGTSVLERFGGLKKFSTWKRALLTDSGGYQVFSLNSLFKYEQDGVRFQSHIDGSRHYFTPNSVIDIQRSIGSDIMMVLDDCAPFDSGPERLRQSLDRTHLWAEMSVEYWEKNKNSQHLFGIFQGGIDLGFRLESLQKIVSLPFDGIAIGGLSVGEPRQDFIRILEGISAYTDRSRPLYLMGVGTVPDILDGVKNGVDMFDCVLPTRNARNGQVFTSLGKINLRNEKWKSSDAPIDPHCGCKVCKRYSIGYIRHLHHIGEITAFSLSTYHNLYFMKNFLSEIQKSIRAGEFLKIYAKWKNLYEKPEFSG

SEQ ID NO: 56908 - protein, 379 aa, Leptospira sarikeiensis
  misc_feature (1)..(379): tr|A0A4R9KC81|A0A4R9KC81_9LEPT Queuine tRNA-ribosyltran sferase OS=Leptospira sarikeiensis OX=2484943 GN=tgt PE =3 SV=1
MFEQKMIFRSKVEDPNSFARTGTLNLNGIEIPTPVFMPVGTRGAVKSLDSDDLDELGYELILGNTYHLYLRPGVEVLEKFGGLKNFVSYKKSLLTDSGGFQVFSLNSLVKFKKEGVEFRSHIDGSPHFFTPKKVVDIQRTIGSDIMMVLDDCPPGDASSARIKEALDRTHRWAEEAVDYWEKDKRSQHLFGIFQGGTNLELRLESLEKIRSLPFSGIAIGGLSVGEPRPDFIRTMEGISSYTDRTRPLYLMGVGTVPDILEGVRNGVDMFDCVLPTRNARNGQVFTSRGKVNLRNEKWKLSDEPMDPECKCKVCKRYSVGYIRHLHHVKELSAFSLSTYHNLHFMKKFMKQLRHSIEVGNFSEFFVKWKNLYERAEISR

SEQ ID NO: 56909 - protein, 379 aa, Leptospira selangorensis
  misc_feature (1)..(379): tr|A0A5F2BX00|A0A5F2BX00_9LEPT Queuine tRNA-ribosyltran sferase OS=Leptospira selangorensis OX=2484982 GN=tgt P E=3 SV=1
MSEQKMIYRSRVEDPNSFARTGTLSLNGIEIPTPVFMPVGTRGAVKSLDSDDIDELGYELILGNTYHLYLRPGTEVLEKFGGLKNFVSYKKALLTDSGGFQVFSLNSLVKFKKEGVEFRSHIDGSPHFFTPQKVIDIQRAIGSDIMMVLDDCPPGDGTVSRIKDALDRTHRWAEEAVNYWVKDKRNQFLFGIFQGGTNLDLRLESLEKIRSLPFSGIAIGGLSVGEPRPDFIRTMEGISSYTDRTRPLYLMGVGTVPDILEGVRNGVDMFDCVLPTRNARNGQVFTSQGKVNLRNEKWKLLDAPMDPECECKVCKRYSIGYIRHLHHVKELSAFSLSTYHNLYFMKKFMKELRHSIEVGNFSEFFVKWKNLYERPEISR

SEQ ID NO: 56910 - protein, 379 aa, Leptospira selangorensis
  misc_feature (1)..(379): tr|A0A4R9G2W5|A0A4R9G2W5_9LEPT Queuine tRNA-ribosyltran sferase OS=Leptospira selangorensis OX=2484982 GN=tgt P E=3 SV=1
MSEQKMIYRSRVEDPNSFARTGTLSLNGIEIPTPVFMPVGTRGAVKSLDSDDIDELGYELILGNTYHLYLRPGTEVLEKFGGLKNFVSYKKALLTDSGGFQVFSLNSLVKFKKEGVEFRSHIDGSPHFFTPQKVIDIQRAIGSDIMMVLDDCPPGDGTVSRIKDALDRTHRWAEEAVNYWAKDKRNQFLFGIFQGGTNLDLRLESLEKIRSLPFSGIAIGGLSVGEPRPDFIRTMEGISSYTDRTRPLYLMGVGTVPDILEGVRNGVDMFDCVLPTRNARNGQVFTSQGKVNLRNEKWKLLDAPMDPECECKVCKRYSIGYIRHLHHVKELSAFSLSTYHNLYFMKKFMKELRHSIEVGNFSEFFVKWKNLYERPEISR

SEQ ID NO: 56911 - protein, 379 aa, Leptospira semungkisensis
  misc_feature (1)..(379): tr|A0A4R9G1W6|A0A4R9G1W6_9LEPT Queuine tRNA-ribosyltran sferase OS=Leptospira semungkisensis OX=2484985 GN=tgt PE=3 SV=1
MSQQKMIFRPGISDPNSHARTGSLDLNGIEIPTPVFMPVGTRGAVKSLDSDDLDELGFELILGNTYHLYLRPGMDVLQKFGGLKNFVSYNKALLTDSGGFQVFSLNSLVKFKKEGVEFRSHIDGSPHFFTPEKVIDIQRAIGSDIMMVLDDCPPGDADTARIKESLDRTHRWAEAAVSYWEKDKGKQNLFGIFQGGTNLDLRLESLSKIASLPFSGIAIGGLSVGEPRPDFIRTMEGIAPHTDKSRPLYLMGVGTVPDILEGVRNGVDMFDCVLPTRNARNGQVFTSRGKMNLRNEKWKFSDEPMDPECECRVCKRYSVGYIRHLHHVKELSAFSLSTYHNLSFMKKFMKELRLSIEVGKFSEFFFKWKNLYERPEISR

SEQ ID NO: 56912 - protein, 374 aa, Leptospira sp.; identical to SEQ ID NO: 56906
  misc_feature (1)..(374): tr|M5UR04|M5UR04_9LEPT Queuine tRNA-ribosyltransferase OS=Leptospira sp. Fiocruz LV4135 OX=1193013 GN=tgt PE=3 SV=1

SEQ ID NO: 56913 - protein, 371 aa, Leptospira sp.
  misc_feature (1)..(371): tr|A0A2M8HL27|A0A2M8HL27_9LEPT Queuine tRNA-ribosyltran sferase OS=Leptospira sp. OX=178 GN=tgt PE=3 SV=1
MIFKEKNRISSGYARTGTLEVAGQTIETPIFMPVGTQGTIKALSTEDISELGYQLILSNTYHLYLRPGTEVLDHFGGIKKMMGYPKAMLTDSGGYQVFSLASLFKFFHDGVKFQSHIDGSHHTFTPAKVLDIQNSIGSDIWMVLDDCAPFDSNSKRIKESLDRTHRWAEDSVKHWQEKEYSSKLFGISQGAFDLDSRKFSLEKIQSLPFSGIAIGGLSVGEPREWFIKVIESLAPFMDPLRPHYLMGVGTVPDILDGVRNGIDMFDCVLPTRNARNAQVFTRKGKLNLRNEKFKFSDAKIDEHCTCKVCQNYSLGYLRHLHKAKEILALQLSTFHNLQFMKDFMEMIRNSINTGEFLEFSTEWKNLYNSSN

SEQ ID NO: 56914 - protein, 374 aa, Leptospira stimsonii
  misc_feature (1)..(374): tr|A0A5E8TIC0|A0A5E8TIC0_9LEPT Queuine tRNA-ribosyltran sferase OS=Leptospira stimsonii OX=2202203 GN=tgt PE=3 SV=1
MIFKTTSEDPNTRARTGILDLNGVKLNTPVFMPVGTRGVVKTLDTEDLEELEYSLILGNTYHLYLRPGTSVLDQFGGLKKFMTWKGALLTDSGGYQVFSLNSLFKYETDGVRFQSHIDGSRHYFTPGSVIDVQRSIGSDIMMVLDDCAPFDSSPERLRQSLERTHRWAEMSVEHWEKKKNSQHLFGIFQGGIDLDSRLESLKAIVSLPFDGIAIGGLSVGEPRKDFIRILNGISSHTDRSRPLYLMGVGTVPDILDGVKNGVDMFDCVLPTRNARNGQVFTSLGKVNLRNEKWKNSDAPMDPNCQCKVCKRYSIGYIRHLHHVGEITAFSLSTFHNLFFMKNFLSEIQNSIQAGEFLETYARWKNLYEKPEFSG

SEQ ID NO: 56915 - protein, 679 aa, Leptospira stimsonii
  misc_feature (1)..(679): tr|A0A396Z4R1|A0A396Z4R1_9LEPT Queuine tRNA-ribosyltran sferase OS=Leptospira stimsonii OX=2202203 GN=tgt PE=3 SV=1
MSRLNFVLEAEAPQTSARATTFTTLHGQVQTPIFMPVGTQATVRAQTVDSLKAMGSRVLLANTYHLLLRPGAEVFRKIGGIHKFMNWDFPVLTDSGGFQIFSLPNSRKMTEEGALFRSYVDGKMILLSPELSIDMQKAIGSDIMMVLDQCIPSTADYAKAKDAMEITHRWAKRSLDARGDSPQSLFGIVQGACFSDLRKESAKVLTQMPFDGFAIGGLAVGETKEERNDFCELSASLLPKNLPRYLMGVGTPIDLLEAVHRGVDMFDCTIPTELAQHGVAYTSAGKLQIHRTIYKFADSKLDENCDCPCCQNYSRSYLHHLIKTSEILGWHLIAQHNLNFYHRLMAEMRARIFEGSFASYYARKKEELTRSDNVDPSLNKKRTPKAQRKRILGDYEIRENKEGKYWSVRLRSSGETMHSVNNPSEEAKSLYVVQTKLSEKLSGRTDSVKQESTNPFVIWDVGLGAATNSMAAIRCYEEIDSPVPMNMISFECDLDPFRLAMRNIGCFPHLFHTAPRSILEKGNWTSPSGTLGWDLVIGNFENTFLSQKIPDLVFYDPFSFKTDSKLWQPEFLKRLFLFFQDHSKNTMFVTYSASTAVRSSLLFAGFWVGKGKGSGPKSETTIAFTKRPENVEESTQLLGADWLGRRERSHARFREEWDETKNRIWEETILSHPQFLFSP

SEQ ID NO: 56916 - protein, 371 aa, Leptospira terpstrae
  misc_feature (1)..(371): tr|N1VXY0|N1VXY0_9LEPT Queuine tRNA-ribosyltransferase OS=Leptospira terpstrae serovar Hualin str. LT 11-33 = ATCC 700639 OX=1257025 GN=tgt PE=3 SV=1
MPSIFKERSKDAGSFARTGTLHLNGIQIETPIFMPVGTRGSIKSLSSADIDELGYNLILANTYHLYLKPGKEVLDHFHGLKKFMSYKRALLTDSGGFQVFSLASLFKFEEDGVRFQSHIDGSHHKFTPASVIDMQRSIGSDIMMVLDDCAPYGSDLGRLELALDRTHRWAKESYEYWMEKPNGQNVFPIVQGGVNESLRKRSLDTLQNIDFPGIAIGGLSVGEPRPEYIRILECMAPYFDQARPRYLMGVGTVVDILEGVKNGVDMFDCVLPTRNARNGQVFTSFGKLNLRNEIHRLADGPIDPECGCKVCTTYSLGYIRHLHKVKELTAFSLSTYHNLYFMQSFMEKMRKSIEIGNFQGFYDHWKNLFGS

SEQ ID NO: 56917 - protein, 374 aa, Leptospira tipperaryensis
  misc_feature (1)..(374): tr|A0A1D7UYU8|A0A1D7UYU8_9LEPT Queuine tRNA-ribosyltran sferase OS=Leptospira tipperaryensis OX=2564040 GN=tgt PE=3 SV=1
MIFRTTSEDSKTRARTGILDLNGVKLNTPVFMPVGTRGVVKTLNTEDLEELEYSLILGNTYHLYLRPGTSVLDQFGGLKKFMTWKGALLTDSGGYQVFSLNSLFKYETDGVRFQSHIDGSRHYFTPGSVIDVQRSIGSDIMMVLDDCAPFDSSPERLRQSLDRTHRWAEMSVEHWEKNKNSQHLFGIFQGGIDLDSRLESLKAIASLPFDGIAIGGLSVGEPRKDFIRILDGISSHTDRSRPLYLMGVGTVPDILDGVKNGVDMFDCVLPTRNARNGQVFTSLGKVNLRNEKWKNSDAPMDPNCQCKVCKRYSIGYIRHLHHVGEITAFSLSTFHNLFFMKNFLSEIQKSIQAGEFLETYARWKNLYEKPEFSG

SEQ ID NO: 56918 - protein, 675 aa, Leptospira tipperaryensis
  misc_feature (1)..(675): tr|A0A1D7UX00|A0A1D7UX00_9LEPT Queuine tRNA-ribosyltran sferase OS=Leptospira tipperaryensis OX=2564040 GN=tgt PE=3 SV=1
MSRLNFLLEAEAPHSNARAATFTTLHGKVQTPIFMPVGTQATVRAQTVDSLKAMGSRVLLANTYHLLLRPGAEVFRKMGGIHKFMNWDFPVLTDSGGFQIFSLPNSRKMTEEGALFRSYVDGKMILLSPELSIDMQRAIGSDIMMVLDQCIPSTADYAKAKDAMEITHRWAKRSLDARGDSSQSMFGIVQGACFPDLRKESAKALTQMSFDGFAIGGLAVGETKEERNDFCELSASLLPKHLPRYLMGVGTPIDLLEAVHRGVDMFDCTIPTELAQHGVAYTSAGKLQLHRTIYKFEESKLDENCECPCCQNYSRSYLHHLIKTSEILGWHLIAMHNLNFYHRLMAEMRARIFEGNFASYYSQKKEELTRSDNVDPSLHKKRTPKAQRKRILGDYEIRENKEGKYWSVRQRSSGETMHSVNNPSQEAKSLYIVQSKLSEKLSVDSSLSKNSRPFVIWDVGLGAATNSMAAIQCYEEVDSPVPMNMISFECDLDPFRLAMRNIGCFPHLFHKAPRSILDKGNWTSPFGGLTWNLVLGDFAETFREEQTPDLIFYDPFSFKTDSKLWEPEFLKELFTFFQNDSKNTMLVTYSASTAVRSSLLYAGFWVGRGKGTGPKSETTVAYTKRPQNPDEFSQLLGAEWLGRRERSHARYRIEWNEEENKIWEESILSHSQFQI

SEQ ID NO: 56919 - protein, 371 aa, Leptospira vanthielii
  misc_feature (1)..(371): tr|N1WEV5|N1WEV5_9LEPT Queuine tRNA-ribosyltransferase OS=Leptospira vanthielii serovar Holland str. Waz Holla nd = ATCC 700522 OX=1218591 GN=tgt PE=3 SV=1
MFSIFKERSKDSGSYARTGTLLLNGVQIETPIFMPVGTRGSIKSLSSSDIDELGYNLILANTYHLYLKPGKEVLDHFHGLKNFMSYKRALLTDSGGFQVFSLASLFKFEEDGVRFQSHIDGSHHKFTPASVIDMQRSIGSDIMMVLDDCAPYGSDLKRLELALDRTHRWAKESYEYWMERPNGQNVFPIVQGGVNESLRKRSLDTLQNINFPGIAIGGLSVGEPRPEYIRILECMAPYFDQARPRYLMGVGTVVDILEGVKNGVDMFDCVLPTRNARNGQVFTSFGKLNLRNEVHRLADGPIDPECGCKVCKTYSLGYIRHLHKVKELTAFSLSTYHNLYFMQSFMERMRKAIEIGNFKGFYDHWKNLFGS

SEQ ID NO: 56920 - protein, 371 aa, Leptospira vanthielii
  misc_feature (1)..(371): tr|A0A4R9LJR8|A0A4R9LJR8_9LEPT Queuine tRNA-ribosyltran sferase OS=Leptospira vanthielii OX=293085 GN=tgt PE=3 SV=1
MFSIFKERSKDSGSYARTGTLLLNGVQIETPIFMPVGTRGSIKSLSSSDIDELGYNLILANTYHLYLKPGKEVLDHFHGLKNFMSYKRALLTDSGGFQVFSLASLFKFEEDGVRFQSHIDGSHHKFTPASVIDMQRSIGSDIMMVLDDCAPYGSDLKRLELALDRTHRWAKESYEYWMERPNGQNVFPIVQGGVNESLRKRSLDTLQNINFPGIAIGGLSVGEPRPEYIRILECMAPYFDQARPRYLMGVGTVVDILEGVKNGVDMFDCVLPTRNARNGQVFTSFGKLNLRNEVHRLADGPIDPECGCKVCTTYSLGYIRHLHKVKELTAFSLSTYHNLYFMQSFMERMRKAIEIGNFKGFYDHWKNLFGS

SEQ ID NO: 56921 - protein, 374 aa, Leptospira weilii
  misc_feature (1)..(374): tr|M6G512|M6G512_9LEPT Queuine tRNA-ribosyltransferase OS=Leptospira weilii str. 2006001855 OX=996804 GN=tgt P E=3 SV=1
MIFQTTSEDPRTRARTGILNLNGVTLETPVFMPVGTRGVVKTLSTDDLEELEYSLILGNTYHLYLRPGTSVLESFGGLKKFSTWKRALLTDSGGYQVFSLNSLFKYEQDGVRFQSHIDGSRHYFTPNSVIDIQRSIGSDIMMVLDDCAPFDSSPERLRQSLDRTHRWAEMSVEYWEKNKNSSHLFGIFQGGIDLGLRLESLRKIASLPFDGIAIGGLSVGEPRKDFIRILEGVSDSTDRNRPLYLMGVGTVPDILDGVKNGVDMFDCVLPTRNARNGQVFTSLGKINLRNEKWKSSDAPMDPHCGCKVCKRYSIGYIRHLHHVGEITAFSLSTYHNLYFMKNFLSEIQKSIRAGEFLKIYAKWKNLYEKPEFSG

SEQ ID NO: 56922 - protein, 374 aa, Leptospira weilii
  misc_feature (1)..(374): tr|M3GE42|M3GE42_9LEPT Queuine tRNA-ribosyltransferase OS=Leptospira weilii serovar Topaz str. LT2116 OX=10885 40 GN=tgt PE=3 SV=1
MIFQTTSEDLRTRARTGILNLNGVTLETPVFMPVGTRGVVKTLSTDDLEELEYSLILGNTYHLYLRPGTSVLESFGGLKKFSTWKRALLTDSGGYQVFSLNSLFKYEQDGVRFQSHIDGSRHYFTPNSVIDIQRSIGSDIMMVLDDCAPFDSSPERLRQSLDRTHQWAEMSVEYWEKNKNSSHLFGIFQGGIDLGLRLESLQKIVSLPFDGIAIGGLSVGEPRKDFIRILEGISDYTDRNRPLYLMGVGTVPDILDGVKNGVDMFDCVLPTRNARNGQVFTSLGKINLRNEKWKSSDAPMDPHCGCKVCKRYSIGYIRHLHHVGEITAFSLSTYHNLYFMKNFLSEIQKSIQAGEFLKIYAKWKNLYEKPEFSG

SEQ ID NO: 56923 - protein, 371 aa, Leptospira wolbachii
  misc_feature (1)..(371): tr|R9A5T1|R9A5T1_9LEPT Queuine tRNA-ribosyltransferase OS=Leptospira wolbachii serovar Codice str. CDC OX=1218 599 GN=tgt PE=3 SV=1
MSSIFKERSKDPGSFARTGTLLLNGIQIETPIFMPVGTRGSVKSLSSADIDELGYNLILANTYHLYLKPGKEVLDHFHGLKNFMSYKRALLTDSGGFQVFSLASLFKFEEDGVRFQSHIDGSHHKFTPASVIEMQRSIGSDIMMVLDDCAPYGSDLGRLELALDRTHRWAKESFEYWMEKPNGQNVFPIVQGGVNESLRKRSLDTLQNINFPGIAIGGLSVGEPRPEYIRILECMAPYFDQARPRYLMGVGTVVDILEGVKNGVDMFDCVLPTRNARNGQVFTSFGKLNLRNEIHRLADGPIDPECGCKVCKTYSLGYIRHLHKVKELTAFSLSTYHNLYFMQSFMERMRKSIEIGNFKGFYDHWKNLFGS

SEQ ID NO: 56924 - protein, 374 aa, Leptospira wolffii
  misc_feature (1)..(374): tr|A0A2M9Z854|A0A2M9Z854_9LEPT Queuine tRNA-ribosyltran sferase OS=Leptospira wolffii OX=409998 GN=tgt PE=3 SV= 1
MIFRSGVQDPGSYARTGTLYLNGIEIPTPVFMPVGTRGAIKSLDSDDIDELGFELILGNTYHLYLRPGVEVLRKFGGLKNFVSYKKALLTDSGGFQVFSLNSLVKFRQEGVEFRSHIDGSPHFFTPEKVIDIQREIGSDIMMVLDDCPPGDGDIARVKQALDRTHRWAEIAVDYWQKDTRGQNLFGIFQGGTNLELRLESLEKIRSLPFSGIAIGGLSVGEPRPDFVRTMEGIAPHTDRSRPLYLMGVGTVPDILDGVRNGVDMFDCVLPTRNARNGQVFTSRGKVNLRNEKWKFSDEPMDPECDCRVCKRYSIGYIRHLHHVKELSAFSLSTYHNLSFMKKFMTDLRESISAGTFSEFFAKWKNLYETAEISR

SEQ ID NO: 56925 - protein, 374 aa, Leptospira wolffii
  misc_feature (1)..(374): tr|A0A5F1YJQ5|A0A5F1YJQ5_9LEPT Queuine tRNA-ribosyltran sferase OS=Leptospira wolffii OX=409998 GN=tgt PE=3 SV= 1
MIFRSGVQDPGSYARTGTLYLNGIEIPTPVFMPVGTRGAIKSLDSDDIDELGFELILGNTYHLYLRPGVEVLRKFGGLKNFVSYKKALLTDSGGFQVFSLNSLVKFRREGVEFRSHIDGSPHFFTPEKVIDIQREIGSDIMMVLDDCPPGDGDIARVKQALDRTHRWAEIAVDYWQKDTRGQNLFGIFQGGTNLELRLESLEKIRSLPFSGIAIGGLSVGEPRPDFVRTMEGIAPHTDRSRPLYLMGVGTVPDILDGVRNGVDMFDCVLPTRNARNGQVFTSRGKVNLRNEKWKFSDEPMDPECDCRVCKRYSIGYIRHLHHVKELSAFSLSTYHNLSFMKKFMTDLRESISAGTFSEFFAKWKNLYETAEISR

SEQ ID NO: 56926 - protein, 371 aa, Leptospira yanagawae
  misc_feature (1)..(371): tr|A0A5E8H8S2|A0A5E8H8S2_9LEPT Queuine tRNA-ribosyltran sferase OS=Leptospira yanagawae serovar Saopaulo str. S ao Paulo = ATCC 700523 OX=1249483 GN=tgt PE=3 SV=1
MPSIFKEGTYDQGSYARTGTLSLNGIQIETPIFMPVGTRGSVKSLTSEDINELGYNLILANTYHLYLKPGKEVFDHFHGLKNFMSYKKALLTDSGGFQVFSLASLFKFEDDGVRFQSHIDGSYHKFTPSSVIDMQRSIGSDIMMVLDDCAPYGSDTKRLELALDRTHRWAKESYEYWMENPNGQNVFPIVQGGVNEALRLRSLETLQKIDFPGIAIGGLSVGEPRPEYIRILECMAPHLDKSRPRYLMGVGTVVDILEGVKNGIDMFDCVLPTRNARNGQVFTSKGKINLRNESHRLSESPIDSECSCKVCQTYSLGYIRHLHKVKELTAFSLSTYHNLFFMQSFMEKMRKSIEIGNFQAFYEHWKNLFGS

SEQ ID NO: 56927 - protein, 371 aa, Leptospira yanagawae; identical to SEQ ID NO: 56926
  misc_feature (1)..(371): tr|A0A4R9IZA1|A0A4R9IZA1_9LEPT Queuine tRNA-ribosyltran sferase OS=Leptospira yanagawae OX=293069 GN=tgt PE=3 S V=1

SEQ ID NO: 56928 - protein, 374 aa, Leptospira yasudae
  misc_feature (1)..(374): tr|A0A418A3T1|A0A418A3T1_9LEPT Queuine tRNA-ribosyltran sferase OS=Leptospira yasudae OX=2202201 GN=tgt PE=3 SV =1
MIFKTLSEDSKTRARTGILNLNGVELETPVFMPVGTRGVVKTLTMDDLEELEYSLILGNTYHLYLRPGTDVLDKFGGLKKFSTWKKALLTDSGGYQVFSLNSLFKYEQDGVRFQSHIDGSRHYFTPSSVIDIQRSIGSDIMMVLDDCAPFDSSPERLRQSLDRTHRWAEMSVEYWEKRKNSQHLFGIFQGGIDLDFRLESLQAITSLPFDGVAIGGLSVGEPRKDFIRILEGISKYTDRNRPLYLMGVGTVPDILDGVKNGVDMFDCVLPTRNARNGQVFTSLGKINLRNEKWKNSDAPMDPNCGCKVCKRYSIGYIRHLHHVGEITAFSLSTYHNLYFMKSFLAEIRKSIQAGEFLETYARWKNLYEKPEFSG

SEQ ID NO: 56929 - protein, 374 aa, Leptospiraceae bacterium
  misc_feature (1)..(374): tr|A0A2E5S6F9|A0A2E5S6F9_9LEPT Queuine tRNA-ribosyltran sferase OS=Leptospiraceae bacterium OX=2026757 GN=tgt P E=3 SV=1
MSLEFQELDRDPQSLARTGEMKLAGIKVQTPMFMPVGTQAAVKTLDSYDLEDMGYELILANTYHLYLRPGEVIRSFGGVKRFMDWKGALLTDSGGFQVFSLAAMRKFVTGGVEFQSHIDGSKHLFTPERVLDIQGMLGSDIMMVLDDCPPGDADSTRLEDSLDRTHRWARQSVEYYRQGQEQGRFQNQNLFGIAQGGIDEKLRSESLSMIQALPFAGVAIGGLSVGESREDFYRVLHHLGPELDEKRPRYLMGVGTIPDFLEAIRCGVDLFDCVLPTRNARHGIAYTRQGKLNLRNAIHTESQEPLDTECQCRACRRFSRGYVRHLLRAGEITALRLLSIHNLQFFFDFFVMARQSIQKGQFMSFYEGWKKIGF

SEQ ID NO: 56930 - protein, 374 aa, Leptospiraceae bacterium
  misc_feature (1)..(374): tr|A0A357IW73|A0A357IW73_9LEPT Queuine tRNA-ribosyltran sferase OS=Leptospiraceae bacterium OX=2026757 GN=tgt P E=3 SV=1
MSLTFEQLDRDPECLARTGKMNLAGIQVQTPMFMPVGTQAAVKTLDSYDLEDMGYELILANTYHLYLRPGEIIRSFGGVKRFMDWKGAILTDSGGFQVFSLAAMRKFVTGGVEFQSHIDGSRHLFTPERVLDIQGMLGSDIMMVLDDCPPGDADGHRLAESLNRTHRWAEQSIEYFHAGLEQGRFQNQNLFGIAQGGTSESLRSESVATIQSLPFAGIAIGGLSVGETREDFYRVLHHIGPELDQNRPRYLMGVGTIPDFLEAIRCGVDLFDCVLPTRNARHGIAYTRQGKLNLRNAIHSESQEPLDTECQCRACRRFSRGYIRHLLRAGEITALRLLTIHNLQFFFDFFVMARHAIQKGQFMSFYEGWKKIGF

SEQ ID NO: 56931 - protein, 378 aa, Leptospirillum ferriphilum
  misc_feature (1)..(378): tr|A0A094WB29|A0A094WB29_9BACT Queuine tRNA-ribosyltran sferase OS=Leptospirillum ferriphilum OX=178606 GN=tgt PE=3 SV=1
MKFHLETADPFSKARTGCVDTRNGFFETPAFMPVATRGTIRGLTAGQVREAGAGILLVNLFHLWLRPGEKIVREAGGISSFMGWKGPVLADSGGYQIYSLSGSVKIREEGAFFQSPYDGRKVFLSPEDVVSVGSGMGIDLIMVLDHLVSPDSSPEVLREARDRTLRWAKRSLDVAPLDGALFGIVQGGCDIDARKWSAETLSSMTGPEGQTFSGFGIGGLGIGEPFEVRNRVVGETLGALPPEKPRYLMGIGYPEDLLTGIIQGVDLFDCVLPTRNGRNGMAFTSKGRLLIRNARFQKEDTPLDEECSCAACKSYSRSYIHHLFRNGEMLGPILNTIHNLTYYLDLMHQSRTRIREGTFNAWARQKIDSLQQTEREQS

SEQ ID NO: 56932 - protein, 378 aa, Leptospirillum ferriphilum
  misc_feature (1)..(378): tr|A0A1V3SU99|A0A1V3SU99_9BACT Queuine tRNA-ribosyltran sferase OS=Leptospirillum ferriphilum OX=178606 GN=tgt PE=3 SV=1
MKFHLEKANPSSKARTGCIDTNNGSFETPAFMPVATRGTIRGLTAGQVREAGAGILLVNLFHLWLRPGEKIIREAGGISSFMGWNGPVLADSGGYQIYSLSGSVKIREEGAFFQSPYDGRKVFLSPEDVVSVGSGMGIDLIMVLDHLVSPDSPPDVLREARDRTLRWARRSLDVAPPDGALFGIVQGGCDTDARKWSAETLSFMTGREGQTFSGFGIGGLGIGESFEVRNRIVGETLDVLPREKPRYLMGIGYPEDLLAGIAQGVDLFDCVLPTRNGRNGMVFTSKGRLLIRNARFQEEDSPLDDGCSCAACKSYSRAYIHHLFRNGEMLGPILNTIHNLTYYLDLMQQSRIEIRQGTFNAWAQQKMDSLQQTEREQS

SEQ ID NO: 56933 - protein, 383 aa, Leptospirillum ferrodiazotrophum
  misc_feature (1)..(383): tr|C6HWB8|C6HWB8_9BACT Queuine tRNA-ribosyltransferase OS=Leptospirillum ferrodiazotrophum OX=412449 GN=tgt PE =3 SV=1
MTSFPFFQHISSDRSSLAREGVIRTRHGVVPTPAFMPVGTRGTVKGLTPDTLSACGAEIVLVNAFHLWLRPGTERVREAGGIGRMMGVDCPVLSDSGGYQIHSLETRRTVTEEGVSFLSPYDGAKVFLSPEISVAHSEALGVDIRMVLDDLAGAAAPPARIREAMERTHRWALRALNAWDPGTTAPLFGIIQGGVDRALREESARGLVSLVGSRGQSFSGFGIGGLGVGETVDERLSVLDATVPILPENRPRYLMGVGYPGDILEAVRRGVDLFDCVLPTRNARNGSYFTREGAIAIRNARFREDDRPIDSSCGCATCRRHSRAYLHHLVKNDEMTGAILGTIHNVSFYLEIMREIRARIRSGTLSGLDWPCFTTRHAIGGDS

SEQ ID NO: 56934 - protein, 380 aa, Leptospirillum ferrooxidans
  misc_feature (1)..(380): tr|I0INR0|I0INR0_LEPFC Queuine tRNA-ribosyltransferase OS=Leptospirillum ferrooxidans (strain C2-3) OX=1162668 GN=tgt PE=3 SV=1
MKWIESHPQTEGKPRTGSLHTEAGIVETPNFMPVGTRGSVRGLSSDVLSRAGTEILLVNLFHLWLRPGERILKGAGGIRPFMGWKGPVLSDSGGFQILSLKERRKVSEEGVHFQSPYDGSSVFLSPEEVVRFSEEIGVTIAMVLDHLVSPEEGTGKNREALERTLRWAKRSLDARESVEGEMALFGIVQGGLDPELRQFCARELSGMTGLSGTIFDGYGIGGLGIGETPEERVSLVAAAIEPLPRNKPRYLMGVGYPEDLIQAVGEGVDLFDCVLPTRNARNGMLFTRSGRLIIRNAKYGEDFGPIDETCSCQTCQSYSRAYLHHLFRTGEMLGPVLNTIHNVTFYLSLMKEMREQLVMGTFSRWKNHMLTHMNSRGNNE

SEQ ID NO: 56935 - protein, 378 aa, Leptospirillum sp.
  misc_feature (1)..(378): tr|A0A0K0WMK3|A0A0K0WMK3_9BACT Queuine tRNA-ribosyltran sferase OS=Leptospirillum sp. Group II 'CF-1' OX=166008 3 GN=tgt PE=3 SV=1
MKFHLEKANPSSKARTGCIDTNNGSFETPAFMPVATRGTIRGLTTNQVREAGAGILLVNLFHLWLRPGEKIIREAGGISSFMGWNGPVLADSGGYQIYSLSGSVKIREEGAFFQSPYDGRKVFLSPEDVVSVGSGMGIDLIMVLDHLVSPDSPPDVLREARDRTLRWARRSLDVAPPDGALFGIVQGGCDTDARKWSAETLSFMTGREGQMFSGFGIGGLGIGESFEVRNRIVGETLDVLSPEKPRYLMGIGYPEDLLAGIAQGVDLFDCVLPTRNGRNGMVFTSKGRLLIRNARFQEEDSPLDDGCSCAACKSYSRAYIHHLFRNGEMLGPILNTIHNLTYYLDLMQQSRIEIRQGTFNAWARQKMDSLQQTEREQS

SEQ ID NO: 56936 - protein, 378 aa, Leptospirillum sp.; identical to SEQ ID NO: 56931
  misc_feature (1)..(378): tr|B6ANM1|B6ANM1_9BACT Queuine tRNA-ribosyltransferase OS=Leptospirillum sp. Group II '5-way CG' OX=419541 GN= tgt PE=3 SV=1

SEQ ID NO: 56937 - protein, 390 aa, Leptothrix cholodnii
  misc_feature (1)..(390): sp|B1XWG6|TGT_LEPCP Queuine tRNA-ribosyltransferase OS= Leptothrix cholodnii (strain ATCC 51168 / LMG 8142 / SP -6) OX=395495 GN=tgt PE=3 SV=1
MLNFDLLTTEGHARRGRLTLNHGVVETPIFMPVGTYGTVKGVMPRDLETMGAQIILGNTFHLWMRPGQDVMAQFGGLHRFENWTRPILTDSGGFQVWSLGEMRKISEEGVRFASPVNGDKLFLTPEVSMQIQTVLNSDIVMQFDECTPYWQGAKNVGHITTEKEARVSMELSLRWAARSKAEFARLGNPNALFGIVQGGMFESLREESLNALVELDFPGYAVGGVSVGEPKDEMLRIMNHTPHLLPADKPRYLMGVGTPEDLVDGVACGVDMFDCVMPTRNARNGHLFTRYGDLKIRNARHKADERPLDETCSCQACKGSTLPDGRVTGGFSRAYLHHLDRCGEMLGPMLASIHNLHYYLNLMREVREALDAGRFEAFRAQFKADRARGV

SEQ ID NO: 56938 - protein, 390 aa, Leptothrix mobilis
  misc_feature (1)..(390): tr|A0A4V2EX69|A0A4V2EX69_9BURK Queuine tRNA-ribosyltran sferase OS=Leptothrix mobilis OX=47994 GN=tgt PE=3 SV=1
MLNFELLGTEGHARRGRLTLNHGVVETPIFMPVGTYGTVKGVMPRDLEAMGAQIILGNTFHLWMRPGLDVMAQFGGLHRFETWERPILTDSGGFQVWSLGDMRKISEEGVRFASPVNGDKLFLTPEVSMQIQTVLNSDIVMQFDECTPYWQGAKGVGHITTEKEARESMELSLRWAGRSQAEFARLANPNALFGIVQGGMFESLREASLAALVDLDLPGYAIGGVSVGEPKDEMLRIMGHTPHRLPAHKPRYLMGVGTPEDLVDGVACGVDMFDCVMPTRNARNGHLFTRYGDLKIRNARHKTDERPIDETCACHACAGSTDASGKTTGGFSRAYLHHLDRCGEMLGPMLASIHNLHYYLNLMREVRAALDEGRFEAFRAQFKADRARGV

SEQ ID NO: 56939 - protein, 393 aa, Leptotrichia buccalis
  misc_feature (1)..(393): tr|C7NBV1|C7NBV1_LEPBD Queuine tRNA-ribosyltransferase OS=Leptotrichia buccalis (strain ATCC 14201 / DSM 1135 / JCM 12969 / NCTC 10249 / C-1013-b) OX=523794 GN=tgt P E=3 SV=1
MCIEKENKDFKNPIEYKLEKKDGNARAGVIKTPHGEIKTPVFMPVGTQATVKAMTREELEEINSQIILGNTYHLYLRPGDDLVNDFGGLHKFMRWDKPILTDSGGFQVFSLGDLRKIKEEGVHFRSHLDGSKHFLSPEKSISIQNNLGSDIMMVLDECPPGLSTREYLIPSIERTTRWAKRCIEANRNKDKQGLFAIVQGGIYEDLRDKSLEELYESDYGFAGYALGGLAVGEPREDMYRILKYITPKLPENKPRYLMGVGEPVDMLEAVEHGIDMMDCVQPTRIGRHGTVFTKYGRLVIKNAIYSRDDRPLDEGCDCYACKNYTRAYIRHLFKAGEILGQRLATYHNLHFLLKLMDNAREAIIDGKFKEYKEEVLRNYAMGKESEWIKPKSI

SEQ ID NO: 56940 - protein, 386 aa, Leptotrichia goodfellowii
  misc_feature (1)..(386): tr|D0GIQ0|D0GIQ0_9FUSO Queuine tRNA-ribosyltransferase OS=Leptotrichia goodfellowii F0264 OX=596323 GN=tgt PE= 3 SV=1
MSKFDNPVKYRLETTDGNARAGVIETPHGLIKTPVFMPVGTQATVKAMTREELEEINSQIILGNTYHLYLRPGDELINDFGGLHKFMNWDRPILTDSGGFQVFSLGDLRKIKEEGVHFSSHIDGSKHFLSPEKSISIQNNLSSDIMMVLDECPPGLSTREYMIPSVERTTRWAKRCIEANRNKDRQGLFAIVQGGIYEDLRDKSLNELTEMDEHFAGYAIGGLAVGEPREDMYRILKYITPKAPDNKPRYLMGVGEPLDMLEAVEHGIDMMDCVQPTRIGRHGTVFTKYGRLVIKNAAYSRDNRPLDECDCYVCKNYTRAYIRHLFKADEILGQRLATYHNLYFLLKLMEDARNAILEKRFKEFKEEFIKNYTMGKDSDWIKPFSI

SEQ ID NO: 56941 - protein, 386 aa, Leptotrichia goodfellowii
  misc_feature (1)..(386): tr|A0A510JAV9|A0A510JAV9_9FUSO Queuine tRNA-ribosyltran sferase OS=Leptotrichia goodfellowii OX=157692 GN=tgt P E=3 SV=1
MSKFDNPVKYRLETTDGNARAGVIETPHGLIKTPVFMPVGTQATVKAMTREELEEINSQIILGNTYHLYLRPGDELINDFGGLHKFMNWDRPILTDSGGFQVFSLGDLRKIKEEGVHFSSHIDGSKHFLSPEKSISIQNNLGSDIMMVLDECPPGLSTREYMIPSVERTTRWAKRCIEANRNKDRQGLFAIVQGGIYEDLRDKSLNELTEMDEHFAGYAIGGLAVGEPREDMYRILKYITPKAPDNKPRYLMGVGEPLDMLEAVEHGIDMMDCVQPTRIGRHGTVFTKYGRLVIKNAAYSRDNRPLDECDCYVCKNYTRAYIRHLFKADEILGQRLATYHNLYFLLKLMEDARNAILEKRFKEFKEEFIKNYTMGKDSDWIKPFSI

SEQ ID NO: 56942 - protein, 393 aa, Leptotrichia hofstadii
  misc_feature (1)..(393): tr|A0A510JJW0|A0A510JJW0_9FUSO Queuine tRNA-ribosyltran sferase OS=Leptotrichia hofstadii OX=157688 GN=tgt PE=3 SV=1
MCIEKENKDFKNPIEYKLEKKDGNARAGVIQTPHGEIKTPVFMPVGTQATVKAMTREELEEINSQIILGNTYHLYLRPGDDLVNDFGGLHKFMRWDKPILTDSGGFQVFSLGDLRKIKEEGVHFRSHLDGSKHFLSPEKSISIQNNLGSDIMMVLDECPPGLSTREYLIPSIERTTRWAKRCIEANRNKDKQGLFAIVQGGIYEDLRDKSFEELYEHDYGFAGYALGGLAVGEPREDMYRILKYSTPKLPENKPRYLMGVGEPVDMLEAVEHGIDMMDCVQPTRIGRHGTVFTKYGRLVIKNAIYSRDDRPLDEGCDCYACKNYTRAYIRHLFKAGEILGQRLATYHNLYFLLKLMDNAREAIIDGRFKEYKEEVLKNYAMGKESEWIKPKSI

SEQ ID NO: 56943 - protein, 351 aa, Leptotrichia hofstadii
  misc_feature (1)..(351): tr|C9MY25|C9MY25_9FUSO Queuine tRNA-ribosyltransferase OS=Leptotrichia hofstadii F0254 OX=634994 GN=tgt PE=3 S V=1
MPVGTQATVKAMTREELEEINSQIILGNTYHLYLRPGDDLVNDFGGLHKFMRWDKPILTDSGGFQVFSLGDLRKIKEEGVHFRSHLDGSKHFLSPEKSISIQNNLGSDIMMVLDECPPGLSTREYLIPSIERTTRWAKRCIEANRNKDKQGLFAIVQGGIYEDLRDKSFEELYEYDYGFAGYALGGLAVGEPREDMYRILKYSTPKLPENKPRYLMGVGEPVDMLEAVEHGIDMMDCVQPTRIGRHGTVFTKYGRLVIKNAIYSRDDRPLDEGCDCYACKNYTRAYIRHLFKAGEILGQRLATYHNLHFLLKLMDNAREAIIDGRFKEYKEEVLKNYTMGKESEWIKPKSI

SEQ ID NO: 56944 - protein, 393 aa, Leptotrichia hongkongensis
  misc_feature (1)..(393): tr|A0A510LCB0|A0A510LCB0_9FUSO Queuine tRNA-ribosyltran sferase OS=Leptotrichia hongkongensis OX=554406 GN=tgt PE=3 SV=1
MCIEKENKDFKNPIEYKLEKKDGNARAGVIKTPHGEIKTPVFMPVGTQATVKAMTREELEEINSQIILGNTYHLYLRPGDELVNDFGGLHKFMRWDKPILTDSGGFQVFSLGDLRKIKEEGVHFRSHLDGSKHFLSPEKSISIQNNLGSDIMMVLDECPPGLSTREYLIPSIERTTRWAKRCIEANRNKDRQGLFAIVQGGIYEDLRDKSFEELYEYDYGFAGYALGGLAVGEPREDMYRILKYSTPKLPENKPRYLMGVGEPVDMLEAVEHGIDMMDCVQPTRIGRHGTVFTKYGRLVIKNAIYSRDDRPLDEDCDCYACKNYTRAYIRHLFKAGEILGQRLATYHNLHFLLKLMDNAREAIIDGRFKEYKEEVLKNYAIGKESEWIKPKSI

SEQ ID NO: 56945 - protein, 393 aa, Leptotrichia shahii
  misc_feature (1)..(393): tr|A0A510JQP2|A0A510JQP2_9FUSO Queuine tRNA-ribosyltran sferase OS=Leptotrichia shahii OX=157691 GN=tgt PE=3 SV =1
MSIEKENQDFNNPIKYKLEKSDGNARAGVITTPHGEIKTPVFMPVGTQATVKAMTKEELEEINSQIILGNTYHLYLRPGDELVNDFGGLHGFMKWDRPILTDSGGFQVFSLGDLRKIKEEGVYFRSHLDGSKHFLSPEKSISIQNNLGSDIMMVLDECPPGLSTREYLIPSIERTSRWAKRCIEANRNKDRQGLFAIVQGGIYEDLRDKSLEELHEADYGFAGYALGGLAVGEPREDMYRILKYITPKLPENKPRYLMGVGEPADMLEAVEHGIDMMDCVQPTRIGRHGTVFTKYGRLVIKNAIYSRDDRPLDEDCDCYACKNYTRAYIRHLFKAGEILGQRLATYHNLHFLLKLMDNAREAIIDGRFKEYKEEVLRNYAMGKESDWIKPKSI

SEQ ID NO: 56946 - protein, 391 aa, Leptotrichia sp.
  misc_feature (1)..(391): tr|U2RAB7|U2RAB7_9FUSO Queuine tRNA-ribosyltransferase OS=Leptotrichia sp. oral taxon 215 str. W9775 OX=132177 9 GN=tgt PE=3 SV=1
MCNKNIEMTENPVKYRIEVKDGNARAGEIETPHGKIKTPVFMPVGTQATVKAMTREELEEINSQIILGNTYHLYLRPGDELVNDFGGLHKFMNWERPILTDSGGFQVFSLGDLRKIKEEGVYFRSHLDGSKHFLSPEKSIEIQNNLGSDIMMVLDECPPGLSTREYLLPSIERTTRWAKRCIEANRNKDRQGLFAIVQGGIYEDLRDKSMNELVEMDEGFAGYAVGGLAVGEPREDMYRILEYITPKLPENKPRYLMGVGEPLDMLEAVEDGIDMMDCVQPTRIGRHGTVFTKYGRLVIKNASYSRDDRPLDECDCYVCKNYTRAYIRHLFKAEEILGQRLATYHNLHFLLKLMNDARQAIIEQRFKEFKEEFEKNYNMGKESEWIKPKSI

SEQ ID NO: 56947 - protein, 403 aa, Leptotrichia sp.
  misc_feature (1)..(403): tr|U2Q789|U2Q789_9FUSO Queuine tRNA-ribosyltransferase OS=Leptotrichia sp. oral taxon 879 str. F0557 OX=122726 8 GN=tgt PE=3 SV=1
MEFRNKIGDKMCIEKENKDFKNPIEYKLEKKDGNARAGVIKTPHGEIKTPIFMPVGTQATVKAMTREELEEINSQIILGNTYHLYLRPGDELVNDFGGLHKFMRWDKPILTDSGGFQVFSLGDLRKIKEEGVHFRSHLDGSKHFLSPEKSISIQNNLGSDIMMVLDECPPGLSTREYLIPSIERTTRWAKRCIEANRNKDRQGLFAIVQGGIYEDLRDKSFEELYEYDYGFAGYALGGLAVGEPREDMYRILKYSTPKLPENKPRYLMGVGEPVDMLEAVEHGIDMMDCVQPTRIGRHGTVFTKYGRLVIKNAIYSRDDRPLDEGCDCYACKNYTRAYIRHLFKAGEILGQRLATYHNLHFLLKLMDNAREAIIDGRFKEYKEEVLKNYAMGKESEWIKSKSI

SEQ ID NO: 56948 - protein, 393 aa, Leptotrichia trevisanii
  misc_feature (1)..(393): tr|A0A510KM77|A0A510KM77_9FUSO Queuine tRNA-ribosyltran sferase OS=Leptotrichia trevisanii OX=109328 GN=tgt PE= 3 SV=1
MCIEKENKDFKNPIEYKLEKKDGNARAGVIKTPHGEIKTPVFMPVGTQATVKAMTREELEEINSQIILGNTYHLYLRPGDDLVNDFGGLHKFMRWDKPILTDSGGFQVFSLGDLRKIKEEGVHFRSHIDGSKHFLSPEKSISIQNNLGSDIMMVLDECPPGLSTREYLIPSIERTTRWAKRCIEANRNKDKQGLFAIVQGGIYEDLRDKSFEELYEYDYGFAGYALGGLAVGEPREDMYRILKYSTPKLPENKPRYLMGVGEPADMLEAVEHGIDMMDCVQPTRIGRHGTVFTKYGRLVIKNASYSRDDRPLDEGCDCYACKHYTRAYIRHLFKAGEILGQRLATYHNLHFLLKLMDNAREAIIDGRFKEYKEEVLKNYAMGKESEWIKPKSI

SEQ ID NO: 56949 - protein, 393 aa, Leptotrichia wadei
  misc_feature (1)..(393): tr|A0A510KLM6|A0A510KLM6_9FUSO Queuine tRNA-ribosyltran sferase OS=Leptotrichia wadei OX=157687 GN=tgt PE=3 SV= 1
MSIENKNQDFNNPIKYKLEKSDGNARAGVITTPHGEIKTPVFMPVGTQATVKAMTKEELEEINSQIILGNTYHLYLRPGDELVNDFGGLHGFMRWDRPILTDSGGFQVFSLGDLRKIKEEGVYFRSHLDGSKHFLSPEKSISIQNNLGSDIMMVLDECPPGLSTREYLIPSIERTSRWAKRCIEANRNKDRQGLFAIVQGGIYEDLRDKSLEELYEADYGFAGYALGGLAVGEPREDMYRILKYITPKLPGNKPRYLMGVGEPADMLEAVEHGIDMMDCVQPTRIGRHGTVFTKYGRLVIKNAIYSRDDRPLDEDCDCYACKNYTRAYIRHLFKAGEILGQRLATYHNLHFLLKLMDNAREAIIDGRFKEYKEEVLKNYAMGKESEWIKPKSI

SEQ ID NO: 56950 - protein, 393 aa, Leptotrichia wadei
  misc_feature (1)..(393): tr|A0A510KZW7|A0A510KZW7_9FUSO Queuine tRNA-ribosyltran sferase OS=Leptotrichia wadei OX=157687 GN=tgt PE=3 SV= 1
MSIEKENQDFNNPIKYKLEKSDGNARAGVITTPHGEIKTPVFMPVGTQATVKAMTKEELEEINSQIILGNTYHLYLRPGDELVNDFGGLHGFMRWDRPILTDSGGFQVFSLGDLRKIKEEGVYFCSHLDGSKHFLSPEKSISIQNNLGSDIMMVLDECPPGLSTREYLIPSIERTSRWAKRCIEANRNKDRQGLFAIVQGGIYEDLRDKSLEELYEADYGFAGYALGGLAVGEPREDMYRILKYITPKLPENKPRYLMGVGEPADMLEAVEHGIDMMDCVQPTRIGRHGTVFTKYGRLVIKNAVYSRDDRPLDEDCDCYACRNYTRAYIRHLFKAGEILGQRLATYHNLHFLLKLMDNAREAIIDGRFKEYKEEVLKNYAMGKESDWIKPKSI

SEQ ID NO: 56951 - protein, 448 aa, Leucobacter chromiiresistens
  misc_feature (1)..(448): tr|A0A147EMF0|A0A147EMF0_9MICO Queuine tRNA-ribosyltran sferase OS=Leucobacter chromiiresistens OX=1079994 GN=t gt PE=3 SV=1
MNDPAAPSSPPSPADFGFRVEHRLSSGGSAGSSGDPLGRTGTIRTPHGDIQTPAFIPVGTKATVKSLLPATVRELGGQAVLANAYHLFLQPGSDLVDEAGGLGAFMNWDGPTFTDSGGFQVMSLGVGFKKVISMAESAHSGSEVIAKNKERLAHVDEDGVTFKSFLNGDKHRFTPEVSMRIQHELGADIMFAFDECTTLLNTRAYQEDSVARTERWAVRCLDEHARQTTSRSHRPYQALFGVVQGAQYEDLRRSAAAGLAGLRGAEAADQEFDGFGIGGALEKRDLGTIVGWVSDELPDAKPRHLLGISEPDDLFAAIAAGADTFDCVAPSRQARGGSMYSPTGRINAKAATQRRRFEPLDAECDCFTCENYTAAYLHHLFKAKEMLASTLATIHNERYIVRLVDRIRASIVDGTFAELREEVLGRQYGAEFAREAAERAITPTASRQ

SEQ ID NO: 56952 - protein, 448 aa, Leucobacter chromiiresistens
  misc_feature (1)..(448): tr|A0A1H0ZM06|A0A1H0ZM06_9MICO Queuine tRNA-ribosyltran sferase OS=Leucobacter chromiiresistens OX=1079994 GN=t gt PE=3 SV=1
MNDPAAPSTPPSPADFGFQVEHRLSSGGFTGSNGEPLGRTGTISTPHGDIQTPAFIPVGTKATVKSLLPATVRELGGQAVLANAYHLFLQPGSDLIDEAGGLGAFMNWDGPTFTDSGGFQVMSLGVGFKKVISMAESAHSGSEVIAKTKERLAHVDEDGVTFKSFLNGDKHRFTPEVSMRIQHELGADIVFAFDECTTLLNTREYQEDSVARTERWAVRCLDEHARQTAARTHRPYQALFGVVQGAQYEDLRRSAAAGLAGLRGAEATGQEFDGFGIGGALEKRDLGTIVGWVSDELPDAKPRHLLGISEPDDLFAAIAAGADTFDCVAPSRQARGGSMYSPTGRINAKAATQRRRFEPLDAECDCFTCENYTAAYLHHLFKAKEMLASTLATIHNERYIVRLVDRIRASIVDGTFAELREEVLGRQYGAEFAREAAQSAIAPAGDRS

SEQ ID NO: 56953 - protein, 442 aa, Leucobacter komagatae
  misc_feature (1)..(442): tr|A0A0D0IU84|A0A0D0IU84_9MICO Queuine tRNA-ribosyltran sferase OS=Leucobacter komagatae OX=55969 GN=tgt PE=3 S V=1
MTETQATHGSPSPADFSFDVEHRLETGGARGTDGRMLGRAGTIHTPHGDIQTPAFIPVGTKATVKSILPETVSQFGGQAVLANAYHLFLQPGSDIVDEAGGFGKFMNWHGPTFTDSGGFQVMSLGVGFKKVISMREGAHEQAEVIAKNKERLAHVDEDGVTFKSFINGDKHRFTPEISMQIQHQLGADIIFAFDECTTLLNTRAYQEDSVARTERWAVRCLDEHARQTAERQHRPYQALFGVVQGAQYEDLRRQAAGGLERLRGAEATEQEFDGYGIGGALEKSELGTIVGWVSEELPEHKPRHLLGISEPDDLFAAIAAGADTFDCVAPSRQARGGTMYSSSGRINAKAATQRRRFEPLDPECDCYTCENYTAAYLHHLFKAKEMLGSTLATIHNERFIVRLVERIRESIINDTFAELRDEVLTRQYGAEFARDAAAKVAS

SEQ ID NO: 56954 - protein, 442 aa, Leucobacter komagatae
  misc_feature (1)..(442): tr|A0A542Y2D0|A0A542Y2D0_9MICO Queuine tRNA-ribosyltran sferase OS=Leucobacter komagatae OX=55969 GN=tgt PE=3 S V=1
MTDTPTSPGSPSPADFSFDVEHHLESGGATGSDGRPLGRAGTIHTPHGDIQTPAFIPVGTKATVKAVLPETVTQFGGQAVLANAYHLFLQPGSDIVDEAGGFGKFMNWHGPTFTDSGGFQVMSLGVGFKKVISMSEKSHAEAEVIAKTKERLAHVDEDGVTFKSFINGDKHRFTPEVSMQIQHQLGADIMFAFDELTTLLDSRAYQEDSVERTERWAVRCLDEHARQTAERQHRPYQALFGVVQGAQYEDLRRRAASGLAGLRGATATQQEFDGFGIGGAIEKTELGEIVGWVCDELPENKPRHLLGISEPDDLFFGIAAGADTFDCVAPSRQARGGTMYSSSGRINAKAATQRRRFEALDPECDCYTCENYTAAYLHHLFKAKEMLGSTLATIHNERFIVRLVDQIRQSIIDGTFVEFREEILTKQYGADFARDAAARYAA

SEQ ID NO: 56955 - protein, 441 aa, Leucobacter luti
  misc_feature (1)..(441): tr|A0A4Q7U9P0|A0A4Q7U9P0_9MICO Queuine tRNA-ribosyltran sferase OS=Leucobacter luti OX=340320 GN=tgt PE=3 SV=1
MNERIPLTPPPTPSDFGFTVDDRLAAGGVSGSDGAPLGRAGTIRTPHGEIQTPAFIPVGTKATVKAVLPESVTQLGGQAVLANAYHLFLQPGSDLVDEAGGLGRFMNWDGPTFTDSGGFQVMSLGVGFKKVISMTESAHSDAEVIAKNKERLAHVDEDGVTFKSFINGDRHRFTPEVSMEIQHQLGADIIFAFDECTTLLNTRAYQEDSVARTARWAVRCLDEHARQTSDRTHRPYQALFGVVQGAQYEDLRRSAARGLAEMTGAEAGDQRFDGFGIGGALEKSELGTIVSWVSDELPENKPRHLLGISEPDDLFAAVAAGADTFDCVAPSRQARGGSMYSAGGRINAKSAGQRRRFEAIDAECDCYTCENYTAAYLHHLFKAKEMLGSTLATIHNERFIVRLVERIRASIIDDTFAELRDEVLGRFYSPEFAREAAAKQA

SEQ ID NO: 56956 - protein, 448 aa, Leucobacter luti
  misc_feature (1)..(448): tr|A0A4R6RR39|A0A4R6RR39_9MICO Queuine tRNA-ribosyltran sferase OS=Leucobacter luti OX=340320 GN=tgt PE=3 SV=1
MPQCLDRRVNERIPLTPPPSPTDFGFTVDHQLASGVPGSDGAPLGRAGTIRTPHGEIQTPAFIPVGTKATVKALLPETVGQLGGQAVLANAYHLFLQPGSDLVDEAGGLGRFMNWSGPTFTDSGGFQVMSLGVGFKKVISMTETAHSDAEVIAKNKERLAHVDEEGVTFKSFINGDKHRFTPEVSMEIQHQLGADIIFAFDECTTLLNTRAYQEDSVARTARWAVRCLDEHARQTDDRSHRPYQALFGVVQGAQYEDLRRSAARGLADMTGAQATDQQFDGFGIGGALEKSELGTIVSWVSDELPDSKPRHLLGISEPDDLFAAIAAGADTFDCVAPSRQARGGSMYSATGRINAKAARQRRRFEALDPECDCYTCENYTAAYLHHLFKAKEMLASTLATIHNERYIVRLVERIRASIIDGTFTELREEVLGRFYSPEFARAAAAKHA

SEQ ID NO: 56957 - protein, 436 aa, Leucobacter massiliensis
  misc_feature (1)..(436): tr|A0A2S9QQH0|A0A2S9QQH0_9MICO Queuine tRNA-ribosyltran sferase OS=Leucobacter massiliensis OX=1686285 GN=tgt P E=3 SV=1
MNERPASEQPTPSPADFGFTVEHRLDRGGAEGSDGRPLGRVGTIRTPHGEIQTPAFIPVGTKATVKSLLPAAVRELGGQAVLANAYHLFLQPGSDIVDEAGGLGRFMNWDGPTFTDSGGFQVMSLGVGFKKVISMAENAHRSDEVIAENKERLAHVDEDGVTFKSFLNGDRHRFTPEVSMRIQHQLGADIIFAFDECTTLLNTRSYQEDSVDRTARWAVRCLDEHARQTAERAHRPYQALFGVVQGAQYEDLRRTAARGLAEMSGDAAPEQRFDGFGIGGALEKSELGTIVGWVNDELPENKPRHLLGISEPDDLFVAIAAGADTFDCVAPSRQARGGTLYSSTGRINAKAATQRRRFEAIDPECDCYTCENTTAAYLHHLFKAKEMLASTLATIHNERFIVRLVDRIRQSIIDGTFAELREETLGRLGRARSSRG

SEQ ID NO: 56958 - protein, 441 aa, Leucobacter sp.
  misc_feature (1)..(441): tr|A0A0M2M0R5|A0A0M2M0R5_9MICO Queuine tRNA-ribosyltran sferase OS=Leucobacter sp. Ag1 OX=1642040 GN=tgt PE=3 S V=1
MNERPAQTPPPSPADFGFTVDHRLETGGASGSDGRPLGRAGTISTPHGEIQTPAFIPVGTKATVKALLPATVSELGGQAVLANAYHLFLQPGSDLVDEAGGLGRFMNWDGPTFTDSGGFQVMSLGVGFRKVISMAEADHASAEVIAETKDRLAHVDEDGVTFKSFINGDTHRFTPEVSMRIQHQLGADIIFAFDECTTLLNTRPYQEDSVARTERWAVRCLDEHARQTADRTHRPYQALFGVVQGAQYEDLRRQAAGGLARLTGAEATGQRFDGYGIGGALEKSQLGTIVSWVSDELPEDKPRHLLGISEPDDLFAGVAAGADTFDCVAPSRQARGGTMYSSSGRINAKAAAQRRRFEPLDPECDCYTCENYTAAYLHHLFKAKEMLASTLATIHNERYIVRMVERIRQSIIDGDFAELRDETLGRLYGPEFARTAAAAWN

SEQ ID NO: 56959 - protein, 431 aa, Leucobacter sp.
  misc_feature (1)..(431): tr|A0A373DIK7|A0A373DIK7_9MICO Queuine tRNA-ribosyltran sferase OS=Leucobacter sp. wl10 OX=2304677 GN=tgt PE=3 SV=1
MNESPAPAQHLPSPADFGFEIVGRLERGGARGTGDKPLGRAGTIRTPHGDIQTPAFIPVGTKATVKALLPATVHELGGQAVLANAYHLFLQPGSDLVDEAGGLGAFMNWDGPTFTDSGGFQVMSLGVGFKKVISMDENAHQSDEVIAENKERLAHVDEDGVTFKSFLNGDRHRFTPEVSMRIQHQLGADIIFAFDECTTLMNTRRYQEDSVDRTARWAVRCLDEHARQTTARGHRPYQALFGIVQGAQYEDLRRRAARGIAEMTGAEAEDLRFDGFGIGGALEKRELGTIVGWVGDELPEDKPRHLLGISEPDDLFAAIAAGADTFDCVAPSRQARGGTLYSSTGRINAKAAAQRRRFEPLDPECDCYTCENYTAAYLHHLFKAKEMLASTLATIHNERFIVRLVDRIRQSIIDDAFAEFREETLGRLSGR

SEQ ID NO: 56960 - protein, 443 aa, Leucobacter triazinivorans
  misc_feature (1)..(443): tr|A0A4P6KHW0|A0A4P6KHW0_9MICO Queuine tRNA-ribosyltran sferase OS=Leucobacter triazinivorans OX=1784719 GN=tgt PE=3 SV=1
MNESPAPTRPLPSPADFGFDIAHRLERGGVRGTGDQPLGRAGTIRTPHGDIQTPAFVPVGTKATVKALLPATVRELGGQAVLANAYHLFLQPGSDLVDEAGGLGRFMNWDGPTFTDSGGFQVMSLGVGFKKVISMDENLHQSDEVIAENKERLAHVDEDGVTFKSFLNGDRHRFTPEVSMRIQHQLGADIIFAFDECTTLFNTRRYQEDSVDRTARWAVRCLDEHARQTAERAHRPYQALFGVVQGAQYEDLRRAAARGLAEMTGAEADGQRFDGFGIGGALDKSELGTIVGWVNDELPENKPRHLLGISEPDDLFVAIAAGADTFDCVAPSRQARGGTMYSSTGRINAKSAAQRRRFEPLDPECDCYTCENYTAAYLHHLFKAKEMLASTLATIHNERFIVRLVDRIRQSIIDDSFAELRDEVLGRQYGPDFARKTAAQSPR

SEQ ID NO: 56961 - protein, 405 aa, Leuconostoc carnosum
  misc_feature (1)..(405): tr|K0DEQ0|K0DEQ0_LEUCJ Queuine tRNA-ribosyltransferase OS=Leuconostoc carnosum (strain JB16) OX=1229758 GN=tgt PE=3 SV=1
MTDKKPAVWYEHLHTEKYTGARRGRIHTPHGTFETPMFMPVGTQGAVKGVGTRELKDIGSQFILSNTYHLWVRPGDELIAEAGGLHKYMGWDQAILTDSGGFQVFSLSDARKLKEEGVTFQNHVNGDKMFLSPEVAMRIQNNLGSDVMMQLDEAIPYFESYDYIKESMQRSLRWADRAQIAHKKADSQALFGIVQGAGFKALRSESANGLVGMDLPGYAIGGLSVGESKKEMNRVLDFTMPLLPEDKPRYLMGVAAPDSLIDSVIRGIDMFDSVLPTRIARKGTLMTRFGRVVIKNSKYKNDFTPLDPDLSYYSSNPIRTEQFGNQAQFDNPDYNPFQNLTRSYLHHLFNANEILGAQLASQHNLRYLLQFMEDMRTAIENDELLQFRETVMEEYGYNKPNARLF

SEQ ID NO: 56962 - protein, 405 aa, Leuconostoc carnosum
  misc_feature (1)..(405): tr|A0A2U3MQS5|A0A2U3MQS5_LEUCA Queuine tRNA-ribosyltran sferase OS=Leuconostoc carnosum OX=1252 GN=tgt PE=3 SV= 1
MTDKKPAVWYEHLHTEKYTGARRGRIHTPHGTFETPMFMPVGTQGAVKGVGTRELKDIGSQFILSNTYHLWVRPGDELIAEAGGLHKYMGWDQAILTDSGGFQVFSLSDARKLKEEGVTFQNHVNGDKMFLSPEVAMRIQNNLGSDVMMQLDEAIPYFESYDYIKESMQRSLRWADRAQIAHKKADSQALFGIVQGAGFKALRSESANGLVGMDLPGYAIGGLSVGESKKEMNRVLDFTMPLLPEDKPRYLMGVAAPDSLIDSVIRGIDMFDSVLPTRIARKGTLMTRFGRVVIKNSKYKNDFTPLDPDLSYYSSNPIRTEQFGNQAQFDNLDYNPFQNLTRSYLHHLFNANEILGAQLASQHNLRYLLQFMEDMRTAIENDELLQFRETVMEEYGYNKPNARLF

SEQ ID NO: 56963 - protein, 405 aa, Leuconostoc citreum
  misc_feature (1)..(405): tr|B1MXF1|B1MXF1_LEUCK Queuine tRNA-ribosyltransferase OS=Leuconostoc citreum (strain KM20) OX=349519 GN=tgt P E=3 SV=1
MGQEHPAVWYEHLHTEKHTGARRGRIHTPHGTFETPMFMPVGTQGAVKGVGTRALKEIGSQFILSNTYHLWVRPGDELIAEAGGLHKYMGWDQAILTDSGGFQVFSLSDARKLKEEGVTFQNHVNGDKMFLSPEVAMRIQNNLGSDVMMQLDEAIPYFESFDYIKESMQRSLRWADRAQVAHRNPEKQALFGIVQGAGFKALRTESANGLVGMDLPGYAVGGLSVGESKLEMNRVLDFTMPLLPENKPRYLMGVAAPDSLIDGVIRGVDMFDSVLPTRIARKGTLMTRYGRVVIKNSKYKNDFSPLDPDLSYYSPNHIRQAQFGNQAQFDNPDYNPFQNLTRSYLHHLFNANEILGAQLASQHNLRFLLQFMEDMRTAIENDELLEFRARVMEEYGYNKPNARLF

SEQ ID NO: 56964 - protein, 405 aa, Leuconostoc fallax
  misc_feature (1)..(405): tr|A0A4V3A2P0|A0A4V3A2P0_9LACT Queuine tRNA-ribosyltran sferase OS=Leuconostoc fallax OX=1251 GN=tgt PE=3 SV=1
MTNQKSAVWYEHLHTEKHTGARRGRIHTPHGTFETPMFMPVGTQGAVKGVSARELKEIGAQFILSNTYHLWVRPGDELIAQAGGLHKYMGWDQAILTDSGGFQVFSLSDARKLKEEGVTFQNHVNGDKMFLSPEVAMRIQNNLGSDIMMQLDEAIPYFETYDYIKESMQRSVRWAERAQKAHKNPDSQALFGIVQGAGFKALRTESANDLVSMDLPGYAVGGLSVGESKKEMNRVLDFTMPLLPEEKPRYLMGVAAPDSLIDSVMRGVDMFDCVLPTRIARKGTLMTRFGRVVIKNAKYKNDFTPLDPDLSYYSPNPIRQEQFGNMAQFDVPGYNPFKTLTRSYLHHLFNANEMLGAQLASQHNLRFLLQFMEDMRTAIERDELLEFRETVMEEYGYNKPNARLF

SEQ ID NO: 56965 - protein, 405 aa, Leuconostoc gelidum
  misc_feature (1)..(405): tr|J9YKX9|J9YKX9_LEUGJ Queuine tRNA-ribosyltransferase OS=Leuconostoc gelidum (strain JB7) OX=1229756 GN=tgt P E=3 SV=1
MTNKKPAVWYEHLHTEKHTGARRGRIHTPHGTFETPMFMPVGTQGAVKGVGTRELKDIGSQFILSNTYHLWVRPGDELIAQAGGLHQYMGWDQAILTDSGGFQVFSLSDARKLQEEGVTFQNHVNGDKMFLSPEVAMRIQNNLGSDVMMQLDEAIPYFESYDYIKESMQRSLRWAERAQVAHKKTDSQGLFGIVQGAGFKALRTESANGLVGMDLPGYAVGGLSVGESKLEMNRVLDFTMPLLPEDKPRYLMGVAAPDSLIDGVIRGVDMFDSVLPTRIARKGTLMTRRGRVVIKNSKYKNDFTPLDPDLSYYSANPIRTNQFGNQRQFDNPNYNPFQNLTRSYLHHLFNANELLGAQLASQHNLRYLLQFMEDMRTAIENDELLAFRATVMEEYGYNKPNARLF

SEQ ID NO: 56966 - protein, 405 aa, Leuconostoc gelidum
  misc_feature (1)..(405): tr|A0A175CHH4|A0A175CHH4_LEUGE Queuine tRNA-ribosyltran sferase OS=Leuconostoc gelidum subsp. gasicomitatum OX= 115778 GN=tgt PE=3 SV=1
MTNKKPAVWYEHLHTEKHTGARRGRIHTPHGTFETPMFMPVGTQGAVKGVGTRELKDMGSQFILSNTYHLWVRPGDELIAQAGGLHQYMGWDQAILTDSGGFQVFSLSDARKLQEEGVTFQNHVNGDKMFLSPEVAMRIQNNLGSDVMMQLDEAIPYFESYDYIKESMQRSLRWAERAQVAHKKTDSQGLFGIVQGAGFKALRTESANGLVGMDLPGYAVGGLSVGESKLEMNRVLDFTMPLLPEDKPRYLMGVAAPDSLIDGVIRGVDMFDSVLPTRIARKGTLMTRRGRVVIKNSKYKNDFTPLDPDLSYYSANPIRTNQFGNQRQFDNPNYNPFQNLTRSYLHHLFNANEILGAQLASQHNLRYLLQFMEDMRTAIEHDELLAFRATVMEEYGYNKPNARLF

SEQ ID NO: 56967 - protein, 405 aa, Leuconostoc kimchii
  misc_feature (1)..(405): tr|D5T304|D5T304_LEUKI Queuine tRNA-ribosyltransferase OS=Leuconostoc kimchii (strain IMSNU 11154 / KCTC 2386 / IH25) OX=762051 GN=tgt PE=3 SV=1
MTDKKPAVWYEHLHTEKHTGARRGRIHTPHGTFETPMFMPVGTQGAVKGVGTRELKEIGSQFILSNTYHLWVRPGDELIAQAGGLHKYMGWDQAILTDSGGFQVFSLSDARKLQEEGVTFQNHVNGDKMFLSPEVAMRIQNNLGSDVMMQLDEAIPYFETYDYIKNSMQRSLRWAERAQVAHKNPDSQGLFGIVQGAGFKALRTESANGLVGMDLPGYAVGGLSVGESKLEMNRVLDFTMPLLPEDKPRYLMGVAAPDSLIDGVIRGVDMFDSVLPTRIARKGTLMTRRGRVVIKNSKYKNDFTPLDPDLSYYSPNQIRTTQFGNQAQFDNPSYNPFGNLTRSYLHHLFNANEILGAQLASQHNLRFLLQFMEDMRTAIENDELLEFRETVMEEYGYNKPNARLF

SEQ ID NO: 56968 - protein, 93 aa, Leuconostoc kimchii
  misc_feature (1)..(93): tr|D5T302|D5T302_LEUKI Queuine tRNA-ribosyltransferase OS=Leuconostoc kimchii (strain IMSNU 11154 / KCTC 2386 / IH25) OX=762051 GN=LKI_05550 PE=4 SV=1
MTISILIFLYATLTSLALFSARKQLPAWLTFLNILAITMLYLSLVYPLWLAISLILAILTAINNGLILNGKVSTYHLIIRIVFSLLIFFLAMA

SEQ ID NO: 56969 - protein, 405 aa, Leuconostoc lactis
  misc_feature (1)..(405): tr|A0A0Q0TQJ4|A0A0Q0TQJ4_LEULA Queuine tRNA-ribosyltran sferase OS=Leuconostoc lactis OX=1246 GN=tgt PE=3 SV=1
MTTEKPAVWYEHLHTEKYTGARRGRIHTPHGTFETPMFMPVGTQGAVKGVGTRELKDIGAQFILSNTYHLWVRPGDELIAEAGGLHKYMGWDQAILTDSGGFQVFSLSDARKLQEEGVTFQNHVNGDKMFLSPEVAMRIQNNLGSDVMMQLDEAIPYFESYDYIKESMQRSLRWAERAQIAHKNPDTQALFGIVQGAGFKALRTESANGLVSLDLPGYAVGGLSVGESKAEMNRVLDFTMPLLPEDKPRYLMGVAAPDSLIDGVIRGIDMFDSVLPTRIARKGTLMTRYGRVVIKNSKYKHDFTPLDPDLSYYSPNPIRREQFGNKAQFDDPTYNPFQNLTRSYLHHLFNANEILGAQLASQHNLRFLLQFMEDMRTAIENDELLAFRETVMEEYGYNKPNARLF

SEQ ID NO: 56970 - protein, 406 aa, Leuconostoc mesenteroides
  misc_feature (1)..(406): tr|C2KLQ1|C2KLQ1_LEUMC Queuine tRNA-ribosyltransferase OS=Leuconostoc mesenteroides subsp. cremoris ATCC 19254 OX=586220 GN=tgt PE=3 SV=1
MANEKHPAVWYEHLHTEKYTGARRGRIHTPHGTFETPMFMPVGTQGAVKGVGTRELKDIGSQFILSNTYHLWVRPGDELIAEAGGLHKYMGWDQAILTDSGGFQVFSLSDARKLKEEGVTFQNHVNGDRMFLSPEVAMRIQNNLGSDVMMQLDEAIPYFETYDYIKNSMQRSLRWAERAKVAHKKTDTQALFGIVQGAGFKALRTESANNLVDMDLPGYAVGGLSVGESKAEMNRVLGFTMPLLPEDKPRYLMGVAAPDSLIDGVMRGVDMFDCVLPTRIGRKGTLMTRYGRVVIRNSKYKNDFTPLDPDLSYYSPNPIRKEQFGNLAQYDIPGYNPFKTLTRSYLHHLFNANELLGAQLASEHNLRFLLQFMEDMRTAIENDELLAFRETVMEEYGYNKPNARLF

SEQ ID NO: 56971 - protein, 406 aa, Leuconostoc mesenteroides
  misc_feature (1)..(406): tr|Q03Z74|Q03Z74_LEUMM Queuine tRNA-ribosyltransferase OS=Leuconostoc mesenteroides subsp. mesenteroides (stra in ATCC 8293 / NCDO 523) OX=203120 GN=tgt PE=3 SV=1
MANEKHPAVWYEHLHTEKYTGARRGRIHTPHGTFETPMFMPVGTQGAVKGVGTRELKDIGSQFILSNTYHLWVRPGDELIAEAGGLHKYMGWDQAILTDSGGFQVFSLSDARKLKEEGVTFQNHVNGDRMFLSPEVAMRIQNNLGSDVMMQLDEAIPYFETYDYIKNSMQRSLRWAERAKVAHKKTDTQALFGIVQGAGFKALRTESANNLVDMDLPGYAVGGLSVGESKAEMNRVLDFTMPLLPEDKPRYLMGVAAPDSLIDGVMRGVDMFDCVLPTRIGRKGTLMTRYGRVVIRNSKYKNDFTPLDPDLSYYSPNPIRKEQFGNLAQYDIPGYNPFKTLTRSYLHHLFNANELLGAQLASEHNLRFLLQFMEDMRTAIENDELLAFRETVMEEYGYNKPNARLF

SEQ ID NO: 56972 - protein, 406 aa, Leuconostoc pseudomesenteroides
  misc_feature (1)..(406): tr|A0A062XNA3|A0A062XNA3_LEUPS Queuine tRNA-ribosyltran sferase OS=Leuconostoc pseudomesenteroides PS12 OX=1339 247 GN=tgt PE=3 SV=1
MAKSEHPAVWYEHLHTEKYTGARRGRIHTPHGTFETPMFMPVGTQGAVKGVGTRELKDIGAQFILSNTYHLWVRPGDELIAQAGGLHKYMGWDQAILTDSGGFQVFSLADARKLKEEGVTFQNHVNGDKMFLSPEVAMRIQNNLGSDVMMQLDEAIPYFETYEYIKESMQRSLRWAERAQVAHKNPDTQALFGIVQGAGFKALRTESANGLVGMDLPGYAVGGLSVGESKKEMNRVLDFTMPLLPEDKPRYLMGVAAPDSLIDGVIRGVDMFDSVLPTRIGRKGTLMTRFGRVVIKNSKYKNDFTPLDPDLSYYSPNPIRREQFGNLAQYDLPDYNPFQNLTRSYLHHLFNANELLGAQLASEHNLRFLLQFMEDMRTAIENDELLAFRETVMEEYGYNKPNARLF

SEQ ID NO: 56973 - protein, 406 aa, Leuconostoc pseudomesenteroides; identical to SEQ ID NO: 56972
  misc_feature (1)..(406): tr|A0A1X0VDS1|A0A1X0VDS1_LEUPS Queuine tRNA-ribosyltran sferase OS=Leuconostoc pseudomesenteroides OX=33968 GN= tgt PE=3 SV=1

SEQ ID NO: 56974 - protein, 406 aa, Leuconostoc suionicum; identical to SEQ ID NO: 56971
  misc_feature (1)..(406): tr|A0A2N9KAS7|A0A2N9KAS7_9LACT Queuine tRNA-ribosyltran sferase OS=Leuconostoc suionicum OX=1511761 GN=tgt PE=3 SV=1

SEQ ID NO: 56975 - protein, 405 aa, Leuconostocaceae bacterium; identical to SEQ ID NO: 54145
  misc_feature (1)..(405): tr|A0A1G6HW25|A0A1G6HW25_9LACT Queuine tRNA-ribosyltran sferase OS=Leuconostocaceae bacterium R-53105 OX=185537 0 GN=tgt PE=3 SV=1

SEQ ID NO: 56976 - protein, 372 aa, Leucothrix pacifica
  misc_feature (1)..(372): tr|A0A317CLA4|A0A317CLA4_9GAMM Queuine tRNA-ribosyltran sferase OS=Leucothrix pacifica OX=1247513 GN=tgt PE=3 S V=1
MSHLQFDLLKSKDQSRRGRLTFPRGTIETPAFMPVGTYGTVKAMTPEQLEGIGAEIILGNTFHLMLRPGTEVIKTHGDLHDFMNWQKPILTDSGGFQVFSLAQMRKITEEGAHFQSPVNGDKVLLTPEYSMQIQRDLGSDIVMIFDECTPYPATIDQARDSMSLSLRWAKRSKKAHEENPSALFGIVQGGMYGDLRKTSAEGLKEIGFDGYAIGGLSVGEPMDERNEVLEATTPHLPTDKPRYLMGVGKPEDIVESVKRGVDMFDCVIPTRNARNGFLFTRYGTLKIRNQKHQFDTSPIDDKCGCYTCQNYSRSYLRHLDKCKEILGAHLNTIHNLYYYQELMRGIREALDDDRFDEFYTEFYALREQGDNL

SEQ ID NO: 56977 - protein, 371 aa, Leucothrix sp.
  misc_feature (1)..(371): tr|A0A317C9E9|A0A317C9E9_9GAMM Queuine tRNA-ribosyltran sferase OS=Leucothrix sp. IMCC9719 OX=1481894 GN=tgt PE =3 SV=1
MQFDLLKTSHDSRRGRLTFPRGTIETPAFMPVGTYGTVKAMTPEQLAGIGAEIILGNTFHLMLRPGTEVIKAHGDLHDFMHWQKPILTDSGGFQVFSLAQMRKITEEGAHFQSPINGDKVLLTPEYSMQIQKDLGSDIVMIFDECTPYPATYEQADESMSLSLRWAKRSKAAHEGNNAALFGIVQGGMYDELRKVSANGLQEIGFDGYAIGGLSVGEPMDERNQVLEATTPNLPTDKPRYLMGVGKPEDIIESVKRGVDMFDCVIPTRNARNGFLFTRYGTLKIRNQKHQFDTGPIDERCGCYTCQNYSRSYLRHLDKCKEILGAHLNTIHNLYYYQELMQGIRKALDEDRFDTFCDEFYALRENLEPEKL

SEQ ID NO: 56978 - protein, 378 aa, Levilinea saccharolytica
  misc_feature (1)..(378): tr|A0A0N8GS22|A0A0N8GS22_9CHLR Queuine tRNA-ribosyltran sferase OS=Levilinea saccharolytica OX=229921 GN=tgt PE =3 SV=1
MDSNPFTFECHATDGQARAGVFHTPHGPIPTPIFAPVGTQATVKAVTPAQLEELGAHLVLSNTYHLFLRPGPDIVAEMGGLHRFMNWPHPILTDSGGFQVFSLTSMRKLDEDGVTFKSHIDGSMQRLTPEISVDVQQKLGADIIMCFDECASPYDRDYVERAMHRTHRWAERCQQAKTRPDQALFGIVQGGVFPDLRQQSAEWIAAQGFPGHAIGGLSVGETKAEMNHMIEVVNAVLPPEKPRYLMGVGSPEDLIHGIWRGVDIFDCVLPTRLARHHAAMTFSGRLNLMNAVNARDPRPIDENCGCYACRHYTRAYLRHLITAKEILAATLISIHNLYTLEELVRQARQAILEGRYQAFAENFLANYRPQPENKSRPA

SEQ ID NO: 56979 - protein, 377 aa, Lewinella agarilytica
  misc_feature (1)..(377): tr|A0A1H9F4L7|A0A1H9F4L7_9BACT Queuine tRNA-ribosyltran sferase OS=Lewinella agarilytica OX=478744 GN=tgt PE=3 SV=1
MKFTLHQTDTSTAARAGTLTTDHGEIPTPIFMPVGTIGTVKGVHQSELKEQVKAKIILGNTYHLYLRPGMETMEAAGGLHQFMNWSGPILTDSGGYQVFSLAHRRKIKEEGVTFASHIDGSKHLFSPESSLGIQRSIGADIVMAFDECPPYPSERKYAENSMHLTHRWLERCVAFMKESQPKYGHSQALFPIVQGSSYDDLRRQSCEFIASQDQPGNAIGGLSVGEPIEDMYRIAALCCEVLPKDKPRYLMGVGTPANILECISRGVDMFDCVLPSRNARHGVIYTRQGIINIKNARWRNDFSAIDDSATAAPTSQAHTKAYLHHLFRVNELLGPQIATLHNLAFYLALVTEARERILDGSFSSWKEGAMAGLERKL

SEQ ID NO: 56980 - protein, 377 aa, Lewinella marina
  misc_feature (1)..(377): tr|A0A2G0CDV4|A0A2G0CDV4_9BACT Queuine tRNA-ribosyltran sferase OS=Lewinella marina OX=438751 GN=tgt PE=3 SV=1
MQFDLQHTDPATDARAGQISTDHGTIQTPIFMPVGTLGTVKGVHQRELKEQVRAQIILGNTYHLYLRPGTEVLEAAGGLHRFMQWDGPILTDSGGYQVFSLAHRRKITEEGATFASHIDGSKHLFSPESSLAIQRSIGADIVMAFDECPPYPSTRKYAENSMHLTHRWLERCVAYMRDSEPRYGHSQALFPIVQGGSYDDLRRQSCEFIASQNQPGNAIGGLSVGEPIPDMYRITQLCCDILPKDKPRYLMGVGTPANILECISRGVDMFDCVLPSRNARHGMLYTRQGIINIRNARWKNDHSPIDDHPEAAPTSQLHSKAYLCHLIRCNELLAGQLATLHNLAFYLSLVREARQRILDGSFREWKEELVPQLERKL

SEQ ID NO: 56981 - protein, 377 aa, Lewinella nigricans
  misc_feature (1)..(377): tr|A0A2D0NB81|A0A2D0NB81_9BACT Queuine tRNA-ribosyltran sferase OS=Lewinella nigricans DSM 23189 = NBRC 102662 OX=1122177 GN=tgt PE=3 SV=1
MFTFDLQHTDPASSARAGLIQTDHGPIETPIFMPVGTAGTVKGVHQYELKNDIGAQIILGNTYHLYLRPGMEVMAKAGGLHGFNGWQGPILTDSGGYQVYSLSDRRKITEEGVTFRSHIDGSKHTFSPERSMEIQRVIGADIIMAFDECPPFPCDYKYAKDSMDLTHRWLARCCEYVDNTEGHYGHGQTLFPIVQGSTYDDLRRASAEAIASFDRAGNAIGGLSVGEPAEEMYRVTDMVCAILPKDKPRYLMGVGTPVNLLECIALGIDMFDCVLPTRNARHGMLYTAEGIINIKNAKWKDDFSPVDPDSSCPSSRFYTRGYLRHLIHSGELLGAQIASLHNLAFFLWLVGEARKHIIAGDFASWKNDMVPRLERRL

SEQ ID NO: 56982 - protein, 377 aa, Lewinella sp.
  misc_feature (1)..(377): tr|A0A4S4NE55|A0A4S4NE55_9BACT Queuine tRNA-ribosyltran sferase OS=Lewinella sp. HSMS-39 OX=2562452 GN=tgt PE=3 SV=1
MQFTLEHTDPTTSARAGQVTTDHGTIQTPIFMPVGTLGTVKGVHQRELREDVRAQIILGNTYHLYLRPGTEVLEAAGGLHRFMQWDGPILTDSGGYQVFSLAHRRKITEEGATFASHIDGSKHLFSPESSLAIQRSIGADIVMAFDECPPYPSTRQYAENSMHLTHRWLERCVAYMRDSEPRYGHSQALFPIVQGGSYDDLRRQSCEFIAGQDQPGNAIGGLSVGEPIPDMYRITQLCCDILPEDKPRYLMGVGTPANILECISRGVDMFDCVLPSRNARHGMLYTRHGIINIRNARWKNDHSPIDDHPEAAPTSQVHSKAYLCHLLRCGELLAGQLATLHNLAFYLSLVREARQRILDGSFREWKDALVPQLERKL

SEQ ID NO: 56983 - protein, 377 aa, Lewinella sp.
  misc_feature (1)..(377): tr|A0A180ERT8|A0A180ERT8_9BACT Queuine tRNA-ribosyltran sferase OS=Lewinella sp. 4G2 OX=1803372 GN=tgt PE=3 SV= 1
MTFKLQHTDTATDARAGELTTDHGTIQTPIFMPVGTIGTVKGVHQRELREQVQAQIILGNTYHLFLRPGMETMSAAGGLHRFMNWDGPILTDSGGYQVFSLAHRRKITEEGATFANHIDGSKHLFSPESSLGIQRDIGADIVMAFDECPPYPSEKVYAEKSMHLTHRWLERCVQFMRDSAPKYGHDQALFPIVQGSSYDDLRRKSCEFIAAQDQPGNAIGGLSVGEPIADMYRIAKLCCDILPKAKPRYLMGVGTPANLLECISRGVDMFDCVLPSRNARHGMLYTRRGIINIKNARWRNDFSVVDDHPAGAPTSRAHTKAYVHHLFRVNELLGPQLATLHNLRFYLALVEEARERILDGSFAAWKAELVPLLETKL

SEQ ID NO: 56984 - protein, 377 aa, Lewinella xylanilytica
  misc_feature (1)..(377): tr|A0A2S6I1F8|A0A2S6I1F8_9BACT Queuine tRNA-ribosyltran sferase OS=Lewinella xylanilytica OX=1514080 GN=tgt PE= 3 SV=1
MQFSLLHTDQETGARAGVVTTDHGTLQTPIFMPVGTLGTVKGVHQRELKEQVKAQIILGNTYHLYLRPGTEVLEAAGGLHRFMQWDGPILTDSGGYQVFSLAHRRKITEEGATFASHIDGSRHLFSPESSLGIQRSIGADIVMAFDECPPYPSTRQYTEDSMHLTHRWLERCVRFMQDSQPKYGHSQALFPIVQGGSFDDLRKQSCEFIASQDQPGNAIGGLSVGEPIPDMYRITQLCCDILPKQKPRYLMGVGTPANILECIARGVDMFDCVLPSRNARHGMLYTRDGIINIKNAKWKNDHSAIDARPDAAPTSQVHSKAYLCHLIRCGELLAGQLATLHNLAFYLSLVREARTRILDGSFLSWKNELVPQLERRL

SEQ ID NO: 56985 - protein, 377 aa, Lewinellaceae bacterium
  misc_feature (1)..(377): tr|A0A2C6C439|A0A2C6C439_9BACT Queuine tRNA-ribosyltran sferase OS=Lewinellaceae bacterium SD302 OX=2014804 GN= tgt PE=3 SV=1
MHFELEHTDPKSSARAGTVTTDHGEIKTPIFMPVGTAGTVKGVHQAELKNEVKAQIILGNTYHLYLRPGTEVLEGAGGLHKFNKWDGPILTDSGGYQVYSLSHRRKIKEEGVTFQSHIDGSKHLFSPETSLEIQRSIGGDIIMAFDECPPYPSTRKYAEDSMHLTHRWLDRCVEYLKEKEGKYGYSQAMFPIVQGSSYDDLRRKSCEYIAAADQPGNAIGGLSVGEPIEDMYRITALCCEILPKDKPRYLMGVGTPANLLECIERGVDMFDCVLPSRNARHGMIYTAEGIINIKNAKWKNDFSPIEDRPGTASTSLTHSKAYLHHLVRCDEMLGRQIASIHNLSFYLWLVGQARERILDGSFSDWKKVMVDKVSRRI

SEQ ID NO: 56986 - protein, 378 aa, Liberibacter asiaticus
  misc_feature (1)..(378): tr|C6XHA8|C6XHA8_LIBAP Queuine tRNA-ribosyltransferase OS=Liberibacter asiaticus (strain psy62) OX=537021 GN=t gt PE=3 SV=1
MDKNFHFNLKAVSGSARLGEIITPRGVIKTPAFMPVGTAGTVKAMYFDQVRDLGADVILGNAYHLMLRPGAERIARLGGLHKFIRWFKPILTDSGGFQVMSLSKLCSIDEQGVRFRSHIDGSLYRVSPEESVHIQNLLGSDIQMQLDECLALPAEDKELKRAMELSLRWAERSLVAFGNQPGKALFGIVQGGDNINLRSFSAERLKELDLKGYAIGGLAVGEPQEVMLHILSNVLPILPVERPHYLMGVGTPDDILKSVSYGVDMFDCVMPTRAGRHGLAFTRFGKINLRNARHIDDMRPLDAESHCSALRDYSRAYLHHLLRVNESLAGMILSWANLAYYQDLMKEIRSAIAEDCFVDFAMQTQENWKKGDIPPIFT

SEQ ID NO: 56987 - protein, 373 aa, Liberibacter crescens
  misc_feature (1)..(373): tr|L0ETP7|L0ETP7_LIBCB Queuine tRNA-ribosyltransferase OS=Liberibacter crescens (strain BT-1) OX=1215343 GN=tg t PE=3 SV=1
MFYFEIKATSGHARLGEISMPRGIIKTPAFMPVGTAGTVKAMYLDQVRFTGADVILANTYHLMLQPGAERIARLGGLHEFIRWPHPILTDSGGFQVMSLSKLCSVDEHGVTFRSHIDGSLHHMSPERAIELQKLLGSDIQMQLDECISLPAEDKEIKRAMELSLRWAERCSLAFGHQPGKAMFGIVQGGNKINLRLISAEALKKLDLKGYAIGGLAVGEPQEVMLEMLMNTLPVLPVEKPRYLMGVGTPEDILKSVACGVDMFDCVMPTRAGRHGLAFTRNGRINLRNAKHAYDIRPLDEESSCPALRDYSRAYLHHLIRMKEPLGGMLLSWANLSYYQDLMKGIRKAIADDSFPDFMMETQEHWLKNKLSFV

SEQ ID NO: 56988 - protein, 377 aa, Liberibacter solanacearum
  misc_feature (1)..(377): tr|E4UDV0|E4UDV0_LIBSC Queuine tRNA-ribosyltransferase OS=Liberibacter solanacearum (strain CLso-ZC1) OX=65817 2 GN=tgt PE=3 SV=1
MDKNFCFNIKAKSGNARLGEIITPRGIIKTPAFMPVGTSGAVKAMYFDQVRDLGADVILGNAYHLMLQPGADRIARLGGLHQFIRWFKPILTDSGGFQVMSLSKLCSIDEQGVSFRSHIDGSLHRVSPEDSIEIQNLLGSDIQMQLDECLALPADEKELKRAMELSLRWAERSLVAFGNQPGKALFGIVQGGDNISLRSFSAARLKELDLKGYAIGGLAVGEPQEVMLHILSNILPILPVEKPHYLMGVGTPDDILKSVSCGVDMFDCVMPTRAGRHGLSFTRFGKINLRNARHTDDMRPLDAESNCPALRDYSRAYLHHLLHVNESLAGMILSWANLFYYQDLMREIRNAIAQDCFADFMMQTQENWRKGDIPPLV

SEQ ID NO: 56989 - protein, 378 aa, Lihuaxuella thermophila
  misc_feature (1)..(378): tr|A0A1H8FVN2|A0A1H8FVN2_9BACL Queuine tRNA-ribosyltran sferase OS=Lihuaxuella thermophila OX=1173111 GN=tgt PE =3 SV=1
MPVRYELIKECKQSGARLGRLHTPHGTIDTPIFMPVGTQATVKAMSPEELKEMGSQIILSNTYHLFLRPGHEIVKEAGGLHTFMNWDRAILTDSGGFQVFSLSQLRNITEEGVSFRSHLSGEKLFISPEKAMEIQNALGADIIMAFDECPPYPAERDYVKASAERTYRWLKRCISAHQRPGDQALFGIVQGGMYRDLREESARQLVDLDLPGYAVGGLSVGEPKEIMYEVLSYTTPLLPKDKPRYLMGVGSPDALIQGAILGIDMFDCVLPTRIARNGTTMTSQGRVVVRNAKYARDFSPLDPNCDCYTCRNYSRAYLRHLIKADEIFGLRLTSYHNLYFLLRLMEKVRQAIMEDRLLTFRDEFMSQYYGSTHPQTAF

SEQ ID NO: 56990 - protein, 458 aa, Limimaricola cinnabarinus
  misc_feature (1)..(458): tr|U2YIB3|U2YIB3_9RHOB Queuine tRNA-ribosyltransferase OS=Limimaricola cinnabarinus LL-001 OX=1337093 GN=tgt P E=3 SV=1
MQHRQVRRHGVLPRTERRGDLTRGHAIGAGLDQKAEGVEPRRLGEGGEGRDGAGLFHESRNIDEMAARQACRLRGGAARAIAQSMNFSFALNATDGAARTGVISTPRGEIRTPAFMPVGTAATVKAMRPESVRATGADILLGNTYHLMLRPSAERIDRLGGLHKFMNWDRPILTDSGGFQVMSLASLRKLTEKGVTFKSHIDGSKHEITPERSMEIQKLLGSDIVMTFDECPALPADRTRIAESMRLSMRWAQRSRDAFGDRPGHALFGIQQGGLERDLREESAEALRVVGFDGYAVGGLAVGEGQEAMFGCLDYAPAQLPEDKPRYLMGVGKPDDIVGAVKRGIDMMDCVLPSRSGRTGQAWTRRGQVNLRNARHADDPRPLDETCTCPACANYSRAYLHHVVRSQEMIAGMLLTWHNLHYYQELMGGMRDAIAAQDFADFETRFHAMRAEGDIDRL

SEQ ID NO: 56991 - protein, 374 aa, Limimaricola cinnabarinus
  misc_feature (1)..(374): tr|A0A2G1MF43|A0A2G1MF43_9RHOB Queuine tRNA-ribosyltran sferase OS=Limimaricola cinnabarinus OX=1125964 GN=tgt PE=3 SV=1
MSFSFSLNATDGAARTGVISTPRGEIRTPAFMPVGTAATVKAMMPESVRQTGADILLGNTYHLMLRPSAERIDRFGGLHKFMNWERPILTDSGGFQVMSLASLRKLTEKGVTFKSHIDGSKHEITPERSMEIQKLLGSDIVMAFDECPALPADRERIAESMRLSMRWAQRSRDAFGDRPGHALFGIQQGGLERDLREESAEKLREIGFEGYAVGGLAVGEGQEAMFGCLDYAPGQLPQDKPRYLMGVGKPDDIVGAVKRGIDMMDCVLPSRSGRTGQAWTRRGQVNLRNARHADDPRPLDEACSCPACARYSRAYLHHVVRSQEMIAGMLLTWHNLHYYQELMGGMRAAIAAQDFAGFEARFHAQRAEGDIERL

SEQ ID NO: 56992 - protein, 374 aa, Limimaricola hongkongensis
  misc_feature (1)..(374): tr|A0A017HDJ4|A0A017HDJ4_9RHOB Queuine tRNA-ribosyltran sferase OS=Limimaricola hongkongensis DSM 17492 OX=1122 180 GN=tgt PE=3 SV=1
MSFSFSLNATDGAARTGVISTPRGEIRTPAFMPVGTAATVKAMMPDSVRQTGADILLGNTYHLMLRPTAERIDRLGGLHRFMNWDRPILTDSGGFQVMSLASLRKLTERGVTFKSHIDGSKHEITPERSMEIQKLLGSDIVMAFDECPALPADRERIAESMRLSMRWAQRSRDAFGDRPGHALFGIQQGGLEPDLREESAEKLREIGFEGYAVGGLAVGEGQEAMFGCLDYAPGQLPEDKPRYLMGVGKPDDIVGAVKRGIDMMDCVLPSRSGRTGQAWTRRGQVNLRNARHADDPRPLDEDCTCPACRNYSRAYLHHVVRSQEMIAGMLLTWHNLHYYQELMGGMRDAIADHDFEGFEARFHARRAEGDIERL

SEQ ID NO: 56993 - protein, 374 aa, Limimaricola pyoseonensis
  misc_feature (1)..(374): tr|A0A1G7H1P0|A0A1G7H1P0_9RHOB Queuine tRNA-ribosyltran sferase OS=Limimaricola pyoseonensis OX=521013 GN=tgt P E=3 SV=1
MSFSFALNATDGAARTGVISTPRGEIRTPAFMPVGTAATVKAMMPESVRQTGADILLGNTYHLMLRPTAERIDRLGGLHKFMNWERPILTDSGGFQVMSLASLRKLTERGVTFKSHIDGSKHEITPERSMEIQRLLGSDIVMAFDECPALPADRARIAESMRLSMRWARRSRDAFGDRPGHALFGIQQGGLERDLREESAEALKEIGFEGYAVGGLAVGEGQQAMFGVLDYAPAQLPVDKPRYLMGVGKPDDIVGAVKRGIDMMDCVLPSRSGRTGQAWTRRGQVNLRNARHADDPRPLDEDCSCPACRNYSRAYLHHVTRSQEMIAGMLLTWHNLHYYQELMAGMREAIAAGRFAAWEAEFHARREEGDIERL

SEQ ID NO: 56994 - protein, 374 aa, Limimaricola soesokkakensis
  misc_feature (1)..(374): tr|A0A1X6YX80|A0A1X6YX80_9RHOB Queuine tRNA-ribosyltran sferase OS=Limimaricola soesokkakensis OX=1343159 GN=tg t PE=3 SV=1
MSFSFSLNATDGAARTGVISTPRGEIRTPAFMPVGTAATVKAMMPESVRQTGADILLGNTYHLMLRPSAERIDRLGGLHKFMNWDRPILTDSGGFQVMSLASLRKLTERGVTFKSHIDGSKHEITPERSMEIQKLLGSDIVMAFDECPALPADRTRIAESMRLSMRWAQRSRDAFGDRPGHALFGIQQGGLERDLREESAEALKEIGFEGYAVGGLAVGEGQEAMFGCLDYAPAQLPEDKPRYLMGVGKPDDIVGAVKRGIDMMDCVLPSRSGRTGQAWTRRGQVNMRNARHADDPRPLDEACGCPACRNYSRAYLHHVVRSQEMIAGMLLTWHNLHYYQELMGDMRAAIAAGDFASFETRFHALRAEGDIEPL

SEQ ID NO: 56995 - protein, 378 aa, Limimonas halophila
  misc_feature (1)..(378): tr|A0A1G7SHV8|A0A1G7SHV8_9PROT Queuine tRNA-ribosyltran sferase OS=Limimonas halophila OX=1082479 GN=tgt PE=3 S V=1
MSIGFQLQARDGAARRGVVETAHGRVDTPAFMPVGTAATVKAMRPQDVAATGAQMVLGNTYHLMLRPGAETVAELGGLHRFMAWPGPILTDSGGYQVMSLAKLRKIDERGVRFRSHIDGSKHELTPEGAVEIQDLLDADIAMQLDECPAAGRPRDEVADSMQLSLRWAERCRAAFRERAGYGLFAIVQGGMHDDLRRESAHALTGMDFPGYAVGGLAVGEGQAEMFRVLDVTVPELPEAKPRYLMGVGRPLDIVGAVERGIDLFDCVLPTRSGRTAQAFTHGGAVNIRNARHRRDPRPLDPACGCGVCSTFSRAYLHHLIRAGEMLGPMLLTEHNVFFYQTLMHRLRDAIAAGALADEAARIRAEQAAGDIAPMEAKA

SEQ ID NO: 56996 - protein, 379 aa, Limnobacter sp.
  misc_feature (1)..(379): tr|A0A151QK93|A0A151QK93_9BURK Queuine tRNA-ribosyltran sferase OS=Limnobacter sp. CACIAM 66H1 OX=1813033 GN=tg t PE=3 SV=1
MSALSFKLKTTSGKARRGEITTAHGVIQTPIFMPVGTYGTVKGMTPRDLTEIQAQIILGNTFHLWMRPGLDIMEKFGGLHQFMGWKGPILTDSGGFQVFSLGAMRKIKEEGVHFRSPVNGDKLFLTPEESMRIQTVLNSDIVMIFDECTPYPATHTEARLSMEMSMRWARRSRDAFDAMGNHNGLFGIVQGGMYEDLRDISLQGLEEIGFDGYAIGGLSVGEPKDDMQRILAHTAPKLPQHKPRYLMGVGTPEDLVNAVGQGVDMFDCVMPTRNARNGWLFTRTGDIRIRNAKFRNDENPLDATCTCYTCKNFSRAYLHHLDRSKEILGAQLNTMHNLHYYLDLMREMREAIEQDRFDEFVKEFTALRAQNAQAQSREL

SEQ ID NO: 56997 - protein, 386 aa, Limnobacter sp.
  misc_feature (1)..(386): tr|A0A520TC07|A0A520TC07_9BURK Queuine tRNA-ribosyltran sferase OS=Limnobacter sp. OX=2003368 GN=tgt PE=3 SV=1
MSALSFKLKTTSGKARRGEITTAHGVIQTPIFMPVGTYGTVKGMTPRDLTEIQAQIILGNTFHLWMRPGLDIMEKFGGLHQFMGWKGPILTDSGGFQVFSLGAMRKIKEEGVHFRSPVNGDKLFLTPEESMRIQTVLNSDIVMIFDECTPYPATHTEARLSMEMSMRWARRSRDSFDALGNNNGLFGIVQGGMYEDLRDISLQGLEEIGFDGYAIGGLSVGEPKDDMQRILAHTAPKLPQHKPRYLMGVGTPEDLVNAVGQGIDMFDCVMPTRNARNGWLFTRTGDIRIRNAKFRNDESPLDATCSCYTCKNFSRAYLHHLDRSKEILGAQLNTMHNLHYYLELMREMREAIEQDRFDEFVKEFNALRAENALAGQQQVQQQPQSQ

SEQ ID NO: 56998 - protein, 374 aa, Limnobaculum parvum
  misc_feature (1)..(374): tr|A0A2Y9U0Z0|A0A2Y9U0Z0_9ENTR Queuine tRNA-ribosyltran sferase OS=Limnobaculum parvum OX=2172103 GN=tgt PE=3 S V=1
MKFELQTKDGRARRGRLVFERGTVETPAFMPVGTYGTVKGMTPEEVKDTGAQIILGNTFHLWLRPGQEIMRKHGDLHDFMQWHGPILTDSGGFQVFSLGDIRKITEEGVNFRNPINGDSIFLSPEKSMEIQYDLGSDIVMIFDECTPYPADWDYAKRSMEMSLRWAKRSRQRFDELQNKNALFGIIQGSVYEDLRDVSVKGLVEIGFDGYAVGGLAVGEPKEDMHRILEHVCPQIPEDKPRYLMGVGKPEDLVEGVRRGIDMFDCVMPTRNARNGHLFVTDGVVKIRNAQHKDDTSTLDEHCDCYTCRHYSRAYLHHLDRCNEILGARLNTIHNLRYYQRLMAGLREAIEQGTLEHFVTDFYGRIGKAVPPLAK

SEQ ID NO: 56999 - protein, 387 aa, Limnochorda pilosa
  misc_feature (1)..(387): tr|A0A0K2SMX8|A0A0K2SMX8_9FIRM Queuine tRNA-ribosyltran sferase OS=Limnochorda pilosa OX=1555112 GN=tgt PE=3 SV =1
MDGAFEVLARDPASGARAGRLHTAHGVVETPAFMPVGTQASVKTLSSEELEELGASMILGNTYHLYLRPGAGRVAELGGLHRFMAWSGSILTDSGGFQVLSLTALRRVDEEGVTFRSHLDGSTHRLTPEGVVHLQELLGSDVAMVLDECPPYPSPPEEVEASLRRTERWAEIALASHRRDDQLLFGIVQGGMEAGVRRRAARALGKLEFDGYGIGGLSIGEPKETMYRMLEASVPELPPARPRYLMGVGSPDALVEGVARGIDLFDSVLPTRVARHGTVLTRRGPVTVRNARYASDERPLDPSCDCRVCRRYSRAYVRHLLNAGEILGLRLCSYHNLHVLLRLMEEVRAAIRQGTFAEVRRAAAALFPRRQEPAAGPRPAPTTEVTG

SEQ ID NO: 57000 - protein, 388 aa, Limnohabitans curvus
  misc_feature (1)..(388): tr|A0A315ES02|A0A315ES02_9BURK Queuine tRNA-ribosyltran sferase OS=Limnohabitans curvus OX=323423 GN=tgt PE=3 S V=1
MLKFDVLAKDTSSHARRGTLTLNHGVVQTPIFMPVGTYGTVKGVMPRSLEEMGAQIILGNTFHLWMRPGLDVMQSFGGLHDFERWNKPILTDSGGFQVWSLGAMRKITEEGVTFASPVNGDKLFMSPEVSMQIQTTLNSDIVMQLDECTPYETKGHLTTEAEARKSMEMSRRWAVRSKDEFARLENPNALFGIVQGGMFTNLRQESLDALVEMNFPGYAVGGVSVGEPKDQMLEIMAHTPHRLPEHKPRYLMGVGTPEDLVQGVADGVDMFDCVMPTRNARNGTLFTRFGDLKIRNARHKADHGPLDSTCTCYTCAGHTRPDGTSSGGFSRAYLHHLDRCGEMLGPMLTTVHNLHYYLNLMREVREALEVGQFGAFRAKFKEDRARGV

SEQ ID NO: 57001 - protein, 390 aa, Limnohabitans parvus
  misc_feature (1)..(390): tr|A0A315EAI4|A0A315EAI4_9BURK Queuine tRNA-ribosyltran sferase OS=Limnohabitans parvus II-B4 OX=1293052 GN=tgt PE=3 SV=1
MLQFDLLKTDPSSHARRGTLTLNHGVVQTPIFMPVGTYGTVKGVMPRSLHEMGAQIILGNTFHLWMRPGLDIMKGFGGLHQFEKWDKPILTDSGGFQVWSLGDMRKITEEGVTFASPVNGDKLFMSPEVSMQIQTILNSDIVMQLDECTPYETKGHLTTEAEARKSMEMSRRWAVRSKDEFARLENPNALFGIVQGGMFENLRQESLDALVEMDFPGYAIGGVSVGEPKDLMLQIMAHTPHRLPANKPRYLMGVGTPEDLVQGVADGVDMFDCVMPTRNARNGTVFTRFGDLKLRNARHKNDPQPLDTSCTCHACAGASGVSWDNGGRDGFSRAYMHHLDRCGEMLGPMLTTIHNLHYYLNLMREVRESLDVGQFAQFRAQFKTDRARGV

SEQ ID NO: 57002 - protein, 390 aa, Limnohabitans planktonicus
  misc_feature (1)..(390): tr|A0A2T7U8I0|A0A2T7U8I0_9BURK Queuine tRNA-ribosyltran sferase OS=Limnohabitans planktonicus II-D5 OX=1293045 GN=tgt PE=3 SV=1
MLQFDLLKTDPSSHARRGKLTLNHGVVQTPIFMPVGTYGTVKGVMPRSLHEMGAQIILGNTFHLWMRPGLDIMKGFGGLHQFEKWDKPILTDSGGFQVWSLGDMRKITEEGVTFASPVNGDKLFMSPEVSMQIQTILNSDIVMQLDECTPYETKGHLTTEAEARKSMEMSRRWAVRSKDEFARLENPNALFGIVQGGMFENLRQESLDALVEMDFPGYAIGGVSVGEPKEQMLQIMAHTPHRLPAHKPRYLMGVGTPEDLVQGVADGVDMFDCVMPTRNARNGTVFTRFGDLKLRNARHKNDPQPLDTSCTCHACAGTSGVSWDQGGREGFSRAYMHHLDRCGEMLGPMLTTIHNLHYYLNLMREVRESLDAGEFSQFRAQFKSDRARGV

SEQ ID NO: 57003 - protein, 390 aa, Limnohabitans sp.
  misc_feature (1)..(390): tr|A0A315BP87|A0A315BP87_9BURK Queuine tRNA-ribosyltran sferase OS=Limnohabitans sp. MMS-10A-160 OX=1835766 GN= tgt PE=3 SV=1
MLKFDLLKTDPSSHARRGTLTLNHGVVQTPIFMPVGTYGTVKGVMPRSLHEMGAQIILGNTFHLWMRPGLDIMKGFGGLHPFEKWDKPILTDSGGFQVWSLGDMRKITEEGVTFASPVNGDKLFMSPEVSMQIQTILNSDIVMQLDECTPYETKGHLTTEAEARKSMEMSRRWAVRSKDEFARLENPNALFGIVQGGMFENLRQESLDALVEMDFPGYAVGGVSVGEPKDLMLQIMAHTPHRLPANKPRYLMGVGTPEDLVQGVADGVDMFDCVMPTRNARNGTVFTRFGDLKLRNARHKNDPQPLDTSCTCHACAGTSGVSWDQGGREGFSRAYMHHLDRCGEMLGPMLTTIHNLHYYLNLMREVRESLDAGQFSQFRAQFKSDRARGV

SEQ ID NO: 57004 - protein, 390 aa, Limnohabitans sp.
  misc_feature (1)..(390): tr|A0A2M6V135|A0A2M6V135_9BURK Queuine tRNA-ribosyltran sferase OS=Limnohabitans sp. G3-2 OX=1100711 GN=tgt PE= 3 SV=1
MLQFDLLKTDPSSHARRGTLTLNHGVVQTPIFMPVGTYGTVKGVMPRSLHEMGAQIILGNTFHLWMRPGLDIMKGFGGLHQFEKWDKPILTDSGGFQVWSLGDMRKITEEGVTFASPVNGDKLFMSPEVSMQIQTILNSDIVMQLDECTPYETKGHLTTEAEARKSMEMSRRWAVRSKDEFARLENPNALFGIVQGGMFENLRQESLDALVEMDFPGYAIGGVSVGEPKDLMLQIMAHTPHRLPANKPRYLMGVGTPEDLVQGVADGVDMFDCVMPTRNARNGTVFTRFGDLKLRNARHKNDPQPLDTSCTCHACAGASGVSWDQGGRDGFSRAYMHHLDRCGEMLGPMLTTIHNLHYYLNLMREVRESLDAGEFSTFRARFNSERARGV

SEQ ID NO: 57005 - protein, 387 aa, Limnoraphis robusta
  misc_feature (1)..(387): tr|A0A0F5YGK4|A0A0F5YGK4_9CYAN Queuine tRNA-ribosyltran sferase OS=Limnoraphis robusta CS-951 OX=1637645 GN=tgt PE=3 SV=1
MSEPFSFQIQARCSQTQARAGVFSTPHGLVETPRFMPVGTLANVKTLTPAHLEAAGAQMVLSNTYHLHLQPGEKIVANAGGLHRFMAWNGPILTDSGGFQVFSLSEIRTINEEGVIFRSPHDGLMINFTPERSIHIQNELGADVIMAFDECPPYPASREQVLNATERTYRWLERCITAHQRSDQALFGIVQGGVYPDLRQNAAKQLVKLDLPGYAIGGVSVGEPSELIEKIVQVTTPFLPPDKPRYLMGVGTYREMAQAIASGVDLFDCVIPTRLARHGAALVQGERWNLKNAQFREDFQPLDETCPCYTCQNFSRAYLSHLVRAKELLAYTLLSIHNVTELIRFTQRIRDAIFRDRFSEEFAEWIKPSESSTHTLEEVGFSRQDDP

SEQ ID NO: 57006 - protein, 370 aa, Limnospira indica
  misc_feature (1)..(370): tr|H1WD59|H1WD59_9CYAN Queuine tRNA-ribosyltransferase OS=Limnospira indica PCC 8005 OX=376219 GN=tgt PE=3 SV= 1
MPQSFSFQIQTRCTHTHARAGVFVTPHGIVETPRFMPVGTLANVKTLTPAQLLDTGAQMVLSNTYHLHLQPGEKIVAAAGGIHKFMGWNGPILTDSGGFQVFSLSEMRTVTEAGVRFRSPHDGAIIELSPERSIEIQNQLGADVIMAFDECPPYPASREDVVAATNRTVRWLERCIAAHDRPEAALFGIVQGGVYPDLRVAAAKKLVEFDLPGYAIGGVSVGEPTDLMEMVVRVTTPILPDHKPRYLMGIGTYREMAQAIASGIDLFDCVIPTRLARHGAALVAGERWNLKNAQFREDFRPLDPSCPCYTCQNFSRAYISHLVRAKELLAYTLLSIHNVTELIRFTTRIRDAILGDRFTDEFAQYLQVQS

SEQ ID NO: 57007 - protein, 371 aa, Limnothrix rosea
  misc_feature (1)..(371): tr|A0A1Q4R0U6|A0A1Q4R0U6_9CYAN Queuine tRNA-ribosyltran sferase OS=Limnothrix rosea IAM M-220 OX=454133 GN=tgt PE=3 SV=1
MSHFHFELQKECRDTKARVGVFHTPHGIVETPRFMPVGTLANVKGITPDHLEQAQAHMVLSNTYHLHLQPGEDIVKKAGGLHRFMAWEQPILTDSGGFQVFSLSEMRKIREEGVVFRSPKDGRLIDMTPERSIQIQNDLGADVIMAFDECPPGDAGREVVEAATARTYRWLKRCITAHQRDDQALFGIVQGGIFLDLRSQAAAELMALDLPGYAIGGVSVGEAPENIRKVVQHTAPLLPKEKIRYLMGVGTYREMAQAIASGIDVFDCVIPTRLGRHGAALVQGDRWNLKNAQFKEDFQPLDETCPCYTCQNFTRAYLHHLIKAKEMLAYMLLSLHNVTELIQFTVKIRESILSDRFVADFGDWLEPTASE

SEQ ID NO: 57008 - protein, 380 aa, Limnothrix sp.
  misc_feature (1)..(380): tr|A0A372DEY8|A0A372DEY8_9CYAN Queuine tRNA-ribosyltran sferase OS=Limnothrix sp. CACIAM 69d OX=1890733 GN=tgt PE=3 SV=1
MAPDFRFELVAECSQTSARVGVFHTPHGIVETPRFMPVGTLANVKTLSPDQVAATGAQMILSNTYHLHLQPGEGIVQAAGGLHKFMNWQGPILTDSGGFQVFSLSEMRQISDRGVTFRSPHDGSIIDFTPEKSIQIQNALGSDVIMAFDECPPYPATREQVEKATDRTYQWLLRCIEAHQRSDQALFGIVQGGTYADLRAKAAADLAALDLPGYAIGGVSVGEPPELIEHIVKATTPLLPPHKLRYLMGVGTYREMAQAIAAGIDVFDCVIPTRLARHGAALVQGERWNLKNAQFREDFRPLDETCPCYTCQNFSRAYISHLIRAKEILGYTLLAIHNVTELIRFTQRIRSAILAGNFADEFAHWLRPADDLAAAARLDD

SEQ ID NO: 57009 - protein, 383 aa, Limnothrix sp.
  misc_feature (1)..(383): tr|A0A1C0VDM5|A0A1C0VDM5_9CYAN Queuine tRNA-ribosyltran sferase OS=Limnothrix sp. P13C2 OX=1880902 GN=tgt PE=3 SV=1
MSAIAPDFRFELVAECSQTSARVGVFHTPHGIVETPRFMPVGTLANVKTLSPDQVAATGAQMILSNTYHLHLQPGEGIVQAAGGLHKFMNWQGPILTDSGGFQVFSLSEMRQISDRGVTFRSPHDGSIIDFTPEKSIQIQNALGSDVIMAFDECPPYPATREQVEKATDRTYQWLLRCIEAHQRSDQALFGIVQGGTYADLRAKAAADLAALDLPGYAIGGVSVGEPPELIEHIVKATTPLLPPHKLRYLMGVGTYREMAQAIAAGIDVFDCVIPTRLARHGAALVQGERWNLKNAQFREDFRPLDETCPCYTCQNFSRAYIGHLIRAKEILGYTLLAIHNVTELIRFTQRIRSAILAGNFADEFAHWLRPADDLAAAARLDD

SEQ ID NO: 57010 - protein, 376 aa, Lishizhenia tianjinensis
  misc_feature (1)..(376): tr|A0A1I7BK44|A0A1I7BK44_9FLAO Queuine tRNA-ribosyltran sferase OS=Lishizhenia tianjinensis OX=477690 GN=tgt PE =3 SV=1
MHFTLQKKDEKTKARAGELKTDHGTIQTPIFMPVGTAGTVKGVHQHELDKEINAQIILGNTYHLYLKPGLEVIEGAGGLHKFNGWNKPILTDSGGYQVYSLSGQRKIKEAGVKFQSHHDGSYHFFTPERAIDIQRTIGADIIMAFDECTPYPCDYAYAKKSMHMTHRWLKRCFDQMDRTAPKYGYEQALFPIVQGSVYEDLRERSAEKIASFDAVGNAIGGLSVGEPDEELYKATDLVCGILPEEKPRYLMGVGTPVNILECIALGVDMFDCVMPTRNARHGMLFTSEGIINIKNKKWEMDFSPLDPNGTATVDQVYSKSYVRHLIRSNEFLGFQIASIHNLAFYLALVTEARTRILDGTFSEWKDKMVVKLANRL

SEQ ID NO: 57011 - protein, 379 aa, Listeria aquatica
  misc_feature (1)..(379): tr|W7AVC0|W7AVC0_9LIST Queuine tRNA-ribosyltransferase OS=Listeria aquatica FSL S10-1188 OX=1265818 GN=tgt PE= 3 SV=1
MAAISYELIKTDKKTGARLGKLHTPHGTFETPMFMPVGTQATVKTMSPEELKQMGAGVILSNTYHLWLRPGEKLVEEAGGLHRFMNWDQPILTDSGGFQVFSLSDMRDIKEEGVHFRNHLNGDKLFLSPEKAIQIQNSLGADIMMSFDECPPYPATHDYMKRSVERTSRWAERGLKAHMKPETQGLFGIVQGGAYEDLRTQSAKELVSLDFPGYSIGGLSVGEPKDVMNQVLEYTTPLLPSGKPRYLMGVGSPDSLIDGVIRGIDMFDCVLPTRIARNGTCMTSNGRLVIKNAKFAHDFGPLDENCDCYTCRHYSRAYIRHLIRCDETFGIRLTTYHNLYFLLNLMEKVRNAIREDALLEFREEFFEQYGFNGPNAKNF

SEQ ID NO: 57012 - protein, 379 aa, Listeria booriae
  misc_feature (1)..(379): tr|A0A099W347|A0A099W347_9LIST Queuine tRNA-ribosyltran sferase OS=Listeria booriae OX=1552123 GN=tgt PE=3 SV=1
MAAITYELIKTDKQTGARLGKIHTPHGSFDTPMFMPVGTLATVKTMSPEELKAMGSGIILSNTYHLWLRPGEDLIEEAGGLHKFMNWDQAILTDSGGYQVFSLSDMRDIKEEGVHFRNHLNGDKLFLSPEKAIQVQNSLGSDIMMSFDECPPYPATHEYMKKSIERTSRWAERGLKAHARPHDQGLFGIVQGGSYKDLREQSARDLVSMDFPGYSIGGLSVGEPKDIMNEVLEYTTPLLPSNKPRYLMGVGSPDALIDGVIRGVDMFDCVLPTRIARNGTCMTSQGRLVVRNAKFARDFRPLDEACDCYTCKNYSRAYIRHLLRCDETFGIRLTTYHNLHFLLHLMEQVRGAIMNDRLADFREEFFEQYGLNGPNAKNF

SEQ ID NO: 57013 - protein, 379 aa, Listeria cornellensis
  misc_feature (1)..(379): tr|W7C1A2|W7C1A2_9LIST Queuine tRNA-ribosyltransferase OS=Listeria cornellensis FSL F6-0969 OX=1265820 GN=tgt PE=3 SV=1
MAAITYELIKTDKQTGARLGKIHTPHGSFDTPMFMPVGTLATVKTMSPEELKAMGSGIILSNTYHLWLRPGEDLIEEAGGLHKFMNWDQAILTDSGGYQVFSLSDMRDIKEEGVHFRNHLNGDKLFLSPEKAIQIQNSLGSDIMMSFDECPPYPATHDYMKKSIERTSRWAERGLKAHARPHDQGLFGIVQGGSYKDLREQSARDLVSMDFPGYSIGGLSVGEPKDIMNEVLEYTTPLLPANKPRYLMGVGSPDALIDGVIRGIDMFDCVLPTRIARNGTCMTSKGRLVVRNAKFARDFRPIDEVCDCYTCKNYSRAYIRHLIRCDETFGIRLTTYHNLHFLLNLMEQVRGAIMNDRLADFREEFFEQYGLNGPNAKNF

SEQ ID NO: 57014 - protein, 382 aa, Listeria fleischmannii
  misc_feature (1)..(382): tr|W7DTA3|W7DTA3_9LIST Queuine tRNA-ribosyltransferase OS=Listeria fleischmannii FSL S10-1203 OX=1265822 GN=tg t PE=3 SV=1
MTAIRYELIKTDKKTGARLGKLHTPHGTFDTPMFMPVGTQATVKTMSPEELKKMGAGVILSNTYHLWLRPGEQLIEQAGGLHKFMNWDQPILTDSGGFQVFSLSDMRDIKEEGVHFRNHLNGDKLFLSPEKAIQIQNALGSDIMMSFDECPPYPATHDYMKRSVERTSRWAERGLKAHMKPDIQGLFGIVQGGAYEDLRRQSAEDLVSLDFPGYSIGGLSVGEPKDVMNEVLEFTTPFLPSGKPRYLMGVGSPDSLIDGVIRGIDMFDCVLPTRIARNGTCMTSNGRLVIKNAKFANDFGPLDENCSCYTCQNYSRAYIRHLIRCDETFGIRLTTYHNLHFLLNLMEQVRDAIRHDRLLEFREEFFEQYGFNGPNAKNFLIK

SEQ ID NO: 57015 - protein, 379 aa, Listeria fleischmannii
  misc_feature (1)..(379): tr|A0A2X3HEZ9|A0A2X3HEZ9_9LIST Queuine tRNA-ribosyltran sferase OS=Listeria fleischmannii subsp. fleischmannii OX=1671902 GN=tgt PE=3 SV=1
MTAIRYELIKTDKKTGARLGKLHTPHGTFDTPMFMPVGTQATVKTMSPEELKKMGAGVILSNTYHLWLRPGEQLIEQAGGLHKFMNWDQPILTDSGGFQVFSLSDMRDIKEEGVHFRNHLNGDKLFLSPEKAIQIQNALGSDIMMSFDECPPYPATHDYMKRSVERTSRWAERGLKAHMKPDIQGLFGIVQGGAYEDLRRQSAEDLVSLDFPGYSIGGLSVGEPKDVMNEVLEFTTPFLPSGKPRYLMGVGSPDSLIDGVIRGIDMFDCVLPTRIARNGTCMTSNGRLVIKNAKFANDFGPLDENCSCYTCQNYSRAYIRHLIRCDETFGIRLTTYHNLHFLLNLMKQVRDAIRHDRLLEFREEFFEQYGFNGPNAKNF

SEQ ID NO: 57016 - protein, 393 aa, Listeria floridensis
  misc_feature (1)..(393): tr|W7CG36|W7CG36_9LIST Queuine tRNA-ribosyltransferase OS=Listeria floridensis FSL S10-1187 OX=1265817 GN=tgt PE=3 SV=1
MTAISYELIKTDKKNGARLGKLHTPHGTFDTPMFMPVGTQATVKTMSPEELKQMGAGVILSNTYHLWLRPGEKLIEEAGGLHKFMNWDQPILTDSGGFQVFSLSDMRDIKEEGVHFRNHLNGDKLFLSPEKAIAIQNSLGSDIMMSFDECPPYPATHEYMKRSVERTSRWAERGLKAHARPHDQGLFGIVQGGAYEDLRAQSAKDLVSLDFPGYSIGGLSVGEPKDVMNQVLEHTTPLLPSGKPRYLMGVGSPDSLIDGVIRGIDMFDCVLPTRIARNGTCMTSAGRLVIKNAKFANDFRPLDENCDCYTCRNYSRAYIRHLIRCDETFGIRLTTYHNLHFLLHLMEEIRDAIRNDSLLEFREEFFEQYGFNGPNAKNFLINLLDNLRGAESF

SEQ ID NO: 57017 - protein, 379 aa, Listeria grandensis
  misc_feature (1)..(379): tr|W7BE52|W7BE52_9LIST Queuine tRNA-ribosyltransferase OS=Listeria grandensis FSL F6-0971 OX=1265819 GN=tgt PE =3 SV=1
MAAITYELIKTDKQTGARLGKIHTPHGSFDTPMFMPVGTLATVKTMSPEELKAMGSGIILSNTYHLWLRPGEDLIEEAGGLHKFMNWDQAILTDSGGYQVFSLSDMRDIKEEGVHFRNHLNGDKLFLSPEKAIQIQNSLGSDIMMSFDECPPYPATHDYMKKSIERTSRWAERGLKAHARPHDQGLFGIVQGGSYKDLREQSARDLVSMDFPGYSIGGLSVGEPKDIMNEVLEYTTPLLPANKPRYLMGVGSPDALIDGVIRGIDMFDCVLPTRIARNGTCMTSQGRLVVRNAKFARDFRPIDEACDCYTCKNYSRAYIRHLIRCDETFGIRLTTYHNLHFLLNLMEQVRESIMNDRLADFREEFFEQYGLNGPNAKNF

SEQ ID NO: 57018 - protein, 379 aa, Listeria grayi
  misc_feature (1)..(379): tr|D7UZ09|D7UZ09_LISGR Queuine tRNA-ribosyltransferase OS=Listeria grayi DSM 20601 OX=525367 GN=tgt PE=3 SV=1
MTAIRYELIKTDKQTGARLGKIHTPHGTFDTPMFMPVGTLATVKTMSPEELKAMGAGIILSNTYHLWLRPGEELIREAGGLHRFMNWDQPILTDSGGFQVFSLSDIRDIKEEGVHFRNHLNGDKLFLSPEKAIQIQNALGSDIMMSFDECPPYPATHDYMKKSVERTSRWAERGLRAHERPEDQGLFGIVQGGAYQELRELSAKDLVSLDFPGYSIGGLSVGEPKSVMNEVLEYTTPLLPTNKPRYLMGVGSPDSLIDGVIRGIDMFDCVLPTRIARNGTCMTSQGRLVIKNAKFARDFRPIDEDCDCYTCRNYSRAYVRHLIKCDETFGIRLTTYHNLHFLLNLMKQVRTAIQADRLGDFREEFFEQYGLNRPDAKNF

SEQ ID NO: 57019 - protein, 342 aa, Listeria grayi
  misc_feature (1)..(342): tr|A0A378MAD9|A0A378MAD9_LISGR Queuine tRNA-ribosyltran sferase OS=Listeria grayi OX=1641 GN=tgt PE=3 SV=1
MTAIRYELIKTDKQTGARLGKIHTPHGTFDTPMFMPVGTLATVKTMSPEELKAMGAGIILSNTYHLWLRPGEELIREAGGLHRFMNWDQPILTDSGGFQVFSLSDIRDIKEEGVHFRNHLNGDKLFLSPEKAIQIQNALGSDIMMSFDECPPYPATHDYMKKSVERTSRWAERGLRAHERPEDQGLFGIVQGGAYQELRELSAKDLVSLDFPGYSIGGLSVGEPKSVMNEVLEYTTPLLPTNKPRYLMGVGSPDSLIDGVIRGIDMFDCVLPTRIARNGTCMTSQGRLVIKNAKFARDFRPIDEDCDCYTCRNYSRAYVRHLIKCDETFGIRLTTYHNLHFC

SEQ ID NO: 57020 - protein, 379 aa, Listeria innocua
  misc_feature (1)..(379): sp|Q92BI4|TGT_LISIN Queuine tRNA-ribosyltransferase OS= Listeria innocua serovar 6a (strain ATCC BAA-680 / CLIP 11262) OX=272626 GN=tgt PE=3 SV=1
MSAIRYELIKTDKQTGARLGKIHTPHGTFDTPMFMPVGTLATVKTMSPEELKAMGAGIILSNTYHLWLRPGEELIREAGGLHKFMNWDQPILTDSGGFQVFSLSKMRDIKEEGVHFRNHLNGDKLFLSPEKAIQIQNALGSDIMMSFDECPPYPASHEYMKKSVERTSRWAERGLKAHERPEDQGLFGIVQGGAYEDLRAQSAKDLVSLDFPGYSIGGLSVGEPKDVMNRVLEHTTPLLPANKPRYLMGVGSPDSLIDGVIRGVDMFDCVLPTRIARNGTCMTSSGRLVIKNAKFTHDFRPIDENCDCYTCKNYSRAYIRHLIRCEETFGIRLTTYHNLHFLLNLMKQVRSAIMEDRLADFREEFFEQYGFNRPDAKNF

SEQ ID NO: 57021 - protein, 379 aa, Listeria innocua; identical to SEQ ID NO: 57020
  misc_feature (1)..(379): tr|A0A5H5AT68|A0A5H5AT68_LISIO tRNA guanosine(34) trans glycosylase Tgt OS=Listeria innocua OX=1642 GN=tgt PE=4 SV=1

SEQ ID NO: 57022 - protein, 379 aa, Listeria ivanovii
  misc_feature (1)..(379): tr|A0A097B5I5|A0A097B5I5_LISIV Queuine tRNA-ribosyltran sferase OS=Listeria ivanovii subsp. londoniensis OX=202 752 GN=tgt PE=3 SV=1
MSAIRYELIKTDKQTGARLGKIHTPHGTFDTPMFMPVGTLATVKTMSPEELKAMGAGIILSNTYHLWLRPGEELIREAGGLHKFMNWDQPILTDSGGFQVFSLSKMRDIKEEGVHFRNHLNGDKLFLSPEKAIQIQNALGSDIMMSFDECPPYPASHEYMKKSVERTSRWAERGLKAHARPDDQGLFGIVQGGAYEDLRAQSAKDLVSLDFPGYSIGGLSVGEPKDVMNQVLEHTTPLLPTNKPRYLMGVGSPDSLIDGVIRGIDMFDCVLPTRIARNGTCMTSNGRLVIKNAKFTHDFRPIDENCDCYTCKNYSRAYIRHLIRCEETFGIRLTTYHNLHFLLNLMKQVRSAIMEDRLADFREEFFEQYGFNRPDAKNF

SEQ ID NO: 57023 - protein, 379 aa, Listeria ivanovii
  misc_feature (1)..(379): tr|G2Z9M9|G2Z9M9_LISIP Queuine tRNA-ribosyltransferase OS=Listeria ivanovii (strain ATCC BAA-678 / PAM 55) OX= 881621 GN=tgt PE=3 SV=1
MSAIRYELIKTDKQTGARLGKIHTPHGTFDTPMFMPVGTLATVKTMSPEELKAMGAGIILSNTYHLWLRPGEELIREAGGLHKFMNWDQPILTDSGGFQVFSLSEMRDIKEEGVHFRNHLNGDKLFLSPEKAIQIQNALGSDIMMSFDECPPYPASHEYMKKSVERTSRWAERGLKAHARPGDQGLFGIVQGGAYEDLRAQSAKDLVSLDFPGYSIGGLSVGEPKDVMNQVLEHTTPLLPTNKPRYLMGVGSPDSLIDGVIRGIDMFDCVLPTRIARNGTCMTSNGRLVIKNAKFTHDFRPIDENCDCYTCKNYSRAYIRHLIRCEETFGIRLTTYHNLHFLLNLMKQVRSAIMEDRLADFREEFFEQYGFNRPDAKNF

SEQ ID NO: 57024 - protein, 379 aa, Listeria kieliensis
  misc_feature (1)..(379): tr|A0A3D8TVY8|A0A3D8TVY8_9LIST Queuine tRNA-ribosyltran sferase OS=Listeria kieliensis OX=1621700 GN=tgt PE=3 S V=1
MAAISYELIKTDKKTGARLGKLHTPHGTFETPMFMPVGTQATVKTMSPEELKQMGAGVILSNTYHLWLRPGEKLVEEAGGLHRFMNWDQPILTDSGGFQVFSLSDMRDIKEEGVHFRNHLNGDKLFLSPEKAIQIQNSLGADIMMSFDECPPYPATHEYMKRSVERTSRWAERGLKAHMKPDVQGLFGIVQGGAYEDLRTQSAKDLVSLDFPGYSIGGLSVGEPKDVMNQVLEYTTPLLPSGKPRYLMGVGSPDSLIDGVIRGIDMFDCVLPTRIARNGTCMTSNGRLVIKNAKFAHDFGPLDENCDCYTCRNYSRAYIRHLIRCDETFGIRLTTYHNLYFLLNLMEKVRNAIREDALLEFREEFFEQYGFNGPNAKNF

SEQ ID NO: 57025 - protein, 379 aa, Listeria marthii
  misc_feature (1)..(379): tr|E3YQH8|E3YQH8_9LIST Queuine tRNA-ribosyltransferase OS=Listeria marthii FSL S4-120 OX=702457 GN=tgt PE=3 SV =1
MSAIRYELIKTDKQTGARLGKIHTPHGTFDTPMFMPVGTLATVKTMSPEELKAMGAGIILSNTYHLWLRPGEELIREAGGLHKFMNWDQPILTDSGGFQVFSLSKMRDIKEEGVHFRNHLNGDKLFLSPEKAIQIQNALGSDIMMSFDECPPYPASHEYMKKSVERTSRWAERGLKAHERPEDQGLFGIVQGGAYEDLRAQSAKDLVSLDFPGYSIGGLSVGEPKDVMNRVLEHTTPLLPANKPRYLMGVGSPDSLIDGVIRGVDMFDCVLPTRIARNGTCMTSSGRLVIKNAKFTHDFRPIDENCDCYTCKNYSRAYIRHLIRCEETFGIRLTTYHNLHFLLNLMKQVRGAIMEDRLADFREEFFEQYGFNRPDAKNF

SEQ ID NO: 57026 - protein, 379 aa, Listeria monocytogenes
  misc_feature (1)..(379): sp|Q8Y700|TGT_LISMO Queuine tRNA-ribosyltransferase OS= Listeria monocytogenes serovar 1/2a (strain ATCC BAA-67 9 / EGD-e) OX=169963 GN=tgt PE=3 SV=1
MSAIRYELIKTDKQTGARLGKIHTPHGTFDTPMFMPVGTLATVKTMSPEELKAMGAGIILSNTYHLWLRPGEELIREAGGLHKFMNWDQPILTDSGGFQVFSLSKMRDIKEEGVHFRNHLNGDKLFLSPEKAIQIQNALGSDIMMSFDECPPYPASHEYMKKSVERTSRWAERGLKAHVRPEDQGLFGIVQGGAYEDLRAQSAKDLVSLDFPGYSIGGLSVGEPKDVMNRVLEHTTPLLPANKPRYLMGVGSPDSLIDGVIRGVDMFDCVLPTRIARNGTCMTSSGRLVIKNAKFTHDFRPIDENCDCYTCKNYSRAYIRHLIRCEETFGIRLTTYHNLHFLLNLMKQVRGAIMEDRLADFREEFFEQYGFNRPDAKNF

SEQ ID NO: 57027 - protein, 379 aa, Listeria monocytogenes; identical to SEQ ID NO: 57025
  misc_feature (1)..(379): sp|B8DHL8|TGT_LISMH Queuine tRNA-ribosyltransferase OS= Listeria monocytogenes serotype 4a (strain HCC23) OX=55 2536 GN=tgt PE=3 SV=1

SEQ ID NO: 57028 - protein, 379 aa, Listeria riparia
  misc_feature (1)..(379): tr|W7D9F6|W7D9F6_9LIST Queuine tRNA-ribosyltransferase OS=Listeria riparia FSL S10-1204 OX=1265816 GN=tgt PE=3 SV=1
MAAITYELIKTDKQTGARLGKIHTPHGSFDTPMFMPVGTLATVKTMSPEELKAMGSGIILSNTYHLWLRPGEDLIEEAGGLHKFMNWDQAILTDSGGYQVFSLSDMRDIKEEGVHFRNHLNGDKLFLSPEKAIQVQNSLGADIMMSFDECPPYPATHEYMKKSIERTSRWAERGLKAHTRPHDQGLFGIVQGGSYKDLREQSARDLVSMDFPGYSIGGLSVGEPKDIMNEVLEYTTPLLPSNKPRYLMGVGSPDALIDGVIRGVDMFDCVLPTRIARNGTCMTSQGRLVVRNAKFARDFRPLDEACDCYTCKNYSRAYIRHLIRCDETFGIRLTTYHNLHFLLHLMEQVRGAIMNDRLADFREEFFEQYGLNGPNAKNF

SEQ ID NO: 57029 - protein, 379 aa, Listeria rocourtiae
  misc_feature (1)..(379): tr|A0A4R6ZMA4|A0A4R6ZMA4_9LIST Queuine tRNA-ribosyltran sferase OS=Listeria rocourtiae OX=647910 GN=tgt PE=3 SV =1
MAAITYELIKTDKQTGARLGKIHTPHGSFDTPMFMPVGTLATVKTMSPEELKAMGSGIILSNTYHLWLRPGEDLIEEAGGLHKFMNWNQAILTDSGGYQVFSLSDMRDIKEEGVHFRNHLNGDKLFLSPEKAIQVQNSLGADIMMSFDECPPYPATHDYMKKSIERTSRWAERGLKAHARPHDQGLFGIVQGGSYKDLREQSARDLVSMDFPGYSIGGLSVGEPKDIMNEVLEYTTPLLPSDKPRYLMGVGSPDALIDGVIRGVDMFDCVLPTRIARNGTCMTSKGRLVVRNAKFARDFRPIDENCDCYTCQNYSRAYIRHLIRCDETFGIRLTTYHNLHFLLHLMEQVRGAIMNDRLADFREEFFEQYGLNGPNAKNF

SEQ ID NO: 57030 - protein, 379 aa, Listeria seeligeri
  misc_feature (1)..(379): tr|E3ZQR6|E3ZQR6_LISSE Queuine tRNA-ribosyltransferase OS=Listeria seeligeri FSL N1-067 OX=702453 GN=tgt PE=3 SV=1
MSAIRYELIKTDKQTGARLGKIHTPHGTFDTPMFMPVGTLATVKTMSPEELKAMGAGIILSNTYHLWLRPGEELIREAGGLHKFMNWDQPILTDSGGFQVFSLSKMRDIKEEGVHFRNHLNGDKLFLSPEKAIQIQNALGSDIMMSFDECPPYPASHEYMKKSVERTSRWAERGLKAHARPGDQGLFGIVQGGAYEDLRAQSAKDLVSLDFPGYSIGGLSVGEPKDVMNQVLEHTTPLLPANKPRYLMGVGSPDSLIDGVIRGIDMFDCVLPTRIARNGTCMTSSGRLVIKNAKFTHDFRPIDENCDCYTCKNYSRAYIRHLIRCEETFGIRLTTYHNLHFLLNLMKQVRSAIMEDRLADFREEFFEQYGFNRPDAKNF

SEQ ID NO: 57031 - protein, 379 aa, Listeria seeligeri; identical to SEQ ID NO: 57030
  misc_feature (1)..(379): tr|A0A5B8AAP8|A0A5B8AAP8_LISSE Queuine tRNA-ribosyltran sferase OS=Listeria seeligeri OX=1640 GN=tgt PE=3 SV=1

SEQ ID NO: 57032 - protein, 379 aa, Listeria sp.
  misc_feature (1)..(379): tr|A0A3N9TTX7|A0A3N9TTX7_9LIST Queuine tRNA-ribosyltran sferase OS=Listeria sp. SHR_NRA_18 OX=2269046 GN=tgt PE =3 SV=1
MAAITYELIKTDKQTGARLGKIHTPHGSFDTPMFMPVGTLATVKTMSPEELKAMGSGIILSNTYHLWLRPGEDLIEEAGGLHKFMNWDQAILTDSGGYQVFSLSDMRDIKEEGVHFRNHLNGDKLFLSPEKAIQIQNSLGSDIMMSFDECPPYPATHDYMKKSIERTSRWAERGLKAHARPHDQGLFGIVQGGSYKDLREQSARDLVSMDFPGYSIGGLSVGEPKDIMNEVLEYTTPLLPANKPRYLMGVGSPDALIDGVIRGIDMFDCVLPTRIARNGTCMTSKGRLVVRNAKFARDFRPIDEACDCYTCKNYSRAYIRHLIRCDETFGIRLTTYHNLHFLLNLMEQVRGAIMNDRLADFREEFFEQYGLNGPNAKNF

SEQ ID NO: 57033 - protein, 379 aa, Listeria weihenstephanensis
  misc_feature (1)..(379): tr|A0A1S7FV61|A0A1S7FV61_9LIST Queuine tRNA-ribosyltran sferase OS=Listeria weihenstephanensis OX=1006155 GN=tg t PE=3 SV=1
MAAITYELIKTDKQTGARLGKIHTPHGSFDTPMFMPVGTLATVKTMSPEELKAMGSGIILSNTYHLWLRPGEDLIEEAGGLHKFMNWDQAILTDSGGYQVFSLSDMRDIKEEGVHFRNHLNGDKLFLSPEKAIQIQNSLGSDIMMSFDECPPYPATHDYMKKSIERTSRWAERGLKAHARPHDQGLFGIVQGGSFKDLREQSARDLVSMDFPGYSIGGLSVGEPKDIMNEVLEYTTPLLPANKPRYLMGVGSPDALIDGVIRGIDMFDCVLPTRIARNGTCMTSQGRLVVRNAKFARDFRPIDEACDCYTCKNYSRAYIRHLIRCDETFGIRLTTYHNLHFLLNLMGQVRGAIMNDRLADFREEFFEQYGLNGPNAKNF

SEQ ID NO: 57034 - protein, 379 aa, Listeria weihenstephanensis; identical to SEQ ID NO: 57033
  misc_feature (1)..(379): tr|W7CIM4|W7CIM4_9LIST Queuine tRNA-ribosyltransferase OS=Listeria weihenstephanensis FSL R9-0317 OX=1265845 G N=tgt PE=3 SV=1

SEQ ID NO: 57035 - protein, 379 aa, Listeria welshimeri
  misc_feature (1)..(379): sp|A0AIX9|TGT_LISW6 Queuine tRNA-ribosyltransferase OS= Listeria welshimeri serovar 6b (strain ATCC 35897 / DSM 20650 / SLCC5334) OX=386043 GN=tgt PE=3 SV=1
MSAIRYELIKTDKQTGARLGKIHTPHGTFDTPMFMPVGTLATVKTMSPEELKAMGAGIILSNTYHLWLRPGEELIREAGGLHKFMNWDQPILTDSGGFQVFSLSKMRDIKEEGVHFRNHLNGDKLFLSPEKAIQIQNALGSDIMMSFDECPPYPASHEYMKKSVERTSRWAERGLQAHARPEDQGLFGIVQGGAYEDLRAQSAKDLVSLDFPGYSIGGLSVGEPKDVMNRVLEHTTPLLPANKPRYLMGVGSPDSLIDGVIRGVDMFDCVLPTRIARNGTCMTSSGRLVIKNAKFTHDFRPIDENCDCYTCKNYSRAYIRHLIRCEETFGIRLTTYHNLHFLLNLMKQVRSAIMEDRLADFREEFFEQYGFNRPDAKNF

SEQ ID NO: 57036 - protein, 379 aa, Listeriaceae bacterium; identical to SEQ ID NO: 57032
  misc_feature (1)..(379): tr|A0A099W373|A0A099W373_9LIST Queuine tRNA-ribosyltran sferase OS=Listeriaceae bacterium FSL A5-0209 OX=149767 9 GN=tgt PE=3 SV=1

SEQ ID NO: 57037 - protein, 376 aa, Litoreibacter albidus
  misc_feature (1)..(376): tr|A0A1H2S385|A0A1H2S385_9RHOB Queuine tRNA-ribosyltran sferase OS=Litoreibacter albidus OX=670155 GN=tgt PE=3 SV=1
MTQRFQFDLHATDGKARTGVISTPRGEIRTPAFMPVGTAATVKAMMPESVRATGADILLGNTYHLMLRPTAERIARLGGLHKFMNWDRPILTDSGGFQVMSLAELRKLTEEGVTFKSHIDGSKHVLTPERSMEIQKLLGSDIVMCFDECPALPADRARIEESMQLSMRWAARSREAFGDRPGHALFGIQQGGLEQDFREESAKALTDIGFEGYAVGGLAVGEGQESMFACLDYAPDQLPTDKPRYLMGVGKPDDIVGAVERGIDMFDCVLPSRSGRTGQAFTRRGVVNIKNARHTDDPRPLDEACTCPCCAQYSRAYLHHVFKSHEMISSMLVTWHNLHYYQELMAGLRGAIARADLAGFVKTFHETRALGDIEPV

SEQ ID NO: 57038 - protein, 376 aa, Litoreibacter arenae
  misc_feature (1)..(376): tr|S9QJH6|S9QJH6_9RHOB Queuine tRNA-ribosyltransferase OS=Litoreibacter arenae DSM 19593 OX=1123360 GN=tgt PE= 3 SV=1
MTQRFQFDIRATDGKARTGLISTPRGDIRTPAFMPVGTAATVKAMMPESVRATGADILLGNTYHLMLRPTAERIANLGGLHKFMNWDRPILTDSGGFQVMSLAELRKLTEEGVTFKSHIDGSKHMLSPERSMEIQKLLGSDIVMCFDECPALPADRDRIKQSMDLSMRWAGRSREAFGDRPGHALFGIQQGGLEQDFREESAKALSKIGFDGYAVGGLAVGEGQEAMFGCLDYAPDQLPQDKPRYLMGVGKPDDIVGAVERGIDMFDCVLPSRSGRTGQAFTRRGVVNIKNARHMDDPRPLDADCTCPCCSQYSRAYLHHVFKAQEIISSMLVTWHNLHYYQELMSGLREAISEGNLSGFVKQFHATRAQGDIEPV

SEQ ID NO: 57039 - protein, 376 aa, Litoreibacter ascidiaceicola
  misc_feature (1)..(376): tr|A0A1M4TKS2|A0A1M4TKS2_9RHOB Queuine tRNA-ribosyltran sferase OS=Litoreibacter ascidiaceicola OX=1486859 GN=t gt PE=3 SV=1
MTQRFQFDIHATDGKARTGIISTPRGDIRTPAFMPVGTAATVKAMMPESVRATGADILLGNTYHLMLRPTAERIAKLGGLHKFMNWDRPILTDSGGFQVMSLAELRKLTEEGVTFKSHIDGSKHMLSPERSMEIQKLLGSDIVMCFDECPALPADRARINESMQLSMRWAARSREAFGDRPGHALFGIQQGGLEQDMRAESAAALTKIGFDGYAVGGLAVGEGQEAMFGCLDYAPEQLPQDKPRYLMGVGKPDDIVGAVERGIDMFDCVLPSRSGRTGQAFTRRGVVNVKNARHMDDPRPLDEDCTCPCCSQYSRAYLSHVFRAQEMISSMLVTWHNLHYYQELMAGLRAAIAAGDLAGFVKTFHEARALGDIEPL

SEQ ID NO: 57040 - protein, 376 aa, Litoreibacter halocynthiae
  misc_feature (1)..(376): tr|A0A4R7LI23|A0A4R7LI23_9RHOB Queuine tRNA-ribosyltran sferase OS=Litoreibacter halocynthiae OX=1242689 GN=tgt PE=3 SV=1
MTQRFQFDIHATDGKARTGIISTPRGDIRTPAFMPVGTAATVKAMMPESVRATGADILLGNTYHLMLRPTAERIAKLGGLHKFMNWDRPILTDSGGFQVMSLAELRKLTEEGVTFKSHIDGSKHMLSPERSMEIQKLLGSDIVMCFDECPALPADRARINESMQLSMRWAARSREAFGDRPGHALFGIQQGGLEQDMRAESSAALTKIGFDGYAVGGLAVGEGQEAMFGCLDYAPEQLPQDKPRYLMGVGKPDDIVGAVERGIDMFDCVLPSRSGRTGQAFTRRGVVNVKNARHMDDPRPLDEDCTCPCCTQYSRAYLSHVFRAQEMISSMLVTWHNLHYYQELMAGLRAAIAAGDLAGFVKTFHETRALGDIEPL

SEQ ID NO: 57041 - protein, 384 aa, Litoreibacter janthinus
  misc_feature (1)..(384): tr|A0A1I6HHJ5|A0A1I6HHJ5_9RHOB Queuine tRNA-ribosyltran sferase OS=Litoreibacter janthinus OX=670154 GN=tgt PE= 3 SV=1
MFTPKAAGMTQRFRFDLHAKDGKARTGIISTPRGEIRTPAFMPVGTAATVKAMMPESVRATGADILLGNTYHLMLRPTAERIANLGGLHKFMNWERPILTDSGGFQVMSLADLRKLTEEGVTFKSHIDGSKHMLSPERSMEIQKLLGSDIVMCFDECPALPADRARINESMQLSMRWAARSREAFGDRPGYALFGIQQGGLEQDMRAESAAALTEIGFDGYAVGGLAVGEGQEAMFGCLDYAPDQLPQDKPRYLMGVGKPDDIVGAVERGIDMFDCVLPSRSGRTGQAFTRRGVVNIKNARHMDDPRPLDEACTCPCCSQYSRAYLHHVFKSQEIISSMLVTWHNLHYYQELMGGLRGAIAAGDLAGFVKSFHETRAMGDIEPV

SEQ ID NO: 57042 - protein, 376 aa, Litoreibacter meonggei
  misc_feature (1)..(376): tr|A0A497X5K8|A0A497X5K8_9RHOB Queuine tRNA-ribosyltran sferase OS=Litoreibacter meonggei OX=1049199 GN=tgt PE= 3 SV=1
MTQRFQFDIHAVDGKARTGTISTPRGDIRTPAFMPVGTAATVKAMMPESVRATGADILLGNTYHLMLRPTAERIAKLGGLHKFMNWDRPILTDSGGFQVMSLAELRKLTEEGVTFKSHIDGSKHMLSPERSMEIQKLLGSDIVMCFDECPALPADRERINESMQLSMRWAARSREAFGDRPGHALFGIQQGGLEQDMRAESAAALTKIGFDGYAVGGLAVGEGQEAMFGCLDYAPEQLPQDKPRYLMGVGKPDDIVGAVERGIDMFDCVLPSRSGRTGQAFTRRGVVNVKNARHMDDPRPLDEDCTCPCCSHYSRAYLSHVFRAQEMISSMLVTWHNLHYYQELLAGLRGAIAEGNLADFVKTFHETRALGDIEPV

SEQ ID NO: 57043 - protein, 376 aa, Litoreibacter ponti
  misc_feature (1)..(376): tr|A0A2T6BKE3|A0A2T6BKE3_9RHOB Queuine tRNA-ribosyltran sferase OS=Litoreibacter ponti OX=1510457 GN=tgt PE=3 S V=1
MTQRFEFELHGTDDRARTGTIKTPRGDIRTPAFMPVGTAATVKAMMPESVRATGADILLGNTYHLMLRPTAERIAKLGGLHKFMNWERPILTDSGGFQVMSLADLRKLTEEGVTFRSHIDGSKHMLSPERSMEIQRLLGSDIVMCFDECPALPADRARIKESMELSMRWAARSREAFGDRPGHALFGIQQGGLEQDFREESAEALRAIGFEGYAVGGLAVGEGQEAMFGCLDYAPEQLPVDRPRYLMGVGKPDDIVGAVERGIDMFDCVLPSRSGRTGQAFTRRGVVNIKNARHQEDPRPLDEACSCPCCSNYSRAYLHHVFKAQEMISGMLLTWHNLHYYQELMAGLHGAIAAGDLAAFVRGFHATRADGDIEPV

SEQ ID NO: 57044 - protein, 376 aa, Litoreibacter sp.
  misc_feature (1)..(376): tr|A0A5B8IX63|A0A5B8IX63_9RHOB Queuine tRNA-ribosyltran sferase OS=Litoreibacter sp. LN3S51 OX=2599296 GN=tgt P E=3 SV=1
MARQFQFDLQATDGKARTGVISTTRGDIRTPAFMPVGTAATVKAMLPENVRATGADILLGNTYHLMLRPTAERIDNLGGLHNFMNWERPILTDSGGFQVMSLTSLRKLTEKGVTFKSHVDGSQHHLTPERSMEIQRLLGADIVMCFDECTPFPAEEDVALESMRLSMRWAQRSRDAFGDRPGHALFGIQQGSVFREQREESAENLKSIGFDGYAVGGLAVGEGQEAMFEVLDYAPDMLPADKPRYLMGVGKPDDIVGAVARGIDMMDCVLPSRSGRTGQVFTRRGALNIKNARHQDDPRPIDEHCTCPACRNYSRAYLHHVFRTGEIISSMLLTWHNLHYYQELMTRMRDAISEGRFDQFQRDFHTERAKGDLPPL

SEQ ID NO: 57045 - protein, 372 aa, Litoricolaceae bacterium
  misc_feature (1)..(372): tr|A0A520S3H5|A0A520S3H5_9GAMM Queuine tRNA-ribosyltran sferase OS=Litoricolaceae bacterium OX=2510333 GN=tgt P E=3 SV=1
MTFEVKATDGLARRGEIVFPRGTIQTPTFMPVGTYGTVKGVTTDQVKESGAEILLGNTFHLMLRPGAEQVVALGGLHQMIHWDRPILTDSGGFQVFSLGKMRKITEEGVKFRSPVDGSGVWLDPERSMAVQRQLGSDVVMIFDECTPYPVSREDSSKSMELSRRWAKRSLIAHGDSPSALFGIVQGSMYLDQRDRSLDALVEMGFDGYAIGGLSVGEPKDDIFRVMRHTAPRLPETQPRYVMGVGKPEDLVEGVRRGVDMFDCVMPTRNARNGHLFTDRGVLKLRNAANRTYEGAIDDSCDCYTCQNYSRAYLHHLDKCGEILGATLNTIHNLRHYQRLMEGLRAAIESRQVDRFVLEFYAKRGLEAPDWES

SEQ ID NO: 57046 - protein, 371 aa, Litoricolaceae bacterium
  misc_feature (1)..(371): tr|A0A520S792|A0A520S792_9GAMM Queuine tRNA-ribosyltran sferase OS=Litoricolaceae bacterium OX=2510333 GN=tgt P E=3 SV=1
MTFQVKATDGLARRGEITFPRGSIQTPAFMPVGTYGTVKGVTTDQVIESGAEILLGNTFHLMLRPGADQVAALGGLHSMIHWDRPILTDSGGFQVFSLGNMRKITEEGVKFRSPVDGSEVWLDPERSMAVQRQLGSDIVMIFDECTPYPVTVEESQQSMELSLRWAKRSLEAHADSPSALFGIVQGSMFLDQRDQSLEALVAMGFDGYAIGGLSVGEPKDEMFKVMRHTAPRLPKDQPRYVMGVGKPEDLVEGVRRGVDMFDCVMPTRNARNSHLFIDAGVLKLRNAANRTHEGPIDEACDCYTCKHYSRAYLHHLDKCGEILGATLNTIHNLRHYQRVMQGLRDAIATQTLDQFVQQFYERQGRSVPSFD

SEQ ID NO: 57047 - protein, 383 aa, Litorilinea aerophila
  misc_feature (1)..(383): tr|A0A540VLP0|A0A540VLP0_9CHLR Queuine tRNA-ribosyltran sferase OS=Litorilinea aerophila OX=1204385 GN=tgt PE=3 SV=1
MPASVPASSAGGPPAAQLALPHGALQLPAFLPDATLGVVRAVDSVDLCHCGVQALVMNTFHLMQHPGSSTVQALGGLHQMCAWPRPIVTDSGGFQAYSLIRQNARYGSLTDNGILFRPEGSRRKLQLTPEKCVQLQLSYGADVVMCLDDCTHVDDPLESQEESVRRTILWARRCKAEFQRLLDQKQPAQRPLLFAVIQGGGSRELRRRCAEALLEMGFDGYGYGGWPLDSQGNLLEELLAYTRSLIPADYPMHALGVGHPRSIAACVRMGYSLFDSALPTRDARHGRLYVWEGDGDDSDGHGAAGGDRFRFLYINDARHIKDGRPLSATCDCLTCTHYARGYLHHLFKQGDTTYVRLATIHNLRFMARLMAHLRESHQSPAAP

SEQ ID NO: 57048 - protein, 404 aa, Litorilinea aerophila
  misc_feature (1)..(404): tr|A0A540VBS7|A0A540VBS7_9CHLR Queuine tRNA-ribosyltran sferase OS=Litorilinea aerophila OX=1204385 GN=tgt PE=3 SV=1
MVQTPSHPESGPPRSANSGAPFSFVLHRTDGAARLATYHTPHGAIQMPAFAPVGTQANVKTLEPRDLHELGCQIILANTYHLYLRPGHRLIQKLGGLHRFMAWDGPILTDSGGYQVFSLADQRQLDDDGVTFRSHIDGSLHRFTPEMVMEIEQALGPDIAMVLDECPDPLDRAYNRQALDRTHRWAERCKASHTRPDQALFGIVQGGIFPDLRQESAAFLTQLDFHGYAIGGLAVGETKEQMYATLDETCPALPQEKPRYLMGVGAPEDIVEAVARGVDLFDCVLPTRIARNGSLLTPEGRINLRNARFAEDPRPVQEDCGCYTCRTFSRAYLRHLYKAGEISALRLGTIHNVYFLMELMRQIRAAIAAGTFADFRAAFLERYQISNQQVRHEQRQRRIQAMRG

SEQ ID NO: 57049 - protein, 385 aa, Litorilituus sediminis
  misc_feature (1)..(385): tr|A0A4P6P3N9|A0A4P6P3N9_9GAMM Queuine tRNA-ribosyltran sferase OS=Litorilituus sediminis OX=718192 GN=tgt PE=3 SV=1
MTETVKNRMKYELIKKDGKARRGRLIFDRGVVETPAFMPVGTYGTVKGMKTDEVEATGADIILGNTFHLMLRPGTDIIEQHGGLHGFMNWDKPILTDSGGFQVFSLGEMRKITEEGVLFSSPVNGEKIMLTPERSMEVQRSLNSDIVMIFDECTPYPATHEESKESMELSLRWAQRSKDAHGDSMNALFGIVQGGMYEDLREISIKGLKDIEFDGYAIGGLSVGEPKEDMIRILDHTAPLIPENKPRYLMGVGKPEDLVEGVRRGIDMFDCVMPTRNARNGHLFVNDGVIKIRNASHKTDTGPLDPTCDCYTCKNYSRAYLHHLDKCKEILGSQLNTLHNLHFYQRVMQGLRDAIEQGKLDDFVEEFYALRGLPVPPLAEGSKQV

SEQ ID NO: 57050 - protein, 385 aa, Litorilituus sp.
  misc_feature (1)..(385): tr|A0A502L885|A0A502L885_9GAMM Queuine tRNA-ribosyltran sferase OS=Litorilituus sp. RZ04 OX=2491017 GN=tgt PE=3 SV=1
MTVTVKNRMKYELITKDGKARRGRLIFDRGVVETPAFMPVGTYGTVKGMKTDEVEATGADIILGNTFHLMLRPGTDIIEQHGGLHGFMNWDKPILTDSGGFQVFSLGEMRKITEEGVRFSSPVNGEKIMLTPERSMEVQRSLNSDIVMIFDECTPYPATHKEAKDSMELSLRWAQRSKDAHGDSLNALFGIIQGGMYEDLREVSVKGLKAIEFDGYAIGGLSVGEPKEDMIRILDHTAPLIPENKPRYLMGVGKPEDLVEGVRRGIDMFDCVMPTRNARNGHLFVNNGVIKIRNASHKTDTGPLDPTCDCYTCKNYSRAYLHHLDKCKEILGSQLNTLHNLHFYQRVMQGLRDAIEQGKLDDFVEEFYALRGLPVPPLAEGSEQV

SEQ ID NO: 57051 - protein, 376 aa, Litorimicrobium taeanense
  misc_feature (1)..(376): tr|A0A1H9KSZ0|A0A1H9KSZ0_9RHOB Queuine tRNA-ribosyltran sferase OS=Litorimicrobium taeanense OX=657014 GN=tgt P E=3 SV=1
MTARIEFRLNATDGKARTGVIATPRGDIRTPAFMPVGTAATVKAMLPESVAATGADILLGNTYHLMLRPTAERIDALGGLHKFMNWQKPILTDSGGFQVMSLSGLRKMNEEGVTFKSHIDGSRHTLTPERSMEIQRLLGSDIVMCFDECTPFPAEEKVALESMRMSMRWAQRSRDAFGDRPGHALFGIQQGSIFRDQRAESAEKLSDIGFDGYAVGGLAVGEGQEMMFDVLDYAPDMLPQDKPRYLMGVGKPDDIVGAVARGIDMMDCVLPSRSGRTGQVFTRHGVVNIKNARHQDDPRPLDEACTCPACRSYSRAYLHHVFRAQEMISGMLLTWHNLHYYQELMQGMRDAITAGTFEAFQAAFHAQRAEGDIEPM

SEQ ID NO: 57052 - protein, 374 aa, Litorimonas taeanensis
  misc_feature (1)..(374): tr|A0A420WKU0|A0A420WKU0_9RHOB Queuine tRNA-ribosyltran sferase OS=Litorimonas taeanensis OX=568099 GN=tgt PE=3 SV=1
MAVFPFDIHAREGKARTGVLRTPRGDIRTPAFMPVGTAGTVKGVYMDQVKGTGADIILGNTYHLMLRPGAERVKKLGGLHKFGGWSGPILTDSGGFQVWSLSKLRKMSEAGVEFQSHLDGSRHMLSPERSIEIQADLLGADISMQLDECTAFPSTHEQAKSSMELSLRWGRRSLEAFGERESQTLFAIVQGSTFPDLREKSAISSRTEGAAGGYGGYAIGGLAVGEGHEMMCEVLDFTTLHLPEDRPRYLMGVGKPIDLVEAVARGVDMFDCVIPTRSGRHGQVWTDTGPYNIKRAEFSEDESPLDETISCEASNAYSKAYVHHLVRSKEMLGGMILSWHNIAYFEDLMARIRSAIFEQRFEAFVEEFRKNWRG

SEQ ID NO: 57053 - protein, 376 aa, Loktanella atrilutea
  misc_feature (1)..(376): tr|A0A1M4UV90|A0A1M4UV90_9RHOB Queuine tRNA-ribosyltran sferase OS=Loktanella atrilutea OX=366533 GN=tgt PE=3 S V=1
MTARFTFDLTATDGMARTGVIHTPRGDIRTPAFMPVGTAATVKAMMPESVAATGADILLGNTYHLMLRPTAERIARLGGLHRFMNWDKPILTDSGGFQVMSLADLRKLTEAGVTFKSHIDGSKHVLSPERSMEIQKLLGSDIVMCFDECPALPADRDRIAESMRLSMRWAQRSRDAFGDRPGHALFGIQQGGLERDFREESAKALTRIGFDGYAVGGLAVGEGQAAMFGCLDFATDMLPRDKPRYLMGVGKPDDIVGAVKRGIDMMDCVLPSRSGRTGQGFTRHGVVNIKNARHADDPRPLDEACTCPACRNYSRAYLHHVFRAQEMISGMLLTWHNLHYFQQIMGEMRDAIAQNRFAAWESGFHAMRAEGDIAPL

SEQ ID NO: 57054 - protein, 380 aa, Loktanella fryxellensis
  misc_feature (1)..(380): tr|A0A1H7YXM9|A0A1H7YXM9_9RHOB Queuine tRNA-ribosyltran sferase OS=Loktanella fryxellensis OX=245187 GN=tgt PE= 3 SV=1
MTATPTDRFAFDLHATDGMARTGVIHTPRGDIRTPAFMPVGTAATVKAMLPESVAATGADILLGNTYHLMLRPTAERIAHLGGLHRFMNWSGPILTDSGGFQVMSLADLRKLTEAGVSFKSHIDGSKHMLSPERSMEIQKLLGSDIVMCFDECPALPADRDRIATSMQLSMRWAQRSRDAFGDRPGHALFGIQQGGLEQDFRAESAQALTDIGFDGYAVGGLAVGEGQEAMFGCLDHATGVLPVDKPRYLMGVGKPDDIVGAVKRGIDMMDCVLPSRSGRTGQAFTRRGVVNLKNARHADDPRPLDEGCTCPACSNYSRAYLHHVFRAQEMILGMLLTWHNLHYYQTLMQGMRDAIAAGRFVAWEADFHAVRAQGDIEPV

SEQ ID NO: 57055 - protein, 376 aa, Loktanella salsilacus
  misc_feature (1)..(376): tr|A0A1I4BQP5|A0A1I4BQP5_9RHOB Queuine tRNA-ribosyltran sferase OS=Loktanella salsilacus OX=195913 GN=tgt PE=3 SV=1
MTTRFSFDLNATDGAARTGVMHTPRGDIRTPAFMPVGTAATVKAMMPESVAATGADILLGNTYHLMLRPTAERIANLGGLHKFMNWDKPILTDSGGFQVMSLADLRKLTENGVTFKSHIDGSKHMLSPERSMEIQKLLGSDIVMCFDECPALPADRDRIAESMRLSMRWAQRSRDAFGDRPGHALFGIQQGGLEQDFREESAKALINVGFDGYAVGGLAVGEGQEAMFGCLDFATDMLPTDKPRYLMGVGKPDDIVGAVKRGIDMMDCVLPSRSGRTGQGFTRHGVVNMKNARHADDPRPLDEACTCPACRNYSRAYLHHVFKSQEMISGMLLTWHNLHYFQQIMGEMRDAIAAGTFAAWEAGFHAGRAQGDIDPL

SEQ ID NO: 57056 - protein, 375 aa, Loktanella sp.
  misc_feature (1)..(375): tr|A0A4Q3Y8R1|A0A4Q3Y8R1_9RHOB Queuine tRNA-ribosyltran sferase OS=Loktanella sp. IMCC34160 OX=2510646 GN=tgt P E=3 SV=1
MTKFSFDLKATDGKARTGVIHTPRGDIRTPAFMPVGTAATVKAMMPESVAATGADILLGNTYHLMLRPTAERIDRLGGLHRFMNWNKPILTDSGGFQVMSLAELRKLTEKGVTFRSHIDGSRHEITPERSMEIQKLLGSDIVMAFDECPALPADRDRIASSMRLSMRWAQRSRDAFGDRPGHALFGIQQGGLEEDLRAESAEALTRIGFDGYAIGGLAVGEGQDAMFAALDYAPDQLPVDKPRYLMGVGKPGDIVGAVKRGVDMMDCVLPSRSGRTGQAWTRRGQVNIKNARHADDPRPLDEHCTCPACTNYSRAYLHHVYRSQEMISGMLLTWHNLHYFQEIMQDMREAIAEGRFAAWEAAFHAQRAEGDIDPV

SEQ ID NO: 57057 - protein, 376 aa, Loktanella sp.
  misc_feature (1)..(376): tr|A0A0F4RMG4|A0A0F4RMG4_9RHOB Queuine tRNA-ribosyltran sferase OS=Loktanella sp. S4079 OX=579483 GN=tgt PE=3 S V=1
MTKRFSFTLSATDGKARTGVISTPRGDIRTPAFMPVGTAATVKAMMPESVAATGADILLGNTYHLMLRPTAERIDRLGGLHKFMNWDKPILTDSGGFQVMSLAELRKLTEKGVTFKSHIDGSRHELTPERSMEIQRLLGSDIVMCFDECPALPADRDRIAESMRLSMRWAQRSRDAFGDRPGHALFGIQQGGLEEDLRAESAQALRDIEFDGYAVGGLAVGEGQEAMFSVLDFAPDQLPVDKPRYLMGVGKPDDIVGAVKRGIDMMDCVLPSRSGRTGQVFTRRGTINIKNARHADDPRPLDENCTCPACSKYSRAYLHHVFRAQEMISGMLLTWHNLHYFQEIMQGMRDAIAANTFDAWEADFQAVRAQGDIEPL

SEQ ID NO: 57058 - protein, 384 aa, Lonepinella koalarum
  misc_feature (1)..(384): tr|A0A4R1KTD7|A0A4R1KTD7_9PAST Queuine tRNA-ribosyltran sferase OS=Lonepinella koalarum OX=53417 GN=tgt PE=3 SV =1
MKFNLKKTNGTARRGEMIFTRPQGDFTVQTPAFMPVGTYGTVKGMTPEEVRATGAEILLGNTFHLWLRPGQEVMRKHGDLHDFMQWHRPILTDSGGFQVFSLGKLRKIKEEGVHFQNPISGEKIFLSPEKSMEIQYDLGSDIVMIFDECTPYPATFDYAKNSMEMSLRWAKRSRQRFDELENQNALFGIVQGGTFEELRKISIEGLVNIGFDGYAVGGLAVGEPKQEMHRILEFVNPLLPQDKPRYLMGVGKPEDLVEGVRRGIDMFDCVMPTRNARNGHLFVSDGIVKIRNAKYRDDTSTLDPECDCYTCKHYTKSYLYHLDKCGEILGARLNTIHNLRYYQRLMEQIRTAIEQDRFEDFVIEFYAKIGKPVPPLQQKEEKHD

SEQ ID NO: 57059 - protein, 376 aa, Longibacter salinarum
  misc_feature (1)..(376): tr|A0A2A8CVN7|A0A2A8CVN7_9BACT Queuine tRNA-ribosyltran sferase OS=Longibacter salinarum OX=1850348 GN=tgt PE=3 SV=1
MQFHLDYTDAATDARVGRIVTDHGVIETPTFMPVGTLGSVKAVEPRELSRDIDADIILGNTYHLFLRPGTDVLETAGGLHQFMNWDGPILTDSGGFQVFSLGHRATLSEEGVEFQNHIDGDKHLFTPETVIDIQRSIGSDIMMVLDECPAADVTKQYARTSNELTLRWAERCKKHFDATDPLYGHEQALFAIVQGVVYPEVRRESARALVDMDFPGYAIGGLSVGETHEEMYDMVEVVAPLLPTDKPRYLMGVGTPENLLENVARGIDTFDCVMPTRNARNGTIFTTQGRINIKNAQFTQDHTPIDPGLENPVSQNFTKSYLRHLQKTGEILGLQLASIQNLAFYLWLMKTAREKIASGDFKSWKDDIIPQITHRW

SEQ ID NO: 57060 - protein, 377 aa, Longibaculum muris
  misc_feature (1)..(377): tr|A0A4R3YZ31|A0A4R3YZ31_9FIRM Queuine tRNA-ribosyltran sferase OS=Longibaculum muris OX=1796628 GN=tgt PE=3 SV =1
MEGFWYELKHVCKQSGARYGILHTPHGDVETPMFMPVGTLATVKGISPEQLKEMNSQVILANTYHLWLRPGEDVVKQAGGLHKFMNYDGPILTDSGGFQVFSLGKTRKIEEEGVTFKSIVDGKKLFLSPEKAIQIQNDLGADIIMSFDECAPYPCTHDYMKQSVERTLRWAKRGKDAHQRDDQALFGIVQGGEYEDLRELSAKELVKMDFPGYSIGGTSVGEPKDVMYKMIDDAIKWLPEDKPRYLMGVGNPIDLIEGAIRGIDMFDCVLPTRVARHGALMTHSGRMNINNEKYKYDFTPVDDKCHCYTCRNYTRAYLRHLHKCDEIFGKSLLSIHNVAFLLQLSEDIRTAIKEDRLLDFKEEFLNSYGRDVYERAF

SEQ ID NO: 57061 - protein, 403 aa, Longicatena caecimuris
  misc_feature (1)..(403): tr|A0A4V2VK23|A0A4V2VK23_9FIRM Queuine tRNA-ribosyltran sferase OS=Longicatena caecimuris OX=1796635 GN=EDD61_1 1427 PE=3 SV=1
MTEYKNNNTFSFEIVKKIPGKLGRAGIIHTPHGDIKTPAFMCVGTKGEVRFLSMQDLHAIQAQAMLSNGYHLRNVSEEIQAQKGLAAWSGWNGPTLTDSGGFQVMSLGSGLGKVVSMDREKEVINTDPKDRLAIVSEDGVQFHDPFTDQDDFIGPEESMQIQCRIGADIHMAYDELTSLADSYEYNVEALARTERWALRSLAEHKKHRDDLGYRQSLYGVLQGGRWEDLRRSTAQKFAKMDFDGYGLGGAFLKESLGEILTWCCEELPENKPRHLLGLSHPDDILIGVEMGADTFDCVAPTREARHGRIYTTHGYYSLSKFADSEELLEQGCDCPVCKAGWTRGQLRALMKSEKQEDKHTYYNLASMHNLRFIIRLTEQARQAILDGTYAEFKENFLKNYYHR

SEQ ID NO: 57062 - protein, 384 aa, Longilinea arvoryzae
  misc_feature (1)..(384): tr|A0A0S7BI06|A0A0S7BI06_9CHLR Queuine tRNA-ribosyltran sferase OS=Longilinea arvoryzae OX=360412 GN=tgt PE=3 S V=1
MSETQSFQFDLLARDGNARAGVFHTPHGDIQTPIFAPVGTQATVKAVTPAQLEEIGANLVLSNTYHLYLRPGADLVAEMGGLHEFMQWPHPMLTDSGGFQVFSLADMRKIDADGVTFKSHIDGSTHRFTPESSIAVQEKLGADIIMSFDECAPPYDRKYNESAMARTHAWAERCLRAKTRPDQALFGIVQGGIFPDLRTQSAEFISSLGFPGHAIGGLSVGETKEEMNTTLQLLNDVLPKDKPRYLMGVGSPEDLINGIRRGVDIFDCVLPTRLARHTAAMTFTGRINLMNATNAHDHRPIDEGCGCYTCQHFTRAYLRHLVVSKEMLAATLISIHNLYTLLELVRRSRKAILNGTFDQFADDFLEHYQSTNAVSTPTTNGANA

SEQ ID NO: 57063 - protein, 369 aa, Longilinea arvoryzae
  misc_feature (1)..(369): tr|A0A0S7BCP6|A0A0S7BCP6_9CHLR Queuine tRNA-ribosyltran sferase OS=Longilinea arvoryzae OX=360412 GN=LARV_03317 PE=3 SV=1
MSTPEFSKSLKLNHGTLEFPVYMPDATFGVVRTVDSNDLHSAGIQALVMNTFHLMQRPGSSTIQSLGGLHRMSAWDRPIITDSGGFQAYSLIRQNPRFGRMDEKGITFQPEGSDRKFQLSPEKCIQLQVAYGSDVVICLDDCTHVDASEEEQHKSVDRTISWAKRCKDEFKRLMRQKKLDEDKRPLIFGVIQGGGIPALRKQCADALLEIGFDGFGFGGWPLDGDGNLLTDILAYTRSLVPPELPMHALGIGHPYNVVTCWDLGYGIFDCAMPTRDARHGRLYTFANPSGADGGLNGDWLRYLYINDERHIRSDQPISPYCTCPVCRNYSAGYLHHLFKLNDSLFLRLSTLHNLSFMAQLTDRIRLRPQ

SEQ ID NO: 57064 - protein, 376 aa, Longimonas halophila
  misc_feature (1)..(376): tr|A0A2H3P887|A0A2H3P887_9BACT Queuine tRNA-ribosyltran sferase OS=Longimonas halophila OX=1469170 GN=tgt PE=3 SV=1
MTFTLAHTDATSDARAASFETAHGTVRTPAFMPVGTLGSVKAVPPRALHEDVQADIILGNTYHLYLRPGTDVIEAAGGLQRFSQWNGPILTDSGGYQVFSLADRCTLTEEGAEFRSHIDGSKHLFTPESVVDTQRALGSDIMMVLDECPAADVSKAYARESNELTLRWAERARLHYEKTTSPHGHEQALFGIVQGVTYPEVRRESARALVDLDFPGYAIGGLSVGESHEDMYDMVEVVTPLLPAHKPRYLMGVGTPENLLENVARGVDMFDCVMPTRNGRNGTLFTTQGRMNIKNAQFTNDHTPIDPGLEAYVSQTFTKAYLRHLQKSNEILGLQIASQQNLAFYCWLMREARQAILDDRFMAWKDAILPQITRRW

SEQ ID NO: 57065 - protein, 376 aa, Lonsdalea britannica
  misc_feature (1)..(376): tr|A0A1X3RYY3|A0A1X3RYY3_9GAMM Queuine tRNA-ribosyltran sferase OS=Lonsdalea britannica OX=1082704 GN=tgt PE=3 SV=1
MKYELFTTDGRARRGRLVFERGVVETPAFMPVGTYGTVKGMTPEEVKETGAQIILGNTFHLWLRPGQEIMKLHGDLHDFMQWQGPILTDSGGFQVFSLGDIRKITEEGVHFRNPINGDAIFLSPEKSMEIQNDLGSDVVMIFDECTPYPADWDYAKRSMEMSLRWAKRCRQRFDELGNGNALFGIIQGSVYEDLRDVSVKGLVDIGFDGYAVGGLAVGEPKADMHRILEHVCPQLPEDKPRYLMGVGKPEDLVEGVRRGVDMFDCVMPTRNARNGHLFVTDGVVKIRNAKHKDDTAPLDAECDCYTCRHYSRAYLHHLDRCNEILGARLNTIHNLRYYQRLMAGLRQAIEDGKLDDFVAAFYQRLGKPVPPAIDAV

SEQ ID NO: 57066 - protein, 376 aa, Lonsdalea iberica
  misc_feature (1)..(376): tr|A0A1X3RX45|A0A1X3RX45_9GAMM Queuine tRNA-ribosyltran sferase OS=Lonsdalea iberica OX=1082703 GN=tgt PE=3 SV= 1
MKYELFTTDGRARRGRLVFERGVVETPAFMPVGTYGTVKGMTPEEVKETGAQIILGNTFHLWLRPGQEIMKLHGDLHDFMQWQGPILTDSGGFQVFSLGDIRKITEEGVHFRNPINGDAIFLSPEKSMEIQHDLGSDVVMIFDECTPYPADWDYAKRSMEMSLRWAKRCRQRFDELGNGNALFGIVQGSVYEDLRDVSVKGLVDIGFDGYAVGGLAVGEPKADMHRILEHVCPQLPEDKPRYLMGVGKPEDLVEGVRRGVDMFDCVMPTRNARNGHLFVTDGVVKIRNAKHKDDTAPLDAECDCYTCRHYSRAYLHHLDRCNEILGARLNTIHNLRYYQRLMAGLRQAIEDGELDDFVAEFYQRLGKPVPPAIDAV

SEQ ID NO: 57067 - protein, 376 aa, Lonsdalea populi
  misc_feature (1)..(376): tr|A0A3N0UHX0|A0A3N0UHX0_9GAMM Queuine tRNA-ribosyltran sferase OS=Lonsdalea populi OX=1172565 GN=tgt PE=3 SV=1
MKYELFTTDGRARRGRLVFERGVVETPAFMPVGTYGTVKGMTPEEVKETGAQIILGNTFHLWLRPGQEIMKLHGDLHDFMQWQGPILTDSGGFQVFSLGDIRKITEEGVHFRNPINGDAIFLSPEKSMEIQHDLGSDVVMIFDECTPYPADWDYAKRSMEMSLRWAKRCRRRFDELGNGNALFGIVQGSVYEDLRDVSVKGLVDIGFDGYAVGGLAVGEPKADMHRILEHVCPQLPEDKPRYLMGVGKPEDLVEGVRRGVDMFDCVMPTRNARNGHLFVTDGVVKIRNAKHKDDTAPLDAECDCYTCRHYSRAYLHHLDRCNEILGARLNTIHNLRYYQRLMAGLRQAIEDGKLDDFVAAFYQRLGKPVPPAIDAV

SEQ ID NO: 57068 - protein, 376 aa, Lonsdalea quercina
  misc_feature (1)..(376): tr|A0A1H3WBD3|A0A1H3WBD3_9GAMM Queuine tRNA-ribosyltran sferase OS=Lonsdalea quercina OX=71657 GN=tgt PE=3 SV=1
MKYELFTTDGRARRGRLVFERGVVETPAFMPVGTYGTVKGMTPEEVKETGAQIILGNTFHLWLRPGQEIMKLHGDLHDFMHWQGPILTDSGGFQVFSLGDIRKITEEGVHFRNPINGDAIFLSPEKSMEIQHDLGSDVVMIFDECTPYPADWDYAKRSMEMSLRWAKRCRQRFDELGNGNALFGIVQGSVYEDLRDVSVKGLVDIGFDGYAVGGLAVGEPKADMHRILEHVCPQLPEDKPRYLMGVGKPEDLVEGVRRGIDMFDCVMPTRNARNGHLFVTDGVVKIRNAKHKDDTAPLDAECDCYTCRHYSRAYLHHLDRCNEILGARLNTIHNLRYYQRLMAGLRQAIEDGKLDDFVTAFYQRLGKPVPPAIDAA

SEQ ID NO: 57069 - protein, 370 aa, Lucifera butyrica
  misc_feature (1)..(370): tr|A0A498R4K4|A0A498R4K4_9FIRM Queuine tRNA-ribosyltran sferase OS=Lucifera butyrica OX=1351585 GN=tgt PE=3 SV= 1
MAVSFELIKQCSKTGARAGKLYTPHGVFETPIFMPVGTQATVKAMTPDELKAMGAGIILSNTYHLFLRPGHELVAEAGGLHGFMHWDRGILTDSGGFQVFSLGSLRKISEEGVAFRSHIDGSKQFLSPEKATEVQMALGADIIMAFDECVPYPAEYDYARQSTERTTRWAERCKRAHARKDQALFGIIQGGMYKELRTASVRDLVSLDFPGYAIGGLSVGEPKPLMYEMLEHTVPQLPARKPRYLMGVGTPDCLVEGVMYGIDMFDCVFPTRVARNGTAMTASGRLVVKNAEFARDFRPLDMDCDCYTCRNFSRAYIRHLLKSEEILGLRLTTIHNLHFLLRFMGKMRQAIMEDRFPAFRQEFWDKYQGH

SEQ ID NO: 57070 - protein, 383 aa, Lujinxingia litoralis
  misc_feature (1)..(383): tr|A0A328CBY2|A0A328CBY2_9DELT Queuine tRNA-ribosyltran sferase OS=Lujinxingia litoralis OX=2211119 GN=tgt PE=3 SV=1
MMTTIQNDVRCDTFAFKEVARDGAARAGELTLTHGTVQTPIFMPVGTVGTVKAMRPDELVDEVKAQIILGNTYHLYLRPGLEVIKLHGGLHKMMGWNLPILTDSGGYQVFSLKELRKIREEGVEFQDHISGARHLFTPEKVIEIQETLGSDIMMAFDECPPAGAEERYMQESMARTTRWEKRCLEARTRRDCALFGIGQGGTSERLRRQHLEELGDLPFEGMAIGGLSVGEETQAMYDTVEFTTPMMPDHKPKYLMGVGKPQDLVECIARGVDMFDCVIPTRNARNGHCFTSRGDVVVRNAVHRDDLRPLDPDCDCYTCQNFSRSYLRHLLKSREMLGPQLCTLHNLRYFLRLVGQAREAILEGRFEAFRKRFHQLQAEGGSR

SEQ ID NO: 57071 - protein, 339 aa, Luminiphilus syltensis
  misc_feature (1)..(339): tr|B8KXC4|B8KXC4_9GAMM Queuine tRNA-ribosyltransferase OS=Luminiphilus syltensis NOR5-1B OX=565045 GN=tgt PE=3 SV=1
MPVGTYGTVKGMLPRDITAIGAQIILGNTFHLWLRPGTDIIAQHGDLHDFMAWQGPILTDSGGFQVFSLGAMRKVAEAGVTFKSPVNGDTVFLDPETSMQIQAKLGSDIVMIFDECTPYPATFEQARESMALSLRWAERSRIGHGDNPAALFGIVQGGMYDDLRRESLAGLVDIGFDGYAIGGLSVGEPKEAMMGVLDGIADDLPVDKPRYLMGVGTPADLLESVRRGIDMFDCVMPTRNARNGHLFTSRGVIKLRNARHKTDPEPLDPACDCYTCNNFSRAYLHHLDRCNEILGSQLCTLHNLRFYQNHMAAIRAAIDAGQFDAFADNFYKSQDNELP

SEQ ID NO: 57072 - protein, 376 aa, Lunatimonas lonarensis
  misc_feature (1)..(376): tr|R7ZT76|R7ZT76_9BACT Queuine tRNA-ribosyltransferase OS=Lunatimonas lonarensis OX=1232681 GN=tgt PE=3 SV=1
MNFTLHHKDSQTKARVGSLETEHGVIQTPIFMPVGTAGSVKAVHQRELKEDVKAQIILGNTYHLFLRPGLSIIEQAGGLHKFNGWDRPILTDSGGYQVFSLAENRKITEEGVVFKSHIDGSKQQFTPENVMDIQRTIGADIIMAFDECTPYPCEWPYAKKSMDLTHRWLKRCIKRFDETSGRYGYEQHLFPIVQGSVYKDLRTESAEFVAEQGRVGNAIGGLSVGEPAELMYEMTEWVTAILPEDRPRYLMGVGTPANVLECIALGVDMFDCVMPTRNARNGMLFTTEGIINIRNEKWKDDFSAIDLGFENEVSNFYTKAYLRHLTIAKEMLAAQIASIHNLSFYLWLVGQAREHIQSGDFPQWKRHMVEKVSRRR

SEQ ID NO: 57073 - protein, 377 aa, Luteibacter pinisoli
  misc_feature (1)..(377): tr|A0A4Y5Z5J7|A0A4Y5Z5J7_9GAMM Queuine tRNA-ribosyltran sferase OS=Luteibacter pinisoli OX=2589080 GN=tgt PE=3 SV=1
MSNLPFELLATDGAARRGRLRFGRGTVETPAFMPVGTYGSVKAMTPRDVLDTGAEIILGNTFHLFLRPGLDIVGKFGGLHKFIGWNKPILTDSGGFQVFSLAHKRKITEEGVTFASPVDGSKVFLSPEVSMEIQTVLDSDVAMIFDECTPYPATEKVASDSMELSLRWAERSRRAFNDLKNPNNLFGIVQGSTFENLRRRSVEQLVDIGFDGYAVGGLAVGEPEAERNHTLDFTLPLLPKDRPRYLMGVGRPEDIVEAVRRGIDMFDCVMPTRNARNGFLFTDEGTLRIRNAKFATDTRVIEEGCDCYACANGFSRAYLRHLDRCNEILGSQLATMHNLRHYQRLMSGLRGAIEAGTLDDFVAAFYAARRKAEVDGQ

SEQ ID NO: 57074 - protein, 376 aa, Luteibacter rhizovicinus
  misc_feature (1)..(376): tr|A0A0G9H0I8|A0A0G9H0I8_9GAMM Queuine tRNA-ribosyltran sferase OS=Luteibacter rhizovicinus DSM 16549 OX=144076 3 GN=tgt PE=3 SV=1
MTQLPFDLLATDGAARRGRLRFGRGTVETPAFMPVGTYGSVKAMTPRDVLDTGAEIILGNTFHLFLRPGLEIVGEFGGLHKFIGWDKPILTDSGGFQVFSLAHKRKITEEGVTFASPVDGSKVFLSPEESMRIQKVLDSDVAMIFDECTPYPATEKVASDSMELSLRWAERSRQAFDDLKNPNALFGIVQGSTYENLRHRSAERLIEIGFDGYAVGGLAVGEPEAERNHTLDLTLHVLPKDRPRYLMGVGRPEDIVEAVRRGIDMFDCVMPTRNARNGFLFTREGTLRIRNAKFSMDTRVIEEDCDCYACANGFSRAYLRHLDRCNEILGSQLATMHNLRHYQRLMAGLRGAIETGTLDDFVADFYAARRKAEVDG

SEQ ID NO: 57075 - protein, 376 aa, Luteibacter rhizovicinus
  misc_feature (1)..(376): tr|A0A4R3YNX3|A0A4R3YNX3_9GAMM Queuine tRNA-ribosyltran sferase OS=Luteibacter rhizovicinus OX=242606 GN=tgt PE =3 SV=1
MTQLAFDLLATDGAARRGRVRFERGTVETPAFMPVGTYGSVKAMTPRDINDIGAEIILGNTFHLFLRPGLDIVGEFGGLHKFIGWEKPILTDSGGFQVFSLAHKRKITEEGVTFASPVDGSKVFLSPEESMRIQKVLDSDIAMIFDECTPYPATEKVAGDSMELSLRWAERSRQAFDDLKNPNSLFGIVQGSTYEKLRHRSAERLVEIGFDGYAIGGLAVGEPEAERNHTLDLTLPMLPKDRPRYLMGVGRPEDIVEAVRRGIDMFDCVMPTRNARNGFLFTASGTLRIRNAKFAMDTRVIEEGCDCYTCASGFSRAYLRHLDRCNEILGAQLNTMHNLRHYQRLMAGLRDAIERGVLEDFVAAFYAARHKAEVDG

SEQ ID NO: 57076 - protein, 376 aa, Luteibacter sp.
  misc_feature (1)..(376): tr|A0A1K1QFA5|A0A1K1QFA5_9GAMM Queuine tRNA-ribosyltran sferase OS=Luteibacter sp. UNCMF366Tsu5.1 OX=1502758 GN =tgt PE=3 SV=1
MTQLPFELLATDGAARRGRLRFGRGTVETPAFMPVGTYGSVKAMTPRDVLETGAEIILGNTFHLFLRPGLDIVGEFGGLHRFIGWDKPILTDSGGFQVFSLAHKRKITEEGVTFASPVDGSKVFLSPEESMRIQKVLDSDIAMIFDECTPYPATDKVASDSMELSLRWAERSRRAFDDLRNPNALFGIVQGSTFEHLRRRSAERLIDIGFDGYAVGGLAVGEPEAERNHTLDFTLPMLPKDRPRYLMGVGRPEDIVEAVRRGIDMFDCVMPTRNARNGFLFTAEGTLRIRNAKFAADTRVIEEGCDCYACANGFSRAYLRHLDRCNEILGSQLATMHNLRHYQRLMAGLRGAIEAGGLEDFVAAFYAARRKAEVDG

SEQ ID NO: 57077 - protein, 376 aa, Luteibacter sp.
  misc_feature (1)..(376): tr|A0A1I0PTH2|A0A1I0PTH2_9GAMM Queuine tRNA-ribosyltran sferase OS=Luteibacter sp. 329MFSha OX=1798239 GN=tgt P E=3 SV=1
MTQLPFDLLATDGAARRGRLRFGRGTVETPAFMPVGTYGSVKAMTPRDVLDTGAEIILGNTFHLFLRPGLEIVGEFGGLHKFIGWDKPILTDSGGFQVFSLAHKRKITEEGVTFASPVDGSKVFLSPEESMRIQKVLDSDVAMIFDECTPYPATERVASDSMELSLRWAERSRRAFDDLKNPNALFGIVQGSTFENLRRRSAERLIEIGFDGYAVGGLAVGEPEAERNHTLDFTLPMLPKDRPRYLMGVGRPEDIVEAVRRGIDMFDCVMPTRNARNGFLFTAAGTLRIRNAKFATDTRVIEEGCDCYACANGFSRAYLRHLDRCNEILGSQLATMHNLRHYQRLMAGLRGAIEAGGLEDFVAAFYEARRKGATDG

SEQ ID NO: 57078 - protein, 376 aa, Luteibacter yeojuensis
  misc_feature (1)..(376): tr|A0A0F3KHS9|A0A0F3KHS9_9GAMM Queuine tRNA-ribosyltran sferase OS=Luteibacter yeojuensis OX=345309 GN=tgt PE=3 SV=1
MSTLPFELLATDGAARRGRLRFGRGTVETPAFMPVGTYGSVKAMTPRDVRDTGAEIILGNTFHLFLRPGLDIVGAFGGLHKFIGWDRPILTDSGGFQVFSLAHKRKITEEGVTFASPVDGSKVFLSPEVSMQIQTVLDSDVAMIFDECTPYPATEKVASDSMELSLRWAERSRRAFDDLKNPNNLFGIVQGSTFENLRRRSAAQLIDIGFDGYAVGGLAVGEPEAERNHTLDFTLPLLPPDRPRYLMGVGRPEDIVEAVRRGIDMFDCVMPTRNARNGFLFTAEGTLRIRNAKFATDTRVIEEGCDCYACANGFSRAYLRHLDRCNEILGSQLATMHNLRHYQRLMAGLRGAIEAGTLDDFVAAFYEAREKGKREA

SEQ ID NO: 57079 - protein, 376 aa, Luteibacter yeojuensis
  misc_feature (1)..(376): tr|A0A561H135|A0A561H135_9GAMM Queuine tRNA-ribosyltran sferase OS=Luteibacter yeojuensis OX=345309 GN=tgt PE=3 SV=1
MTQLPFDLLATDGAARRGRLRFGRGTVETPAFMPVGTYGSVKAMTPRDVLDIGAEIILGNTFHLFLRPGLEIVGEFGGLHKFIGWNKPILTDSGGFQVFSLAHKRKITEEGVTFASPVDGSKVFLSPEESMRIQKVLDSDIAMIFDECTPYPATEKVASDSMELSLRWAERSRRAFDDLKNPNALFGIVQGSTFENLRHRSAERLVEIGFDGYAVGGLAVGEPEAERNHTLDVTLPMLPADRPRYLMGVGRPEDIVEAVRRGIDMFDCVMPTRNARNGFLFTDKGTLRIRNAKFATDTRVIEEGCDCYACANGFSRAYLRHLDRCNEILGSQLATMHNLRHYQRLMAGLRGAIETGTLDDFVAGFYEARARGTVDG

SEQ ID NO: 57080 - protein, 376 aa, Luteibaculum oceani
  misc_feature (1)..(376): tr|A0A5C6VAY2|A0A5C6VAY2_9FLAO Queuine tRNA-ribosyltran sferase OS=Luteibaculum oceani OX=1294296 GN=tgt PE=3 S V=1
MSFTLSTTASDSKARAGVLKLAHGEIETPIFMPVGTVGTVKGVHNKELEDEIAAQIILGNTYHLYLRPGTSILEEAGGLHKFMGWNKPILTDSGGYQVYSLAANRKINEEGVKFSSHIDGSKHFFTPEKAMEIQRSIGADIIMAFDECTPYPCEKSYARASMEMTHRWLRRCFDHLEKIPELYGYPQHLFPIVQGSVYPDLRQKSAEFIASQNAVGNAIGGLSVGEPHEDLYEMTDLVCNILPTEKPRYLMGVGTPDNILECIDLGVDMFDCVMPTRNGRNGMLFTSEGIINIKNKKWERDFSPIDPNSPVSTDTFHSKAYLRHLFIARERLGPQLASIHNLGFYLWLVKEARKRIIDGTFKTWKTQMIPKLKNRL

SEQ ID NO: 57081 - protein, 374 aa, Luteimonas aestuarii
  misc_feature (1)..(374): tr|A0A4R5TY48|A0A4R5TY48_9GAMM Queuine tRNA-ribosyltran sferase OS=Luteimonas aestuarii OX=453837 GN=tgt PE=3 S V=1
MSRMQFQLLTTDGIARRGRLSFPRGTVETPAFMPVGTYGTVKGVLPDQIRALGAQIILGNTFHLYLRPGLEIIEAHGGLHGFARWNGPILTDSGGFQVFSLAHKRKITEQGVTFAAPTDGSKVFLGPEESMHIQKVLGSDIVMIFDECPPVHVDGQPVDKRVIERSMELSLRWAERSRRAHEGNDAALFGIVQGGVHHDLRSRSAEGLRQVGFDGYAVGGLAVGETEAERNAMLDHTCPQLPDDRPRYLMGVGRPEDLVEAVARGIDMFDCVMPTRNARNGHYFTSTGTVRVRNARYEKDLRPIEEGCGCPACAGGYSRAYLRHLDRCNEMLGPILGTLHNLWYYQALMAEMRAAIDAGTFAAFRESFYARRSP

SEQ ID NO: 57082 - protein, 373 aa, Luteimonas cucumeris
  misc_feature (1)..(373): tr|A0A562LBL2|A0A562LBL2_9GAMM Queuine tRNA-ribosyltran sferase OS=Luteimonas cucumeris OX=985012 GN=tgt PE=3 S V=1
MSRMSFELLGTDGPARRGRLAFPRGTVETPAFMPVGTYGSVKGVLPEQVRALGAQIILGNTFHLYLRPGLEVIEAHGGLHGFTRWDGPILTDSGGFQVFSLAHRRKITEQGVTFAAPTDGSTVFLGPEESMRIQRVLDSDIVMIFDECPPVHVDGKPVGLGVVQQSMELSLRWAERSKKAHEGNDAALFGIVQGGVHHELRTRSAQGLQQIGFDGYAIGGLAVGETEAERNDMLDHTAPQLPQDRPRYLMGVGRPEDLVEAVARGVDMFDCVMPTRNARNGHYFTGTGTVRIRNARYERDTGPIEAGCGCYTCSNGYSRAYLRHLDRCNEMLAPILGTLHNLWYYQKLMADMRAAIEQGTFATFRLSFHAARA

SEQ ID NO: 57083 - protein, 375 aa, Luteimonas marina
  misc_feature (1)..(375): tr|A0A5C5TY51|A0A5C5TY51_9GAMM Queuine tRNA-ribosyltran sferase OS=Luteimonas marina OX=488485 GN=tgt PE=3 SV=1
MSRLQFQLLSTDGAARRGRLSFPRGTVETPAFMPVGTYGTVKGMLPEQVRALGAEIILGNTFHLFLRPGLEVIEAHGGLHGFARWDGPILTDSGGFQVFSLAHRRKISEAGVTFAAPTDGSKVFLGPEESMRIQKVLGSDIVMIFDECPPVHVDGQPVDKRVVERSMELSLRWAERSRRAHEGNDAALFGIVQGGVHHDLRTRSAEGLKAIGFDGYAVGGLAVGETEAERNAMLEHTCPQLPADRPRYLMGVGRPEDLVEAVARGIDMFDCVMPTRNARNGHYFTSTGVVRVRNAKYEKDLRPIEEGCGCPACAGGYSRAYLRHLDRCNEMLGPILGTLHNLWHYQTLMADMRAAIGQGTFAAFRESFHAARRPG

SEQ ID NO: 57084 - protein, 374 aa, Luteimonas sp.
  misc_feature (1)..(374): tr|A0A1B3W8Z7|A0A1B3W8Z7_9GAMM Queuine tRNA-ribosyltran sferase OS=Luteimonas sp. JM171 OX=1896164 GN=tgt PE=3 SV=1
MSRMQFELLGTDGAARRGRLVFPRGTVETPAFMPVGTYGTVKGMLPDQLRELGAQMILGNTFHLYLRPGLEVIGDHGGLHGFARWDGPILTDSGGFQVFSLAHKRRITEQGVTFQAPTDGSTVFLGPEESMRIQKVLDSDVVMIFDECPPVHENGKPVDPRVIERSMELSLRWAERSKRAHEGNDAALFGIVQGGVHHDLRTRSAEGLKSIGFDGYAIGGLAVGETEDERNAMLDHTCPQLPGDRPRYLMGVGRPEDLVEAVARGVDMFDCVMPTRNARNGHYFTSTGVVRIRNAKYERDLRPIEEGCGCPACAGGYTRAYLRHLVRCNEMLGPILGTLHNLWHYQRLMAGMRDAIAAGTFGAFRESFYRQRTP

SEQ ID NO: 57085 - protein, 378 aa, Luteimonas sp.
  misc_feature (1)..(378): tr|A0A0H1AS51|A0A0H1AS51_9GAMM Queuine tRNA-ribosyltran sferase OS=Luteimonas sp. FCS-9 OX=1547516 GN=tgt PE=3 SV=1
MSRLQFQLQTTDGTARRGRLTFPRGTIETPAFMPVGTYGTVKGVLPHQIRALGAQIILGNTFHLYLRPGLEVIEAHGGLHGFARWDGPILTDSGGFQVFSLAHKRKITEEGVTFAAPTDGSRVFLGPEESMRIQKALDSDIVMIFDECPPVQVDGKPVDPRVVERSMELSLRWAARSKRAHEGNDAALFGIVQGGVHHDLRTRSAQGLQAIGFDGYAIGGLAVGETEDERNAMLDHTTPQLPADRPRYLMGVGRPEDLVEAVARGVDMFDCVMPTRNARNGHFFTSTGTIRIRNAKFEKDLRPIEEGCGCEACAGGYTRAYLRHLDRCGEMLGPMLGTLHNLWYYQKLMADMRAAIEAGTFAAFRESFYRARMGNPDA

SEQ ID NO: 57086 - protein, 378 aa, Luteimonas terrae
  misc_feature (1)..(378): tr|A0A4R5UC30|A0A4R5UC30_9GAMM Queuine tRNA-ribosyltran sferase OS=Luteimonas terrae OX=1530191 GN=tgt PE=3 SV= 1
MSRLQFELITTDGVARRGRLTFPRGTIETPAFMPVGTYGTVKGVLPEQVRALGAEIILGNTFHLYLRPGLEVIEAHGGLHGFARWHKPILTDSGGFQVFSLAHKRKITEEGVTFAAPTDGAKVFLGPEESMRIQKVLDSDIVMIFDECPPVQIDGKPVHPRVVEKSMELSLRWAARSKRAHEGNDAALFGIVQGGVHHDLRTRSAEGLKDIGFDGYAIGGLAVGETEDERNAMLDHTAPQLPDDRPRYLMGVGRPEDLVEAVARGVDMFDCVMPTRNARNGHFFTSTGVIRIRNAKFEKDLRPIEEGCGCEACSGGFTRAYLRHLDRCGEMLGPMLGTLHNLWYYQTLMADMRAAIASGTFAAFRDSFYRARTGNPDA

SEQ ID NO: 57087 - protein, 387 aa, Luteitalea pratensis
  misc_feature (1)..(387): tr|A0A143PWI2|A0A143PWI2_9BACT Queuine tRNA-ribosyltran sferase OS=Luteitalea pratensis OX=1855912 GN=tgt PE=3 SV=1
MPGAFAFTLTGRDGQARTGCLQTPHGLVETPAFMPVGTRGAVRGVTQRTLEEAGAAIVLANTYHLYLRPGDDLIAERGGLHRFIGWPGPILTDSGGYQIFSLGPLVKITEEGARFQSHLDGSRHALTPEKVVDIQAQLGPDIAMVLDECLAAPASEAASAASLDLTLRWARRARDRFLQLQAGPVAGVTVTNPGQAQFGIVQGGIYPHLREKSAAALREIGFESYAIGGLSVGESVETMYEVVGDTTPFLPDDRPRYLMGTGMPDDLVECVARGIDMFDCVLPTRNARNGQVFTPDGPINLRNARFARDDRPIDEQCPCDTCRRHSRAYLRHLFHNKEMNAGTLASVHNLVFYLDTLRRIRQAIGFGLFAQFRQDFHRRFSRTSPSS

SEQ ID NO: 57088 - protein, 417 aa, Luteococcus japonicus
  misc_feature (1)..(417): tr|A0A1R4JIB1|A0A1R4JIB1_9ACTN Queuine tRNA-ribosyltran sferase OS=Luteococcus japonicus LSP_Lj1 OX=1255658 GN= tgt PE=3 SV=1
MSGFGFTPRTTLDNGIGRTGTIHTPHGEIQTPAFIAVGTKATVKAVLPESISELGAQAVLANAYHLYLQPGSDLIDEAGGLGRFMNWRGPTFTDSGGFQVMSLGSGFKKVIEMDAKRAEADHAVAPGKERLAHVDDDGVTFKSHLDGSKHRFTPEVSMRVQHQIGADIMFAFDELTHLHNSRGYQEEALERTRLWAERCLAEHRRLTEERVGKPYQALFGVIQGAQYEDLRRKACRDLGGMEVDGQSFDGFGYGGALEKENLGTICGWMSEELPFDKPRHLLGISEPDDFFAAVAAGADTFDCVNPSRVARNSAIYAADGRYNLSTARNRRLFEPLEDGCDCYTCTHYTRAYLHHLFKAKEMLASTLATIHNERFTVRLVDDIRASMDNDDFESFRDHFLGRFYGNSTGPSSVDTTN

SEQ ID NO: 57089 - protein, 417 aa, Luteococcus japonicus
  misc_feature (1)..(417): tr|A0A3N1ZSS2|A0A3N1ZSS2_9ACTN Queuine tRNA-ribosyltran sferase OS=Luteococcus japonicus OX=33984 GN=tgt PE=3 S V=1
MSGFGFTPRTTLDNGIGRTGTIHTPHGEIQTPAFIAVGTKATVKAVLPESISELGAQAVLANAYHLYLQPGSDLIDEAGGLGRFMNWRGPTFTDSGGFQVMSLGSGFKKVIEMDAKRAEADHAVAPGKERLAHVDDDGVTFKSHLDGSKHRFTPEVSMRVQHQIGADIMFAFDELTHLHNSRGYQEEALERTRLWAERCLAEHRRLTEERVGKPYQALFGVIQGAQYEDLRRKACRDLGGMEVDGQSFDGFGYGGALEKENLGTICGWMSEELPFDKPRHLLGISEPDDFFAAVAAGADTFDCVNPSRVARNSAIYTADGRYNLSTARNRRLFEPLEDGCDCYTCTHYTRAYLHHLFKAKEMLASTLATIHNERFTVRLVDDIRASMDNGDFESFRDHFLGRFYGNSTGPSSVDTTN

SEQ ID NO: 57090 - protein, 376 aa, Lutibacter agarilyticus
  misc_feature (1)..(376): tr|A0A238Y232|A0A238Y232_9FLAO Queuine tRNA-ribosyltran sferase OS=Lutibacter agarilyticus OX=1109740 GN=tgt PE =3 SV=1
MQFELKSKDAQSKARAGVITTDHGTIETPIFMPVGTVGTVKGVHQTELKDEINPDIILGNTYHLYLRPQTKILEQAGGLHKFMNWDRNILTDSGGYQVYSLSGRRKIKEEGVKFKSHIDGSYHTFTPENVMEIQRSIGADIIMAFDECTPYPCDYNYAKRSMHMTHRWLTRCINHLEKVPFKYDYSQTFFPIVQGSTYKDLRKQSAEYIASVGAEGNAIGGLSVGEPAEEMYEMTEVVTAILPEDKPRYLMGVGTPINILENIALGIDMFDCVMPTRNARNGMLFTAHGTINIKNKKWENDFSAIDEMGTTFVDTMYSKAYLRHLFASKELLGKQIASIHNLGFYLWLTREARKHILAGDFTEWKNRMVKQMDKRL

SEQ ID NO: 57091 - protein, 376 aa, Lutibacter flavus
  misc_feature (1)..(376): tr|A0A238XM45|A0A238XM45_9FLAO Queuine tRNA-ribosyltran sferase OS=Lutibacter flavus OX=691689 GN=tgt PE=3 SV=1
MQFELKTKDPNSKARAGVITTDHGTIETPIFMPVGTVGTVKGVHQSELKDEINPDIILGNTYHLYLRPQTKILEQAGGLHKFMNWNSNILTDSGGYQVYSLSERRKIKEEGVKFKSHIDGSYHTFTPENVMEIQRSIGADIIMAFDECTPYPCDYSYAKRSMHMTHRWLERCITHLDKTPLKYDYNQTFFPIVQGSTYKDLRKQSAEYIASVGAEGNAIGGLSVGEPAEEMYEMTEVVTAILPEDKPRYLMGVGTPINILENIALGIDMFDCVMPTRNARNGMLFTANGTINIKNKKWENDFSAIDEMDITFVDTMYSKAYLRHLFISKELLGKQIASIHNLGFYLWLVREARKHILAGDFTDWKNRMVKQMDKRL

SEQ ID NO: 57092 - protein, 376 aa, Lutibacter maritimus
  misc_feature (1)..(376): tr|A0A1I6SC36|A0A1I6SC36_9FLAO Queuine tRNA-ribosyltran sferase OS=Lutibacter maritimus OX=593133 GN=tgt PE=3 S V=1
MQFKLKTTDAQSKARAGIITTDHGIIETPIFMPVGTVGTVKGVHQSELKNEINPDIILGNTYHLYLRPQTTILEQAGGLHKFMNWDRNILTDSGGYQVYSLSERRKINEEGVKFKSHIDGSYHTFTPENVMEIQRSIGADIIMAFDECTPYPCDYNYAKRSMHMTHRWLKRCITHLEKTPFKYDYSQAFFPIVQGSTYKDLRQQSAEYIAGVGAEGNAIGGLSVGEPAEEMYAMTEIVTAILPEDKPRYLMGVGTPTNILENIALGIDMFDCVMPTRNARNGMLFTANGSINIKNKKWENDFSPIDEMGITFVDTMYSKAYLRHLFISKELLGKQIASIHNLGFYLWLVREARKHILAGDFTTWKNQMVKQLDQRL

SEQ ID NO: 57093 - protein, 376 aa, Lutibacter oceani
  misc_feature (1)..(376): tr|A0A3D9RSA8|A0A3D9RSA8_9FLAO Queuine tRNA-ribosyltran sferase OS=Lutibacter oceani OX=1853311 GN=tgt PE=3 SV= 1
MQFELKTKDAQSKARAGVITTDHGTIETPIFMPVGTVGTVKGVHQTELKNEINPDIILGNTYHLYLRPQTTILEQAGGLHKFMNWDRNILTDSGGYQVYSLSGRRKINEEGVKFKSHIDGSYHTFTPENVMEIQRTIGADIIMAFDECTPYPCNYNYAKRSMHMTHRWLKRCITHLDKTPYKYDYSQAFFPIVQGSTYKDLRKQSAEFIASVGAEGNAIGGLSVGEPAEEMYEMTEVVTAILPEDKPRYLMGVGTPINILENIALGIDMFDCVMPTRNARNGMLFTAHGSINIKNKKWENDFSAIDEMGITFVDTMYSKAYLRHLFVSKELLGKQIASIHNLGFYLWLVREARKHILAGDFTEWKNRMVNQMNKRL

SEQ ID NO: 57094 - protein, 409 aa, Lutibacter oricola
  misc_feature (1)..(409): tr|A0A1H3AGR3|A0A1H3AGR3_9FLAO Queuine tRNA-ribosyltran sferase OS=Lutibacter oricola OX=762486 GN=tgt PE=3 SV= 1
MNVYHKFYPTSLQHITSITYFSLNKTYSVSLPTMQFKLNTKDTASKARAGVITTDHGTIETPIFMPVGTVGTVKGVHQTELKNEINPDIILGNTYHLYLRPQTKILEKAGGLHKFMNWDRNILTDSGGYQVYSLSGRRKIKEEGVKFKSHIDGSYHTFTPENVMEIQRSIGADIIMAFDECTPYPCDYNYAKRSMHMTHRWLKRCITHLDKTPFKYDYAQTFFPIVQGSTYKDLRKQSAEYIASAGAEGNAIGGLSVGEPAEEMYEMTEVVTAILPEDKPRYLMGVGTPINILENIALGIDMFDCVMPTRNARNGMLFTANGTINIKNKKWEDDFSPIDEMGITYVDTLYSKAYLRHLFAAKELLGKQIASIHNLGFYMWLVREARKHILAGDFTEWKNRMVKQMDKRL

SEQ ID NO: 57095 - protein, 376 aa, Lutibacter profundi
  misc_feature (1)..(376): tr|A0A0X8G5P5|A0A0X8G5P5_9FLAO Queuine tRNA-ribosyltran sferase OS=Lutibacter profundi OX=1622118 GN=tgt PE=3 S V=1
MQFELKKTDAQSKARAGIITTDHGTIETPIFMPVGTVGTVKGIHQTELKDEINPDVILGNTYHLYLRPKTKILEQAGGLHKFMNWDRNILTDSGGYQVYSLSGRRKIKEEGVKFKSHIDGSYHTFTPENVMEIQRIIGADIIMAFDECTPYPCDYSYAKRSMHMTHRWLKRCITHLEKTPLKYDYNQAFFPIVQGSTYKDLRKKSAEFIASVGAEGNAIGGLSVGEPAEEMYEMTEIVTAILPEDKPRYLMGVGTPINILENIALGIDMFDCVMPTRNARNGMLFTAHGTINIKNKKWENDFSAIDEMGITFVDTMYSKAYLRHLFASKELLGKQIASIHNLGFYLWLVREARKHILAGDFTEWKNGMVKQLDKRL

SEQ ID NO: 57096 - protein, 376 aa, Lutibacter sp.
  misc_feature (1)..(376): tr|A0A559RZZ0|A0A559RZZ0_9FLAO Queuine tRNA-ribosyltran sferase OS=Lutibacter sp. Hel_I_33_5 OX=1566289 GN=tgt PE=3 SV=1
MIFDLKSTDPKSKARAGVITTDHGTIETPIFMPVGTVGTVKGVHQTELKNEINPDIILGNTYHLYLRPQTSILEQAGGLHKFMNWDRNILTDSGGYQVYSLSGRRKIKEEGVKFKSHIDGSMHFFTPENVMEIQRTIGADIIMAFDECTPYPCDYNYAKRSMHMTHRWLNRCINHLEKLPFKYGYEQTFFPIVQGSTYKDLRKQSAEYIANAGAQGNAIGGLSVGEPAEEMYAMTEVVTAILPEDKPRYLMGVGTPINILENIALGIDMFDCVMPTRNARNGMLFTAHGTINIKNKKWENDFSAIDDMGITYVDTLYSKAYLRHLFAAKEMLGKQIASVHNLGFYLWLTREARKHILAGDFTQWKDKMVKQMDKRL

SEQ ID NO: 57097 - protein, 376 aa, Lutibacter sp.
  misc_feature (1)..(376): tr|A0A2G2P5P0|A0A2G2P5P0_9FLAO Queuine tRNA-ribosyltran sferase OS=Lutibacter sp. OX=1925666 GN=tgt PE=3 SV=1
  misc_feature (21)..(21): Xaa can be any naturally occurring amino acid
  misc_feature (186)..(186): Xaa can be any naturally occurring amino acid
  misc_feature (188)..(188): Xaa can be any naturally occurring amino acid
MQFELKTTDAQSKARAGIITXDHGTIETPIFMPVGTVGTVKGVHQTELKNEINPDIILGNTYHLYLRPKTAILEQAGGLHKFMNWDRPILTDSGGYQVYSLSSRRKIKEEGVRFKSHIDGSYHTFTPENVMEIQRVIGADIIMAFDECTPYPCDYSYAKRSMHMTHRWLKRCITHLDKTPYKYDYXQXFFPIVQGSTYKDLRKQSAEFIASVGAEGNAIGGLSVGEPAEEMYEMTEIVTAILPEDKPRYLMGVGTPINILENIALGIDMFDCVMPTRNARNGMLFTAHGSINIKNKKWENDFSPIDEMGITFVDTMYSKAYLRHLFASKELLGKQIASIHNLGFYLWLVREARKHILAGDFTAWKNRMVKQLDKRL

SEQ ID NO: 57098 - protein, 377 aa, Lutibaculum baratangense
  misc_feature (1)..(377): tr|V4RMR2|V4RMR2_9RHIZ Queuine tRNA-ribosyltransferase OS=Lutibaculum baratangense AMV1 OX=631454 GN=tgt PE=3 SV=1
MTIQFGYELQARDGKARRGVVHTPRGDIQTPAFMPVGTAGTVKGLLPEQVRATGADIILGNTYHLMLRPGAERVARLGGLHAFMRWDGPILTDSGGFQVMSLASLRKIDEQGVVFKSHLDGSEHAMSPERSVEIQRLLGADITMQLDECIRLPAPHAEAERAMQLSLRWAERCKAAFDPAGGGRALFGIVQGGTERDLRLRSAEGLVGIGFDGYAVGGLAVGEPQEVMIRVLSETLGALPEDRPRYLMGVGTPEDMLLSVAEGIDMFDCVMPTRAGRHGQAYTRFGRLNLKNAKHAEDLRPLDEDSDCPAMRDYSRAYLHHLVRSQELLGAVLLSWANVHYYHSVMRDARRAIEEGLYADHVAATREAWARGDESAA

SEQ ID NO: 57099 - protein, 376 aa, Lutimaribacter litoralis
  misc_feature (1)..(376): tr|A0A521FQQ3|A0A521FQQ3_9RHOB Queuine tRNA-ribosyltran sferase OS=Lutimaribacter litoralis OX=1010611 GN=tgt P E=3 SV=1
MTAKFSFDLLATDGKARRGVIHTTRGDIRTPAFMPVGTAATVKAMMPESVAATGADILLGNTYHLMLRPTAERIDRLGGLHKFMNWDKPILTDSGGFQVMSLSALRKMTEDGVTFKSHIDGSMHTLTPERSMEIQKLLGSDIVMCFDECTPFPAEEKVAHESMRMSMRWAKRSREAFGDRPGHALFGIQQGSVFRDQRQESAEKLAGIGFDGYAVGGLAVGEGQDMMFDVLDYAPDMLPTDRPRYLMGVGKPDDIVGAVKRGIDMMDCVLPSRSGRTGQVFTRHGVVNIKNARHQDDPRPLDENCTCPACRNYSRAYLHHVFRAQEMISGMLLTWHNLHYYQELMQGMRDAIEVGRFAAFEAEFHAQRAQGDIDPL

SEQ ID NO: 57100 - protein, 375 aa, Lutimaribacter pacificus
  misc_feature (1)..(375): tr|A0A1H0FA06|A0A1H0FA06_9RHOB Queuine tRNA-ribosyltran sferase OS=Lutimaribacter pacificus OX=391948 GN=tgt PE =3 SV=1
MTGVTFELKATDGRARTGVIRTTRGDIRTPAFMPVGTAATVKAMMPESVAATGADILLGNTYHLMLRPGAERIARLGGLHRFMNWEKPILTDSGGFQVMSLADLRKLTEKGVTFRSHVDGSKHELTPERSMEIQRLLGSDIVMCFDECPALPADRARIEESMRLSMRWAARSKAAFGDRPGHALFGIQQGGLEPDLREESAKALRDIGFDGYAIGGLAVGEGQEAMFACLDYAPDMLPNDKPRYLMGVGKPDDILGAVKRGVDMMDCVLPSRSGRTGQAWTRRGQVNIKNARHADDPRPLDAECTCPACRNYSRAYLHHVFRAGEMISGMLLTWHNLHYYQELMAGMRAAIAEGRFDAWEGEFHAQRAEGDIAPL

SEQ ID NO: 57101 - protein, 375 aa, Lutimaribacter saemankumensis
  misc_feature (1)..(375): tr|A0A1G8H0B5|A0A1G8H0B5_9RHOB Queuine tRNA-ribosyltran sferase OS=Lutimaribacter saemankumensis OX=490829 GN=t gt PE=3 SV=1
MSGVTFELKATDGRARTGVIRTTRGDIRTPAFMPVGTAATVKAMMPESVAATGADILLGNTYHLMLRPGAERIARLGGLHKFMNWDKPILTDSGGFQVMSLSDLRKLTEKGVTFRSHVDGSKHELTPERSMEIQRLLGSDIVMCFDECPALPADRKRIEESMRLSMRWAARSKDAFGDRPGHALFGIQQGGLEPDLREESAKALQEIGFDGYAIGGLAVGEGQEAMFACLDYAPGQLPADRPRYLMGVGKPDDIVGAVKRGVDMMDCVLPSRSGRTGQAWTRRGQVNIKNARHSDDPRPLDEECTCPACRNYSRAYLHHVFRAGEMISGMLLTWHNLHYYQEIMAGMREAIAEGRFDAWEAAFHATREEGDIPAL

SEQ ID NO: 57102 - protein, 379 aa, Lutispora thermophila
  misc_feature (1)..(379): tr|A0A1M6HPH3|A0A1M6HPH3_9CLOT Queuine tRNA-ribosyltran sferase OS=Lutispora thermophila DSM 19022 OX=1122184 G N=tgt PE=3 SV=1
MNREGNIVAIRYELIKECKDTNARLGRVYTPHGTIETPAFMPVGTQASVKAMSPDELKEIGSQIILSNTYHLYIRPGHKLIEDFGGLHGFMNWDIPILTDSGGFQVFSLNELRKISEEGVEFKSHLDGSKHFFTPEFVMEIEESLGADIIMAFDECIPYPCEKDYARKSMERTVRWLKRCKKAHTKTDKQALFGIVQGGTFKDLRIESAKMTVDVDLPGYAVGGLSVGESKEEMYEVLEYTVPLLPKDKPRYLMGVGSPDSLIDGVIRGIDMFDCVLPTRIARNGTVMTSKGKLVVRNAEYARDSLPLDENCDCYACRNFSRAYIRHLIKAGEILGARLTTIHNLRFLQNLMKNIRDAIKEDRLLNFRKDFFDSYGYEK

SEQ ID NO: 57103 - protein, 386 aa, Lyngbya aestuarii
  misc_feature (1)..(386): tr|U7QEB5|U7QEB5_9CYAN Queuine tRNA-ribosyltransferase OS=Lyngbya aestuarii BL J OX=1348334 GN=tgt PE=3 SV=1
MSEPNSFDIQARCSQSSARAGIFWTPHGQVETPRFMPVGTLANVKTLTPAHLEAAGAQMVLSNTYHLHLQPGEKIVASAGGLHRFMAWKGPILTDSGGFQVFSLSEIRTINDEGVIFRSPHDGLMIHFTPERSIQIQNELGADVIMAFDECPPSPASREQVLAATERTYRWLERCITAHQRSDQALFGIVQGGVYPELRQEAAQQLTKLDLPGYAIGGVSVGEPAELIEKIVKVTTPFLPPEKPRYLMGVGTYREMAQAIASGIDLFDCVIPTRLARHGAALVKGERWNLKNSPFREDFQPLDETCPCYTCQNFSRAYLSHLVRAKELLAYTLLSIHNVTELIRFTQRIRDAIFRDRFSEEFAEWLIPSQSGKTLEEVGFSDQDEP

SEQ ID NO: 57104 - protein, 375 aa, Lyngbya confervoides; identical to SEQ ID NO: 55893
  misc_feature (1)..(375): tr|A0A0C1YB35|A0A0C1YB35_9CYAN Queuine tRNA-ribosyltran sferase OS=Lyngbya confervoides BDU141951 OX=1574623 GN =tgt PE=3 SV=1

SEQ ID NO: 57105 - protein, 386 aa, Lyngbya sp.
  misc_feature (1)..(386): tr|A0YJH8|A0YJH8_LYNSP Queuine tRNA-ribosyltransferase OS=Lyngbya sp. (strain PCC 8106) OX=313612 GN=tgt PE=3 SV=1
MSEPNSFDIQARCSQSSARAGIFSTPHGSVETPRFMPVGTLANVKTLTPAHLEAAGAQMVLSNTYHLHLQPGEKIVASAGGLHRFMAWNGPILTDSGGFQVFSLSEIRTINDEGVIFRSPHDGLMIHLTPERSIQIQNELGADVIMAFDECPPYPASREQVLAATERTYRWLERCITAHQRSDQALFGIVQGGVYPELRQEAAQQLAKLNLPGYAIGGVSVGEPSELIEKIVKVTTPFLPPEKPRYLMGVGTYREMAQAIASGIDLFDCVIPTRLARHGAALVQGERWNLKNSPFREDFQPLDETCPCYTCQNFSRAYLSHLVRAKELLAYTLLSIHNVTELIRFTQRIRDAIFRDRFSEEFAEWIKPSESGKTLEEVGFSHQDDP

SEQ ID NO: 57106 - protein, 381 aa, Lysinibacillus acetophenoni
  misc_feature (1)..(381): tr|A0A285U3K3|A0A285U3K3_9BACI Queuine tRNA-ribosyltran sferase OS=Lysinibacillus acetophenoni OX=614649 GN=tgt PE=3 SV=1
MTQPAIRYEHIKTCKQTGARLGIVHTPHGSFETPAFMPVGTQATVKTMSPEEVKEMGAGIILSNTYHLWLRPGNEIVKEAGGLHKFMNWDRAILTDSGGFQVFSLSDFRKIEEEGVYFRNHLNGDKLFLSPEKSIQVQNDLGADIIMAFDECPPYPATYEYMLASVDRTTRWAKRCKEAHSRPEEQGLFGIIQGGEFEDLRKRSAEALVELDFPGYAIGGLSVGEPKDVMNKVLEFTTPLMPFDKPRYLMGVGSPDSLIDGAIRGVDMFDCVLPTRIARNGTLMTSEGRLVVKNAQYAKDFGPLDPNCDCYTCKNYSRAYIRHLIKAGETFGIRLTTYHNLQFLLKLMEQVRQAIREDRLGDFREEFFEKYGFNKPDAKNF

SEQ ID NO: 57107 - protein, 381 aa, Lysinibacillus boronitolerans
  misc_feature (1)..(381): tr|A0A0A3IYD7|A0A0A3IYD7_9BACI Queuine tRNA-ribosyltran sferase OS=Lysinibacillus boronitolerans JCM 21713 = 10 a = NBRC 103108 OX=1294264 GN=tgt PE=3 SV=1
MTQPAIRYELLHTCKQTGARLGIVHTPHGSFETPAFMPVGTQATVKTMSPEELKEMNAGIILSNTYHLWLRPGNDIVKEAGGLHKFMNWDRPILTDSGGFQVFSLSQFRKIEEEGVHFRNHLNGDKLFLSPEKAMEIQNDLGSDIMMAFDECPPYPATHDYMLQSVDRTTRWAKRCKEAHQRPEEQGLFGIIQGGEYEDLRRRSAEALVELDFPGYAIGGLSVGEPKDVMNRVLEFTTPMMPENKPRYLMGVGSPDSLIDGAIRGIDMFDCVLPTRIARNGTLMTSEGRLVVKNAKYARDFGPIDPNCDCYTCKNYSRAYVRHLIRTEETFGIRLTSYHNLHFLLKLMEQVREAIRQDRLGDFREEFFEKYGFNGPDAKNF

SEQ ID NO: 57108 - protein, 381 aa, Lysinibacillus chungkukjangi
  misc_feature (1)..(381): tr|A0A318TY78|A0A318TY78_9BACI Queuine tRNA-ribosyltran sferase OS=Lysinibacillus chungkukjangi OX=1202712 GN=t gt PE=3 SV=1
MTKPAVTYELIKTCKQTGARLGIVHTPHGSFETPAFMPVGTQATVKTMSPEDLKEMEAGIILSNTYHLWLRPGNDIVKEAGGLHKFMNWDRPILTDSGGFQVFSLSDFRKIEEEGVHFRNHLNGDKLFLSPEKAMEIQNDLGSDIMMAFDECPPFPATYEYMLDSVDRTTRWAKRCKEAHARPEDQGLFGIVQGGEFEDLRKRSAEALVELDLPGYAVGGLSVGEPKDIMNRVLEFTTPLLPENKPRYLMGVGSPDSLIDGSIRGIDMFDCVLPTRIARNGTLMTSEGRLVVKNAKYARDFSPIDPNCDCYTCKNYTRAYVRHLIRTEETFGIRLTTYHNLHFLLKLMEQVRQAIREDRLGDFREEFFEKYGFNKPNAKNF

SEQ ID NO: 57109 - protein, 381 aa, Lysinibacillus composti
  misc_feature (1)..(381): tr|A0A3N9UKS1|A0A3N9UKS1_9BACI Queuine tRNA-ribosyltran sferase OS=Lysinibacillus composti OX=720633 GN=tgt PE= 3 SV=1
MTQPAIRYEFIKTCKQTGARLGIVHTPHGSFETPAFMPVGTQATVKTMSPEDLKEMGAGIILSNTYHLWLRPGNDIVKEAGGLHKFMNWDRPILTDSGGFQVFSLSEFRKIEEEGVHFRNHLNGDKLFLSPEKAMEIQNDLGSDIMMAFDECPPFPATYDYMLASVDRTTRWAKRCKDAHQRPEDQGLFGIVQGGEFEDLRKRSAEALVELDLPGYAVGGLSVGEPKEIMNRVLEFTTPLLPENKPRYLMGVGSPDSLIDGAIRGIDMFDCVLPTRIARNGTLMTSEGRLVVKNAKYARDFGPLDPNCDCYTCKNYSRAYIRHLIRTEETFGIRLTTYHNLHFLLNLMEQVRQAIREDRLGDFREEFFEKYGFNKPNAKNF

SEQ ID NO: 57110 - protein, 381 aa, Lysinibacillus contaminans
  misc_feature (1)..(381): tr|A0A0M8Q2A5|A0A0M8Q2A5_9BACI Queuine tRNA-ribosyltran sferase OS=Lysinibacillus contaminans OX=1293441 GN=tgt PE=3 SV=1
MTQPAIRYELLHTCKQTGARLGIVHTPHGSFETPAFMPVGTQATVKTMSPEELKEMNAGIILSNTYHLWLRPGNDIVKEAGGLHKFMNWDRPILTDSGGFQVFSLSKFRKIEEEGVHFRNHLNGDKLFLSPEKAMEIQNDLGSDIMMAFDECPPFPATHEYMLKSVDRTTRWAKRCKEAHARPEDQGLFGIIQGGEYEDLRRRSAEALVELDFPGYAIGGLSVGEPKDIMNRVLEFTTPLMPENKPRYLMGVGSPDSLIDGAIRGIDMFDCVLPTRIARNGTLMTSEGRLVVKNAKYARDFGPIDPNCDCYTCKNYSRAYVRHLIRTEETFGLRLTSYHNLRFLLNLMEQVREAIREDRLGDFREEFFEKYGFNEPNAKNF

SEQ ID NO: 57111 - protein, 381 aa, Lysinibacillus endophyticus
  misc_feature (1)..(381): tr|A0A494ZBR1|A0A494ZBR1_9BACI Queuine tRNA-ribosyltran sferase OS=Lysinibacillus endophyticus OX=1978490 GN=tg t PE=3 SV=1
MTKPAVTYELIKTCKQTGARLGIVHTPHGSFETPAFMPVGTQATVKTMSPEELKEMNAGIILSNTYHLWLRPGNEIVKEAGGLHKFMNWDRPILTDSGGFQVFSLSQFRKIEEEGVHFRNHLNGDKLFLSPEKAMEIQNDLGSDIMMAFDECPPYPATYDYMLASVDRTTRWAKRCKEAHQRPEDQGLFGIVQGGEYEDLRKRSAEALVELDFPGYAIGGLSVGEPKDIMNRVLEFTTPLLPTNKPRYLMGVGSPDSLIDGAIRGVDMFDCVLPTRIARNGTLMTSEGRLVVKNAKYARDFSPIDPNCDCYTCKNYTRAYIRHLIRTEETFGIRLTTYHNLHFLLKLMEQVRQAIREDRLGDFREEFFEKYGFNKPDAKNF

SEQ ID NO: 57112 - protein, 381 aa, Lysinibacillus fusiformis
  misc_feature (1)..(381): tr|A0A1E4R9U0|A0A1E4R9U0_9BACI Queuine tRNA-ribosyltran sferase OS=Lysinibacillus fusiformis OX=28031 GN=tgt PE =3 SV=1
MTQPAIRYELLHTCKQTGARLGIVHTPHGSFETPAFMPVGTQATVKTMSPEELKEMNAGIILSNTYHLWLRPGNDIVKEAGGLHKFMNWDRPILTDSGGFQVFSLSKFRKIEEEGVHFRNHLNGDKLFLSPEKAMEIQNDLGSDIMMAFDECPPYPATHEYMLQSVDRTTRWAKRCKEAHNRPEEQGLFGIIQGGEYEDLRRRSAEALVELDFPGYAIGGLSVGEPKDIMNRVLEFTTPLMPANKPRYLMGVGSPDSLIDGAIRGVDMFDCVLPTRIARNGTLMTSEGRLVVKNAKYARDFGPIDPNCDCYTCKNYSRAYIRHLIRTEETFGIRLTSYHNLHFLLKLMEQVREAIRQDRLGDFREEFFEKYGFNGPDAKNF

SEQ ID NO: 57113 - protein, 381 aa, Lysinibacillus fusiformis
  misc_feature (1)..(381): tr|D7WQC0|D7WQC0_9BACI Queuine tRNA-ribosyltransferase OS=Lysinibacillus fusiformis ZC1 OX=714961 GN=tgt PE=3 SV=1
MTQPAIRYELLHTCKQTGARLGIVHTPHGSFETPAFMPVGTQATVKTMSPEELKEMNAGIILSNTYHLWLRPGNDIVKEAGGLHKFMNWDRPILTDSGGFQVFSLSQFRKIEEEGVHFRNHLNGDKLFLSPEKAMEIQNDLGSDIMMAFDECPPYPATHDYMLKSVDRTTRWAKRCKEAHQRPEEQGLFGIIQGGEYEDLRRRSAEALVELDFPGYAIGGLSVGEPKDVMNRVLEFTTPMMPENKPRYLMGVGSPDSLIDGAIRGIDMFDCVLPTRIARNGTLMTSEGRLVVKNAKYARDFGPIDPNCDCYTCKNYSRAYVRHLIRTEETFGIRLTSYHNLHFLLKLMEQVREAIRQDRLGDFREEFFEKYGFNGPNAKNF

SEQ ID NO: 57114 - protein, 381 aa, Lysinibacillus halotolerans
  misc_feature (1)..(381): tr|A0A3M8H4X2|A0A3M8H4X2_9BACI Queuine tRNA-ribosyltran sferase OS=Lysinibacillus halotolerans OX=1368476 GN=tg t PE=3 SV=1
MTKPAVTYELIKTCKQTGARLGIVHTPHGSFETPAFMPVGTQATVKTMSPEELKEMDAGIILSNTYHLWLRPGNDIIKEAGGLHKFMNWDRPILTDSGGFQVFSLSEFRKIEEEGVHFRNHLNGDKLFLSPEKAMEIQNDLGSDIMMAFDECPPYPASYEYMLNSVDRTTRWAKRCKEAHARPEDQALFGIVQGGEYEDLRKRSAEALVELDLPGYAIGGLSVGEPKEIMNRMLEYTTPLLPDNKPRYLMGVGSPDSLIDGAIRGVDMFDCVLPTRIARNGTLMTSEGRLVVKNAKYARDFSPIDPNCDCYTCKNYTRAYVRHLIRTEETFGIRLTTYHNLHFLLKLMEQVRQAIREDRLGDFREEFFEKYGFNKPDAKNF

SEQ ID NO: 57115 - protein, 381 aa, Lysinibacillus macroides
  misc_feature (1)..(381): tr|A0A0N0UWC3|A0A0N0UWC3_9BACI Queuine tRNA-ribosyltran sferase OS=Lysinibacillus macroides OX=33935 GN=tgt PE= 3 SV=1
MTQPAIRYELLHTCKQTGARLGIVHTPHGSFETPAFMPVGTQATVKTMSPEELKEMNAGIILSNTYHLWLRPGNDIVKEAGGLHKFMNWDRPILTDSGGFQVFSLSQFRKIEEEGVHFRNHLNGDKLFLSPEKAMEIQNDLGSDIMMAFDECPPYPATYDYMLQSVDRTTRWAKRCKEAHQRPEEQGLFGIIQGGEYEDLRRRSAEALVELDFPGYAIGGLSVGEPKDVMNRVLEFTTPMMPVNKPRYLMGVGSPDSLIDGAIRGIDMFDCVLPTRIARNGTLMTSEGRLVVKNAKYARDFGPLDPNCDCYTCKNYSRAYIRHLIRTEETFGIRLTTYHNLHFLLKLMEQVREAIRQDRLGDFREEFFEKYGFNGSNAKNF

SEQ ID NO: 57116 - protein, 381 aa, Lysinibacillus manganicus
  misc_feature (1)..(381): tr|A0A0A3I535|A0A0A3I535_9BACI Queuine tRNA-ribosyltran sferase OS=Lysinibacillus manganicus DSM 26584 OX=13840 49 GN=tgt PE=3 SV=1
MTQPAIRYEHIKTCKQTGARLGIVHTPHGSFETPAFMPVGTQATVKTMSPEEVKEMGAGIILSNTYHLWLRPGNEIVKEAGGLHKFMNWDRAILTDSGGFQVFSLSDFRKIEEEGVYFRNHLNGDKLFLSPEKSIQVQNDLGADIIMAFDECPPYPATYDYMLASVDRTTRWAKRCKEAHSRPEDQGLFGIIQGGEFEDLRKRSAEALVELDFPGYAIGGLSVGEPKDVMNKVLDFTTPLMPFDKPRYLMGVGSPDSLIDGAIRGVDMFDCVLPTRIARNGTLMTSEGRLVVKNAQYAKDFGPLDPNCDCYTCKNYSRAYIRHLIKAGETFGIRLTTYHNLHFLLKLMEQVRQAIREDRLGDFREEFFEKYGFNKPDAKNF

SEQ ID NO: 57117 - protein, 381 aa, Lysinibacillus mangiferihumi
  misc_feature (1)..(381): tr|A0A4U2ZFG2|A0A4U2ZFG2_9BACI Queuine tRNA-ribosyltran sferase OS=Lysinibacillus mangiferihumi OX=1130819 GN=t gt PE=3 SV=1
MTQPAIRYELLHTCKQTGARLGIVHTPHGSFETPAFMPVGTQATVKTMSPEELKEMNAGIILSNTYHLWLRPGNDIVKEAGGLHKFMNWDRPILTDSGGFQVFSLSQFRKIEEEGVHFRNHLNGDKLFLSPEKAMEIQNDLGSDIMMAFDECPPYPATYDYMLKSVDRTTRWAKRCKEAHARPEEQGLFGIIQGGEYEELRRRSAEALVELDFPGYAIGGLSVGEPKDVMNQVLEFTTPLMPTNKPRYLMGVGSPDSLIDGAIRGIDMFDCVLPTRIARNGTLMTSEGRLVVKNAKYARDFGPIDPNCDCYTCKNYSRAYVRHLIRTEETFGIRLTSYHNLHFLLKLMEQVREAIREDRLGDFREEFFEKYGFNGPNAKNF

SEQ ID NO: 57118 - protein, 381 aa, Lysinibacillus massiliensis
  misc_feature (1)..(381): tr|A0A0A3J3Z0|A0A0A3J3Z0_9BACI Queuine tRNA-ribosyltran sferase OS=Lysinibacillus massiliensis 4400831 = CIP 10 8448 = CCUG 49529 OX=1211035 GN=tgt PE=3 SV=1
MTKPAVTYELIKTCKQTGARLGIVHTPHGSFETPAFMPVGTQATVKTMSPEELKEMNAGIILSNTYHLWLRPGNDIVKEAGGLHKFMNWDRPILTDSGGFQVFSLSEFRKIEEEGVHFRNHLNGDKLFLSPEKAMEIQNDLGSDIMMAFDECPPYPATYEYMLNSVDRTTRWAKRCKEAHSRPEDQGLFGIVQGGEFEDLRKRSAEALVELDLPGYAVGGLSVGEPKDIMNRVLEFTTPLLPDNKPRYLMGVGSPDSLIDGAIRGIDMFDCVLPTRIARNGTLMTSEGRLVVKNAKYARDFSPIDPNCDCYTCKNYTRAYVRHLIRTEETFGIRLTTYHNLHFLLKLMEQVRQAIREDRLGDFREEFFEKYGFNKPDAKNF

SEQ ID NO: 57119 - protein, 381 aa, Lysinibacillus odysseyi
  misc_feature (1)..(381): tr|A0A0A3IFE2|A0A0A3IFE2_9BACI Queuine tRNA-ribosyltran sferase OS=Lysinibacillus odysseyi 34hs-1 = NBRC 100172 OX=1220589 GN=tgt PE=3 SV=1
MTQPPIRYELIKTCKQTGARLGIVHTPHGSFETPTFMPVGTQATVKAMSPEELKEMNAGIILSNTYHLWLRPGNDIVKEAGGLHKFMNWDRPILTDSGGFQVFSLSQFRKIEEEGVHFRNHLNGDKLFLSPEKAMEIQNDLGSDIMMAFDECPPYPATHEYMLKSVDRTTRWAKRCKEAHQRPDEQGLFGIIQGGEYEDLRRRSAEALVELDFPGYAVGGLSVGEPKDVMNRVLDFTTPLMPADKPRYLMGVGSPDSLIDGSIRGIDMFDCVLPTRIARNGTLMTSEGRMVIKNAKYARDFRPIDENCDCYTCKNYTRAYVRHLLRTEETFGLRLTSYHNLRFLIKLMEDVRQAIREDRLGDFKEEFFEKYGYNKPDAKNF

SEQ ID NO: 57120 - protein, 381 aa, Lysinibacillus saudimassiliensis
  misc_feature (1)..(381): tr|A0A078M0R1|A0A078M0R1_9BACI Queuine tRNA-ribosyltran sferase OS=Lysinibacillus saudimassiliensis OX=1461583 GN=tgt PE=3 SV=1
MTKPAVWYEPIKTCKQTGARLGIVHTPHGSFETPTFMPVGTQATVKTMSPEDLKEMNAGIILSNTYHLWLRPGNDIVKEAGGLHKFMNWDKPILTDSGGFQVFSLSKFRKIEEEGVHFRNHLNGDKLFLSPEKAMEIQNDLGSDIMMAFDECPPFPATHEYMLKSVDRTTRWAKRCKEAHKNTENQALFGIVQGGEYEDLRQRSAEALVALDFPGYAIGGLSVGEPKDIMYRVLEQTTHLLPEDKPRYLMGVGSPDSLIEGAIRGVDMFDCVLPTRIARNGTLMTSQGRLVVKNAKYERDFTPIDPECDCYTCKNYTRAYVRHLIRTEETFGLRLTSYHNLRFLIKLMEQVRQAIREDRLGDFRDEFFEKYGFNKPDAKNF

SEQ ID NO: 57121 - protein, 381 aa, Lysinibacillus sinduriensis
  misc_feature (1)..(381): tr|A0A0A3HTA5|A0A0A3HTA5_9BACI Queuine tRNA-ribosyltran sferase OS=Lysinibacillus sinduriensis BLB-1 = JCM 1580 0 OX=1384057 GN=tgt PE=3 SV=1
MTKPAVTYELIKTCKQTGARLGIVHTPHGSFETPAFMPVGTQATVKTMSPEELKEMDAGIILSNTYHLWLRPGNDIVKEAGGLHKFMNWDRPILTDSGGFQVFSLSEFRKIEEEGVHFRNHLNGDKLFLSPEKAMEIQNDLGSDIMMAFDECPPYPATYEYMLNSVDRTTRWAKRCKEAHARPEDQGLFGIVQGGEFEDLRKRSAEALVELDFPGYAIGGLSVGEPKDIMNRVLEFTTPLLPDNKPRYLMGVGSPDSLIDGAIRGVDMFDCVLPTRIARNGTLMTSEGRLVVKNAKYARDFGPIDPNCDCYTCKNYTRAYVRHLIRTEETFGIRLTTYHNLHFLLKLMEQVRQAIREDRLGDFREEFFEKYGFNKPDAKNF

SEQ ID NO: 57122 - protein, 381 aa, Lysinibacillus sp.
  misc_feature (1)..(381): tr|A0A0B1YCW4|A0A0B1YCW4_9BACI Queuine tRNA-ribosyltran sferase OS=Lysinibacillus sp. A1 OX=1571920 GN=tgt PE=3 SV=1
MTQPAIRYELLHTCKQTGARLGIVHTPHGSFETPAFMPVGTQATVKTMSPEELKEMNAGIILSNTYHLWLRPGNDIVKEAGGLHKFMNWDRPILTDSGGFQVFSLSQFRKIEEEGVHFRNHLNGDKLFLSPEKAMEIQNDLGSDIMMAFDECPPYPATHEYMLQSVDRTTRWAKRCKEAHNRPEEQGLFGIIQGGEYEDLRRRSAEALVELDFPGYAIGGLSVGEPKDIMNRVLEFTTPLMPANKPRYLMGVGSPDSLIDGAIRGVDMFDCVLPTRIARNGTLMTSEGRLVVKNAKYARDFGPIDPNCDCYTCKNYSRAYIRHLIRTEETFGIRLTSYHNLHFLLKLMEQVREAIRQDRLGDFREEFFEKYGFNGPDAKNF

SEQ ID NO: 57123 - protein, 376 aa, Lysinibacillus sp.; identical to SEQ ID NO: 52825
  misc_feature (1)..(376): tr|A0A544UZG1|A0A544UZG1_9BACI Queuine tRNA-ribosyltran sferase OS=Lysinibacillus sp. SDF0063 OX=2133753 GN=tgt PE=3 SV=1

SEQ ID NO: 57124 - protein, 381 aa, Lysinibacillus sphaericus
  misc_feature (1)..(381): tr|A0A2X1AI97|A0A2X1AI97_LYSSH Queuine tRNA-ribosyltran sferase OS=Lysinibacillus sphaericus OX=1421 GN=tgt PE= 3 SV=1
MTQPAIRYELLHTCKQTGARLGIVHTPHGSFETPAFMPVGTQATVKTMSPEELKEMNAGIILSNTYHLWLRPGNDIVKEAGGLHKFMNWDRPILTDSGGFQVFSLSQFRKIEEEGVHFRNHLNGDKLFLSPEKAMEIQNDLGSDIMMAFDECPPYPATHDYMLKSVDRTTRWAKRCKEAHQRPEEQGLFGIIQGGEYEDLRRRSAEALVELDFPGYAIGGLSVGEPKDVMNRVLEFTTPMMPENKPRYLMGVGSPDSLIDGAIRGIDMFDCVLPTRIARNGTLMTSEGRLVVKNAKYARDFGPIDPNCDCYTCKNYSRAYVRHLIRTEETFGIRLTSYHNLHFLLKLMEQVREAIRQDRLGDFREEFFEKYGFNGPDAKNF

SEQ ID NO: 57125 - protein, 381 aa, Lysinibacillus sphaericus
  misc_feature (1)..(381): sp|B1HVA1|TGT_LYSSC Queuine tRNA-ribosyltransferase OS= Lysinibacillus sphaericus (strain C3-41) OX=444177 GN=t gt PE=3 SV=1
MTQPAIRYELLHTCKQTGARLGIVHTPHGSFETPAFMPVGTQATVKTMSPEELKEMNAGIILSNTYHLWLRPGNDIVKEAGGLHKFMNWDRPILTDSGGFQVFSLSQFRKIEEEGVHFRNHLNGDKLFLSPEKAMEIQNDLGSDIMMAFDECPPYPATHEYMLQSVDRTTRWAKRCKEAHSRPEEQGLFGIIQGGEYEDLRRRSAEALVELDFPGYAIGGLSVGEPKDIMNRVLEFTTPLMPANKPRYLMGVGSPDSLIDGAIRGVDMFDCVLPTRIARNGTLMTSEGRLVVKNAKYARDFGPIDPNCDCYTCKNYSRAYIRHLIRTEETFGIRLTSYHNLHFLLKLMEQVREAIRQDRLGDFREEFFEKYGFNGPNAKNF

SEQ ID NO: 57126 - protein, 381 aa, Lysinibacillus tabacifolii
  misc_feature (1)..(381): tr|A0A4U2XQJ2|A0A4U2XQJ2_9BACI Queuine tRNA-ribosyltran sferase OS=Lysinibacillus tabacifolii OX=1173107 GN=tgt PE=3 SV=1
MTQPAIRYELLHTCKQTGARLGIVHTPHGSFETPAFMPVGTQATVKTMSPEELKEMNAGIILSNTYHLWLRPGNDIVKEAGGLHKFMNWDRPILTDSGGFQVFSLSQFRKIEEEGVHFRNHLNGDKLFLSPEKAMEIQNDLGSDIMMAFDECPPYPATYDYMLKSVDRTTRWAKRCKEAHARPEEQGLFGIIQGGEYEELRRRSAEALVELDFPGYAIGGLSVGEPKDVMNRVLEFTTPLMPTNKPRYLMGVGSPDSLIDGAIRGIDMFDCVLPTRIARNGTLMTSEGRLVVKNAKYARDFGPIDPNCDCYTCKNYSRAYVRHLIRTEETFGIRLTSYHNLHFLLKLMEQVREAIREDRLGDFREEFFEKYGFNGPNAKNF

SEQ ID NO: 57127 - protein, 381 aa, Lysinibacillus telephonicus
  misc_feature (1)..(381): tr|A0A431UX31|A0A431UX31_9BACI Queuine tRNA-ribosyltran sferase OS=Lysinibacillus telephonicus OX=1714840 GN=tg t PE=3 SV=1
MTKPAVTYELIKTCKQTGARLGIVHTPHGSFETPAFMPVGTQATVKTMSPEELKEMNAGIILSNTYHLWLRPGNDIIKEAGGLHKFMNWDRPILTDSGGFQVFSLSDFRKIKEEGVHFRNHLNGDKLFLSPEKAMEIQNDLGSDIMMAFDECPPYPATYEYMLDSVDRTTRWAKRCKEAHKRPEDQALFGIVQGGEYEELRKRSAEALVELDLPGYAVGGLSVGEPKDIMNRMLEYTTPLLPENKPRYLMGVGSPDSLIDGAIRGIDMFDCVLPTRIARNGTLMTSEGRIVIKNAKYARDFGPLDPNCDCYTCKNYTRAYVRHLFRTEETFGLRLTTYHNLHFLLNLMEQVRQAIREDRLGDFREEFFEKYGFNKPNAKNF

SEQ ID NO: 57128 - protein, 381 aa, Lysinibacillus varians; identical to SEQ ID NO: 57126
  misc_feature (1)..(381): tr|X2GZ69|X2GZ69_9BACI Queuine tRNA-ribosyltransferase OS=Lysinibacillus varians OX=1145276 GN=tgt PE=3 SV=1

SEQ ID NO: 57129 - protein, 381 aa, Lysinibacillus xylanilyticus
  misc_feature (1)..(381): tr|A0A2M9PXC5|A0A2M9PXC5_9BACI Queuine tRNA-ribosyltran sferase OS=Lysinibacillus xylanilyticus OX=582475 GN=tg t PE=3 SV=1
MTQPAIRYELLHTCKQTGARLGIVHTPHGSFETPAFMPVGTQATVKTMSPEELKDMNAGIILSNTYHLWLRPGNDIVKEAGGLHKFMNWDRPILTDSGGFQVFSLSQFRKIEEEGVHFRNHLNGDKLFLSPEKAMEIQNDLGSDIMMAFDECPPYPATYDYMLKSVDRTTRWAKRCKEAHQRPEDQGLFGIIQGGEYEDLRRRSAEALVELDFPGYAIGGLSVGEPKDIMNRVLEFTTPLMPTNKPRYLMGVGSPDSLIDGAIRGIDMFDCVLPTRIARNGTLMTSEGRLVVKNAKYARDFGPIDPNCDCYTCKNYSRAYIRHLIRTEETFGIRLTTYHNLHFLLKLMEQVREAIREDRLGDFREEFFEKYGFNEPNAKNF

SEQ ID NO: 57130 - protein, 381 aa, Lysinibacillus xylanilyticus
  misc_feature (1)..(381): tr|A0A0K9F755|A0A0K9F755_9BACI Queuine tRNA-ribosyltran sferase OS=Lysinibacillus xylanilyticus OX=582475 GN=tg t PE=3 SV=1
MTQPAIRYELLHTCKQTGARLGIVHTPHGSFETPAFMPVGTQATVKTMSPEELKDMNAGIILSNTYHLWLRPGNDIVKEAGGLHKFMNWDRPILTDSGGFQVFSLSQFRKIEEEGVHFRNHLNGDKLFLSPEKAMEIQNDLGSDIMMAFDECPPYPATYDYMLKSVDRTTRWAKRCKEAHNRPEDQGLFGIIQGGEYEDLRRRSAEALVELDFPGYAIGGLSVGEPKDIMNRVLEFTTPLMPTNKPRYLMGVGSPDSLIDGAIRGIDMFDCVLPTRIARNGTLMTSEGRLVVKNAKYARDFGPIDPNCDCYTCKNYSRAYIRHLIRTEETFGIRLTTYHNLHFLLKLMEQVREAIREDRLGDFREEFFEKYGFNEPNAKNF

SEQ ID NO: 57131 - protein, 381 aa, Lysinibacillus xyleni
  misc_feature (1)..(381): tr|A0A285SA89|A0A285SA89_9BACI Queuine tRNA-ribosyltran sferase OS=Lysinibacillus xyleni OX=614648 GN=tgt PE=3 SV=1
MTKPAVTYELIKTCKQTGARLGIVHTPHGSFETPAFMPVGTQATVKTLSPEELKEMNAGIILSNTYHLWLRPGNDIVKEAGGLHKFMNWDRPILTDSGGFQVFSLSEFRKIEEEGVHFRNHLNGDKLFLSPEKAMEIQNDLGSDIMMAFDECPPYPATYDYMLASVDRTTRWAKRCKEAHQRPEDQALFGIVQGGEFEELRKRSAEALVELDFPGYAIGGLSVGEPKDIMNRMLEYTTPLLPANKPRYLMGVGSPDSLIDGAIRGVDMFDCVLPTRIARNGTLMTSEGRLVVKNAKYARDFGPIDPNCDCYTCKNYSRAYVRHLIRTEETFGIRLTTYHNLHFLLNLMEQVRQAIREDRLGDFREEFFEKYGFNKPDAKNF

SEQ ID NO: 57132 - protein, 379 aa, Lysobacter aestuarii
  misc_feature (1)..(379): tr|A0A508A0N4|A0A508A0N4_9GAMM Queuine tRNA-ribosyltran sferase OS=Lysobacter aestuarii OX=1706195 GN=tgt PE=3 SV=1
MSRMDFELLGTDGQARRGRIRFPRGTIETPAFMPVGTYGTVKGVLPHQVRELGAEIILGNTFHLFLRPGLEVIGEHGGLHGFARWDGPILTDSGGFQVFSLAHKRKITEAGVHFAAPTDGRKVFLGPEESMHIQKVLGSDIVMIFDECPPVHVDGQPVPVERIARSMELSLRWAERSRRAHEGNDAALFGIVQGGVHPDLRTRSAEGLRAIGFDGYAIGGLAVGETEDERNAMLDHTCPQLPADRPRYLMGVGRPEDLVEAVARGVDMFDCVMPTRNARNGHFFTSTGTIRVRNATYEHDLRPIEEGCDCHACANGFSRAYLRHLDRCNEMLGPMLGTLHNLRYYQRLMAGMREAIARGTFAAFRESFYATRGLTLPGA

SEQ ID NO: 57133 - protein, 365 aa, Lysobacter antibioticus
  misc_feature (1)..(365): tr|A0A0S2E059|A0A0S2E059_9GAMM Queuine tRNA-ribosyltran sferase OS=Lysobacter antibioticus OX=84531 GN=tgt PE=3 SV=1
MSFQLLGQDGAARRGRLTFPRGTVETPAFMPVGTYGSVKGIMPEHVRDLGAEIILGNTFHLYLRPGLDVIGDHGGLHGFARWNGPILTDSGGFQVFSLAHRRKITEQGVTFASPVDGSKVFLGPEESMNIQRVLDSDIVMIFDECTPYPATVEVARKSMELSLRWAERSKKAHEGNDAALFGIVQGGVHHELRTQSAAGLKGLGFDGYAIGGLAVGEPEAERNEMLEHTCPQLPEDRPRYLMGVGRPEDLVESVARGVDMFDCVMPTRNARNGHYFTPSGTVRVRNAKYERDLRPIEEGCDCYACSNGFSRAYLRHLDRCNEMLGPMLGTLHNLRYYQRLMAQMREAIEQGTFTAFRESFYAARA

SEQ ID NO: 57134 - protein, 370 aa, Lysobacter arseniciresistens
  misc_feature (1)..(370): tr|A0A0A0F415|A0A0A0F415_9GAMM Queuine tRNA-ribosyltran sferase OS=Lysobacter arseniciresistens ZS79 OX=913325 GN=tgt PE=3 SV=1
MSRMSFELLATDGAARRGRMSFPRGTVETPAFMPVGTYGSVKGVLPQQVRELGAEIILGNTFHLYLRPGLEVIEAHGGLHGFERWDGPILTDSGGFQVFSLAHKRKITEQGVTFAAPTDGSRVFLGPEESMRIQKVLGSDIVMIFDECTPYPATEQVAHASMELSLRWAERSKRAHEGNDAALFGIVQGGVHRELRTRSAASLKDIGFDGYAIGGLAVGEPEAERNAMLDHTAPQLPADRPRYLMGVGRPEDLVEAVARGVDMFDCVMPTRNARNGHFFTAEGVVRIRNSKYEKDLGPIEEGCDCLACAGGFSRSYLRHLDRCNEMLGPMLGTLHNLRHYQRLMAGMREAIAQGTFGAFRESFYAARTPG

SEQ ID NO: 57135 - protein, 368 aa, Lysobacter capsici
  misc_feature (1)..(368): tr|A0A120AG06|A0A120AG06_9GAMM Queuine tRNA-ribosyltran sferase OS=Lysobacter capsici AZ78 OX=1444315 GN=tgt PE =3 SV=1
MSRMSFELLGNDGAARRGRLTFPRGTVETPAFMPVGTYGSVKGIMPEHVAELGAQIILGNTFHLYLRPGLDVIGDHGGLHGFARWNGPILTDSGGFQVFSLAHRRKITEQGVTFASPVDGSKVFLGPEESMNIQRVLDSDIVMIFDECTPYPATIDVARKSMELSLRWAERSKKAHEGNDAALFGIVQGGVHHDLRTRSADGLKAIGFDGYAVGGLAVGEPEEERNAMLEHTCPQLPEDRPRYLMGVGRPEDLVESVARGVDMFDCVMPTRNARNGHYFTAHGTVRVRNAKYERDLRPIEEGCDCYACRNGFSRAYLRHLDRCNEMLGPMLGTLHNLRYYQRLMAQMRSAIEQGTFAAFRESFYAART

SEQ ID NO: 57136 - protein, 368 aa, Lysobacter capsici
  misc_feature (1)..(368): tr|A0A290ZZ70|A0A290ZZ70_9GAMM Queuine tRNA-ribosyltran sferase OS=Lysobacter capsici OX=435897 GN=tgt PE=3 SV= 1
MSRMSFELLGNDGAARRGRLTFPRGTVETPAFMPVGTYGSVKGIMPEHVAELGAQIILGNTFHLYLRPGLDVIGDHGGLHGFARWNGPILTDSGGFQVFSLAHRRKITEQGVTFASPVDGSKVFLGPEESMNIQRVLDSDIVMIFDECTPYPATEEVARKSMELSLRWAERSKKAHEGNDAALFGIVQGGVHHDLRTRSADGLKAIGFDGYAVGGLAVGEPEEERNAMLEHTCPQLPEDRPRYLMGVGRPEDLVESVARGVDMFDCVMPTRNARNGHYFTAHGTVRVRNAKYERDLRPIEEGCDCYACRNGFSRAYLRHLDRCNEMLGPMLGTLHNLRYYQRLMAQMRSAIEQGTFAAFRESFYAART

SEQ ID NO: 57137 - protein, 374 aa, Lysobacter concretionis
  misc_feature (1)..(374): tr|A0A0A0EJ13|A0A0A0EJ13_9GAMM Queuine tRNA-ribosyltran sferase OS=Lysobacter concretionis Ko07 = DSM 16239 OX= 1122185 GN=tgt PE=3 SV=1
MSGLPDSRMSFTLLGTDGDARRGRLSFPRGTVETPAFMPVGTYGTVKGIYPDDVRELGAQIILGNTFHLYLRPGLEVIEAHGGLHGFMRWDGPILTDSGGFQVFSLAHKRKITEAGVTFAAPIDGRKVFLGPEESMHIQKVLGADVVMIFDECTPYPATEEVARKSMELSLRWAERSRIAHGGNDAALFGIVQGGVHHDLRTRSADGLKQIGFDGYAIGGLAVGEPEHERNAMLEHTCPQLPADRPRYLMGVGRPEDLVEGVARGIDMFDCVMPTRNARNGHFFTSTGTVRIRNAKYEHDLRPIEEGCDCLACAGGFTRSYLRHLDRCNEMLGPMLGTAHNLRYYQRLMAQMREAIGQGTFAAFRESFYAAREP

SEQ ID NO: 57138 - protein, 377 aa, Lysobacter daejeonensis
  misc_feature (1)..(377): tr|A0A0A0F129|A0A0A0F129_9GAMM Queuine tRNA-ribosyltran sferase OS=Lysobacter daejeonensis GH1-9 OX=1385517 GN= tgt PE=3 SV=1
MSRMSFELLGSDGQARRGRLTFPRGTVETPAFMPVGTYGSVKGVMPEQVRELGAEIILGNTFHLYLRPGLDVIADHGGLHGFGRWSGPILTDSGGFQVFSLAHKRKITEQGVTFAAPTDGRKVFLGPEESMHIQKVLDSDIVMIFDECTPYLVDGQPASEQVARKSMELSLRWAERSKKAHEGNDAALFGIVQGGMYPELRTRSAEGLKQIGFDGYAIGGLAVGEPEEVRNHTLDHIAPQLPEDRPRYLMGVGRPEDLVEAVARGVDMFDCVMPTRNARNGHYFTSFGTVRVRNAKYERDLRPIEEGCDCYACSRGFSRSYLRHLDRCNEMLAPMLGTLHNLRYYQRLMAQMRAAIEQGTFQAFREAFYATRAAGGD

SEQ ID NO: 57139 - protein, 375 aa, Lysobacter defluvii
  misc_feature (1)..(375): tr|A0A0A0M9N8|A0A0A0M9N8_9GAMM Queuine tRNA-ribosyltran sferase OS=Lysobacter defluvii IMMIB APB-9 = DSM 18482 OX=1385515 GN=tgt PE=3 SV=1
MSRMSFELLGTDGAARRGRLSFPRGTVETPAFMPVGTYGSVKGVLPPQLRDMGAEIILGNTFHLFLRPGLEVIEAHGGLHGFARWDGPILTDSGGFQVFSLAHKRRITEAGVHFAAPTDGSRVFLGPEESMHIQKVLGSDIVMIFDECTPYPATEEVARTSMELSLRWAERSRRAHEGNDAALFGIVQGGVHPDLRSRSAAALVDIGFDGYAVGGLAVGEPEHERNAMLEHTCPQLPADRPRYLMGVGRPEDLVEGVARGIDMFDCVMPTRNGRNGHYFTASGTVRVRNAKYEHDLRPIEEGCDCVACAGGFTRAYLRHLDRCNEMLGPMLGTLHNLRYYQRLMAQVRAAVASGTFRAFRESFYQARGAQPPPLA

SEQ ID NO: 57140 - protein, 376 aa, Lysobacter dokdonensis
  misc_feature (1)..(376): tr|A0A0A2WE95|A0A0A2WE95_9GAMM Queuine tRNA-ribosyltran sferase OS=Lysobacter dokdonensis DS-58 OX=1300345 GN=t gt PE=3 SV=1
MRFEFLGTDGGARRGRLHFPRGTVETPAFMPVGTYGSVKGVLPEQIRALGAEIILGNTFHLYLRPGLEVIEAHGGLHGFARWDGPILTDSGGFQVFSLAHRRKITEKGVTFAAPTDGSTVFLGPEESMRIQKVLDSDIVMIFDECTPYPATQAVAQASMELSLRWAERSKRAHEGNDAALFGIVQGGVHHDLRSASAAGLRGIGFDGYAIGGLAVGEPEDERNAMLDHTCPQLPEDRPRYLMGVGRPEDLVEAVARGVDMFDCVMPTRNARNGHYFTSFGTVRIRNAKYEKDVRPIEEGCGCPTCSGGYTRAYLRHLDRCNEMLAPMLGTLHNLWYYEKLMADMRAAIEAGTFAAFRESFYAARTTSPGASPGHVA

SEQ ID NO: 57141 - protein, 368 aa, Lysobacter enzymogenes
  misc_feature (1)..(368): tr|A0A0S2DJP2|A0A0S2DJP2_LYSEN Queuine tRNA-ribosyltran sferase OS=Lysobacter enzymogenes OX=69 GN=tgt PE=3 SV= 1
MSRMSFQLLGQDGAARRGRLTFPRGTVETPAFMPVGTYGSVKGIMPEHVRELGAQIILGNTFHLYLRPGLDVIGDHGGLHGFARWNGPILTDSGGFQVFSLAHRRKITEQGVTFASPVDGSKVFLGPEESMNIQRVLDSDIVMIFDECTPYPAAEDVARKSMELSLRWAERSKKAHEGNDAALFGIVQGGVHHGLRTRSAEALKALGFDGYAIGGLAVGEPEAERNEMLEHTCPQLPQDRPRYLMGVGRPEDLVESVARGVDMFDCVMPTRNARNGHYFTAQGTVRVRNAKYERDLRPIEEGCDCYACANGFSRAYLRHLDRCNEMLGPMLGTLHNLRYYQRLMAQMRAAIEQGTFAAFRESFYAARM

SEQ ID NO: 57142 - protein, 368 aa, Lysobacter enzymogenes
  misc_feature (1)..(368): tr|A0A1H2XZ81|A0A1H2XZ81_LYSEN Queuine tRNA-ribosyltran sferase OS=Lysobacter enzymogenes OX=69 GN=tgt PE=3 SV= 1
MSRMSFQLLGQDGAARRGRLTFPRGTVETPAFMPVGTYGSVKGIMPEHVRDLGAQIILGNTFHLYLRPGLDVIGDHGGLHGFARWNGPILTDSGGFQVFSLAHRRKITEQGVTFASPVDGSKVFLGPEESMKIQRVLDSDIVMIFDECTPYPATEEVARKSMELSLRWAERSKRAHEGNDAALFGIVQGGVHHDLRTRSAQALKALDFDGYAVGGLAVGEPEAERNEMLEHTCPQLPEHRPRYLMGVGRPEDLVESVARGVDMFDCVMPTRNARNGHYFTAQGTVRVRNAKYERDLRPIEEGCDCYACANGFSRAYLRHLDRCNEMLGPMLGTLHNLRYYQRLMAQMRAAIEQGTFAAFRESFYAARM

SEQ ID NO: 57143 - protein, 365 aa, Lysobacter gummosus
  misc_feature (1)..(365): tr|A0A0S2G9C3|A0A0S2G9C3_9GAMM Queuine tRNA-ribosyltran sferase OS=Lysobacter gummosus OX=262324 GN=tgt PE=3 SV =1
MSFQLLGNDGAARRGRLTFPRGTVETPAFMPVGTYGSVKGIMPEHVAELGAQIILGNTFHLYLRPGLDVIGDHGGLHGFARWNGPILTDSGGFQVFSLAHRRKITEQGVTFASPVDGSKVFLGPEESMNIQRVLDSDIVMIFDECTPYPATIDVARKSMELSLRWAERSKRAHEGNDAALFGIVQGGVHHELRTRSAEALRALDFDGYAVGGLAVGEPEDERNAMLEHTCPQLPEDRPRYLMGVGRPEDLVESVARGVDMFDCVMPTRNARNGHYFTAQGTVRVRNAKYERDLRPIEEGCDCYACRNGFSRAYLRHLDRCNEMLGPMLGTLHNLRYYQRLMAQMREAIEQGTFTAFRESFYAARQ

SEQ ID NO: 57144 - protein, 385 aa, Lysobacter lycopersici
  misc_feature (1)..(385): tr|A0A516V4G0|A0A516V4G0_9GAMM Queuine tRNA-ribosyltran sferase OS=Lysobacter lycopersici OX=1324796 GN=tgt PE= 3 SV=1
MSRMQFQLLGNDGAARRGRITFPRGTVETPAFMPVGTYGSVKGMLPGQLRDLGAEMVLGNTFHLFLRPGLEVIEAHGGLHGFMRWNGPILTDSGGFQVFSLAHRRKVTEQGVTFAAPTDGSKVFLGPEESMHIQKVLGSDIVMIFDECPPVNGKDGQPVHPRVVEKSMELSLRWAERSKVAHAGNDAALFGIVQGGVHRDLRTRSAEGLKQIGFDGYAIGGLAVGESEAERNAMLDHTAPQLPEDRPRYLMGVGRPEDLVEAVARGVDMFDCVMPTRNARNGHYFTSTGTVRIRNSKYERDLRTIEEGCGCAACAGGYSRAYLRHLDRCNEMLAPILGTLHNLWYYEKLMADMRSAIGQGTFAAFRESFHAARKTPRPHSGEGLG

SEQ ID NO: 57145 - protein, 375 aa, Lysobacter maris
  misc_feature (1)..(375): tr|A0A2U9T5T9|A0A2U9T5T9_9GAMM Queuine tRNA-ribosyltran sferase OS=Lysobacter maris OX=1605891 GN=tgt PE=3 SV=1
MSFQLLGRDGAARRGRISFPRGTIETPAFMPVGTYGTVKGVLPHQIRELGAQIILGNTFHLFLRPGLEVIGEHGGLHGFARWDGPILTDSGGFQVFSLAHKRKITEAGVHFAAPTDGRKVFLGPEESMHIQKVLGSDIVMIFDECPPVQVDGKPVAVEVVKRSMELSLRWAERSKKAHEGNDAALFGIVQGGVHHELRSRSADGLKAIGFDGYAIGGLAVGETEAERNAMLDHTCPQLPQERPRYLMGVGRPEDLVEAVARGVDMFDCVMPTRNARNGHFFTAGGTIRVRNAKYEHDLRPIEEGCDCHACANGFSRAYLRHLDRCNEMLGPMLGTLHNLRYYQRLMAQMRDAIGQGTFAAFRESFYAARGAAPPA

SEQ ID NO: 57146 - protein, 378 aa, Lysobacter maris
  misc_feature (1)..(378): tr|A0A507ZWQ3|A0A507ZWQ3_9GAMM Queuine tRNA-ribosyltran sferase OS=Lysobacter maris OX=1605891 GN=tgt PE=3 SV=1
MSRMSFQLLGRDGAARRGRISFPRGTIETPAFMPVGTYGTVKGVLPHQIRELGAQIILGNTFHLFLRPGLEVIGEHGGLHGFARWDGPILTDSGGFQVFSLAHKRKITEAGVHFAAPTDGRKVFLGPEESMHIQKVLGSDIVMIFDECPPVQVGGKPVAVEVVKRSMELSLRWAERSKKAHEGNDAALFGIVQGGVHHELRSRSADGLKAIGFDGYAIGGLAVGETEAERNAMLDHTCPQLPQERPRYLMGVGRPEDLVEAVARGVDMFDCVMPTRNARNGHFFTAGGTIRVRNAKYEHDLRPIEEGCDCHACANGFSRAYLRHLDRCNEMLGPMLGTLHNLRYYQRLMAQMRDAIGQGTFAAFRESFYVARGAAPPA

SEQ ID NO: 57147 - protein, 376 aa, Lysobacter pythonis
  misc_feature (1)..(376): tr|A0A3M2I1V3|A0A3M2I1V3_9GAMM Queuine tRNA-ribosyltran sferase OS=Lysobacter pythonis OX=2483112 GN=tgt PE=3 S V=1
MSRMSFQLIGRDGAARRGRLHFPRGSVETPAFMPVGTYGSVKGVFPEQIRQLGAEIILGNTFHLWLRPGLEVIEAHGGLHGFGRWAGPILTDSGGFQVFSLAHRRKIDEAGVTFAAPTDGRKVFLGPEASMHIQKVLGSDIVMIFDECPPVNIDGKPADKGLIERSMQLSLRWAERSKRAHAGNDAALFGIVQGGVHHDLRTRSAEGLKAIGFDGYAIGGLAVGESEAERNAMLDHTAPQLPADRPRYLMGVGRPEDLVEAVARGVDMFDCVMPTRNARNGHFFTSTGTVRIRNAKYERDLRPIEEGCDCYACANGFSRGYLRHLDRCNEMLAPMLGTLHNLRYYQRLMAGMREAIEQARFADFRAAFYAARGRDG

SEQ ID NO: 57148 - protein, 420 aa, Lysobacter ruishenii
  misc_feature (1)..(420): tr|A0A562LSP0|A0A562LSP0_9GAMM Queuine tRNA-ribosyltran sferase OS=Lysobacter ruishenii OX=686800 GN=tgt PE=3 S V=1
MSPGLPPATDNEHAPDASGEGNPAVGNDGFRSDVADDRATPAADSRMSFELLGTDGQARRGRLTFPRGTVETPAFMPVGTYGSVKGVMPEQVRELGAEIILGNTFHLYLRPGLDVIADHGGLHGFGRWNGPILTDSGGFQVFSLAHKRRITEQGVTFAAPTDGRKVFLGPEESMHIQKVLDSDIVMIFDECTPYLVDGQPASEQVACKSMELSLRWAERSRKAHEGNDAALFGIVQGGMYPELRTRSAEGLKQIGFDGYAIGGLAVGEPEEVRNHTLDHIAPQLPEDRPRYLMGVGRPEDLVEAVARGVDMFDCVMPTRNARNGHYFTSFGTVRVRNARYERDLRPIEEGCDCYACSRGFSRSYLRHLDRCNEMLAPMLGTLHNLRYYQRLMAQMRAAIEQGRFADFRAEFYALRAGGGD

SEQ ID NO: 57149 - protein, 377 aa, Lysobacter silvestris
  misc_feature (1)..(377): tr|A0A2K1PXZ8|A0A2K1PXZ8_9GAMM Queuine tRNA-ribosyltran sferase OS=Lysobacter silvestris OX=1645665 GN=tgt PE=3 SV=1
MNFELLAIDGAARRGRLTFPRGTVETPAFMPVGTYGSVKGVLPQQVRDLGAEIILGNTFHLYLRPGLEVIAAHGGLHGFTRWSGPILTDSGGFQVFSLAHRRKITEEGVTFAAPTDGSKVFLGPEESMHIQKVLDSDIVMIFDECPPVHVDGKPVDQRVVERSMELSLRWAERSKRAHEGNDAALFGIVQGGVHRDLRTRSAEGLKKIGFDGYAVGGLAVGETEAERNAMLEHTVPQLPADRPRYLMGVGRPEDLVEGVARGIDMFDCVMPTRNARNGHFFTATGTIRIRNAKYESDLRPIEEGCDCEACAGGYSRSYLRHLDRCNEMLAPMLGTLHNLRYYQRLMAQMREAIAAGRFEEFRQAFYAARAGNPAAEA

SEQ ID NO: 57150 - protein, 370 aa, Lysobacter soli
  misc_feature (1)..(370): tr|A0A3D8VC65|A0A3D8VC65_9GAMM Queuine tRNA-ribosyltran sferase OS=Lysobacter soli OX=453783 GN=tgt PE=3 SV=1
MSRLSFELLRTDGAARRGRLTFPRGTVETPTFMPVGTYGSVKGVLPEQVRELGAEMILGNTFHLYLRPGLDVIGDHGGLHRFTGWNGPILTDSGGFQVFSLAHKRKITEQGVTFAAPTDGSKVFLGPEESMRIQKVLDSDVVMIFDECTPYPATEDVARRSMELSLRWAERSKRAHEGSDAALFGIVQGGVHEALRTRSAAALVDIGFDGYAIGGLAVGEPEAERNHMLEHTCPQLPADQPRYLMGVGRPEDLVEGVARGIDMFDCVMPTRNARNGHYFTSFGTVRVRNAKYERDLRPIEEGCDCYTCRNGFTRSYLRHLDRCNEMLGPMLGTLHNLRYYQRLMAQMREAIAQGTFAAFRESFYASRTPE

SEQ ID NO: 57151 - protein, 378 aa, Lysobacter sp.
  misc_feature (1)..(378): tr|A0A4R4EYF2|A0A4R4EYF2_9GAMM Queuine tRNA-ribosyltran sferase OS=Lysobacter sp. N42 OX=2545719 GN=tgt PE=3 SV =1
MSRMSFQLLGTDGVARRGRLTFPRGTVETPAFMPVGTYGSVKGVMPQQVRELGAEIILGNTFHLYLRPGLDVIADHGGLHGFARWNGPILTDSGGFQVFSLAHRRKITEEGVTFASPTDGAKVFLGPEESMRIQKVLDSDIVMIFDECPPVQKDGKPVHPDVVRRSMELSLRWAERSRRAHERNDAALFGIVQGGVHHELRTRSAEGLKAIGFDGYAIGGLAVGETEAERNAMLEHTAPQLPADRPRYLMGVGRPEDLVEAVARGVDMFDCVMPTRNARNGHYFTAFGTVRVRNAKYERDTRPIEEGCDCYACANGFTRSYLRHLDRCNEMLGPMLGTLHNLRYYQRLMAGMRLAIEERRFEAFRAEFHRRRQAGEGG

SEQ ID NO: 57152 - protein, 369 aa, Lysobacter sp.
  misc_feature (1)..(369): tr|A0A0D0RZY4|A0A0D0RZY4_9GAMM Queuine tRNA-ribosyltran sferase OS=Lysobacter sp. A03 OX=1199154 GN=tgt PE=3 SV =1
MSRMAFELLGTDGAARRGRLSFPRGMVETPAFMPVGTYGTVKGIYPQAVRELGAQMVLGNTFHLFLRPGLEVIEAHGGLHGFMRWDGPILTDSGGFQVFSLAHKRKITEAGVTFAAPIDGRKVFLGPEESMHIQKVLGSDVVMIFDECTPYPATEEVARTSMELSLRWAERSRKAHEGNDAALFGIVQGGVHHALRTRSAAGLTAIGFDGYAIGGLAVGEPEEERNAMLEHTCPQLPSERPRYLMGVGRPEDLVEGVARGIDMFDCVMPTRNARNGHFFTATGTVRIRNAKYEHDLGPIEEGCDCTACAGGFSRSYLRHLDRCNEMLGPMLGTAHNLRYYQRLMAQMRGAIAGGTFAAFRESFYEARRA

SEQ ID NO: 57153 - protein, 374 aa, Lysobacter spongiicola
  misc_feature (1)..(374): tr|A0A1T4N6K3|A0A1T4N6K3_9GAMM Queuine tRNA-ribosyltran sferase OS=Lysobacter spongiicola DSM 21749 OX=1122188 GN=tgt PE=3 SV=1
MSASPASRMSFELLGTDGGARRGRVSFPSGTIETPAFMPVGTYGSVKAVLPQQVRELGAEIILGNTFHLYLRPGLEVIEAHGGLHRFMGWERPILTDSGGFQVFSLAHKRKITEAGVTFAAPTDGRKVFLGPEESMHIQKVLGSDIVMIFDECTPYPATEDVARASMELSLRWAERSRRAHEGNDAALFGIVQGGVHHGLRTRSAEALKQIGFDGYAIGGLAVGEPEAERNEMLEHTTPQLPQDRPRYLMGVGRPEDLVEAVARGVDMFDCVMPTRNARNGHFFTDQGVVRIRNARYEHDLRPIEEGCDCHACANGFSRSYLRHLDRCNEMLGPMLGTLHNLRHYQRLMARMRAAIEQGGFAAFRESFHAARQG

SEQ ID NO: 57154 - protein, 378 aa, Lysobacter tolerans
  misc_feature (1)..(378): tr|A0A1N6NXZ4|A0A1N6NXZ4_9GAMM Queuine tRNA-ribosyltran sferase OS=Lysobacter tolerans OX=1604334 GN=tgt PE=3 S V=1
MSRMSFELLATDGAARRGRLTFPRGTVETPAFMPVGTYGSVKGVFPEQIRDLGAEIILGNTFHLYLRPGLDVIEAHGGLHGFGKWNGPILTDSGGFQVFSLAKRRKITEEGVTFAAPTDGSKVFIGPEESMHIQKVLGSDIVMIFDECPPVQIDGKPVDVGVVARSMELSLRWAERSKRAHEGNDAALFGIVQGGVHHDLRSRSAEGLKEIGFDGYAIGGLAVGETEAERNAMLDHTTPQLPDDHPRYLMGVGRPEDLVEAVARGVDMFDCVMPTRNARNGHFFTADGTVRIRNAKYEHDLGVIEEGCDCYACANGFSRAYIRHLDRCNEMLAPMLGTLHNLRHYQRLMAGMREAIAAGRFTDFRADFYAARGANPPN

SEQ ID NO: 57155 - protein, 376 aa, Macellibacteroides sp.
  misc_feature (1)..(376): tr|A0A1C2BSV2|A0A1C2BSV2_9PORP Queuine tRNA-ribosyltran sferase OS=Macellibacteroides sp. HH-ZS OX=1857568 GN=t gt PE=3 SV=1
MKFELQYKDTKTNARAGLITTDHGVIETPIFMPVGTQGSVKAVHMTELKEDIKAQIILGNTYHLYLRPGLEILKQAGGLHKFNSWNGPILTDSGGFQVFSLAENRKLHEEGAEFRSHIDGSKHLFTPEKVMDIERTIGADIIMAFDECCPGDADYNYAKESLGLTERWLDRCFNRFNSTDPMYGYNQSLFPIVQGCVYPDLRIRAAENVASKGADGNAIGGLAVGEPTEKMYEMIEVVNDILPKDKPRYLMGVGTPVNLLEAIERGVDMFDCIMPTRNGRNGQLFTKYGTMNMRNQKWENDFSPLDTEGTSYVDSLYSKAYVRHLFKTNELLGLQIASIHNLAFYLWLVGEARKHIIAGDFSIWKSGMVTQLSNRL

SEQ ID NO: 57156 - protein, 379 aa, Macrococcus bohemicus
  misc_feature (1)..(379): tr|A0A4R5Y7M8|A0A4R5Y7M8_9STAP Queuine tRNA-ribosyltran sferase OS=Macrococcus bohemicus OX=1903056 GN=tgt PE=3 SV=1
MPAVTYEHIKTCKQSGARLGIVHTPHGSFETPMFMPVGTQATVKTMSPEELKAMNAKIILSNTYHLWLRPGSDIIREAGGLHKFMNWDRPILTDSGGFQVFSLSDMRKIEEEGVHFRHHLNGSKLFLSPEKAMHIQNDLGSDIMMAFDECPPMPATYEYVKASIERTSRWAERCLEAHQRPNDQALFGIIQGGEYEDLRTQSAKDLVSLDFPGYAIGGLSVGEPKPIMYRMLEHTTPLMPFDKPRYLMGVGSPDALIEGAIRGIDMFDCVLPTRIARNGTCMTSKGRVVVKNAKYERDYTPLDENCDCYTCKNYTKAYIRHLIKADETFGIRLTTIHNLHFLLNMMEQVREAIRNDRLLDFKEEFFEAYGLNVENPKNF

SEQ ID NO: 57157 - protein, 379 aa, Macrococcus bohemicus
  misc_feature (1)..(379): tr|A0A328A6X4|A0A328A6X4_9STAP Queuine tRNA-ribosyltran sferase OS=Macrococcus bohemicus OX=1903056 GN=tgt PE=3 SV=1
MPAVTYEHIKTCKQSGARLGIVHTPHGSFETPMFMPVGTQATVKTMSPEELKAMNAKIILSNTYHLWLRPGSDIIREAGGLHKFMNWDRPILTDSGGFQVFSLSDMRKIEEEGVHFRHHLNGSKLFLSPEKAMHIQNDLGSDIMMAFDECPPMPATYEYVKASIERTSRWAERCLEAHQRPNDQALFGIIQGGEYEDLRTQSAKDLVSLDFPGYAIGGLSVGEPKPIMYRMLEHTTPLMPFDKPRYLMGVGSPDALIEGAIRGIYMFDCVLPTRIARNGTCMTSKGRVVVKNAKYERDYTPLDENCDCYTCKNYTKAYIRHLIKADETFGIRLTTIHNLHFLLNMMEQVREAIRNDRLLDFKEEFFEAYGLNVENPKNF

SEQ ID NO: 57158 - protein, 379 aa, Macrococcus bovicus
  misc_feature (1)..(379): tr|A0A4R6C3B2|A0A4R6C3B2_9STAP Queuine tRNA-ribosyltran sferase OS=Macrococcus bovicus OX=69968 GN=tgt PE=3 SV= 1
MPAVTYEHIKTCKQSGARLGIVHTPHGSFETPMFMPVGTQATVKTVSPEELHAMNAKIILSNTYHLWLRPGSDIIREAGGLHQFMNWDGPILTDSGGFQVFSLSDMRKIEEEGVHFRHHLNGSKLFLSPEKAMQIQNDLGSDIMMAFDECPPMPAEYQYVKDSIERTSRWAERCLKAHNRPEDQALFGIIQGGEYEDLRTQSAKDLVSLDFPGYAIGGLSVGEPKPIMYRMLEHTTPLMPFNKPRYLMGVGSPDALIEGAIRGIDMFDCVLPTRIARNGTCMTSKGRVVVKNAKYERDFTPLDENCDCYTCKNYTKAYIRHLIKADETFGIRLTSIHNLHFLLNMMEQVREAIRNDRLLDFKEEFFESYGLNVENPKNF

SEQ ID NO: 57159 - protein, 379 aa, Macrococcus brunensis
  misc_feature (1)..(379): tr|A0A4R6BEJ8|A0A4R6BEJ8_9STAP Queuine tRNA-ribosyltran sferase OS=Macrococcus brunensis OX=198483 GN=tgt PE=3 SV=1
MPAVTYEHIKTCKQSGARLGIVHTPHGSFETPMFMPVGTQATVKTVSPEELHAMNAKIILSNTYHLWLRPGNDVIREAGGLHKFMNWDGPILTDSGGFQVFSLSDMRKIEEEGVHFRHHLNGSKLFLSPEKAMHIQNDLGSDIMMAFDECPPMPAEYKYVKDSIERTSRWAERCLKAHNRPEDQALFGIIQGGEYEDLRTQSAKDLVSLDFPGYAIGGLSVGEPKPIMYRMLEHTTPLMPFNKPRYLMGVGSPDALIEGAIRGIDMFDCVLPTRIARNGTCMTSKGRVVVKNAKYERDFTPLDENCDCYTCKNYTKAYIRHLIKADETFGIRLTSIHNLHFLLNMMEQVREAIRNDRLLDFKEEFFESYGLNVENPKNF

SEQ ID NO: 57160 - protein, 379 aa, Macrococcus canis
  misc_feature (1)..(379): tr|A0A4R6C7V4|A0A4R6C7V4_9STAP Queuine tRNA-ribosyltran sferase OS=Macrococcus canis OX=1855823 GN=tgt PE=3 SV= 1
MNAVTYEHIKTCKQSGARLGIVHTPHGSFETPMFMPVGTQATVKTMSPEELKAMNAKIILSNTYHLWLRPGNDIIREAGGLHKFMNWDGPILTDSGGFQVFSLSDMRKIEEEGVHFRHHLNGSKLFLSPEKAMHIQNDLGSDIMMAFDECPPMPATYEYVKASIERTSRWAERCLEAHQRPQDQALFGIIQGGEYEDLRTQSAKDLISMDFPGYAIGGLSVGEPKPIMYRMLEHTTPLMPFNKPRYLMGVGSPDALIEGAIRGIDMFDCVLPTRIARNGTCMTSKGRVVVKNAKYERDFTPLDEKCDCYTCKNYTKAYLRHLIKADETFGIRLTTIHNLHFLLNLMELVREAIRNDRLLDFKEEFFEEYGLNVENPKNF

SEQ ID NO: 57161 - protein, 379 aa, Macrococcus canis
  misc_feature (1)..(379): tr|A0A1W7ACF3|A0A1W7ACF3_9STAP Queuine tRNA-ribosyltran sferase OS=Macrococcus canis OX=1855823 GN=tgt PE=3 SV= 1
MNAVTYEHIKTCKQSGARLGIVHTPHGSFETPMFMPVGTQATVKTMSPEELKAMNAKIILSNTYHLWLRPGNDIIREAGGLHKFMNWDGPILTDSGGFQVFSLSDMRKIEEEGVHFRHHLNGSKLFLSPEKAMHIQNDLGSDIMMAFDECPPMPATYEYVKASIERTSRWAERCLEAHQRPQDQALFGIIQGGEYEDLRTQSAKDLISMDFPGYAIGGLSVGEPKPIMYRMLEHTTPLMPFNKPRYLMGVGSPDALIEGAIRGIDMFDCVLPTRIARNGTCMTSKGRVVVKNAKYERDFTPLDEKCDCYTCKNYTKAYLRHLIKADETFGIRLTTIHNLHFLLNLMEQVREAIRNDRLLDFKEEFFEEYGLNVENPKNF

SEQ ID NO: 57162 - protein, 379 aa, Macrococcus carouselicus
  misc_feature (1)..(379): tr|A0A4R6BR31|A0A4R6BR31_9STAP Queuine tRNA-ribosyltran sferase OS=Macrococcus carouselicus OX=69969 GN=tgt PE= 3 SV=1
MSAVTYEHIKTCKQSGARLGIVHTPHGSFETPMFMPVGTQATVKTVSPEELHAMNAKIILSNTYHLWLRPGNEVIREAGGLHKFMNWDGPILTDSGGFQVFSLSDMRKIEEEGVHFRHHLNGSKLFLSPEKAMHIQNDLGSDIMMAFDECPPMPAEYQYVKDSIERTSRWAERCLEAHNRPEDQALFGIIQGGEYEELRTQSAKDLVSLDFPGYAIGGLSVGEPKPVMYRVLEHTTPLMPFNKPRYLMGVGSPDALIEGAIRGIDMFDCVLPTRIARNGTCMTSKGRVVVKNAKYERDFTPLDENCDCYTCRNYTKAYIRHLIKADETFGIRLTSIHNLHFLLNMMEQVRDAIRNDRLLDFKEEFFESYGLNVENPKNF

SEQ ID NO: 57163 - protein, 379 aa, Macrococcus caseolyticus
  misc_feature (1)..(379): sp|B9E716|TGT_MACCJ Queuine tRNA-ribosyltransferase OS= Macrococcus caseolyticus (strain JCSC5402) OX=458233 GN =tgt PE=3 SV=1
MNAVTYEHIKTCKQSGARLGIVHTPHGSFETPMFMPVGTQATVKTMSPEELKAMNAKIILSNTYHLWLRPGNDVIREAGGLHKFMNWDGPILTDSGGFQVFSLSDMRKIEEEGVHFRHHLNGSKLFLSPHKAMHIQNDLGSDIMMAFDECPPMPATYEYVKASIERTSRWAERCLEAHQRPEDQALFGIIQGGEYEDLRTQSAKDLVSMDFPGYAIGGLSVGEPKPIMYRMLEHTTPLMPFNKPRYLMGVGSPDALIEGAIRGIDMFDCVLPTRIARNGTCMTSKGRVVVKNAKYERDFTPLDEKCECYTCKNYTKAYLRHLIKADETFGIRLTTIHNLHFLLNLMEQVREAIRNDRLLDFKEEFFEEYGLNVENPKNF

SEQ ID NO: 57164 - protein, 379 aa, Macrococcus caseolyticus
  misc_feature (1)..(379): tr|A0A2N0VTK6|A0A2N0VTK6_9STAP Queuine tRNA-ribosyltran sferase OS=Macrococcus caseolyticus OX=69966 GN=tgt PE= 3 SV=1
MNAVTYEHIKTCKQSGARLGIVHTPHGSFETPMFMPVGTQATVKTMSPEELKAMNAKIILSNTYHLWLRPGNDVIREAGGLHKFMNWDGPILTDSGGFQVFSLSDMRKIEEEGVHFRHHLNGSKLFLSPEKAMHIQNDLGSDIMMAFDECPPMPATYEYVKASIERTSRWAERCLEAHQRPEDQALFGIIQGGEYEDLRTQSAKNLVSMDFPGYAIGGLSVGEPKPIMYRMLEHTTPLMPFNKPRYLMGVGSPDALIEGAIRGIDMFDCVLPTRIARNGTCMTSKGRVVVKNAKYERDFTPLDEKCECYTCKNYTKAYLRHLIKADETFGIRLTTIHNLHFLLNLMEQVREAIRNDRLLDFKEEFFEEYGLNVENPKNF

SEQ ID NO: 57165 - protein, 379 aa, Macrococcus epidermidis; identical to SEQ ID NO: 57156
  misc_feature (1)..(379): tr|A0A327ZXD5|A0A327ZXD5_9STAP Queuine tRNA-ribosyltran sferase OS=Macrococcus epidermidis OX=1902580 GN=tgt PE =3 SV=1

SEQ ID NO: 57166 - protein, 379 aa, Macrococcus goetzii
  misc_feature (1)..(379): tr|A0A4R6CBX2|A0A4R6CBX2_9STAP Queuine tRNA-ribosyltran sferase OS=Macrococcus goetzii OX=1891097 GN=tgt PE=3 S V=1
MPAVTYEHIKTCKQSGARLGIVHTPHGSFETPMFMPVGTQATVKTMSPEELKAMNAKIILSNTYHLWLRPGSDIIREAGGLHKFMNWDRPILTDSGGFQVFSLSDMRKIEEEGVHFRHHLNGSKLFLSPEKAMHIQNDLGSDIMMAFDECPPMPATYEYVKASIERTSRWAERCLEAHQRPNDQALFGIIQGGEYEDLRTQSAKDLVSLDFPGYAIGGLSVGEPKPIMYRMLEHTTPLMPFDKPRYLMGVGSPDALIEGAIRGIDMFDCVLPTRIARNGTCMTSKGRVVVKNAKYERDYTPLDEKCDCYTCKNYTKAYIRHLIKADETFGIRLTTIHNLHFLLNMMEQVREAIRNDRLLDFKEEFFEAYGLNVENPKNF

SEQ ID NO: 57167 - protein, 379 aa, Macrococcus goetzii; identical to SEQ ID NO: 57156
  misc_feature (1)..(379): tr|A0A2G5NPB3|A0A2G5NPB3_9STAP Queuine tRNA-ribosyltran sferase OS=Macrococcus goetzii OX=1891097 GN=tgt PE=3 S V=1

SEQ ID NO: 57168 - protein, 379 aa, Macrococcus hajekii
  misc_feature (1)..(379): tr|A0A4R6BM77|A0A4R6BM77_9STAP Queuine tRNA-ribosyltran sferase OS=Macrococcus hajekii OX=198482 GN=tgt PE=3 SV =1
MPAVTYEHIKTCKQSGARLGIVHTPHGSFETPMFMPVGTQATVKTVSPEELHAMNAKIILSNTYHLWLRPGSDIIREAGGLHQFMNWNGPILTDSGGFQVFSLSDMRKIEEEGVHFRHHLNGSKLFLSPEKAMHIQNDLGSDIMMAFDECPPMPAEYKYVKDSIERTSRWAERCLKAHNRPEDQALFGIIQGGEYEELRTQSAKDLVSLDFPGYAIGGLSVGEPKPIMYRMLEHTTPLMPFNKPRYLMGVGSPDALIEGAIRGIDMFDCVLPTRIARNGTCMTSKGRVVVKNAKYERDFTPLDANCDCYTCKNYTKAYIRHLIKADETFGIRLTSIHNLHFLLNLMEQVREAIRNDRLLDFKEEFFENYGLNVENPKNF

SEQ ID NO: 57169 - protein, 379 aa, Macrococcus lamae
  misc_feature (1)..(379): tr|A0A4R6BX98|A0A4R6BX98_9STAP Queuine tRNA-ribosyltran sferase OS=Macrococcus lamae OX=198484 GN=tgt PE=3 SV=1
MPAVTYEHIKTCKQSGARLGIVHTPHGSFETPMFMPVGTQATVKTMSPEELKAMNAKIILSNTYHLWLRPGNDVIREAGGLHKFMNWDGPILTDSGGFQVFSLSDMRKIEEEGVHFRHHLNGSKLFLSPEKAMHIQNDLGSDIMMAFDECPPMPAEYKYVKDSIERTSRWAERCLKAHNRPEDQALFGIIQGGEYEDLRTQSAKDLVAMDFPGYAIGGLSVGEPKPVMYRMLEHTTPLMPFDKPRYLMGVGSPDALIEGSIRGIDMFDCVLPTRIARNGTCMTSQGRVVIKNAKYERDFTPLDPKCDCYTCKNYTKAYIRHLIKADETFGIRLTTIHNLHFLLNMMEEVREAIRQDRLLDYKEEFFESYGLNVENPKNF

SEQ ID NO: 57170 - protein, 379 aa, Macrococcus sp.
  misc_feature (1)..(379): tr|A0A4Q1B0R6|A0A4Q1B0R6_9STAP Queuine tRNA-ribosyltran sferase OS=Macrococcus sp. DPC7161 OX=2507060 GN=tgt PE =3 SV=1
MPAVTYEHIKTCKQSGARLGIVHTPHGSFETPMFMPVGTQATVKTMSPEELKAMNAKIILSNTYHLWLRPGNDIIREAGGLHKFMNWDGPILTDSGGFQVFSLSDMRKIEEEGVHFRHHLNGSKLFLSPEKAMHIQNDLGSDIMMAFDECPPMPATYEYVKASIERTSRWAERCLKAHNRPNDQALFGIIQGGEYEDLRTQSAKDLISMDFPGYAIGGLSVGEPKPIMYRMLEHTTPLMPFNKPRYLMGVGSPDALIEGAIRGIDMFDCVLPTRIARNGTCMTSKGRVVVKNAKYERDFTPLDEKCDCYTCKNYTKAYLRHLIKADETFGIRLTTIHNLHFLLNLMEQVREAIRNDRLLDFKEEFFEEYGLNVENPKNF

SEQ ID NO: 57171 - protein, 382 aa, Mageeibacillus indolicus
  misc_feature (1)..(382): tr|D3R1X1|D3R1X1_MAGIU Queuine tRNA-ribosyltransferase OS=Mageeibacillus indolicus (strain UPII9-5) OX=699246 GN=tgt PE=3 SV=1
MNYQDKFPVWYELKHVCRQTGARLGVVHTPHGDFPTPAFMPVGTQATVKGMSPEEVESTGAGILLSNTYHLWMRPGPDIVTKAGGLHKFMNWNKPILTDSGGFQVFSLSDLRHITEDGVKFRSHIDGSSHVLTPEKSIEVQNALGSDIMMAFDECTPWQSDYKYALNSLQRTTRWLERCIKANHNPERQALFGIVQGGMFADLRKQSIAEITAFDLPGFAIGGLSVGEPADLMYHMMDETVHLLPNDKPRYLMGVGTPDYLIEGAIRGIDMFDCVLPTRIGRNGTVLTKYGRLIVRDFKYAEDFRPIEEDCDCYACRNYSRAYIRHLIKAGEMFGLRLASWHNLRFLQRLMQSVREAIAADRLADFRTEFLTQFAQSKKNQI

SEQ ID NO: 57172 - protein, 382 aa, Mageeibacillus indolicus
  misc_feature (1)..(382): tr|A0A2J8B4F7|A0A2J8B4F7_9FIRM Queuine tRNA-ribosyltran sferase OS=Mageeibacillus indolicus OX=884684 GN=tgt PE =3 SV=1
MNYQDKFPVWYELKHVCRQTGARLGVVHTLHGDFPTPAFMPVGTQATVKGMSPEEVESTGAGILLSNTYHLWMRPGPDIVSKAGGLHKFMNWNKPILTDSGGFQVFSLSDLRHITEDGVKFRSHIDGSSHVLTPEKSIEVQNALGSDIMMAFDECTPWQSDYKYALNSLQRTTRWLERCIKANHNPERQALFGIVQGGMFADLRKQSIAEITAFDLPGFAIGGLSVGEPADLMYHMMDETVHLLPNDKPRYLMGVGTPDYLIEGAIRGIDMFDCVLPTRIGRNGTVLTKYGRLIVRDFKYAEDFRPIEEDCDCYACRNYSRAYIRHLIKAGEMFGLRLASWHNLRFLQRLMQSVREAIAADRLADFRTEFLTQFAQSKKNQI

SEQ ID NO: 57173 - protein, 368 aa, Magnetococcales bacterium
  misc_feature (1)..(368): tr|A0A2E3C1S7|A0A2E3C1S7_9PROT Queuine tRNA-ribosyltran sferase OS=Magnetococcales bacterium OX=2026759 GN=tgt PE=3 SV=1
MPAFEYKLLKTDGKARLGEVHTAHGVIRTPAFMPVGTAATVKGMRPEEVKALGSDIILGNTYHLFLRPGHELIEELGGLHKFMNWPGPILTDSGGYQVFSLADSRKITEEGVTFRSHIDGDKKTLTPENSTEIQRALDATITMAFDECTPYPAEVDVAADSMRMSMRWAKRSRDAFVKREGYGQFGIMQGGMHPHLRKESMEALEKLDFEGYAIGGLAVGEPPEMLAEMTEVCADLMPTDKPRYLMGVGYPSDIIRAVLAGVDMFDCVLPTRNGRNGQGYTSEGLVKIKLKTFERDPSPLDPNCECNTCKNYSKSYLRHLYRADEMLAGMLITHHNIHFYQQLMQTLRQAISDGNLQEVATKLLKKVR

SEQ ID NO: 57174 - protein, 370 aa, Magnetococcales bacterium
  misc_feature (1)..(370): tr|A0A2D7C6F7|A0A2D7C6F7_9PROT Queuine tRNA-ribosyltran sferase OS=Magnetococcales bacterium OX=2026759 GN=tgt PE=3 SV=1
MPEFKYELLATDGRARRGRLHTAHGTVETPTFMPVGTVGSVKGMKMEDVKAQGAEVVLGNVYHLMLRPGADLVEKMGGLHKFMNWEGPILTDSGGFQVYSLNDIRTDDEDGVTFRSHIDGSLHRLNPEISTEIQYKLDATITMAFDECTEFPVTYERAKESLERTIRWEKRSRDAFIPREGYGQFGIIQGAHYKDLRKASIDALVDIGFEGYAFGGWLFDETGSKDTYNETVEHCVPFMPEDKPRYMMGVGYPSDLIYSVQQGIDMFDCVIPTRNGRKGQAFVHSGVVKIKQAQYREDPSPLDPECDCYVCKTYTKSYIRHLFVSGESLAGQLITEHNLYFYQKLMRLMRENIEAGTFQEFAAEWLPKVK

SEQ ID NO: 57175 - protein, 395 aa, Magnetococcus marinus
  misc_feature (1)..(395): tr|A0L583|A0L583_MAGMM Queuine tRNA-ribosyltransferase OS=Magnetococcus marinus (strain ATCC BAA-1437 / JCM 17 883 / MC-1) OX=156889 GN=tgt PE=3 SV=1
MRQGGEPYMAPADRFSAELSTPFTFTLHNTDASGARRGVMHTPRGSIETPAFMPVGTQGSVKAMTPQEVEKLGAQIILGNTYHLFLRPGHERVQQLGGLHRFMNWRGPILTDSGGYQVFSLGELNKISEDGVTFRSHIDGSKQFISPEISIQIQQALGSDIMMQFDECPPYPAQRDYVANSLELTLRWGRRSLAAKTPNQPGRALFGIVQGGMYADLREISAQRTLEMGFDGYALGGLSVGEPKALMEEVLSYAPAFLPADKPRYLMGVGKPPDLVMAVERGIDMFDCVLPTRNARNGQLLTRYGPINIKRAEYRESLEAVDPSCGCDCCQNYSRAYIHHLFRTNEILGMRLMTLHNLHYYQTLMAEMRQAISQGDFAAFKANFLHNYFAVTEGA

SEQ ID NO: 57176 - protein, 379 aa, Magnetococcus massalia
  misc_feature (1)..(379): tr|A0A1S7LR77|A0A1S7LR77_MAGMO Queuine tRNA-ribosyltran sferase OS=Magnetococcus massalia (strain MO-1) OX=4515 14 GN=tgt PE=3 SV=1
MCTADLSQPFRFEHLSTDPSGARRGRFVTPRGAVETPAFMPVGTAGTVKAMTPEEVKGLGAQIILGNTYHLYLRPGHERMRRLGGLHKFMNWSGPILTDSGGYQVFSLGELRKITEEGVTFNSHIDGSKHFIGAEESIAIQEALGADIMMQFDECPPYPAEKEYVKNSLDLTIRWGQRSIDAKTPDTPGRALFGIVQGGMYEDLRKESAEKTIALGFDGYALGGLSVGEPKELMQEVLSYAPAFLPEDKPRYLMGVGKPADLVMAVEQGIDMFDCVLPTRNARNGQLLTRYGALNIKQARFRDEVGPVDPSCPCDCCQQYDRAYLHHLFRANEILGMRLMTLHNLTYYQTLMREMREAIEVNGFAAFKTKFLEDQQAGV

SEQ ID NO: 57177 - protein, 319 aa, Magnetofaba australis
  misc_feature (1)..(319): tr|A0A1Y2K305|A0A1Y2K305_9PROT Queuine tRNA-ribosyltran sferase OS=Magnetofaba australis IT-1 OX=1434232 GN=tgt PE=3 SV=1
MKAMTPEEVKATGAQILLGNTYHLFLRPGHERIKRLGGLHRFMNWSGPILTDSGGFQVWSLGELRKITEEGVSFRSHIDGSKRFIGPEESIAIQEALGADIMMQFDECPPYPAERDYAAKSMELSLRWGKRCLEAKTKEQPGRALFAIVQGGMYPDLKKESAERSIEMGFDGYALGGLSVGEPKEVMREVLSYAPSYLPADKPRYLMGVGKPEDLRHAVASGIDMFDCVIPTRNARNGQLFTRNGPMNIKRAEFAEDDRPVDGQCRCDACQNYSRAYLHHLFRANEILGHRLMTNHNLTYFQDVMAEMRAQIETEMTGG

SEQ ID NO: 57178 - protein, 388 aa, Magnetospira sp.
  misc_feature (1)..(388): tr|W6KNK0|W6KNK0_MAGSQ Queuine tRNA-ribosyltransferase OS=Magnetospira sp. (strain QH-2) OX=1288970 GN=tgt PE= 3 SV=1
MTIGFEILATDGAARRGRLTSAHGSAETPAFMPVGTAGTVKAMYPEQVAETGAEIVLGNTYHLMLRPSAERVARLGGLHKFMNWNQTILTDSGGFQVMSLSDLRKLTEDGVTFRSHVDGAYHHLTPERSVEIQHLLDSNITMVLDECPKFGTDKDQIAKSLHLTSRWALRSRHAFQQRPGYGLFGIVQGGVHADLRAESAADLVNIGFDGYAVGGLAVGEDQETTLSVLDFTVPLLPVDRPHYLMGVGTPADIVEAVRRGIDMFDCVMPTRSGRTGQAFTRRGPLNLRNARHKDDPRPIEEGCSCPACRQYSRAYLHHLVRAKEMLGPMLLTRHNLQHYQDLMKDLRAAIEAGTLDAFAAHFHAVQASGDIEPMSSDVFQVDVQNGHQ

SEQ ID NO: 57179 - protein, 375 aa, Magnetospirillum caucaseum
  misc_feature (1)..(375): tr|M3A7D4|M3A7D4_9PROT Queuine tRNA-ribosyltransferase OS=Magnetospirillum caucaseum OX=1244869 GN=tgt PE=3 SV =1
MTEFSFELLATDGAARRGRVHTAHGAIDTPAFMPVGTAGTVKAMMPASVAATGAQIVLGNTYHLMLRPGAERVARLGGLHKFMNWPGPILTDSGGFQVMSLAKLRKMDADGVTFQSHHDGSKHRLTPESSMEIQRLLDADITMAFDECTPFPATHGQAEESMRLSMRWARRSKEAFVARDGYGLFGIVQGGVYPDLRAESAKALLEIGFEGYAVGGLAVGEGQDAMFSTLDVTTPLLPGDKPRYLMGVGRPSDIIGAVGRGIDMFDCVMPTRSGRTAQAFTRRGTVNLRNARHQDDPRPLEEDCPCPACRDHSRAYLHHLIRSEEILGPMLLTWHNIQAYQTLMAGLRSAIAEGRFTRFAAEAAALEEMGDIPPP

SEQ ID NO: 57180 - protein, 376 aa, Magnetospirillum gryphiswaldense
  misc_feature (1)..(376): tr|V6F460|V6F460_MAGGM Queuine tRNA-ribosyltransferase OS=Magnetospirillum gryphiswaldense (strain DSM 6361 / JCM 21280 / NBRC 15271 / MSR-1) OX=431944 GN=tgt PE=3 S V=1
MLTQFRFDLHATDGAARLGIVHTAHGPMDTPAFMPVGTAGTVKAMLPDSVAATGAQTILGNTYHLMLRPGAERIGRLGGLHEFMQWQGPILTDSGGFQVMSLAKLRKMTEEGVAFQSHIDGSKHLLTPERSMQIQHLLDADITMAFDECTPFPATPEQAAQSMRLSMRWAKRSKDAFVERPGYGLFGIVQGGIHHDLRQESAEALQGIGFDGYAVGGLAVGEGQELMFSTLDFTTPLLPTDRPRYLMGVGKPSDIVGAVLRGIDMFDCVMPTRSGRTAQGFTRRGTVNLRNARHQDDPRPLDEHCACPACRQYSRAYLHHLIRSEEILGPMLLTWHNIQFYQDVMKGLRQAIGEGRVQDFARDFLATEALGDIEPI

SEQ ID NO: 57181 - protein, 376 aa, Magnetospirillum gryphiswaldense
  misc_feature (1)..(376): tr|A4U389|A4U389_9PROT Queuine tRNA-ribosyltransferase OS=Magnetospirillum gryphiswaldense OX=55518 GN=tgt PE= 3 SV=1
MLTQFRFDLHATDGAARLGIVHTAHGPMDTPAFMPVGTAGTVKAMLPQSVAATGAQTILGNTYHLMLRPGAERIGRLGGLHEFMQWKGPILTDSGGFQVMSLAKLRKMTEEGVAFQSHIDGSKHLLTPERSMQIQHLLDADITMAFDECTPFPATPEQAAQSMRLSMRWAKRSKDAFVERPGYGLFGIVQGGIYQDLRQESANALQGIGFDGYAVGGLAVGEGQELMFSTLDFTTPLLPTDRPRYLMGVGKPSDIVGAVLRGIDMFDCVMPTRSGRTAQGFTRRGTVNLRNARHQDDPRPLDEHCACPACRQYSRAYLHHLIRSEEILGPMLLTWHNIQFYQDVMKGLRQAIGEGRVQDFARDFLATEALGDIEPI

SEQ ID NO: 57182 - protein, 375 aa, Magnetospirillum kuznetsovii
  misc_feature (1)..(375): tr|A0A364NXP0|A0A364NXP0_9PROT Queuine tRNA-ribosyltran sferase OS=Magnetospirillum kuznetsovii OX=2053833 GN=t gt PE=3 SV=1
MTDFKFDLLATDGQARLGRVHTAHGVIDTPAFMPVGTAGTVKAMLPGSVAATGAQIVLGNTYHLMLRPGADRVERLGGLHQFMNWPGPILTDSGGFQVMSLAKLRKMDADGVTFQSHHDGSKHRLTPENSMEIQRQLDADITMAFDECTPFPATPQQAAESMRLSMRWAARSKAAFTPRPGYGLFGIVQGGIYPDLRAESAKALLEIGFDGYAIGGLAVGEGQEAMFATLDVTTPLLPEDKPRYLMGVGRPSDIIGAVMRGVDMFDCVMPTRSGRTAQAFTKRGTVNLRNARHQDDPRPLEEGCACPACRDHSRAYLHHLIRSEEILGPMLLTWHNIQAYQDLTRSLRAAIAEGRVEAFAARAAELEAQGDIAAL

SEQ ID NO: 57183 - protein, 375 aa, Magnetospirillum magneticum
  misc_feature (1)..(375): tr|Q2W9S2|Q2W9S2_MAGSA Queuine tRNA-ribosyltransferase OS=Magnetospirillum magneticum (strain AMB-1 / ATCC 700 264) OX=342108 GN=tgt PE=3 SV=1
MTEFSFELLATDGAARRGRVHTAHGAIDTPAFMPVGTAGTVKAMLPASVAATGAQIVLGNTYHLMLRPGAERVARLGGLHKFMNWPGPILTDSGGFQVMSLAKLRKMDADGVTFQSHHDGSKHRLTPESSMEIQRLLDADITMAFDECTPFPATFEQAQESMLLSMRWARRSKEAFVAREGYGLFGIVQGGVYPDLRAESAKALLEIGFEGYAVGGLAVGEGQEAMFATLEVTTPLLPTDKPRYLMGVGRPSDIIGAVGRGVDMFDCVMPTRSGRTAQAFTRRGTVNLRNARHQDDPRPLEEGCPCPACRDHSRAYLHHLIRSEEILGPMLLTWHNIQAYQTLTAGLRAAIAEGRFAQFAADAAALEEQGDIAPL

SEQ ID NO: 57184 - protein, 375 aa, Magnetospirillum magnetotacticum
  misc_feature (1)..(375): tr|A0A0C2U745|A0A0C2U745_MAGMG Queuine tRNA-ribosyltran sferase OS=Magnetospirillum magnetotacticum MS-1 OX=272 627 GN=tgt PE=3 SV=1
MTQFSFELLATDGAARRGRVNTAHGTLDTPAFMPVGTAGTVKAMLPASVAATGAQIVLGNTYHLMLRPGAERVARLGGLHQFMNWPGPILTDSGGFQVMSLAKLRKMDADGVTFQSHHDGSKHRLTPESSMEIQRLLDADITMAFDECTPFPATHEQAEESMRLSMRWARRSKEAFVQRPGYGLFGIVQGGVYPDLRAESAQALQEIGFEGYAVGGLAVGEGQEAMFATLDVTTPLLPADKPRYLMGVGRPSDIIGAVGRGIDMFDCVMPTRSGRTAQAFTKRGTVNLRNARHQDDPRPLEEGCPCPACRDHSRAYLHHLIRSEEILGPMLLTWHNIQAYQTLMAGLRGAIAEGRFAQFAAEAQALEEMGDIAPL

SEQ ID NO: 57185 - protein, 379 aa, Magnetospirillum marisnigri
  misc_feature (1)..(379): tr|A0A178MFK8|A0A178MFK8_9PROT Queuine tRNA-ribosyltran sferase OS=Magnetospirillum marisnigri OX=1285242 GN=tg t PE=3 SV=1
MTQFSFELLAEDGAARLGRVHTAHGAIDTPAFMPVGTAATVKAMLPGSVAATGAQIVLGNTYHLMLRPGAERVARLGGLHKFMNWPGPILTDSGGFQVMSLAKLRKLDEDGVTFQSHHDGSRHRLTPESSMDIQRLLDADITMAFDECTPFPATPEQAAVSMRLSMRWAARSKAAFVPRPGYGLFGIVQGGVYPELRADSAKALLEIGFDGYAVGGLAVGEGQEAMFATLEVTTPLLPRDKPRYLMGVGRPSDIIGAVLRGVDMFDCVMPTRSGRTAQAFTRRGTVNLRNARHQDDPRPLEEGCSCPCCRDHSRAYLHHLIRSEEILGPMLLTWHNIQAYQDLMRSLREAIAEGRVAEFAAEAARLEALGDIEVLRHAG

SEQ ID NO: 57186 - protein, 375 aa, Magnetospirillum moscoviense
  misc_feature (1)..(375): tr|A0A178MMW7|A0A178MMW7_9PROT Queuine tRNA-ribosyltran sferase OS=Magnetospirillum moscoviense OX=1437059 GN=t gt PE=3 SV=1
MTAFRFDLHATDGAARCGTLHTAHGPMDTPAFMPVGTAATVKAMMPESVAATGAQMILGNTYHLMLRPGAERIGKLGGLHRFMNWPGPILTDSGGFQVMSLAKLRKLTEDGVTFQSHIDGSKHLLTPERSMEIQNLLDADVTMAFDECTPFPATEKQAAESMRLSMRWAKRSKDAFVERPGYGLFGIVQGGIYPEFRAESAAALTAMGFDGYAIGGLAVGEGQELMFSTLEVTTPLLPTDRPRYLMGVGRPSDIVGAVLRGVDMFDCVMPTRSGRTAQAFTRRGTVNLRNARHQDDPRPLDQDCTCPACRNYSRAYLHHLIRAEEILGPMLLTWHNLHYYQEVMAGLRSAIKDGRVQEFAKNFAEQEAMGDIEVG

SEQ ID NO: 57187 - protein, 375 aa, Magnetospirillum sp.
  misc_feature (1)..(375): tr|A0A0U5MBG2|A0A0U5MBG2_9PROT Queuine tRNA-ribosyltran sferase OS=Magnetospirillum sp. XM-1 OX=1663591 GN=tgt PE=3 SV=1
MTEFSFELLATDGAARRGRVQTAHGPIDTPAFMPVGTAGTVKAMLPASVAATGAQIVLGNTYHLMLRPGAERVARLGGLHKFMNWPGPILTDSGGFQVMSLAKLRKMDADGVTFQSHHDGSKHRLTPESSMEIQRLLDADITMAFDECTPFPATHEQAEESMRLSMRWARRSKEAFVAREGYGLFGIVQGGVYPDLRAESAKALLEIGFEGYAVGGLAVGEGQDAMFATLDVTTPLLPADKPRYLMGVGRPSDIIGAVGRGIDMFDCVMPTRSGRTAQAFTRRGTVNLRNARHQDDPRPLEEGCPCPACRDHSRAYLHHLIRSEEILGPMLLTWHNIQAYQTLTAGLRAAIAEGRFAQFAAEAAALEEMGDIPPL

SEQ ID NO: 57188 - protein, 375 aa, Magnetospirillum sp.
  misc_feature (1)..(375): tr|A0A1M3LHX7|A0A1M3LHX7_9PROT Queuine tRNA-ribosyltran sferase OS=Magnetospirillum sp. 64-120 OX=1895778 GN=tg t PE=3 SV=1
MTQFGFQVHATDGAARLGTVMTAHGPMDTPAFMPVGTAGTVKAMMPESVAATGAQTILGNTYHLMLRPGAERVGRLGGLHEFMQWKGPILTDSGGFQVMSLAKLRKMTEEGVAFQSHIDGSRHMLTPERSMQIQHLLDADITMAFDECTPFPATEQQAAESMRLSMRWAVRSKDAFVQRDGYGLFGIVQGGVYQDLREESAKALQGIGFDGYAIGGLAVGEGQELMFATLDFTTPLLPADRPRYLMGVGKPSDIVGAVLRGVDMFDCVMPTRSGRTAQGFTRRGTVNLRNARHQDDPRPLDEHCSCPACRQYSRAYLHHLIRSEEILGPMLLTWHNIQFYQDVMKGLRQAIGEGRVQQFAADFLAAESQGDIAPL

SEQ ID NO: 57189 - protein, 377 aa, Magnetovibrio blakemorei
  misc_feature (1)..(377): tr|A0A1E5QC71|A0A1E5QC71_9PROT Queuine tRNA-ribosyltran sferase OS=Magnetovibrio blakemorei OX=28181 GN=tgt PE= 3 SV=1
MTTFGFELLGSDGQARTGRVSTAHGAIQTPAFMPVGTAATVKAMTSESVKATGAEILLGNTYHLMLRPGAERIAKLGGLHTFMNWDLPILTDSGGYQVMSLTDLRKLDEEGVTFRSHIDGSYHKLTPERSIEVQHLLDADITMCFDECPPFPCEKDEVARATELSMRWAKRSRDAFVDRPGYGLFGICQGGVHEDLREMSAKALIDIGFDGYAVGGLAVGEGREMMFASLDVTTPHLPTDKPRYLMGVGKPEDIVGAVARGIDMFDCVLPTRSGRTGQAWTPGGSINIRNARHAEDPRPLDANCACPACTNHSRAYLHHLTKADEILGAMLLTWHNLHYYQDLMRAIRQAIGEGRFSQFQADFAATRERGDIEALSI

SEQ ID NO: 57190 - protein, 378 aa, Magnetovibrio sp.
  misc_feature (1)..(378): tr|A0A2E3P6C0|A0A2E3P6C0_9PROT Queuine tRNA-ribosyltran sferase OS=Magnetovibrio sp. OX=2024836 GN=tgt PE=3 SV= 1
MKKMQFTVSATDGRARRGRLDTAHGPMETPAFMPVGTAATVKAMTPEAVAETGAQCVLGNTYHLMLRPGSARIKRLGGLHEFMNWPGPILTDSGGFQVWSLKDLRKLTEDGVTFRSHIDGAKHELTPESAMAIQNDLDADITMVLDECTPFGVDEAAARVSMELSMRWAQRCRDAFEQRPGYGLFGIVQGGVFPDLRAESAKALVEIGFDGYAIGGLAVGEGQDLMFETLDVTTPHLPEDKPRYLMGVGKPSDLVGAVERGVDMFDCVLPTRSGRTDQAFTRRGQVNIRNARHKDDPRPLDPDCSCYACSNYSRAYLHHLAQAKEILGLTLLTWHNLHYYQELMAGMRQAIESGTFAAFKKAFEDGEAAGDIPAIEGD

SEQ ID NO: 57191 - protein, 375 aa, Magnetovibrio sp.
  misc_feature (1)..(375): tr|A0A2D7AAN7|A0A2D7AAN7_9PROT Queuine tRNA-ribosyltran sferase OS=Magnetovibrio sp. OX=2024836 GN=tgt PE=3 SV= 1
MANISFKLTKRDGRARLGQLMTAHGPIDTPAFMPVGTAATVKAMTPEAVHNTGAQIILANTYHLMLRPTAERVNRFGGLHKFMNWPGPILTDSGGYQIMSLNKLRKIDEKGVTFRSHLDGSKHKLTPERAIEIQHLLDADISMVLDECTSFPATKTEAENSMRLSMRWALRSKKAFQDRLGYGLFGIVQGGVYGELREESAKALIKIGFDGYAIGGLAVGEGQDLLFSTLEVTEPHLPDSHPRYLMGVGKPEDLVRAVGLGVDMFDCVLPTRSGRTDQAFTRRGRLNMRNARHKDDLRPLDPECTCYTCKNYSRGYVHHLVISNEILAAVLLTGHNLHYYQELMGAMRKAISEEAFDAFTILFTAEQASGDIIMT

SEQ ID NO: 57192 - protein, 374 aa, Mahella australiensis
  misc_feature (1)..(374): tr|F4A272|F4A272_MAHA5 Queuine tRNA-ribosyltransferase OS=Mahella australiensis (strain DSM 15567 / CIP 107919 / 50-1 BON) OX=697281 GN=tgt PE=3 SV=1
MALRYELIKKDKSSGARLGRIYTEHSVIDTPVFMPVGTQATVKAMAPDELKDIGFEIILSNTYHLYLRPGHDIVAKAGGLHGFMHWDRSILTDSGGYQVFSMSHLRDITEDGVAFRSYIDGSKHFIGPEKAIEIQNALGADIIMAFDECVPYPCDRDYALHAVERTTRWAKRCKQAHADERQSLFGIIQGSTYKDLRQKSMEEIVNIGFPGYAVGGLSVGEPKDVMYDILEYIMPNMPDDRPRYLMGVGSPDCLIEGVIRGVDMFDCVWPTRIARNGTVMTSQGKLVVRNAAYKDDMRPLDEQCGCYACRNFSRAYIRHLFNVGEILGARLATIHNLYFLAGLMSDIRKAIMEDRLLEFRDIFFGNYYKSQTLS

SEQ ID NO: 57193 - protein, 372 aa, Maledivibacter halophilus
  misc_feature (1)..(372): tr|A0A1T5L2C4|A0A1T5L2C4_9CLOT Queuine tRNA-ribosyltran sferase OS=Maledivibacter halophilus OX=36842 GN=tgt PE =3 SV=1
MAIRYELIKECKQSGARLGKLHTPHGVIETPIFMPVGTQATVKSMTPEELKEIESQIILSNTYHLYLRPGHKLVEKAGGLHKFMNWDRPILTDSGGFQVFSLGDLRKISEKGVEFRSHIDGSKHFISPEKAIEIQNSLGSDIMMCFDECAPYPSDREYVKNSLERTTRWAKRCKEAHKKTDTQALFGIIQGGMYKELREQSVKEITEIDFPGYSIGGLSVGEPKPLMYEILEYTTPLMPKDKPRYLMGVGSPDCLIEGAIRGVDMFDCVLPTRIARNGTAMTSQGRITIKQARYFDDFTPLDPECDCYTCKNYTKAYLRHLFKANEILSARLFSYHNLYFLLKLMKNIREAIRNDNLLDYRKEFFEKYGYEL

SEQ ID NO: 57194 - protein, 394 aa, Malikia granosa
  misc_feature (1)..(394): tr|A0A2S9K9I9|A0A2S9K9I9_9BURK Queuine tRNA-ribosyltran sferase OS=Malikia granosa OX=263067 GN=tgt PE=3 SV=1
MLKFDLLHTDPDSHARRGQLTLNHGVVQTPIFMPVGTYGTVKGVMPKSLHDMGAQIILGNTFHLWMRPGLDIMQSFGGLHKFEQWDKPILTDSGGFQVWSLGAMRKISEEGVKFASPVNGDKLFMSPEVSMQIQTILNSDIVMQLDECTPYWQGEKGSGHITTEAEARVSMELSRRWALRSKNEFERLGNPNALFGIVQGGMFEHLRQESLEALVEMDFPGYAVGGVSVGEPKELMLQIMAHTPHRLPAHKPRYLMGVGTPEDLVEGVAQGVDMFDCVMPTRNARNGTIFTRYGDLKIRNARHKADPQPLDSSCTCYACAGSSGVSWDDGGREGFSRAYLHHLDRCGEMLGPMLTTVHNLHYYLNLMREVRESLEAGQFSALRARFKSERARGV

SEQ ID NO: 57195 - protein, 394 aa, Malikia spinosa
  misc_feature (1)..(394): tr|A0A2S9KGJ3|A0A2S9KGJ3_9BURK Queuine tRNA-ribosyltran sferase OS=Malikia spinosa OX=86180 GN=tgt PE=3 SV=1
MLKFDLLKTDPDSHARRGTLTLNHGVVQTPIFMPVGTYGTVKGVMPKSLHDMGAQIILGNTFHLWMRPGLDIMQSFGGLHQFEQWDKPILTDSGGFQVWSLGAMRKISEEGVKFASPVNGDKLFMSPEVSMQIQTILNSDIVMQLDECTPYWQGEKGSGHITTEAEARVSMELSRRWALRSKNEFERLENPNALFGIVQGGMFEHLRQESLEALVEMDFPGYAVGGVSVGEPKELMLQIMAHTPHRLPAHKPRYLMGVGTPEDLVEGVAQGVDMFDCVMPTRNARNGTIFTRYGDLKIRNARHKADPQPLDPSCNCYACAGSSGVSWDAGGREGFSRAYLHHLDRCGEMLGPMLSTVHNLHYYLNLMREVRESLEAGQFSALRARFKSERARGV

SEQ ID NO: 57196 - protein, 375 aa, Maliponia aquimaris
  misc_feature (1)..(375): tr|A0A238K2E7|A0A238K2E7_9RHOB Queuine tRNA-ribosyltran sferase OS=Maliponia aquimaris OX=1673631 GN=tgt PE=3 S V=1
MALTSFDVSARDGRARRGVIRTPRGEIRTPAFMPVGTAATVKGMLPESVAATGADILLGNTYHLMLRPGAERVARLGGLHRFMNWERPILTDSGGFQVMSLADLRKLTEEGVTFRSHIDGSKHMLSPERSMEIQKLLGSDIVMAFDECPALPADRERIAESMRLSMRWAARSREAFGDRPGHMLFGIQQGGLEQDLRGESAEALKAIGFDGYAVGGLAVGEGQEAMFGCLDYAPDMLPEDKPRYLMGVGKPDDIVGAVKRGIDMMDCVLPSRSGRTGQAWTRRGQVNIKNARHADDPRPLDADCTCPACRSYSRAYLHHVFRAGEMISGMLLTWHNLHYYQELMAGMRAAIEAGSFADFEAAFHAQRAEGDIPPV

SEQ ID NO: 57197 - protein, 372 aa, Malonomonas rubra
  misc_feature (1)..(372): tr|A0A1M6CE40|A0A1M6CE40_MALRU Queuine tRNA-ribosyltran sferase OS=Malonomonas rubra DSM 5091 OX=1122189 GN=tgt PE=3 SV=1
MSAFKYDLLKQDEGSQARRGRITTARGVIETPVFMPVGTAGTVKGLLPEALKEIGAQIILGNTYHLYLRPGHKLIQQLGGLHKFMNWDRPILTDSGGFQVFSLGELRKITEEGASFQSHIDGSKHMLTPELSIEIQQALGADIIMVFDECIPHPAERKYVADSTNLSARWAKRCREAMPAGSSDSALFGIVQGGMHTDLRKQSAEQLQEIGFEGYALGGLSVGEETSLMYEMMEFSLPLLPADKPRYVMGVGTPENLVEGVARGCDMFDCVMPTRNARNGNLFSSFGKISIKQAQYRDDETPIDPDCDCYVCRNYSRAYLRHLFMSREILSSVLNTHHNLYYYQQLMAGIRTALEEGRFHEFRAEFYRKRNQ

SEQ ID NO: 57198 - protein, 378 aa, Malonomonas rubra
  misc_feature (1)..(378): tr|A0A1M6BSW5|A0A1M6BSW5_MALRU Queuine tRNA-ribosyltran sferase OS=Malonomonas rubra DSM 5091 OX=1122189 GN=tgt PE=3 SV=1
MFQFTLLKEDPKSRARRGRLETPHGTIETPIFMPVGTHGALKAMTPAQVEETEAQIILSNTYHLHLKPGEGLVKKAGGLHKFMNWDKPILTDSGGFQVFSLPKKRIAEDGVHFRHELTGEEIFLGPKEAMQIENDLGADIMMAFDECIPYPASHDYSAKSIKKTIRWAEACLKHHSREDQALFGIVQGSVYEDLRRICAEELTAMDFPGYAIGGVSVGEGLELLKKVVDFTEPHMPKHKPRYLMGVGLPEDILESIERGMDMFDCVIPTRYARSATLFTRRGKIRLTNKNFRRDFFPVDPSCDCYCCRNFTRAYLHHLYNANEILSATLAAIHNVRFYLNMVAGARKAIEAGDYPAYKNEFLAEYKSGEKGGGKKKKR

SEQ ID NO: 57199 - protein, 375 aa, Mameliella alba
  misc_feature (1)..(375): tr|A0A0B3S067|A0A0B3S067_9RHOB Queuine tRNA-ribosyltran sferase OS=Mameliella alba OX=561184 GN=tgt PE=3 SV=1
MAQTSFELTARDGRARRGVIRTPRGEIRTPAFMPVGTAATVKGMMPESVAATGADILLGNTYHLMLRPGAERVARLGGLHKFMNWEKPILTDSGGFQVMSLAELRKLTEEGVSFRSHIDGSKHMLTPERSMEIQKLLGSDIVMAFDECPALPADRDRITQSMRLSMRWAARSREAFGDRPGHMLFGIQQGGLEEDLRGESAEALKAIGFDGYAVGGLAVGEGQEAMFSCLDYAPDMLPEDKPRYLMGVGKPDDIVGAVKRGIDMMDCVLPSRSGRTGQAWTRRGQVNIKNARHADDPRPLDENCTCPACRGYSRAYLHHVFRAGEMISGMLLTWHNLHYYQELMQGMRSAIEAGDFAGFEADFHAKRAEGDIEPL

SEQ ID NO: 57200 - protein, 375 aa, Mameliella sp.
  misc_feature (1)..(375): tr|A0A2E9I5D7|A0A2E9I5D7_9RHOB Queuine tRNA-ribosyltran sferase OS=Mameliella sp. OX=1924940 GN=tgt PE=3 SV=1
MAQTSFELIARDGRARRGVIRTPRGEIRTPAFMPVGTAATVKGMMPESVAATGADILLGNTYHLMLRPGAERVARLGGLHTFMNWSGPILTDSGGFQVMSLAELRKLTEDGVTFRSHIDGSKHMLSPERSMEIQKLLGSDIVMAFDECPALPADRDRIAQSMRLSMRWAARSREAFGDRPGHMLFGIQQGGLEEDLRGESAEALKGIGFDGYAVGGLAVGEGQEAMFGCLDYAPGMLPEDRPRYLMGVGKPDDIVGAVKRGIDMMDCVLPSRSGRTGQAWTRRGQVNIKNARHADDPRPLDEQCTCPACRGYSRAYLHHVFRAGEMISGMLLTWHNLHYYQELMAGMREAISAGRFEAFEAEFHAMRAEGDIEPL

SEQ ID NO: 57201 - protein, 375 aa, Mangrovibacter phragmitis
  misc_feature (1)..(375): tr|A0A1B7L9Z8|A0A1B7L9Z8_9ENTR Queuine tRNA-ribosyltran sferase OS=Mangrovibacter phragmitis OX=1691903 GN=tgt PE=3 SV=1
MKFELKNTDGRARRGKLVFERGVVETPAFMPVGTYGTVKGMTPEEVEATGAQIILGNTFHLWLRPGQEIMKLHGDLHDFMQWKGPILTDSGGFQVFSLGDIRKITEDGVHFRNPINGDPIFLDPEKSMEIQYDLGSDIVMIFDECTPYPADWDYAKRSMEMSLRWAKRSRDRFDSLGNKNALFGIIQGSVYEDLRDISVKGLVDIGFDGYAVGGLAVGEPKADMHRILEHVCPQIPADKPRYLMGVGKPEDLVEGVRRGIDMFDCVMPTRNARNGHLFVTNGVVKIRNAKYKSDTGPLDEECDCYTCRNYSRAYLHHLDRCNEILGARLNTIHNLRYYQRLMAGLRQAIEEGKLEHFVVDFYQRQGKPVPPLNVD

SEQ ID NO: 57202 - protein, 375 aa, Mangrovibacter plantisponsor
  misc_feature (1)..(375): tr|A0A317Q5W8|A0A317Q5W8_9ENTR Queuine tRNA-ribosyltran sferase OS=Mangrovibacter plantisponsor OX=451513 GN=tg t PE=3 SV=1
MKFELKNTDGRARRGKLVFERGVVETPAFMPVGTYGTVKGMTPEEVEATGAQIILGNTFHLWLRPGQEIMKLHGDLHDFMQWKGPILTDSGGFQVFSLGDIRKITEDGVHFRNPINGDPIFLDPEKSMEIQYDLGSDIVMIFDECTPYPADWDYAKRSMEMSLRWAKRSRDRFDSLGNKNALFGIIQGSVYEDLRDISVKGLVEIGFDGYAVGGLAVGEPKADMHRILEHVCPQIPADKPRYLMGVGKPEDLVEGVRRGIDMFDCVMPTRNARNGHLFVTNGVVKIRNAKYKSDTGPLDEECDCYTCRNYSRAYLHHLDRCNEILGARLNTIHNLRYYQRLMAGLRQAIEEGKLEHFVVDFYQRQGKPVPPLNVD

SEQ ID NO: 57203 - protein, 375 aa, Mangrovibacter sp.; identical to SEQ ID NO: 57202
  misc_feature (1)..(375): tr|A0A071LNH9|A0A071LNH9_9ENTR Queuine tRNA-ribosyltran sferase OS=Mangrovibacter sp. MFB070 OX=1224318 GN=tgt PE=3 SV=1

SEQ ID NO: 57204 - protein, 376 aa, Mangrovibacterium diazotrophicum
  misc_feature (1)..(376): tr|A0A419WBK0|A0A419WBK0_9BACT Queuine tRNA-ribosyltran sferase OS=Mangrovibacterium diazotrophicum OX=1261403 GN=tgt PE=3 SV=1
MDFTLKHTASQSEARAGILETDHGVIETPIFMPVGTAGSVKGIHKKDLKEDIGAQIILGNTYHLYLRPGMDIIERAGGLHKFNGWDGPILTDSGGYQVFSLGDIRKLTEEGARFQSHIDGSYHLFTPESVIDIQRKIGADIMMAFDECTPGDADFDYAKKSLALTQRWLDRCVNQMAKTSPLYGHNQSLFPIVQGGVYPELREQAARHVTTIPSDGYAIGGLSVGEPEADMYAMIDVVNPILPKDKLRYLMGVGTPVNILEAIDRGVDMFDCVMPTRNGRNGMLFTKNGFMNMRNAKWADDFSPIDPEGTSFVDINYTKAFLRHLIVSGEMLGAQIASQHNLAFYLWLVKEARRQILADTFKDWKEEMVVKLAQRL

SEQ ID NO: 57205 - protein, 376 aa, Mangrovibacterium marinum
  misc_feature (1)..(376): tr|A0A2T5C178|A0A2T5C178_9BACT Queuine tRNA-ribosyltran sferase OS=Mangrovibacterium marinum OX=1639118 GN=tgt PE=3 SV=1
MDFTLKHTATGSKARAGTLNTDHGRIETPIFMPVGTAGSVKGIHKKDLKEDIGAQIILGNTYHLYLRPGMDIIERAGGLHKFNGWDGPILTDSGGYQVFSLGAMRKLSEEGAKFQSHIDGSRHLFTPESVIDIQRIIGADIMMAFDECTPGDADFDYAKKSLQLTQRWLERCVNQMQKTKPLYGHSQSLFPIVQGAVYPELREQAARHVTTIPADGYAIGGLSVGESEADMYAMIEVVNPILPIDKPRYLMGVGTPVNILEAIDRGVDMFDCVMPTRNGRNGMLFTRNGVINIRNKKWADDFSPVDPDGTSFVDQNYTKAFLRHLIVANEMLGAQIASHHNLAFYLWLVKEARRQILADNFKSWKEEMVVKLAQRL

SEQ ID NO: 57206 - protein, 376 aa, Mangrovimonas sp.
  misc_feature (1)..(376): tr|A0A428JYX5|A0A428JYX5_9FLAO Queuine tRNA-ribosyltran sferase OS=Mangrovimonas sp. HN-E26 OX=2494697 GN=tgt P E=3 SV=1
MTFDLLAKDLQSKARAGTITTDHGTIETPIFMPVGTVASVKGVHQRELKNDINPDIILGNTYHLYLRPKTPILEAAGGLHKFMNWDRNILTDSGGYQVYSLSANRKIKEEGVKFKSHIDGSYHTFTPENVMEIQRTIGADIIMAFDECTPYPCDYHYAKRSMHMTHRWLDRCINHLEKTPLKYDYNQTLFPIVQGSTYKDLRQQSAEYIANVGAAGNAIGGLSVGEPAEEMYAMTDVVCNILPEDKPRYLMGVGTPINILENIALGVDMFDCVMPTRNARNGMLFTAHGTINIKNKKWEDDFSPIDDMGITFVDTEYSKAYLRHLFTVNELLGKQIATIHNLGFYLWLVREARKHILAGDFRTWKDKMVKQMDKRL

SEQ ID NO: 57207 - protein, 376 aa, Mangrovimonas sp.
  misc_feature (1)..(376): tr|A0A1V1ZKR7|A0A1V1ZKR7_9FLAO Queuine tRNA-ribosyltran sferase OS=Mangrovimonas sp. DI 80 OX=1779330 GN=tgt PE =3 SV=1
MKFDLKAKDPQSSARAGVITTDHGTIETPIFMPVGTVASVKGVHQRELKDEINPDIILGNTYHLYLRPQTSILEKAGGLHKFMNWDRNILTDSGGYQVYSLSGNRKIKEEGVKFKSHIDGSYHTFTPENVMEIQRSIGADIIMAFDECTPYPCDYNYAKRSMHMTHRWLDRCINHLEKVPFKYDYSQAFFPIVQGSTYKDLRKQSAEYIANAGAVGNAIGGLSVGEPAEEMYAMTDVVTAILPEDKPRYLMGVGTPINILENIALGIDMFDCVMPTRNARNGMLFTAHGTINIKNKKWEDDFSPIDEMGITFVDTEYSKAYLRHLFTVNELLGKQIATIHNLGFYLWLVREARKHILAGDFRTWKDMMVKQMDKRL

SEQ ID NO: 57208 - protein, 376 aa, Mangrovimonas yunxiaonensis
  misc_feature (1)..(376): tr|A0A084TNB3|A0A084TNB3_9FLAO Queuine tRNA-ribosyltran sferase OS=Mangrovimonas yunxiaonensis OX=1197477 GN=tg t PE=3 SV=1
MTFDLHVKDAQSQARAGTITTDHGVIETPIFMPVGTVASVKGVHQRELKNDINPDIILGNTYHLYLRPQTPILEAAGGLHKFMNWDRNILTDSGGYQVYSLSANRKIKEEGVRFKSHIDGSYHTFTPENVMEIQRSIGADIIMAFDECTPYPCDYHYAKRSMHMTHRWLDRCIKHLEKTPLKYDYNQTLFPIVQGSTYKDLRQQSAEYIANAGAKGNAIGGLSVGEPAEEMYAMTDVVCSILPEDKPRYLMGVGTPINILENIALGVDMFDCVMPTRNARNGMLFTAHGTINIKNKKWEDDFSPIDDMGITFVDTEYSKAYLKHLFSVNELLGKQIATIHNLGFYLWLVREARKHILAGDFRTWKDKMVKQMDKRL

SEQ ID NO: 57209 - protein, 382 aa, Mannheimia granulomatis
  misc_feature (1)..(382): tr|A0A011LXU7|A0A011LXU7_9PAST Queuine tRNA-ribosyltran sferase OS=Mannheimia granulomatis OX=85402 GN=tgt PE=3 SV=1
MKYELKKTSGNARRGRLTFSRPKGEYHVETPAFMPVGTYGTVKGMTPEEVAATGAQILLGNTFHLWLRPGQEVMRMHGDLHDFMQWHGPILTDSGGFQVFSLGKLRKIKEEGVTFQNPISGEKIFLSPEKSMEIQYDLGSDIVMIFDECTPYPATFDYAKKSMEMSLRWAKRSRDRFDELENPNALFGIIQGGIYEELRKVSVEKLVEIGFDGYAVGGLAVGEPKEDMHRILEYVCPQIPADKPRYLMGVGKPEDLVEGVRRGIDMFDCVMPTRNARNGHLFVTNGIVKIRNAKYRNDTTPLDPECDCYTCKNYTKAYLYHLDKCGEILGARLNTIHNLRYYQRLMAEIRQAIEDDRFDDFVIEFYARIGKEVPPLQSEINK

SEQ ID NO: 57210 - protein, 134 aa, Mannheimia haemolytica
  misc_feature (1)..(134): tr|A0A378N860|A0A378N860_MANHA Queuine tRNA-ribosyltran sferase OS=Mannheimia haemolytica OX=75985 GN=tgt_2 PE= 4 SV=1
MVTLVVGVLTFNRPKGEFHVETPAFMPVGTYGTVKGMTPEEVKATGAQILLGNTFHLWLRPGQEVMKMHGDLHDFMQWHGPILTDSGGFQVFSLGKLRKIKEEGVTFQNRLAVRKFSFRRKNQWRSNTILDQTL

SEQ ID NO: 57211 - protein, 119 aa, Mannheimia haemolytica
  misc_feature (1)..(119): tr|A0A378MTL2|A0A378MTL2_MANHA Queuine tRNA-ribosyltran sferase OS=Mannheimia haemolytica OX=75985 GN=tgt_2 PE= 4 SV=1
MHGDLHDFMQWHGPILTDSGGFQVFSLGKLRKIKEEGVTFQNPISGEKIFLSPEKSMEIQYDLGSDIVMIFDECTPYPATFDYAKKSMEMSLRWAKRSRDRFDELENPNALFGIIQGGI

SEQ ID NO: 57212 - protein, 351 aa, Mannheimia sp.
  misc_feature (1)..(351): tr|W0Q618|W0Q618_9PAST Queuine tRNA-ribosyltransferase OS=Mannheimia sp. USDA-ARS-USMARC-1261 OX=1432056 GN=tg t PE=3 SV=1
MPVGTYGTVKGMTPEEVAATGAQILLGNTFHLWLRPGQEVMKMHGDLHDFMQWHGPILTDSGGFQVFSLGKLRKIKEEGVTFQNPISGEKIFLSPEKSMEIQYDLGSDIVMIFDECTPYPATFDYAKKSMEMSLRWAKRSRDRFDELENPNALFGIIQGGVYEELRKVSVEKLVEIGFDGYAVGGLAVGEPKEDMHRILEYVCPQIPADKPRYLMGVGKPEDLVEGVRRGIDMFDCVMPTRNARNGHLFVTNGIVKIRNAKYREDTTPLDPECDCYTCKNYTKAYLYHLDKCGEILGARLNTIHNLRYYQRLMAEIRQAIEDDRFDDFVVEFYARIGKDVPPLQSEVNNQE

SEQ ID NO: 57213 - protein, 379 aa, Mannheimia succiniciproducens
  misc_feature (1)..(379): sp|Q65S94|TGT_MANSM Queuine tRNA-ribosyltransferase OS= Mannheimia succiniciproducens (strain MBEL55E) OX=22198 8 GN=tgt PE=3 SV=1
MKFKLKTTSGAARRGELTFNRPQGEFSVQTPAFMPVGTYGTVKGMTPEEVRATGAEILLGNTFHLWLRPGQEVMRKHGDLHDFMQWHRPILTDSGGFQVFSLGKLRKITEEGVKFQNPINGERIFLSPEKSMEIQYDLGSDIVMIFDECTPYPATFDYAKKSMEMSLRWAKRSRDRFDELGNKNALFGIVQGGTFEELRKVSAENLINIGFDGYAVGGLAVGEPKEEMHRILEFTTPLLPADKPRYLMGVGKPEDLVEGVRRGIDMFDCVMPTRNARNGHLFVTDGIVKIRNAKYKDDTSPLDPHCDCYTCQHYTKSYLYHLDKCGEILGARLNTIHNLRYYQRLMEQIRTAIEQDRFDDFVQEFYARMDKPVPPLQKA

SEQ ID NO: 57214 - protein, 382 aa, Mannheimia varigena
  misc_feature (1)..(382): tr|W0Q9V4|W0Q9V4_9PAST Queuine tRNA-ribosyltransferase OS=Mannheimia varigena USDA-ARS-USMARC-1296 OX=1433287 GN=tgt PE=3 SV=1
MKYELKTTSDNARRGRLTFSRPKGEFTVETPAFMPVGTYGTVKGMTPEEVKATGAEILLGNTFHLWLRPGQEVMKMHGDLHDFMQWHGPILTDSGGFQVFSLGKLRKIKEEGVTFQNPISGEKIFLSPEKSMEIQYDLGSDIVMIFDECTPYPATFDYAKQSMEMSLRWAKRSRDRFDELENPNALFGIIQGGVYEELRKVSVEKLVEIGFDGYAVGGLAVGEPKEDMHRILEYVCPQIPADKPRYLMGVGKPEDLVEGVRRGIDMFDCVMPTRNARNGHLFVTNGIVKIRNAKYRADTTPLDPECDCYTCKNYTKAYLYHLDKCGEILGARLNTIHNLRYYQRLMAEIRQAIEDDRFDDFVVEFYARIGKEVPPLQSEINK

SEQ ID NO: 57215 - protein, 383 aa, Maribacter aquivivus
  misc_feature (1)..(383): tr|A0A1M6VT77|A0A1M6VT77_9FLAO Queuine tRNA-ribosyltran sferase OS=Maribacter aquivivus OX=228958 GN=tgt PE=3 S V=1
MQLELENLKFTLHNTDLQSKARAGTIVTDHGTIETPIFMPVGTVASVKGVHQKELREEVNPDIILGNTYHLFLRPKTEILKKAGGLHKFMGWDRNILTDSGGYQVYSLSANRKIKEEGVKFKSHIDGSMHLFTPENVMEIQRVIGADIIMAFDECTPYPCDYNYAKRSMHMTHRWLDRCINHLEKTPFEYDYEQTFFPIVQGSTYKDLRRQSAEYIANAGAEGNAIGGLSVGEPAEEMYGMTEVVCEILPEDKPRYLMGVGTPINILENIALGIDMFDCVMPTRNARNGMLFTAHGTINIKNKKWEDDFSPIDEMGTTFVDHEYSKAYLRHLFAANEYLGKQIATIHNLGFYMWLVREARKHIIAGDFRAWKDIMVKQMDKRL

SEQ ID NO: 57216 - protein, 383 aa, Maribacter arcticus
  misc_feature (1)..(383): tr|A0A1T5A153|A0A1T5A153_9FLAO Queuine tRNA-ribosyltran sferase OS=Maribacter arcticus OX=561365 GN=tgt PE=3 SV =1
MQLDLENLKFTLHTTDAQSKARAGTVVTDHGVIETPIFMPVGTVASVKGVHQKELKEEINPDIILGNTYHLFLRPKTEILRKAGGLHKFMGWDRNILTDSGGYQVYSLSANRKIKEEGVKFKSHIDGSMHLFTPENVMEIQRVIGADIIMAFDECTPYPCDYNYAKRSMHMTHRWLDRCITHLEKTPFTYDFEQTFFPIVQGSTYKDLRRQSAEYIANTGAEGNAIGGLSVGEPAEEMYGMTEVVCEILPEDKPRYLMGVGTPINILENIALGIDMFDCVMPTRNARNGMLFTAHGTINIKNKKWEDDFSQLDEMGTTFVDREYSKAYLRHLFAANEYLGKQIATIHNLGFYMWLVREARKHILAGDFRQWKDIMVKQMDKRL

SEQ ID NO: 57217 - protein, 383 aa, Maribacter caenipelagi
  misc_feature (1)..(383): tr|A0A4R7DB64|A0A4R7DB64_9FLAO Queuine tRNA-ribosyltran sferase OS=Maribacter caenipelagi OX=1447781 GN=tgt PE= 3 SV=1
MQLDLENLKFTLHNTDLQSKARAGTIVTDHGIIETPIFMPVGTVASVKGVHQKELKEEVNPDIILGNTYHLFLRPKTEILKKAGGLHKFMGWDRNILTDSGGYQVYSLSANRKIKEEGVKFKSHIDGSMHLFTPENVMEIQRVIGADIIMAFDECTPYPCDYNYAKRSMHMTHRWLDRCINHLSKTPFEYDYEQTFFPIVQGSTYKDLRRQSAEYIANAGAEGNAIGGLSVGEPAEEMYGMTEVVCEILPEDKPRYLMGVGTPINILENIALGIDMFDCVMPTRNARNGMLFTAHGTINIKNKKWEDDFSPIDEMGTTFVDHEYSKAYLRHLFAANEYLGKQIATIHNLGFYMWLVREARKHIIAGDFRTWKDMMVKQMDKRL

SEQ ID NO: 57218 - protein, 376 aa, Maribacter cobaltidurans
  misc_feature (1)..(376): tr|A0A223VAV5|A0A223VAV5_9FLAO Queuine tRNA-ribosyltran sferase OS=Maribacter cobaltidurans OX=1178778 GN=tgt P E=3 SV=1
MEFTLHKTDVQSKARAGTIKTDHGAIETPIFMPVGTVASVKGVHQKELREEINPDIILGNTYHLFLRPKTEILQKAGGLHKFMGWDRNILTDSGGYQVYSLSGNRKIKEEGVKFKSHIDGSMHMFTPENVMEIQRVIGADIIMAFDECTPYPCDYNYAKRSMHMTHRWLDRCINHLEKTPFAYDYSQSFFPIVQGSTYKDLRRQSAEYIANAGAEGNAIGGLSVGEPAEEMYGMTEVVCEILPEDKPRYLMGVGTPINILENIALGIDMFDCVMPTRNARNGMLFTAHGTINIKNKKWEDDFSSIDEMGTTFVDKEYSKAYLRHLFVANEYLGKQIATIHNLGFYLWLVREARKHILEGDFYSWKNTMVKQMDKRL

SEQ ID NO: 57219 - protein, 383 aa, Maribacter dokdonensis
  misc_feature (1)..(383): tr|A0A1H4PWG0|A0A1H4PWG0_9FLAO Queuine tRNA-ribosyltran sferase OS=Maribacter dokdonensis OX=320912 GN=tgt PE=3 SV=1
MQLELESLKFTLHTTDTQSKARAGTVVTDHGVIETPIFMPVGTVASVKGVHQKELKEEINPDIILGNTYHLFLRPKTEILKKAGGLHKFMGWDRNILTDSGGYQVYSLSGNRKIKEEGVKFKSHIDGSMHLFTPENVMEIQRVIGADIIMAFDECTPYPCEYNYAKRSMHMTHRWLDRCINHLEKTPFEYDYAQTFFPIVQGSTYKNLRRQSAEYIANAGAEGNAIGGLSVGEPAEEMYGMTEVVCEILPEDKPRYLMGVGNPINILENIALGIDMFDCVMPTRNARNGMLFTAHGTINIKNKKWEDDFSPIDEMGTTFVDHEYSKAYLRHLFAANEYLGKQIATIHNLGFYMWLVREARKHIIAGDFRTWKDMMVKQMDKRL

SEQ ID NO: 57220 - protein, 376 aa, Maribacter flavus
  misc_feature (1)..(376): tr|A0A5B2TU89|A0A5B2TU89_9FLAO Queuine tRNA-ribosyltran sferase OS=Maribacter flavus OX=1658664 GN=tgt PE=3 SV= 1
MKFTLHKTDVQSKARAGTLVTDHGTIETPIFMPVGTVASVKGVHQKELREEINPDIILGNTYHLFLRPKTDILQKAGGLHKFMGWDRNILTDSGGYQVYSLSGNRKIKEEGVKFKSHIDGSMHMFTPENVMEIQRVIGADIIMAFDECTPYPCDYNYAKRSMHMTHRWLDRCIAHLEKTPFVYDYSQSFFPIVQGSTYKDLRRQSAEYIANAGAEGNAIGGLSVGEPAEEMYGMTEVVCEILPEDKPRYLMGVGTPINILENIALGIDMFDCVMPTRNARNGMLFTAHGTINIKNKKWEDDFSPIDEMGTTFVDREYSKAYLRHLFVANEYLGKQIATIHNLGFYLWLVREARKHILEGDFYSWKNNMVKQMDKRL

SEQ ID NO: 57221 - protein, 383 aa, Maribacter orientalis
  misc_feature (1)..(383): tr|A0A1H7PVS2|A0A1H7PVS2_9FLAO Queuine tRNA-ribosyltran sferase OS=Maribacter orientalis OX=228957 GN=tgt PE=3 SV=1
MQLDLENLKFTLHTTDAQSKARAGTVVTDHGVIDTPIFMPVGTVASVKGVHQKELKEEVNPDIILGNTYHLFLRPKTEILRKAGGLHKFMGWDRNILTDSGGYQVYSLSANRKIKEEGVKFKSHIDGSTHLFTPENVMEIQRIIGADIIMAFDECTPYPCDYNYAKRSMHMTHRWLDRCINHLEKTPFEYDYEQTFFPIVQGSTYKDLRRQSAEYIANAGAEGNAIGGLSVGEPAEEMYGMTEVVCEILPEDKPRYLMGVGTPINILENIALGIDMFDCVMPTRNARNGMLFTAHGTINIKNKKWEDDFSQLDEMGTTFVDREYSKAYLRHLFAANEYLGKQIATIHNLGFYMWLVREARKHIIAGDFRQWKDIMVKQMDKRL

SEQ ID NO: 57222 - protein, 386 aa, Maribacter polysiphoniae
  misc_feature (1)..(386): tr|A0A316E1L7|A0A316E1L7_9FLAO Queuine tRNA-ribosyltran sferase OS=Maribacter polysiphoniae OX=429344 GN=tgt PE =3 SV=1
MIIFATLNKKVQFTLEHTDAQSKARAGKMVTDHGVIETPIFMPVGTVASVKGVHQRELKEEINPDIILGNTYHLFLRPKTQILQQAGGLHKFMGWDRNILTDSGGYQVYSLSANRKIKEEGVKFKSHIDGSMHMFTPEKVMEIQRVIGADIIMAFDECTPYPCEYNYAKRSMHMTHRWLDRCMAHLDKTPFTYDFSQSFFPIVQGSTYKDLRIQSAEYIANAGAEGNAIGGLSVGEPAEEMYAMTEVVCDILPKDKPRYLMGVGTPINILENIALGIDMFDCVMPTRNARNGMLFTAHGTINIKNKKWEDDFSPIDEMGTTFVDKEYSKAYLRHLFAANEYLGKQIATIHNLGFYLWLVREARKHILAGDFTSWKNIMVKQMDKRL

SEQ ID NO: 57223 - protein, 376 aa, Maribacter sp.
  misc_feature (1)..(376): tr|A0A2G6QUX3|A0A2G6QUX3_9FLAO Queuine tRNA-ribosyltran sferase OS=Maribacter sp. OX=1897614 GN=tgt PE=3 SV=1
MQFTLEHTDAQSKARAGKMVTDHGVVETPIFMPVGTVASVKGVHQRELREDINPDIILGNTYHLFLRPKTRILQQAGGLHKFMGWDRNILTDSGGYQVYSLSANRKIKEEGVKFKSHIDGSMHMFTPERVMEIQRVIGADIIMAFDECTPYPCDYDYAKRSMHMTHRWLDRCMAHLEKTPFAYDYSQSFFPIVQGSTYKDLRIRSAEYIANAGAEGNAIGGLSVGEPAGEMYAMTEVVCDILPEDKPRYLMGVGTPINILENIALGIDMFDCVMPTRNARNGMLFTAHGTMNIKNKKWEDDFSPIDEMGTTFVDKEYSKAYLRHLFAANEYLGRQIATIHNLGFYLWLVREARKHILAGDFTSWKHIMVKQMDKRL

SEQ ID NO: 57224 - protein, 383 aa, Maribacter sp.
  misc_feature (1)..(383): tr|A0A559NVE9|A0A559NVE9_9FLAO Queuine tRNA-ribosyltran sferase OS=Maribacter sp. MAR_2009_72 OX=1250050 GN=tgt PE=3 SV=1
MHLYLDNLKFTLHKTDAQSKARAGTMVTDHGVIETPIFMPVGTVASVKGVHQKELREEINPDIILGNTYHLFLRPKTDILKKAGGLHKFMGWDRNILTDSGGYQVYSLSANRKIKEEGVKFKSHIDGSMHMFTPENVMEIQRTIGADIIMAFDECTPYPCEYNYAKRSMHMTHRWLDRCIKHLEKTPFEYDYEQTFFPIVQGSTYKDLRRQSAEYIANAGAQGNAIGGLSVGEPAEEMYGMTEVVCEILPEDKPRYLMGVGTPINILENIALGIDMFDCVMPTRNARNGMLFTAHGTINIKNKKWEDDFSPLDEMGTTFVDREYSKAYLRHLFAANEYLGKQIATIHNLGFYMWLVREARRHIIEGDFKTWKDMMVKQMDKRL

SEQ ID NO: 57225 - protein, 383 aa, Maribacter spongiicola
  misc_feature (1)..(383): tr|A0A4R7KAL5|A0A4R7KAL5_9FLAO Queuine tRNA-ribosyltran sferase OS=Maribacter spongiicola OX=1206753 GN=tgt PE= 3 SV=1
MQLELESLKFTLHNTDLQSKARAGTIVTDHGTIETPIFMPVGTVASVKGVHQKELREEVNPDIILGNTYHLFLRPKTEILKKAGGLHKFMGWDRNILTDSGGYQVYSLSANRKIKEEGVKFKSHIDGSTHLFTPENVMEIQRVIGADIIMAFDECTPYPCEYNYAKRSMHMTHRWLDRCINHLEKIPFEYDYAQTFFPIVQGSTYKDLRRQSAEYIANAGAEGNAIGGLSVGEPAEEMYGMTEVVCEILPEDKPRYLMGVGTPINILENIALGIDMFDCVMPTRNARNGMLFTAHGTINIKNKKWEDDFSPIDEMGTTFVDHEYSKAYLRHLFAANEYLGKQIATIHNLGFYMWLVREARKHIIAGDFRTWKDMMVKQMDKRL

SEQ ID NO: 57226 - protein, 383 aa, Maribacter stanieri
  misc_feature (1)..(383): tr|A0A1I6IPY2|A0A1I6IPY2_9FLAO Queuine tRNA-ribosyltran sferase OS=Maribacter stanieri OX=440514 GN=tgt PE=3 SV =1
MQLDLEILKFTLHNTDTQSKARAGTMVTDHGTIETPIFMPVGTVASVKGVHQKELREEVNPDIILGNTYHLFLRPKTEILKKAGGLHKFMGWDRNILTDSGGYQVYSLSANRKIKEEGVKFKSHIDGSMHLFTPENVMEIQRVIGADIIMAFDECTPYPCDYNYAKRSMHMTHRWLDRCINHLEKTPFEYDYEQTFFPIVQGSTYKDLRRQSAEYIANAGAEGNAIGGLSVGEPAEEMYGMTEVVCEILPEDKPRYLMGVGTPINILENIALGIDMFDCVMPTRNARNGMLFTAHGTINIKNKKWEDDFSPLDEMGTTFVDREYSKAYLRHLFAANEYLGKQIATIHNLGFYMWLVREARKHIIAGDFRAWKDIMVKQMDKRL

SEQ ID NO: 57227 - protein, 383 aa, Maribacter ulvicola
  misc_feature (1)..(383): tr|A0A1N6SPL2|A0A1N6SPL2_9FLAO Queuine tRNA-ribosyltran sferase OS=Maribacter ulvicola OX=228959 GN=tgt PE=3 SV =1
MQLDIESLKFTLHNTDLQSKARAGTIVTDHGTIETPIFMPVGTVASVKGVHQKELREEVNPDIILGNTYHLFLRPKTEILKKAGGLHKFMGWDRNILTDSGGYQVYSLSGNRKIKEEGVKFKSHIDGSMHLFTPENVMEIQRVIGADIIMAFDECTPYPCEYNYAKRSMHMTHRWLDRCINHLEKTPFEYDYAQTFFPIVQGSTYKDLRRQSAEYIANAGAEGNAIGGLSVGEPAEEMYGMTEVVCEILPEDKPRYLMGVGTPINILENIALGIDMFDCVMPTRNARNGMLFTAHGTINIKNKKWEDDFSPIDEMGTTFVDREYSKAYLRHLFAANEYLGKQIATIHNLGFYMWLVREARKHIIAGDFRPWKDTMVKQMDKRL

SEQ ID NO: 57228 - protein, 376 aa, Maribacter vaceletii
  misc_feature (1)..(376): tr|A0A495E5A8|A0A495E5A8_9FLAO Queuine tRNA-ribosyltran sferase OS=Maribacter vaceletii OX=1206816 GN=tgt PE=3 SV=1
MKFTLHHTDPLSKARAGTMVTDHGTIETPIFMPVGTVASVKGVHQKELREEIKPDIILGNTYHLFLRPKTPILHKAGGLHKFMGWDGNILTDSGGYQVYSLSSNRKIKEEGVKFKSHIDGSYHMFTPENVMEIQRTIGADIIMAFDECTPYPCDYKYAKRSMHMTHRWLDRCITHLDKTPFVYDYSQTFFPIVQGSTYKDLRRQSAEYIANAGAEGNAIGGLSVGEPAEEMYGMTEVVCEVLPEDKPRYLMGVGTPINILENIALGIDMFDCVMPTRNARNGMLFTSHGTINIKNKKWEDDFSMLDPEGTTFVDKEYTKAYLRHLFAANEYLGKQIATIHNLGFYMWLVREARKHILAGDFRVWKDAMVKQMDKRL

SEQ ID NO: 57229 - protein, 375 aa, Maribius pelagius
  misc_feature (1)..(375): tr|A0A1H8BGP1|A0A1H8BGP1_9RHOB Queuine tRNA-ribosyltran sferase OS=Maribius pelagius OX=387096 GN=tgt PE=3 SV=1
MTRFSFDLHATDGAARTGTIHTPRGDIRTPAFMPVGTAATVKATLPESVRATGADILLGNTYHLMLRPTAERIDRLGGLHGFMNWDRPILTDSGGFQVMSLADLRKLTERGVTFKSHIDGSRHEITPERSMEIQRLLGSDIVMCFDECPALPADRDRIASSMRLSMRWAARSKDAFGDRPGHALFGIQQGGLEPDLREESAKALVDIGFDGYAVGGLAVGEGQEAMFGVLDYAPAQLPADKPRYLMGVGKPDDIVGAVKRGIDMMDCVLPSRSGRTGQAFTRRGVVNIKNARHADDPRPLDESCSCPACTGYSRAYLHHVFRAGEMISGMLLTWHNLHYFQEIMQGMRDAIAAGRFAAWEADFHATRAEGDIAPL

SEQ ID NO: 57230 - protein, 375 aa, Maribius salinus
  misc_feature (1)..(375): tr|A0A1M6AN84|A0A1M6AN84_9RHOB Queuine tRNA-ribosyltran sferase OS=Maribius salinus OX=313368 GN=tgt PE=3 SV=1
MTRFSFDLHATDGAARTGTIHTPRGEIRTPAFMPVGTAATVKAMLPESVRATGADILLGNTYHLMLRPTAERIDRLGGLHGFMNWDRPILTDSGGFQVMSLADLRKLTERGVTFKSHIDGSRHEITPERSMEIQRLLGSDIVMCFDECPALPADRDRIASSMRLSMRWAARSKDAFGDRPGHALFGIQQGGLEPDLREESAKALVDIGFDGYAVGGLAVGEGQEAMFGVLDYAPAQLPADKPRYLMGVGKPDDIVGAVKRGIDMMDCVLPSRSGRTGQAFTRRGVVNIKNARHADDPRPLDESCSCPACTGYSRAYLHHVFRAGEMISGMLLTWHNLHYFQEIMQGMRDAIAAGRFAAWEADFHATRAEGDIAPL

SEQ ID NO: 57231 - protein, 380 aa, Maricaulis maris
  misc_feature (1)..(380): tr|A0A495D1D0|A0A495D1D0_9RHOB Queuine tRNA-ribosyltran sferase OS=Maricaulis maris OX=74318 GN=tgt PE=3 SV=1
MTTFPYDIHATDGAARTGVLKTSRGDIRTPAFMPVGTAATVKALYMDQVRETGADIILGNTYHLMLRPGAERVKRLGGLHKFSTWQGPMLTDSGGFQVWSLSKLRKMTEEGVKFRSHIDGSEHNLTPERSIEIQADLLGADISMQLDECTPFGCSEKEARTSMELSIRWGQRSKAAFGTRDSQALFGIVQGSVFETLRRESAERLIETGYDGYAIGGLAVGEGFEKMCDVLDFTTPHLPSERPRYLMGVGKPIDLVEAVARGVDMFDCVLPTRSGRHGQAWSDHGPINIKRAEFAEDDSPLNPEIDCPASRDYSKAYLHHLFRAGEYLSAMLLSWHNIAYFQHLTARMRTAIAAGEFESFRKDFRAKWEAGQAEAAARAS

SEQ ID NO: 57232 - protein, 380 aa, Maricaulis maris
  misc_feature (1)..(380): tr|Q0ANH9|Q0ANH9_MARMM Queuine tRNA-ribosyltransferase OS=Maricaulis maris (strain MCS10) OX=394221 GN=tgt PE= 3 SV=1
MTTFPYEIHATDGAARTGVLKTSRGDIRTPAFMPVGTAATVKALYMDQVRETGADIILGNTYHLMLRPGAERVKRLGGLHKFSTWKGPMLTDSGGFQVWSLSKLRKMTEEGVKFRSHIDGSEHNLTPERSIEIQADLLGADISMQLDECTPFGCSEAEARTSMELSIRWGQRSKAAFGTRDSQALFGIVQGSVFENLRRESAERLIETGYDGYAIGGLAVGEGFEKMCDVLDFTTPHLPSERPRYLMGVGKPIDLVEAVARGVDMFDCVLPTRSGRHGQAWSDHGPINIKRAEFAEDDSPLNPEIDCPASRDYSKAYLHHLFRSGEYLSAMLLSWHNIAYFQHLTARMRAAIAAGEFEAFRREFRGKWEQGQAEAAERAG

SEQ ID NO: 57233 - protein, 380 aa, Maricaulis salignorans
  misc_feature (1)..(380): tr|A0A1G9PTW0|A0A1G9PTW0_9RHOB Queuine tRNA-ribosyltran sferase OS=Maricaulis salignorans OX=144026 GN=tgt PE=3 SV=1
MSVFAYEIHATDGAARTGVLKTPRGDIRTPAFMPVGTAGTVKALYMDQVKETGADIILGNTYHLMLRPGAERVKRMGGLQKFSTWQGPILTDSGGFQVWSLSKLRKMNEQGVTFQSHIDGSKHHLSPERSIEIQADLLGADISMQLDECTAFGCTPAEAQASLELSLRWGQRSKDAFGSRDDQVLFGIVQGSVFEDLRRQSAEGLKEIGFDGYAIGGLAVGEGFEQMCDVLDFTTPHLPVERPRYLMGVGKPIDLVEAVARGVDMFDCVLPTRSGRHGQAWSDYGPINIKRAEFIEDDTPLAPEIDCPASRDYSKAYLNHLFKSGEYLSAMLISWHNIAYFEHLMARIRAAIAAGEYEAFRREFRAKWDQGIAEAATRSA

SEQ ID NO: 57234 - protein, 374 aa, Maricaulis sp.
  misc_feature (1)..(374): tr|A0A2D8BTL1|A0A2D8BTL1_9RHOB Queuine tRNA-ribosyltran sferase OS=Maricaulis sp. OX=1486257 GN=tgt PE=3 SV=1
MTAFSFDIAATDGAARTGALRTTRGDIRTPAFMPVGTAGTVKALYMDQVREAGADIILGNTYHLMLRPGAERVKKLGGLHAFSRWSGPMLTDSGGFQVWSLAGLRKMTEEGVQFASHIDGSRHMLSPERSIEIQADLLGADISMQLDECTPFPCEKEAARASMELSLRWGKRSKEAFGERETQNLFGIVQGSVYPDLRRESAERLIETGFDGYAVGGLAVGEGFEMMCSVLESVVPHLPADRPRYLMGVGKPIDLVEAVARGIDMFDCVMPTRSGRHGQAWSDYGPVNLKAARFAEDAAPLDASLDCPASRDYSRAYIHHLVRAGEYLAAMLLSWHNIAYYQSLMARMRAAIADGRFEDFRREFNARWDSGAFE

SEQ ID NO: 57235 - protein, 380 aa, Maricaulis sp.
  misc_feature (1)..(380): tr|A0A1Q8FJS9|A0A1Q8FJS9_9RHOB Queuine tRNA-ribosyltran sferase OS=Maricaulis sp. W15 OX=1772333 GN=tgt PE=3 SV =1
MTTFPYEIHATDGAARTGVLKTSRGDIRTPAFMPVGTAATVKALYMDQVRETGADIILGNTYHLMLRPGAERVKRLGGLHKFSTWQGPMLTDSGGFQVWSLSKLRKMTEEGVKFRSHIDGSEHNLTPERSIEIQADLLGADISMQLDECTPFGCSEKEARTSMELSIRWGQRSKAAFGPRDSQALFGIVQGSVFENLRRESAERLIETGYDGYAIGGLAVGEGFEKMCDVLDFTTPHLPSERPRYLMGVGKPIDLVEAVARGVDMFDCVLPTRSGRHGQAWSDHGPINIKRAEFAEDDSPLNPEIDCPASRDYSKAYLHHLFRAGEYLSAMLLSWHNIAYFQHLTARMRTAIAVGEFEAFRRDFRAKWEAGQAEAAARAS

SEQ ID NO: 57236 - protein, 367 aa, Marichromatium gracile
  misc_feature (1)..(367): tr|A0A4V2WA88|A0A4V2WA88_MARGR Queuine tRNA-ribosyltran sferase OS=Marichromatium gracile OX=1048 GN=tgt PE=3 S V=1
MEFELLARDGLARRARLHFPRGTVETPAFMPVGTYGTVKAMSPEELRELGAEIVLGNTFHLMLRPGTEVIRRHGDLHDFMHWERPILTDSGGFQVFSLGELRKITEEGVHFRSPVDGSRVFMSPEVSMQVQRELGSDIVMIFDECTPYPADEAQARASMELSLRWAARSREAHGDNPAALFGIVQGGMHEGPRADSLEGLMRIGFDGYAIGGLSVGEPEADRLRVLDFLSGKLPVDHPRYLMGVGTPEDIVAAVCRGVDMFDCVMPTRNARNGYLFTRHGTIKIRNAAHRTDERPLDPECSCYTCRHYSRAYLHHLDRCKEILGSRLATIHNLHYYQELMAGLRAAIAAGRLAEFVAEFKALRGLAD

SEQ ID NO: 57237 - protein, 367 aa, Marichromatium purpuratum
  misc_feature (1)..(367): tr|W0E241|W0E241_MARPU Queuine tRNA-ribosyltransferase OS=Marichromatium purpuratum 984 OX=765910 GN=tgt PE=3 SV=1
MEFELLARDGLARRARLHFPRGTVETPAFMPVGTYGTVKAMSPEELRELGAEIVLGNTFHLMLRPGTEVIRRHGDLHDFMHWERPILTDSGGFQVFSLGELRKITEEGVHFRSPVDGSRVFMSPEVSMQVQRELGSDIVMIFDECTPYPADEAQARASMELSLRWAARSREAHGDNPAALFGIVQGGMHEGPRADSLEGLMRIGFDGYAIGGLSVGEPEADRLRVLDFLSDKLPTDHPRYLMGVGTPEDIVAAVCRGVDMFDCVMPTRHARNGYLFTRHGTIKIRNAVHRTDERPLDPACDCYTCRHYSRAYLHHLDRCKEILGSRLATIHNLHYYQELMAGLRAAIADGRLVEFVAEFKALRAQTD

SEQ ID NO: 57238 - protein, 369 aa, Unknown
  misc_feature (1)..(369): tr|A0A0C1UHU1|A0A0C1UHU1_9ACTN Queuine tRNA-ribosyltran sferase OS=marine actinobacterium MedAcidi-G1 OX=155039 9 GN=tgt PE=3 SV=1
MRADFDLENKDGEARTGIVRLATGSFKTPCFMPVGTRGSVRHLSSLDLKDLGAQVVLANTYHLMLRPGAEIVKNAGGIGSFANWKGLTLTDSGGYQIFSLAPKIDEEGATFRSVYDGSFHKLTPESSAEIQADIGADIQMVLDICPALPAPEETIKESVEMTAAWAERGRKTFIDHPDASSRQSQFGIVQGGINSALRIESARRTLEIGFDGYAIGGLSVGEGRDEMLDSVSVVTDLIPESQPRYFMGLGDPVGLVNVVERGVDMFDCVLPTRLARHGTVLTSEGRINIGNARFAKDDKPLDPGFPQSPGNHWSRSYLRHLMATDEPTGARILTLHNLAWLFNFVERMRTSINENEFDNFRKETLDIWS

SEQ ID NO: 57239 - protein, 369 aa, Unknown
  misc_feature (1)..(369): tr|A0A0C1US03|A0A0C1US03_9ACTN Queuine tRNA-ribosyltran sferase OS=marine actinobacterium MedAcidi-G2B OX=15504 01 GN=tgt PE=3 SV=1
MKALSNIIAKDGKARLSEVSLANGKFQTPCFMPVGTRGAVKHLSSLDMKDLNAEIILGNTYHLMLRPGADLIKKHGGLGKFANWGGLTLTDSGGYQIFSLKPKVEDEGATFRSIYDGSSHHLTPESASSIQADLGADIQMVLDVCSALPAERNVLKDAVDRTALWAERARTAFLTHPTANEKQSQFGIVQGGTDAPLRIESTEKTLEVGFDGYAIGGLSVGEGRSEMLEPVEVVTDLLPEDQPRYFMGLGDPVGIVEVVARGVDMFDCVLPTRLARHGTVLTSTGRINLRNACFIGDEQPLDPTFENSPASNWSRSYLRHLLITNEPTAPRILTLHNLAWMFDFVFKLRKSIADGEFEEFHKQTLEIWG

SEQ ID NO: 57240 - protein, 376 aa, Unknown
  misc_feature (1)..(376): tr|A0A1Q3GHT9|A0A1Q3GHT9_9BACT Queuine tRNA-ribosyltran sferase OS=marine bacterium AO1-C OX=1905359 GN=tgt PE= 3 SV=1
MKFKLQANDTDSSARAGEITTAHGQIQTPIFMPVGTAGTVKAVHQRELKEDIQAQIILGNTYHLYLRPGLDILKKFGGLHKFNGWDRPILTDSGGYQVYSLSDMRKIKEEGVTFQSHIDGSKHQFSPEIVMDIQRAIGADIIMAFDECTPYPCEYDYAKKSMEMTHRWLKRCCDRFDSTEPLYGYEQTLFPIVQGSTYKDLRKQSAEVIASFERDGNAIGGLSVGEPHEMMYESTELVCGILPKDKPRYLMGVGTPENILECIALGVDMFDCVMPTRNARNGMLFTTQGIINIKNKKWENDETPIDPMLGGYASTFYSKGYLRHLVQSKEILAAQIASIHNLSFYLWLVGQAREQILAGTFLPWKNKMVKQVMQRL

SEQ ID NO: 57241 - protein, 338 aa, Unknown
  misc_feature (1)..(338): tr|B7RY80|B7RY80_9GAMM Queuine tRNA-ribosyltransferase OS=marine gamma proteobacterium HTCC2148 OX=247634 GN=t gt PE=3 SV=1
MPVGTYGTVKGMLPRDIHEIGAEIILGNTFHLWLRPGTDIIEQHGDLHDFMHWNGPILTDSGGFQVFSLGDMRKISEEGVKFQSPVDGSKVFLDPEKSMSIQRKLGSDIVMIFDECTPYPATEQEASDSMELSLRWAARSKTAHADSSAALFGIVQGGMYSHLRAQSLAGLKEIGFDGYAIGGLSVGEPKDEMMSVLEVMQPLLPEDKPRYLMGVGTPADLLEGVRRGVDMFDCVMPTRNARNGNIFTSHGALKLRNARHKTSTLPLDEECGCYTCKNFSRAYLHHLDKCNEILGSQLNTIHNLYFYQQHMAGIREAIEQGRLEQFADQFYAEQERGV

SEQ ID NO: 57242 - protein, 391 aa, Unknown
  misc_feature (1)..(391): tr|A0YHN6|A0YHN6_9GAMM Queuine tRNA-ribosyltransferase OS=marine gamma proteobacterium HTCC2143 OX=247633 GN=t gt PE=3 SV=1
MEQDFMSRECFMQFEIDTSDEQARRGRLTFPRGVVETPAFMPVGTYGTVKGMLPRDIKEIGADIILGNTFHLWLRPGTEVIKGHGANGSGTLHDFMGWDKPILTDSGGFQVFSLGAMRKISEEGVAFRSPIDGSKVFLDPEKSMQVQRDLGSDIVMIFDECTPYPATHQEAKDSMELSLRWAKRSQSAHGDNPSALFGIIQGGMYEDLRNQSMAGLVDLDFDGYAIGGLSVGEPKDEMMKVLDVITPGMPANKPRYLMGVGTPQDLLEGVMRGVDMFDCVMPTRNARNAHIFTSQGVLKLRNAKHRHSTEALDPNCDCYTCKNFSRGYLHHLDKCKEMLGGQLNTIHNLRFYQRHMSHIRTAIEQQQLNTYAAEFYEAQGVSASNRNPVVQ

SEQ ID NO: 57243 - protein, 375 aa, Marinibacterium profundimaris
  misc_feature (1)..(375): tr|A0A225NWW6|A0A225NWW6_9RHOB Queuine tRNA-ribosyltran sferase OS=Marinibacterium profundimaris OX=1679460 GN= tgt PE=3 SV=1
MSTFSFSLAATDGRARTGTITTPRGEIRTPAFMPVGTAATVKAMLPESVRATGADILLGNTYHLMLRPTAERIDRLGGLHRFMNWERPILTDSGGFQVMSLAGLRKLTEQGVTFKSHIDGSKHELTPERSMEIQRLLGSDIVMCFDECPALPAEENVVAESMRMSMRWAARSREAFGDRPGHALFGIQQGGVTEELRGESAEALTKIGFDGYAVGGLAVGEGQEAMFGVLDYAPEMLPQDKPRYLMGVGKPDDIVGAVARGIDMMDCVLPSRSGRTGQVFTRRGVLNIKNARHMDDPRPLDEACSCPACLNYSRAYLHHVFRSQEIISSMLLTWHNLHYFQEIMEGMRGAISAGRFEAWQAEFHATRAEGDIEPL

SEQ ID NO: 57244 - protein, 372 aa, Mariniblastus fucicola
  misc_feature (1)..(372): tr|A0A5B9PA42|A0A5B9PA42_9PLAN Queuine tRNA-ribosyltran sferase OS=Mariniblastus fucicola OX=980251 GN=tgt PE=3 SV=1
MFRYELLHVDQNCGARLGRLHTPRGVIELPTFMPVGTCGTVKGMTTDMVEATGSQILLGNTYHLHLRPGESVVKELGGLHKFMGWDKPILTDSGGFQVFSLAQRTVVDEQGATFRSHIDGSKITITPEISVQIQQDLGSDIAMVFDHVIELPSSREKVKDAMDRSIRWAERCRDAHTLESQVQFGILQGGLDESLRIECAKELRQLDFPGYAIGGLSVGEPPPEMYRIIEATTPHMPEDRPRYLMGVGRPEDLLQAVLRGVDMFDCVMPTRNGRNAMAFTDDGFLKMKNAIHERDPRPIQAGMHTPHAELSRGYIRHLFMAKEMLAGMLVSMHNIGYYQRLMTQAREAIAADRFLDFFEERMAGWAGGKSSD

SEQ ID NO: 57245 - protein, 377 aa, Marinicauda algicola
  misc_feature (1)..(377): tr|A0A4V3RYC1|A0A4V3RYC1_9RHOB Queuine tRNA-ribosyltran sferase OS=Marinicauda algicola OX=2029849 GN=tgt PE=3 SV=1
MSAFLFEIAAVDGKARTGQLVTPRGAIRTPAFMPVGTAATVKALYPEQVRQAGADIILGNTYHLMLRPGAERVQRLGGLHRFMRWDGPILTDSGGFQVWSLAQLRKMEEEGVTFKSHIDGTSHKLTPERSIEIQADLLGADISMQLDECTPFPCPRQEAESSMELSLRWAKRSKEAFGDREAQNLFGIVQGSTFEDLRQRSAQGLVETGFDGYAVGGLAVGEGFETMCEVLNYTVPELPHERPRYLMGVGKPIDLVEAVARGIDMFDCVMPTRSGRHGQAWSDYGPVNLKNAQFAEDSDPLDPAIDCPASRDYSKAYLHHLVRAGEYLAAMLLSWHNVAYYEHLMARMRAAIAKGEFDSFRRDFNDRWAEGRKSRAE

SEQ ID NO: 57246 - protein, 377 aa, Marinicauda pacifica
  misc_feature (1)..(377): tr|A0A4S2HEM5|A0A4S2HEM5_9RHOB Queuine tRNA-ribosyltran sferase OS=Marinicauda pacifica OX=1133559 GN=tgt PE=3 SV=1
MTHFPFEIAAVDGAARTGRIQTPRGDIRTPAFMPVGTAATVKALYPEQVSEAGADIILGNTYHLMLRPGAERVHRLGGLHRFMRWSGPILTDSGGFQVWSLSKLRQMSEEGVTFKSHIDGSAHSLTPERSIEIQADLLGADISMQLDECTAFPSPREEAERSMEMSLRWAKRSKAAFGERETQNLFGIVQGSTFEDLRRRSAEGLMEIGFDGYAIGGLAVGEGFEAMCEVLDFTTPVLPLDRPRYLMGVGKPVDLVESVARGVDMFDCVMPTRSGRHGQAWSDYGPVNLKNARFAEDDTPLNAAIACPASRDYSRAYIHHLVRAGEYLGSMLLSWHNIAYYEDLMARMRTAIAEGEFEAFRRGFLERWHSNEKDRAE

SEQ ID NO: 57247 - protein, 376 aa, Marinicauda sp.
  misc_feature (1)..(376): tr|A0A2U2BRI9|A0A2U2BRI9_9RHOB Queuine tRNA-ribosyltran sferase OS=Marinicauda sp. WD6-1 OX=2135793 GN=tgt PE=3 SV=1
MASFDFPVSAVDGAARTGRLITSRGEIRTPAFMPVGTAATVKALYPEQVRAAGADIILGNTYHLMLRPGAERIARLGGLHRFMGWDGPILTDSGGFQVWSLAKLRKMSEQGVEFASHIDGSKHMLTPERSIEIQADLLGADISMQLDECTAFGSDRDEAAKSMELSLRWGKRSKDAFGERESQALFGIVQGSVYEDLRAASAEALVETGYDGYAIGGLAVGEGFETMCAVLDHTTPRLPADRPRYLMGVGKPIDLVESVARGVDMFDCVMPTRSGRHGQAWSDYGPVNLKNARFAEDPEPLDASIDCPASRDYAKAYIHHLVRANEYLGAMLLSWHNVAYYEDLMARMRAAIAEGAFEAFRRDFLSRWEAGPAAGR

SEQ ID NO: 57248 - protein, 375 aa, Marinicaulis flavus
  misc_feature (1)..(375): tr|A0A2S7K3N3|A0A2S7K3N3_9PROT Queuine tRNA-ribosyltran sferase OS=Marinicaulis flavus OX=2058213 GN=tgt PE=3 S V=1
MSEGFSFTVSATDAGARAGVIETPRGDIRTPAFMPVGTAGTVKAMLPENVRATGADIVLGNTYHLMLRPTAERVAALGGLHHFMNWPHPILTDSGGFQVMSLSKLRKLTEEGVSFQSHIDGSKHMLTPERSIEIQCLLGADIQMQLDECPAIPIEEEKARTSMLLSVRWAERSKRAFEEKSQPGQALFGIVQGANYEALRRESLEKLMEIDFPGYSIGGLAVGEGREEMFRVLDFTTPHMPAQKPRYLMGVGKPADIVGAVARGVDMFDCVAPTRSGRHGQAWTKAGAINIKNASFADDPEPLDPESPCPASRDYSKAYLHHLFRAGEYLGPMLLTWHNLQYYQELMAGMRAAIATGDFAGFVAEFRAATGETVL

SEQ ID NO: 57249 - protein, 371 aa, Marinicella litoralis
  misc_feature (1)..(371): tr|A0A4V3DHI6|A0A4V3DHI6_9GAMM Queuine tRNA-ribosyltran sferase OS=Marinicella litoralis OX=644220 GN=tgt PE=3 SV=1
MKFDLKKQDGLARRGELTFERGTVQTPCFMPVGTYGTVKAMSPEEVKGIGAEIVLGNTFHLMLRPGTEVIEAHGDLHDFMGWDKPILTDSGGFQVFSLAKRRKITEEGVTFASPVDGSTVFMGPEESMEVQRKLGSDIVMIFDECTPYPASHEEAKVSMELSLRWAQRSKNAFADNPNALFGIVQGGMYDDLRKISAQGLADIDFHGFAIGGLSVGEPKDLREQVLKTTTPLLPADKPRYLMGVGKPEDILEAVLLGVDMFDCVMPTRNARNGYLFTWDGVVKIRNAKHQFDATPLDKDCGCYTCQHFSKSYLRHLDKCGEMLGSRLNTIHNLYFYQEFMQKIREAIDTDDLELFADNYYRRIESHKKSSS

SEQ ID NO: 57250 - protein, 376 aa, Marinifilaceae bacterium
  misc_feature (1)..(376): tr|A0A434AVI8|A0A434AVI8_9BACT Queuine tRNA-ribosyltran sferase OS=Marinifilaceae bacterium T3-2 S1-C OX=248701 7 GN=tgt PE=3 SV=1
MDFKLYKTDPKSSARTGELTTDHGKIQTPIFMPVGTLGSVKGVHQRELKEDINAEIILGNTYHLYLRPGLDVLEQAGGLHKFNGWDRPILTDSGGFQVFSLAENRKLTEEGAIFRSHIDGSKHSFTPEGVMDIQRTIGADIIMAFDECPPGTSNYEYSKNSLELTQRWLERCVKRFDETESKYGYSQTLFPIVQGCVYKDLRIKAAEHAASLNREGYAIGGLAVGEPVEDMYSMIEVVNEILPENKPRYLMGVGTPVNILEGIARGVDMFDCVMPTRNGRNGMMFTSEGTINIKNKKWANDFSVIDPNGTSYVDKFYSKAYVRHLIHSGELLGSQICSIHNLAFYLWLVREAREQINLGTFAAWKDIMVKKLSIRL

SEQ ID NO: 57251 - protein, 376 aa, Marinifilum breve
  misc_feature (1)..(376): tr|A0A2V3ZSE1|A0A2V3ZSE1_9BACT Queuine tRNA-ribosyltran sferase OS=Marinifilum breve OX=2184082 GN=tgt PE=3 SV= 1
MDFKLHKTDPKSSARTGELTTDHGKIQTPIFMPVGTLGSVKGVHQRELRDDINAEIILGNTYHLYLRPGLDILEKAGGLHKFNGWERPILTDSGGFQVFSLADNRKLTEEGAMFRSHIDGSKHFFTPENVMDIQRTIGADIIMAFDECPPGTSTYEYAKNSLELTQRWLERCVKRFDETDPKYGYSQTLFPIVQGCVYDDLRIKAAEHAASLDREGYAIGGLAVGEPVEEMYSMIEVVNDVLPEDKPRYLMGVGTPVNILEAISRGVDMFDCVMPTRNGRNGMIFTSEGIINIKNKKWADDFSPIDPNGTSFVDSAYSKAYVRHLVHSGELLGSQICSIHNLAFYLWLVREAREQINAGTFAAWKDIMVKKLATRL

SEQ ID NO: 57252 - protein, 376 aa, Marinifilum flexuosum
  misc_feature (1)..(376): tr|A0A419WWZ8|A0A419WWZ8_9BACT Queuine tRNA-ribosyltran sferase OS=Marinifilum flexuosum OX=1117708 GN=tgt PE=3 SV=1
MDFKLHKTDPKSSARTGELTTDHGKIQTPIFMPVGTLGSVKGVHQRELRDDINAEIILGNTYHLYLRPGLDILEKAGGLHKFNGWERPILTDSGGFQVFSLADNRKLTEEGAMFRSHIDGSKHFFTPENVMDIQRTIGADIIMAFDECPPGTSTYEYAKNSLELTQRWLERCVKRFDETDPKYGYSQTLFPIVQGCVYDDLRIKAAEHAASLNREGYAIGGLAVGEPVEEMYSMIEVVNDVLPEDKPRYLMGVGTPVNILEAISRGVDMFDCVMPTRNGRNGMIFTSEGIINIKNKKWADDFSPIDPNGTSFVDSAYSKAYVRHLIHSGELLGSQICSIHNLAFYLWLVREAREQINAGTFAAWKDIMVKKLATRL

SEQ ID NO: 57253 - protein, 378 aa, Marinifilum sp.
  misc_feature (1)..(378): tr|A0A4T2AD79|A0A4T2AD79_9BACT Queuine tRNA-ribosyltran sferase OS=Marinifilum sp. JC120 OX=2302941 GN=tgt PE=3 SV=1
MSEEKKKPGNFTVHATDGNARRGTLMTAHGEIQTPVYMPVGTQGAVKAVSPRDLHEINSQIILGNTYHLYLRPGDELIARRGGLHKFSNWDKPILTDSGGFQVFSLESIRKITEQGVEFRSYIDGSKHFFSPEKVISIQNNIGSDIMMVLDECVGYGHDRDYTAKSLEMTTRWAKRCRDAYPVGSGDQLMFGIVQGGFHKDLREVSLEQLSEIPFEGYAIGGLSVGEPIPDMYDILQHIGPKLPADKPRYLMGVGTPLDILEGIANGVDMFDCVLPTRNARNGTLYTSQGKVNIKRAQYREDDSPLDPNCDCYTCRNFSKAYLRHLYTAKELLSSQLNSIHNLRFFLKLTEEAREAIEKGTFDDLRKKYEAVYEPVVR

SEQ ID NO: 57254 - protein, 376 aa, Mariniflexile fucanivorans
  misc_feature (1)..(376): tr|A0A4R1R993|A0A4R1R993_9FLAO Queuine tRNA-ribosyltran sferase OS=Mariniflexile fucanivorans OX=264023 GN=tgt PE=3 SV=1
MKFELKAKDTQSKARAGTITTDHGTIETPIFMPVGTVGTVKGVHQRELKNDINPDIILGNTYHLYLRPQTDIIEKAGGLHKFMNWDRNILTDSGGYQVYSLSANRKIKEEGVKFKSHIDGSYHTFTPENVMEIQRTIGADIIMAFDECTPYPCDYNYAKRSMHMTHRWLDRCINHLEKTPLKYDYNQAFFPIVQGSTYKDLRKQSAEYIANAGAFGNAIGGLSVGEPAEEMYAMTEIVTAILPENKPRYLMGVGTPINILENIALGIDMFDCVMPTRNARNGMLFTAHGTINIKNKKWEADFSPVDAMGITFVDTEYTKAYLRHLFTVNELLGKQIATIHNLGFYLWLVREARKHILAGDFTTWKDQMVKQMDNRL

SEQ ID NO: 57255 - protein, 376 aa, Mariniflexile sp.
  misc_feature (1)..(376): tr|A0A385BJ67|A0A385BJ67_9FLAO Queuine tRNA-ribosyltran sferase OS=Mariniflexile sp. TRM1-10 OX=2027857 GN=tgt PE=3 SV=1
MKFELKAKDTQSKARAGTITTNHGVIETPIFMPVGTVGTVKGVHQRELKEDINPDIILGNTYHLYLRPQTDIIEKAGGLHRFMNWDRNILTDSGGYQVYSLSANRKIKEEGVKFKSHIDGSYHTFTPENVMEIQRSIGADIIMAFDECTPYPCDYKYAKRSMHMTHRWLDRCINHLEKTPLKYDYDQAFFPIVQGSTYKDLRQQSAEYIANAGAVGNAIGGLSVGEPAEEMYAMTEVVTEILPEDKPRYLMGVGTPINILENIALGIDMFDCVMPTRNARNGMLFTAHGTINIKNKKWEADFSPVDDMGITFVDTEYTKAYLRHLFTVNELLGKQIATIHNLGFYLWLVREARKHILAGDFKTWKDQMVKQMDNRL

SEQ ID NO: 57256 - protein, 376 aa, Marinilabilia salmonicolor
  misc_feature (1)..(376): tr|A0A2T0XA67|A0A2T0XA67_9BACT Queuine tRNA-ribosyltran sferase OS=Marinilabilia salmonicolor OX=989 GN=tgt PE= 3 SV=1
MQFTLEKTDDQTAARAGEVVTDHGNIPTPVFMPVGTVGSVKGIHVNDLKEEVKAHIILGNTYHLYLRPGLEVLEQAGGLHRFNAWDKPILTDSGGFQVFSLSDKRKLTAEGAEFQSHLDGSRHLFTPENVVDIQRTIGADIIMAFDECPPGDADYKYALQSMELTHKWLKRGLDRFDTTDPKYGYSQTFFPIVQGAGYADLRRKSAEYIASFNREGNAIGGLAVGEPEDVMYEMIEVVNEILPEDKPRYLMGVGTPVNLLEAISRGVDMFDCVMPTRNGRNGMLFTSEGIINIRNEKWKNDFSPVDPDGHCSFDTIYSKAYLRHLFISREMLGPQVASIHNLSFYLWLVGEARRRILDGTFSGWKDQMVKQLARRL

SEQ ID NO: 57257 - protein, 376 aa, Marinilabilia sp.
  misc_feature (1)..(376): tr|A0A2U2B8C9|A0A2U2B8C9_9BACT Queuine tRNA-ribosyltran sferase OS=Marinilabilia sp. WTE OX=2162893 GN=tgt PE=3 SV=1
MQFTLEKTDNQTSARAGEIITDHGKIPTPVFMPVGTVGSVKGIHVKDLEEEVKAHIILGNTYHLYLRPGLDVLKQAGGLHRFNGWNRPILTDSGGFQVFSLSDKRKLSHEGAEFRSHLDGSKHMFTPENVVDIQRVIGADIIMAFDECPPGDSDFKYAFQSMELTHKWLKRGIERFDSTDPVYDYSQTFFPIVQGGSFPELRRKSAEYIASFNREGNAIGGLAVGEPEEVMYEMVEVVNDILPEDKPRYLMGVGNPVNILEAISRGVDMFDCVMPTRNGRNGMLFTSRGIINIKNEKWKADFSPIDPDGHCSFDTLYSKSYLRHLFVSREMLGPQIASIHNLSFYLWLVTEARRQIQNDTFAAWKDGMVKQLARRL

SEQ ID NO: 57258 - protein, 376 aa, Marinilabiliaceae bacterium
  misc_feature (1)..(376): tr|A0A359FXG8|A0A359FXG8_9BACT Queuine tRNA-ribosyltran sferase OS=Marinilabiliaceae bacterium OX=2053574 GN=tg t PE=3 SV=1
MEFVLQKSDNKTKARAGKLTTDHGEIQTPVFMPVGTLGSVKGVHMKDMEEEVKASIILGNTYHLYLRPGLEVLKKAGGLHRFNSWKRPILTDSGGFQVFSLSHRRKLSEEGAEFQSHIDGSRHFFSPEGVVDIQRTIGADIIMAFDECPPGDSDYKYAKASMELTHRWLKRGIDRFDGTEPLYSYNQTFFPIVQGAGFKDLRRQSAEYIASFGRDGNAIGGLAVGEPEDVMYEMIEVVNEILPSDKPRYLMGVGTPANILEAISLGVDMFDCVMPTRNGRNGMLFTARGIINIKNEKWKKDYSPMDPDGHCEADLRYSRAYLRHLFIAKEMLGPQLASLHNLSFYLWLVSEARAQILGGKFFEWKERMLKQLSQRL

SEQ ID NO: 57259 - protein, 376 aa, Marinilabiliaceae bacterium
  misc_feature (1)..(376): tr|A0A4Q8S1D5|A0A4Q8S1D5_9BACT Queuine tRNA-ribosyltran sferase OS=Marinilabiliaceae bacterium JC017 OX=2234116 GN=tgt PE=3 SV=1
MKFDLQYTDGLSEARAGKITTDHGEIQTPIFMPVGTVGSVKGVHFRDLKEDIKAQIILGNTYHLYLRPGMEVIKAAGGLHKFNGWDRPLLTDSGGYQVFSLSANRKLKEHGAEIRSHLDGSKHIFTPENVVDIQRTIGADIIMAFDECTPGTADFKYAKNSMELTHRWLQRGITRFDETDPHYGHSQTFFPIVQGGVYPELRKQSAEFIASMGREGNAIGGLSVGEPAEVMYEMIEVVHPILPKDKPRYLMGVGTPQNILEAIARGVDMFDCVMPSRNGRNGMLFTRNGIMNMKNEKWKNDFSPVDPDGPSYVDKHYTKAYLRHLFVSKELLAMQIASIHNLAFYLWLVTEARKHIIEGDFTSWKNQMVKQVSTRL

SEQ ID NO: 57260 - protein, 376 aa, Marinilabiliales bacterium
  misc_feature (1)..(376): tr|A0A2J6I063|A0A2J6I063_9BACT Queuine tRNA-ribosyltran sferase OS=Marinilabiliales bacterium OX=2053303 GN=tgt PE=3 SV=1
MKYSLQATDPKGKARAGTIETDHGKIETPIFMPVGTAATVKAIHQRDIYDDVKAQIILGNTYHLYLRPGLDILQKAGGLHKFNGWHKPILTDSGGFQVYSLSGMRKLTEEGVKFQSHIDGSYHIFTPERVMDIQRVIGADIIMAFDECTPYPCDYEYAKKSMGLTHRWLERCVSHLNSTEPVYGHTQSLFPIVQGSTYRDLRAQSAEFIASQGADGNAIGGLAVGEPAEMMYEMIDLVNGILPQEKPRYLMGVGTPVNILESIALGVDMFDCVMPTRNGRNGMLFTSEGIINIKNKKWEDDFSPVDPQGTSFVDSQYSKAYLRHLFVAGERLGPMIASLHNLAFYLELVTQARAHIIDGDFTEWKNMMVPKLSNRL

SEQ ID NO: 57261 - protein, 376 aa, Marinilabiliales bacterium
  misc_feature (1)..(376): tr|A0A359FS13|A0A359FS13_9BACT Queuine tRNA-ribosyltran sferase OS=Marinilabiliales bacterium OX=2053303 GN=tgt PE=3 SV=1
MKFKLLKTDTKTNARLGVITTEHGQIQTPIFMPVGTVGSIKGVHQLEVKNDIKAQIILGNTYHLYLRPGIELLKQAGGLHKFMNWDLPILTDSGGYQVFSLSDNRKLTKEGAKFSSHIDGSKHIFTPENVVDIQRVIGADIMMAFDECPPGTADYKYASHSLDLTMQWLKRGLKRFDETEPLYGHSQTFFPIVQGGTYSDLRKKAANMIAELQREGNAIGGLSVGEPTEVMYEMTEVVNAILPADKPRYLMGVGTPVNILEGISRGVDMFDCVMPTRNGRNGMLFTSGGIINIKNKKWENDFSAIDPKGTSYVDSYYSKAYLRHLFVAKELLGPQVASIHNLAFYLWLVNEARTKIEDGSFSEWKDGMVKKLSSRL

SEQ ID NO: 57262 - protein, 381 aa, Marinilactibacillus piezotolerans
  misc_feature (1)..(381): tr|A0A1I4ABL0|A0A1I4ABL0_9LACT Queuine tRNA-ribosyltran sferase OS=Marinilactibacillus piezotolerans OX=258723 GN=tgt PE=3 SV=1
MIDHPVKYHLEKKEKHTGARLGKIETPHGTFETPMFMPVGTLASVKTMAPEELEEMGAGIILSNTYHLWLRPGEDIVDEAGGLHEFMNWDRGILTDSGGFQVFSLSDMRDIKEEGVHFRSHLDGSKLFLSPEKAIQIQNKLGSDIMMSFDECPPFDESYDYVKKSVERTSRWAERGLKAHEKLNKQGLFGIVQGAGFEDLRKQSAKDLVSMDFPGYSIGGLSVGEPKKEMYRVLDFTTPLLPENKPRYLMGVGTPDALIEGVIRGIDMFDCVLPTRIARNGTTMTSKGRVVIKNAEYARDYRPLDENCNCYTCRNYSRAYIRHLIKSDETFGLRLTSYHNLYFLLDLMKKVRQAIREDNLLEFKESFFEEYGYNKPNPKNF

SEQ ID NO: 57263 - protein, 381 aa, Marinilactibacillus psychrotolerans
  misc_feature (1)..(381): tr|A0A511H2U1|A0A511H2U1_9LACT Queuine tRNA-ribosyltran sferase OS=Marinilactibacillus psychrotolerans OX=19177 0 GN=tgt PE=3 SV=1
MIDHPVKYHLEKKEKHTGARLGKIETPHGTFETPMFMPVGTLASVKTMAPEELEEMGAGIILSNTYHLWLRPGEDIVDEAGGLHEFMNWDRGILTDSGGFQVFSLSDMRDIKEEGVHFRSHLDGSKLFLSPEKAIQIQNKLGSDIMMSFDECPPFDESYDYVKKSVERTSRWAERGLNAHEKLNKQGLFGIVQGAGFEDLRKQSAKDLVSMDFSGYSIGGLSVGEPKKEMYRVLDFTTPLLPENKPRYLMGVGTPDALIEGVIRGVDMFDCVLPTRIARNGTTMTSKGRVVIKNAEYARDYRPLDEKCNCYTCRNYSRAYIRHLIKSDETFGLRLTSYHNLYFLLDLMKKVRQAIREDNLLEFKERFFEEYGYNKPNAKNF

SEQ ID NO: 57264 - protein, 381 aa, Marinilactibacillus psychrotolerans
  misc_feature (1)..(381): tr|A0A1R4JDC3|A0A1R4JDC3_9LACT Queuine tRNA-ribosyltran sferase OS=Marinilactibacillus psychrotolerans 42ea OX= 1255609 GN=tgt PE=3 SV=1
MIDHPVKYHLEKKEKHTGARLGKIETPHGTFETPMFMPVGTLASVKTMAPEELEEMGAGIILSNTYHLWLRPGEDIVDEAGGLHEFMNWDRGILTDSGGFQVFSLSDMRDIKEEGVHFRSHLDGSKLFLSPEKAIQIQNKLGSDIMMSFDECPPFDESYDYVKKSVERTSRWAERGLNAHEKLNKQGLFGIVQGAGFEDLRKQSAKDLVSMDFSGYSIGGLSVGEPKKEMYRVLDFTTPLLPENKPRYLMGVGTPDALIEGVIRGVDMFDCVLPTRIARNGTTMTSKGRVVIKNAEYARDYRPLDEKCNCYTCRNYSRAYIRHLIKSDETFGLRLTSYHNLFFLLDLMKKVRQAIREDNLLEFKESFFEEYGYNKPNAKNF

SEQ ID NO: 57265 - protein, 381 aa, Marinilactibacillus sp.; identical to SEQ ID NO: 57262
  misc_feature (1)..(381): tr|A0A1L4BZ08|A0A1L4BZ08_9LACT Queuine tRNA-ribosyltran sferase OS=Marinilactibacillus sp. 15R OX=1911586 GN=tg t PE=3 SV=1

SEQ ID NO: 57266 - protein, 391 aa, Marinimicrobia bacterium
  misc_feature (1)..(391): tr|A0A117M8Q2|A0A117M8Q2_9BACT Queuine tRNA-ribosyltran sferase OS=Marinimicrobia bacterium 46_43 OX=1635280 GN =tgt PE=3 SV=1
MKFELLKTSNAYAARAGLIHTDHGPVETPVFMPVGTRGTVKALTNEELISASAHIILGNTYHLYLSPGMDVIREAGGLHKFMNWNRPILTDSGGYQVFSLAHMRKIEGDVTTFRSHIDGSLHTLSPEKSMEIQRILGSDIVMVFDECTPYPCDYAYAKESLIRTHRWERLSKEAFDATDPLWEHTQALFAIVQGSVYEDLRMESAAYLTDLDFDGYAIGGLAVGEPKAIMYELTEKICQLLPTEKPRYLMGVGKPEDILHSIARGVDMMDCVLPTRNARNGTLYTRRGKINIKRAEFSRDFSPLDPECPCPACQNHNKAYLHHLYKAGEITGLRLNSLHNITFFLQLVREARRAIQEGTFSDFYEKFCRTYPMEEDHSAKNAAARERRQKP

SEQ ID NO: 57267 - protein, 391 aa, Marinimicrobia bacterium; identical to SEQ ID NO: 57266
  misc_feature (1)..(391): tr|A0A101GC19|A0A101GC19_9BACT Queuine tRNA-ribosyltran sferase OS=Marinimicrobia bacterium 46_47 OX=1635279 GN =tgt PE=3 SV=1

SEQ ID NO: 57268 - protein, 376 aa, Marinimicrobium koreense
  misc_feature (1)..(376): tr|A0A3N1P4R2|A0A3N1P4R2_9GAMM Queuine tRNA-ribosyltran sferase OS=Marinimicrobium koreense OX=306545 GN=tgt PE =3 SV=1
MSSFMQFELDREDGLARRGRLKFPRGVVETPAFMPVGTYGTVKGMLPRDIEAIGAQIILGNTFHLMLRPGTEVVKAHGDLHDFMQWSGPILTDSGGFQVFSLGDIRKITEEGVSFRSPIDGSPVFLGPEEAMQVQRDLGSDIVMIFDECTPYPATEDEARKSMELSLRWAKRSKDAHGDNPSALFGIVQGGMYESLRRESLAGLEEIGFDGYAIGGLSVGEPKEDMVRVLSALTPHMPKDKPRYLMGVGKPEDLVEGVRRGVDMFDCVMPTRNARNGHLFTHEGVIKIRNAKHRHDTGSLDPKCDCYTCQNFSRAYLHHLDKCGEILGAQLQTIHNLRYYQLVMAGLREAIAAGELEAFVADFYRALGKDVPPLTP

SEQ ID NO: 57269 - protein, 372 aa, Marinimicrobium sp.
  misc_feature (1)..(372): tr|A0A2D8WHX8|A0A2D8WHX8_9GAMM Queuine tRNA-ribosyltran sferase OS=Marinimicrobium sp. OX=2024837 GN=tgt PE=3 S V=1
MQFELDREDGLARRGRLKFPRGVVETPAFMPVGTYGTVKGMLPRDIEAIGAQIILGNTFHLMLRPGTEVVKAHGDLHDFMQWSGPILTDSGGFQVFSLGDIRKITEEGVSFRSPIDGSPVFLGPEEAMQVQRDLGSDIVMIFDECTPYPATEDEARKSMELSLRWAKRSKDAHGDNPSALFGIVQGGMYESLRRESLAGLEEIGFDGYAIGGLSVGEPKEDMVRVLSALTPHMPKDKPRYLMGVGKPEDLVEGVRRGVDMFDCVMPTRNARNGHLFTHEGVIKIRNAKHRHDTGSLDPKCDCYTCQNFSRAYLHHLDKCGEILGAQLQTIHNLRYYQLVMAGLREAIAAGELEAFVADFYRALGKDVPPLTP

SEQ ID NO: 57270 - protein, 381 aa, Marininema halotolerans
  misc_feature (1)..(381): tr|A0A1I6R1Z7|A0A1I6R1Z7_9BACL Queuine tRNA-ribosyltran sferase OS=Marininema halotolerans OX=1155944 GN=tgt PE =3 SV=1
MAVRYELIKTCSQTGARLGRLHTPHGTIDTPVFMPVGTLATVKTMSPEELKEMGSGIILSNTYHLFLRPGHDVVKEAGGLHSFMNWDRAILTDSGGFQVFSLSDLRKITEEGVSFRSHLSGEPLFISPEKSIEIQNALGADIIMAFDECPPYPADRDYVKKSMERTYRWLKRCVDAHERPEEQGLFGIVQGGMYGDLRKESARQITSIDLPGYAIGGLSVGEPKELMYEALEETTPLLPVDKPRYLMGVGSPDALVEGVMRGVDMFDCVLPTRIARNGTTMTSEGRVVVRNAKYTRDFGPLDPECDCYTCRNYSRAYLRHLFKAEETLGLRLTTYHNLYFLLKLMEGVRQAIQEDRLQDFRNQFFTKYYGSMNSDAMRRGF

SEQ ID NO: 57271 - protein, 381 aa, Marininema mesophilum
  misc_feature (1)..(381): tr|A0A1H2SAY4|A0A1H2SAY4_9BACL Queuine tRNA-ribosyltran sferase OS=Marininema mesophilum OX=1048340 GN=tgt PE=3 SV=1
MAVRYELIKTCSQTGARLGRLHTPHGTIDTPAFMPVGTLATVKTMSPEELKEMGSGIILSNTYHLFLRPGQDVVKEAGGLHQFMNWDRAILTDSGGFQVFSLSDLRKITEEGVSFRSHLSGEPLFISPEKSIEIQNALGADIIMAFDECPPYPADRDYVKQSMERTYRWLKRCVDAHQRPEEQGLFGIVQGGMYGDLRKESVRQITSIDLPGYAIGGLSVGEPKELMYEALEQTTPLLPTDKPRYLMGVGSPDALVEGVLRGVDMFDCVLPTRIARNGTTMTSEGRIVVRNAKYTRDFGPLDPECDCYTCRNYSRAYLRHLFKAEETLGLRLTTYHNLYFLLKLMEGVRQAIREDQLQAFRDQFFTKYYGSTNADALRRGF

SEQ ID NO: 57272 - protein, 375 aa, Mariniphaga anaerophila
  misc_feature (1)..(375): tr|A0A1M5DKB2|A0A1M5DKB2_9BACT Queuine tRNA-ribosyltran sferase OS=Mariniphaga anaerophila OX=1484053 GN=tgt PE =3 SV=1
MEFKLTATENGTRARAGILSTGHGQIETPIFMPVGTAGSVKGIHARDLKNDIKAQIILGNTYHLYLRPGTSVIETAGGLHKFNRWDGPILTDSGGYQVFSLGDIRKLSDEGARFQSHIDGSYHLFSPEKVIDIQRSIGADIMMAFDECTPGDADFDYAKKSLELTQRWLQRCFEQFEKTEPKYGYSQSLFPIVQGNTYPELRKQAAIHVKNFEADGYAIGGLSVGEPEEVMYEMTEVVNAELPENKPRYLMGVGTPVNILESIDRGVDMFDCVMPTRNGRNGMLFTSKGVINIRNKKWENDHSPIDEAENSFVDLYSKAYLRHLIISNEMLGAQIASQHNLAFYLWLVKTARQKITEGSFKSWKTNMVQQLKTRL

SEQ ID NO: 57273 - protein, 375 aa, Mariniphaga sediminis
  misc_feature (1)..(375): tr|A0A399D2L3|A0A399D2L3_9BACT Queuine tRNA-ribosyltran sferase OS=Mariniphaga sediminis OX=1628158 GN=tgt PE=3 SV=1
MEFKLTATESGSRARAGIISTGHGQIETPIFMPVGTTGSVKGIHARDLKEDIGAQIILGNTYHLYLRPGVSVLEAAGGLHKFNSWDGPILTDSGGYQVFSLGDIRKITEDGARFQSHIDGSYHLFSPEKVVDIQRSIGADIIMAFDECTPGDADFDYARKSLELTQRWLDRCFAQFDKTEPKYGYPQTLFPIVQGNTYPELRKQAAIHVKTFDADGYAIGGLSVGEPEEVMYEMTEVVNAELPENKPRYLMGVGNPVNILESIDRGVDMLDCVMPTRNGRNGMLFTSEGIINIRNKKWANDHSPIDENGASFVDRYSKAYLRHLIISNEMLGAQIASQHNLAFYLWLVRTARQKITEGNFKSWKSNMVEQLKIRL

SEQ ID NO: 57274 - protein, 376 aa, Mariniradius saccharolyticus
  misc_feature (1)..(376): tr|M7Y468|M7Y468_9BACT Queuine tRNA-ribosyltransferase OS=Mariniradius saccharolyticus AK6 OX=1239962 GN=tgt P E=3 SV=1
MKFKLEATDTKSKARAGLINTDHGDIETPIFMPVGTAGSVKAVHQRELQYDIKAQIILGNTYHLYLRPGLDILEKAGGLHKFNGWSKPILTDSGGYQVFSLAENRKLTEEGAIFKSHIDGSKHVFSPERVMDIQRIIGADIIMAFDECPPYPCDFTYARKSMELTHRWLKRCITRFDETEGKYGYSQTLFPIVQGSVFPELRKQSAEFIASCEREGNAIGGLSVGEPAEEMYAMTEMVTDILPKDKPRYLMGVGTPANILESIALGVDMFDCVMPTRNARNGMLFTSEGIINIRNEKWKDDFSPIDPHIRSYVSSFYSKAYLRHLTISKEILAAQIASIHNLSFYLWLVGQAREKIKSGEFSVWKNQMVEKVSRRL

SEQ ID NO: 57275 - protein, 376 aa, Marinirhabdus gelatinilytica
  misc_feature (1)..(376): tr|A0A370Q908|A0A370Q908_9FLAO Queuine tRNA-ribosyltran sferase OS=Marinirhabdus gelatinilytica OX=1703343 GN=t gt PE=3 SV=1
MQFTLHKTDPETQARAGTIQLDHGPVETPIFMPVGTIGTVKGVHQRELKEEINPDIILGNTYHLYLRPQTEILEKAGGLHKFMNWDRNILTDSGGYQVYSLSDRRKIKEEGVKFKSHIDGSYHTFTPENVMEIQRTIGADIIMAFDECTPYPCDYNYAKRSMHMTHRWLERCITHLEKTPLKYGYDQTFFPIVQGSTYKDLRKQSAEYIAGVGAEGNAIGGLSVGEPAEEMYEMTEVVTAILPKEKPRYLMGVGTPINLLENVALGIDMFDCVMPTRNGRNGMLFTAHGTINIKNKKWEADFSPIDEMGITWVDLEYSKAYVRHLFTVNEMLGRQICTIHNLGFYLWLMREARKQILAGTFATWKNKMVKQMDKRL

SEQ ID NO: 57276 - protein, 372 aa, Marinisporobacter balticus
  misc_feature (1)..(372): tr|A0A4R2KYV1|A0A4R2KYV1_9CLOT Queuine tRNA-ribosyltran sferase OS=Marinisporobacter balticus OX=2018667 GN=tgt PE=3 SV=1
MAVKYELIKECKQSGARLGRLHTPHGTIETPIFMPVGTQATVKTMTPEELKEINAQIILSNTYHLYLRPGHELVEKAGGLHKFMNWNKPILTDSGGFQVFSLGDLRKISEEGVEFRSHIDGSKHFISPEKAIEIENALGADIIMAFDECAPYPADREYVKNSLERTTRWAKRCKEAHRNPDTQALFGIIQGGMYKDLREQSVAEITALDFPGYAVGGLSVGEPKPLMYEVLDYTTPLMPKDKARYLMGVGSPDCLIEGAIRGIDMFDCVLPTRIARNGTAMTSVGKVVIKNAKYTEDFGPLDPNCDCYTCRNYSRAYLRHLYKAGEILSGRLVSYHNLYFLLNLMKDVREAIKADCLLDFRKEFFERYGYDL

SEQ ID NO: 57277 - protein, 387 aa, Marinithermus hydrothermalis
  misc_feature (1)..(387): tr|F2NPL1|F2NPL1_MARHT Queuine tRNA-ribosyltransferase OS=Marinithermus hydrothermalis (strain DSM 14884 / JCM 11576 / T1) OX=869210 GN=tgt PE=3 SV=1
MFAFRVTATDGKARTGTLHTPHGPVQTPLFMPVGTQATVKGLTPAELHQVGSQIVLANTYHLLLRPGPELVARLGGLHHFAGYQGPWLTDSGGYQVMSLGHMRTITEEGVTFRSHLNGDLITLTPETSIQVQEHLGADIIMAFDECPPYPSERRYLEASLERTLRWLERSVRAQTRKDQALFGITQGGTDLELRRRSTRETVRFDLPGYAIGGLAVGEPKEKMFPTVALSTDLLPEDRPRYLMGVGHPEDLVAAVGLGVDLFDCVYPTRTGRFGYALVPEGRLNLNSARYKEDPRPLMEDCDCYACRTFSRAYLTHLVRAGEMLGLRMLSLHNVRYLHRLMEAARAAIREGRYAAFAWAFAERRFAGHPPAWFLEALRAGGHEPPGD

SEQ ID NO: 57278 - protein, 374 aa, Marinitoga hydrogenitolerans
  misc_feature (1)..(374): tr|A0A1M4SKW4|A0A1M4SKW4_9BACT Queuine tRNA-ribosyltran sferase OS=Marinitoga hydrogenitolerans DSM 16785 OX=11 22195 GN=tgt PE=3 SV=1
MFDDIPLKYELLHKDKNSNARRGRIYTQNGIIETPVFMPVGTNGTVKALKNTDLKDIEAEIILGNAFHLFLRPGLEVLKNVGGLHNFMNWERPILTDSGGFQVFSLRDRKISDEGVLFRSPLDGSKIMMTPELSMEIQMTIGSNIAMAFDECVEAGAERKYVEESVDRTFEWAKRSFKSHAKKDQALFGIVQGGFFEDLRDRSLKQITSIDFDGFALGGLSVGEHYAETERILKHSGPKLPENKPRYIMGIGTPLIILMSVENGMDMFDCVLPTRMGRHGTAMTWEGKVNLKAGKWKYSTDPIDNKCDCYACQNHTRGYIHHLIRKDEILGKILLSIHNLRFLINFVKEVRKAIEDDRFIQFKEEFLSNPNNIY

SEQ ID NO: 57279 - protein, 373 aa, Marinitoga piezophila
  misc_feature (1)..(373): tr|H2J3I3|H2J3I3_MARPK Queuine tRNA-ribosyltransferase OS=Marinitoga piezophila (strain DSM 14283 / JCM 11233 / KA3) OX=443254 GN=tgt PE=3 SV=1
MLEGPLKYELLHKDKHSNARRGRIYTPNGIIETPVFMPVGTNGTVKALKNSDLKDIEAEIILGNAFHLFLRPGLEVLKNAGGLHKFMNWDRPILTDSGGFQVFSLRDRKISDEGVLFRSPLDGSKIMMTPELSMEIQMTIGSNIAMAFDECVEAGAERKYVEESVDRTFEWAKRSYKAHTKKDQALFGIVQGGFHEDLRDRSLKQITSIDFDGFALGGLSVGEHYSETERILKHSGPKLPEDKPRYIMGIGTPLIILMSVENGMDMFDCVLPTRMGRHGTAMTWEGKVNLKAGKWKYSTEPIDNKCDCYACQNHTRGYIHHLIRKDEILGKILLSIHNLRFLINFVKEVRKAIEEDRFLEFKEEFLSNPNNVY

SEQ ID NO: 57280 - protein, 374 aa, Marinitoga sp.
  misc_feature (1)..(374): tr|A0A0H2SLP2|A0A0H2SLP2_9BACT Queuine tRNA-ribosyltran sferase OS=Marinitoga sp. 1155 OX=1428448 GN=tgt PE=3 S V=1
MFEDSPLKYELLHKDKNSNARRGRIYTKNGIIETPVFMPVGTNGTVKTLKNSDLKDIEAEIILGNAFHLFLRPGLDVLRNVGGLHNFMNWDRPILTDSGGFQVFSLKDRKISDDGVLFRSPLDGSKIMMTPELSMEIQMIIGSNIAMAFDECVEAGAEKKYVEESVERTYQWAKRSYQAHTKKDQALFGIVQGGFHEDLREKSIKQITSIDFDGFALGGLSVGEHYSETERILKHSGPKLPENKPRYIMGIGTPLIILMSVENGMDMFDCVLPTRMGRHGTAMTWEGKVNLKAGKWKYSTDPIDNKCDCYACQNHTRGYIHHLIRKDEILGKILLSIHNLRFLINFVKEVRKAIEDDRFIQFKEEFLSNPNNIY

SEQ ID NO: 57281 - protein, 374 aa, Marinitoga sp.
  misc_feature (1)..(374): tr|A0A1W9TMN0|A0A1W9TMN0_9BACT Queuine tRNA-ribosyltran sferase OS=Marinitoga sp. 4572_148 OX=1971619 GN=tgt PE =3 SV=1
MFDSKPIKYELLHKDKHSNARRGRIYTQNGIIETPVFMPVGTNGTVKALKNSDLKDIEAEIILGNAFHLFLRPGLEVLKNAGGLHKFMNWDRPILTDSGGFQVFSLKDRKISDDGVLFRSPLDGSKIMMTPEKSMEIQMTIGSNIAMAFDECVEAGAEKKYVEESVERTYAWAKRSFEAHTKEDQALFGIVQGGFHEDLRDRSLEQITSIDFDGFALGGLSVGEHYSETERILKHSGPKLPEDKPRYIMGIGTPLIILMSVENGMDMFDCVLPTRMGRHGTAMTWDGKVNLKAGKWKYSTEPIDNKCDCYACQNHTRGYIHHLIRKDEILGKILLSIHNLRFLINFVKKVRKAIEEDRFMEFKEEFLSNPNNIY

SEQ ID NO: 57282 - protein, 373 aa, Marinobacter adhaerens
  misc_feature (1)..(373): tr|A0A352IPQ6|A0A352IPQ6_9ALTE Queuine tRNA-ribosyltran sferase OS=Marinobacter adhaerens OX=1033846 GN=tgt PE= 3 SV=1
MSFEKLGEDGRARRGRLTFPRGTVETPAFMPVGTYGTVKGMLPRDIHEIGAEIILGNTFHLMLRPGTEVVKAHGDLHDFTQWHGPILTDSGGFQVFSLGEMRKITEDGVTFRSPVDGSPVELSPEIAIQVQRDLGSDIVMIFDECTPYPATERQAKDSMELSLRWAQRSKDAHEGNPAALFGIVQGGMYEGLRDRSLEGLTEIGFDGYAIGGLSVGEPKEDMIRILDHLPPKMPEDKPRYLMGVGRPEDLVEAVRRGVDMFDCVMPTRNARNGYLFTSTGIVKIRNARHRHDTAPLDDRCDCYTCKNFSRSYLHHLDKCGEMLGSQLNTIHNLRFYQNLMAELRGAIEAGTLSDFVTDFYALRGETVPPLGNV

SEQ ID NO: 57283 - protein, 373 aa, Marinobacter adhaerens
  misc_feature (1)..(373): tr|A0A1E3C5A2|A0A1E3C5A2_9ALTE Queuine tRNA-ribosyltran sferase OS=Marinobacter adhaerens OX=1033846 GN=tgt PE= 3 SV=1
MSFEKLGEDGRARRGRLTFPRGTVETPAFMPVGTYGTVKGMLPRDIHEIGAEIILGNTFHLMLRPGTEVVKAHGDLHDFTQWQGPILTDSGGFQVFSLGEMRKITEEGVTFRSPVDGSPVELSPEIAIQVQRDLGSDIVMIFDECTPYPATERQAKDSMELSLRWAQRSKDAHEGNPAALFGIVQGGMYENLRDRSLEGLTDIGFDGYAIGGLSVGEPKEDMIRILDHLPPKMPEDKPRYLMGVGRPEDIVEAVRRGVDMFDCVMPTRNARNGYLFTSTGIVKIRNARHRHDTAPLDERCDCYTCKNFSRSYLHHLDKCGEMLGSQLNTIHNLRFYQNLMAGLRGAIEAGTLSDFVTDFYALRGETVPPLGNV

SEQ ID NO: 57284 - protein, 378 aa, Marinobacter algicola
  misc_feature (1)..(378): tr|A6EWH7|A6EWH7_9ALTE Queuine tRNA-ribosyltransferase OS=Marinobacter algicola DG893 OX=443152 GN=tgt PE=3 SV =1
MSDQCYMSFEKLGEDGRARRGRLTFPRGTVETPTFMPVGTYGTVKGMLPRDIKEIGAEIILGNTFHLMLRPGTEVVKAHGDLHDFTQWQGPILTDSGGFQVFSLGEMRKITEAGVTFRSPIDGSPVELSPEIAMQVQRDLGSDIVMIFDECTPYPATEKQAKESMELSLRWAARSKQAHAGNPAALFGIVQGGMYESLRDRSLEGLTEIGFDGYAIGGLSVGEPKEDMIRILDHLPPRMPEDRPRYLMGVGRPEDLVEAVRRGVDMFDCVMPTRNARNGYLFTSTGIIKIRNAKHRHDTAPLDDQCDCYTCENFSRSYLHHLDKCGEMLGSQLNTIHNLRYYQNVMAGLRGAIEAGTLSDFISDFYARRGETVPPMAQ

SEQ ID NO: 57285 - protein, 379 aa, Marinobacter antarcticus
  misc_feature (1)..(379): tr|A0A1M6U236|A0A1M6U236_9ALTE Queuine tRNA-ribosyltran sferase OS=Marinobacter antarcticus OX=564117 GN=tgt PE =3 SV=1
MSQSCFMSFEKLGEDGLARRGRLTFPRGTVETPAFMPVGTYGTVKGMLPRDIHETGAEIILGNTFHLMLRPGTEVVKAHGDLHDFTQWKGPILTDSGGFQVFSLGEMRKITEEEVTFRSPIDGSPVKLSPEIAIQVQRDLGSDIVMIFDECTPYPATEKQAKESMELSLRWAKRSKDAHEGNPAALFGIVQGGMYESLRDRSLEGLTDIGFDGYAIGGLSVGEPKEDMIRILDHLPSKMPGDKPRYLMGVGRPEDLVEAVRRGVDMFDCVMPTRNARNGYLFTSVGIVKIRNARHRHDTAPLDERCDCYTCENFSRSYLHHLDKCGEMLGAQLNTIHNLRFYQNLMAGLRGAIEAGTLSNFINDFYALRGETVPAMGNG

SEQ ID NO: 57286 - protein, 372 aa, Marinobacter confluentis
  misc_feature (1)..(372): tr|A0A4Z1BXR9|A0A4Z1BXR9_9ALTE Queuine tRNA-ribosyltran sferase OS=Marinobacter confluentis OX=1697557 GN=tgt P E=3 SV=1
MSFEKLGEDGRARRGRLTFPRGAVETPAFMPVGTYGTVKGMLPRDIENIGAHIILGNTFHLMLRPGTEVVKAHGDLHDFTQWHGPILTDSGGFQVFSLGEMRKITEQGVTFRSPVDGSPVELSPEIAMQVQRDLGSDIVMIFDECTPYPATETEARESMELSLRWAKRSKDAHEGNPAALFGIVQGGMYESLRERSLEGLVDIGFDGYAIGGLSVGEPKEDMIRILDDLPPKMPDDKPRYLMGVGRPEDIVEAVRRGVDMFDCVMPTRNARNGYLFTSTGIVKIRNARHRYDTQPLDDQCDCYTCQNFSRSYLHHLDKCGEMLGSQLNTIHNLRYYQNIMAGLRGAIEAGTLSDFISDFYARRDQPVPPLAD

SEQ ID NO: 57287 - protein, 379 aa, Marinobacter daqiaonensis
  misc_feature (1)..(379): tr|A0A1I6GL77|A0A1I6GL77_9ALTE Queuine tRNA-ribosyltran sferase OS=Marinobacter daqiaonensis OX=650891 GN=tgt P E=3 SV=1
MTDRCFMTFEKLGEDGKARRGRLTFPRGVVETPAFMPVGTYGTVKGMLPRDIEATGAQIILGNTFHLMLRPGTEVIRAHGDLHDFTQWQGPILTDSGGFQVFSLGDMRKITEEGVSFRSPVDGSPVELNPEIAMRVQRDLGSDIVMIFDECTPYPATMTEARVSMEMSLRWAARSRIAHGDSPSALFGIIQGGMYNDLRQRSLDGLVEIGFDGYAIGGLSVGEPKEEMLAVLDDLPPRMPADRPRYLMGVGRPEDIVEAVRRGVDMFDCVMPTRNARNGYLFTSTGIVKIRNATHRHDTSPLDAECDCYTCSQFSRSYLHHLDKCGEMLGSQLNTIHNLHYYQKLMAGLRGAIEAGTLSDFVASFYAKRGLPVPPLAGV

SEQ ID NO: 57288 - protein, 379 aa, Marinobacter excellens
  misc_feature (1)..(379): tr|A0A0N8KKE6|A0A0N8KKE6_9ALTE Queuine tRNA-ribosyltran sferase OS=Marinobacter excellens HL-55 OX=1305731 GN=t gt PE=3 SV=1
MSQSCFMSFEKLGEDGKARRGRLTFPRGTVETPAFMPVGTYGTVKGMLPRDIEAIGAEIILGNTFHLMLRPGTEVVKAHGDLHDFTQWQGPILTDSGGFQVFSLGEMRKITEQGVTFRSPIDGSKVELSPEIAIQVQRDLGSDIVMIFDECTPYPATEKQAKDSMELSLRWADRSKQAHEGNPAALFGIVQGGMYESLRDQSLEGLINIGFDGYAIGGLSVGEPKEDMIRILDHLPPKMPEDKPRYLMGVGRPEDLVEAVRRGVDMFDCVMPTRNARNGYLFTSTGIVKIRNAKNRHDTGPLDERCDCHTCQHFSKSYLHHLDKCGEMLGSQLNTIHNLRFYQNLMSGLRGAIEAGTLSDFVSEFYALRGESVPPMGNS

SEQ ID NO: 57289 - protein, 379 aa, Marinobacter excellens
  misc_feature (1)..(379): tr|A0A137SBM9|A0A137SBM9_9ALTE Queuine tRNA-ribosyltran sferase OS=Marinobacter excellens LAMA 842 OX=1306954 G N=tgt PE=3 SV=1
MSNSCFMSFEKLGEDGRARRGRLTFPRGTVETPAFMPVGTYGTVKGMLPRDIEAIGAEIILGNTFHLMLRPGTEVIKAHGDLHDFTQWQGPILTDSGGFQVFSLGEMRKITEQGVTFRSPVDGSKVELSPEIAIQVQRDLGSDIVMIFDECTPYPATEKQAKESMELSLRWAERSKKAHEGNPAALFGIVQGGMFEPLRDRSLQGLTDIGFDGYAIGGLSVGEPKEDMIRILDHLPSKMPEDKPRYLMGVGRPEDIVEAVRRGVDMFDCVMPTRNARNGYLFTSTGIVKIRNAKNRHDTGPLDERCDCYTCQNFSKSYLHHLDKCGEMLGAQLNTIHNLRFYQNLMSGLRGAIEAGTLSDFISEFYALRGESVPPLGES

SEQ ID NO: 57290 - protein, 373 aa, Marinobacter flavimaris
  misc_feature (1)..(373): tr|A0A3D8H1D9|A0A3D8H1D9_9ALTE Queuine tRNA-ribosyltran sferase OS=Marinobacter flavimaris OX=262076 GN=tgt PE= 3 SV=1
MSFEKLGEDGRARRGRLTFPRGTVETPAFMPVGTYGTVKGMLPRDIHEIGAEIILGNTFHLMLRPGTEVVKAHGDLHDFTQWHGPILTDSGGFQVFSLGEMRKITEDGVTFRSPVDGSPVELSPEIAIQVQRDLGSDIVMIFDECTPYPATERQAKDSMELSLRWAQRSKDAHEGNPAALFGIVQGGMYEGLRDRSLEGLTEIGFDGYAIGGLSVGEPKEDMIRILDHLPPKMPEDKPRYLMGVGRPEDLVEAVRRGVDMFDCVMPTRNARNGYLFTSTGIVKIRNARHRHDTAPLDDRCDCYTCKNFSRSYLHHLDKCGEMLGSQLNTIHNLRFYQNLMAGLRGAIEAGTLSDFVTDFYALRGETVPPLGNV

SEQ ID NO: 57291 - protein, 373 aa, Marinobacter fuscus
  misc_feature (1)..(373): tr|A0A2T1K6G1|A0A2T1K6G1_9ALTE Queuine tRNA-ribosyltran sferase OS=Marinobacter fuscus OX=2109942 GN=tgt PE=3 S V=1
MSFEKLGEDGKARRGRLTFPRGVVETPAFMPVGTYGTVKGMLPRDIEEIGAHIILGNTFHLMLRPGTEVVKAHGDLHDFTQWQGPILTDSGGFQVFSLGEMRKITEKGVTFRSPVDGSKVELSPEIAIQVQRDLGSDIVMIFDECTPYPATEKQAKDSMELSLRWAQRSKDAHQGSPSALFGIVQGGMYESLRDQSLEGLTSIGFDGYAIGGLSVGEPKEDMIRILDYLPPKMPEDKPRYLMGVGRPEDLVEGVRRGVDMFDCVMPTRNARNGYLFTSTGIVKIRNAKNRHDTGPLDERCDCYTCKHFSKSYLHHLDKCGEMLGSQLNTIHNLRFYQNLMSGLRGAIEAGTLSDFVSEFYALRGEAVPPLGDS

SEQ ID NO: 57292 - protein, 379 aa, Marinobacter gudaonensis
  misc_feature (1)..(379): tr|A0A1I6G7P4|A0A1I6G7P4_9ALTE Queuine tRNA-ribosyltran sferase OS=Marinobacter gudaonensis OX=375760 GN=tgt PE =3 SV=1
MSQTCFMSFEKLGEDGRARRGRLTFPRGTVETPAFMPVGTYGTVKGMLPRDIQEIGAEIILGNTFHLMLRPGTEVVKAHGDLHDFTQWHGPILTDSGGFQVFSLGEMRKITEEGVTFRSPVDGSPVELNPEIAIQVQRDLGSDIVMIFDECTPYPATERQAKESMELSLRWAQRSKDAHEGNPAALFGIVQGGMYEGLRDVSLEGLTDIGFDGYAIGGLSVGEPKEDMIRILDHLPPKMPEDKPRYLMGVGRPEDIVEAVRRGVDMFDCVMPTRNARNGYLFTSTGIVKIRNARHRHDTAPLDERCDCYTCQNFSRSYLHHLDKCGEMLGSQLNTIHNLRFYQNLMAGLRGAIEAGTLSDFVTNFYALRGEAVPPLHKV

SEQ ID NO: 57293 - protein, 373 aa, Marinobacter guineae
  misc_feature (1)..(373): tr|A0A2G1VBJ3|A0A2G1VBJ3_9ALTE Queuine tRNA-ribosyltran sferase OS=Marinobacter guineae OX=432303 GN=tgt PE=3 S V=1
MSFEKLGEDGRARRGRLTFPRGTVETPAFMPVGTYGTVKGMLPRDIHEIGAEIILGNTFHLMLRPGTEVVKAHGDLHDFTQWQGPILTDSGGFQVFSLGEMRKITEEGVTFRSPVDGSPVELSPEIAIRVQRDLGSDIVMIFDECTPYPATEQEAKDSMELSLRWAKRSKDAHEGNPAALFGIVQGGMYENLRDRSLDGLTGIGFDGYAIGGLSVGEPKEDMIRILDHLPPKMPEDKPRYLMGVGRPEDIVEAVRRGVDMFDCVMPTRNARNGYLFTSTGIVKIRNARHRHDTAPLDERCDCYTCQNFSRSYLHHLDKCGEMLGAQLNTIHNLRFYQNLMAGLRGAIEAGTLSDFVTDFYALRGETVPSLGNV

SEQ ID NO: 57294 - protein, 373 aa, Marinobacter halophilus
  misc_feature (1)..(373): tr|A0A2T1KH79|A0A2T1KH79_9ALTE Queuine tRNA-ribosyltran sferase OS=Marinobacter halophilus OX=1323740 GN=tgt PE =3 SV=1
MSFEKLGEDGKARRGRLTFPRGTVETPAFMPVGTYGTVKGMLPRDIEAIGAEIILGNTFHLMLRPGTEVVKAHGDLHDFTQWQGPILTDSGGFQVFSLGDMRKISEQGVTFRSPIDGSKVELSPEIAIQVQRDLGSDIVMIFDECTPYPATEKQARESMELSLRWADRSKQAHAGNPAALFGIVQGGMYESLRDRSLEGLTEIGFDGYAIGGLSVGEPKEDMIRILDHLPPKMPADKPRYLMGVGRPEDLVEAVRRGVDMFDCVMPTRNARNGYLFTSTGIVKIRNAKNRHDTGPLDERCDCYTCQHFSKSYLHHLDKCGEMLGSQLNTIHNLRFYQNLMSGLRGAIEAGTLSDFISEFYALRGENVPPMGNS

SEQ ID NO: 57295 - protein, 373 aa, Marinobacter hydrocarbonoclasticus
  misc_feature (1)..(373): sp|A1TZN7|TGT_MARHV Queuine tRNA-ribosyltransferase OS= Marinobacter hydrocarbonoclasticus (strain ATCC 700491 / DSM 11845 / VT8) OX=351348 GN=tgt PE=3 SV=1
MSFEKLGEDGKARRGRLTFPRGVVETPAFMPVGTYGTVKGMLPRDIEEIGAHIILGNTFHLMLRPGTEVVKAHGDLHDFTQWQGPILTDSGGFQVFSLGEMRKITEQGVTFRSPVDGSKVELSPEIAIQVQRDLGSDIVMIFDECTPYPATEKQAKESMELSLRWAERSKRAHEGNPAALFGIVQGGMYESLRDQSLEGLEKIGFDGYAIGGLSVGEPKEDMIRILDHLPPKMPEDKPRYLMGVGRPEDIVEAVRRGVDMFDCVMPTRNARNGYLFTSAGIVKIRNAKNRHDTGPLDERCDCYTCKHFSKSYLHHLDKCGEMLGSQLNTIHNLRFYQNLMSGLRGAIEAGTLSDFVSEFYALRGETVPPLGDS

SEQ ID NO: 57296 - protein, 379 aa, Marinobacter hydrocarbonoclasticus
  misc_feature (1)..(379): tr|A0A455W5D7|A0A455W5D7_MARHY Queuine tRNA-ribosyltran sferase OS=Marinobacter hydrocarbonoclasticus OX=2743 G N=tgt PE=3 SV=1
MSNSCFMSFKKLGEDGRARRGRLTFPRGTVETPAFMPVGTYGTVKGMLPRDIEAIGAEIILGNTFHLMLRPGTEVVKAHGDLHDFTQWQGPILTDSGGFQVFSLGEMRKITEQGVTFRSPVDGSKVELSPEIAIQVQRDLGSDIVMIFDECTPYPATEKQAKESMELSLRWAERSKKAHEGNPAALFGIVQGGMYEPLRDRSLQGLTDIGFDGYAIGGLSVGEPKEDMIRILDHLPPKMPADKPRYLMGVGRPEDIVEAVRRGVDMFDCVMPTRNARNGYLFTSTGIVKIRNAKNRHDTGPLDERCDCYTCQNFSKSYLHHLDKCGEMLGSQLNTIHNLRFYQNLMSGLRGAIEAGTLSDFISEFYALRGETVPPLGES

SEQ ID NO: 57297 - protein, 372 aa, Marinobacter lipolyticus
  misc_feature (1)..(372): tr|R8B198|R8B198_9ALTE Queuine tRNA-ribosyltransferase OS=Marinobacter lipolyticus SM19 OX=1318628 GN=tgt PE=3 SV=1
MSFEKLGEDGRARRGRLTFPRGTVETPAFMPVGTYGTVKGMLPRDIKEIGAEIILGNTFHLMHRPGTEVVKAHGDLHDFTQWHGPILTDSGGFQVFSLGEMRKITEEGVTFRSPVDGSPVKLNPEIAMQVQRDLGSDIVMIFDECTPYPATEKEARESMEMSLRWADRSKQAHEGNPAALFGIVQGGMYESLRDRSLDGLTEIGFDGYAIGGLSVGEPKEDMIRILDHLPPRMPADKPRYLMGVGRPEDIVEAVRRGVDMFDCVMPTRNARNGYLFTSTGIVKIRNAKNRHDTGPLDERCDCYTCENFSRSYLHHLDKCGEMLGSQLNTIHNLRFYQNLMAGLRGAIEAGTLSDFISDFYARRGETVPPLAD

SEQ ID NO: 57298 - protein, 379 aa, Marinobacter litoralis
  misc_feature (1)..(379): tr|A0A3M2R9P4|A0A3M2R9P4_9ALTE Queuine tRNA-ribosyltran sferase OS=Marinobacter litoralis OX=187981 GN=tgt PE=3 SV=1
MNESCFMSFEKLGEDGKARRGRLTFPRGTVETPAFMPVGTYGTVKGMLPRDIKEIGAEIILGNTFHLMLRPGTEVVKAHGDLHDFTQWHGPILTDSGGFQVFSLGEMRKITEKGVTFRSPVDGAKVELNPEIAMQVQRDLGSDIVMIFDECTPYPATEKQAKDSMELSLRWAARSKKAHEGNPSALFGIVQGGMYESLRDRSLEGLTEIGFDGYAIGGLSVGEPKEDMIRILDHLPPKMPEDKPRYLMGVGRPEDIVEAVRRGVDMFDCVMPTRNARNGYLFTSTGIVKIRNAKNRHDAGPLDERCDCYTCENFSKSYLHHLDKCGEMLGSQLNTIHNLRFYQNLMSGLRGAIEAGTLSDFVSEFYALRGETVPPLGDE

SEQ ID NO: 57299 - protein, 374 aa, Marinobacter lutaoensis
  misc_feature (1)..(374): tr|A0A1V2DUT8|A0A1V2DUT8_9ALTE Queuine tRNA-ribosyltran sferase OS=Marinobacter lutaoensis OX=135739 GN=tgt PE= 3 SV=1
MSFEKIAEQGRARRGRLRFPRGVVETPAFMPVGTYGTVKGMLPRDIREIGAQIILGNTFHLMLRPGTEVIKTHGDLHDFTQWHGPILTDSGGFQVFSLGEMRKISEEGVTFRSPVDGSRVELSPEIAIQVQRDLGSDIVMIFDECTPYPATEKQARESMELSLRWAARSKRAHGDNPAALFGIVQGGMYESLRERSLTGLTEIGFDGYAIGGLSVGEPKADMLRILDFLPPRMPEDKPRYLMGVGRPEDIVEAVRRGVDMFDCVMPTRNARNGYLFTSTGIVKIRNARHRHDTAPLDERCDCYTCQNFSRSYLHHLDKCGEMLGAQLNTIHNLRFYQNLMAGLRGAIEAGTLSDFVSNFYALRGETVPPLDGAE

SEQ ID NO: 57300 - protein, 373 aa, Marinobacter manganoxydans
  misc_feature (1)..(373): tr|G6YV86|G6YV86_9ALTE Queuine tRNA-ribosyltransferase OS=Marinobacter manganoxydans MnI7-9 OX=1094979 GN=tgt PE=3 SV=1
MSFEKLGEDGRARRGRLTFPRGTVETPAFMPVGTYGTVKGMLPRDIHEIGAEIILGNTFHLMLRPGTEVVKAHGDLHDFTQWQGPILTDSGGFQVFSLGEMRKITEDGVTFRSPVDGSPVELSPEIAIQVQRDLGSDIVMIFDECTPYPATERQAKDSMELSLRWAQRSKDAHEGNPAALFGIVQGGMYENLRDYSLEGLTDIGFDGYAIGGLSVGEPKEDMIRILDHLPPKMPEDKPRYLMGVGRPEDIVEAVRRGVDMFDCVMPTRNARNGYLFTSTGIVKIRNARHRHDTSPLDERCDCYTCKNFSRSYLHHLDKCGEMLGSQLNTIHNLRFYQNLMAGLRGAIEAGTLSDFVTDFYALRGETVPPLGNV

SEQ ID NO: 57301 - protein, 376 aa, Marinobacter mobilis
  misc_feature (1)..(376): tr|A0A1H3BS60|A0A1H3BS60_9ALTE Queuine tRNA-ribosyltran sferase OS=Marinobacter mobilis OX=488533 GN=tgt PE=3 S V=1
MSYMSFEKLGEDGKARRGRLTFPRGAVETPAFMPVGTYGTVKGMLPRDIEEIGAHIILGNTFHLMLRPGTEVIKAHGDLHDFTQWQGPILTDSGGFQVFSLGEMRKITEQGVKFRSPVDGSPVELNPEIAMQVQRDLGSDIVMIFDECTPYPATRKQAEESMELSLRWAARSRKAHGDNPAALFGIVQGGMYPELRDRSLAGLTEIGFDGYAIGGLSVGEPKDEMIRILDHLPPKMPEDKPRYLMGVGRPEDIVEAVRRGVDMFDCVMPTRNARNGYLFTSTGIVKIRNARHRHDTSPLDDQCDCYTCKNFSRSYLHHLDKCGEMLGSQLNTIHNLRYYQNVMSGLRGAIEAGKLSDFVEDFYARRGESVPALEEQ

SEQ ID NO: 57302 - protein, 376 aa, Marinobacter nanhaiticus
  misc_feature (1)..(376): tr|N6WQE8|N6WQE8_9ALTE Queuine tRNA-ribosyltransferase OS=Marinobacter nanhaiticus D15-8W OX=626887 GN=tgt PE= 3 SV=1
MSFKTTAADGKARRGTLTFPRGEVQTPAFMPVGTYGTVKGMLPRDIEEIGAQIILGNTFHLMLRPGTGVIKEHGDLHDFTQWQGPILTDSGGFQVFSLGEMRKITEQGVNFRSPVDGSPVELSPEISMQVQRDLGSDIVMIFDECTPYPATERQAKDSMEMSLRWAKRSKDAHGDSPSALFGIVQGGMYPHLRDRSLEGLVDIGFDGYAIGGLSVGEPKEDMIRILDHLPPRMPADRPRYLMGVGKPEDIVEAVRRGVDMFDCVMPTRNARNGHLFTSEGVVKIRNAKHRNDTGPLDEQCDCYTCQHFSRGYLHHLDRCGEMLGSQLNTIHNLRYYQNLMAGLRGAIEAGTLSDFIEQFYARRGQPVPAMSAGSEA

SEQ ID NO: 57303 - protein, 379 aa, Marinobacter nitratireducens
  misc_feature (1)..(379): tr|A0A072N5R9|A0A072N5R9_9ALTE Queuine tRNA-ribosyltran sferase OS=Marinobacter nitratireducens OX=1137280 GN=t gt PE=3 SV=1
MSQTSFMSFEKLGEDGRARRGRLTFPRGTVETPAFMPVGTYGTVKGMLPRDIEEIGAEIILGNTFHLMLRPGTEVVKAHGDLHDFTQWQGPILTDSGGFQVFSLGDMRKITEEGVKFRSPVDGSPVELSPEIAMQVQRDLGSDIVMIFDECTPYPATERQAKDSMELSLRWAARSKAAHEGNPSALFGIVQGGMYEHLRDRSLEGLTEIGFDGYAIGGLSVGEPKEDMIRILDHLPPKMPEDRPRYLMGVGRPEDIVEAVRRGVDMFDCVMPTRNARNGYLFTSTGIVKIRNAKNRHDTGPLDERCDCYTCKNFSKSYLHHLDKCGEMLGSQLNTIHNLRFYQNLMAGLRGAIEAGTLSDFVSEFYALRGESVPALAEA

SEQ ID NO: 57304 - protein, 379 aa, Marinobacter pelagius
  misc_feature (1)..(379): tr|A0A1I4VZK7|A0A1I4VZK7_9ALTE Queuine tRNA-ribosyltran sferase OS=Marinobacter pelagius OX=379482 GN=tgt PE=3 SV=1
MTNSCFMSFEKITEDGRARRGRLTFPRGAVETPAFMPVGTYGTVKGMLPRDIHEIGAQIILGNTFHLMLRPGTEVVKAHGDLHDFTQWQGPILTDSGGFQVFSLGEMRKITEEGVTFRSPVDGSKVELSPEIAIRVQRDLGSDIVMIFDECTPYPATEKQARESMELSLRWAERSKQAHEGNPAALFGIVQGGMYEGLRDKSLEGLTEIGFDGYAIGGLSVGEPKEDMIRILDHLPPKMPEDKPRYLMGVGRPEDIVEAVRRGVDMFDCVMPTRNARNGYLFTSTGIVKIRNARHRHDTSPLDERCDCYTCQNFSRSYLHHLDKCGEMLGSQLNTIHNLRFYQNLMAGLRGAIEAGTLSDFVSDFYALRGESVPPLAGA

SEQ ID NO: 57305 - protein, 379 aa, Marinobacter pelagius
  misc_feature (1)..(379): tr|A0A366GMI4|A0A366GMI4_9ALTE Queuine tRNA-ribosyltran sferase OS=Marinobacter pelagius OX=379482 GN=tgt PE=3 SV=1
MTNSCFMSFEKITEDGRARRGRLTFPRGVVETPAFMPVGTYGTVKGMLPRDIHEIGAQIILGNTFHLMLRPGTEVVKAHGDLHDFTQWQGPILTDSGGFQVFSLGEMRKITEEGVTFRSPVDGSKVELSPEIAIRVQRDLGSDIVMIFDECTPYPATEKQARESMELSLRWAERSKNAHEGNPAALFGIVQGGMYEGLRDQSLAGLTEIGFDGYAIGGLSVGEPKEDMIRILDHLPPKMPEDKPRYLMGVGRPEDIVEAVRRGVDMFDCVMPTRNARNGYLFTSTGIIKIRNARHRHDTSPLDERCDCYTCQNFSRSYLHHLDKCGEMLGAQLNTIHNLRFYQNLMAGLRGAIEAGTLSDFVSDFYALRGESVPPLAGA

SEQ ID NO: 57306 - protein, 377 aa, Marinobacter persicus
  misc_feature (1)..(377): tr|A0A1I3WTL0|A0A1I3WTL0_9ALTE Queuine tRNA-ribosyltran sferase OS=Marinobacter persicus OX=930118 GN=tgt PE=3 SV=1
MSQSCFMSFEKLGEDGKARRGRLTFPRGTVETPAFMPVGTYGTVKGMLPRDIEAIGAEIILGNTFHLMLRPGTEVVKAHGDLHDFTQWQGPILTDSGGFQVFSLGDMRKITEKSVTFRSPVDGSKVELSPEIAIQVQRDLGSDIVMIFDECTPYPATEKQARESMEMSLRWAERSKKAHEGNPAALFGIVQGGMYESLRERSLQGLTDIGFDGYAIGGLSVGEPKEDMIRILDHLPPKMPGDKPRYLMGVGRPEDIVEAVRRGIDMFDCVMPTRNARNGYLFTSTGIIKIRNARHRHDTGPLDERCDCYTCQHFSRSYLHHLDKCGEMLGSQLNTIHNLRFYQNLMRGLRGAIEAGTLSDFIREFYALRGESVPPLG

SEQ ID NO: 57307 - protein, 377 aa, Marinobacter persicus
  misc_feature (1)..(377): tr|A0A2S6G7X3|A0A2S6G7X3_9ALTE Queuine tRNA-ribosyltran sferase OS=Marinobacter persicus OX=930118 GN=tgt PE=3 SV=1
MSQSCFMSFEKLGEDGKARRGRLTFPRGTVETPAFMPVGTYGTVKGMLPRDIEAIGAEIILGNTFHLMLRPGTEVVKAHGDLHDFTQWQGPILTDSGGFQVFSLGDMRKITEKSVTFRSPVDGSKVELSPEIAIQVQRDLGSDIVMIFDECTPYPATEKQARESMELSLRWAERSKKAHEGNPAALFGIVQGGMYEPLRERSLQGLTDIGFDGYAIGGLSVGEPKEDMIRILDHLPPKMPEDKPRYLMGVGRPEDIVEAVRRGIDMFDCVMPTRNARNGYLFTSTGIIKIRNARHRHDTGPLDERCDCYTCQHFSRSYLHHLDKCGEMLGSQLNTIHNLRFYQNLMSGLRGAIEAGTLSDFISEFYALRGETVPPLG

SEQ ID NO: 57308 - protein, 373 aa, Marinobacter psychrophilus
  misc_feature (1)..(373): tr|A0A0H4I914|A0A0H4I914_9ALTE Queuine tRNA-ribosyltran sferase OS=Marinobacter psychrophilus OX=330734 GN=tgt PE=3 SV=1
MRFEKLGEDGRARLGRLTFPRGVVETPAFMPVGTYGTVKGMLPRDIKEIGAHIILGNTFHLMLRPGTEVIKAHGDLHDFTQWQGPILTDSGGFQVFSLGETSKITEQGVIFRSPVDGSQVELNPEIAMQVQRDLGSDIVMIFDECTPYPATEKEAKDSMELSLRWAARSKNAHEGNPAALFGIVQGGMYEGLRQQSLDGLTNIGFDGYAIGGLSVGEPKEDMIRILDDLPPKMPADKPRYLMGVGRPEDIVEAVRRGVDMFDCVMPTRNARNGYLFTATGTVKIRNAKNRHDTAPLDDSCDCYTCQNFSRSYLHHLDKCGEMLASQLNTIHNLRYYQNLMSGLRGAIEAGTLCDFVTGFYALRGATAPELSGA

SEQ ID NO: 57309 - protein, 372 aa, Marinobacter salarius
  misc_feature (1)..(372): tr|W5YQI5|W5YQI5_9ALTE Queuine tRNA-ribosyltransferase OS=Marinobacter salarius OX=1420917 GN=tgt PE=3 SV=1
MSFEKLGEDGRARRGRLTFPRGTVETPAFMPVGTYGTVKGMLPRDIKDIGAEIILGNTFHLMLRPGTEVVKAHGDLHDFTQWQGPILTDSGGFQVFSLGEMRKITEAGVTFRSPIDGSPVELSPEIAMQVQRDLGSDIVMIFDECTPYPATEKQASESMELSLRWAARSKQAHAGNPAALFGIVQGGMYESLRDRSLEGLTEIGFDGYAIGGLSVGEPKEDMIRILDHLPPKMPEDRPRYLMGVGRPEDLVEAVRRGVDMFDCVMPTRNARNGYLFTSTGIIKIRNARHRHDTAPLDDQCDCYTCENFSRSYLHHLDKCGEMLGSQLNTIHNLRYYQNVMAGLRGAIEAGTLSDFISDFYARRGETVPPMAQ

SEQ ID NO: 57310 - protein, 378 aa, Marinobacter salarius
  misc_feature (1)..(378): tr|A0A1W6KAK3|A0A1W6KAK3_9ALTE Queuine tRNA-ribosyltran sferase OS=Marinobacter salarius OX=1420917 GN=tgt PE=3 SV=1
MSDQCYMSFEKLGEDGRARRGRLTFPRGTVETPAFMPVGTYGTVKGMLPRDIKDIGAEIILGNTFHLMLRPGTEVVKAHGDLHDFTQWQGPILTDSGGFQVFSLGEMRKITEAGVTFRSPIDGSPVELSPEIAMQVQRDLGSDIVMIFDECTPYPATEKQASESMELSLRWAARSKQAHAGNPAALFGIVQGGMYESLRDRSLEGLTEIGFDGYAIGGLSVGEPKEDMIRILDHLPPKMPEDRPRYLMGVGRPEDLVEAVRRGVDMFDCVMPTRNARNGYLFTSTGIIKIRNARHRHDTSPLDDQCDCYTCENFSRSYLHHLDKCGEMLGSQLNTIHNLRYYQNVMAGLRGAIEAGTLSDFISDFYARRGETVPPMAQ

SEQ ID NO: 57311 - protein, 373 aa, Marinobacter salinus
  misc_feature (1)..(373): tr|A0A1D9GS28|A0A1D9GS28_9ALTE Queuine tRNA-ribosyltran sferase OS=Marinobacter salinus OX=1874317 GN=tgt PE=3 SV=1
MSFEKFGEDGRARRGRLTFPRGSVETPAFMPVGTYGTVKGMLPRDIEEIGAEIILGNTFHLMLRPGTEVIKAHGDLHDFTQWKGPILTDSGGFQVFSLGEMRKITEEDVTFRSPVDGSPVKLSPEIAIQVQRDLGSDIVMIFDECTPYPATEQQARDSMELSLRWAERSKNAHQGNPAALFGIVQGGMYENLRERSLDGLTEIGFDGYAIGGLSVGEPKEDMIRILDHLPPRMPEDKPRYLMGVGRPEDIVEAVRRGVDMFDCVMPTRNARNGYLFTSTGIVKIRNARHRHDTLPLDERCDCYTCKNFSRSYLHHLDKCGEMLGSQLNTIHNLRFYQNLMAGLRGAIEAGTLSDFVTDFYALRGETAPPMSTD

SEQ ID NO: 57312 - protein, 373 aa, Marinobacter santoriniensis
  misc_feature (1)..(373): tr|M7CU60|M7CU60_9ALTE Queuine tRNA-ribosyltransferase OS=Marinobacter santoriniensis NKSG1 OX=1288826 GN=tgt PE=3 SV=1
MSFEKLTEDGRARRGRLTFPRGTVETPAFMPVGTYGTVKGMLPRDIHEIGAEIILGNTFHLMLRPGTEVVKAHGDLHDFTQWQGPILTDSGGFQVFSLGEMRKITEEGVTFRSPVDGSKVELSPEIAIRVQRDLGSDIVMIFDECTPYPATEKQARESMELSLRWAERSKKAHEGNPAALFGIVQGGMYEGLRDRSLAGLTEIGFDGYAIGGLSVGEPKEDMIRILDHLPPKMPENRPRYLMGVGRPEDVVEAVRRGVDMFDCVMPTRNARNGYLFTSEGIVKIRNARHRHDTSPLDARCDCYTCKNFSRSYLHHLDKCGEMLGAQLNTIHNLRFYQNLMAGLRGAIEAGTLSDFISEFYGLRGESVPPMPAA

SEQ ID NO: 57313 - protein, 379 aa, Marinobacter segnicrescens
  misc_feature (1)..(379): tr|A0A1H9YDE9|A0A1H9YDE9_9ALTE Queuine tRNA-ribosyltran sferase OS=Marinobacter segnicrescens OX=430453 GN=tgt PE=3 SV=1
MRDNCFLSFEKLGEDGKARRGRLTFPRGVVETPAFMPVGTYGTVKGMLPRDIEATGAQIILGNTFHLMLRPGTEVIKAHGDLHDFTQWQGPILTDSGGFQVFSLGDMRKITEQGVSFRSPVDGSPVELNPEIAMQVQRDLGSDIVMIFDECTPYPATEKQARESMEMSLRWAARSKVAHGESPSALFGIIQGGMYNDLRQRSLEGLVDIGFDGYAIGGLSVGEPKEEMIAVLDYLPVRMPEDHPRYLMGVGRPEDIVEAVRRGVDMFDCVMPTRNARNGYLFTSTGIVKIRNATHRHDTSPLDAECDCYTCSHFSRSYLHHLDKCGEMLGSQLNTIHNLHYYQKVMAGLRGAIEAGTLSDFVESFYAKRGLPVPPLAGG

SEQ ID NO: 57314 - protein, 373 aa, Marinobacter shengliensis
  misc_feature (1)..(373): tr|A0A2T1KNS5|A0A2T1KNS5_9ALTE Queuine tRNA-ribosyltran sferase OS=Marinobacter shengliensis OX=1389223 GN=tgt PE=3 SV=1
MSFEKLGEDGRARRGRLTFPRGTVETPAFMPVGTYGTVKGMLPRDIEAIGAEIILGNTFHLMLRPGTEVVKAHGDLHDFTQWQGPILTDSGGFQVFSLGEMRKITEQGVTFRSPVDGSKVELSPEIAIQVQRDLGSDIVMIFDECTPYPATEKQAKESMELSLRWAERSKKAHEGNPAALFGIVQGGMYEPLRDRSLQGLTDIGFDGYAIGGLSVGEPKEDMIRILDHLPSKMPEDKPRYLMGVGRPEDIVEAVRRGVDMFDCVMPTRNARNGYLFTSTGIVKIRNAKNRHDTGPLDERCDCYTCQNFSKSYLHHLDKCGEMLGAQLNTIHNLRFYQNLMSGLRGAIEAGTLSDFISEFYALRGESVPPLGES

SEQ ID NO: 57315 - protein, 373 aa, Marinobacter similis
  misc_feature (1)..(373): tr|W5YNF4|W5YNF4_9ALTE Queuine tRNA-ribosyltransferase OS=Marinobacter similis OX=1420916 GN=tgt PE=3 SV=1
MSFEKLGEDGRARRGRLSFPRGTVETPAFMPVGTYGTVKAMLPRDIHGIGAEIILGNTFHLMLRPGTEVIKAHGDLHDFTQWKGPILTDSGGFQVFSLGEMRKITEEGVTFRSPVDGSPVKLNPEIAIQVQRDLGSDIVMIFDECTPYPATEQEAKDSMELSLRWAERSKKAHEGNPAALFGIVQGGMYEGLRDVSLEGLTDIGFDGYAIGGLSVGEPKEDMIRILDHLPPKMPEDKPRYLMGVGRPEDIVEAVRRGVDMFDCVMPTRNARNGYLFTSTGIVKIRNARHRHDTAPLDERCDCYTCQNFSRSYLYHLDKCGEMLGSQLNTIHNLRFYQNLMAGLRGAIEAGTLSDFVTDFYALRGETVPPMGSA

SEQ ID NO: 57316 - protein, 373 aa, Marinobacter sp.
  misc_feature (1)..(373): tr|A0A1E7Q1Z1|A0A1E7Q1Z1_9ALTE Queuine tRNA-ribosyltran sferase OS=Marinobacter sp. X15-166B OX=1897620 GN=tgt PE=3 SV=1
MAFEKLAEDGKARRGRLTFPRGVVETPAFMPVGTYGTVKGMLPRDIEATGAHIILGNTFHLMLRPGTEVVKAHGSLHDFTQWQGPILTDSGGFQVFSLGAMRKITEEGVTFRSPVNGDPVELNPEIAMQVQRDLGSDVVMIFDECTPYPATEQEAEQSMELSLRWAARSRKAHGDNPAALFGIVQGGMYTHLRDRSLAGLTDIGFDGYAIGGLSVGEPHEDMVRVLDHLAHRMPADKPRYLMGVGRPEDLVEGVRRGVDMFDCVMPTRNARNGHLFTSTGTVKIRNARHRHDTGRLDEQCDCYTCENFSLSYLHHLEKCKEMLGSQLNTIHNLRYYQILMRGLREAIEAGTLSDFVEDFYERRGQTVPPLTET

SEQ ID NO: 57317 - protein, 372 aa, Marinobacter sp.
  misc_feature (1)..(372): tr|A0A434ASP9|A0A434ASP9_9ALTE Queuine tRNA-ribosyltran sferase OS=Marinobacter sp. NP-6 OX=2488666 GN=tgt PE=3 SV=1
MSFEKLGDDGRARRGRLTFPRGTVETPAFMPVGTYGTVKGMLPRDIKDIGAEIILGNTFHLMLRPGTEVVKAHGDLHDFTQWQGPILTDSGGFQVFSLGEMRKITEAGVTFRSPIDGSPVELSPEIAMQVQRDLGSDIVMIFDECTPYPATEKQASESMELSLRWAARSKQAHADNPAALFGIVQGGMYESLRDRSLEGLTEIGFDGYAIGGLSVGEPKEDMIRILDYLPPRMPEDRPRYLMGVGRPEDLVEAVRRGVDMFDCVMPTRNARNGYLFTSTGIIKIRNARHRHDTAPLDDQCDCYTCENFSRSYLHHLDKCGEMLGSQLNTIHNLRYYQNVMAGLRGAIEAGTLSDFISDFYARRGETVPPMAQ

SEQ ID NO: 57318 - protein, 379 aa, Marinobacter subterrani
  misc_feature (1)..(379): tr|A0A0J7J8G3|A0A0J7J8G3_9ALTE Queuine tRNA-ribosyltran sferase OS=Marinobacter subterrani OX=1658765 GN=tgt PE =3 SV=1
MTQTCFMSFEKLGEDGQARRGRLTFPRGTVETPAFMPVGTYGTVKGMLPRDIHEIGAEIILGNTFHLMLRPGTEVVKAHGDLHDFTQWQGPILTDSGGFQVFSLGEMRKITEEGVTFRSPVDGSPVELSPEIAIRVQRDLGSDIVMIFDECTPYPATERQAQESMELSLRWAKRSKDAHEGNPAALFGIVQGGMYEGLRDRSLAGLTDIGFDGYAIGGLSVGEPKEDMIRILDHLPPKMPEDKPRYLMGVGRPEDIVEAVRRGIDMFDCVMPTRNARNGYLFTSTGIVKIRNARHRHDTAPLDERCDCYTCQNFSRSYLHHLDKCGEMLGAQLNTIHNLRFYQNLMAGLRGAIEAGTLSDFVTDFYALRGETVPPQGSV

SEQ ID NO: 57319 - protein, 373 aa, Marinobacter vinifirmus
  misc_feature (1)..(373): tr|A0A558BER9|A0A558BER9_9ALTE Queuine tRNA-ribosyltran sferase OS=Marinobacter vinifirmus OX=355591 GN=tgt PE= 3 SV=1
MSFEKLGEDGKARRGRLTFPRGTVETPAFMPVGTYGTVKGMLPRDIKEIGAEIILGNTFHLMLRPGTEVVKAHGDLHDFTQWQGPILTDSGGFQVFSLGEMRKITEQGVTFRSPVDGSKVELSPEIAIGVQRDLGSDIVMIFDECTPYPATEKQAKESMELSLRWAERSKNAHEGNPAALFGIVQGGMYESLRDRSLEGLANIGFDGYAIGGLSVGEPKEDMIRILDHLPPKMPEDKPRYLMGVGRPEDIVEAVRRGVDMFDCVMPTRNARNGYLFTSTGIVKIRNARNRHDTGPLDERCDCYTCQNFSKSYLHHLDKCGEMLGSQLNTIHNLRFYQNLMSGLRGAIEAGTLSDFVSEFYALRGESVPPLGDS

SEQ ID NO: 57320 - protein, 376 aa, Marinobacter zhejiangensis
  misc_feature (1)..(376): tr|A0A1I4P8P3|A0A1I4P8P3_9ALTE Queuine tRNA-ribosyltran sferase OS=Marinobacter zhejiangensis OX=488535 GN=tgt PE=3 SV=1
MSFMSFEKLGEDGKARRGRLTFPRGVVETPAFMPVGTYGTVKGMLPRDIEQIGAHIILGNTFHLMLRPGTEVIKAHGDLHDFTQWQGPILTDSGGFQVFSLGEMRKITEQGVKFRSPVDGSPVELNPEIAMQVQRDLGSDIVMIFDECTPYPATHKQAEASMELSLRWAARSRDAHGDNPAALFGIIQGGMYPELRDRSLEGLTAIGFDGYAIGGLSVGEPKEDMIRILDHLPPKMPEDKPRYLMGVGRPEDIVEAVRRGVDMFDCVMPTRNARNGYLFTSTGIVKIRNARNRHDTSPLDDQCDCYTCQNFSRSYLHHLDKCGEMLGSQLNTIHNLRYYQNVMSGLRGAIEAGKLSDFVEDFYARRGETVPPLEEQ

SEQ ID NO: 57321 - protein, 379 aa, Marinobacterium aestuarii
  misc_feature (1)..(379): tr|A0A1A9F3S5|A0A1A9F3S5_9GAMM Queuine tRNA-ribosyltran sferase OS=Marinobacterium aestuarii OX=1821621 GN=tgt PE=3 SV=1
MSRSCFMNYERLAVDGKARRGRLTFPRGAVETPAFMPVGTYGTVKGMLPRDIEATGAQMILGNTFHLMLRPGTEIIRQHGDLHDFMQWKGPILTDSGGFQVFSLGAMRKITEEGVAFQSPVDGSKVFIDPERSMQVQRELGSDVVMIFDECTPHPATEDEAAKSMRLSLRWAERSKRAHGDSPSALFGIVQGGMYESLRDESLAGLTEIGFDGYAIGGLSVGEPKEDMMRVLDHLAWKMPEDKPRYLMGVGKPEDLVEGVRRGVDMFDCVMPTRNARNGFLFGSKGVVKIRNSANKTDMRPVDDKCDCYTCQNFSRAYLHHLDKCKEILGAQLNTIHNLHYYQVLMASLRAAIEQGKLSAFVDEFYAERGLETPPLASI

SEQ ID NO: 57322 - protein, 372 aa, Marinobacterium georgiense
  misc_feature (1)..(372): tr|A0A1H4GRD0|A0A1H4GRD0_9GAMM Queuine tRNA-ribosyltran sferase OS=Marinobacterium georgiense DSM 11526 OX=1122 198 GN=tgt PE=3 SV=1
MQFETLASEGKARRGRLTFPRGVVETPAFMPVGTYGTVKGMLPRDIEATGAQIILGNTFHLMLRPGTEIVQQHGDLHDFMQWKGPILTDSGGFQVFSLGKLRKITEEGVTFQSPVNGSKVFMTPESSMQVQRELGSDIVMIFDECTPYPATEKEAADSMRMSLRWAERSKKAHGESPSALFGIIQGGMYESLRDESLAGLTEIGFDGYAIGGLSVGEPKEDMVRILDRLAWKMPEDKPRYLMGVGKPEDLVEGVRRGVDMFDCVMPTRNARNGFLFTRNGIVKIRNSANKTNTAPVDETCSCYTCQNFSRAYLHHLDKCKEILGAQLNTIHNLHYYQELMAGLRNAIEQGKLSDFVDEFYRQRGQETPPLTA

SEQ ID NO: 57323 - protein, 372 aa, Marinobacterium halophilum
  misc_feature (1)..(372): tr|A0A2P8EQT3|A0A2P8EQT3_9GAMM Queuine tRNA-ribosyltran sferase OS=Marinobacterium halophilum OX=267374 GN=tgt PE=3 SV=1
MQFETTASEGKARRGRLTFPRGVVETPAFMPVGTYGTVKGMTPRDIEATGAQIILGNTFHLMLRPGTEIVQQHGDLHDFMNWKGPILTDSGGFQVFSLGKMRKITENGVVFQSPVNGSKVVMTPESSMQVQRELGSDIVMIFDECTPYPATHKEAADSMRMSLRWAQRSKDAHGDSPSALFGIIQGGMYEDLRDESLEGLTSIGFDGYAIGGLSVGEPKEDMKRVLDHLAWKMPEDKPRYLMGVGKPEDLVEGVRRGVDMFDCVMPTRNARNGFLFTRDGIVKIRNSANKTNTAPVDETCSCYTCQNFSRAYLHHLDKCKEILGAQLNTIHNLHYYQELMAGLRNAIEQGKLSDFIDEFYRRRGQTTPPLTA

SEQ ID NO: 57324 - protein, 382 aa, Marinobacterium lutimaris
  misc_feature (1)..(382): tr|A0A1H6CT77|A0A1H6CT77_9GAMM Queuine tRNA-ribosyltran sferase OS=Marinobacterium lutimaris OX=568106 GN=tgt P E=3 SV=1
MSDNSTRECFMNFELLGSEGKARRGRLTFPRGTVETPAFMPVGTYGTVKGMLPRDVEEIGAQIILGNTFHLMLRPGTEIIKQHGDLHDFMNWKGPILTDSGGFQVFSLGNMRKITEEGVSFQSPVNGSKVFISPEVSMQVQRDLGSDIVMIFDECTPYPADEMEAAKSMRMSLRWAERSKKAHGDSPSALFGIIQGGMYEHLRDESLEGLTGIGFDGYAIGGLSVGEPKEEMIKILDHLAYKMPEDKPRYLMGVGKPEDLVEGVRRGVDMFDCVMPTRNARNGFLFTTDGIVKIRNSANKTNTGPVDETCDCYTCQNFSRAYLHHLDKCGEILGSQLNTIHNLHYYQVLMAGLRGALEQGTLSAFVADFYAKRGKEVPPLKG

SEQ ID NO: 57325 - protein, 382 aa, Marinobacterium mangrovicola
  misc_feature (1)..(382): tr|A0A4R1GG44|A0A4R1GG44_9GAMM Queuine tRNA-ribosyltran sferase OS=Marinobacterium mangrovicola OX=1476959 GN=t gt PE=3 SV=1
MSDNSTRECFMNFELLGSEGKARRGRLTFPRGTVETPAFMPVGTYGTVKGMLPRDVEEIGAQIILGNTFHLMLRPGTEIIKQHGDLHDFMNWKGPILTDSGGFQVFSLGNMRKITEEGVSFQSPVNGSKVFISPEVSMQVQRDLGSDIVMIFDECTPYPADEMEAAKSMRMSLRWAKRSKDAHGDSPSALFGIIQGGMYEHLRDESLEGLTGIGFDGYAIGGLSVGEPKEEMIKILDHLAYKMPEDKPRYLMGVGKPEDLVEGVRRGVDMFDCVMPTRNARNGFLFTTDGIVKIRNSANKTNTGPVDETCDCYTCQNFSRAYLHHLDKCGEILGSQLNTIHNLHYYQVLMAGLRGALEQGTLSDFVADFYAKRGKEVPPLKG

SEQ ID NO: 57326 - protein, 384 aa, Marinobacterium sp.
  misc_feature (1)..(384): tr|A0A081G1E2|A0A081G1E2_9GAMM Queuine tRNA-ribosyltran sferase OS=Marinobacterium sp. AK27 OX=1232683 GN=tgt P E=3 SV=1
MSDNTTQGRECFMNFELLGSEGKARRGRLTFPRGVVETPAFMPVGTYGTVKGMLPRDIEGIGAQIILGNTFHLMLRPGTDIIAQHGDLHDFMQWQGPILTDSGGFQVFSLGKMRKITEEGVSFQSPVDGSKVFLSPEVSMEVQRALGSDIVMIFDECTPHPATEVEAAQSMRLSLRWAKRSKEAHGDSPSALFGIVQGGMYEHLRDESLEGLTEIGFDGYAIGGLSVGEPKEDMMRILDHLAYKMPEDKPRYLMGVGKPEDLVEGVRRGVDMFDCVMPTRNARNAFLFTTTGVVKIRNSANKTDTRPLDETCDCYTCQHFSRAYLHHLDKCGEILGAQLNTIHNLHYYQQLMAGLRGALEQGKLSDFVENFYALRGQEVPPLKG

SEQ ID NO: 57327 - protein, 378 aa, Marinobacterium stanieri
  misc_feature (1)..(378): tr|A0A1N6U6Q0|A0A1N6U6Q0_9GAMM Queuine tRNA-ribosyltran sferase OS=Marinobacterium stanieri OX=49186 GN=tgt PE= 3 SV=1
MRKECFMKFETTTTEGKARRGRLTFPRGVVETPAFMPVGTYGTVKGMTPRDIEATGAQIILGNTFHLMLRPGTEIVQQHGDLHDFMQWKGPILTDSGGFQVFSLGKMRKISEQGVTFQSPVNGDKVLMTPESSMQVQRELGSDIVMIFDECTPYPATHKEAADSMRLSMRWAQRSKDAHGDSPSALFGIIQGGMYEDLRDESLEGLTEIGFDGYAIGGLSVGEPKEDMKRVLDHLAWKMPEDKPRYLMGVGKPEDLVEGVRRGVDMFDCVMPTRNARNGFLFTRNGIVKIRNSSNKTNTAPVDETCSCYTCQNFSRAYLHHLDKCREILGAHLNTIHNLHYYQELMAGLRNAIEQGKLSDFVDEFYRQRGQETPPLTA

SEQ ID NO: 57328 - protein, 379 aa, Marinococcus halophilus
  misc_feature (1)..(379): tr|A0A510Y618|A0A510Y618_MARHA Queuine tRNA-ribosyltran sferase OS=Marinococcus halophilus OX=1371 GN=tgt PE=3 SV=1
MTAVTYEHIKTCRQSGARLGKVHTPHGSFDTPAFMPVGTLATVKTLSPEELESMGAGMILSNTYHLWIRPGEDIVEEAGGLHKFMNWNKPILTDSGGFQVFSLSKLRDIKEEGVHFRNHISGAKLFLSPEKAMQIQNSLGADVMMAFDECPPYPAEEEYMKASVERTTRWAERCLEAHTRPKDQALFGIVQGGDYQHLREKSAKELISMDFPGYAIGGLSVGEPKETMNRVLEYTAPLLPQNKPRYLMGVGSADALIDGSIRGIDMFDCVLPTRIGRNGTCMTSKGRLVVRNASNARDFRPIDEACSCYTCRNYSRAYIRHLIKSEETFGVRLTSYHNLYFLLSLMQQVREAIQQDRLLDFRETFFEQYGFNRPDAKNF

SEQ ID NO: 57329 - protein, 379 aa, Marinococcus luteus
  misc_feature (1)..(379): tr|A0A1H2S7C6|A0A1H2S7C6_9BACI Queuine tRNA-ribosyltran sferase OS=Marinococcus luteus OX=1122204 GN=tgt PE=3 S V=1
MTAVTYEHIKTCRQSGARLGKVHTPHGSFDTPAFMPVGTLATVKTLSPEELESMGAGMILSNTYHLWIRPGEDIVEEAGGLHKFMNWNKPILTDSGGFQVFSLSKLRDIKEEGVHFRNHISGAKLFLSPEKAMQIQNSLGADVMMAFDECPPYPAEEEYMKASVERTTRWAERCLEAHTRPKDQALFGIVQGGDYRHLREKSAKELISMDFPGYAIGGLSVGEPKETMNRVLEYTTPLLPQNKPRYLMGVGSADALIDGSIRGIDMFDCVLPTRIGRNGTCMTSKGRLVVRNASNARDFRPIDEACGCYTCRNYSRAYIRHLIKSEETFGVRLTSYHNLYFLLSLMQQVREAIQQDRLLDFRETFFEQYGFNRPDAKNF

SEQ ID NO: 57330 - protein, 381 aa, Marinomonas alcarazii
  misc_feature (1)..(381): tr|A0A318VDI8|A0A318VDI8_9GAMM Queuine tRNA-ribosyltran sferase OS=Marinomonas alcarazii OX=491949 GN=tgt PE=3 SV=1
MSDKRPECFMDFELHTTSGKARRATLTFPRGKVETPAFMPVGTYGTVKGMLTKDIEEIGADIILGNTFHLWLRPGTDVVKAHGDLHDFTQWKKPILTDSGGFQVFSLGEMRKITEEGVSFRSPINGSKVFLSPEISMQVQRDLGSDIVMIFDECTPYPATPEVAAKSMRMSLRWAKRSKDEHGDSPSALFGIIQGSMYENLRDESLEGLVDIGFDGYAIGGLSVGEPKEEMMKVLDHTTPKMPADKPRYLMGVGKPEDLVEGVRRGVDMFDCVMPTRNARNGHLFTSDGVVRIRNAQYRHDVGPLDKECDCYTCKNFSRSYLHHLDKCQEMVGAQLNTIHNLRYYQTLMAGLRLALDEGRFDAFVDEFYAKRGLETPALSE

SEQ ID NO: 57331 - protein, 381 aa, Marinomonas aquimarina
  misc_feature (1)..(381): tr|A0A1A8TII9|A0A1A8TII9_9GAMM Queuine tRNA-ribosyltran sferase OS=Marinomonas aquimarina OX=295068 GN=tgt PE=3 SV=1
MSDKRPECFMDFEVLATSGKARRARLSFPRGDIETPAFMPVGTYGTVKSMLTKDIEAIGADIILGNTFHLWLRPGTEVIKAHGDLHDFTQWQKPILTDSGGFQVFSLGDMRKITEQGVSFRSPVNGDKVFLSPEISMQVQRDLGSDIVMIFDECTPYPATEDEAAKSMRMSLRWAQRSKDAHGDSPSALFGIIQGSMYEQLRDESLEALTNIGFDGYAIGGLSVGEPKEDMVRILDHVAYKMPEDKPRYLMGVGKPEDLVEGVRRGVDMFDCVMPTRNARNGHLFTSEGIIRIRNAFHRYDTDPLDKECDCYTCKNFSRSYLHHLDKCQEMVGAQLNTIHNLRYYQNLMAGLRKALDEGRFDAFVDEFYAKRGMETPPLSE

SEQ ID NO: 57332 - protein, 381 aa, Marinomonas aquiplantarum
  misc_feature (1)..(381): tr|A0A366CXG4|A0A366CXG4_9GAMM Queuine tRNA-ribosyltran sferase OS=Marinomonas aquiplantarum OX=491951 GN=tgt P E=3 SV=1
MSEKRPECFMDFELHTSSGKARRATLTFPRGKVETPAFMPVGTYGTVKGMLTKDIEEIGADIILGNTFHLWLRPGTEVVKAHGDLHDFTQWKKPILTDSGGFQVFSLGEMRKITEEGVSFRSPINGSKVFLSPEISMQVQRDLGSDIVMIFDECTPYPATADVAAKSMRMSLRWAKRSKEEHGDSPSALFGIIQGSMYENLRDESLEGLEEIGFDGYAIGGLSVGEPKEEMIKVLDYITPKMPENKPRYLMGVGKPEDLVEGVRRGVDMFDCVMPTRNARNGHLFTSEGVVRIRNAQYRHDIDPLDKECDCYTCKNFSRAYLHHLDKCQEMVGAQLNTIHNLRYYQTLMAGLRKALDEGRFDAFVDEFYAKRGLETPALSE

SEQ ID NO: 57333 - protein, 381 aa, Marinomonas balearica
  misc_feature (1)..(381): tr|A0A4R6MG38|A0A4R6MG38_9GAMM Queuine tRNA-ribosyltran sferase OS=Marinomonas balearica OX=491947 GN=tgt PE=3 SV=1
MSDKRPECFMDFEVHATSGKARRATLSFPRGNVETPAFMPVGTYGTVKGMLTKDIEEIGADIILGNTFHLWLRPGTQVIKEHGDLHDFTQWKKPILTDSGGFQVFSLGEMRKITEEGVSFRSPVDGSKVFLNPEISMEVQRDLGSDIVMIFDECTPYPATETEAAKSMRMSLRWAKRSKDAHGDSPSALFGIIQGSMYETLRDESLEGLVDIGFDGYAIGGLSVGEPKHEMMKVLDHVTPKMPDNKPRYLMGVGKPEDLVEGVRRGVDMFDCVMPTRNARNGHLFTSDGVVRIRNAKNRHDTGPLDKECDCYTCKNFSRAYLHHLDKCQEMVGAQLNTIHNLRYYQTLMAGLRKALDEGKFDAFVDEFYAKRGMETPTLAE

SEQ ID NO: 57334 - protein, 381 aa, Marinomonas communis
  misc_feature (1)..(381): tr|A0A4R6X338|A0A4R6X338_9GAMM Queuine tRNA-ribosyltran sferase OS=Marinomonas communis OX=28254 GN=tgt PE=3 SV =1
MSEKRPECFMDFEVLATSGKARRARLSFPRGDIETPAFMPVGTYGTVKSMLTKDIEAIGADIILGNTFHLWLRPGTDVIKAHGDLHDFTQWQKPILTDSGGFQVFSLGDMRKITEEGVSFRSPVNGDKVFLSPEISMQVQRDLGSDIVMIFDECTPYPATEDEAARSMRMSLRWAQRSKDAHGDSPSALFGIIQGSMYEQLRDESLEGLTNIGFDGYAIGGLSVGEPKEDMVRILDHLAYKMPEDKPRYLMGVGKPEDLVEGVRRGVDMFDCVMPTRNARNGHLFTSEGIVRIRNAFHRHDTSPLDKECDCYTCKNFSRSYLHHLDKCQEMVGAQLNTIHNLRYYQTLMAGLRKALDEGRFDAFVDEFYAKRGMETPPLSE

SEQ ID NO: 57335 - protein, 381 aa, Marinomonas foliarum
  misc_feature (1)..(381): tr|A0A369ACX4|A0A369ACX4_9GAMM Queuine tRNA-ribosyltran sferase OS=Marinomonas foliarum OX=491950 GN=tgt PE=3 S V=1
MSDKRPECFMDFELHTTSGKARRATLTFPRGKVETPAFMPVGTYGTVKGMLTKDIEEIGADIILGNTFHLWLRPGTDVVKAHGDLHDFTQWKKPILTDSGGFQVFSLGEMRKITEEGVSFRSPINGSKVFLSPEISMQVQRDLGSDIVMIFDECTPYPATPEVAAKSMRMSLRWAKRSKDEHGDSPSALFGIIQGSMYENLRDESLEGLVDIGFDGYAIGGLSVGEPKDEMMKVLDHTTPKMPADKPRYLMGVGKPEDLVEGVRRGVDMFDCVMPTRNARNGHLFTSDGVVRIRNAQYRHDVGPLDKECDCYTCKNFSRSYLHHLDKCQEMVGAQLNTIHNLRYYQTLMAGLRLALDEGRFDAFVDEFYAKRGLETPALSE

SEQ ID NO: 57336 - protein, 381 aa, Marinomonas fungiae
  misc_feature (1)..(381): tr|A0A0K6IR53|A0A0K6IR53_9GAMM Queuine tRNA-ribosyltran sferase OS=Marinomonas fungiae OX=1137284 GN=tgt PE=3 S V=1
MSDKRPECFMDFEVLATSGKARRARLSFPRGDIETPAFMPVGTYGTVKSMLTKDIEAIGADIILGNTFHLWLRPGTDVIKAHGDLHDFTQWQKPILTDSGGFQVFSLGDMRKITEEGVSFRSPVNGDKVFLSPEISMQVQRDLGSDIVMIFDECTPYPATEDEAAKSMRMSLRWAQRSKDAHGDSPSALFGIIQGSMYEQLRDESLEGLTNIGFDGYAIGGLSVGEPKEDMVRILDHLAYKMPEDKPRYLMGVGKPEDLVEGVRRGVDMFDCVMPTRNARNGHLFTSEGIVRIRNAFHRYDTNPLDKECDCYTCKNFSRSYLHHLDKCQEMVGAQLNTIHNLRYYQTLMAGLRQALDEGRFDAFVDEFYAKRGMETPPLSE

SEQ ID NO: 57337 - protein, 381 aa, Marinomonas gallaica
  misc_feature (1)..(381): tr|A0A1C3JT60|A0A1C3JT60_9GAMM Queuine tRNA-ribosyltran sferase OS=Marinomonas gallaica OX=1806667 GN=tgt PE=3 SV=1
MSDKRPECFMDFEVLATSGKARRARLSFPRGDVETPAFMPVGTYGTVKSMLTKDIEAIGADIILGNTFHLWLRPGTEVIKAHGDLHDFTQWKKPILTDSGGFQVFSLGDMRKITEEGVSFRSPVNGDKVFLSPEISMQVQRDLGSDIVMIFDECTPYPASDDEAAKSMRMSLRWAQRSKDAHGDSPSALFGIIQGSMYETLRDESLEGLVGIGFDGYAIGGLSVGEPKEDMIRILDHLAHKMPEDKPRYLMGVGKPEDLVEGVRRGVDMFDCVMPTRNARNGHLFTSEGIVRIRNAFHRHDTNPLDKECDCYTCKNFSRSYLHHLDKCQEMVGAQLNTIHNLRYYQTLMAGLRQALDEGRFDAFVDEFYAKRGLETPPLSQ

SEQ ID NO: 57338 - protein, 382 aa, Marinomonas hwangdonensis
  misc_feature (1)..(382): tr|A0A3M8Q7B5|A0A3M8Q7B5_9GAMM Queuine tRNA-ribosyltran sferase OS=Marinomonas hwangdonensis OX=1053647 GN=tgt PE=3 SV=1
MSDKRPECFMDFELHTTSGKARRATLTFPRGKVETPAFMPVGTYGTVKGMLTKDIEEIGADIILGNTFHLWLRPGTDVVKAHGDLHDFTQWKKPILTDSGGFQVFSLGEMRKITEEGVSFRSPINGSKVFLSPEISMQVQRDLGSDIVMIFDECTPYPATPEVAAKSMRMSLRWAQRSKDEHGDSPSALFGIIQGSMYENLRDESLEGLVGIGFDGYAIGGLSVGEPKDEMMKVLDHTTPKMPEDKPRYLMGVGKPEDLVEGVRRGIDMFDCVMPTRNARNGHLFTSDGVVRIRNAQYRHDVGPLDKECDCYTCKNFSRSYLHHLDKCQEMVGAQLNTIHNLRYYQTLMAGLRQALDEGRFDAFVDEFYAKRGLETPALNKE

SEQ ID NO: 57339 - protein, 381 aa, Marinomonas mediterranea
  misc_feature (1)..(381): tr|F2JY80|F2JY80_MARM1 Queuine tRNA-ribosyltransferase OS=Marinomonas mediterranea (strain ATCC 700492 / JCM 2 1426 / NBRC 103028 / MMB-1) OX=717774 GN=tgt PE=3 SV=1
MSEKRPECFMDFEVHATSGKARRATLSFPRGNVETPAFMPVGTYGTVKGMLTKDIEEIGADIILGNTFHLWLRPGTEVVKEHGDLHDFTQWKKPILTDSGGFQVFSLGEMRKITEDGVSFRSPVDGSKVFLNPEISMEVQRELGSDIVMIFDECTPYPATETEAAKSMRMSLRWAQRSKDAHGDSPSALFGIIQGSMYENLRDESLEGLTDIGFDGYAIGGLSVGEPKHEMMKVLDHVAHKMPEDKPRYLMGVGKPEDLVEGVRRGVDMFDCVMPTRNARNGHLFTSDGVVRIRNAKNRHDTRPLDEECDCYTCKNFSRAYLHHLDKCQEMVGAQLNTIHNLRYYQTLMAGLRTALDEGRFDAFVDEFYAKRGMETPPLSK

SEQ ID NO: 57340 - protein, 381 aa, Marinomonas polaris
  misc_feature (1)..(381): tr|A0A1M5G7I0|A0A1M5G7I0_9GAMM Queuine tRNA-ribosyltran sferase OS=Marinomonas polaris DSM 16579 OX=1122206 GN= tgt PE=3 SV=1
MSDKRPECFMDFELHTTSGKARRATLTFPRGKVETPAFMPVGTYGTVKGMLTKDIEEIGADIILGNTFHLWLRPGTDVVKAHGDLHDFTQWKKPILTDSGGFQVFSLGEMRKITEEGVSFRSPINGSKVFLSPEISMQVQRDLGSDIVMIFDECTPYPATPEVAAKSMRMSLRWAQRSKDEHGDSPSALFGIIQGSMYENLRDESLEGLVDIGFDGYAIGGLSVGEPKDEMMKVLDHTTPKMPEDKPRYLMGVGKPEDLVEGVRRGVDMFDCVMPTRNARNGHLFTSDGVVRIRNAQYRHDVGPLDKECDCYTCKNFSRSYLHHLDKCQEMVGAQLNTIHNLRYYQTLMAGLRQALDEGRFDAFVDEFYAKRGLETPALSE

SEQ ID NO: 57341 - protein, 381 aa, Marinomonas pollencensis
  misc_feature (1)..(381): tr|A0A3E0DG13|A0A3E0DG13_9GAMM Queuine tRNA-ribosyltran sferase OS=Marinomonas pollencensis OX=491954 GN=tgt PE =3 SV=1
MSDKRPECFMDFDLHTTSGKARRATLTFPRGKVETPAFMPVGTYGTVKGMLTKDIEEIGADIILGNTFHLWLRPGTEVVKAHGDLHDFTQWKKPILTDSGGFQVFSLGEMRKITEEGVSFRSPINGSKVFLSPEISMQVQKDLGSDIVMIFDECTPYPATPERAADSMRMSLRWAKRSKQEHGDSPSALFGIIQGSMYENLRDESLEGLVDIGFDGYAIGGLSVGEPKEEMMKVLDYVTPKMPQDKPRYLMGVGKPEDLVEGVRRGVDMFDCVMPTRNARNGHLFTSEGVVRIRNATHRHDTAPLDKECDCYTCKNFSRSYLHHLDKCQEMVGAQLNTIHNLRYYQTLMAGLRQALDEGRFDAFVDEFYAKRGLETPPLSE

SEQ ID NO: 57342 - protein, 381 aa, Marinomonas posidonica
  misc_feature (1)..(381): tr|F6CXB3|F6CXB3_MARPP Queuine tRNA-ribosyltransferase OS=Marinomonas posidonica (strain CECT 7376 / NCIMB 144 33 / IVIA-Po-181) OX=491952 GN=tgt PE=3 SV=1
MSEKRPECFMDFELHTSSGKARRATLTFPRGKVETPAFMPVGTYGTVKGMLTKDIEEIGADIILGNTFHLWLRPGTEVVKAHGDLHDFTQWKKPILTDSGGFQVFSLGEMRKITEEGVSFRSPINGSKVFLSPEISMQVQRDLGSDIVMIFDECTPYPATADVAAKSMRMSLRWAKRSKDEHGDSPSALFGIIQGSMFENLRDESLEGLEEIGFDGYAIGGLSVGEPKEEMIKVLDYITPKMPENKPRYLMGVGKPEDLVEGVRRGVDMFDCVMPTRNARNGHLFTSEGVVRIRNAQYRHDIDPLDKECDCYTCKNFSRAYLHHLDKCQEMVGAQLNTIHNLRYYQTLMAGLRKALDEGRFDAFVDEFYAKRGLETPALSE

SEQ ID NO: 57343 - protein, 381 aa, Marinomonas primoryensis
  misc_feature (1)..(381): tr|A0A2Z4PUR0|A0A2Z4PUR0_9GAMM Queuine tRNA-ribosyltran sferase OS=Marinomonas primoryensis OX=178399 GN=tgt PE =3 SV=1
MSDKRPECFMDFDLHTTSGKARRATLTFPRGKVETPAFMPVGTYGTVKGMLTKDIEEIGADIILGNTFHLWLRPGTDVVKAHGDLHDFTQWKKPILTDSGGFQVFSLGEMRKITEEGVSFRSPINGSKVFLSPEISMQVQKDLGSDVVMIFDECTPHPATTDVAATSMRRSLRWAQRSKDEHGDSPSALFGIIQGSMYENLREESLEGLVDIGFDGYAIGGLSVGEPKEEMMKVLDFVTPKMPADKPRYLMGVGKPEDLVEGVRRGVDMFDCVMPTRNARNGHLFTSDGVVRIRNAQYREDIGPLDKECDCYTCKNFSRSYLHHLDKCKEMVGAQLNTIHNLRYYQTLMAGLRLALDEGRFDAFVDEFYAKRGLDVPVLSE

SEQ ID NO: 57344 - protein, 382 aa, Marinomonas profundimaris
  misc_feature (1)..(382): tr|W1RZX8|W1RZX8_9GAMM Queuine tRNA-ribosyltransferase OS=Marinomonas profundimaris OX=1208321 GN=tgt PE=3 SV= 1
MSDKRPECFMDFDLHTTSGKARRATLTFPRGKVETPAFMPVGTYGTVKGMLTKDIEEIGADIILGNTFHLWLRPGTEVVKAHGDLHDFTQWKKPILTDSGGFQVFSLGEMRKITEEGVSFRSPINGSKVFLSPEISMQVQKDLGSDVVMIFDECTPHPATTDVAATSMRRSLRWAKRSKDEHGDSPSALFGIIQGSMYENLRDESLEGLVDIGFDGYAIGGLSVGEPKEEMMKVLDFVTPKMPEDKPRYLMGVGKPEDLVEGVRRGVDMFDCVMPTRNARNGHLFTSDGVVRIRNAQYRHDVGPLDKECDCYTCKNFSRSYLHHLDKCQEMVGAQLNTIHNLRYYQTLMAGLRLALDEGRFDAFVDEFYAKRGLDTPPLSEK

SEQ ID NO: 57345 - protein, 381 aa, Marinomonas rhizomae
  misc_feature (1)..(381): tr|A0A366JER5|A0A366JER5_9GAMM Queuine tRNA-ribosyltran sferase OS=Marinomonas rhizomae OX=491948 GN=tgt PE=3 S V=1
MSDKRPECFMDFELHTTSGKARRATLTFPRGKVETPAFMPVGTYGTVKGMLTKDIEEIGADIILGNTFHLWLRPGTDVVKAHGDLHDFTQWKKPILTDSGGFQVFSLGEMRKITEEGVSFRSPINGSKVFLSPEISMQVQRDLGSDIVMIFDECTPYPATPEVAAKSMRMSLRWAQRSKDEHGDSPSALFGIIQGSMYENLRDESLEGLVDIGFDGYAIGGLSVGEPKDEMMKVLDHTTPKMPEDKPRYLMGVGKPEDLVEGVRRGVDMFDCVMPTRNARNGHLFTSDGVVRIRNAQYRHDVGPLDKECDCYTCKNFSRSYLHHLDKCQEMVGAQLNTIHNLRYYQTLMAGLRKALDEGRFDAFVDEFYAKRGLETPALSE

SEQ ID NO: 57346 - protein, 372 aa, Marinomonas sp.
  misc_feature (1)..(372): tr|A0A370U5F7|A0A370U5F7_9GAMM Queuine tRNA-ribosyltran sferase OS=Marinomonas sp. YLB-05 OX=2213058 GN=tgt PE= 3 SV=1
MDFEVLATSGKARRARLSFPRGDVETPAFMPVGTYGTVKSMLTKDIEEIGADIILGNTFHLWLRPGTEVIKAHGDLHDFTQWKKPILTDSGGFQVFSLGAMRKITEEGVSFRSPVNGDKVFLSPEISMQVQRDLGSDIVMIFDECTPYPAKEDEAAKSMRMSLRWAQRSKDAHGDSPSALFGIIQGSMYETLRDESLEGLTNIGFDGYAIGGLSVGEPKEDMVRILDHLAHKMPDNKPRYLMGVGKPEDLVEGVRRGVDMFDCVMPTRNARNGHLFTSEGVVRIRNAFHRHDTSPLDKECDCYTCKNFSRSYLHHLDKCQEMVGAQLNTIHNLRYYQTLMAGLRKALDEGRFDAFVDEFYAKRGMETPPLNN

SEQ ID NO: 57347 - protein, 387 aa, Marinomonas sp.
  misc_feature (1)..(387): tr|A3YFR8|A3YFR8_9GAMM Queuine tRNA-ribosyltransferase OS=Marinomonas sp. MED121 OX=314277 GN=tgt PE=3 SV=1
MTDKRPECFMDFEVAATSGKARRATLTFPRGKVETPAFMPVGTYGTVKGMLTKDIEEIGADIILGNTFHLWLRPGMEVIKAHGDLHDFTQWKKPILTDSGGFQVFSLGAMRKITEEGVSFQSPVNGSKVFMSPEISMQVQRDLGSDIVMIFDECTPYPATPERAAESMRMSLRWAKRSKAEHGDSPSALFGIIQGSMYDNLRDESLEGLVDIGFDGYAIGGLSVGEPKQEMMKVLDYITPKMPDDKPRYLMGVGKPEDLVEGVRRGVDMFDCVMPTRNARNGHLFTSEGVVKIRNAKHRHDVSPLDKECDCYTCKNFSRSYLHHLDKCQEMVGAQLNTIHNLRYYQTLMAGLRLALEEGRFDAFVDEFYAKRGLETPPLNAEQAIES

SEQ ID NO: 57348 - protein, 381 aa, Marinomonas spartinae
  misc_feature (1)..(381): tr|A0A1A8TCZ7|A0A1A8TCZ7_9GAMM Queuine tRNA-ribosyltran sferase OS=Marinomonas spartinae OX=1792290 GN=tgt PE=3 SV=1
MSDKRPECFMDFELHNTSGKARRATLTFPRGKVETPAFMPVGTYGSVKGMLTKDIEEIGADIILGNTFHLWLRPGTEVIKAHGDLHDFTQWKKPILTDSGGFQVFSLGEMRKITEEGVSFRSPINGSKVFLSPEISMQVQKDLGSDIVMIFDECTPYPATPERAAASMRMSLRWAKRSKDEHGDSPSALFGIIQGSMYEHLRDESLEGLTDIGFDGYAIGGLSVGEPKEEMMKVLDYVTPKMPENKPRYLMGVGKPEDLVEGVRRGVDMFDCVMPTRNARNGHLFTSDGVVRIRNATNRHDTSPLDKECDCYTCKNFSRSYLHHLDKCQEMVGAQLNTIHNLRYYQTLMAGLRLALDEGRFDAFVDEFYAKRGLETPPLSD

SEQ ID NO: 57349 - protein, 373 aa, Marinomonas ushuaiensis
  misc_feature (1)..(373): tr|X7E3I2|X7E3I2_9GAMM Queuine tRNA-ribosyltransferase OS=Marinomonas ushuaiensis DSM 15871 OX=1122207 GN=tgt PE=3 SV=1
MDFELHTTSGKARRATLTFPRGKVETPAFMPVGTYGTVKGMLTKDIEEIGADIILGNTFHLWLRPGTDVIKAHGDLHDFTQWKKPILTDSGGFQVFSLGEMRKITEEGVSFRSPINGSKVFLSPEISMQVQRDLGSDIVMIFDECTPHPATTEVAATSMRRSLRWAKRSKDEHGDSPSALFGIIQGSMYENLRDESLEGLVDIGFDGYAIGGLSVGEPKEEMMKVLDHTTPKMPEDKPRYLMGVGKPEDLVEGVRRGVDMFDCVMPTRNARNGHLFTSDGVVRIRNAQYRHDVGPLDKECDCYTCKNFSRSYLHHLDKCQEMVGAQLNTIHNLRYYQTLMAGLRKALDEGKFDAFVDEFYAKRGLETPALSEK

SEQ ID NO: 57350 - protein, 390 aa, Marinoscillum furvescens
  misc_feature (1)..(390): tr|A0A3D9KXA7|A0A3D9KXA7_9BACT Queuine tRNA-ribosyltran sferase OS=Marinoscillum furvescens DSM 4134 OX=1122208 GN=tgt PE=3 SV=1
MGVIRIGPTIFAAFMDFSLQHTDPKSKARAGVVTTDHGQIETPIFMPVGTAGTVKAVHQREIKEDIAAEIILGNTYHLYLRPGLEVIQAAGGLHKFNGWDRPILTDSGGYQVYSLGDNRKITEKGVRFKSHIDGSMHDFTPERVMDIQRVIGADIIMAFDECTPYPCERKYAEDSMHMTHRWLKRCIDHFDQTEPVYDYSQTLFPIVQGSTYPDLRRQSAEFIAEQGREGNAIGGLSVGEPHEDMYAMTELVCDILPKDKPRYLMGVGTPENILECIALGVDMFDCVMPTRNARNGMLFTSEGIINIKNERWKSDFSPIDPEIGGYVSTFYTRAYLRHLIMSKEMLGAQICSVHNLTFYLWLVKQAREQIKAGTFASWKNQMVKKVTTRL

SEQ ID NO: 57351 - protein, 381 aa, Marinoscillum sp.; identical to SEQ ID NO: 55282
  misc_feature (1)..(381): tr|A0A2D7TFN5|A0A2D7TFN5_9BACT Queuine tRNA-ribosyltran sferase OS=Marinoscillum sp. OX=2024838 GN=tgt PE=3 SV= 1
  misc_feature (74)..(75): Xaa can be any naturally occurring amino acid
  misc_feature (219)..(219): Xaa can be any naturally occurring amino acid
  misc_feature (237)..(237): Xaa can be any naturally occurring amino acid
  misc_feature (281)..(281): Xaa can be any naturally occurring amino acid
  misc_feature (307)..(307): Xaa can be any naturally occurring amino acid
  misc_feature (327)..(327): Xaa can be any naturally occurring amino acid
  misc_feature (357)..(357): Xaa can be any naturally occurring amino acid
  misc_feature (376)..(376): Xaa can be any naturally occurring amino acid

SEQ ID NO: 57352 - protein, 377 aa, Marinospirillum alkaliphilum
  misc_feature (1)..(377): tr|A0A1K1VZJ2|A0A1K1VZJ2_9GAMM Queuine tRNA-ribosyltran sferase OS=Marinospirillum alkaliphilum DSM 21637 OX=11 22209 GN=tgt PE=3 SV=1
MRSECFMQFDLLKTDGKARRGRISFPRGTIETPAFMPVGTYGTVKGILPRDVEDLGAEIVLGNTFHLMLKPGTDVIEAHGDLHDFMQWQKPILTDSGGFQVFSLGDLRKITEQGVHFRSPHDGAKVFMGPEESMAVQRKLGSDIVMIFDECTPYPASFSEAETSMELSLRWAKRSRIAHADSPSALFGIIQGGMYPDLRKRSLEGLLEIGFDGMAIGGLSVGEPKEEMIKTLDYLPALMPTDKPRYLMGVGKPEDLVEAVRRGVDMFDCVMPTRNARNGHYFTAEGVVKIRNARYKADTGPIEEGCDCHACQNFSRSYLHHLDRSGEMLGAMLGTIHNLRHYQRLMAGLRQAIEAGKLTGFVDEFYSRRGLPTPELA

SEQ ID NO: 57353 - protein, 378 aa, Marinospirillum celere
  misc_feature (1)..(378): tr|A0A1I1IXP9|A0A1I1IXP9_9GAMM Queuine tRNA-ribosyltran sferase OS=Marinospirillum celere OX=1122252 GN=tgt PE= 3 SV=1
MRPEASMQFDLLATDGKARRGRITFPRGSIETPAFMPVGTYGTVKGVLPRDIEDLGAEIVLGNTFHLMLKPGTEIIKAHGDLHDFMQWQRPILTDSGGFQVFSLGKLRKITEQGVHFRSPHNGAKVFMGPEESIQVQKDLGSDIVMIFDECTPYPATFSEAEKSMELSLRWAKRSRLAHGDSPAALFGIIQGGMYPDLRKRSLEGLNEIGFDGMAIGGLSVGEPKEEMLKTLNYLPALMPENKPRYLMGVGKPEDLVEGVRRGVDMFDCVMPTRNARNGHYFTAEGVVKIRNAKHKTAIGPIEEGCDCYACQHFSRAYLHHLDRSGEMLGAMLGTLHNLRHYQRLMASLRQAIEAGKLSSFVDDFYARRGQTTPPLGE

SEQ ID NO: 57354 - protein, 375 aa, Marinosulfonomonas sp.
  misc_feature (1)..(375): tr|A0A0P8Z0Y8|A0A0P8Z0Y8_9RHOB Queuine tRNA-ribosyltran sferase OS=Marinosulfonomonas sp. PRT-SC04 OX=1527300 G N=tgt PE=3 SV=1
MKKFSFDLAATDGKARTGTIRTPRGDIRTPAFMPVGTAATVKAMLPENVAATGADILLGNTYHLMLRPTAERIANLGGLHKFMNWERPILTDSGGFQVMSLSDLRKMSENGVTFKSHIDGSLHEITPERSMEIQQLLGSDIVMCFDECTPHPAPEDVALKSMQMSMRWAKRSRDAFGDRPGHALFGIQQGSVFQDQREESAKALTDIGFEGYAVGGLAVGEGQQVMFEVLDYATDMLPCDKPRYLMGVGKPDDLVGGGKRGIDMFDCVLPSRSGRTGQVFTRNGVLNIKNARHRDDPRPLDENCSCPACKNYSRAYLHHVFRSQEIIASMLMTWHNLHYYQELMATMRAAIAAGKFNDFEIAFHAQRAEGDIEPI

SEQ ID NO: 57355 - protein, 375 aa, Marinosulfonomonas sp.
  misc_feature (1)..(375): tr|A0A2G2B542|A0A2G2B542_9RHOB Queuine tRNA-ribosyltran sferase OS=Marinosulfonomonas sp. OX=2030815 GN=tgt PE= 3 SV=1
  misc_feature (170)..(170): Xaa can be any naturally occurring amino acid
  misc_feature (172)..(172): Xaa can be any naturally occurring amino acid
  misc_feature (192)..(192): Xaa can be any naturally occurring amino acid
  misc_feature (194)..(195): Xaa can be any naturally occurring amino acid
  misc_feature (265)..(265): Xaa can be any naturally occurring amino acid
MTQFSFDLAATDGKARTGTIHTPRGDIRTPAFMPVGTAATVKAMLPENVRATGADILLGNTYHLMLRPTAERIANLGGLHKFMNWQRPILTDSGGFQVMSLSDLRKMSENGVTFKSHIDGSEHEITPERSMEIQRLLGSDIVMCFDECTPHPSPEDVALKSMQMSMRWAXRXREAFGDRPGHALFGIQQGSXFXXQREESAAALTDIGFEGYAVGGLAVGEGQEVMFEVLDYAPDMLPTDKPRYLMGVGKPDDLVGAVKRGIDMXDCVLPSRSGRTGQIFTRNGVLNIKNARHRDDPRPLDEDCSCPACKNYSRAYLHHVFKAQEIISSMLMTWHNLHYYQELMAGMRCAIAAGAFANFEARFHAMRAGGDIEPI

SEQ ID NO: 57356 - protein, 404 aa, Marinovum algicola
  misc_feature (1)..(404): tr|A0A0H4KXH2|A0A0H4KXH2_9RHOB Queuine tRNA-ribosyltran sferase OS=Marinovum algicola DG 898 OX=988812 GN=tgt P E=3 SV=1
MHGLQAKAEPARVKSALSTNAVKPGKSGRMTQTSFTLHASDGRARTGVISTPRGEIRTPAFMPVGTAATVKAMLPESVRETGADILLGNTYHLMLRPTAERIDRLGGLHDFMNWQRPILTDSGGFQVMSLASLRKLTEQGVSFKSHIDGSKHMLSPERSMEIQRLLGSDIVMCFDECPALPADRDRIAESMELSMRWAARSKAAFGDRPGHMLFGIQQGGLEQDLRQHSAEALREIGFDGYAIGGLAVGEGQEAMFGCLDFAPGQLPEDRPRYLMGVGKPDDIVGAVARGVDMMDCVLPSRSGRTGQVFTRLGQLNIKNARHQDDPRPLDEDCGCPTCRNYSRAYLHHVFRSQEIISSMLLTWHNLHYYQELMDGMRTAIAKGGFAQWASEFHAQRAQGDIDPL

SEQ ID NO: 57357 - protein, 376 aa, Marinovum sp.
  misc_feature (1)..(376): tr|A0A2E4R1T0|A0A2E4R1T0_9RHOB Queuine tRNA-ribosyltran sferase OS=Marinovum sp. OX=2024839 GN=tgt PE=3 SV=1
  misc_feature (27)..(27): Xaa can be any naturally occurring amino acid
  misc_feature (52)..(52): Xaa can be any naturally occurring amino acid
MTDRFSYSVAASDGKARTGKISTPRGXIRTPAFMPVGTAATVKAMMPESVAXTGADILLGNTYHLMLRPGAERVDALGGLHNFMNWQRPILTDSGGFQVMSLAGLRKLTERGVTFKSHVDGSKHEITPERSMDIQRLLGSDIVMCFDECTPFPADEKTALDSMQLSMRWAARSKEAFGDRPGHALFGIQQGSVFPEQRAESAEALKAIGFDGYAVGGLAVGEGQEAMFSVLDYAPDMLPQDKPRYLMGVGKPDDIVGAVKRGIDMMDCVLPSRSGRTGQAFTRQGVVNIKNARHQDDPRPLDSACSCPACKNYSRAYLHHVFRSQEMISGMLLTWHNLQYYQDLMADMRAAIAAGRFASFEAEFHAQRAAGDIAPL

SEQ ID NO: 57358 - protein, 376 aa, Marinovum sp.
  misc_feature (1)..(376): tr|A0A2D5IG55|A0A2D5IG55_9RHOB Queuine tRNA-ribosyltran sferase OS=Marinovum sp. OX=2024839 GN=tgt PE=3 SV=1
MSKNFSFSLNATDGKARSGLISTPRGDIRTPAFMPVGTAATVKAMLPESVGATGADVLLGNTYHLMLRPGAERIDALGGLHKFMNWDRPILTDSGGFQVMSLSGLRKMTESGVTFKSHIDGSQHVLSPERSMEIQRLLGSDIVMAFDECTPFPADPDTSLQSMQLSMRWAKRSRDGFGDRPGHALFGIQQGSIYQDQRAESAEALKSIGFDGYAVGGLAVGEGQETMFKVLEYAPDMLPSDKPRYLMGVGKPDDIVGAVKRGIDMMDCVLPSRSGRTGQVFTRRGVINIKNARHQNDPRPLDENCSCPACTGYSRAYLHHVFRAQEMISGMLLTWHNLHYFQELMQSMRDAIAMQKFAEFEQNFHAMRAAGDIEPL

SEQ ID NO: 57359 - protein, 374 aa, Mariprofundus aestuarium
  misc_feature (1)..(374): tr|A0A2K8L1A6|A0A2K8L1A6_9PROT Queuine tRNA-ribosyltran sferase OS=Mariprofundus aestuarium OX=1921086 GN=tgt P E=3 SV=1
MSSLSFEIVANDENGYARAGRMQLPHGLVETPVFMPVGTQATVKSLTPADLTDDIQASIILGNTYHLMLRPGADLVEKMGGLHKFMAWNRPILTDSGGFQVWSLGELRKIEAHGVRFRSHIDGREVFLGPKESMDIQRKLGSDIVMAFDECTPYPATFKEANDSMQLSMRWASECREHLPVNDTQALFGIVQGGMYPELRLESLKAISEIDFEGIAIGGLSVGEPKEEMMAMMDALAPHLPKEKPHYVMGVGTPDDLIEGIDRGIDMFDCVMPTRNARNGTLFTDDGKINIKNLKHAEDKRPIMESCNCYTCKNFSRAYLRHLYMAKEILSSRLNTLHNLHYYCDLMSRARNALVEGNWPEFRDNFLQRYRSEA

SEQ ID NO: 57360 - protein, 374 aa, Mariprofundus ferrinatatus
  misc_feature (1)..(374): tr|A0A2K8L9P7|A0A2K8L9P7_9PROT Queuine tRNA-ribosyltran sferase OS=Mariprofundus ferrinatatus OX=1921087 GN=tgt PE=3 SV=1
MSALSFKILARDANSYARAGRIELPHGVVETPVFMPVGTQATVKSLTPADLTDDIKASIILGNTYHLMLRPGADLVERLGGLHKFMAWERPILTDSGGFQVWSLGELRKIEEHGVRFRSHIDGREVFLGPKESMDIQRKLGSDIVMAFDECTPYPATWNEANDSMQLSMRWAAECREHLPVNDSQALFGIVQGGMYPELRLESLKAISAIDFEGIAIGGLSVGEPKKEMMAMMDALAPHLPEHKPHYVMGVGTPDDLIEGIDRGIDMFDCVMPTRNARNGTIFTDDGKINIKNLKHAEDERPIMEECNCYTCKHFSRAYLRHLYMSKEILSSRLNTLHNLHYYCHLMSRARNALIEGNWPEFRDNFLQRYRGEA

SEQ ID NO: 57361 - protein, 53 aa, Mariprofundus ferrooxydans
  misc_feature (1)..(53): tr|Q0EY74|Q0EY74_9PROT Queuine tRNA-ribosyltransferase OS=Mariprofundus ferrooxydans PV-1 OX=314345 GN=SPV1_05 307 PE=4 SV=1
MVNVNHQYRLFIDAGIVRHVNGKHQKLVRVACWLRHLGHTLYVEDEQGMQIQV

SEQ ID NO: 57362 - protein, 374 aa, Mariprofundus ferrooxydans
  misc_feature (1)..(374): tr|Q0EY73|Q0EY73_9PROT Queuine tRNA-ribosyltransferase OS=Mariprofundus ferrooxydans PV-1 OX=314345 GN=tgt PE= 3 SV=1
MSALSFEILATDANGYARRGRMQLAHGVVETPVFMPVGTQATVKSMTPADLTDDIKADIILGNTYHLMLRPGADLVEKMGGLHRFMGWERPILTDSGGFQVWSLGELRKIEEHGVRFRSHIDGAEVFLGPKESMEIQRKLGSDIVMAFDECTPYPATYAEAEESMQMSMRWAGECREHLPVNETQALFGIVQGGMYPELRIKSLQALSAIDFEGIAIGGLSVGEPKEEMMAMLDALAPHLPVDKPHYVMGVGTPDDLIEGIDRGIDMFDCVMPTRNARNGTLFTDDGKLNIKNLCHAEDPRPIMHDCDCYTCRNFSRAYLRHLYMAKEILSSRLNTLHNLHYYCTLMQRARDAIAEENWPAFRHQFLQRYRGKA

SEQ ID NO: 57363 - protein, 374 aa, Mariprofundus micogutta
  misc_feature (1)..(374): tr|A0A1L8CJS7|A0A1L8CJS7_9PROT Queuine tRNA-ribosyltran sferase OS=Mariprofundus micogutta OX=1921010 GN=tgt PE =3 SV=1
MAALSFEILAKDESGYARRGRMQLPHGIVETPVFMPVGTQATVKSLTPADLTDDINASIILGNTYHLMLRPGADLVEKMGGLHQFMAWERPILTDSGGFQVWSLGELRKIEQHGVRFRSHIDGREVFLGPKESMEIQRKLGSDIVMAFDECTPYPATLEEAEASMQLSMRWAGECREHLPAGDTQALFGIVQGGMYPELRLQSLEAIAAIDFEGIAIGGLSVGEPKQEMMGMMDALAPHLPEDKPHYVMGVGTPDDLIEGIDRGIDMFDCVMPSRNARNGTLFTDDGKINIKNLKHFDDERPIMESCNCYTCKHFSRSYLRHLYMAKEILSSRLNTLHNLHYYCDLMHRARTALEEGNWPQFRDQFLQRYRGEA

SEQ ID NO: 57364 - protein, 374 aa, Mariprofundus sp.
  misc_feature (1)..(374): tr|A0A498DLY0|A0A498DLY0_9PROT Queuine tRNA-ribosyltran sferase OS=Mariprofundus sp. EBB-1 OX=2650971 GN=tgt PE =3 SV=1
MSALSFEILAKDKTGYARRGRVTLPHGTVETPVFMPVGTQATVKSLTPADLTDDIEASIILGNTYHLMLRPGADLVEKMGGLHKFMAWDRPILTDSGGFQVWSLGELRKIEEHGVRFRSHIDGREVFLGPKESMEIQRQLGSDIVMAFDECTPYPATYEEANDSMQMSMRWAGECREALPVNDTQALFGIVQGGMYPELRLESLKAVADIDFEGIAIGGLSVGEPKEEMMAMLDALAPHLPEDKPHYVMGVGTPADLIEGIDRGIDMFDCVMPSRNARNGTLFTDDGKINIKNLKHFDDKRPIMDDCSCYTCKNFSRAYLRHLFMAKEILSSRLNTLHNLHYYCDLMKRARTALEQGNWPEFKKQFLQRYHSNA

SEQ ID NO: 57365 - protein, 370 aa, Marisediminitalea aggregata
  misc_feature (1)..(370): tr|A0A1M5GX29|A0A1M5GX29_9ALTE Queuine tRNA-ribosyltran sferase OS=Marisediminitalea aggregata OX=634436 GN=tgt PE=3 SV=1
MQFELLHTDGKARRGRLVFERGVVETPAFMPVGTYGTVKGMTPEELEDSGAHICLGNTFHLMLRPGTGIIKQHGDLHDFMHWDKPILTDSGGFQVFSLGDLRKITEEGVTFRSPINGEKILLTPEKSMEVQRDLGSDIVMIFDECTPYPATEQEARISMELSLRWAKRSKDAHGDNPSALFGIIQGGMYEDLRDVSLAGLEDIGFDGYAIGGLSVGEPKDDMIRIINHTAPKIPENKPRYLMGVGKPEDIVEAVRRGIDMFDCVMPTRNARNGHLFVTEGVIKIRNAKHKHDTGPLDENCDCYTCKNYSRSYLHHLDKCNEILGARLNTIHNLRYYQRVMQGLRDAIANDALDAFVEEFYAQKNMPVPAL

SEQ ID NO: 57366 - protein, 376 aa, Marispirochaeta aestuarii
  misc_feature (1)..(376): tr|A0A1Y1S2Q7|A0A1Y1S2Q7_9SPIO Queuine tRNA-ribosyltran sferase OS=Marispirochaeta aestuarii OX=1963862 GN=tgt PE=3 SV=1
MSIKFTVTERDGTSLARNGILELAHGSMETPAFMPVGTNGSVKAISHQKLEEMGVPLILGNTYHLYLRPGTEVIDAYGGLHQFSSWKGNILTDSGGFQVFSLATFRKITEEGVRFRSHIDGSYHELTPEKVVGIQNSLNSDIAMVLDVCTPPDIEYREALKALEITTAWAKRSLKEWQLHDPAPGRALFPILQGNFYKDLRQRSAEELLPLDFPGVAVGGLSVGEPFPLFLEMLHHTGELLPPEKPHYLMGIGTPEYILAAVENGIDLFDCVFPTRIARNGSVFTPRGVMALKNARFEKDTGPIDSECDCTACRRYSRAYIRHLFKAKEILGPMLATEHNIHFLMRMTRNIRTAIRNSAFREYKEAFLDEYRGKHT

SEQ ID NO: 57367 - protein, 376 aa, Maritalea mobilis
  misc_feature (1)..(376): tr|A0A4R6VQG4|A0A4R6VQG4_9RHIZ Queuine tRNA-ribosyltran sferase OS=Maritalea mobilis OX=483324 GN=tgt PE=3 SV=1
MTQDFAFELKSKSNGARLGEISTPRGEIRTPAFMPVGTAATVKGMYPDQVRELGADIILGNTYHLMLRPGAERVAHLGGLHKFANWSRPILTDSGGFQVMSLAKLRKLDEHGVSFKSHIDGSKHMLTPERSIEIQTLLGADIQMQLDECVALPSTREDIQRAMELSVRWAERSKNAFGTQPGRALFGIVQGGDQEDLRLRSAQALTEIGFKGYAVGGLAVGEPQETMFEVLDYTTPALPQDRPRYLMGVGKPDDLLGAVKRGIDMFDCVHPTRAGRHGHAYTKYGVINLKNARHKDDARPLDETSSNPNCQIYQRAYLHHLIRANEMLGAMILSQINLAYYQTLMQGMRDAIAEDRFDDFAAETREGWAKGDIPPL

SEQ ID NO: 57368 - protein, 377 aa, Maritalea myrionectae
  misc_feature (1)..(377): tr|A0A2R4MFK7|A0A2R4MFK7_9RHIZ Queuine tRNA-ribosyltran sferase OS=Maritalea myrionectae OX=454601 GN=tgt PE=3 SV=1
MTTDFAFEFKSESNGARLGEISTPRGEIRTPAFMPVGTAATVKGMYPDQVRETGADIILGNTYHLMLRPGAERVAHLGGLHKFANWSRPILTDSGGFQVMSLAKLRKLDEKGVSFKSHIDGSKHMLTPERSIEIQTLLGADIQMQLDECVALPSTREDIQRAMELSIRWAERSKNAFGTQPGRALFGIVQGGDQEDLRLRSAQALTEIGFKGYAVGGLAVGEPQETMFEVLDYTTPALPQDRPRYLMGVGKPDDLLGAVKRGIDMFDCVHPTRAGRHGHAYTKYGVINLKNARHKDDARPLDETSSNPNCQIYQRAYLHHLIRANEMLGAMILSQINLAYYQTLMQGMRDAIAADRFDDFAAETREGWAKGDIPPLS

SEQ ID NO: 57369 - protein, 380 aa, Maritimibacter alkaliphilus
  misc_feature (1)..(380): tr|A3VDX4|A3VDX4_9RHOB Queuine tRNA-ribosyltransferase OS=Maritimibacter alkaliphilus HTCC2654 OX=314271 GN=tg t PE=3 SV=1
MSAAMTERFSYSLNATDGKARTGVISTPRGEIRTPAFMPVGTAATVKAMLPESVAATGADILLGNTYHLMLRPGAERVERLGGLHRFMNWDKPILTDSGGFQVMSLAELRKLTEEGVTFRSHVDGSKHVLSPETSMEIQRQLGSDIVMCFDECPALPADETTVAQSMRLSMRWAQRSRDAFGDRPGHALFGIQQGGVTEDLRGESAEALTAIGFDGYAIGGLAVGEGQEAMFGVLDYAPGMLPEDKPRYLMGVGKPDDIVGAVKRGVDMMDCVLPSRSGRTGQAWTRRGQVNIKNARHADDPRPLDEACACPACTGYSRAYLHHVFRAGEMISGMLLTWHNLHYYQELMSHMRAAIAEGRFTAFEAQFHALRAEGDIDPL

SEQ ID NO: 57370 - protein, 376 aa, Maritimibacter sp.
  misc_feature (1)..(376): tr|A0A1X7MWE9|A0A1X7MWE9_9RHOB Queuine tRNA-ribosyltran sferase OS=Maritimibacter sp. HL-12 OX=1162418 GN=tgt P E=3 SV=1
MPDRFSFALHATDGKARTGVISTPRGQIRTPAFMPVGTAATVKAMMPESVAATGADILLGNTYHLMLRPGAERIDRLGGLHRFMNWSGPILTDSGGFQVMSLAELRKLTEEGVTFRSHVDGSRHSLTPERSMEIQKLLGSDIVMCFDECPALPADEAVVARSMRLSMRWAERSKAAFGDRPGHALFGIQQGGVTPELRAESAEKLKEIGFDGYAIGGLAVGEGQEAMFGVLDVAPDMLPEDRPRYLMGVGKPDDIVGAVKRGVDMMDCVLPTRSGRTGQAWTRRGPVAIKNARHADDPRPLDEECACPACRSYSRAYLHHVFRSGEIISSMLLTWHNLQYYQDLMAGMRAAIAAGEFATFEAEFHALRAEGDIERL

SEQ ID NO: 57371 - protein, 371 aa, Maritimibacter sp.
  misc_feature (1)..(371): tr|A0A3D0G220|A0A3D0G220_9RHOB Queuine tRNA-ribosyltran sferase (Fragment) OS=Maritimibacter sp. OX=2003363 GN= DEO85_00605 PE=3 SV=1
MTQRFSFSLDATDGKARTGVISTPRGEIRTPAFMPVGTAATVKAMMPESVAATGADILLGNTYHLMLRPGADRVERLGGLHRFMNWAGPILTDSGGFQVMSLAELRRLTEEGVTFRSHVDGSRHMLSPESSMEIQKKLGSDIVMCFDECPALPAEHKRIADSMRLSMRWAQRSRDAFGDRPGHALFGIQQGGDVEELRGESAEALKAIEFDGYAIGGLAVGEGQEVMFKVLDYAPGMLPIDKPRYLMGVGKPDDIVGAVKRGVDMMDCVLPSRSGRTGQVWTRRGQVNIKNARHADDPRPLDESCRCPACSNYSRAYLHHVFRSGEIISSMLLTWHNLHYYQELMGEMRAAIAEGTFDAFAARFHALRAEG

SEQ ID NO: 57372 - protein, 376 aa, Marivirga sericea
  misc_feature (1)..(376): tr|A0A1X7ILP6|A0A1X7ILP6_9BACT Queuine tRNA-ribosyltran sferase OS=Marivirga sericea OX=1028 GN=tgt PE=3 SV=1
MQFTISNKDKNSNARAGELTTAHGNIKTPIFMPVGTAGSVKAVHQRELKDDIQAQIILGNTYHLYLRPGLDILQKAGGLHKFNGWDKPILTDSGGYQVYSLSGTRKIKEEGVTFKSHIDGSKHIFSPEGVMDIQRKIGADIIMAFDECTPYPCDYEYARKSMDMTHRWLDRCIAQFDSTEGNYGYEQTLFPIVQGSTYKDLRKRSAEEIASKGRSGNAIGGLSVGEPAEDMYEMTELVCDILPEDKPRYLMGVGTPANILECIALGVDMFDCVMPTRNARNGMLFTTEGIINIRNKKWEDDFSAIDPALGTYVDTFYTKAYLRHLMHSKEILGAQIASIHNLTFYLWLVEQAREQITSGTFYDWKQKMVKKLMTRL

SEQ ID NO: 57373 - protein, 376 aa, Marivirga tractuosa
  misc_feature (1)..(376): tr|E4TMM3|E4TMM3_MARTH Queuine tRNA-ribosyltransferase OS=Marivirga tractuosa (strain ATCC 23168 / DSM 4126 / NBRC 15989 / NCIMB 1408 / VKM B-1430 / H-43) OX=643867 GN=tgt PE=3 SV=1
MQFTISNKDQNSNARAGELTTAHGNIKTPIFMPVGTAGSVKAVHQRELKEDIQAQIILGNTYHLYLRPGLEVLQKAGGLHKFNGWDKPILTDSGGYQVYSLSGTRKIKEEGVTFKSHIDGSSHIFSPEGVMDIQRKIGADIIMAFDECTPYPCDYEYARKSMDMTHRWLDRCIKQFDKTEGHYGYDQSLFPIVQGSTYKDLRKRSAEEIASKGREGNAIGGLSVGEPAEDMYEMTELVCDILPQDKPRYLMGVGTPANILECIALGVDMFDCVMPTRNARNGMLFTTEGIINIRNKKWEDDFSPIDPALGSYVDTFYTKAYLRHLIHSKEILGAQIASIHNLTFYLWLVEQAREQITSGTFYEWKEKMVKKLMTRL

SEQ ID NO: 57374 - protein, 376 aa, Marivita cryptomonadis
  misc_feature (1)..(376): tr|A0A1X4NX53|A0A1X4NX53_9RHOB Queuine tRNA-ribosyltran sferase OS=Marivita cryptomonadis OX=505252 GN=tgt PE=3 SV=1
MTVSSSFALHATDGLARTGAITTPRGTIRTPAFMPVGTAATVKAMMPESVAATGADILLGNTYHLMLRPTAERIDRLGGLHRFMNWNKPILTDSGGFQVMSLADLRKLTEKGVTFKSHIDGSKHELTPERSMEIQRLLSSDIVMCFDECPALPADRDRIAESMRLSMRWAERSKEAFGDRPGHMLFGIQQGGLEQDFREESAEALKAIGFDGYAIGGLAVGEGQDAMFGCLDFAPSQLPVDRPRYLMGVGKPDDIVGAVKRGVDMMDCVLPSRSGRTGQAWTRRGQVNIKNARHQDDPRPLDEECTCPACRNYSRAYLHHVFRAQEMISGMLLTWHNLHYYQELMQGMRDAIAGGQFAEFEARFHAQRASGDIEPL

SEQ ID NO: 57375 - protein, 376 aa, Marivita geojedonensis
  misc_feature (1)..(376): tr|A0A1X4NNG3|A0A1X4NNG3_9RHOB Queuine tRNA-ribosyltran sferase OS=Marivita geojedonensis OX=1123756 GN=tgt PE= 3 SV=1
MTVSSFFTLHATDGTARTGVIETPRGAIRTPAFMPVGTAATVKAMMPESVAATGADILLGNTYHLMLRPTAERIARLGGLHRFMNWSKPILTDSGGFQVMSLSDLRKLTEKGVTFKSHIDGSKHELTPERSMEIQRLLGSDIVMCFDECPALPADRDRIAESMRLSMRWAERSKDAFGDRPGHMLFGIQQGGLEQDFREESAEALKAIGFDGYAVGGLAVGEGQAAMFQCLDFAPGQLPQDKPRYLMGVGKPDDIVGAVRRGIDMMDCVLPSRSGRTGQAWTRRGQVNIKNARHQDDPRPLDENCTCPACRNYSRAYLHHVFRAQEMISGMLLTWHNLHYYQELMQAMRDAISSGTFAAFEAQFHALRAEGDIEPV

SEQ ID NO: 57376 - protein, 375 aa, Marivita hallyeonensis
  misc_feature (1)..(375): tr|A0A1M5RDU7|A0A1M5RDU7_9RHOB Queuine tRNA-ribosyltran sferase OS=Marivita hallyeonensis OX=996342 GN=tgt PE=3 SV=1
MTKTSFTLQATDGLARTGRIDTPRGTIRTPAFMPVGTAATVKAMMPESVAATGADILLGNTYHLMLRPTAERIDRLGGLHRFMNWDKPILTDSGGFQVMSLADLRKLTEKGVTFKSHIDGSKHELTPERSMDIQRLLGSDIVMCFDECPALPADRDRIAESMRLSMRWAQRSRDAFGDRPGYMLFGIQQGGLEEDLRAESAEALRAIGFDGYAVGGLAVGEGQEAMFGCLEYAPGQLPEDKPRYLMGVGKPDDIVGAVKRGIDMMDCVLPSRSGRTGQAWTRRGQVNIKNARHQDDPRPLDEDCTCPACRNYSRAYLHHVFRAQEMISGMLLTWHNLHYYQELMQGMREAIAAGQFAAFEADFHALRAEGDIASF

SEQ ID NO: 57377 - protein, 376 aa, Marivita sp.
  misc_feature (1)..(376): tr|A0A316KP47|A0A316KP47_9RHOB Queuine tRNA-ribosyltran sferase OS=Marivita sp. XM-24bin2 OX=2133951 GN=tgt PE= 3 SV=1
MTVFSSFALHATDGTARTGAITTPRGTIRTPAFMPVGTAATVKAMMPESVAATGADILLGNTYHLMLRPTAERIARLGGLHKFMNWDKPILTDSGGFQVMSLADLRKLTEKGVTFKSHIDGSRHELTPERSMEIQRLLGSDIVMCFDECPALPADRDRIAESMRLSMRWAERSKEAFGDRPGHMLFGIQQGGLEQDFREESAQALRAIGFDGYAIGGLAVGEGQEAMFDCLDFAPNQLPEDKPRYLMGVGKPDDIVGAVKRGVDMMDCVLPSRSGRTGQAWTRRGQVNIKNARHQDDPRPLDEECTCPACRNYSRAYLHHVFRAQEMISGMLLTWHNLHYYQELMQAMRDAIAAGTFAAFEADFHAKRAEGDIPPI

SEQ ID NO: 57378 - protein, 375 aa, Marivivens niveibacter
  misc_feature (1)..(375): tr|A0A251WUR4|A0A251WUR4_9RHOB Queuine tRNA-ribosyltran sferase OS=Marivivens niveibacter OX=1930667 GN=tgt PE= 3 SV=1
MTRFSFDLHNTDGKARTGVIHTPRGDIRTPAFMPVGTAATVKAMMPESVAATGADILLGNTYHLMLRPTAERVDRMGGLHKFMNWDKPILTDSGGFQVMSLADLRKLTEDGVTFKSHVDGSKHFLSPERSMEIQKLLGSDIVMCFDECPALPADEQTVAESMRLSMRWAQRSRDAFGDRPGHALFGIMQGGVTPHLREESAKALVDIGFEGYAIGGLAVGEGQEAMFGVLEYAPDFLPTDKPRYLMGVGKPDDIVGAVKRGVDMMDCVLPSRSGRTGQAWTHRGQVNIKNARHQDDPRPLDENCTCPCCRNYSRAYLHHVFRAKEMISGMLLTWHNLHYYQEIMAGMRGAIAKGEFAAWEADFHAKRAMGDIEPV

SEQ ID NO: 57379 - protein, 376 aa, Marixanthomonas ophiurae
  misc_feature (1)..(376): tr|A0A3E1Q626|A0A3E1Q626_9FLAO Queuine tRNA-ribosyltran sferase OS=Marixanthomonas ophiurae OX=387659 GN=tgt PE =3 SV=1
MQFNLEKTDPESQARAGTITLDHGPVETPIFMPVGTVGTVKGVHQRELSQDINPDIILGNTYHLYLRPQTDILEKAGGIHKFMNWDRNILTDSGGYQVYSLSANRKIKEEGVKFKSHIDGSMHFFTPENVMEIQRTIGADIIMAFDECTPYPCDYKYAKRSMHMTHRWLDRCISHLEKTPLKYDYNQTFFPIVQGSTYKDLRKQSAEYIASVGAAGNAIGGLSVGEPAEEMYAMTEVVTDILPEDKPRYLMGVGTPINLLENIALGIDMFDCVMPTRNGRNGMLFTAHGSINIKNKKWEDDFSPIDDMDITWVDTAYSKAYVRHLFKVKELLGMQIATIHNLGFYLWLVREARKHILAGDFTSWKNKMVKQMDKRL

SEQ ID NO: 57380 - protein, 376 aa, Marixanthomonas sp.
  misc_feature (1)..(376): tr|A0A2U0I5K5|A0A2U0I5K5_9FLAO Queuine tRNA-ribosyltran sferase OS=Marixanthomonas sp. HN-E44 OX=2174845 GN=tgt PE=3 SV=1
MQFKLENTDPESQARAGTITLDHGPVETPIFMPVGTVGSVKGVHQRELSNDINPDIILGNTYHLYLRPQTTVLEKAGGLHKFMNWDRNILTDSGGYQVYSLSANRKIKEEGVKFKSHIDGSMHFFTPENVMEIQRTIGADIIMAFDECTPYPCDYNYAKRSMHMTHRWLDRCVAHLGKTPLKYDYNQTLFPIVQGSTYKDLRKQSAEYIASVGAAGNAIGGLSVGEPAEEMYAMTEVVTEILPKDKPRYLMGVGTPINLLENIALGIDMFDCVMPTRNGRNGMLFTAHGTINIKNKKWETDFSPIDEMDITWVDTAYSKAYVRHLFKVKELLGMQIATIHNLGFYLWLVREARKHILAGDFTSWKNKMVKQMDKRL

SEQ ID NO: 57381 - protein, 377 aa, Martelella endophytica
  misc_feature (1)..(377): tr|A0A0D5LT19|A0A0D5LT19_9RHIZ Queuine tRNA-ribosyltran sferase OS=Martelella endophytica OX=1486262 GN=tgt PE= 3 SV=1
MSEDFRFTLKNTDGNARLGEISMPRGVIRTPAFMPVGTAGTVKAMYLDQVRDLGADIILGNTYHLMLRPGAERVARLGGLHSLIRWPHPILTDSGGFQVMSLAALREIDERKGVTFKSHIDGSVHHMSPERSIEIQGLLGSDIQMQLDECVRLPAERPEIEKSTEMSLAWAERCRVAFGDQPGKAMFGIVQGGDIPDLRVRSARGLADLDLKGYAVGGLAVGEPQAVMLDMLEITLPELPTQKPRYLMGVGTPDDILKSVARGIDMFDCVMPTRAGRHGLAFTRRGKVNLRNARHAEDLRPLDEESICPATRDYSRAYLHHLVRANESLAGMLLTWNNLHYYQQLMQGIRAAIAEGRYEDFMAETQEGWARGDVPAL

SEQ ID NO: 57382 - protein, 377 aa, Martelella mediterranea
  misc_feature (1)..(377): tr|A0A1U9Z3L0|A0A1U9Z3L0_9RHIZ Queuine tRNA-ribosyltran sferase OS=Martelella mediterranea DSM 17316 OX=1122214 GN=tgt PE=3 SV=1
MSEDFRFTLKATDGNARLGAITMPRGEIRTPAFMPVGTAGTVKAMYLDQVRDLGADIILGNTYHLMLRPGAERVARLGGLHSLIRWPHPILTDSGGFQVMSLAALREIDENNGVTFKSHIDGSVHHMSPERSIEIQGLLGSDIQMQLDECVRLPAERAEIEKSTEMSLAWAERCREAFGDQPGKAMFGIVQGGDIPDLRIRSARGLADLDLKGYAVGGLAVGEPQDVMLAMLETTLPELPAEKPRYLMGVGTPDDILKSVARGIDMFDCVMPTRAGRHGLAFTRRGKVNLRNARHAEDLRPLDEESDCPATRDYSRAYLHHLVRSNESLGGMLLTWNNLHYYQQLMQGIRKAIAEGRYDDFVAETQEGWARGDVAAI

SEQ ID NO: 57383 - protein, 377 aa, Martelella mediterranea
  misc_feature (1)..(377): tr|A0A4R3NT22|A0A4R3NT22_9RHIZ Queuine tRNA-ribosyltran sferase OS=Martelella mediterranea OX=293089 GN=tgt PE= 3 SV=1
MNDKFQFTLKNTSDKARLGEITMPRGVIRTPAFMPVGTAGTVKAMYLDQVRELGADIILGNTYHLMLRPGAERVARLGGLHALIRWPYPILTDSGGFQVMSLAALRQIDEKKGVTFKSHIDGSVHHMSPERSIEIQGLLGSDIQMQLDECVRLPAERQEIERAMEMSLRWAERCREAFGEQPGKAMFGIVQGGDIPDLRVRSAEGLAALDLKGYAVGGLAVGEPQAVMLDMLNVTLPVLPKEKPRYLMGVGTPDDILKSVACGIDMFDCVMPTRAGRHGLAFTRRGKVNLRNARHAEDLRPLDEESECPATRDYSRAYLHHLVRANESLAGMLLTWNNLHYYQDLMKGIRASIAEGRFADFMAETQDIWARGDLDPV

SEQ ID NO: 57384 - protein, 377 aa, Martelella sp.
  misc_feature (1)..(377): tr|A0A127CIE3|A0A127CIE3_9RHIZ Queuine tRNA-ribosyltran sferase OS=Martelella sp. AD-3 OX=686597 GN=tgt PE=3 SV =1
MSQEFQFTLKTTDGNARLGAITMPRGEIRTPAFMPVGTAGTVKAMYLDQVRDLGADIILGNTYHLMLRPGAERVARLGGLHSLIRWKYPILTDSGGFQVMSLAALRQIDEKKGVTFKSHIDGSVHHMSPERSIKIQGLLGSDIQMQLDECVRLPAERAEIEKSTEMSLRWAERCREAFGDQPGKAMFGIVQGGDIPDLRVRSARGLADLDLKGYAVGGLAVGEPQEVMLAMLETTLPELPTTKPRYLMGVGTPDDILKSVARGIDMFDCVMPTRAGRHGLAFTRRGKVNLRNARHAEDLRPLDEESNCPAARDYSRAYLHHLVRANESLAGMLLTWNNLHYYQSLMQGIRAAIAESRFAAFMAETQEGWARGDIAPV

SEQ ID NO: 57385 - protein, 377 aa, Martelella sp.
  misc_feature (1)..(377): tr|A0A2E1BEX0|A0A2E1BEX0_9RHIZ Queuine tRNA-ribosyltran sferase OS=Martelella sp. OX=1969699 GN=tgt PE=3 SV=1
MSEDFRFTLKATDGNARLGAITMPRGEIRTPAFMPVGTAGTVKAMYLDQVRDLGADIILGNTYHLMLRPGAERVARLGGLHSLIRWPHPILTDSGGFQVMSLAALREIDEKKGVTFKSHIDGSVHHMSPERSIEIQGLLGSDIQMQLDECVRLPADRPEIEKSTEMSLAWAERCRIAFGDQPGKAMFGIVQGGDIPDLRVRSARGLADLDLKGYAVGGLAVGEPQDVMLAMLETTLPELPAEKPRYLMGVGTPDDILKSVARGIDMFDCVMPTRAGRHGLAFTRRGKVNLRNARHAEDLRPLDEESDCPATRDYSRAYLHHLVRSNESLGGMLLTWNNLHYYQQLMQGIRKAIAEGRYDDFVAETQEGWARGDVAAI

SEQ ID NO: 57386 - protein, 380 aa, Marvinbryantia formatexigens
  misc_feature (1)..(380): tr|C6LEM5|C6LEM5_9FIRM Queuine tRNA-ribosyltransferase OS=Marvinbryantia formatexigens DSM 14469 OX=478749 GN= tgt PE=3 SV=1
MRKRMYQIKKTEGRAKRAELVTVHGTIQTPVFMNVGTAAAVKGAVSTMDLKEIGTQVELSNTYHLHVRPGDDVIRQLGGLHKFMVWDRPILTDSGGFQVFSLAGLRKIKEEGVYFQSHVDGRKIFMGPEESMQIQSNLASTIAMAFDECPSSRATREYVQASVDRTTRWLARCKAEMARLNSLPDTINRQQLLFGINQGAVYEDIRIAHADAISEMDLDGYAVGGLAVGETHEEMYHILDEVVPHLPQNKPTYLMGVGTPANILEAVERGVDFFDCVYPSRNGRHGHVYTAHGKLNLFNEKYKLDERPIEEGCGCPACRHYSRAYIRHLLKAKEMLGMRLCVLHNLYFYNHLMEEIRDALDEGRFSEYKAEKLAGFEKMT

SEQ ID NO: 57387 - protein, 379 aa, Massilia albidiflava
  misc_feature (1)..(379): tr|A0A411X797|A0A411X797_9BURK Queuine tRNA-ribosyltran sferase OS=Massilia albidiflava OX=321983 GN=tgt PE=3 S V=1
MLEFKLIKTDTTGLTKARRGTLKLNHGVVQTPIFMPVGTYGSVKAMSPLELKEIGAQIILGNTFHLWLRPGNAVMGKFGGLHKFMGWDKPILTDSGGFQVFSLGEMRKITEEGVHFNSPINGDKLFLSPEISMQIQRVLNSDIVMQFDECTPYEIDGRPATLEEAAKSMRMSLRWAQRSMNEFKAGENPNALFGIVQGGMFESLRDESLAGLEEIDFPGLAIGGLSVGEPKEDMMRVLEHIGPRLPANKPHYLMGVGTPEDLVAGVSNGVDMFDCVMPTRNARNGWIFTRFGDIKIKNARYKEDTEPFDATCSCYACRNFSRAYLHHLHRAQEILGARLNTIHNLHFYLDIMQQMRDALDEDRFPEWVKQFHADRARGV

SEQ ID NO: 57388 - protein, 379 aa, Massilia armeniaca
  misc_feature (1)..(379): tr|A0A2R4C5E3|A0A2R4C5E3_9BURK Queuine tRNA-ribosyltran sferase OS=Massilia armeniaca OX=2072590 GN=tgt PE=3 SV =1
MLEFKLHKTDTTGLTKARRGTLKLNHGTVETPIFMPVGTYGSVKAMSPLELKEIGAQIILGNTFHLWLRPGNDVMSKFGGLHGFMGWDKPILTDSGGFQVFSLGEMRKITEEGVHFNSPINGDKLFLSPEISMQIQRVLNSDIVMQFDECTPYEINGRPATLDEAAKSMRMSLRWAQRSMNEFKAGENPNALFGIVQGGMFESLRDESLEGLEKIDFPGLAIGGLSVGEPKEDMLRVLEHVGPRLPANKPHYLMGVGTPEDLVAGVSNGVDMFDCVMPTRNARNGWIFTRFGDIKIKNARYKDDKEPLDPTCSCYACRNFSRAYLHHLHRAQEILGARLNTIHNLHYYLDIMRQMREALDEDRFPDWVKQFHADRARGI

SEQ ID NO: 57389 - protein, 379 aa, Massilia aurea
  misc_feature (1)..(379): tr|A0A422QJ98|A0A422QJ98_9BURK Queuine tRNA-ribosyltran sferase OS=Massilia aurea OX=373040 GN=tgt PE=3 SV=1
MLEFTLLKKDTSGLSHARRGRLKLNHGTIETPIFMPVGTYGSVKAMDPVELKEVGSQIILGNTFHLWLRPGVDVMNKFGGLHQFMGWDKPILTDSGGFQVFSLGAMRKITEEGVKFASPIDGSKLFLSPEISMQIQRALNSDIVMQFDECTPYEIDGRPATAEEAAKSMRMSLRWAQRSMNEFTGGENPNALFGIVQGGMYEHLRDESLAGLEDINFPGLAIGGLSVGEPKEDMKRILAHVGPRLPENKPHYLMGVGTPEDLVDGVANGVDMFDCVMPTRNARNGWLFTRFGDVKIKNARYKDDQAPLDESCDCYCCKNFSRAYLHHLHRSNEILGARLNTIHNLHYYLKLMREMRDAIDADRFNEFRIEFNAGRARGV

SEQ ID NO: 57390 - protein, 379 aa, Massilia eurypsychrophila
  misc_feature (1)..(379): tr|A0A2G8TKE5|A0A2G8TKE5_9BURK Queuine tRNA-ribosyltran sferase OS=Massilia eurypsychrophila OX=1485217 GN=tgt PE=3 SV=1
MLEFTLLKTDTSGLSHARRGRLKLNHGTIETPIFMPVGTYGSVKAMDPDELVAVGSQIILGNTFHLWLRPGTEVLNKFGGLHGFMGWNGPILTDSGGFQVFSLGAMRKITEEGVKFASPIDGSKLFLSPEISMQIQRALNSDIVMQFDECTPYEIDGRPATSEEAAKSMRMSLRWAQRSMNEFSGGENPNALFGIVQGGMFENLRDESLAGLEEINFPGIAIGGLSVGEPKEDMMRMLAHVGPRLPANKPHYLMGVGTPEDLVAGVANGIDMFDCVMPTRNARNGWLFTRFGDVKIKNARYKEDMGPLDESCDCYCCKNFSRAYLHHLHRSKEILGARLNTIHNLHYYLKLMQEMRDAIDADGFHAFRLTFNEQRARGV

SEQ ID NO: 57391 - protein, 379 aa, Massilia flava
  misc_feature (1)..(379): tr|A0A562PCF2|A0A562PCF2_9BURK Queuine tRNA-ribosyltran sferase OS=Massilia flava OX=871742 GN=tgt PE=3 SV=1
MLEFKLIKTDTTGLTKARRGTLTLNHGVVQTPIFMPVGTYGSVKAMSPVELKEIGAQIILGNTFHLWLRPGNAVMGKFGGLHKFMGWDKPILTDSGGFQVFSLGEMRKITEEGVHFNSPINGDKLFLSPEISMQIQRVLNSDIVMQFDECTPYEIDGRPATVEEAAKSMRMSLRWAQRSMDEFKRGENPNALFGIVQGGMYESLRDESLAGLEEIDFPGLAIGGLSVGEPKEDMMRVLEHVGPRLPANKPHYLMGVGTPEDLVAGVSNGVDMFDCVMPTRNARNGWIFTRFGDIKIKNARYKDDQEPYDATCSCYACRNFSRAYLHHLHRAQEILGARLNTIHNLHYYLDIMQQMRDALDEDRFPEWVKQFHTDRARGV

SEQ ID NO: 57392 - protein, 379 aa, Massilia glaciei
  misc_feature (1)..(379): tr|A0A2U2HH90|A0A2U2HH90_9BURK Queuine tRNA-ribosyltran sferase OS=Massilia glaciei OX=1524097 GN=tgt PE=3 SV=1
MLDFKLLKTDTSGLSHARRGRLTLNHGVIETPIFMPVGTYGSVKAMSPLELKEIDAQIILGNTFHLWLRPGTDVLNKFGGLHKFMGWDKPILTDSGGFQVFSLGAMRKITEEGVKFSSPIDGSKLFLSPEISMQIQRALNSDIVMQFDECTPYEIEGRPATTEEAAKSMRMSLRWAQRSMNEFKAGGNPNALFGIVQGGMYEHLRDESLAGLEEIDFPGIAIGGLSVGEPKEDMMRMLAHVGPRLPANKPHYLMGVGTPEDLVAGVANGIDMFDCVMPTRNARNGWLFTRFGDVKIKNARYKDDQGPLDESCTCYACSNFSRAYLHHLHRSKEILGARLNTIHNLHYYLQLMKEVREAIDADDFHGFRLKFNAGRARGV

SEQ ID NO: 57393 - protein, 379 aa, Massilia lurida
  misc_feature (1)..(379): tr|A0A562QXE6|A0A562QXE6_9BURK Queuine tRNA-ribosyltran sferase OS=Massilia lurida OX=1036180 GN=tgt PE=3 SV=1
MLEFKLLKTDTTGLTKARRGTLQLNHGTVQTPIFMPVGTYGSVKAMSPVELKEIGAQIILGNTFHLWLRPGNTVMEKFGGLHKFMGWDKPILTDSGGFQVFSLGEMRKITEEGVHFNSPINGDKLFLSPEISMQIQRVLNSDIVMQFDECTPYEIDGRPATVEEAAKSMRMSLRWAQRSMDEFKRGENPNALFGIVQGGMFESLRDESLEGLEKIDFPGLAIGGLSVGEPKEDMMRVLEHIGPRLPANKPHYLMGVGTPEDLVAGVSNGVDMFDCVMPTRNARNGWIFTRFGDVKIKNARYKEDVEPLDATCTCYACRNFSRAYLHHLHRAQEILGARLNTIHNLHYYLDIMRQMREALDEDRFPDWVKQFHADRARGV

SEQ ID NO: 57394 - protein, 379 aa, Massilia lutea
  misc_feature (1)..(379): tr|A0A4P6KYR4|A0A4P6KYR4_9BURK Queuine tRNA-ribosyltran sferase OS=Massilia lutea OX=321985 GN=tgt PE=3 SV=1
MLEFKLIKTDTTGLTKARRGTLKLNHGVVQTPIFMPVGTYGSVKAMSPIELKEIGAQIILGNTFHLWLRPGNTVMAKFGGLHKFMGWDKPILTDSGGFQVFSLGEMRKITEDGVHFNSPINGDKLFLSPEISMQIQRVLNSDIVMQFDECTPYEINGRPATLEEAAKSMRMSLRWAQRSMNEFKGGENPNALFGIVQGGMFESLRDESLAGLEEIDFPGLAIGGLSVGEPKEDMMRVLEHIGPRLPANKPHYLMGVGTPEDLVAGVSNGVDMFDCVMPTRNARNGWIFTRFGDIKIKNARYKEDTEPFDSTCSCYACRNFSRAYLHHLHRAQEILGARLNTIHNLHYYLDIMQQMRDALDEDRFPAWVKQFHADRARGI

SEQ ID NO: 57395 - protein, 379 aa, Massilia namucuonensis
  misc_feature (1)..(379): tr|A0A1I7L9Q9|A0A1I7L9Q9_9BURK Queuine tRNA-ribosyltran sferase OS=Massilia namucuonensis OX=1035707 GN=tgt PE= 3 SV=1
MLEFKLIKNDTTGLTKARRGTVKLNHGEVQTPIFMPVGTYGSVKAMSPLELKEIGAQIILGNTFHLWLRPGNDVMSKFGGLHGFMGWDKPILTDSGGFQVFSLGEMRKITEEGVHFNSPINGDKLFLSPEISMQIQRVLNSDIVMQFDECTPYEIQGRPATVDEAAKSMRMSLRWAQRSMDEFNRGENPNALFGIVQGGMFENLRDESLAKLEEIDFPGLAIGGLSVGEPKEDMMRVLAHVGPRLPPNKPHYLMGVGTPEDLVAGVSNGVDMFDCVMPTRNARNGWIFTRFGDIKIKNARYKEDTQPLDESCGCYACRNFSRAYLHHLHRSQEILGARLNTIHNLHYYLDIMRQMREALDGDRFPAWVQQFHADRARGV

SEQ ID NO: 57396 - protein, 379 aa, Massilia oculi
  misc_feature (1)..(379): tr|A0A2S2DJW3|A0A2S2DJW3_9BURK Queuine tRNA-ribosyltran sferase OS=Massilia oculi OX=945844 GN=tgt PE=3 SV=1
MLEFTLLKKDTSGLSHARRGRLKLNHGTIETPIFMPVGTYGSVKAMSPVELKEVGSQIILGNTFHLWLRPGVDVMNKFGGLHGFMGWDKPILTDSGGFQVFSLGAMRKITEEGVKFASPIDGSRQFLSPEISMQIQRALNSDIVMQFDECTPYEIDGRPATAEEAAKSMRMSLRWAQRSMNEFTGGENPNALFGIVQGGMYEHLRDESLAGLEDIDFPGLAIGGLSVGEPKEDMKRILAHVGPRLPENKPHYLMGVGTPEDLVDGVANGVDMFDCVMPTRNARNGWLFTRFGDVKIKNARYKDDQAPLDESCDCYCCKNFSRAYLHHLHRSNEILGARLNTIHNLHYYLKLMQEMRDAIDADRFNEFRIAFNAGRARGV

SEQ ID NO: 57397 - protein, 379 aa, Massilia phosphatilytica
  misc_feature (1)..(379): tr|A0A2S8H0Q3|A0A2S8H0Q3_9BURK Queuine tRNA-ribosyltran sferase OS=Massilia phosphatilytica OX=2026176 GN=tgt P E=3 SV=1
MLEFTLLKKDTSGLSHARRGRLKLNHGTIETPIFMPVGTYGSVKAMAPNELKEVGSQIILGNTFHLWLRPGTDVMDKFGGLHGFMGWDKPILTDSGGFQVFSLGAMRKITEEGVKFASPIDGSRLFLSPEISMQIQRSLNSDIVMQFDECTPYEIDGRPATAEEAAKSMRMSLRWAQRSMNEFNKGENPNALFGIVQGGMYERLRDESLAGLEEIDFPGVAIGGLSVGEPKEDMLRVLQHVGPRLPENKPHYLMGVGTPEDLVEGVANGVDMFDCVMPTRNARNGWLFTRFGDLKIKNARYKDDQSPLDESCSCYCCKNFSRAYLHHLHRSKEILGARLNTIHNLHYYLNLMQEIRDAIDADRFHEFRLKFNADRARGV

SEQ ID NO: 57398 - protein, 379 aa, Massilia plicata
  misc_feature (1)..(379): tr|A0A4P7BI14|A0A4P7BI14_9BURK Queuine tRNA-ribosyltran sferase OS=Massilia plicata OX=321984 GN=tgt PE=3 SV=1
MLEFTLHKTDTTGLTKARRGTLKLNHGTVETPIFMPVGTYGSVKAMSPLELKEIGAQIILGNTFHLWLRPGNDVMSKFGGLHGFMGWDKPILTDSGGFQVFSLGEMRKITEEGVHFNSPINGDKLFLSPEISMQIQRVLNSDIVMQFDECTPYEINGRPATVDEAAKSMRMSLRWAQRSMDEFKAGENPNALFGIVQGGMFESLRDESLEGLEKIDFPGLAIGGLSVGEPKEDMMRMLEHVGPRLPPNKPHYLMGVGTPEDLVAGVSNGVDMFDCVMPTRNARNGWIFTRFGDIKIKNARYKDDKEPLDATCSCYACRNFSRAYLHHLHRAQEILGARLNTIHNLHYYLDIMRQMREALDEDRFPDWVKQFHADRARGV

SEQ ID NO: 57399 - protein, 379 aa, Massilia psychrophila
  misc_feature (1)..(379): tr|A0A2G8T671|A0A2G8T671_9BURK Queuine tRNA-ribosyltran sferase OS=Massilia psychrophila OX=1603353 GN=tgt PE=3 SV=1
MLEFSLLKTDTSGLSHARRGRLKVNHGTIETPIFMPVGTYGSVKAMDPDELVAVGSQIILGNTFHLWLRPGTEVLNKFGGLHGFMGWNGPILTDSGGFQVFSLGAMRKITEEGVKFSSPIDGSKLFLSPEISMQIQRSLNSDIVMQFDECTPYEIDGRPATIDEAATSMRMSLRWAQRSMNEFKGGENPNALFGIVQGGMFEHLRDESLAKLEDIDFPGIAIGGLSVGEPKEDMMRMLAHVGPRLPANKPHYLMGVGTPEDLVAGVANGIDMFDCVMPTRNARNGWLFTRFGDVKIKNARYKDESGPLDESCDCYCCKNFSRAYLHHLHRSKEILGARLNTIHNLHYYLKLMQEMRDAIDADRFHAFRLQFNADRARGV

SEQ ID NO: 57400 - protein, 379 aa, Massilia sp.
  misc_feature (1)..(379): tr|A0A0Q5HQV2|A0A0Q5HQV2_9BURK Queuine tRNA-ribosyltran sferase OS=Massilia sp. Leaf139 OX=1736272 GN=tgt PE=3 SV=1
MLEFTLLKKDTSGLSHARRGRLTLNHGTIETPIFMPVGTYGSVKAMDPVELKTVGSQIILGNTFHLWLRPGIDVFNKFGGLHGFMGWDKPILTDSGGFQVFSLGAMRKITEEGVTFASPIDGSRKFLSPEVSMQIQRALNSDIVMQFDECTPYEIDGRAATAEEAAKSMRMSLRWAQRSMNEFTGGGNPNALFGIVQGGMYEHLRDESLAGLEDINFPGLAIGGLSVGEPKEDMQRILAHVGPRLPENKPHYLMGVGTPEDLVEGVANGVDMFDCVMPTRNARNGWLFTRFGDVKIKNARYKEDTAPLDESCDCYCCKNFSRAYLHHLHRSNEILGARLNTIHNLHYYLNLMQEMRDAIDADGFHAFRLQFAADRARGI

SEQ ID NO: 57401 - protein, 221 aa, Massilia sp.
  misc_feature (1)..(221): tr|A0A519PEW9|A0A519PEW9_9BURK Queuine tRNA-ribosyltran sferase (Fragment) OS=Massilia sp. OX=1882437 GN=tgt PE =3 SV=1
PATADEAAKSMRMSLRWAQRSMNEFTSGGNPNALFGIVQGGMYEHLRDESLAGLEDINFPGLAIGGLSVGEPKEDMQRILAHVGPRLPENKPHYLMGVGTPEDLVEGVANGVDMFDCVMPTRNARNGWLFTRFGDVKIKNARYKDDMAPLDESCDCYCCKNFSRAYLHHLHRSNEILGARLNTIHNLHFYLKIMQEMRDAIDADKFNEFRIQFRADRTRGV

SEQ ID NO: 57402 - protein, 379 aa, Massilia timonae
  misc_feature (1)..(379): tr|A0A1S2NEE6|A0A1S2NEE6_9BURK Queuine tRNA-ribosyltran sferase OS=Massilia timonae OX=47229 GN=tgt PE=3 SV=1
MLEFTLLKKDTSGLSHARRGRLKLNHGTIETPIFMPVGTYGSVKAMSPVELKEVGSQIILGNTFHLWLRPGVDVMNKFGGLHQFMGWDKPILTDSGGFQVFSLGAMRKITEEGVKFASPIDGSRQFLSPEISMQIQRALNSDIVMQFDECTPYEIDGRPATAEEAAKSMRMSLRWAQRSMNEFTGGGNPNALFGIVQGGMYEHLRDESLAGLEDINFPGLAIGGLSVGEPKEDMKRILAHVGPRLPENKPHYLMGVGTPEDLVDGVANGVDMFDCVMPTRNARNGWLFTRFGDVKIKNARYKDDQAPLDESCDCYCCKNFSRAYLHHLHRSNEILGARLNTIHNLHYYLKLMQEMRDAIDADRFNEFRIAFNAGRARGV

SEQ ID NO: 57403 - protein, 379 aa, Massilia timonae
  misc_feature (1)..(379): tr|K9DH06|K9DH06_9BURK Queuine tRNA-ribosyltransferase OS=Massilia timonae CCUG 45783 OX=883126 GN=tgt PE=3 SV =1
MLEFTLLKKDTSGLSHARRGRLKLNHGTIETPIFMPVGTYGSVKAMSPVELKEVGSQIILGNTFHLWLRPGVDVMNKFGGLHQFMGWDKPILTDSGGFQVFSLGAMRKITEEGVKFASPIDGSRQFLSPEISMQIQRALNSDIVMQFDECTPYEIDGRPATAEEAAKSMRMSLRWAQRSMNEFTGGGNPNALFGIVQGGMYEHLRDESLAGLEDINFPGLAIGGLSVGEPKEDMKRILAHVGPRLPENKPHYLMGVGTPEDLVDGVANGVDMFDCVMPTRNARNGWLFTRFGDIKIKNARYKEDQAPLDESCDCYCCKNFSRAYLHHLHRSNEILGARLNTIHNLHYYLKLMQEMRDAIDADRFNEFRIEFNAGRARGV

SEQ ID NO: 57404 - protein, 379 aa, Massilia umbonata
  misc_feature (1)..(379): tr|A0A4P8HUR7|A0A4P8HUR7_9BURK Queuine tRNA-ribosyltran sferase OS=Massilia umbonata OX=864828 GN=tgt PE=3 SV=1
MLEFKLIKTDTTGLTKARRGTLKLNHGVVQTPIFMPVGTYGSVKAMSPLELKEIGAQIILGNTFHLWLRPGNAVMGKFGGLHKFMGWDKPILTDSGGFQVFSLGEMRKITEEGVHFNSPINGDKLFLSPEISMQIQRVLNSDIVMQFDECTPYEIEGRPATLEEAAKSMRMSLRWAQRSMNEFKSGENPNALFGIVQGGMFESLRDESLAGLEEIDFPGLAIGGLSVGEPKEDMMRVLEHIGPRLPANKPHYLMGVGTPEDLVAGVSNGVDMFDCVMPTRNARNGWIFTRFGDIKIKNARYKEDTEPFDSTCSCYACRNFSRAYLHHLHRAQEILGARLNTIHNLHFYLDIMQQMRDALDEDRFPEWVKQFHADRARGV

SEQ ID NO: 57405 - protein, 379 aa, Massilia yuzhufengensis
  misc_feature (1)..(379): tr|A0A1I1T6V0|A0A1I1T6V0_9BURK Queuine tRNA-ribosyltran sferase OS=Massilia yuzhufengensis OX=1164594 GN=tgt PE =3 SV=1
MLEFTLLKKDTSGLSHARRGRLKLNHGTIETPIFMPVGTYGSVKAMDPTELKDVGSQIILGNTFHLWLRPGTKVLDKFGGLHKFMGWDGPILTDSGGFQVFSLGAMRKITEEGVKFASPIDGSRLFLSPEISMQIQRSLNSDIVMQFDECTPYEIDGRPATADEAAKSMRMSLRWAQRSMNEFKGGENPNALFGIVQGGMYEHLRDESLAGLEDIDFPGLAIGGLSVGEPKEDMKRILAHVGPRLPENKPHYLMGVGTPEDLVDGVANGVDMFDCVMPTRNARNGWLFTRFGDVKIKNARYKEDTAPLDESCDCYCCKNFTRAYLHHLHRSNEILGARLNTIHNLHYYLKLMQEMRDAIDADGFNAFRIRFAADRGRGV

SEQ ID NO: 57406 - protein, 377 aa, Massilimicrobiota sp.
  misc_feature (1)..(377): tr|A0A1Y3TFN9|A0A1Y3TFN9_9FIRM Queuine tRNA-ribosyltran sferase OS=Massilimicrobiota sp. An80 OX=1965658 GN=tgt PE=3 SV=1
MEGFWYELKHVCKQSGARYGILHTPHGDVETPMFMPVGTLATVKGISPEQLKEMHSQVILANTYHLWLRPGEDVVKMAGGLHQFMNYDGPILTDSGGFQVFSLGKTRKIEEEGVTFKSIVDGKKLFLSPEKSIQIQNDLGADIIMSFDECAPYPSTHEYMKKSVERTLRWAKRGKDAHKRKDQALFGIVQGGEFEDLRELSAKELVKMDFPGYSIGGTSVGEPKDVMYKMIDDAVKWLPQDKPRYLMGVGNPIDLIEGAIRGIDMFDCVLPTRVARHGALMTHHGRMNINNEKYKYDFTPIDEKCHCYTCQNYTRAYLRHLHKCDELFGKSLLSIHNVAFLLQLSEDIRKAIQEDRLLDFKEEFLNSYGRDVYERAF

SEQ ID NO: 57407 - protein, 377 aa, Massilimicrobiota sp.
  misc_feature (1)..(377): tr|A0A1Y4R6T3|A0A1Y4R6T3_9FIRM Queuine tRNA-ribosyltran sferase OS=Massilimicrobiota sp. An142 OX=1965564 GN=tg t PE=3 SV=1
MEGFWYELKHVCKQSGARYGILHTPHGDVETPMFMPVGTLATVKGISPEQLKEMHSQVILANTYHLWLRPGEDVIKMAGGLHKFMNYDGPILTDSGGFQVFSLGKTRKIEEEGVTFKSIVDGKKLFLSPEKSIQIQNDLGADIIMSFDECAPYPSTHEYMKKSVERTLRWAKRGKDAHKRKDQALFGIVQGGEFEDLRELSAKELVKMDFPGYSIGGTSVGEPKDVMYKMIDDAVKWLPQDKPRYLMGVGNPIDLIEGAIRGIDMFDCVLPTRVARHGALMTHHGRMNINNEKYKYDFTPIDDKCHCYTCQNYTRAYLRHLHKCDELFGKSLLSIHNVAFLLQLSEDIRKAIQEDRLLDFKEEFLNSYGRDVYERAF

SEQ ID NO: 57408 - protein, 377 aa, Massilimicrobiota timonensis
  misc_feature (1)..(377): tr|A0A1Y4T1Y8|A0A1Y4T1Y8_9FIRM Queuine tRNA-ribosyltran sferase OS=Massilimicrobiota timonensis OX=1776392 GN=t gt PE=3 SV=1
MEGFWYELKHVCKQSGARYGILHTPHGDVETPMFMPVGTLATVKGISPEQLKEMHSQVILANTYHLWLRPGEDVVKMAGGLHKFMNYDGPILTDSGGFQVFSLGKTRKIEEEGVTFKSIVDGKKLFLSPEKSIQIQNDLGADIIMSFDECAPYPSTHEYMKKSVERTLRWAKRGKDAHKRKDQALFGIVQGGEFEDLRELSAKELVKMDFPGYSIGGTSVGEPKDVMYKMIADAVKWLPDDKPRYLMGVGNPIDLIEGAIRGIDMFDCVLPTRVARHGALMTHHGRMNINNEKYKYDFTPIDDKCHCYTCQNYTRAYLRHLHKCDELFGKSLLSIHNVAFLLQLSEDIRKAIQEDRLLDFKEEFLNSYGRDVYERAF

SEQ ID NO: 57409 - protein, 376 aa, Massilioclostridium sp.
  misc_feature (1)..(376): tr|A0A316T8H1|A0A316T8H1_9CLOT Queuine tRNA-ribosyltran sferase OS=Massilioclostridium sp. OX=1935928 GN=tgt PE =3 SV=1
MFQLLKKQGEARRGTFTTVHGTVQTPAFMNVGTAAAIKGGISSYDLVDLKCQVELCNTYHLHIRPGDKLIKELGGLHHFMGWNGPILTDSGGFQVFSLASLRKIQEEGVYFSSHVDGKRIFMGPEESMQIQSNLGSTIAMAFDECIENPSPYEYTKHSCDRTVRWLHRCKAEMERLNSLSDTINPNQMLFGINQGCIYEDLRVQHMKEIVELDLDGYAIGGLAVGETKEEMYHIISTVTPYMPLEKPRYLMGVGKPTNIIEAVSRGVDLFDCVMPSRNARHGHLNTWNGVINLNNAKYEKDDTPIDEHCDCPTCRHFSKAYLRHLFKSKEMLSNRLAVMHNLYFYNTLMEKIREAIDTDTFDTFKEKYVPILDRRI

SEQ ID NO: 57410 - protein, 364 aa, Mastigocladus laminosus
  misc_feature (1)..(364): tr|A0A4D9CC52|A0A4D9CC52_MASLA Queuine tRNA-ribosyltran sferase OS=Mastigocladus laminosus UU774 OX=1594576 GN= tgt PE=3 SV=1
MAQCSHTKARAGVFHTPHGVVETPRFMPVGTLATVKTLTPAQLKETGAQMVLSNTYHLHLQPGEVIVSGGGGLHKFMGWNGPMLTDSGGFQVFSLSEMRKISEEGVTFRSPHDGQIIKFTPEKSIEIQNILGADVIMAFDECPPATANRQEVEAATERTYRWLLRCIEAHQRREEQALFGIVQGGVYLDLRAQAAEALQKLDLPGYAIGGVSVGEEPELIHQVVQTTAPLLPYHKPRYLMGVGTYQEMVIAIASGVDLFDCVIPTRWARHGTAMVQGDRWNLKNAKFREDFTPLDETCPCYTCRNFTRAYISHLVRSQEILAYTLLSIHNITELIRFTQKIREAILNDTFTTEFSKWFKKGVME

SEQ ID NO: 57411 - protein, 342 aa, Mastigocoleus testarum
  misc_feature (1)..(342): tr|A0A0V7ZXP3|A0A0V7ZXP3_9CYAN Queuine tRNA-ribosyltran sferase OS=Mastigocoleus testarum BC008 OX=371196 GN=tg t PE=3 SV=1
MPVGTLANVKTLTPAQLRDTGAQMILSNTYHLHLQPGEGIVAGGGGLHKFMGWDGPILTDSGGFQVFSLSEMRKISERGVKFRSPHDGQIIELTPERSIEIQNTLGADIIMAFDECPPYPVSREEVETATERTYRWLLRCIETHKRPEQALFGIVQGGIYSDLRSRAANALTELDLPGYAIGGVSVGEEPELIHEIVRVTAPLLPVNKPRYLMGVGTYREIAIAIAAGIDLFDCVIPTRWARHGTAMVRGERWNLKNARFREDFQPLDADCPCYTCKNFTRAYISHLVRSQEILAYTLLSIHNITEIIHFTQKIRQSILQGSFATDFARWLNTDNSVELEHG

SEQ ID NO: 57412 - protein, 376 aa, Mediterranea sp.
  misc_feature (1)..(376): tr|A0A1Y4HM24|A0A1Y4HM24_9BACT Queuine tRNA-ribosyltran sferase OS=Mediterranea sp. An20 OX=1965586 GN=tgt PE=3 SV=1
MTFELQHTDNKTNARAGLITTDHGQIMTPIFMPVGTVGTVKGVHLSELKNDIKAQIILGNTYHLYLRPGLDIIEKAGGLHQFNGFDRPMLTDSGGFQVFSLSSIRKLHEDGAEFRSHIDGSKHFFTPEKVMDIERTIGADIMMAFDECPPGDSDYEYAKKSLGLTHRWLDRCIQRFNETEPKYGYRQSLFPIVQGCVYRDLRIQSAEFVASKNADGNAIGGLAVGEPVEKMYEMIEVVNEILPKDKPRYLMGVGTPVNILEGIERGVDMFDCVMPTRNGRNGMLFTKDGILNMRNKKWEADFSPIEADGASYVDTLYTKAYLRHLFHAQEMLAMQIASVHNLAFYLWLTAEARKHIIAGDFATWKATMVKRVSTRL

SEQ ID NO: 57413 - protein, 374 aa, Mediterraneibacter butyricigenes
  misc_feature (1)..(374): tr|A0A391NXP9|A0A391NXP9_9FIRM Queuine tRNA-ribosyltran sferase OS=Mediterraneibacter butyricigenes OX=2316025 GN=tgt PE=3 SV=1
MAYQLIKKEGRAKRGRLETVHGVIETPVFMNVGTTAAIKGAVSTDDLRQIKTQVELSNTYHLHVRPGDKIVKQLGGLHKFMNWDKPILTDSGGFQVFSLAGLRKIREEGVTFQSHIDGHRIFMGPEESMQIQSNLGSTIAMAFDECPSSVAERSYIQNSVDRTVRWLERCKKEMNRLNQLEDTINPHQMLFGINQGGIYADIRIEHAKRITELDLDGYAVGGLAVGETHEEMYHILDEVVPYLPENKPTYLMGVGTPVNILEAVDRGVDFFDCVYPSRNGRHGHVYTNHGKLNLFNAKYELDDRPIEEGCQCPACRSYSRAYIRHLLKAKEMLGMRLCVLHNLYFYNTMMEEIRDALDQGCFQEYKKEKISKMS

SEQ ID NO: 57414 - protein, 377 aa, Mediterraneibacter sp.
  misc_feature (1)..(377): tr|A0A4Q8U596|A0A4Q8U596_9FIRM Queuine tRNA-ribosyltran sferase OS=Mediterraneibacter sp. gm002 OX=2527876 GN=t gt PE=3 SV=1
MYELLKKDGKAKRGRFHTVHGTIETPVFMNVGTAAAIKGAVSTDDLRQIKTQVELSNTYHLHVRPGDEVVKKLGGLHQFMNWDKPILTDSGGFQVFSLADLRKIKEEGVHFHSHIDGRKIFMGPEQSMQIQSNLASTIAMAFDECPSSVADRRYMENSVARTTRWLKRCKDEMERLNSLPDTINKQQLLFGINQGGVYEDIRVEHAKQISKLNLPGYAVGGLAVGESHEEMYRILDAVVPVLPENKPTYLMGVGTPANILEAVDRGVDFFDCVYPSRNGRHGHVYTNHGKLNLFNAKFELDNRPIEEGCQCPACRSYSRAYIRHLLKAKEMLGMRLCVLHNLYFYNTMMEEIRDAIDAGEYQAYKKRKLDNMSQPLD

SEQ ID NO: 57415 - protein, 376 aa, Megamonas funiformis
  misc_feature (1)..(376): tr|H3KA12|H3KA12_9FIRM Queuine tRNA-ribosyltransferase OS=Megamonas funiformis YIT 11815 OX=742816 GN=tgt PE=3 SV=1
MKPAITYELIKQCPHTGARAGRIHTPHGSFDTPIFMPVGTQASVKTLAPEELKEMGAGIILSNNYHLFLRPGSKLVKEAGGLHKFMNWDRAILTDSGGFQVFSLGDLRKISEEGVTFRSHIDGSKKFLSPEIATQSQMDLGADIIMAFDECVPYPADFKYTRESMELTLRWAQRCKDTMTNPNQGLFGIVQGGMYKDLRIECANRLVDMDFPGYAVGGLSVGEPKELMYEMLDITLEHLPQNKARYLMGVGTPDCLVEGVMRGIDMFDCVYPTRVARNGTAMTWNGRLVIKNAQYEHDFHPIDEHCNCYTCRNYSRAYIRHLVRVNEIFGLRLLTIHNLHFLIDFMRQMRQSIMEDRFPEFYRKFTANFSFNAKSV

SEQ ID NO: 57416 - protein, 376 aa, Megamonas hypermegale
  misc_feature (1)..(376): tr|A0A378NVV6|A0A378NVV6_9FIRM Queuine tRNA-ribosyltran sferase OS=Megamonas hypermegale OX=158847 GN=tgt PE=3 SV=1
MKPAITYELIKQCPHTGARAGRIHTPHGSFDTPIFMPVGTQASVKTLAPEELKEMGAGIILSNNYHLFLRPGSKLVKEAGGLHKFMNWDRAILTDSGGFQVFSLGDLRKISEEGVTFRSHIDGSKKFLSPEIATQSQMDLGADIIMAFDECVPYPADFKYTRESMELTLRWAQRCKDTMTNPNQGLFGIVQGGMYKDLRIECANRLVEMDFPGYAVGGLSVGEPKELMYEMLDITLEHLPQNKARYLMGVGTPDCLVEGVMRGIDMFDCVYPTRVARNGTAMTWNGRLVIKNAQYEHDFHPIDEHCNCYTCRNYSRAYIRHLVRVNEIFGLRLLTIHNLHFLIDFMRQMRQSIMEDRFPEFYRKFTANFSFNAKSV

SEQ ID NO: 57417 - protein, 376 aa, Megamonas hypermegale
  misc_feature (1)..(376): tr|A0A239T7A8|A0A239T7A8_9FIRM Queuine tRNA-ribosyltran sferase OS=Megamonas hypermegale OX=158847 GN=tgt PE=3 SV=1
MKPAITYELIKECPHTHARAGRIHTPHGTFDTPIFMPVGTQATVKTMAPEELKAMGAGIILSNTYHLFLRPGAALVKEAGGLHKFMNWDRAILTDSGGFQVFSLGDLRKITEEGVTFRSHIDGSKKFLSPEIATKTQMDLGADIIMAFDECVPYPADFKYTHESMELTLRWAQRCKDTMTSPNQGLFGIVQGGMYKDLRIECANRLVDMDFPGYAVGGLSVGEPKELMYDMLDITLEHLPKNKARYLMGVGTPDCLAEGVMRGIDMFDCVYPTRVARNGTAMTWNGRLVMKNAQYEHDFRPIDENCDCYACRNYSRAYIRHLVRVNEIFGLHLLTIHNLHFLINFMKKMREAILNDSFPEFYHRFTANFSFNAKSE

SEQ ID NO: 57418 - protein, 376 aa, Megamonas rupellensis
  misc_feature (1)..(376): tr|A0A412CGQ7|A0A412CGQ7_9FIRM Queuine tRNA-ribosyltran sferase OS=Megamonas rupellensis OX=491921 GN=tgt PE=3 SV=1
MKPAITYELIKQCPHTGARAGRIHTPHGSFDTPIFMPVGTQASVKTLAPEELKEMGAGIILSNNYHLFLRPGSKLVKEAGGLHKFMNWDRAILTDSGGFQVFSLGDLRKISEEGVTFRSHIDGSKKFLSPEIATQSQMDLGADIIMAFDECVPYPADFKYTRESMELTLRWAQRCKDTMTNSNQGLFGIVQGGMYKDLRIECANRLVDMDFPGYAVGGLSVGEPKELMYEMLDITLEHLPQNKARYLMGVGTPDCLVEGVMRGIDMFDCVYPTRVARNGTAMTWNGRLVIKNAQYEHDFHPIDEHCNCYTCRNYSRAYIRHLVRVNEIFGLRLLTIHNLHFLIDFMRQMRQSIMEDRFPEFYRKFTANFSFNAKSV

SEQ ID NO: 57419 - protein, 376 aa, Megamonas rupellensis; identical to SEQ ID NO: 57415
  misc_feature (1)..(376): tr|A0A411ZV41|A0A411ZV41_9FIRM Queuine tRNA-ribosyltran sferase OS=Megamonas rupellensis OX=491921 GN=tgt PE=3 SV=1

SEQ ID NO: 57420 - protein, 376 aa, Megamonas sp.; identical to SEQ ID NO: 57415
  misc_feature (1)..(376): tr|A0A1H8CST6|A0A1H8CST6_9FIRM Queuine tRNA-ribosyltran sferase OS=Megamonas sp. Calf98-2 OX=1855330 GN=tgt PE= 3 SV=1

SEQ ID NO: 57421 - protein, 368 aa, Megasphaera cerevisiae
  misc_feature (1)..(368): tr|A0A0J6WTD1|A0A0J6WTD1_9FIRM Queuine tRNA-ribosyltran sferase OS=Megasphaera cerevisiae DSM 20462 OX=1122219 GN=tgt PE=3 SV=1
MVITYELQAECDGARAGLLRTPHGTFKTPMFMPVGTQATVKTLTPEELYDMGAQVILSNTYHLFLRPGEDLVREAGGLHKFMNWKQAVLTDSGGFQVFSLGQMRKITEQGVTFRSHLDGSKKFLSPEVSMDIQMALDSDIAMAFDECIPYPSDYDYTQLSTERTSRWAKRCADHHHSDTQGLFGIVQGGMYPELRRKSCDDLVDMDFDGYGIGGLSVGESKDMMYDILEKTTPCLPAHKARYLMGVGTPDCLLEGVARGVDMFDCVFPTRVARNGMAMTHTGRVTVRNAKFARDFRPIEDGCGCYTCRNYTRAYIRHLFKAEELLAYRLVSIHNLYFLLDFMRSMRQSILDGTFREFRKQFWQWYQDA

SEQ ID NO: 57422 - protein, 368 aa, Megasphaera elsdenii
  misc_feature (1)..(368): tr|G0VPU3|G0VPU3_MEGEL Queuine tRNA-ribosyltransferase OS=Megasphaera elsdenii DSM 20460 OX=1064535 GN=tgt PE= 3 SV=1
MVITYEQQAECDGARAGILRTPHGTFKTPMFMPVGTQATVKTLTPEELYDMGAQVILSNTYHLFLRPGHDLVQEAGGLHKFMNWKQAILTDSGGFQVFSLGQMRKITEEGVTFRSHLDGSKKFLSPEVSMDIQMALDSDIAMAFDECIPYPSDYEYTQMSTERTSRWAARCLDHHHSDTQGLFGIVQGGMYKDLRKQSCQDLVDMDFDGYGIGGLSVGESKDIMYDILEHTTPYLPKHKARYLMGVGTPDCLLEGVARGVDMFDCVFPTRVARNGMAMTHTGRLTVRNAKYAHDFHPIEEGCQCYTCRNYSRAYIRHLFKAEELLAYRLVSIHNLYFLLQFMRDMRQSIFDGTFREFRKDFWKRYQDA

SEQ ID NO: 57423 - protein, 368 aa, Megasphaera elsdenii; identical to SEQ ID NO: 57422
  misc_feature (1)..(368): tr|A0A1M6Q813|A0A1M6Q813_MEGEL Queuine tRNA-ribosyltran sferase OS=Megasphaera elsdenii OX=907 GN=tgt PE=3 SV=1

SEQ ID NO: 57424 - protein, 368 aa, Megasphaera genomosp.
  misc_feature (1)..(368): tr|A0A2J8BBE6|A0A2J8BBE6_9FIRM Queuine tRNA-ribosyltran sferase OS=Megasphaera genomosp. type_2 OX=699193 GN=tg t PE=3 SV=1
MVITYELQAECDGARAGLLHTTHGTFKTPMFMPVGTQATVKTLTPEELYDMGAQVILSNTYHLFLRPGADLIKKAGGLHAFMHWRQPILTDSGGFQVFSLGQMRKITEEGVTFRSHLDGSSKFLSPEVSMDIQMDLNSDIAMAFDECIPYPSDYEYTKQSTARTTRWAKRCVEHHRSDTQGLFGIVQGGMYKDLRQQSCQELVDLPFDGYGIGGLSVGEEKALMYEVLDYTTPCLPRHKARYLMGVGTADCLLEGVARGVDMFDCVYPTRVARNGMAMTHQGRLTVRNAAYAEDFRPIEDGCSCYTCQHYTRSYIRHLFKAEELLAYRLVSIHNLHFLLHFMQDMRQSIINGTFREFRRDFWKQYQDV

SEQ ID NO: 57425 - protein, 368 aa, Megasphaera genomosp.
  misc_feature (1)..(368): tr|D3LT21|D3LT21_9FIRM Queuine tRNA-ribosyltransferase OS=Megasphaera genomosp. type_1 str. 28L OX=699218 GN=t gt PE=3 SV=1
MVIRYELQAECDGARAGLLHTPHGTFKTPMFMPVGTQATVKTLTPEELYAMGAQIILSNTYHLFLRPGEELIRQAGGLHAFMHWQQPILTDSGGFQVFSLGQMRKITEDGVTFRSHLDGSRKFLSPEVSMDVQMALNSDIAMAFDECIPYPSDYDYTSQSTARTSRWAQRCLQHHHSPTQGLFGIVQGGMYKDLRARSCAELVAMDFDGYGIGGLSVGEEKSLMYDILEYTVPLLPKHKARYLMGVGTPDCLLEGVARGVDMFDCVYPTRVARNGMAMTKTGRLTVRNAKYAADFVPIEENCDCYTCQNYTRAYIRHLFKAEELLAYRLVSIHNLHFLLHFMRDLRQSIVDGTFREFCRQFRRVYRDR

SEQ ID NO: 57426 - protein, 368 aa, Megasphaera hexanoica
  misc_feature (1)..(368): tr|A0A344MIH1|A0A344MIH1_9FIRM Queuine tRNA-ribosyltran sferase OS=Megasphaera hexanoica OX=1675036 GN=tgt PE=3 SV=1
MVITYELQAECDGARAGLLRTPHGTFKTPMFMPVGTQATVKTLTPEELYDMGAQVILSNTYHLFLRPGEELIKEAGGLHKFMNWKQAILTDSGGFQVFSLGQMRKIKEEGVTFRSHLDGSKKFLSPEVSMDIQMALNSDIAMAFDECIPYPSDYEYTKLSTERTSRWAQRCLDHHHSDTQGLFGIVQGGMYEDLRRKSCEDLVDMDFDGYGIGGLSVGESKDIMYEVLGYTTKHLPREKARYLMGVGTPDCLVEGVARGVDMFDCVFPTRVARNGMAMTHTGRLTVRNARYAHDFHPIEEGCQCYTCRNYTRAYIRHLFKAEELLAYRLVSIHNLYFLLDFMRHMRQSILDGTFRTFREQFWKRYQDG

SEQ ID NO: 57427 - protein, 368 aa, Megasphaera micronuciformis
  misc_feature (1)..(368): tr|E2Z9B6|E2Z9B6_9FIRM Queuine tRNA-ribosyltransferase OS=Megasphaera micronuciformis F0359 OX=706434 GN=tgt P E=3 SV=1
MVIEFELQAECDGARAGLLRTPHGTYQTPMFMPVGTQATVKTLTPEELYDMGAQVILSNTYHLFLRPGEDLVHEAGGIHRFMNWKNAVLTDSGGFQVFSLGKMRKITEDGVTFRSHIDGSKKFLSPEVSMDIQMALDSDIAMAFDECIPYPSDYEYTRLSTERTSRWAKRCLDHHHSPTQGLFGIVQGGMYKDLRKKSCEDLVAMDFDGYGIGGLSVGESKDIMYDILEGTTPYLPQDKARYLMGVGTPDCLVEGVARGVDMFDCVFPTRVARNGMAMTAEGRVNVRNAKYARDFSPIEEGCGCYTCRNYTRAYIRHLFKAEELLAYRLVSIHNLYFLLDFMRRMRQSIFDGTFRRFRKEFFDRYKDA

SEQ ID NO: 57428 - protein, 368 aa, Megasphaera paucivorans
  misc_feature (1)..(368): tr|A0A1G9UV53|A0A1G9UV53_9FIRM Queuine tRNA-ribosyltran sferase OS=Megasphaera paucivorans OX=349095 GN=tgt PE= 3 SV=1
MVISYELQAECDGARAGLLRTPHGTFKTPMFMPVGTQATVKTLTPEELYDMGAQIILSNTYHLFLRPGEDLVREAGGLHKFMNWKQAILTDSGGFQVFSLGQMRKITEEGVTFRSHLDGSRKFLSPEVSMDIQMKLDSDIAMAFDECIPYPSDYDYTKHSTERTSRWAKRCLDHHHSDTQGVFGIVQGGMYKDLRRQSCEELTAMDFDGFGIGGLSVGEAKDIMYDILENTTPYLPIHKARYLMGVGTPDCLLEGVARGVDMFDCVFPTRVARNGMAMTHTGRLTVRNAKYAHDFTPLEEGCQCYTCRNYSRAYIRHLFKAEELLAYRLVSIHNLYFLLDFMRNMRQSIFDGTFRQFRKQFWDRYQDG

SEQ ID NO: 57429 - protein, 368 aa, Megasphaera sp.
  misc_feature (1)..(368): tr|S7J282|S7J282_9FIRM Queuine tRNA-ribosyltransferase OS=Megasphaera sp. NM10 OX=1273103 GN=tgt PE=3 SV=1
MVITYEQQAECDGARAGILRTPHGTFKTPMFMPVGTQATVKTLTPEELYDMGAQVILSNTYHLFLRPGHDLVQEAGGLHKFMNWKQAILTDSGGFQVFSLGQMRKITEEGVTFRSHLDGSKKFLSPEVSMDIQMALDSDIAMAFDECIPYPSDYEYTQMSTERTSRWAARCLDHHHSDTQGLFGIVQGGMYKDLRKQSCQDLVDMDFDGYGIGGLSVGESKDIMYDILEHTTPYLPKDKARYLMGVGTPDCLLEGVARGVDMFDCVFPTRVARNGMAMTHTGRLTVRNAKYAHDFHPIEEGCQCYTCRNYSRAYIRHLFKAEELLAYRLVSIHNLYFLLQFMRDMRQSIFDGTFRQFRQDFWKRYQDA

SEQ ID NO: 57430 - protein, 368 aa, Megasphaera sp.
  misc_feature (1)..(368): tr|A0A100YSX7|A0A100YSX7_9FIRM Queuine tRNA-ribosyltran sferase OS=Megasphaera sp. DJF_B143 OX=537288 GN=tgt PE =3 SV=1
MVITYELQAECDGARAGLLRTPHGTFKTPMFMPVGTQATVKTLTPEELYDMGAQVILSNTYHLFLRPGEELIKEAGGLHKFMNWKQAILTDSGGFQVFSLGQMRKIKEEGVTFRSHLDGSKKFLSPEVSMDIQMALNSDIAMAFDECIPYPSDYEYTKLSTERTSRWAQRCLDHHHSDTQGLFGIVQGGMYEDLRRKSCEDLVDMDFDGYGIGGLSVGESKDIMYEVLGYTTKHLPREKARYLMGVGTPDCLVEGVARGVDMFDCVFPTRVARNGMAMTHTGRLTVRNARYAHDFHPIEEGCQCYTCRNYTRAYIRHLFKAEELLAYRLVSIHNLYFLLDFMRQMRQSILDGTFRTFREQFWKRYQDG

SEQ ID NO: 57431 - protein, 368 aa, Megasphaera stantonii
  misc_feature (1)..(368): tr|A0A346AXK7|A0A346AXK7_9FIRM Queuine tRNA-ribosyltran sferase OS=Megasphaera stantonii OX=2144175 GN=tgt PE=3 SV=1
MVITYELQAECDGARAGILRTPHGTFKTPMFMPVGTQATVKTLSPEELYDMGAQVILSNTYHLFLRPGEDLVKEAGGLHKFMNWKQAILTDSGGFQVFSLGQMRKITEEGVTFRSHLDGSKKFLSPEVSMDVQMALNSDIAMAFDECIPYPSDYDYTLHSTERTSRWAKRCLDHHHSDTQGLFGIVQGGMYADLRRKSCEELVDMNFDGYGIGGLSVGESKDIMYDILDHTTPYLPQTKARYLMGVGTPDCLVEGVARGVDMFDCVFPTRVARNGMAMTHTGRLTVRNAKYARDFSPIEEGCGCYTCRNYTRAYIRHLFKAEELLAYRLVSIHNLYFLLQFMRDMRQSILDGTFRQFRQEFWKRYQDA

SEQ ID NO: 57432 - protein, 367 aa, Mehylophilales bacterium
  misc_feature (1)..(367): tr|A0A258LBS8|A0A258LBS8_9PROT Queuine tRNA-ribosyltran sferase OS=Mehylophilales bacterium 35-46-6 OX=1970535 GN=tgt PE=3 SV=1
MQFTLHKQDGLARRGTVALAHGNVETPAFMPVGTYGTVKAMSPLELKEINAHIVLGNTFHLWLRPGLEVIAAHGGLHKFMGWDKPILTDSGGFQVWSLGDLRKISEEGVKFRSPINGDSCFLTPEESMRIQRVLNSDIVMIFDECTPYPATHSEASDSMQLSLRWAKRSKQAHEGNPNALFGIIQGGMFEDLRDVSLNGLEEIGFDGYAIGGLSVGEPKEDMLRILAHTAPKMPQNKPRYLMGVGTPEDLVAAVSQGVDMFDCVMPTRNARNGWLFTQYGDVKIKNASYKNDTQPLDADCGCYTCQNFTRAYLHHLHRIGEILSARLNTIHNLYYYQELMAGMRAAIEAGNFETFKQTFAAKRNSRV

SEQ ID NO: 57433 - protein, 384 aa, Meiothermus cateniformans
  misc_feature (1)..(384): tr|A0A399DXT8|A0A399DXT8_9DEIN Queuine tRNA-ribosyltran sferase OS=Meiothermus cateniformans OX=482825 GN=tgt P E=3 SV=1
MFEFAITAQSGRARTGLFHTPHGVVQTPLFMPVGTQGSVKGLSPRELREIGSQIILGNTYHLLLRPGPERVRALGGLHKFAAYDGPWLTDSGGFQVMSLGDLRKISEQGVTFRSHLNGDLIELTPEYSIQVQEALGADIIMAFDECPPYPATTEYLKASIERTLRWLERCLKAKTRPDQALFAIAQGGVDLKLRRFSAEATVAFDTPGFAIGGLAVGEPKEGMYPAVELSTRLLPEHKPRYLMGVGHPEDLVAAVALGVDMFDCVYPTRTGRFGYALVPEGRLNLKLSRYLDDPRPIDPACDCYACTHYSRAYLAHLVRAEEMLAPRMISLHNLRYLHRLMEGARTAIQTGNYGEFAQDFAGRRFGRQIPGWFTRALQEGGHWN

SEQ ID NO: 57434 - protein, 384 aa, Meiothermus granaticius
  misc_feature (1)..(384): tr|A0A399F6Y0|A0A399F6Y0_9DEIN Queuine tRNA-ribosyltran sferase OS=Meiothermus granaticius NBRC 107808 OX=12275 51 GN=tgt PE=3 SV=1
MFEFSLTARSGRARTGLLLTPHGEVQTPLFMPVGTLGSVKGISPQELQEIGSQIILGNTYHLLLRPGPERVQRLGGLHGFAAYPGPWLTDSGGFQVMSLGHLRRISEEGVVFQSHLNGDLIELSPEKSVWVQEALGADILMAFDECPPYPASREYMRDSIERTLRWLERCLRAKTRPDQALFAIAQGGVDLELRRLSTEATARFDTPGYAIGGLAVGEPKEGMYPAVELSTRLLPERKPRYLMGVGHPEDLVASVGLGVDMFDCVYPTRTGRFGYALVPEGRMNLKLSKHLDDPNPIDPGCDCYTCQHFSRAYLSHLVRAEEMLGLRMLSLHNLRYLHRLMESARAAIQAQAYGEFAQDFAGKRFGPEVPEWFRKALQAGGHWA

SEQ ID NO: 57435 - protein, 403 aa, Meiothermus hypogaeus
  misc_feature (1)..(403): tr|A0A511R4K8|A0A511R4K8_9DEIN Queuine tRNA-ribosyltran sferase OS=Meiothermus hypogaeus NBRC 106114 OX=1227553 GN=tgt PE=3 SV=1
MRLRVAGLAHKLNNPENTQVFEFSITAQSGRARTGLFSTPHGAVQTPLFMPVGTQGSVKGISPRELKEIGSQIILGNTYHLLLRPGPERVRALGGLHRFAAYDGPWLTDSGGFQVMSLGDLRKISEQGVTFRSHLNGDLIELTPEYSILVQEALGADIIMAFDECPPYPATPDYLRASIERTLRWLERCLKAKTRPDQALFAIAQGGTDLALRKASAEATVAFDTPGLAIGGLAVGEPKEGMYPAVALSTQLLPEHKPRYLMGVGHPEDLVASVALGVDMFDCVYPTRTGRFGYALVPEGRLNLKLTRYLDDPRPIDPECDCYACTHYSRAYLSHLVRAEEMLAPRMISLHNLRYLHRLMESARAAIRSGDYGEFAKDFAGKRFGHAIPPWFTGALQEGGHWR

SEQ ID NO: 57436 - protein, 401 aa, Meiothermus luteus
  misc_feature (1)..(401): tr|A0A399F0A8|A0A399F0A8_9DEIN Queuine tRNA-ribosyltran sferase OS=Meiothermus luteus OX=2026184 GN=tgt PE=3 SV =1
MSHLGLAREPNSLENTQVFEFSITARSGRARAGLLTTPHGVVKTPLFMPVGTQGSVKGISPRELKEIGSQIVLANTYHLLLRPGPERVRALGGLHWFAAYDGPWLTDSGGFQVMSLGDLRKIDEQGVTFRSHLNGDLVVLTPERSIEAQEALGADIIMAFDECPPYPSSPDYLKASVGRTLRWLERSLKAKTRPDQALFAIAQGGVDLELRRTSVLATVAFDTPGFAIGGLAVGEPKEDMYPAVELSTRLLPDHKPRYLMGVGHPEDLVAAVALGVDMFDCVYPTRTGRFGYALVPEGRLNLKLSRYLDDPRPIDPACDCYACTHYSRAYLSHLVRAEEILALRMLSLHNLRYLHRLMEAAWEAIQSRDYGAFAREFAGRRFREGIPPWFTLALREGGHWG

SEQ ID NO: 57437 - protein, 384 aa, Meiothermus roseus
  misc_feature (1)..(384): tr|A0A399EFS2|A0A399EFS2_9DEIN Queuine tRNA-ribosyltran sferase OS=Meiothermus roseus OX=1644118 GN=tgt PE=3 SV =1
MFSFAITARAGRARTGVFETPHGPVETPLFMPVGTLGSVKGISPQELREIGSQIVLGNTYHLLLRPGPERVRALGGLHRFAAYDGPWLTDSGGFQVMSLGHMRRISEEGVVFQSHINGDLIELSPEKSVAAQEALGADIIMAFDECPPYPAAPEYLEESIERTLRWLERCLEAKTRPDQALFAIAQGGVDLKLRRLSAQATVSFDTPGFAIGGLAVGEPKEAMYPAVELSTRLLPEGKPRYLMGVGHPEDLVASVALGVDMFDCVYPTRTGRFGYALVPEGRLNLKLTRHLDDPTPIDPECDCYACRHFSRAYLAHLVRADEMLGLRMLSLHNLRYLHRLMEQARAAIREGCYGEFAREFARRRFGGEVPGWFRRALEEGGHWA

SEQ ID NO: 57438 - protein, 384 aa, Meiothermus ruber
  misc_feature (1)..(384): tr|A0A0S7ALB5|A0A0S7ALB5_MEIRU Queuine tRNA-ribosyltran sferase OS=Meiothermus ruber H328 OX=1297799 GN=tgt PE= 3 SV=1
MFEFAITAQSGRARTGLFHTPHGLVQTPLFMPVGTQGSVKGISPRELREIGSQIILGNTYHLLLRPGPERVRTLGGLHKFAAYDGPWLTDSGGFQVMSLGDLRQISEQGVTFRSHLNGDLIELTPEYSIQVQEALGADIIMAFDECPPYPASPEYLKASIERTLRWLERCLKAKTRPDQALFAIAQGGIDLALRKASAEATAAFDTPGLAIGGLAVGEPKEGMYPAVELSTRLLPESKPRYLMGVGHPEDLVASVALGVDMFDCVYPTRTGRFGYALVTEGRLNLKLSRYLDDPRPIDPTCDCYACTHYSRAYLAHLVRAEEMLAPRMISLHNLRYLHRLMESARKAIQSGNYGEFAKDFAGQRFGQQIPAWFTRALEEGGHWQ

SEQ ID NO: 57439 - protein, 383 aa, Meiothermus ruber
  misc_feature (1)..(383): tr|D3PMC1|D3PMC1_MEIRD Queuine tRNA-ribosyltransferase OS=Meiothermus ruber (strain ATCC 35948 / DSM 1279 / VK M B-1258 / 21) OX=504728 GN=tgt PE=3 SV=1
MFEFAITAQSGRARTGLFHTPHGLVQTPLFMPVGTQGSVKGISPRELREIGSQIILGNTYHLLLRPGPERVRALGGLHKFAAYDGPWLTDSGGFQVMSLGDLRQISEQGVTFRSHLNGDLIELTPEYSIQVQEALGADIIMAFDECPPYPASPEYLKASIERTLRWLERCLKAKTRPDQALFAIAQGGIDLALRKASAEATAAFDTPGLAIGGLAVGEPKEGMYPAVELSTRLLPESKPRYLMGVGHPEDLVASVALGVDMFDCVYPTRTGRFGYALVTEGRLNLKLSRYLDDPRPIDPTCDCYACTHYSRAYLAHLVRAEEMLAPRMISLHNLRYLHRLMESARKAIQSGNYGEFAKDFAGQRFGQQIPAWFTRALEEGGHW

SEQ ID NO: 57440 - protein, 384 aa, Meiothermus silvanus
  misc_feature (1)..(384): tr|A0A4V1WHB1|A0A4V1WHB1_9DEIN Queuine tRNA-ribosyltran sferase OS=Meiothermus silvanus OX=52022 GN=tgt PE=3 SV =1
MFDFRITTQAGRARTGLLQTPHGLVHTPLFMPVGTLGSVKGLSPQEIQEIGSQIVLANTYHLLLRPGPERVRALGGLHRFAAYSGPWLTDSGGFQVMSLGHLRRISEEGVVFQSHINGDLIELSPEKSVAVQEALGADVIMAFDECPPYPAHREYMKESIERTLRWLERCLKAKTRPDQALFAIAQGGIDLELRRISTEATVAYDTPGFAIGGLAVGEPKEAMYPAVELSTRILPESKPRYLMGVGHPEDLVASVALGVDMFDCVYPTRTGRFGYALVAEGRMNLKLTRHLDDPRPIDPECDCYACRHFSRAYLAHLIRAEEMLGLRMVSLHNLRYLHRLMEQARSAIAENRYGEFARDFAQQRFGQEVPGWFARALQEGGHWE

SEQ ID NO: 57441 - protein, 384 aa, Meiothermus silvanus
  misc_feature (1)..(384): tr|D7BDL5|D7BDL5_MEISD Queuine tRNA-ribosyltransferase OS=Meiothermus silvanus (strain ATCC 700542 / DSM 9946 / VI-R2) OX=526227 GN=tgt PE=3 SV=1
MFDFRITARAGRARNGLLPTPHGLVHTPLFMPVGTLGSVKGISPQEIRDIGSQIVLANTYHLLLRPGPQRVKALGGLHRFAAYSGPWLTDSGGFQVMSLGHLRRISEEGVVFQSHINGDLIELSPEKSVAVQEALGADIIMAFDECPPYPASREYMKESIERTLRWLERCFKAKTRPDQALFAIAQGGIDLELRRISAEATVAFDAPGFAIGGLAVGEPKEAMYPAVELSTRILPESKPRYLMGVGHPEDLVASVALGIDMFDCVYPTRTGRFGYALVAEGRMNLKLTRYLDDPRPIDPECDCYACRHFSRAYLSHLIRAEEMLGLRMVSLHNLRYLHRLMEQARSAIAEKRYGEFARDFARRRFGQEIPGWFARALQEGGHWE

SEQ ID NO: 57442 - protein, 383 aa, Meiothermus sp.
  misc_feature (1)..(383): tr|A0A370JXJ2|A0A370JXJ2_9DEIN Queuine tRNA-ribosyltran sferase OS=Meiothermus sp. QL-1 OX=2058095 GN=tgt PE=3 SV=1
MFAFTLLARSGRARRGRFSTPHGTVETPLFMPVGTQGSVKGLTPRELEEVGSQIILGNTYHLLLRPGPERVRALGGLHGFAAYQGPWLTDSGGFQVMSLGELRRISEEGVTFRSHLNGELVTLTPERSIAVQEALGADIIMAFDECPPYPAEPTYLRASMERTLRWLERSLKAKTRPDQALFAIAQGGTDPGLRRASTEATVAFGTPGFAIGGLAVGEPKEAMYAAVELSTRLLPEDKPRYLMGVGHPEDLVAAVALGVDMFDCVYPTRTGRFGYALVPEGRLNLKLSRFLDDPRPLEPGCDCYACTQFSRAYLAHLVRAGELLAPRLLSLHNLRHLHRLMERARQAIQEGAYGAFAREFAERRFGQIPDWFRYALEAGGHWP

SEQ ID NO: 57443 - protein, 384 aa, Meiothermus sp.; identical to SEQ ID NO: 57440
  misc_feature (1)..(384): tr|A0A323U3A6|A0A323U3A6_9DEIN Queuine tRNA-ribosyltran sferase OS=Meiothermus sp. Pnk-1 OX=873128 GN=tgt PE=3 SV=1

SEQ ID NO: 57444 - protein, 383 aa, Meiothermus terrae
  misc_feature (1)..(383): tr|A0A399EZ46|A0A399EZ46_9DEIN Queuine tRNA-ribosyltran sferase OS=Meiothermus terrae OX=1408545 GN=tgt PE=3 SV =1
MFSFAITARAGRARTGVFETPHGPVQTPLFMPVGTLGSVKGISPQELRDIGSQVVLGNTYHLLLRPGPERVRALGGLHGFAAYAGPWLTDSGGFQVMSLGHMRRISEEGVVFQSHINGDLIELTPEKSVATQEALGADVIMAFDECPPYPAAREYLKESIERTLRWLERCLGAKTRPDQALFAIAQGGVDLELRRVSAEATVPFDTPGFAIGGLAVGEPKEGMYPAVGLSTRLLPEHKPRYLMGVGHPEDLVASVALGVDMFDCVYPTRTGRFGYALLPEGRLNLKLTRHLDDPKPIDPECDCYACRHFSRAYLAHLVRADEMLGLRMLSLHNLRYLHRLMEQARAAIREGRYGDFARDFARRRFGGEVPGWFRGALEEGGHW

SEQ ID NO: 57445 - protein, 390 aa, Melaminivora alkalimesophila
  misc_feature (1)..(390): tr|A0A317R8F6|A0A317R8F6_9BURK Queuine tRNA-ribosyltran sferase OS=Melaminivora alkalimesophila OX=1165852 GN=t gt PE=3 SV=1
MLQFDLLATDPSSHARRGRLTLNHGVVQTPIFMPVGTYGTVKGVMPRSLTEMGAQIILGNTFHLWMRPGLDVVKGFGGLHAFEQWDKPILTDSGGFQVWSLGAMRKITEEGVHFRSPVNGDKLFMSPEVSMQIQTVLNSDIAMQLDECTPYETNGQRTTESEARKSMEMSRRWAARSKAEFERLENPNALFGIVQGGMYEHLRQESLDALVEMDFPGYAVGGVSVGEPKEEMLRIMAHTPHRLPANKPRYLMGVGTPEDLVEGVAQGVDMFDCVMPTRNARNGTIFTRYGDLKIRNARHREDHRPLDTTCTCHACAGTSGVAWDDGGREGFSRAYLHHLERCGEMLGPMLTTIHNLHYYLQLMQEMRDALDAGRFAQFRAQFKSDRARGV

SEQ ID NO: 57446 - protein, 390 aa, Melaminivora sp.
  misc_feature (1)..(390): tr|A0A2P1NIF3|A0A2P1NIF3_9BURK Queuine tRNA-ribosyltran sferase OS=Melaminivora sp. SC2-7 OX=2116657 GN=tgt PE= 3 SV=1
MLQFDLLATDPASHARRGALTLNHGVVQTPIFMPVGTYGTVKGVMPRSLTEMGAQIILGNTFHLWMRPGLDVVQGFGGLHAFEQWDKPILTDSGGFQVWSLGAMRKITEEGVHFQSPVNGDKLFMSPEVSMQIQTVLNSDIVMQLDECTPYESNGQLTTESEARKSMEMSRRWALRSKAEFERLANPNALFGIVQGGMFEHLRQESLDALVEMDFPGYAVGGVSVGEPKDEMLRIMAHTPHRLPAHKPRYLMGVGTPEDLVEGVAQGVDMFDCVMPTRNARNGTLFTRYGDLKIRNARHKDDHRPLDTSCTCHACAGTAGVSWDDGGRGGFSRAYLHHLDRCGEMLGPMLTTIHNLHYYLQLMQDIRNALDAGAFAQLRAQFKADRARGV

SEQ ID NO: 57447 - protein, 390 aa, Melaminivora sp.
  misc_feature (1)..(390): tr|A0A2R3QD39|A0A2R3QD39_9BURK Queuine tRNA-ribosyltran sferase OS=Melaminivora sp. SC2-9 OX=2109913 GN=tgt PE= 3 SV=1
MLQFDLLATDPASHARRGRLTLNHGVVQTPIFMPVGTYGTVKGVMPRSLTEMGAQIILGNTFHLWMRPGLDVVKSFGGLHAFEQWDKPILTDSGGFQVWSLGAMRKITEEGVHFQSPVNGDKLFMSPEVSMQIQTVLNSDIVMQLDECTPYETGGQLTTESQARKSMEMSRRWALRSKAEFERLGNPNALFGIVQGGMFENLRQESLDALVEMDFPGYAVGGVSVGEPKDEMLRIMAHTPHRLPQGKPRYLMGVGTPEDLVEGVAQGVDMLDCVMPTRNARNGTIFTRYGDLKIRNARHKDDHRPLDTTCTCHACAGTSGVAWDDGGRGGFSRAYLHHLDRCGEMLGPMLTTIHNLHYYLNLMQEIRDALDAGTFAQLRARFREERARGV

SEQ ID NO: 57448 - protein, 378 aa, Melghiribacillus thermohalophilus
  misc_feature (1)..(378): tr|A0A4R3NEJ7|A0A4R3NEJ7_9BACI Queuine tRNA-ribosyltran sferase OS=Melghiribacillus thermohalophilus OX=1324956 GN=tgt PE=3 SV=1
MAIIFELLKEDSQTGARLGRLHTPHGSIDTPVFMPVGTLATVKTMSPEELNEIGARILLSNTYHLWLRPGEDIVEEAGGLHSFMNWNGAILTDSGGFQVFSLSDMREIQEEGVHFRNHLSGEKLFLSPEKSIQIQNSLGADIIMAFDECPPYPAEYDYMKQSVERTSRWAERCLKAHRRPEDQGLFGIIQGGEYEDLRQQSARDLVSLDFPGYAVGGLSVGEPKDVMNKVLEFTTPLLPKNKPRYLMGVGSPDSLIDGAIRGIDMFDCVLPTRIARNGTCMTSTGRLVVRNAKYARDFRPLDEHCDCYVCRNYSRAYIRHLIKANEIFGMRLTTYHNLYFLVKLMEQVREAIRENRLLDFREQFFEQYGFNKPDAKNF

SEQ ID NO: 57449 - protein, 378 aa, Melghirimyces algeriensis
  misc_feature (1)..(378): tr|A0A521AUT5|A0A521AUT5_9BACL Queuine tRNA-ribosyltran sferase OS=Melghirimyces algeriensis OX=910412 GN=tgt P E=3 SV=1
MAVHYELIKTCGQSGARLGRLHTPHGTMKTPVFMPVGTLATVKTMSPEELKELGSGIILSNTYHLFLRPGHDVVQEAGGLHRFMNWDRAILTDSGGFQVFSLADLRQISEEGVSFRSHLNGQPLFLSPEKSMEIQNALGADVIMAFDECPPHPAERDYVKDSSDRTYRWLKRCVDSHRRKEDQALFGIIQGGMYRDLREESAKQITSVDLPGYAIGGLSVGEPKEMMYEALEWTVPLMPKAKPRYLMGVGSPDALVEGVIRGVDMFDCVLPTRIARNGTIMTSRGRVVVRNAKYARDFSPLDPECDCYTCRNYSRAYLRHLLKADEIFGLRLTTYHNLHFLLQLMKQVQQAIQEDRLLDFRNRFFEQYYGSLTPERNF

SEQ ID NO: 57450 - protein, 378 aa, Melghirimyces profundicolus
  misc_feature (1)..(378): tr|A0A2T6BH01|A0A2T6BH01_9BACL Queuine tRNA-ribosyltran sferase OS=Melghirimyces profundicolus OX=1242148 GN=tg t PE=3 SV=1
MAVRYELIKTCRQSGARLGRLHTPHGTVDTPVFMPVGTLATVKTMSPEELKEMGSGIILANTYHLFLRPGHEVVREAGGLHSFMNWDRAILTDSGGFQVFSLSDLRKITEEGVSFRSHLSGEPLFLSPEKSMEVQNALGADIIMAFDECPPYPAERDYVKASTERTYRWLKRCVKAHGRKEDQALFGIIQGGMHRDLREESARQITSVDLPGYAIGGLSVGEPKEMMYEALEWTTPLMPEDKPRYLMGVGSPDALVEGVIRGVDMFDCVLPTRIARNGTTMTSQGRVVVRNAKYARDFSPLDPECDCYTCRNYSRAYLRHLIKSDETFGLRLTTYHNLYFLLKLKEQVRRAIKEDRLLDFRDRFFEQYYGSTEPTRNF

SEQ ID NO: 57451 - protein, 378 aa, Melghirimyces thermohalophilus
  misc_feature (1)..(378): tr|A0A1G6JJV8|A0A1G6JJV8_9BACL Queuine tRNA-ribosyltran sferase OS=Melghirimyces thermohalophilus OX=1236220 GN =tgt PE=3 SV=1
MAVRYELIKTCRQSGARLGRLHTPHGTVETPVFMPVGTLATVKTMSPEELKEMGSGIILSNTYHLYLRPGHEVVREAGGLHRFMNWDRAILTDSGGFQVFSLADLRKISEEGVSFRSHLSGEPLFLSPEKSMEIQNALGADIIMAFDECPPYPAERDYVKASLDRTYRWLKRCTEAHSRKEDQALFGIIQGGMYRDLREESARLITSIDLPGYAIGGLSVGEPKEKMYEALEWTTPLLPEEKPRYLMGVGSPDALVEGVIRGVDMFDCVLPTRIARNGATMTSRGRVVVRNAKYARDFSPLDPECDCYTCRNYTRAYLRHLIKSDETFGIRLTTYHNLYFLLRLKEKVRQAIREDRLLDFRDRFFEEYYGSTMPTRNF

SEQ ID NO: 57452 - protein, 382 aa, Melioribacter roseus
  misc_feature (1)..(382): tr|I6ZVC0|I6ZVC0_MELRP Queuine tRNA-ribosyltransferase OS=Melioribacter roseus (strain JCM 17771 / P3M-2) OX=1 191523 GN=tgt PE=3 SV=1
MDFKLEKRDTRSKARAGRIITEHGEIKTPIFMPVGTQGTVKAVSQRILKDEIKAQIILSNTYHLYLRPGTDILEQAGGLHKFMSWDLPILTDSGGFQVYSLTELRKLKSDGVEFRSHLDGSIHYFTPQKVIEIQRSIGSDIIMPLDECTPYPCEYDYAKKSTELTSKWAILNKEAFESTKPLYGHSQALFGIIQGSVYKDLREISAKDLLKLDFDGYAIGGLAVGEPPEVMYDLVDFTTDFMPENKPRYLMGVGRPENILEAIERGVDMFDCVMPTRNARNAYLFTSKGVVSMRNAAYKDDFSPLDPECDCYTCKNFSKSYLRHLFNAKEILALELSSIHNLTFYLNLVKTAREKILDGSFVEWKNGIVEVLSTNVQLNKEY

SEQ ID NO: 57453 - protein, 383 aa, Melioribacter sp.
  misc_feature (1)..(383): tr|A0A1G1B9J3|A0A1G1B9J3_9BACT Queuine tRNA-ribosyltran sferase OS=Melioribacter sp. GWF2_38_21 OX=1801612 GN=t gt PE=3 SV=1
MLPFSLIHTDKNSKARVGEFKTGHGTVQTPIFMPVGTQGTVKAITQRVLESEVNAEIVLSNTYHLYLRPGTEILEKAGGLHRFMNWTRPILTDSGGFQIYSLSELRKIKRDGVEFKSHLDGSSHYFDPRKVIEIQRSIGSDILMPLDECTPYPCEFEYAKKSKELTSRWAILNKEAFEQTLPLYGHEQFLFGIIQGSVYKELRESSANDLVKLDFDGYSIGGLAVGEPTDEMYKLVDFTTDFIPQTKPRYLMGVGRPENILEAIARGVDMFDCVMPTRNARNAYLFTSQGIVSMRNAAYKDDMTPLDQECGCYTCKNFSRAYLRHLFNAKEILAMELATIHNLTFYLNLVSEARKRIIDGSFVEWKNEFGKTISINVQSKKEQ

SEQ ID NO: 57454 - protein, 383 aa, Melissococcus plutonius
  misc_feature (1)..(383): tr|F3Y9H9|F3Y9H9_MELPT Queuine tRNA-ribosyltransferase OS=Melissococcus plutonius (strain ATCC 35311 / CIP 104 052 / LMG 20360 / NCIMB 702443) OX=940190 GN=tgt PE=3 S V=1
MPQSVPAIRYRLLKKEKHTGARLGELITPHGTFPTPMFMPVGTLATVKTISPEELKEIGAGVILSNTYHLWLRPGEDLIEEAGGLHKFIHWDQPILTDSGGFQVFSLSDMRNITEDGVHFKNHLNGSPMFLSPEKAIAIQNKLGSDIMMSFDECPPYYESYTYVKKSIERTSRWAERGLKAHKHPDTQGLFGIIQGAGFEELRRQSAQELVAMDLPGYSIGGLSVGESKEEMNRILEYTTPFIPEDKPRYLMGVGAADSLIDGAIRGVDMFDCVLPTRIARNGTCMTSKGRLVVKNAQFARDFSPIDEKCDCYVCKNYSRAYIRHLIKCDETFGIRLTSYHNLYFLLNLMKNVRQAIQEDKLLEFRQQFFEEYGFNQKNAKNF

SEQ ID NO: 57455 - protein, 383 aa, Melissococcus plutonius
  misc_feature (1)..(383): tr|A0A2Z5Y3B4|A0A2Z5Y3B4_9ENTE Queuine tRNA-ribosyltran sferase OS=Melissococcus plutonius OX=33970 GN=tgt PE=3 SV=1
MPQSVPAIRYRLLKKEKHTGARLGELITPHGTFPTPMFMPVGTLATVKTISPEELKEIGAGVILSNTYHLWLRPGEDLIEEAGGLHKFMHWDQPILTDSGGFQVFSLSDMRNITEDGVHFKNHLNGSPMFLSPEKAIAIQNKLGSDIMMSFDECPPYYESYTYVKKSIERTSRWAERGLKAHKHPDTQGLFGIIQGAGFEELRRQSAQELVAMDFPGYSIGGLSVGESKEEMNRILEYTTPFIPEDKPRYLMGVGAADSLIDGAIRGVDMFDCVLPTRIARNGTCMTSKGRLVVKNAQFARDFSPIDEKCDCYVCKNYSRAYIRHLIKCDETFGIRLTSYHNLYFLLNLMKNVRQAIQEDKLLEFRQQFFEEYGFNQKNAKNF

SEQ ID NO: 57456 - protein, 381 aa, Melissococcus sp.
  misc_feature (1)..(381): tr|A0A374JDY2|A0A374JDY2_9ENTE Queuine tRNA-ribosyltran sferase OS=Melissococcus sp. OM08-11BH OX=2293110 GN=tg t PE=3 SV=1
MTEPAIKYRLIKKEKHTGARLGEIITPHGTFPTPMFMPVGTLATVKTMAPEELKEMGAGIILSNTYHLWLRPGEDIVEGAGGLHKFMNWDQGILTDSGGFQVWSLSDMRQIEESGVHFRNHLNGSKMFLSPEKAIQIQNKLGPDIMMSFDECPPFQESHDYVKKSIERTSRWAERGLKAHQNPDRQGLFGIIQGAGYKDLREQSARELVSLDFPGYSIGGLSVGEPKEEMNKVLEYTTPLIPENKPRYLMGVGTPDSLIDGVIRGVDMFDCVLPTRIARNGTCMTSQGRLVVKNAKYAEDYRPIDEKCDCYTCRNYTRAYIRHLIKCDETFGIRLTSYHNLYFLLNTMKQVRQAIMDDNLLEFRQAFFEEYGFNKENAKNF

SEQ ID NO: 57457 - protein, 394 aa, Melittangium boletus
  misc_feature (1)..(394): tr|A0A250ITK9|A0A250ITK9_9DELT Queuine tRNA-ribosyltran sferase OS=Melittangium boletus DSM 14713 OX=1294270 GN =tgt PE=3 SV=1
MGEPREEKGDTRVPPSLVRYELLHEDASGTRARRGRLHTPHGMVETPIFMPVGTVGSVKGVGPDELLTLDAQIILGNTYHLMLRPGDDLVGEMGGLHRFISWDRPMLTDSGGFQVFSLSEKRKITEEGAAFQSHLDGRKLLLTPERSIEIQETLGADIIMAFDECPPSTESRAYLEKSLARTTRWLHRCVKAWRRERSSLFGIVQGGMDPQLRKAHAEEVCAVDLPGYALGGYAVGETPEAMYEGVAYSAPLLPRDKPRYLMGVGTPVDLINCVEQGVDMFDCVLPTRCARNGLLFTTEGKLVIRNATWAKDPRPVDPACSCYTCRTFSRAYLRHLFVAGEILAMRLNTLHNLHYFLTLMKQVREAIAEDRYASFARDFREKARAQEAERTRTK

SEQ ID NO: 57458 - protein, 407 aa, Melittangium boletus
  misc_feature (1)..(407): tr|A0A250ITF8|A0A250ITF8_9DELT Queuine tRNA-ribosyltran sferase OS=Melittangium boletus DSM 14713 OX=1294270 GN =tgt PE=3 SV=1
MEGVIRARHGYKAGSMAVRFELVTTDSTGARAGVLHTRRGSIPTPVFMPVATHASFRHLGMEEIKATGSKILLSNTYHLMLKPGAEVFKRFGGIHPFMQWDGAVLTDSGGFQIFSLPEDRLITEKGAHFRSFYDNSRQLLSPESSIAMQQAINSEIMMVLDVCIDSRTDEPGTREAMERTHRWAVRSLAAKNQVDTGQALFAIVQGGVHPHLRDESAAFLTQHPFDGFAIGGLAVGETNEERKTMTARAAASLPQDKPRYLMGVGTPTDLLEAVLRGVDMFDCIIPTKMAQQGYAYTFQGLVRITRQAFRLSDEPLDPMCDCYVCKRYSRGYLQHLMSGKHHTGSRMLSVHNVHHYQMLTWKMRDAILRGSYAQAYRELKQMVATPKDLKEARLEVGANAVTLKDVG

SEQ ID NO: 57459 - protein, 376 aa, Meridianimaribacter sp.
  misc_feature (1)..(376): tr|A0A4V2KED7|A0A4V2KED7_9FLAO Queuine tRNA-ribosyltran sferase OS=Meridianimaribacter sp. CL38 OX=2213021 GN=t gt PE=3 SV=1
MIFELKGKDSQSKARAGKITTDHGVIETPIFMPVGTVASVKGVHQRELKNDINPDIILGNTYHLYLRPQTDILEKAGGLHKFMNWDRNILTDSGGYQVYSLSANRKIKEEGVKFKSHIDGSYHTFTPENVMEIQRSIGADIIMAFDECTPYPCDYNYAKRSMHMTHRWLDRCIAHLEKTPFKYGYSQTFFPIVQGSTYKDLRMQSAEYIANSGALGNAIGGLSVGEPAEEMYAMTDVVCGILPEDKPRYLMGVGTPINILENIALGVDMFDCVMPTRNARNGMLFTAHGTINIKNKKWEDDFSPIDEMGITFVDTEYSKAYLRHLFTVNELLGKQIATIHNLGFYLWLVREARKHILAGDFRSWKDKMVKQMDKRL

SEQ ID NO: 57460 - protein, 380 aa, Merismopedia glauca
  misc_feature (1)..(380): tr|A0A2T1BZ73|A0A2T1BZ73_9CYAN Queuine tRNA-ribosyltran sferase OS=Merismopedia glauca CCAP 1448/3 OX=1296344 G N=tgt PE=3 SV=1
MNENFTFKSIARCSHTQARAGIFYTPHGVVETPRFMPVGTVATVKTLTPAQLEATEAQMVLANTYHLHLQPGEEIIAKAGGLHKFMNWKGPMLTDSGGFQVFSLSKMRKISEDGVIFRSPRNGDIINLTPEKSIQIQNALGADVIMAFDECPPYPSDRSTIIASTERTYRWLERCINAHECPQDRALFGIVQGGVYLDLRQAAAESLVKLDLPGYAIGGVSVGEPAELIEKIVKVTAPLLPASKPRYLMGVGTYREMAQAIAWGVDMFDCVIPTRLGRHGAALVQGERWNLRNSRFREDFTPLDETCPCYTCQNFSRAYLNHLVKCQEVLGYTLLSLHNTTELIRFTTRIREAILSDRFTEEFAPWLNSTTTESTDPDLC

SEQ ID NO: 57461 - protein, 370 aa, Mesoaciditoga sp.
  misc_feature (1)..(370): tr|A0A2J6WK29|A0A2J6WK29_9BACT Queuine tRNA-ribosyltran sferase OS=Mesoaciditoga sp. OX=2060323 GN=tgt PE=3 SV= 1
MRFETTRRDGTARSGKLILERGTVETPVFMPVGTNGAIKMCTRDCVKKAGATIVLANAFHLYLKPGLEILREFGGIHDFASWDIPVLTDSGGFQIFSLSKNIKVDDDGADFKSPFDGTVHRFTPEKVVEIQETIGSDIAMVLDECLAPTDLESTKKSMKRTFKWAQRAILAHKRKDQALFGITQGGFFEETRRESTIEITSLPFDGFGIGGLSVGEDIDTTIKMLDVVLPLMPEDRPRYLMGVGDPLLMLEAVERGVDMMDCVLPTRMARHGGILTSQGRINIRAAIYEKDKGPLDPSCDCEVCRSYSRGYIHHLIKRNESTGMILATYHNIYFLTDLMKRSKAAIINKEFKEFKEEVLSKMKYQKRRVL

SEQ ID NO: 57462 - protein, 384 aa, Mesocricetibacter intestinalis
  misc_feature (1)..(384): tr|A0A4R6VFK4|A0A4R6VFK4_9PAST Queuine tRNA-ribosyltran sferase OS=Mesocricetibacter intestinalis OX=1521930 GN =tgt PE=3 SV=1
MKYQLQTTNGRARRGKLTFERPQGTFSVETPAFMPVGTYGTVKGMTPEEVRESGAEILLGNTFHLWLRPGQEIIRKHGDLHDFMQWQRPILTDSGGFQVFSLGKLRKISEEGVKFQNPINGERIFLSPEKSMEIQYDLGSDIVMIFDECTPYPATFDYAKKSMEMSLRWAKRSRDRFDQLGNKNALFGIIQGGTFEELRQISLDGLKAIGFDGYAVGGLAVGEPKEDMHRILEYITPQIPADKPRYLMGVGKPEDLVEGVRRGIDMFDCVMPTRNARNGHLFVSDGIVKIRNAKYRDDTSPLDAECDCYTCRHYSKAYLYHLDKCGEILGARLNTIHNLRYYQRLMAQIRRAIEEHRFEDFVQEFYARIGKPVPPLDSYHQFEG

SEQ ID NO: 57463 - protein, 376 aa, Mesoflavibacter aestuarii
  misc_feature (1)..(376): tr|A0A2T1NBC0|A0A2T1NBC0_9FLAO Queuine tRNA-ribosyltran sferase OS=Mesoflavibacter aestuarii OX=1266046 GN=tgt PE=3 SV=1
MIFNLEGKDAQSSARAGKITTDHGVIETPIFMPVGTVGTVKGVHQRELKDEINPDIILGNTYHLYLRPGIETLEKAGGLHKFMNWDRNILTDSGGYQVYSLSGRRKIKEEGVKFKSHIDGSYHVFTPENVMETQRSIGADIIMAFDECTPYPCDYNYAKRSMHMTHRWLDRCIDHLHKVPYKYDYSQAFFPIVQGSTYKDLRRQSAEYIANAGALGNAIGGLSVGEPAEELYAMTEIVTEILPEDKPRYLMGVGTPINILENIALGVDMFDCVMPTRNARNGMLFTAYGSINIKNLKWKDDFSPIDEMNITWVDTEYSKAYLRHLFHVNELLGKQIATIHNLGFYLWLTREARKHILAGDFRTWKDKMVKQMDNRL

SEQ ID NO: 57464 - protein, 376 aa, Mesoflavibacter sabulilitoris
  misc_feature (1)..(376): tr|A0A2T1NBC8|A0A2T1NBC8_9FLAO Queuine tRNA-ribosyltran sferase OS=Mesoflavibacter sabulilitoris OX=1520893 GN= tgt PE=3 SV=1
MTFDLKAKDTQSKARAGVIKTDHGVIETPIFMPVGTVASVKGVHQRELKEEINPDIILGNTYHLYLKPQTDILEKAGGLHKFMNWDRNILTDSGGYQVYSLSANRKIKEEGVKFKSHIDGSYHTFTPENVMEIQRTIGADIIMAFDECTPYPCDYNYAKRSMHMTHRWLERCLAHLKKTPFKYGYSQAFFPIVQGSTYKDLRKQSAEYIAGVGAEGNAIGGLSVGEPAEEMYAMTEVVTDILPEDKPRYLMGVGTPINILENIALGVDMFDCVMPTRNARNGMLFTAHGTINIKNLKWRDDFSPIDEMGITFVDTEYSKAYLRHLFNVNELLGKQIATIHNLGFYLWLVREARKHIIAGDFRTWKDKMVKQMDKRL

SEQ ID NO: 57465 - protein, 376 aa, Mesoflavibacter sp.
  misc_feature (1)..(376): tr|A0A2T1NRC2|A0A2T1NRC2_9FLAO Queuine tRNA-ribosyltran sferase OS=Mesoflavibacter sp. HG96 OX=2109944 GN=tgt P E=3 SV=1
MTFDLKAKDTQSKARAGVITTDHGVIETPIFMPVGTVASVKGVHQRELKEEINPDIILGNTYHLYLKPQTDILEKAGGLHKFMNWDRNILTDSGGYQVYSLSANRKIKEEGVKFKSHIDGSYHTFTPENVMEIQRTIGADIIMAFDECTPYPCDYNYAKRSMHMTHRWLERCLTHLKKTPFKYDYSQAFFPIVQGSTYKDLRKQSAEYIAGVGAEGNAIGGLSVGEPAEEMYAMTEVVTDILPEDKPRYLMGVGTPINILENIALGVDMFDCVMPTRNARNGMLFTAHGTINIKNLKWRDDFSPIDEMGITFVDTEYSKAYLRHLFNVNELLGKQIATIHNLGFYLWLVREARKHIIAGDFRTWKDKMVKQMDKRL

SEQ ID NO: 57466 - protein, 376 aa, Mesonia algae
  misc_feature (1)..(376): tr|A0A2W7HX94|A0A2W7HX94_9FLAO Queuine tRNA-ribosyltran sferase OS=Mesonia algae OX=213248 GN=tgt PE=3 SV=1
MEFDLLAKDSGSKARAGEITTAHGKIETPIFMPVGTIGTVKGVHQRELKEEINPDIILGNTYHLYLRPQMEVLRKAGGLHKFMNWDRNILTDSGGYQVYSLSANRKIKEEGVKFKSHIDGSYHFFTPENVMDVQRTIGADIIMAFDECTPYPCDYRYAKRSMHMTHRWLDRCMNHFHNTPPLYGYDQTLFPIVQGSTYKDLRQQSAEYIANAGAEGNAIGGLSVGEPAEEMYAMTEVVTAILPEDKPRYLMGVGTPINILENIALGVDMFDCVMPTRNARNGMLFTAHGTINIKNKKWYDDFSPIDEMGITWVDTEYSKAYLKHLFSVNEMLGKQIATIHNLGFYLWLTREARKHIIAGDFREWKDKMVKQMDKRL

SEQ ID NO: 57467 - protein, 376 aa, Mesonia phycicola
  misc_feature (1)..(376): tr|A0A1M6A9S9|A0A1M6A9S9_9FLAO Queuine tRNA-ribosyltran sferase OS=Mesonia phycicola OX=579105 GN=tgt PE=3 SV=1
MKFDLLSTDINSKARAGEITTDHGKIETPIFMPVGTIATVKGVHQKELKEEINPDIILGNTYHLYLKPKTEILRKAGGIHKFMNWDRNILTDSGGYQVYSLSANRKIKEEGVKFKSHIDGSYHFFTPENVMEIQRTIGADIIMAFDECTPYPCDYRYAKKSMHMTHRWLDRCIKHFEKTPPLYGYEQSLFPIVQGSTYKDLRRQSAEYIANAGAVGNAIGGLSVGEPAEEMYAMTEVVTEILPEDKPRYLMGVGTPINILENIALGVDMFDCVMPTRNGRNGMLFTAHGTINIKNKKWEDDFSAIDDMAITWVDTEYSKAYLRHLFTVNEMLGRQIATIHNLGFYLWLVREARKHILAGDFRVWKDMMVKQMDKRL

SEQ ID NO: 57468 - protein, 376 aa, Mesonia sp.
  misc_feature (1)..(376): tr|A0A5C8LEZ8|A0A5C8LEZ8_9FLAO Queuine tRNA-ribosyltran sferase OS=Mesonia sp. HuA40 OX=2602761 GN=tgt PE=3 SV= 1
MQFKLEANDVGSKARAGTITTDHGSIETPIFMPVGTIATVKGVHQRELKEEINPDIILGNTYHLYMRPHTDILQKAGGLHKFMNWDRNILTDSGGYQVYSLSANRKIKEEGVKFKSHIDGSYHFFTPEGVMDIQRQIGADIIMAFDECTPYPCDYNYAKRSMHMTHRWLERCLKRFHDTPPLYGYEQTLFPIVQGSTYKDLRQQSAEYIANAGAPGNAIGGLSVGEPAEEMYAMTEVVTAILPEDKPRYLMGVGTPINILENIALGVDMFDCVMPTRNGRNGMLFTAHGTINIKNKKWEDDFSPLDEMGITWVDKEYSKAYVRHLFSVNEMLGRQIATIHNLGFYLWLVREARKHILAGDFTSWKNQMVKQMDKRL

SEQ ID NO: 57469 - protein, 376 aa, Mesonia sp.
  misc_feature (1)..(376): tr|A0A2W1JUB0|A0A2W1JUB0_9FLAO Queuine tRNA-ribosyltran sferase OS=Mesonia sp. K7 OX=2218606 GN=tgt PE=3 SV=1
MFFDLKAKDQHSKARAGVITTDHGIIETPIFMPVGTVGTVKGVHQRELEEEVNPDIILGNTYHLYLRPQTDILEQAGGLHKFMNWDRNILTDSGGYQVYSLSANRKIKEEGVKFKSHIDGSYHTFTPENVMEIQRTIGADIIMAFDECTPYPCDYKYAKKSMHMTHRWLDRCIHHLEKTPLKYDYNQYFFPIVQGSTYKDLRQQSAEYIANAGAVGNAIGGLSVGEPAEEMYAMTDVVCSILPEEKPRYLMGVGTPINILENIALGVDMFDCVMPTRNARNGMLFTAHGTINIKNKKWENDFSPIDEMGITWVDTAYSKAYVRHLFSVNELLGKQIATIHNLGFYLWLVREARKQILEGTFRTWKDKMVKQMDKRL

SEQ ID NO: 57470 - protein, 376 aa, Mesorhizobium albiziae
  misc_feature (1)..(376): tr|A0A1I4BY43|A0A1I4BY43_9RHIZ Queuine tRNA-ribosyltran sferase OS=Mesorhizobium albiziae OX=335020 GN=tgt PE=3 SV=1
MADTFTFKLLATDGKARRGEISMPRGTVRTPAFMPVGTGGTVKAMYMDQVRDVGADIILGNTYHLMLRPGAERVARLGGLHDFARWPHPILTDSGGFQVMSLAQLRKLNENGVTFRSHIDGAPYEMSPERSIEIQGLLDSDIQMQLDECVALPAKEKDIERAMEMSLRWAERCKTAFGEQPGKAMFGIVQGGDNAKLRVRSATALSAMGLKGYAVGGLAVGEPQPVMLDMLDITCPELPAEKPRYLMGVGTPDDILKSVARGIDMFDCVMPTRAGRHGLAYTRRGKVNLRNARHTDDPRPLDEESDCPAARDYSRAYLHHLVKSQEALGAMLLTWNNLSYYQRLMQDIRDAIEAGQFTERAAAITEGWARGDLAPV

SEQ ID NO: 57471 - protein, 376 aa, Mesorhizobium albiziae
  misc_feature (1)..(376): tr|A0A5D4H8T0|A0A5D4H8T0_9RHIZ Queuine tRNA-ribosyltran sferase OS=Mesorhizobium albiziae OX=335020 GN=tgt PE=3 SV=1
MSDEFTFKVLATDGKARRGEISMPRGTVRTPAFMPVGTGGTVKAMYMDQVRGVGADIILGNTYHLMLRPGAERVARLGGLHEFARWPWPILTDSGGFQVMSLSKLRKLNESGVTFRSHIDGAPYEMSPERSIEIQGLLDSDIQMQLDECVALPATEKEIARAMELSLRWAERCKTAFGEQPGRAMFGIVQGGDIPALRERSAGALKDMGLKGYAVGGLAVGEPQAVMLDMLDVTCPVLPQEKPRYLMGVGTPDDIIKSVARGIDMFDCVMPTRAGRHGLAYTRRGKVNLRNARHADDPRPLDEESDCPAARDYSRAYLHHLVKSGEALGSMLLTWNNLAYYQTLMADIRGSIEAGRFVERTGEIAQAWAEGDLPVL

SEQ ID NO: 57472 - protein, 376 aa, Mesorhizobium alhagi
  misc_feature (1)..(376): tr|H0HVI0|H0HVI0_9RHIZ Queuine tRNA-ribosyltransferase OS=Mesorhizobium alhagi CCNWXJ12-2 OX=1107882 GN=tgt PE =3 SV=1
MNQTFSFSLLATDGKARRGEISMPRGTIRTPAFMPVGTGGTVKAMYMDQVRGVGSDIILGNTYHLMLRPGAERVARLGGLHEFARWPYPILTDSGGFQVMSLSKLRKLNEQGVTFRSHIDGAAYEMSPERSIEIQGLLDSDIQMQLDECTALPAKDKEIERAMELSLRWAERCKTAFGEQPGKAMFGIVQGGDDALLREKSARALATMDLKGYAVGGLAVGEPQAVMLEMLEITCPELPAQKPRYLMGVGTPDDILKSVARGIDMFDCVMPTRAGRHGLAYTRRGKVNLRNARHADDHRPLDEESDCPAARDYSRAYLHHLVRSQEALGAMLLTWNNLSYYQSLMGQIRDAISAGAFEERTAEITEGWVKGDLPPL

SEQ ID NO: 57473 - protein, 376 aa, Mesorhizobium amorphae
  misc_feature (1)..(376): tr|G6Y9D5|G6Y9D5_9RHIZ Queuine tRNA-ribosyltransferase OS=Mesorhizobium amorphae CCNWGS0123 OX=1082933 GN=tgt PE=3 SV=1
MAEAFSFKVLAADGKARRGVIDMPRGEIRTPAFMPVGTGGTVKTMYMDQVRDLGADIILGNTYHLMLRPGAERVARLGGLHEFARWPHPILTDSGGFQVMSLSKLRKLTEKGVTFRSHIDGAAYEMSPERSIEIQGLLDSDIQMQLDECTALPAKEKEIERAMELSLRWAERCKAAFGDQPGKAMFGIVQGGDVPSLRVRSAQALKVMELKGYAVGGLAVGEPQAVMLNMLDITCAELPEDKPRYLMGVGTPDDIIKSVARGIDMFDCVMPTRAGRHGLAYTRRGKVNLRNARHADDPRPLDEESDCPAARDYSRAYLHHLVRSQEALGAMLLTWNNLSYYQNLMHDIRAAIEAGAFEARATEISEGWARGDIPAN

SEQ ID NO: 57474 - protein, 376 aa, Mesorhizobium amorphae
  misc_feature (1)..(376): tr|A0A2W4YY22|A0A2W4YY22_9RHIZ Queuine tRNA-ribosyltran sferase OS=Mesorhizobium amorphae OX=71433 GN=tgt PE=3 SV=1
MTTPFSFSVSATDGLARRGAITTARGTIRTPAFMPVGTAGTVKAMYMDQVRGTGADIILGNTYHLMLRPGAERVARLGGLHAMARWPHPILTDSGGFQVMSLAGLRKLDEQGVVFQSHIDGSRHAMSPERSIEIQGLLGSDIQMQLDECIALPAPRAEVERAMELSLRWAERCKTAFGDQPDRAMFGIVQGGDMPDLRVRSAQALRGLDLKGYAVGGLAVGEPQAVMLDILSATCPALPEEKPRYLMGVGTPEDILLSVARGVDMFDCVMPTRAGRHGLAYTRRGKINLKNARHAEDTRPLDEESDCPAARDYSRAYLHHLVRSGEALGAMLLSWNNIAYYQALMGQIRTAIEAGGLGEATGEIREMWARGDVAPV

SEQ ID NO: 57475 - protein, 379 aa, Mesorhizobium australicum
  misc_feature (1)..(379): tr|A0A1X7PAD0|A0A1X7PAD0_9RHIZ Queuine tRNA-ribosyltran sferase OS=Mesorhizobium australicum OX=536018 GN=tgt P E=3 SV=1
MSSTSFQFTLHATDGAARTGEISMPRGTIATPAFMPVGTGGTVKAVYMDQVRGAGADIILGNTYHLMLRPGAERVARLGGLHEFARWPWPILTDSGGFQVMSLAQLRKLTEDGVTFRSHIDGSSWHMSPERSIEIQGLLDSDIQMQLDECVALPAKRQEIERAMELSLRWADRCKTAFGDQPGKAMFGIVQGGDDAELRIRSAQALKALELKGYAVGGLAVGEPQEVMLTMLEATCPELPHEKPRYLMGVGTPDDIVKSVARGIDMFDCVMPTRAGRHGLAYTRRGKINLRNARHADDPRPLDEESSCPAARDYSRAYLHHLIKSGEALGGMLLTWNNISYYQDLMRGLRGAIRESRFVDHAAAVTEGWARGDIAPVTC

SEQ ID NO: 57476 - protein, 376 aa, Mesorhizobium australicum
  misc_feature (1)..(376): tr|L0KMH6|L0KMH6_MESAW Queuine tRNA-ribosyltransferase OS=Mesorhizobium australicum (strain HAMBI 3006 / LMG 2 4608 / WSM2073) OX=754035 GN=tgt PE=3 SV=1
MAENFTFRVLATDGKARRGLIEMPRGEIRTPAFMPVGTGGTVKAMYMDQVRGVGADIILGNTYHLMLRPGAERVARLGGLHEFARWPHPILTDSGGFQVMSLSKLRKLTEKGVTFRSHIDGAAYEMSPERSIEIQGLLDSDIQMQLDECTALPAEVKEIERAMELSLRWAERCKTAFGDQPGKAMFGIVQGGDNAALRVRSAQALSAMELKGYAVGGLAVGEPQAVMLDMLDITCPELPDDKPRYLMGVGTPDDILKSVARGIDMFDCVMPTRAGRHGLAYTRRGKVNLRNARHADDPRPLDEESDCPAARDYSRAYLHHLVRSQEALGAMLLTWNNLSYYQKLMQDIRAAIETGTFKTRGAEISEGWTRGDIPAP

SEQ ID NO: 57477 - protein, 376 aa, Mesorhizobium ciceri
  misc_feature (1)..(376): tr|A0A143NBE3|A0A143NBE3_9RHIZ Queuine tRNA-ribosyltran sferase OS=Mesorhizobium ciceri OX=39645 GN=tgt PE=3 SV =1
MAKQFSFKVLAIDGKARRGVIDMPRGEIRTPAFMPVGTGGTVKTMYMDQVRGVGADIILGNTYHLMLRPGAERVARLGGLHEFARWPHPILTDSGGFQVMSLSKLRKLTEKGVTFRSHIDGAAYEMSPERSIEIQGLLDSDIQMQLDECTALPAEMKEIERAMELSLRWAERCKTAFGDQPGKAMFGIVQGGDNAALRVRSAQALSAMELKGYAVGGLAVGEPQAVMLEMLDITCPELPADKPRYLMGVGTPDDILKSVARGIDMFDCVMPTRAGRHGLAYTRRGKVNLRNARHADDPRPLDEESDCPAARDYSRAYLHHLVRSQEALGAMLLTWNNLSYYQKLMQDIRAAIEAGTFEARGAEITEGWARGDIPLL

SEQ ID NO: 57478 - protein, 376 aa, Mesorhizobium ciceri
  misc_feature (1)..(376): tr|E8TB03|E8TB03_MESCW Queuine tRNA-ribosyltransferase OS=Mesorhizobium ciceri biovar biserrulae (strain HAMBI 2942 / LMG 23838 / WSM1271) OX=765698 GN=tgt PE=3 SV=1
MAKQFSFKVLAIDGKARRGVIDMPRGEIRTPAFMPVGTGGTVKTMYMDQVRGVGADIILGNTYHLMLRPGAERVARLGGLHEFARWPHPILTDSGGFQVMSLSKLRKLTEKGVTFRSHIDGAAYEMSPERSIEIQGLLDSDIQMQLDECTALPAEMKEIERAMELSLRWAERCKTAFGDQPGKAMFGIVQGGDNAALRVRSAQALSAMELKGYAVGGLAVGEPQAVMLEMLDITCPELPDNKPRYLMGVGTPDDILKSVARGIDMFDCVMPTRAGRHGLAYTRRGKVNLRNARHADDPRPLDEESDCPAARDYSRAYLHHLVRSQEALGAMLLTWNNLSYYQKLMQDIRAAIEAGTFEARGAEITEGWARGDIPLL

SEQ ID NO: 57479 - protein, 376 aa, Mesorhizobium delmotii
  misc_feature (1)..(376): tr|A0A2P9A9V0|A0A2P9A9V0_9RHIZ Queuine tRNA-ribosyltran sferase OS=Mesorhizobium delmotii OX=1631247 GN=tgt PE= 3 SV=1
MTKAFTFEVLATDGKARRGSITMPRGEVRTPAFMPVGTGGTVKTMYMDQVRGVGSDIILGNTYHLMLRPGAERVARLGGLHEFARWPHPILTDSGGFQVMSLSKLRKLTENGVTFRSHIDGAAHEMSPERSIEIQGLLDSDIQMQLDECTALPAMEKEIERAMELSLRWAERCKTAFGDQPGKAMFGIVQGGDIPALRLRSAQALKAMDLKGYAIGGLAVGEPQAVMLEMLDITCPELPADRPRYLMGVGTPDDILKSVARGIDMFDCVMPTRAGRHGLAYTRRGKVNLRNARHAEDPRPLDEESDCPAARDYSRAYLHHLVRSQEALGAMLLTWNNLSYYQKLMQDIRAAIEAGAFEARAAEISEGWARGDIPAM

SEQ ID NO: 57480 - protein, 376 aa, Mesorhizobium ephedrae
  misc_feature (1)..(376): tr|A0A2P7SPN3|A0A2P7SPN3_9RHIZ Queuine tRNA-ribosyltran sferase OS=Mesorhizobium ephedrae OX=2116701 GN=tgt PE= 3 SV=1
MTETFGFRVLATDGLARRGEVSMPRGKIRTPAFMPVGTGGTVKTMYMDQVRALGSDIILGNTYHLMLRPGAERVARLGGLHHFSRWPHPILTDSGGFQVMSLAKLRKLDEKGVTFRSHIDGAAYEMSPERSIEIQGLLGSDIQMQLDECIALPGEEKDIERAMELSLRWAERCKAAFGDQPGRAMFGIVQGGDKARLRERSATALSELGLKGYAVGGLAVGEPQAVMLDMLEATCPELPADKPRYLMGVGTPDDILKSVARGIDMFDCVMPTRAGRHGLAYTRRGKVNLRNARHADDPRPLDEESDCPASRDYSRAYLHHLVRSQEALGAMLLTWNNLAYYQRLMQDIRAAIEAGELAERSALISEGWARGDLPPV

SEQ ID NO: 57481 - protein, 376 aa, Mesorhizobium erdmanii
  misc_feature (1)..(376): tr|A0A4Q1UZI8|A0A4Q1UZI8_9RHIZ Queuine tRNA-ribosyltran sferase OS=Mesorhizobium erdmanii OX=1777866 GN=tgt PE= 3 SV=1
MAKPFSFKVLATDGKARRGIIDMPRGEIRTPAFMPVGTGGTVKTMYMDQVRGVGADIILGNTYHLMLRPGAERVARLGGLHEFARWPHPILTDSGGFQVMSLSKLRKLTEKGVTFRSHIDGAPYEMSPERSIEIQGLLDSDIQMQLDECTALPAELKEIERAMELSLRWAERCKTAFGDQPGKAMFGIVQGGDNAALRVRSAQALSEMGLKGYAVGGLAVGEPQAVMLEMLDITCPELPADKPRYLMGVGTPDDILKSVARGIDMFDCVMPTRAGRHGLAYTRRGKVNLRNARHADDPRPLDEESDCPAARDYSRAYLHHLVRSQEALGAMLLTWNNLSYYQKLMQDIRAAIETQTFEARGAEITEGWARGDIPVL

SEQ ID NO: 57482 - protein, 376 aa, Mesorhizobium hawassense
  misc_feature (1)..(376): tr|A0A330HM14|A0A330HM14_9RHIZ Queuine tRNA-ribosyltran sferase OS=Mesorhizobium hawassense OX=1209954 GN=tgt P E=3 SV=1
MAETFSFKLLASDGKARRGLVSMPRGEIRTPAFMPVGTGGTVKAMYMDQVRGVGADVILGNTYHLMLRPGAERVARLGGLHEFARWPHPILTDSGGFQVMSLSKLRKLTEQGVTFRSHIDGAPYEMSPERSIEIQGLLDSDIQMQLDECTALPAKPKEIERAMELSLRWAERCKTAFGDQPGKAMFGIVQGGDSAPMRVRSAQALKAMDLKGYAVGGLAVGEPQSVMLEMLDITCPELPADRPRYLMGVGTPDDILKSVARGIDMFDCVMPTRAGRHGLAYTRRGKVNLRNARHADDPRPLDEESDCAAARDYSRAYLHHLVRSQESLGAMLLTWNNLSYYQKLMQDIRASIEAQAFEARAAEIAEGWARGDIPAV

SEQ ID NO: 57483 - protein, 377 aa, Mesorhizobium helmanticense
  misc_feature (1)..(377): tr|A0A2T4J1Y9|A0A2T4J1Y9_9RHIZ Queuine tRNA-ribosyltran sferase OS=Mesorhizobium helmanticense OX=1776423 GN=tg t PE=3 SV=1
MTREFTFKVLATNGRARRGAITMPRGEIRTPAFMPVGTGGTVKAMYMDQVRGVGSDIILGNTYHLMLRPGAERVAKLGGLHEFARWPHPILTDSGGFQVMSLSKLRKLTEKGVTFRSHIDGAAYEMSPERSIEIQGLLDSDIQMQLDECTALPAEKKEIERAMELSLRWAERCKSAFGDQPGKAMFGIVQGGDVPDLRLRSAQALKAMDLKGYAVGGLAVGEPQAVMLDMLDITCPELPADRPRYLMGVGTPDDILKSVARGIDMFDCVMPTRAGRHGLAYTRRGKVNLRNARHADDPRPLDEDSDCPAARDYSRAYLHHLVRSQEALGAMLLTWNNLSYYQKLMQDIRAAIEAGAFEVRTAEISEGWAKGDIPVRY

SEQ ID NO: 57484 - protein, 376 aa, Mesorhizobium japonicum; identical to SEQ ID NO: 57481
  misc_feature (1)..(376): tr|A0A3M9X4R7|A0A3M9X4R7_9RHIZ Queuine tRNA-ribosyltran sferase OS=Mesorhizobium japonicum OX=2066070 GN=tgt PE =3 SV=1

SEQ ID NO: 57485 - protein, 376 aa, Mesorhizobium japonicum
  misc_feature (1)..(376): sp|Q98M57|TGT_RHILO Queuine tRNA-ribosyltransferase OS= Mesorhizobium japonicum (strain LMG 29417 / CECT 9101 / MAFF 303099) OX=266835 GN=tgt PE=3 SV=1
MAKPFSFKVLATDGRARRGIIDMPRGEIRTPAFMPVGTGGTVKTMYMDQVRGVGADIILGNTYHLMLRPGAERVARLGGLHEFARWPHPILTDSGGFQVMSLSKLRKLTEKGVTFRSHIDGAPYEMSPERSIEIQSLLDSDIQMQLDECTALPAELKEIERAMELSLRWAERCKTAFGDQPGKAMFGIVQGGDNAALRVRSAQALSAMGLKGYAVGGLAVGEPQAVMLEMLDITCPELPADKPRYLMGVGTPDDILKSVARGIDMFDCVMPTRAGRHGLAYTRRGKVNLRNARHADDPRPLDEESDCPAARDYSRAYLHHLVRSQEALGAMLLTWNNLSYYQKLMQDIRAAIETQTFEARGAEITEGWARGDIPVL

SEQ ID NO: 57486 - protein, 376 aa, Mesorhizobium jarvisii
  misc_feature (1)..(376): tr|A0A3A5KHR7|A0A3A5KHR7_9RHIZ Queuine tRNA-ribosyltran sferase OS=Mesorhizobium jarvisii OX=1777867 GN=tgt PE= 3 SV=1
MAKPFSFKVLAIDGKARRGVIDMPRGEIRTPAFMPVGTGGTVKTMYMDQVRGVGADIILGNTYHLMLRPGAERVARLGGLHEFARWPHPILTDSGGFQVMSLSKLRKLTEKGVTFRSHIDGAPYEMSPERSIEIQGLLDSDIQMQLDECTALPAEMKEIERAMELSLRWAERCKTAFGDQPGKAMFGIVQGGDNAALRVRSAQALSAMGLKGYAVGGLAVGEPQAVMLEMLDITCPELPADKPRYLMGVGTPDDILKSVARGIDMFDCVMPTRAGRHGLAYTRRGKVNLRNARHADDPRPLDEESDCPAARDYSRAYLHHLVRSQEALGAMLLTWNNLSYYQKLMQDIRAAIETGSFEARGAEISEGWARGDIPVL

SEQ ID NO: 57487 - protein, 379 aa, Mesorhizobium kowhaii
  misc_feature (1)..(379): tr|A0A2W7CHZ3|A0A2W7CHZ3_9RHIZ Queuine tRNA-ribosyltran sferase OS=Mesorhizobium kowhaii OX=1300272 GN=tgt PE=3 SV=1
MAKPFSFKVLATDGKARRGVIDMPRGEIRTPAFMPVGTGGTVKTMYMDQVRGVGADIILGNTYHLMLRPGAERVARLGGLHEFARWPHPILTDSGGFQVMSLSKLRKLTEKGVTFRSHIDGAAYEMSPERSIEIQGLLDSDIQMQLDECTALPAAMKEIERAMELSLRWAERCKTAFGDQPGKAMFGIVQGGDNAALRVRSAQALSAMGLKGYAVGGLAVGEPQAVMLEMLDITCPELPANKPRYLMGVGTPDDILKSVARGIDMFDCVMPTRAGRHGLAYTRRGKVNLRNARHADDPRPLDEENDCPAARDYSRAYLHHLVRSQEALGAMLLTWNNLSYYQKLMQDIRAAIEANAFETRAAEISEGWARGDIPAAARS

SEQ ID NO: 57488 - protein, 376 aa, Mesorhizobium mediterraneum
  misc_feature (1)..(376): tr|A0A271KZU2|A0A271KZU2_9RHIZ Queuine tRNA-ribosyltran sferase OS=Mesorhizobium mediterraneum OX=43617 GN=tgt PE=3 SV=1
MTKAFTFEVLATDGKARRGAITMPRGEIRTPAFMPVGTGGTVKTMYMDQVRGVGSDIILGNTYHLMLRPGAERVARLGGLHEFARWPHPILTDSGGFQVMSLSKLRKLTEKGVTFRSHIDGAAYEMSPERSIEIQGLLDSDIQMQLDECTALPAMEKEIERAMELSLRWAERCKAAFGDQQGKAMFGIVQGGDIPALRLRSSQALKAMDLKGYAIGGLAVGEPQAVMLEMLEITCPELPADRPRYLMGVGTPDDILKSVARGIDMFDCVMPTRAGRHGLAYTRRGKVNLRNARHADDPRPLDEESDCPAARDYSRAYLHHLVRSQEALGAMLLTWNNLSYYQKLMQDIRAAIEAGAFEARAVEISEGWARGDIPAR

SEQ ID NO: 57489 - protein, 376 aa, Mesorhizobium metallidurans
  misc_feature (1)..(376): tr|M5EQK8|M5EQK8_9RHIZ Queuine tRNA-ribosyltransferase OS=Mesorhizobium metallidurans STM 2683 OX=1297569 GN=t gt PE=3 SV=1
MSKAFTFKVSATDGRARRGTITMPRGEIRTPAFMPVGTGGTVKAMYMEQVRGVGADIILGNTYHLMLRPGAERVARLGGLHEFARWPHPILTDSGGFQVMSLSKLRKLTEKGVTFRSHIDGAAHEMSPERSIEIQGLLDSDIQMQLDECTALPAEEKEIERAMDLSLRWAERCKAAFGDQPGKAMFGIVQGGDVPALRLRSARALKAMDLKGYAIGGLAVGEPQAVMLEMLDITCLELPADRPRYLMGVGTPDDILRSVARGIDMFDCVMPTRAGRHGLAYTRRGKVNLRNARHADDPRPLDEESDCPAARDYSRAYLHHLVRSQEALGAMLLTWNNLSYYQKLMQDIRAAIEAGAFDARAAEISEGWARGDIPAI

SEQ ID NO: 57490 - protein, 376 aa, Mesorhizobium muleiense
  misc_feature (1)..(376): tr|A0A1G8TMI8|A0A1G8TMI8_9RHIZ Queuine tRNA-ribosyltran sferase OS=Mesorhizobium muleiense OX=1004279 GN=tgt PE =3 SV=1
MTKAFTFKVLATDGKARRGSITMPRGEIRTPAFMPVGTGGTVKTMYMDQVRGVGSDIILGNTYHLMLRPGAERVARLGGLHEFARWPHPILTDSGGFQVMSLSKLRKLTEKGVTFRSHIDGAAYEMSPERSIEIQGLLGADIQMQLDECTALPAMEKEIERAMELSLRWAERCRTAFGDQQGKAMFGIVQGGDIPALRLRSAQALKAMDLKGYAIGGLAVGEPQAVMLEMLDITCPELPADRPRYLMGVGTPDDILKSVARGIDMFDCVMPTRAGRHGLAYTRRGKVNLRNARHADDPRPLDEESDCPAARDYSRAYLHHLVRSQEALGAMLLTWNNLSYYQKLMQDIRAAIEAGTFEARAAEISEGWARGDIPAM

SEQ ID NO: 57491 - protein, 376 aa, Mesorhizobium oceanicum
  misc_feature (1)..(376): tr|A0A1L3SS07|A0A1L3SS07_9RHIZ Queuine tRNA-ribosyltran sferase OS=Mesorhizobium oceanicum OX=1670800 GN=tgt PE =3 SV=1
MSDQFTFRLLATDGDARRGEISMPRGTIRTPAFMPVGTGGTVKAMYMDQVRELGADIILGNTYHLMLRPGAERMARLGGLHEFARWPWPILTDSGGFQVMSLAQLRKLTEKGVTFKSHIDGVAYEMTPERSIEIQGLLDSDIQMQLDECVALPAEPAEIERAMELSLRWAERCKTAFGDQPGKAMFGIVQGGDIAALRVRSAEALKAMDLKGYAVGGLAVGEPQSVMLEMLEATCPVLPAEKPRYLMGVGTPDDIVKSVMRGIDMFDCVMPTRAGRHGLAYTRHGKINLKNARHAEDPRPLDEESACPAARDYSRAYLHHLVKSGENLAGMLLTWNNLSYYQDLMQGIRDAIEAGRMADFATETAEQWARGDLPPV

SEQ ID NO: 57492 - protein, 376 aa, Mesorhizobium opportunistum
  misc_feature (1)..(376): tr|F7Y777|F7Y777_MESOW Queuine tRNA-ribosyltransferase OS=Mesorhizobium opportunistum (strain LMG 24607 / HAMB I 3007 / WSM2075) OX=536019 GN=tgt PE=3 SV=1
MARPFSFKVLATDGKARRGVIDMPRGEIRTPAFMPVGTGGTVKAMYMDQVRGVGADIILGNTYHLMLRPGAERVARLGGLHEFARWPQPILTDSGGFQVMSLSKLRKLTEKGVTFRSHIDGAAYEMSPERSIEIQGLLDSDIQMQLDECTALPAEIKEIERAMELSLRWAERCKTAFGDQPGKAMFGIVQGGDNAALRVRSAQALSAMNLKGYAVGGLAVGEPQAVMLEMLDITCPELPDDKPRYLMGVGTPDDILKSVARGVDMFDCVMPTRAGRHGLAYTRRGKVNLRNARHADDPRPLDEESDCPAARDYSRAYLHHLVRSQEALGAMLLTWNNLSYYQKLMQDIRAAIETGAFDARGVEITEGWARGDIPVL

SEQ ID NO: 57493 - protein, 376 aa, Mesorhizobium plurifarium
  misc_feature (1)..(376): tr|A0A2T3EM05|A0A2T3EM05_MESPL Queuine tRNA-ribosyltran sferase OS=Mesorhizobium plurifarium OX=69974 GN=tgt PE =3 SV=1
MTQAFQFKLLANDGNARRGEVVTPRGTIRTPAFMPVGTVGTVKAMYLDQVRDLGADIILGNTYHLMLRPGAERVARLGGLHKFIGWEHPILTDSGGFQVMSLSSLRRINEQGVTFKSHVDGALYHMSPERSIEIQGLLGSDIQMQLDECVALPAEPDEIERAMEMSLRWAERCRIAFGDQPGKAMFGIVQGGDIPRLRERSALALKDLDLKGYAVGGLAVGEPQEVMLDMLDVTCPVLPTDKPRYLMGVGTPDDILKSVAHGIDMFDCVMPTRSGRHGLAFTRYGRINLRNARHAEDIRPLDEQSSCPATRDYSRAYLHHLIRSNESLGGMLLSWNNLAYYQDLMAGIRKAIEEGRYADFMAETIEGWRRGDLPPV

SEQ ID NO: 57494 - protein, 376 aa, Mesorhizobium plurifarium
  misc_feature (1)..(376): tr|A0A090DL17|A0A090DL17_MESPL Queuine tRNA-ribosyltran sferase OS=Mesorhizobium plurifarium OX=69974 GN=tgt PE =3 SV=1
MAETFSFKVLATDGKARRGLVSMPRGEIRTPAFMPVGTGGTVKAMYMDQVRGIGADIILGNTYHLMLRPGAERVARLGGLHEFARWPYPILTDSGGFQVMSLSKLRKLTEQGVTFRSHIDGAPYEMSPERSIEIQGLLDSDIQMQLDECTALPAKPKEIERAMELSLRWAERCKAAFGDQPGKAMFGIVQGGDSAAMRLRSAQALKAMDLKGYAVGGLAVGEPQSVMLEMLDITCPELPADRPRYLMGVGTPDDILKSVARGIDMFDCVMPTRAGRHGLAYTRRGKVNLRNARHADDPRPLDEESDCPAARDYSRAYLHHLVRSQEALGAMLLTWNNLSYYQKLMQDIRAAIEAGAFEERAAGITEGWARGDIPAR

SEQ ID NO: 57495 - protein, 376 aa, Mesorhizobium prunaredense
  misc_feature (1)..(376): tr|A0A1R3VJB9|A0A1R3VJB9_9RHIZ Queuine tRNA-ribosyltran sferase OS=Mesorhizobium prunaredense OX=1631249 GN=tgt PE=3 SV=1
MTKAFTFKVLATDGKARRGSITMPRGEIRTPAFMPVGTGGTVKTMYMDQVRGVGSDIILGNTYHLMLRPGAERVARLGGLHEFARWPHPILTDSGGFQVMSLSKLRKLTEKGVTFRSHIDGAAYEMSPERSIEIQGLLGADIQMQLDECTALPAMEKEIERAMELSLRWAERCRTAFGDQQGKAMFGIVQGGDIAALRLRSAQALKAMDLKGYAIGGLAVGEPQPVMLEMLDITCPELPADRPRYLMGVGTPDDILKSVARGIDMFDCVMPTRAGRHGLAYTRRGKVNLRNARHADDPRPLDEESDCPAARDYSRAYLHHLVRSQEALGAMLLTWNNLSYYQKLMQDIRAAIEAGAFEARAAEISERWARGDIPGM

SEQ ID NO: 57496 - protein, 376 aa, Mesorhizobium qingshengii
  misc_feature (1)..(376): tr|A0A1G5V492|A0A1G5V492_9RHIZ Queuine tRNA-ribosyltran sferase OS=Mesorhizobium qingshengii OX=1165689 GN=tgt PE=3 SV=1
MAKPFTFKVLATDGKARRGVIDMPRGEIRTPAFMPVGTGGTVKTMYMDQVRDLGADIILGNTYHLMLRPGAERVARLGGLHEFARWPHPILTDSGGFQVMSLSKLRKLTEKGVTFRSHIDGAAYEMSPERSIEIQGLLDSDIQMQLDECTALPAEMKEIERAMELSLRWAERCKTAFGDQPGKAMFGIVQGGDNAALRVRSAQALSAMELKGYAVGGLAVGEPQAVMLEMLDITCPELPADKPRYLMGVGTPDDILKSVARGIDMFDCVMPTRAGRHGLAYTRRGKVNLRNARHADDPRPLDEQSDCPAARDYSRAYLHHLVRSQEALGAMLLTWNNLSYYQKLMQDIRAAIEAGSFETRAAEISEGWARGDIPAM

SEQ ID NO: 57497 - protein, 376 aa, Mesorhizobium sanjuanii
  misc_feature (1)..(376): tr|A0A2A6FGR5|A0A2A6FGR5_9RHIZ Queuine tRNA-ribosyltran sferase OS=Mesorhizobium sanjuanii OX=2037900 GN=tgt PE =3 SV=1
MTREFTFKVLATNGRARRGAITMPRGEIRTPAFMPVGTGGTVKAMYMDQVRGVGSDIILGNTYHLMLRPGAERVARLGGLHEFARWPHPILTDSGGFQVMSLSKLRKLTEKGVTFRSHIDGAAYEMSPERSIEIQGLLDSDIQMQLDECTALPAEKKEIERAMELSLRWAERCKSAFGDQPGKAMFGIVQGGDVPDLRLRSAQALKAMDLKGYAVGGLAVGEPQAVMLDMLDITCPELPADRPRYLMGVGTPDDILKSVARGIDMFDCVMPTRAGRHGLAYTRRGKVNLRNARHADDPRPLDEDSDCPAARDYSRAYLHHLVRSQEALGAMLLTWNNLSYYQKLMQDIRAAIEARAFDARAAEISEGWARGDIPAM

SEQ ID NO: 57498 - protein, 376 aa, Mesorhizobium soli
  misc_feature (1)..(376): tr|A0A2P7SBK1|A0A2P7SBK1_9RHIZ Queuine tRNA-ribosyltran sferase OS=Mesorhizobium soli OX=1295366 GN=tgt PE=3 SV =1
MSTEFTFKVLATDGKARRGEITMPRGTIRTPAFMPVGTGGTVKTMYMDQVRDLGADIILGNTYHLMLRPGAERVAKLGGLHEFARWPHPILTDSGGFQVMSLSKLRKINEQGVTFRSHIDGAPYEMSPERSIEIQGLLDSDIQMQLDECTALPAKEPEIERAMELSLRWAERCKTAFGDQPGKAMFGIVQGGDNPRLRERSAQSLSGLGLKGYAVGGLAVGEPQEVMLDMLDITCPELPTDKPRYLMGVGTPDDIVKSVARGIDMFDCVMPTRAGRHGLAYTRRGKVNLRNARHADDHRPLDDESDCPAARDYSRAYLHHLVRSQEALGAMLLTWNNLSYYQSLMQGLRNAIEQGRFAEHVAEISEGWARGDISAL

SEQ ID NO: 57499 - protein, 376 aa, Mesorhizobium sp.
  misc_feature (1)..(376): tr|A0A503AK52|A0A503AK52_9RHIZ Queuine tRNA-ribosyltran sferase OS=Mesorhizobium sp. B2-7-1 OX=2589909 GN=tgt P E=3 SV=1
MAEIFSFEVLATDGKARRGLVSMPRGEIRTPAFMPVGTGGTVKAMYMDQVRGVGADIILGNTYHLMLRPGAERVARLGGLHEFARWPYPILTDSGGFQVMSLSKLRKLTEQGVTFRSHIDGAPYEMSPERSIEIQGLLDSDIQMQLDECTALPAKPKEIERAMELSLRWAERCKTAFGDQPGKAMFGIVQGGDSAGLRVRSAQALKAMDLKGYAVGGLAVGEPQPVMLEMLDITCPELPADKPRYLMGVGTPDDILKSVARGIDMFDCVMPTRAGRHGLAYTRRGKVNLRNARHADDPRPLDEESDCPAARDYSRAYLHHLVRSQEALGAMLLTWNNLSYYQRLMQDVRAAIEAQAFEARAAEITEGWARGDIPAL

SEQ ID NO: 57500 - protein, 376 aa, Mesorhizobium sp.; identical to SEQ ID NO: 57477
  misc_feature (1)..(376): tr|A0A3S1T2P4|A0A3S1T2P4_9RHIZ Queuine tRNA-ribosyltran sferase OS=Mesorhizobium sp. M7A.F.Ca.CA.001.05.1.1 OX= 2496721 GN=tgt PE=3 SV=1

SEQ ID NO: 57501 - protein, 376 aa, Mesorhizobium tamadayense
  misc_feature (1)..(376): tr|A0A3P3FYN8|A0A3P3FYN8_9RHIZ Queuine tRNA-ribosyltran sferase OS=Mesorhizobium tamadayense OX=425306 GN=tgt P E=3 SV=1
MAETFSFKLLATDGKARRGLIRMPRGEIRTPAFMPVGTGGTVKTMYMDQVRGVGADIILGNTYHLMLRPGAERVARLGGLHEFARWPHPILTDSGGFQVMSLSKLRKLTEKGVTFRSHIDGAAYEMSPERSIEIQGLLDSDIQMQLDECTALPAKPTEIERAMELSLRWAERCKTAFGDQPGKAMFGIVQGGDSAVMRVRSAQALKAMELKGYAIGGLAVGEPQAVMLEMLDITCPELPADRPRYLMGVGTPDDILKSVARGIDMFDCVMPTRAGRHGLAYTRRGKINLRNARHADDPRPLDEESDCPAARDYSRAYLHHLVRSQESLGAMLLTWNNLSCYQKLMQDIRAAIEAQTFEARAAEMSEGWARGDIPAL

SEQ ID NO: 57502 - protein, 376 aa, Mesorhizobium temperatum
  misc_feature (1)..(376): tr|A0A271LND8|A0A271LND8_9RHIZ Queuine tRNA-ribosyltran sferase OS=Mesorhizobium temperatum OX=241416 GN=tgt PE =3 SV=1
MTKAFIFEVLATDGKARRGSITMPRGEIRTPAFMPVGTGGTVKTMYMDQVRGVGSDIILGNTYHLMLRPGAERVARLGGLHEFARWPYPILTDSGGFQVMSLSKLRKLTEKGVTFRSHIDGAAYEMSPERSIEIQGLLDSDIQMQLDECTALPAMEKEIERAMELSLRWAERCKTAFGDQQGKAMFGIVQGGDIPALRLRSAQALKAMDLKGYAIGGLAVGEPQAVMLEMLDITCPELPADRPRYLMGVGTPGDILKSVARGIDMFDCVMPTRAGRHGLAYTRRGKVNLRNARHADDPRPLDEESDCPATRDYSRAYLHHLVRSQEALGAMLLTWNNLSYYQKLMQDVRAAIEAGAFDVRVAEISEGWARGDIPVM

SEQ ID NO: 57503 - protein, 376 aa, Mesorhizobium tianshanense
  misc_feature (1)..(376): tr|A0A562PE05|A0A562PE05_9RHIZ Queuine tRNA-ribosyltran sferase OS=Mesorhizobium tianshanense OX=39844 GN=tgt P E=3 SV=1
MSKAFTFEVLATNGRARRGAITMPRGEIRTPAFMPVGTGGTVKTMYMDQVRGVGSDIILGNTYHLMLRPGAERVARLGGLHEFARWPHPILTDSGGFQVMSLSKLRKLTENGVTFRSHIDGAAYEMSPERSIEIQGLLDSDIQMQLDECTALPAMEKEIERAMELSLRWAERCKTAFGDQQGKAMFGIVQGGDIPALRLRSAQALKAMDLKGYAIGGLAVGEPQAVMLEMLDITCPELPADRPRYLMGVGTPDDILKSVARGIDMFDCVMPTRAGRHGLAYTRRGKVNLRNARHADDPRPLDEESDCPAARDYSRAYLHHLVRSQEALGAMLLTWNNLSYYQKLMQDIRAAIEAGAFEARAAEISEGWVRGDIPAM

SEQ ID NO: 57504 - protein, 376 aa, Mesorhizobium waimense
  misc_feature (1)..(376): tr|A0A3A5KK50|A0A3A5KK50_9RHIZ Queuine tRNA-ribosyltran sferase OS=Mesorhizobium waimense OX=1300307 GN=tgt PE= 3 SV=1
MADAFSFKVLATDGKARRGVIDMPRGEIRTPAFMPVGTGGTVKTMYMDQVRNLGADIILGNTYHLMLRPGAERVARLGGLHEFARWQHPILTDSGGFQVMSLSKLRKLTEKGVTFRSHIDGAAYEMSPERSIEIQGLLDSDIQMQLDECTALPAKEKEIERAMELSLRWAERCKTAFGDQPGRAMFGIVQGGDVPSFRVRSAQALKAMDLKGYAVGGLAVGEPQAVMLDMLDITCAELPEDKPRYLMGVGTPDDILKSVARGIDMFDCVMPTRAGRHGLAYTRRGKVNLRNARHADDPRPLDEESDCPAARDYSRAYLHHLVRSQEALGAMLLTWNNLSYYQRLMQDIRAAIGAQAFDARAAEISEGWARGDIPAN

SEQ ID NO: 57505 - protein, 376 aa, Mesorhizobium wenxiniae
  misc_feature (1)..(376): tr|A0A271KC09|A0A271KC09_9RHIZ Queuine tRNA-ribosyltran sferase OS=Mesorhizobium wenxiniae OX=2014805 GN=tgt PE =3 SV=1
MTKAFTFEVLATDGKARRGSITMPRGEIRTPAFMPVGTGGTVKTMYMDQVRGVGSDIILGNTYHLMLRPGAERVARLGGLHEFARWPHPILTDSGGFQVMSLSKLRKLTEKGVTFRSHIDGAPYEMSPERSIEIQGLLDSEIQMQLDECTALPAMEKEIERAMELSLRWAERCKTAFGDQPGKAMFGIVQGGDIPALRLRSAQALKAMDLKGYAIGGLAVGEPQAVMLEMLDITCPELPADRPRYLMGVGTPDDILKSVARGIDMFDCVMPTRAGRHGLAYTRRGKVNLRNARHADDPRPLDEESDCPAARDYSRAYLHHLVRSQEALGAMLLTWNNLSYYQRLMQDIRVAIEAGAFEARAAAISEGWARGDIAVM

SEQ ID NO: 57506 - protein, 377 aa, Mesosutterella multiformis
  misc_feature (1)..(377): tr|A0A388S9U1|A0A388S9U1_9BURK Queuine tRNA-ribosyltran sferase OS=Mesosutterella multiformis OX=2259133 GN=tgt PE=3 SV=1
MALSFKVLKTSGKARRGELHLNHGVVQTPIFMPVGTCGTVKSMTPEELKDNGAQIILGNTFHLWLRPGLEVVGLHKGLHDFMHWDRPILTDSGGFQVFSLRGIRKITEEGVKFASPIDGRRLFLSPEESMRIQTVLNSDIVMQLDECTPYEIDGKPATEKQAADSMRMSLRWAKRCKDEFNRLGNPNALFGIVQGGMYKHLREESLHGLVDIGFDGYAVGGLSVGEPKAEMNRIEEEIVSQLPDDKPRYLMGVGTPEDLVEGVSQGIDMFDCVMPTRNARNGWLFTRYGDVKIKNAKYIKDLAPLDESCDCYTCRNYDRSYLHHLHKVGEILGARLNTIHNIHFYLTLMAEMRDALEKGTFEEWKEQFYRDRARGVG

SEQ ID NO: 57507 - protein, 381 aa, Mesotoga infera
  misc_feature (1)..(381): tr|A0A101GYT7|A0A101GYT7_9BACT Queuine tRNA-ribosyltran sferase OS=Mesotoga infera OX=1236046 GN=tgt PE=3 SV=1
MVELKIRAKSTETKARTAVLATAHGEFETPVFMPVGTNGTVKGIWQDQLYEMDSKIILGNAFHLFLRPGLDTLRYFGGLHNFMSWDHSILTDSGGFQVFSLSDKKITEEGVKFRSPLDGRSLFVTPELSIEIQEAIGSDIAMAFDECVEPNADKEYVRNSVRRTTNWAKRFLLAHKKDSNQSLFGIVQGGFFNDLREESASEITAMDFEGFALGGLSVGEDFETTEKVLSASVGLLPEDRPRYLMGVGSPELILAAVESGVDMFDCVLPTRLGRHGAALTSGGRINLKSARNKHDKSPVDPNCTCKVCSTYSRAYIHHLFTRDEILGKILLSYHNVSFLMDFVKKIREAILEDRLCEFKEHCAETGLIQVGNLKTSEERLG

SEQ ID NO: 57508 - protein, 381 aa, Mesotoga prima
  misc_feature (1)..(381): tr|I2F2Y7|I2F2Y7_9BACT Queuine tRNA-ribosyltransferase OS=Mesotoga prima MesG1.Ag.4.2 OX=660470 GN=tgt PE=3 SV =1
MVELKLKAKSTESKARTGVIVTPHGEFETPVFMPVGTNGTVKGLWQDQLEELDARIILGNAFHLFLRPGLNVLRNFGGLHKFMSWKHSILTDSGGFQVFSLKEKKITDDGVKFRSPLDGRALFFTPELSSEIQEAIGSDIAMAFDECVEPSANKDYVRQSVKRTTVWAERFLLSHKGQSMQSLFGIVQGGFFGDLREESAARITSLDFEGFALGGLSVGEDFQTTERILSGSVNLLPEERPRYLMGIGSPELIMAAVENGIDMFDCVLPTRLGRHGAALTSNGRINLKSSTNKEDKRPVDPDCSCKVCSTYSRAYIHHLFIRDEILGKILLSYHNISFLMQFVKRIRQAILDDRLAEFKEHCIETGLIQTENLKTSEERMG

SEQ ID NO: 57509 - protein, 381 aa, Mesotoga prima
  misc_feature (1)..(381): tr|A0A101HRY5|A0A101HRY5_9BACT Queuine tRNA-ribosyltran sferase OS=Mesotoga prima OX=1184387 GN=tgt PE=3 SV=1
MVELSIRASSTESKARTGIISTPHGEFDTPVFMPVGTNGTVKGIWQDQLHELEARIILGNAFHLFLRPGLDILRDFGGLHKFMSWGHSILTDSGGFQVFSLKDKKVSDEGVKFRSPLDGRSLFVTPELSMEIQEAVGSDIAMAFDECTEPSATKEYVRNSVNRTTAWAKRFLIAHRRNSKQSFFGVVQGGFFNDLREESASQITAMDFDGFALGGLSVGEDFETTERVLSSSVEFLPEDRPRYLMGVGTPELIMVAVENGVDMFDSVLPTRLGRHGAALTSRGRVNLKSARNKLDRSPVDPFCQCKVCSTYSKAYIHHLFTRDEILGKTLLSYHNISFLMQFVKKIREAILEDRLAEFKNYCLETGLIQAVNPKTSEERMG

SEQ ID NO: 57510 - protein, 378 aa, Mesotoga sp.
  misc_feature (1)..(378): tr|A0A351H916|A0A351H916_9BACT Queuine tRNA-ribosyltran sferase OS=Mesotoga sp. OX=2053577 GN=tgt PE=3 SV=1
MSIRASSTESKARTGIISTPHGEFDTPVFMPVGTNGTVKGIWQDQLQELEARIILGNAFHLFLRPGLDILRDFGGLHKFMSWGHSILTDSGGFQVFSLKDKMVSDEGVKFRSPLDGRSLFVTPELSMEIQEAVGSDIAMAFDECTEPSATKEYIRNSVNRTTAWAKRFLIAHRRNSKQSFFGVVQGGFFNDLREESASQITAMDFDGFALGGLSVGEDFETTERVLSSSVELLPEDRPRYLMGVGTPELIMVAVENGVDMFDSVLPTRLGRHGAALTSRGRVNLKSARNKLDRSPVDPFCQCKVCSTYSKAYIHHLFTRDEILGKTLLSYHNISFLMQFVKKIREAILEDRLAEFKNYCLETGLIQAVNPKTSEERMG

SEQ ID NO: 57511 - protein, 381 aa, Mesotoga sp.; identical to SEQ ID NO: 57509
  misc_feature (1)..(381): tr|A0A2T7N3P6|A0A2T7N3P6_9BACT Queuine tRNA-ribosyltran sferase OS=Mesotoga sp. Brook.08.105.5.1 OX=1421002 GN= tgt PE=3 SV=1

SEQ ID NO: 57512 - protein, 375 aa, Metakosakonia sp.; identical to SEQ ID NO: 56374
  misc_feature (1)..(375): tr|A0A348DIR7|A0A348DIR7_9ENTR Queuine tRNA-ribosyltran sferase OS=Metakosakonia sp. MRY16-398 OX=2487150 GN=tg t PE=3 SV=1

SEQ ID NO: 57513 - protein, 374 aa, Metallibacterium scheffleri
  misc_feature (1)..(374): tr|A0A4S3KSR8|A0A4S3KSR8_9GAMM Queuine tRNA-ribosyltran sferase OS=Metallibacterium scheffleri OX=993689 GN=tgt PE=3 SV=1
MQFSLLATDGAARRGRVQFARGAVETPAFMPVGTYGTVKAMTPADLHGVGAQMVLGNTFHLWLRPGMEVIERCGGLHGFMRWNGPILTDSGGFQVFSLAHRRKISEDGVRFASPVDGRAVFLSPEESMRIQRVLDSDVAMIFDECTPYPASARAAQDSMELSLRWAARSRRAFDDLRNPNALFGIVQGGVYPELRQRSAAGLREIGFDGYAVGGLAVGEPEAERERTLDETLPLLPADRPRYLMGVGRPEDIVAAVRRGVDLFDCVMPTRNARNGFLFTAQGTLRIRNARYATDTRPIEEGCDCAACAGGFSRAYLRHLDRCNEILGSILATQHNLRYYQRLMAGLRDAIAATRLDDFCAAFAAARQVAGAGCG

SEQ ID NO: 57514 - protein, 382 aa, Methylacidimicrobium cyclopophantes
  misc_feature (1)..(382): tr|A0A5E6ME42|A0A5E6ME42_9BACT Queuine tRNA-ribosyltran sferase OS=Methylacidimicrobium cyclopophantes OX=10417 66 GN=tgt PE=3 SV=1
MKFRLLASATESRARIGELSTGHGLVQTPAFLPVGTRGTVKGVFPRDLLDLGASMILCNTYHLLLRPGIDLLRSLGGLHRFLGWPGAILTDSGGYQVFSLSSLRSIDDRGVAFRSHLDGKLLFLSPELAVEFQSIAGSDLAMSLDECPPWPASSSELDQAVRRTVLWAARGKETWRRLRESCSGLPTPEAGLFAIVQGGGSAKLRGLCAEELGAIGFDGFAIGGVSVGEPVEEGLRAVAETVVHLDPGRPRYVMGVGEPWQIVEMVNLGVDLFDCVLPTRLARHGVAYTERGRLSLRNASFRLDTEPLSAECGCYTCRHFHRAYLRHLLKSEEILGVMLLTLHNLYFYLCLMRGIRRALETGRWDPFLAEQRRRRKEYKEGS

SEQ ID NO: 57515 - protein, 381 aa, Methylacidimicrobium tartarophylax
  misc_feature (1)..(381): tr|A0A5E6MJT2|A0A5E6MJT2_9BACT Queuine tRNA-ribosyltran sferase OS=Methylacidimicrobium tartarophylax OX=104176 8 GN=tgt PE=3 SV=1
MKFRVIGSAADQARVGELNTGHGLVRTPAFMPVGTRGTVKGVFPRDLLDLGAQVILCNTYHLLLRPGIDLLRDLGGLHRFLGWPGAILTDSGGYQVFSLSSLRRVDDHGVVFRSHLDGSPLFLSPELAVEFQLIAGSDLIMSLDECPPWPASPSELDQAVRRTVLWAARGKEAWERLQDSHASFPTPEAGLFGIVQGGGDARLRALCAEELGAIGFDGFAIGGVSVGEPPEEGLRAVAETVVHLDPARPRYVMGVGEPWQMVEMVNLGVDLFDCVLPTRLARHGVAYTGMGRISLRNSSFRLDPAPISSECGCYTCRNFSRAYLRHLLKSEEILGLMLLTLHNLYFYLCLMKEMRTALERGCWEAFLAEKRKRREEFEEGG

SEQ ID NO: 57516 - protein, 380 aa, Methylacidiphilum fumariolicum
  misc_feature (1)..(380): tr|I0JZ35|I0JZ35_METFB Queuine tRNA-ribosyltransferase OS=Methylacidiphilum fumariolicum (strain SolV) OX=1156 937 GN=tgt PE=3 SV=1
MVMKFEVIKKVEGSKARLGRLFTPHGEVSTPCFMPVGTAATVRAVFPKDLEKDGVQMVLANVYHLILRPGIQIIKEAGGLHKFMGWEGAILTDSGGFQVFSLSSFCKILPEGVRFKSPIDGSSLLLTPESVIDAQMELGADIVMSLDHCPPWPSKEKDLVEATRRTIGWAKMGKERWEKHWGTKMVERSTNPMLFGIVQGGTKKELRQDCFEELLKIGFDGFAIGGLSVGEPQEESLKTIEALSPFMDSSYPKYVMGMGHPWQIIQMVDLGIDLFDCVLPTRLARHGSAYVEEGILHLKNARFKKDGLPIEEKCSCYACRKFSRAYIHHLLKSQEILGIMLLSMHNLSFYNRLMKEMRLSIGNGQWIDMLTRWKNKKITK

SEQ ID NO: 57517 - protein, 380 aa, Methylacidiphilum fumariolicum; identical to SEQ ID NO: 57516
  misc_feature (1)..(380): tr|A0A5F0I048|A0A5F0I048_9BACT Queuine tRNA-ribosyltran sferase OS=Methylacidiphilum fumariolicum OX=591154 GN= tgt PE=3 SV=1

SEQ ID NO: 57518 - protein, 378 aa, Methylacidiphilum infernorum
  misc_feature (1)..(378): sp|B3DYE4|TGT_METI4 Queuine tRNA-ribosyltransferase OS= Methylacidiphilum infernorum (isolate V4) OX=481448 GN= tgt PE=3 SV=1
MKFEVIQKSGGSRARLGRLLTPHGVVETPCFMPVGTSATVKAIFPKDLEEEGIKLILANAYHLLFRPGISVIKEFGGLHQFMGWNGAILTDSGGFQVFSLSPFCKIFPEGVRFKSPVDGSFLMLTPESAIHAQMELGSDIVMSLDHCPPWPSKEKDLLEATRRTIQWAKRGKETWMQQQEKLFSKPSASYSLFGIIQGGTDERLRLYCSEELMKIGFDGYAIGGLSVGEPHEESLAVVKTVSSFLDEKAPKYVMGMGQPWQIVQMVDLGIDLFDCVLPTRLARHGSAYVEEGIIHIKNARFRKDGSPLDSRCSCYACRKFSRGYIHHLLKSKEILGIMLLSMHNLLFYNRLMKEIRSFLAHGQWVDFLARWKDKKVTK

SEQ ID NO: 57519 - protein, 378 aa, Methylacidiphilum kamchatkense
  misc_feature (1)..(378): tr|A0A516TK41|A0A516TK41_9BACT Queuine tRNA-ribosyltran sferase OS=Methylacidiphilum kamchatkense Kam1 OX=12027 85 GN=tgt PE=3 SV=1
MKFKVIKEVEGSKARLGRLFTPHGEVDTPCFMPVGTAATVRAVFPKDLEKDGVQMVLANVYHLILRPGIQIIKEAGGLHKFMGWTGAILTDSGGFQVFSLSSFCKILPEGVRFKSPIDGSSLLLTPESVIDAQIELGADIVMSLDHCPPWPSKEKDLVEATRRTICWAKMGKERWEKHWGTEMVEGATNPLLFGIVQGGTKKELRQFCFEQLLKIGFDGFAIGGLSVGEPLEESLKTIEALTPFMDSSYPKYVMGMGHPWQIIQMVDLGIDLFDCVLPTRLARHGSAYVEEGILHLKNARFKTDGLPIDEKCSCYACRKFSRAYIHHLLKSQEILGIMLLSMHNLSFYNRLMKEMRLSIGNGQWIDFLTRWRNKKITK

SEQ ID NO: 57520 - protein, 379 aa, Methylacidiphilum sp.
  misc_feature (1)..(379): tr|A0A4Y8PA65|A0A4Y8PA65_9BACT Queuine tRNA-ribosyltran sferase OS=Methylacidiphilum sp. Phi OX=1847729 GN=tgt PE=3 SV=1
MNFEIIQKSEGSRARLGRLLTPHGVVETPCFMPVGTAATVKAIFPKDLEEEGIKLVLANLYHLLLRPGISLIRDFGGLHQFMGWNGPILTDSGGFQVFSLSSFCKIFPEGVRFKSPINGSMLLLTPENAITTQLDLGSDIVMSLDQCPPWPSKEKDLLEATRRTIQWAKRGKETWLRHQQKGASSRCSLFSLFGIIQGGTDTRLRIYCAEELLNIGFDGYAIGGLCVGEPIEESFATIAAVSSFLDEAVPKYVMGMGHPWQIVQMVDLGIDLFDCVLPTRLARHGSAYVEEEGIIHIKNARFKKDGSPLDHRCCCYACQKFSRAYIHHLLKSKEILGIMLLSMHNLLFYNRLMKEIRLFLSHGQWNDFLGRWRNKKITK

SEQ ID NO: 57521 - protein, 380 aa, Methylacidiphilum sp.
  misc_feature (1)..(380): tr|A0A4Y8PCU7|A0A4Y8PCU7_9BACT Queuine tRNA-ribosyltran sferase OS=Methylacidiphilum sp. Yel OX=1847730 GN=tgt PE=3 SV=1
MVMKFEVIKEVAGSKARLGRLFTPHGEVATPCFMPVGTAATVRAVFPKDLEKDGVQMVLANVYHLSLRPGIQIIKEAGGLHKFMGWEGAILTDSGGFQLFSLSSFCKILPEGVRFKSPIDGSSLLLTPESVIDAQIELGADIVMSLDHCPPWSSKEKDLVEATRRTICWAKMGKERWEKHWGTEMVERSTNPLLFGIVQGGTKKELRQYCFEELLKIGFDGFAIGGLSVGEPQEESLKTIEALSPFMDSSYPKYVMGMGHPWQIIQMVDLGIDLFDCVLPTRLARHGSAYVEEGILHLKNASFKKDGLPIEEKCSCYACRKFSRAYIHHLLKSQEILGIMLLSMHNLSFYNRLMKEMRLSIGNGQWMDLLTRWRNKKITK

SEQ ID NO: 57522 - protein, 376 aa, Methylarcula marina
  misc_feature (1)..(376): tr|A0A3R7LH28|A0A3R7LH28_9RHOB Queuine tRNA-ribosyltran sferase OS=Methylarcula marina OX=72022 GN=tgt PE=3 SV= 1
MSDRFSFTLNARDGHARSGIIHTPRGEIRTPAFMPVGTAATVKAMLPESVRETGADILLGNTYHLMLRPGAERVARLGGLHDFMNWQRPILTDSGGFQVMSLGPLRKLTEEGVTFASHIDGSRHVLTPERSMEIQNLLGSDIVMAFDECPALPATPEDVARSMRLSMRWAQRSRDAFGDRPGHALFGIMQGGVTRELREESAQALTGIGFDGYAIGGLAVGEGQEAMFGVLDYAPGLLPKDKPRYLMGVGKPDDIVGAVQRGVDMMDCVLPSRSGRTGQAWTRRGQINIKNARHQDDPRPLDENCSCPACRSYSRAYLHHVFRAGEMISGMLLTWHNLHYYQELMAGLRDAIAEGRLDDFVAGFHAMRAGGDIPPL

SEQ ID NO: 57523 - protein, 375 aa, Methylibium petroleiphilum
  misc_feature (1)..(375): sp|A2SM97|TGT_METPP Queuine tRNA-ribosyltransferase OS= Methylibium petroleiphilum (strain ATCC BAA-1232 / LMG 22953 / PM1) OX=420662 GN=tgt PE=3 SV=1
MLRFDLLHTEGHARRGRLTLNHGVVETPIFMPVGTYGTVKGVMPASLEAMGAQIILGNTFHLWLRPGLDVLRQFGGLHRFENWQRPILTDSGGFQVWSLGAMRKISEEGVKFASPVNGDKLFLTPETSMQIQTVLNSDIVMQFDECTPYETSGHLTTEQEARASMELSLRWAARCKTEFARLENPNALFGIVQGGMFEPLRQASLDALVAMDFPGYAIGGVSVGEPKDEMLRIMAHTPHRLPAHKPRYLMGVGTPEDLVEGVTQGVDLFDCVMPTRNARNGHLFTRHGDLRLRNARYKTDERPIDESCTCTACNGFSRAYLHHLDRCGEMLGPMLTSIHNLHYFLNLMREVREALDAGRFEAFRAQFRADRARGV

SEQ ID NO: 57524 - protein, 375 aa, Methylibium sp.
  misc_feature (1)..(375): tr|A0A0Q7DDE7|A0A0Q7DDE7_9BURK Queuine tRNA-ribosyltran sferase OS=Methylibium sp. Root1272 OX=1736441 GN=tgt P E=3 SV=1
MLRFDLLHTEGHARRGRLTLNHGVVETPIFMPVGTYGTVKGVMPASLEAMGAQIILGNTFHLWLRPGLDVLRQFGGLHRFEHWPKPILTDSGGFQVWSLGAMRKISEEGVKFASPVNGDKLFLTPETSMQIQAVLNSDIVMQFDECTPYETAGHLTTEQEARASMELSLRWAARCKTEFARLENPNALFGIVQGGMFEPLRQESLDALVAMDFPGYAVGGVSVGEPKDEMLRIMAHTPHRLPAHKPRYLMGVGTPEDLVEGVAQGVDMFDCVMPTRNARNGHLFTRHGDLRLRNARYKTDERPIDESCACTACAGFSRAYLHHLDRCGEMLGPMLTSIHNLHYYVNLMREVREALDAGRFEAFRAQFRADRARGV

SEQ ID NO: 57525 - protein, 375 aa, Methylibium sp.; identical to SEQ ID NO: 57523
  misc_feature (1)..(375): tr|W7WQG5|W7WQG5_9BURK Queuine tRNA-ribosyltransferase OS=Methylibium sp. T29-B OX=1437443 GN=tgt PE=3 SV=1

SEQ ID NO: 57526 - protein, 370 aa, Methylobacillus flagellatus
  misc_feature (1)..(370): sp|Q1H403|TGT_METFK Queuine tRNA-ribosyltransferase OS= Methylobacillus flagellatus (strain KT / ATCC 51484 / D SM 6875) OX=265072 GN=tgt PE=3 SV=1
MEFTLIKQDGAARRGTVSLAHGDVQTPAFMPVGTYGAVKSLSPVEVRDTGAHILLGNTFHLWLRPGLEVIGEFGGLHRFMGWNGPILTDSGGFQVWSLGDLRKITEEGVRFRSPINGDSCFLTPEESMRIQKVLNSDIVMIFDECTPYPATPADARDSMLLSLRWAARSKAAHQGNPNALFGIIQGGMYEDLRDESLAGLTEIGFDGYAIGGLSVGEPKEDMLRILAHTTPKMPQDKPRYLMGVGTPEDLVAAVSHGVDMFDCVMPTRNARNGWLFTRHGDIKLKNARHRKDTRPLDEHCQCYTCLNFSRAYLHHLHRSGEILGARLNTIHNLHYYQELMLGMRQAIEQGRFEAFATEFRQGRQMLQQSA

SEQ ID NO: 57527 - protein, 370 aa, Methylobacillus rhizosphaerae
  misc_feature (1)..(370): tr|A0A238ZWZ9|A0A238ZWZ9_9PROT Queuine tRNA-ribosyltran sferase OS=Methylobacillus rhizosphaerae OX=551994 GN=t gt PE=3 SV=1
MEFTLIKQDGAARRGTVSLAHGDMQTPAFMPVGTYGSVKSLSPVEVRDTGAHILLGNTFHLWLRPGLEVISEFGGLHQFMGWDGPILTDSGGFQVWSLGDLRKITEEGVRFRSPINGDSCFLTPEESMRIQKALNSDIVMIFDECTPYPATHVEARDSMQLSLRWAARSKAAHQGNPNALFGIIQGGMYEDLRDESLAGLTEIDFDGYAIGGLSVGEPKEDMLRILAHTAPQMPKNKPRYLMGVGTPEDLVAAVSHGVDMFDCVMPTRNARNGWLFTRNGDIKLKNARHRKDTRPLDEACSCYTCRNFSRAYLHHLHRTGEILGARLNTIHNLHYYQELMAGMRNAIEQGQFSAFVTQFRQDRLKLQQST

SEQ ID NO: 57528 - protein, 365 aa, Methylobacillus sp.
  misc_feature (1)..(365): tr|A0A1A9NLF2|A0A1A9NLF2_9PROT Queuine tRNA-ribosyltran sferase OS=Methylobacillus sp. MM3 OX=1848039 GN=tgt PE =3 SV=1
MLYSVTHTDGAARRGTLTLAHGVVQTPAFMPVGTYGTVKTMSPDEIRDIGAHIVLGNTFHLWLRPGLEVIEAHGGLHRFMGWDGPILTDSGGFQVWSLGALRKITEEGVKFRSPINGDLCFLTPEESMRIQKVLNSDIVMIFDECTPYPATWTQARDSMELSLRWAERSKKAHEGNANALFGIIQGGMYEDLRDISLKGLSDIGFDGYAIGGLSVGEPKEDMLRILDHLPQRMPADKPRYLMGVGTPEDLVDAVQRGVDMFDCVMPTRNARNGWLFTRNGDIKLKNARYKTDTAPLDPECTCYTCRHFTRAYLHHLHRVGEILGSRLNTIHNLHYYQELMAGLRAAIEQGQLASFADEFRRRRQA

SEQ ID NO: 57529 - protein, 371 aa, Methylobacter sp.
  misc_feature (1)..(371): tr|A0A522WXE9|A0A522WXE9_9GAMM Queuine tRNA-ribosyltran sferase OS=Methylobacter sp. OX=2051955 GN=tgt PE=3 SV= 1
MDFKLINTDGHARRGQLNFARGIVETPIFMPVGTYGTVKSLTPDELTGIGAQIILGNTFHLMLRPGMDVVKAHGDLHDFMRWDKPILTDSGGFQVFSLGALRKITEQGVTFKSPINGSSIFMGPEESMQVQRDLGSDIVMIFDECTPYPATVHEAAESMRLSLRWAARSKAAHEGNASALFGIVQGGMYEHLRQESIAGLVDIGFDGYAIGGLSVGEPKEEMMATLDVVHTKMPTDKPRYLMGVGTPEDLVEAVRRGIDMFDCVMPTRNARNGHLFTTFGVVKIRNSQYEFDTGPLDESCGCYTCRNFSRAYLRHLDKCKEMLGSRLNTIHNLYYYLSLMQGLRDAIEKKELDIFVKQFYQQRGKAVPSVA

SEQ ID NO: 57530 - protein, 371 aa, Methylobacter sp.
  misc_feature (1)..(371): tr|A0A2P5M0F0|A0A2P5M0F0_9GAMM Queuine tRNA-ribosyltran sferase OS=Methylobacter sp. OX=2051955 GN=tgt PE=3 SV= 1
MEFNVLATDGSARRGRLSFARGTVETPIFMPVGTYGTVKALTPEELESLGAQIILGNTFHLMLRPGAEVIKAHGDLHDFMRWQKPVLTDSGGFQVFSLGALRKISEQGVSFKSPVDGSAIFMGPEESMLMQRDLGSDIVMIFDECTPYPASVQQAADSMRLSLRWAERSKRAHEGNASALFGIVQGGMYQHLRQESIAGLSEIGFDGYAIGGLSVGEPKAEMLATLDQVAPALPADKPRYLMGVGTPEDLVEGVRRGIDMFDCVMPTRNARNGHLFTRHGVIKIRNQQYQSDTRPLDEHCTCYTCRNYSRSYLKHLDKCQEMLGARLNTIHNLHYYLELMQDLRTAIEINALSTFVQQFYHQREKIIPVVA

SEQ ID NO: 57531 - protein, 371 aa, Methylobacter tundripaludum
  misc_feature (1)..(371): tr|A0A2S6H4F4|A0A2S6H4F4_9GAMM Queuine tRNA-ribosyltran sferase OS=Methylobacter tundripaludum OX=173365 GN=tgt PE=3 SV=1
MDFKLINTDGHARRGQLKFARGIVETPIFMPVGTYGTVKALTPDELTGIGAQIILGNTFHLMLRPGMDVVKAHGDLHDFMRWDKPILTDSGGFQVFSLGALRKITEKGVTFKSPINGSSIFMGPEESMQVQRDLGSDIVMIFDECTPYPATVHEAAESMRLSLRWAARSKAAHEGNASALFGIVQGGMYEHLRKESIAGLVDIGFDGYAIGGLSVGEPKEEMMATLDVVHPKMPVDKPRYLMGVGTPEDLVEAVRRGIDMFDCVMPTRNARNGHLFTTFGVVKIRNSQYEFDTGPLDESCGCYTCRNFSRAYLRHLDKCKEMLGSRLNTIHNLYYYLNLMQGLRDAIERQELDIFVKQFYQQRGKAVPTVA

SEQ ID NO: 57532 - protein, 371 aa, Methylobacter tundripaludum
  misc_feature (1)..(371): tr|G3IS59|G3IS59_METTV Queuine tRNA-ribosyltransferase OS=Methylobacter tundripaludum (strain ATCC BAA-1195 / DSM 17260 / SV96) OX=697282 GN=tgt PE=3 SV=1
MDFKLINTDGHARRGQLTFARGIVETPIFMPVGTYGTVKSLTPDELTGIGAQIILGNTFHLMLRPGMDVVKAHGDLHDFMHWDKPILTDSGGFQVFSLGALRKITEKGVTFKSPINGSSIFMGPEESMQVQRDLGSDIVMIFDECTPYPATVHEAADSMRLSLRWAARSKAAHEGNDSALFGIVQGGMYEHLRQESIAGLVDIGFDGYAIGGLSVGEPKEEMMATLDVVHGKMPVDKPRYLMGVGTPEDLVEAVRRGIDMFDCVMPTRNARNGHLFTTFGVVKIRNSQYEFDTGPLDESCGCYTCRNYSRAYLRHLDKCKEMLGSRLNTIHNLYYYLSLMQGLRDAIERQELDIFVKQFYQQRGKAVPTVA

SEQ ID NO: 57533 - protein, 377 aa, Methylobacterium aquaticum
  misc_feature (1)..(377): tr|A0A0C6FBP4|A0A0C6FBP4_9RHIZ Queuine tRNA-ribosyltran sferase OS=Methylobacterium aquaticum OX=270351 GN=tgt PE=3 SV=1
MTDHFTFTVAATDGPARTGEIRMPRGVIRTPAFMPVGTAGTVKAMYPEQVKALGADVVLGNTYHLMLRPGAERVARLGGLHTMMQWPYPILTDSGGFQVMSLSGLRKLDETGVRFQSHLDGSTHLLSPERSIEIQGLLGSDIQMQLDECVRLPAPESAIESAMRLSLRWAERCRIAFGDQPGKAMFGIVQGGDIPALRVESARALVDLDLKGYAVGGLAVGEPQATMLAMIETVEPHLPTHKPRYLMGVGTPDDIVQAVSRGIDMFDCVMPTRAGRHGMVYTRHGRLNLRNARFAEDNTPLDPESTCPAANLYSKAYLHHLVRAGEILGMMLLTWNNLSYYQDLMAGLRKAIAEGRLQDFIGETREGWRKAERDRAA

SEQ ID NO: 57534 - protein, 377 aa, Methylobacterium aquaticum
  misc_feature (1)..(377): tr|A0A0J6T4G6|A0A0J6T4G6_9RHIZ Queuine tRNA-ribosyltran sferase OS=Methylobacterium aquaticum OX=270351 GN=tgt PE=3 SV=1
MTDHFTFTVAATDGPARTGEIRMPRGVIRTPAFMPVGTAGTVKAMYPEQVKALGADVVLGNTYHLMLRPGAERVARLGGLHAMMQWPYPILTDSGGFQVMSLAGLRKLDETGVRFQSHLDGSTHLLSPERSIEIQGLLGSDIQMQLDECVRLPAPEPAIESAMRLSLRWAERCRIAFGDQPGKAMFGIVQGGDIPGLRIESAKALVDLDLKGYAIGGLAVGEPQATMLSMIETVEPHLPTTKPRYLMGVGTPDDIVQAVSRGIDMFDCVMPTRAGRHGMVYTRHGRLNLRNARFAEDNTPLDPDSTCPAANQYSKAYLHHLVRAGEILGMMLLTWNNLSYYQDLMVGLRKAIAERRLHAFIGETREGWERAERDRAA

SEQ ID NO: 57535 - protein, 379 aa, Methylobacterium brachiatum
  misc_feature (1)..(379): tr|A0A3G2V2S5|A0A3G2V2S5_9RHIZ Queuine tRNA-ribosyltran sferase OS=Methylobacterium brachiatum OX=269660 GN=tgt PE=3 SV=1
MTETVPFGFTLHGQDGTARTGEIATPRGNIRTPAFMPVGTAATVKAMYPGQVRELGADVVLGNTYHLMLRPGPERMARLGGLHTFMNWERPILTDSGGFQVMSLSALRKIDEQGVTFRSHIDGTAHHMSPERSIEIQGLLGSDIQMQLDECVRLPAEHKAIEKAMHLSLRWAERCRVAFGEQSGKALFGIVQGGDVPALRIESARALTDLDLKGYAVGGLAVGEPQAVMFAMIETVEPHLPEAKPRYLMGVGTPDDILGAVARGIDMFDCVMPTRAGRHGLAYTRNGRVNLRNARHAEDTAPLDETSTCPAARDYSRAYLHHLVRSNEILGMMLLTWNNLAYYQDLMAGARTAIREGRFADYCASTREGWVRAERAAAG

SEQ ID NO: 57536 - protein, 379 aa, Methylobacterium brachiatum
  misc_feature (1)..(379): tr|A0A1I3H064|A0A1I3H064_9RHIZ Queuine tRNA-ribosyltran sferase OS=Methylobacterium brachiatum OX=269660 GN=tgt PE=3 SV=1
MTETVPFGFTLHGQDGTARTGEIATPRGNIRTPAFMPVGTAATVKAMYPGQVRELGADVVLGNTYHLMLRPGPERMARLGGLHTFMNWDRPILTDSGGFQVMSLSALRKIDEQGVTFRSHIDGTAHHMSPERSIEIQGLLGSDIQMQLDECVRLPAEHKAIEKAMHLSLRWAERCRVAFGEQPGKAMFGIVQGGDVPALRIESARALTDLDLKGYAVGGLAVGEPQAVMFAMIETVEPHLPQAKPRYLMGVGTPDDILGAVARGIDMFDCVMPTRAGRHGLAYTRNGRVNLRNARHAEDTAPLDETSSCPAARDYSRAYLHHLVRSNEILGMMLLTWNNLAYYQDLMAGARAAIREGRFADYCASTREGWVRAERAAAG

SEQ ID NO: 57537 - protein, 377 aa, Methylobacterium currus
  misc_feature (1)..(377): tr|A0A2R4WHD8|A0A2R4WHD8_9RHIZ Queuine tRNA-ribosyltran sferase OS=Methylobacterium currus OX=2051553 GN=tgt PE =3 SV=1
MTDQFSFTVAATDGAARTGEIRMPRGVIRTPAFMPVGTAGTVKAMYPEQVKALGADVVLGNTYHLMLRPGAERVARLGGLHAMMQWPYPILTDSGGFQVMSLAGLRKLDETGVRFQSHLDGSTHLLSPERSIEIQGLLGSDIQMQLDECVRLPAPESAIESAMRLSLRWAERCRIAFGDQPGKAMFGIVQGGDIPALRVESAKALVGLDLKGYAIGGLAVGEPQATMLAMIETVEPHLPTHKPRYLMGVGTPDDIVQAVSRGIDMFDCVMPTRAGRHGMVYTRHGRLNLRNARFAEDNSPLDPDSTCPAANLYSKAYLHHLVRAGEILGMMLLTWNNLSYYQDLMAGLRKAIAAGRLADFIGETREGWEKAERDRAA

SEQ ID NO: 57538 - protein, 384 aa, Methylobacterium dankookense
  misc_feature (1)..(384): tr|A0A564G198|A0A564G198_9RHIZ Queuine tRNA-ribosyltran sferase OS=Methylobacterium dankookense OX=560405 GN=tg t PE=3 SV=1
MTEPTATPEFRFALHATDGQARTGAITLPRGVIRTPAFMPVGTAATVKAMYADQVRDLGADVVLGNTYHLMLRPGPERMARLGGLHRFMRWDGPILTDSGGFQVMSLSALRKLDEDGVTFRSHVDGSAHRMSPERSIEIQGLLGSDIQMQLDECVRLPAPPEAIEKAMRLSLRWAERCRAAFGEQPGKAMFGIVQGGDVPELRVESARALVDLDLKGYAIGGLAVGEPQAVMLAMIETVEPHLPREKPRYLMGVGTPDDLLRAVERGVDMFDCVMPTRAGRHGLAYTRHGRVNLRNARHAEDVRPLDETSRCPAARDYSRAYLHHLVRSEEILGMMLLTWNNLAYYQDLMAGMRAAIREGRFAAFAEETRAGWAQAEAAAKAGA

SEQ ID NO: 57539 - protein, 377 aa, Methylobacterium frigidaeris
  misc_feature (1)..(377): tr|A0A2G8MNQ6|A0A2G8MNQ6_9RHIZ Queuine tRNA-ribosyltran sferase OS=Methylobacterium frigidaeris OX=2038277 GN=t gt PE=3 SV=1
MTDQFSFTVAATDGPARTGEIRMPRGVIRTPAFMPVGTAGTVKAMYPEQVKALGADVVLGNTYHLMLRPGAERVARLGGLHAMMQWPYPILTDSGGFQVMSLAGLRKLDETGVRFQSHLDGSTHLLSPERSIEIQGLLGSDIQMQLDECVRLPAPESAIESAMRLSLRWAERCRIAFGDQPGKAMFGIVQGGDIPALRVESAKALVGLDLKGYAIGGLAVGEPQATMLAMIETVEPHLPTHKPRYLMGVGTPDDIVQAVSRGIDMFDCVMPTRAGRHGMVYTRHGRLNLRNARFAEDNSPLDPESTCPAANLYSKAYLHHLVRAGEILGMMLLTWNNLSYYQDLMAGLRKAIAAGRLADFIGETREGWQKAERDRAA

SEQ ID NO: 57540 - protein, 377 aa, Methylobacterium gnaphalii
  misc_feature (1)..(377): tr|A0A512JIY1|A0A512JIY1_9RHIZ Queuine tRNA-ribosyltran sferase OS=Methylobacterium gnaphalii OX=1010610 GN=tgt PE=3 SV=1
MTDSFSFRVDATDGAARTGAITMPRGTIRTPAFMPVGTAATVKAMYPEQVRDLGADVVLGNTYHLMLRPGAERMAHLGGLHRFMRWDGPILTDSGGFQVMSLSALRKLDEQGVTFRSHIDGTAHHMSPERSIEIQSLLGSDIQMQLDECVRLPAERDEIEKAMRLSLRWAERCRMAFGEQPGKAMFGIVQGGDIPELRVESARALTDLDLKGYAIGGLAVGEPQAVMLAMIETVEPHLPTAKPRYLMGVGTPDDLMQSVSRGIDMFDCVMPTRAGRHGLAYTRHGRINLRNARHAEDTAPLDEASTCPATRDYSRAYLHHLVRSDEILGMMLLTWNNLAYYQELMADMRAAIAAGRLADFIGETKQEWARAEAARAA

SEQ ID NO: 57541 - protein, 385 aa, Methylobacterium gossipiicola
  misc_feature (1)..(385): tr|A0A1I2TI30|A0A1I2TI30_9RHIZ Queuine tRNA-ribosyltran sferase OS=Methylobacterium gossipiicola OX=582675 GN=t gt PE=3 SV=1
MSEPAPAAFPQNFTFRVDATDGTARTGAISMPRGVIRTPAFMPVGTAATVKAMYPGQVRDLGADVVLGNTYHLMLRPGPERMARLGGLHHFMNWPHPILTDSGGFQVMSLSALRKLDEQGVTFRSHVDGSTHHMSPERSIEIQGLLGSDIQMQLDECVRLPADHDTIEKAMRLSLRWAERCRVQFGEQPGKAMFGIVQGGDVPALRVESARALVDLDLKGYAIGGLAVGEPQDVMLAMIETVAPHLPQAKPRYLMGVGTPDDLMRSVARGIDMFDCVMPTRAGRHGLAYTRHGRINLRNARHGEDTRPLDEASSCPAARDYSRAYLHHLVRTDEILGMMLLTWNNLAYYQELMAGMRAAIAAGRLADFCDETRDAWAKAEAERNA

SEQ ID NO: 57542 - protein, 380 aa, Methylobacterium haplocladii
  misc_feature (1)..(380): tr|A0A512IRC6|A0A512IRC6_9RHIZ Queuine tRNA-ribosyltran sferase OS=Methylobacterium haplocladii OX=1176176 GN=t gt PE=3 SV=1
MSDLPTDFRFSVHATDGAARTGAISMPRGTIRTPAFMPVGTAATVKAMYPEQVRDLGADVVLGNTYHLMLRPGAERMERLGGLHRFMRWDGPILTDSGGFQVMSLSALRKLDEKGVTFRSHIDGTAHHMSPERSIEIQGLLGSDIQMQLDECVRLPAEREAIEKAMRLSLRWAERCRVTFGEQPGKALFGIVQGGDIPDLRVESARALTELDLKGYAIGGLAVGEPQAVMLAMIETVEPHLPSGKPRYLMGVGTPDDLMQAVSRGIDMFDCVMPTRAGRHGLAYTRHGRINLRNARHAEDTRPLDEQSTCPATRDYSRAYLHHLVRSDEILGMMLLTWNNLAYYQELMAGMRAAISAGRLADFIGETKAEWARAEAERAA

SEQ ID NO: 57543 - protein, 377 aa, Methylobacterium indicum
  misc_feature (1)..(377): tr|A0A0J6QKK8|A0A0J6QKK8_9RHIZ Queuine tRNA-ribosyltran sferase OS=Methylobacterium indicum OX=1775910 GN=tgt P E=3 SV=1
MTDHFTFTVAATDGPARTGEIRMPRGVIRTPAFMPVGTAGTVKAMYPEQVKALGADVVLGNTYHLMLRPGAERVARLGGLHAMMQWPYPILTDSGGFQVMSLAGLRKLDETGVRFQSHLDGSTHLLSPERSIEIQGLLGSDIQMQLDECVRLPAPESAIESAMRLSLRWAERCRIAFGDQPGKAMFGIVQGGDIPALRVESAKALVDLDLKGYAVGGLAVGEPQATMLAMIETVEPHLPTAKPRYLMGVGTPDDIVQAVSRGIDMFDCVMPTRAGRHGMVYTRHGRLNLRNARFAEDNTPLDPESTCPAANLYSKAYLHHLVRAGEILGMMLLTWNNLSYYQDLMAGLRKAIAEGRLQDFIGETREGWQKAERDRAA

SEQ ID NO: 57544 - protein, 381 aa, Methylobacterium mesophilicum
  misc_feature (1)..(381): tr|M7Y526|M7Y526_9RHIZ Queuine tRNA-ribosyltransferase OS=Methylobacterium mesophilicum SR1.6/6 OX=908290 GN=t gt PE=3 SV=1
MTDPVPFGFTLRAQDGTARTGEIVTPRGTIRTPAFMPVGTAATVKAMYPEQVRELGADVVLGNTYHLMLRPGAERMARLGGLHRFMNWDRPILTDSGGFQVMSLSALRKIDEQGVTFRSHIDGTAHHMSPERSIEIQGLLGSDIQMQLDECVRLPAEHGAIEKAMHLSLRWAERCRVAFGEQPGRAMFGIVQGGDVPALRVESARALTDLDLKGYAVGGLAVGEPQAVMFAMIETVEPHLPQGKPRYLMGVGTPDDILGAVARGIDMFDCVMPTRAGRHGLAYTRHGRVNLRNARHAEDTAPLDDASSCPAARDYSRAYLHHLVRSNEILGMMLLTWNNLAYYQDLMAGARAAIRDGRFADYCGSTREGWARAERAASTTA

SEQ ID NO: 57545 - protein, 378 aa, Methylobacterium nodulans
  misc_feature (1)..(378): tr|B8IE72|B8IE72_METNO Queuine tRNA-ribosyltransferase OS=Methylobacterium nodulans (strain LMG 21967 / CNCM I -2342 / ORS 2060) OX=460265 GN=tgt PE=3 SV=1
MTDTFRFTVAATDGAARTGEIRMPRGVIRTPAFMPVGTAGTVKAMYPEQVKALGADVVLGNTYHLMLRPGAERVARLGGLHAFMQWPYPILTDSGGFQVMSLSGLRKLDETGVTFQSHIDGTPHVLTPERSIAIQGQLGSDIQMQLDECVRLPAEPAAIERAMRLSLRWAERCRVAFGEQPGKALFGIVQGGDSPALRVESAKALVGLDLKGYAIGGLAVGEPQGTMLAMIEAVEPHLPMAKPRYLMGVGTPDDIIEAVRRGIDMFDCVMPTRAGRHGMVYTRHGRMNLRNARFAEDNTPLDPESTCPAANLYTKAYLHHLVRAGEILGMMLLTWNNLSYYQDLMAGLRRAIGEGRLADFIGETREGWAKAERDRAQG

SEQ ID NO: 57546 - protein, 378 aa, Methylobacterium organophilum
  misc_feature (1)..(378): tr|A0A2U1F6H4|A0A2U1F6H4_METOR Queuine tRNA-ribosyltran sferase OS=Methylobacterium organophilum OX=410 GN=tgt PE=3 SV=1
MTDSAPFRFDLLARDGTARTGMIATPRGEIRTPAFMPVGTAATVKAMYPGQVRDLGADVVLGNTYHLMLRPGPERMARLGGLHRFMNWDRPILTDSGGFQVMSLSALRKIDEQGVTFRSHIDGTAHHMSPERSIEIQGLLGSDIQMQLDECVRLPADHAAIEKAMHLSLRWAERCRVAFGEQPGRALFGIVQGGDVPALRVESARALTDLDLKGYAVGGLAVGEPQAVMFAMIETVEPHLPAAKPRYLMGVGTPDDILGAVGRGIDMFDCVMPTRAGRHGLAYTRHGRVNLRNARHAEDTAPLDVASTCPAARDYSRAYLHHLVRSNEILGMMLLTWNNLAYYQDLMAGARAAIRDGRYADYCAATRAGWASAERAAA

SEQ ID NO: 57547 - protein, 378 aa, Methylobacterium oryzae
  misc_feature (1)..(378): tr|A0A089NPH6|A0A089NPH6_9RHIZ Queuine tRNA-ribosyltran sferase OS=Methylobacterium oryzae CBMB20 OX=693986 GN= tgt PE=3 SV=1
MTDSVPFGFNLLAQDDTARTGVITTPRGTIRTPAFMPVGTAATVKAMYPDQVRDLGADVVLGNTYHLMLRPGPERMARLGGLHRFMNWDRPILTDSGGFQVMSLSALRKIDEQGVTFRSHIDGTAHHMSPERSIEIQGLLGSDIQMQLDECVRLPADHAAIEKAMRLSLRWAERCRVAFGEQPGRAMFGIVQGGDVPALRVESARALTDLDLKGYAVGGLAVGEPQEVMFAMIETVEPHLPAAKPRYLMGVGTPDDILGAVARGIDMFDCVMPTRAGRHGLAYTRHGRVNLRNARHAEDTAPLDEASTCPAARDYSRAYLHHLVRSNEILGMMLLTWNNLAYYQDLMAGARAAIRDGRYADYCTSTRAGWARSERAAA

SEQ ID NO: 57548 - protein, 393 aa, Methylobacterium oxalidis
  misc_feature (1)..(393): tr|A0A512JAD8|A0A512JAD8_9RHIZ Queuine tRNA-ribosyltran sferase OS=Methylobacterium oxalidis OX=944322 GN=tgt P E=3 SV=1
MPPDPEPPMQDAARPEPTPDFAFRVDATDGAARTGAITMPRGAIRTPAFMPVGTAATVKAMYPEQVRDLGADVVLGNTYHLMLRPGPERMARLGGLHRFMRWDGPILTDSGGFQVMSLSALRKLDEEGVTFRSHIDGTAHHMSPERSIEIQGLLGSDIQMQLDECVRLPAEPEAIERAMRLSLRWAERCRAAFGEQPGKAMFGIVQGGDVPALRIESARALVDLDLKGYAIGGLAVGEPQAVMLAMIEAVEPHLPRAKPRYLMGVGTPDDLMRSVERGIDMFDCVMPTRAGRHGLAYTRHGRVNLRNARHAEDSRPLDETSACPAARDYSRAYLHHLVRSDEILGMMLLTWNNLAYYQELMAGLRAAIRTGRLADFAAETREAWARAEAERAE

SEQ ID NO: 57549 - protein, 378 aa, Methylobacterium phyllostachyos
  misc_feature (1)..(378): tr|A0A1G9VCX5|A0A1G9VCX5_9RHIZ Queuine tRNA-ribosyltran sferase OS=Methylobacterium phyllostachyos OX=582672 GN =tgt PE=3 SV=1
MTDPVPFGFTLLAQDGTARSGTISTPRGEIRTPAFMPVGTAATVKAMYPQQVRDLGADVVLGNTYHLMLRPGPERMARLGGLHRFMNWDRPILTDSGGFQVMSLSALRKIDEQGVTFRSHIDGTAHHMSPERSIEIQGLLGSDIQMQLDECVRLPADHAAIEKAMQLSLRWAERCRVAFGEQPGRALFGIVQGGDVPALRVESSRALTDLGLKGYAIGGLAVGEPQAVMFSMIETVEPHLPPTKPRYLMGVGTPDDILGAVARGVDMFDCVMPTRAGRHGLAYTRHGRVNLRNARHAENTAPLDEASACPAARDYSRAYLHHLVRSNEILGMMLLTWNNLAYYQDLMAGARAAIREGRFADYCCATREGWAQAERASA

SEQ ID NO: 57550 - protein, 377 aa, Methylobacterium platani
  misc_feature (1)..(377): tr|A0A179S3U8|A0A179S3U8_9RHIZ Queuine tRNA-ribosyltran sferase OS=Methylobacterium platani OX=427683 GN=tgt PE =3 SV=1
MTDLFTFTVAATDGAARTGEIRMPRGVIRTPAFMPVGTAGTVKAMYPEQVKALGADVVLGNTYHLMLRPGAERVARLGGLHAMMQWPYPILTDSGGFQVMSLAGLRKLDETGVRFQSHLDGSTHLLSPERSIEIQGLLGSDIQMQLDECVRLPAPESAIESAMRLSLRWAERCRIAFGDQPGKAMFGIVQGGDIPALRVESARALVDLDLKGYAVGGLAVGEPQATMLAMIETVEPHLPTAKPRYLMGVGTPDDIVQAVSRGIDMFDCVMPTRAGRHGMVYTRHGRLNLRNARFAEDNTPLDPESTCPAANLYSKAYLHHLVRAGEILGMMLLTWNNLSYYQDLMAGLRRAIAEGRLQDFIGETREGWQKAERDRAA

SEQ ID NO: 57551 - protein, 383 aa, Methylobacterium pseudosasicola
  misc_feature (1)..(383): tr|A0A1I4JPT3|A0A1I4JPT3_9RHIZ Queuine tRNA-ribosyltran sferase OS=Methylobacterium pseudosasicola OX=582667 GN =tgt PE=3 SV=1
MTVPAMTETTPFGFTLHRQDGTARTGEIATPRGNIRTPAFMPVGTAATVKAMYPGQVRELGADVVLGNTYHLMLRPGPERMARLGGLHTFMNWDRPILTDSGGFQVMSLSALRKIDEQGVTFRSHIDGTAHHMSPERSIEIQGLLGSDIQMQLDECVRLPAEHKAIEKAMHLSLRWAERCRIAFGEQPGKAMFGIVQGGDVPALRVESARALTDLDLKGYAVGGLAVGEPQAVMFAMIETVEPHLPQAKPRYLMGVGTPDDILGAVARGIDMFDCVMPTRAGRHGLAYTRNGRVNLRNARHAEDTAPLDESSTCPAARDYSRAYLHHLVRSNEILGMMLLTWNNLAYYQDLMAGARAAIRDGRFADYCGATREGWARAERAAG

SEQ ID NO: 57552 - protein, 378 aa, Methylobacterium radiotolerans; identical to SEQ ID NO: 57546
  misc_feature (1)..(378): tr|A0A3S3BDR7|A0A3S3BDR7_9RHIZ Queuine tRNA-ribosyltran sferase OS=Methylobacterium radiotolerans OX=31998 GN=t gt PE=3 SV=1

SEQ ID NO: 57553 - protein, 379 aa, Methylobacterium radiotolerans
  misc_feature (1)..(379): tr|B1M583|B1M583_METRJ Queuine tRNA-ribosyltransferase OS=Methylobacterium radiotolerans (strain ATCC 27329 / DSM 1819 / JCM 2831 / NBRC 15690 / NCIMB 10815 / 0-1) O X=426355 GN=tgt PE=3 SV=1
MTDSAPFRFDLLARDGTARTGMIATPRGEIRTPAFMPVGTAATVKAMYPGQVRDLGADVVLGNTYHLMLRPGPERMARLGGLHRFMNWDRPILTDSGGFQVMSLSALRKIDEQGVTFRSHIDGTAHHMSPERSIEIQGLLGSDIQMQLDECVRLPADHAAIEKAMHLSLRWAERCRVAFGEQPGRALFGIVQGGDVPALRVESARALTDLDLKGYAVGGLAVGEPQAVMFAMIETVEPHLPAAKPRYLMGVGTPDDILGAVGRGIDMFDCVMPTRAGRHGLAYTRHGRVNLRNARHAEDTAPLDVASTCPAARDYSRAYLHHLVRSNEILGMMLLTWNNLAYYQDLMAGARAAIRDGRYADYCAETRAGWASAERAAAA

SEQ ID NO: 57554 - protein, 392 aa, Methylobacterium sp.
  misc_feature (1)..(392): tr|A0A0Q4TZW6|A0A0Q4TZW6_9RHIZ Queuine tRNA-ribosyltran sferase OS=Methylobacterium sp. Leaf85 OX=1736241 GN=tg t PE=3 SV=1
MSETPSLRSNASEHFTFRVDATDGQARTGAISMPRGTIRTPAFMPVGTAATVKAMYPGQVRDLGADVVLGNTYHLMLRPGPERMERLGGLHHFMNWPHPILTDSGGFQVMSLSALRKLDEQGVTFRSHVDGSAHHMSPERSIEIQGLLGSDIQMQLDECVRLPAERPAIESAMRLSLRWAERCRLQFGEQPGKAMFGIVQGGDLADLRVESARGLVDLDLKGYAIGGLAVGEPQAVMLAMIETVEPHLPRDKPRYLMGVGTPDDLMRSVARGIDMFDCVMPTRAGRHGLAYTRFGRINLRNARFAEDTRPLDETSACPAARDYSRAYLHHLVRTDEILGMMLLTWNNLSYYQDLMSGMRGAIAAGRLADFAGETREAWARAEAERASANLAG

SEQ ID NO: 57555 - protein, 377 aa, Methylobacterium sp.
  misc_feature (1)..(377): tr|A0A4Z0NG89|A0A4Z0NG89_9RHIZ Queuine tRNA-ribosyltran sferase OS=Methylobacterium sp. 6HR-1 OX=1141884 GN=tgt PE=3 SV=1
MTDQFSFTVAATDGSARTGEIRMPRGVIRTPAFMPVGTAGTVKAMYPEQVKALGADVVLGNTYHLMLRPGAERVARLGGLHAMMQWPYPILTDSGGFQVMSLAGLRKLDETGVRFQSHLDGSTHLLSPERSIAIQGLLGADIQMQLDECVRLPAPESAIESAMRLSLRWAERCRIAFGDQPGRAMFGIVQGGDIPGLRVESAKALVELDLKGYAIGGLAVGEPQATMLAMIETVEPHLPTEKPRYLMGVGTPDDIVQAVSRGIDMFDCVMPTRAGRHGMVYTRHGRLNLRNARFAEDNAPLDPESTCPAANLYTKAYLHHLVRAGEILGMMLLTWNNLSYYQDLMAGLRRAIAAGRLSDFIGETREGWEKAERDRAA

SEQ ID NO: 57556 - protein, 377 aa, Methylobacterium variabile
  misc_feature (1)..(377): tr|A0A0J6SYF3|A0A0J6SYF3_9RHIZ Queuine tRNA-ribosyltran sferase OS=Methylobacterium variabile OX=298794 GN=tgt PE=3 SV=1
MTDQFSFTVAATDGAARTGEIRMPRGVIRTPAFMPVGTAGTVKAMYPEQVKALGADVVLGNTYHLMLRPGAERVARLGGLHAMMQWPYPILTDSGGFQVMSLAGLRKLDETGVRFQSHIDGTAHLLSPERSIEIQGLLGSDIQMQLDECVRLPAPEAAIESAMRLSLRWAERCRIAFGDQPGRAMFGIVQGGDIPALRVESARALVGLDLKGYAIGGLAVGEPQATMLAMIETVEPHLPTTKPRYLMGVGTPDDIVQAVSRGIDMFDCVMPTRAGRHGMVYTRHGRLNLRNARFAEDNAPLDPESTCPAANQYSKAYLHHLVRAGEILGMMLLTWNNLSYYQDLMAGLRRAIAAGRLQDFIGETREGWEKAERDRAA

SEQ ID NO: 57557 - protein, 315 aa, Methylobrevis pamukkalensis
  misc_feature (1)..(315): tr|A0A1E3H4M0|A0A1E3H4M0_9RHIZ Queuine tRNA-ribosyltran sferase OS=Methylobrevis pamukkalensis OX=1439726 GN=tg t_2 PE=3 SV=1
MLRPGAERVARLGGLHEFARWPHTILTDSGGFQVMSLAQIRKLTETGVTFRSHIDGSRHEMTPERSVEIQGLLGSDIQMQLDECIRLPAERKEIDRAMQLSLRWAARSRAKFEAMGGPGKGQGLYGIVQGGDDAELRATSARELAAMPFEGFSIGGLAVGEPQAVMLQMLDIVCPLLPQDRPRYLMGVGTPDDIVESVARGVDQFDCVMPTRAGRHGQVFTRFGRINLRNARHAEDPRPLDEASDCPAARDYSRAYLHHLVRAEEALGAMLLTWVNVAYYQSLMQGIRDAIEAGRYADFVAETKAGWARGDIAAV

SEQ ID NO: 57558 - protein, 64 aa, Methylobrevis pamukkalensis
  misc_feature (1)..(64): tr|A0A1E3H663|A0A1E3H663_9RHIZ Queuine tRNA-ribosyltran sferase OS=Methylobrevis pamukkalensis OX=1439726 GN=tg t_1 PE=4 SV=1
MTAPFAFDLLATDGAARRGTITTPHGEVRTPAFMPVGTQGTVKAMFMDDVRATGATSSSATPIT

SEQ ID NO: 57559 - protein, 375 aa, Methylocaldum marinum
  misc_feature (1)..(375): tr|A0A250KQC5|A0A250KQC5_9GAMM Queuine tRNA-ribosyltran sferase OS=Methylocaldum marinum OX=1432792 GN=tgt PE=3 SV=1
MEFNVSSTDGKARRGELIFSRGRVQTPAFMPVGTYGTVKAMTPEELKELGAEIVLGNTFHLMLRPGTDVIRSHGGLHDFMHWDRPILTDSGGFQVFSLGAMRKITEAGVLFRSPVDGSVTFLGPEESMAVQRELGSDIVMVFDECTPYPASYEQAADSMRLSLRWAERSKKAHDGNRSALFGIVQGGVYEALRSESVEGLKAIGFDGYAIGGLSVGESKEDRARVLNSLMPKMPFDKPRYLMGVGTPEDIVEAVRLGIDMFDCVMPTRNARNGHLFTRHGAIRIRNSCYQNDTRPLDDECRCYTCRNYSRSYLRHLDKCREILGARLNTIHNLFYYQELMAGLRRAIEERTFNDFVVRFYEQRGKGDVLCNNAAL

SEQ ID NO: 57560 - protein, 375 aa, Methylocaldum sp.
  misc_feature (1)..(375): tr|A0A4R6ZVW7|A0A4R6ZVW7_9GAMM Queuine tRNA-ribosyltran sferase OS=Methylocaldum sp. 0917 OX=2485163 GN=tgt PE= 3 SV=1
MEFIVSSTDGRARRGELIFSRGNVRTPAFMPVGTYGTVKAMTPEELKELGAEIVLGNTFHLMLRPGTDVIRRHGDLHDFMHWDRPILTDSGGFQVFSLGAMRKITEAGVRFRSPVDGSVTFLGPEESMAVQRDLGSDIVMIFDECTPYPASYEQAADSMRLSLRWAERSKDAHEGNPSALFGIVQGGVYEELRFESVEGLKNIGFDGYAIGGLSVGEPKEDRARILNSLLPNMPSDRPRYLMGVGTPEDIVEAVRLGIDMFDCVLPTRNARNGHLFTRHGAIRIRNSCYQNDTRPLDDECRCYTCRNFSRSYLRHLDKCGEILGSRLNTIHNLYYYQELMAGLRQAIEDNRLSEFVARFYEQRGKGEVLCNNAAF

SEQ ID NO: 57561 - protein, 380 aa, Methylocapsa palsarum
  misc_feature (1)..(380): tr|A0A1I4C6X6|A0A1I4C6X6_9RHIZ Queuine tRNA-ribosyltran sferase OS=Methylocapsa palsarum OX=1612308 GN=tgt PE=3 SV=1
MTGGFRFNVTRTDGQARTGVIATARGEIRTPAFMPVGTAATVKAMHPEAVKALGADIVLANTYHLMLRPGAERVAELGGLHRFMNWPWPILTDSGGFQVMSLAKLRKLDEDGVTFQSHIDGARHRLTPERAMEIQALLGSDIQMQFDECVRLPCEEDEARRAMLLSLRWAERSRAAFTPAPGRALFGIVQGGASPALRIESATALTGMDFHGYALGGLAVGEPQEIMLAMIETALPLLPAGKPRYLMGVGAPDDLLESVRRGIDMFDCVMPTRAGRHGLAYTRRGRLNLRNARHAGDPAPVDPLSASAAARTYSRAYLHHLVKSGEILGMMLLTEINLAYYEDLMEAARRAIAAGDYADFCARTKEDWALGEGEGQPKPS

SEQ ID NO: 57562 - protein, 376 aa, Methyloceanibacter caenitepidi
  misc_feature (1)..(376): tr|A0A0A8K3H3|A0A0A8K3H3_9RHIZ Queuine tRNA-ribosyltran sferase OS=Methyloceanibacter caenitepidi OX=1384459 GN =tgt PE=3 SV=1
MTVPFTFALKATDGRARTGVIQTQRGEIRTPAFMPVGTQATVKAMFIEDVAAAGADIILGNTYHLMLRPGAERIAKLGGLHSFMHWDKPILTDSGGYQVMSLAKLRKITEEGVTFNSHLDGAPVFLTPERAVEVQCLLGADIQMALDECTPFPCSREEARVSLDLSMRWAERSKAAFETMSAPGQALFGIVQGSVFPDMREDSAKTLVGIGFPGYAVGGLAVGEGQEAMFDTLDATTPYLPEDKPRYLMGVGTPLDILGAVARGIDMFDCVMPTRSGRHGQAFTWGGRLNLRNAQYAEDLTPLDADSACPAAQYSRAYLHHLVKAGEMLGAMLVSYANIQFYQELMAGARAAIANGTFAAFADDIRRRYARADGTD

SEQ ID NO: 57563 - protein, 375 aa, Methyloceanibacter marginalis
  misc_feature (1)..(375): tr|A0A1E3W8V9|A0A1E3W8V9_9RHIZ Queuine tRNA-ribosyltran sferase OS=Methyloceanibacter marginalis OX=1774971 GN= tgt PE=3 SV=1
MSAPFSFELKAKDGRARTGAINTPRGLIRTPAFMPVGTGATVKAMFPEDVAATGADIILGNTYHLMLRPGAERVARLGGLHKFMHWEKPILTDSGGYQVMSLAKLRKISEQGVTFQSHLDGATIELTPERAIEVQCLLGSDIQMVLDECTPFPATHEEAKRSLDLSMRWAERSKAAFETMSAPGQALFGIVQGSIYPDLREESARALTGIGFPGYAVGGLAVGEGQEAMFDTVEITTAFLPEDRPRYLMGVGTPQDMLGAIARGIDMFDCVMPTRSGRHGQAFTWGGRINLRNARYAEDATPLDAESKCPAARYERAYLHHLIKSGEMLGAMLISYANVQFYQELMAKARAAIGAGNFVAFAEDVARRYAVDDES

SEQ ID NO: 57564 - protein, 376 aa, Methyloceanibacter methanicus
  misc_feature (1)..(376): tr|A0A1E3W0E1|A0A1E3W0E1_9RHIZ Queuine tRNA-ribosyltran sferase OS=Methyloceanibacter methanicus OX=1774968 GN= tgt PE=3 SV=1
MTRAFSFSVKAQDGAARTGVIATQRGDIRTPAFMPVGTQATVKAMFVEDVAAAGADIILGNTYHLMLRPGAERIAKLGGLHSFMHWDKPILTDSGGYQVMSLAKLRKISEEGVAFQSHLDGARVVLRPNRAIEVQCLLGADIQMALDECTPFPASRAEARVSLDLSMRWAERSKAAFEAMSAPGQALFGIVQGSVYPDLREDSAKTLEGIGFPGYAVGGLAVGEGHEAMLQTLEATTPFLPEDKPRYLMGVGTPLDILEAVAQGIDMFDCVMPTRSGRHGQAFTWGGRLNLRNAQYAEDLSPLDPESACPAAQYSRAYLHHLVKAGEILGAMLVSYANVQFYQELMARARTAIAGGTFADFVEDVRRRYAGPENTA

SEQ ID NO: 57565 - protein, 385 aa, Methyloceanibacter stevinii
  misc_feature (1)..(385): tr|A0A1E3VKL1|A0A1E3VKL1_9RHIZ Queuine tRNA-ribosyltran sferase OS=Methyloceanibacter stevinii OX=1774970 GN=tg t PE=3 SV=1
MPADSERPGVTVPFSFALKAKDAGARTGVIETQRGEIRTPAFMPVGTQATVKAMFIEDVAAAGADIILGNTYHLMLRPGAERIAKLGGLHSFMHWDKPILTDSGGYQVMSLAKLRKITEEGVTFNSHLDGAPVFLTPERAVEVQCLLGADIQMALDECTPFPCSREEARVSLDLSMRWAERSKAAFETMSAPGQALFGIVQGSIFPDMREDSARTLVEIGFPGYAVGGLAVGEGQQAMFDTLDATTPYLPEDKPRYLMGVGTPLDILGAVARGIDMFDCVMPTRSGRHGQAFTWGGRLNLRNAQYAEDLTPLDADSACPAAQYSRAYLHHLVKAGEMLGAMLMSYANIQFYQELMAGARAAIANGTFADFADDIRRRYAKAEGTD

SEQ ID NO: 57566 - protein, 375 aa, Methyloceanibacter superfactus
  misc_feature (1)..(375): tr|A0A1E3VIV9|A0A1E3VIV9_9RHIZ Queuine tRNA-ribosyltran sferase OS=Methyloceanibacter superfactus OX=1774969 GN =tgt PE=3 SV=1
MTELFSFELKRQDKAARTGVITTPRGQIRTPAFMPVGTGATVKAMFPEDVAATGADIILGNTYHLMLRPGAERVAKLGGLHRFMHWEKPILTDSGGYQVMSLAKLRRITEEGVTFQSHIDGATIHLTPERAIEVQCLLGADIQMVLDECTPFPATREEAKRSLDLSMRWAERSKAAFARLGAPGQALFGIVQGSTYPDLREQSARALMEIGFPGYAVGGLAVGEGQQSMLDMVEVTTAVLPEDRPRYLMGVGTPEDLLGAIARGIDMFDCVMPTRSGRHCQAFTWSGRLNLRNARHAEDTRPLDAESQCPAAQYSRAYLHHLVKSGETLGAMLLSYANVQFYQELMARSREAIAQGRFAAFAEDVLRRYQSGGED

SEQ ID NO: 57567 - protein, 378 aa, Methylocella silvestris
  misc_feature (1)..(378): tr|B8EIV2|B8EIV2_METSB Queuine tRNA-ribosyltransferase OS=Methylocella silvestris (strain DSM 15510 / CIP 1081 28 / LMG 27833 / NCIMB 13906 / BL2) OX=395965 GN=tgt PE =3 SV=1
MSEEFAFAIFGVDGAARTGAISTSRGTIRTPAFMPVGTAATVKAMHPQAVKALGADIVLANTYHLMLRPGAERIAELGGLHRFMNWPGPILTDSGGFQVMSLAKLRKLDENGVTFQSHIDGSRHVLTPERSMQIQDLLGADIQMQFDECVKLPCTEAEARRAMELSLRWGERSKQAFARQPGRALFGIVQGGASESLRRESARALVEMEFDGYALGGLAVGEPQDVMLAMIDCTAPQLPSPKPRYLMGVGSPDDLIESVARGIDMFDCVMPTRAGRHGLAYTRAGKLNLRNARHAGDPAPVDANSPNEATRTYSRAYLHHLVKSGEILGMMLLTEINLAYYQELMAGMRAAIAAGCFDAFRAETKESWRGGMIAGEEF

SEQ ID NO: 57568 - protein, 378 aa, Methylocella silvestris
  misc_feature (1)..(378): tr|A0A2J7TLL9|A0A2J7TLL9_METSI Queuine tRNA-ribosyltran sferase OS=Methylocella silvestris OX=199596 GN=tgt PE= 3 SV=1
MSGEFAFRIFSVDGAARTGAISTSRGTIRTPAFMPVGTAATVKAMHPEAVRALGADIVLANTYHLMLRPGAERIAELGGLHRFMNWSGPILTDSGGFQVMSLAKLRKLDENGVTFQSHIDGSRHVLTPERSMQIQDLLGADIQMQFDECVKLPCTDAEARRAMELSLRWAERSRKAFAHQPGRALFGIVQGGASQALRLESARALVGMEFDGYALGGLAVGEPQDIMLAMIECTAPQLPLSKPRYLMGVGSPDDLIESVARGVDMFDCVMPTRAGRHGLAYTRAGKLNLRNARHANDPAPVDPGSTNEATRTYSRAYLHHLVKSGEILGMMLLTEINLAYYQELMAGMRAAIAAGSFDAFRAETKESWRGGMIAGEEF

SEQ ID NO: 57569 - protein, 371 aa, Methylococcaceae bacterium
  misc_feature (1)..(371): tr|A0A257MXA7|A0A257MXA7_9GAMM Queuine tRNA-ribosyltran sferase OS=Methylococcaceae bacterium NSM2-1 OX=1917482 GN=tgt PE=3 SV=1
MEFNLINTDGHARRGRLTFARGVVETPIFMPVGTYGAVKSLTPEDLAGVGAQIILGNTFHLMLRPTTPVIKAHGDLHDFMRWDKPILTDSGGFQVFSLGALRKITEKGVTFKSPINGSSIFMGPEESMQVQRDLGSDIVMIFDECTPYPATVYEAADSMRLSLRWAERSKTAHGDNPSALFGIVQGGMYEHLRQESIDGLLDIGFDGYAIGGLSVGEPKDEMMATLDVIHSKMPVDKPRYLMGVGTPEDLVEAVRRGIDMFDCVMPTRNARNGHLFTRFGVIKIRNSQYEFDNKPLDESCGCYTCLNYSRAYLRHLDKCKEMLGSRLNTLHNLHYYLSLMQNLRDAIEKQELDVFVRQFYQQRGKAVPSMA

SEQ ID NO: 57570 - protein, 370 aa, Methylococcaceae bacterium
  misc_feature (1)..(370): tr|A0A1Z9UER1|A0A1Z9UER1_9GAMM Queuine tRNA-ribosyltran sferase OS=Methylococcaceae bacterium TMED282 OX=198675 8 GN=tgt PE=3 SV=1
  misc_feature (9)..(9): Xaa can be any naturally occurring amino acid
  misc_feature (13)..(13): Xaa can be any naturally occurring amino acid
  misc_feature (21)..(21): Xaa can be any naturally occurring amino acid
  misc_feature (27)..(27): Xaa can be any naturally occurring amino acid
  misc_feature (45)..(45): Xaa can be any naturally occurring amino acid
  misc_feature (50)..(51): Xaa can be any naturally occurring amino acid
  misc_feature (61)..(61): Xaa can be any naturally occurring amino acid
  misc_feature (99)..(99): Xaa can be any naturally occurring amino acid
  misc_feature (105)..(105): Xaa can be any naturally occurring amino acid
  misc_feature (130)..(130): Xaa can be any naturally occurring amino acid
  misc_feature (139)..(140): Xaa can be any naturally occurring amino acid
  misc_feature (187)..(187): Xaa can be any naturally occurring amino acid
  misc_feature (250)..(250): Xaa can be any naturally occurring amino acid
  misc_feature (252)..(252): Xaa can be any naturally occurring amino acid
  misc_feature (293)..(293): Xaa can be any naturally occurring amino acid
  misc_feature (296)..(296): Xaa can be any naturally occurring amino acid
  misc_feature (304)..(304): Xaa can be any naturally occurring amino acid
  misc_feature (359)..(359): Xaa can be any naturally occurring amino acid
MGANFSLIXTDKXARAGLLSXSHGVIXTPVFMPVGTYGTVKAMTXEELVXXGAQIVLGNTXHLMLRPGEKVIRNHGGLHDFMSWRKPILTDSGGYQVFXLGDLRXISEEGVTFRSPINGDKIFLSPERSXEVQKWLNSXXAMVFDECTPYPANEEMARISMEMSLRWAKRSKQAHEGSSNALFGIVXGGMHENLRSESAEKLRRLDFDGYAIGGLSVGEPKGDMLRIMTHTAALLPADKPRYLMGVGTPXDXLNAIGQGVDMFDCVLPTRNARNGHLYTSQGIVRIRNAEHRXSLXPLDESCAXSTCQNYSRAYLHHLQRSNEILGARLNTLHNLHFYQSLMSAAREAIQEDKFEIFKXSFLQKYKDSKQ

SEQ ID NO: 57571 - protein, 371 aa, Methylococcales bacterium
  misc_feature (1)..(371): tr|A0A418RG65|A0A418RG65_9GAMM Queuine tRNA-ribosyltran sferase OS=Methylococcales bacterium OX=2304002 GN=tgt PE=3 SV=1
MEFNLLNTDGHARRGRLNFERGVVETPIFMPVGTYGAVKSLTPEDLIGVGAQIILGNTFHLMLRPTTAVIKAHGDLHDFMHWQKPILTDSGGFQVFSLGALRKITEKGVTFKSPLNGSAIFMGPEESMQVQRDLGSDIVMIFDECTPYPATVDEAAISMRLSLRWAQRSKDAHDDNPAALFGIVQGGMYEHLRKESIDGLLDIGFDGYAIGGLSVGEPKEEMMETLDVIHNKMPVDKPRYLMGVGTPEDLVEAVRRGIDMFDCVMPTRNARNGHLFTTFGVVKIRNSQYEFDNQPLDSDCACYTCQNYSRAYLRHLDRCKEMLGSRLNTIHNLYYYLSLMQGLRDAIEKQELDVFVKQFYHLRGKAMPSMA

SEQ ID NO: 57572 - protein, 371 aa, Methylococcales bacterium
  misc_feature (1)..(371): tr|A0A3A2J2Y7|A0A3A2J2Y7_9GAMM Queuine tRNA-ribosyltran sferase OS=Methylococcales bacterium OX=2304002 GN=tgt PE=3 SV=1
MEFNLLNTDGHARRGRLNFARGVVETPIFMPVGTYGAVKSLTPEDLIGVGAQIILGNTFHLMLRPTTAVINAHGDLHDFMHWQKPILTDSGGFQVFSLGALRKITEQGVTFKSPLNGSAIFMGPEESMQVQRELGSDIVMIFDECTPYPATVEEADISMRLSLRWAQRSKDAHGDNPSALFGIVQGGMYEHLRKESIDGLLDIGFDGYAIGGLSVGEPKEEMMATLDVIHNKMPVDKPRYLMGVGTPEDLVEAVRRGIDMFDCVMPTRNARNGHLFTTFGVVKIRNSQYEFDSQSLDPDCACYTCQNYSRAYLRHLDKCKEMLGSRLNTIHNLYYYLSLMQGLRDAIEKQELDVFVRQFYQQRGKAMPSMA

SEQ ID NO: 57573 - protein, 370 aa, Methylococcus capsulatus
  misc_feature (1)..(370): tr|Q60B05|Q60B05_METCA Queuine tRNA-ribosyltransferase OS=Methylococcus capsulatus (strain ATCC 33009 / NCIMB 11132 / Bath) OX=243233 GN=tgt PE=3 SV=1
MEFAVKCCDGPARRGELSFPRGRVQTPAFMPVGTYGTVKAMTPEELRDSGAEIILGNTFHLMLRPGVDIIRAHGDLHGFMHWDGPILTDSGGFQVFSLGAMRKIGEQGVLFRSPIDGSPVFMGPEESMAVQRALGSDIVMVFDECTPYPAEYGEARASMELSLRWAERSKAAHADNPSALFGIVQGGMYEDLRARSIAGLQEIGFDGYAIGGLSVGEPKEDRHRVLEALMPQMPAERPRYLMGVGTPEDIVDAVTRGIDMFDCVLPTRNARNGHLFTRFGAVRIRNARYRDDLRPIDEECGCYTCRHYSRAYLRHLDRCGEILGARLNTIHNLFYYQELMAGLRAAIEEGTLERFVDRFHVLRSTGNAFM

SEQ ID NO: 57574 - protein, 371 aa, Methylococcus sp.
  misc_feature (1)..(371): tr|A0A3N9V7Q8|A0A3N9V7Q8_9GAMM Queuine tRNA-ribosyltran sferase OS=Methylococcus sp. OX=39769 GN=tgt PE=3 SV=1
MQFRVFNADGRARRGEMAFPRGTLQTPAFMPVGTYGTVKAMTPEELRETGAEIILGNTFHLMLRPGTDIICRHGELHDFMHWDGPILTDSGGFQVFSLGDMRKITEAGVHFQSPVNGDRVFLGPEESMAVQRALGSDIVMIFDECTPYPATWQEARDSMRLSLRWAERSRAAHGDSAAALFAIVQGGVHEDLRAESARALQAIGFDGYAIGGLSVGEPKEDRARVLDAVVPGLPADKPRYLMGVGTPEDIVEAVRAGIDMFDCVMPTRNARNAHIFTRHGTLRLRNSGYQDDIRPLDENCRCYTCRHYSRAYLRHLDKCGEILGARLNTIHNLHYYQELMTGLRGAIAAGNIEGFVSEFYRLREGSPVFVA

SEQ ID NO: 57575 - protein, 371 aa, Methylococcus sp.
  misc_feature (1)..(371): tr|A0A432RNG7|A0A432RNG7_9GAMM Queuine tRNA-ribosyltran sferase OS=Methylococcus sp. OX=39769 GN=tgt PE=3 SV=1
MQFSIKQTDGRARIGQMIFPRGTVNTPAFMPVGTYGTVKAMTPEELVASGTEIVLGNTFHLLLRPGTEIIRKHGGLHGFMQWNGPILTDSGGFQVFSLGKIRTITEQGVEFRSPINGSPVFMGPEESMKIQRDLGSDIVMIFDECTPYPATIEQARSSMELSLRWARRSKAAHGDNPNALFGIVQGGMYEDLRRESLDNLTSTGFDGYAIGGLSVGEPKEEMHRIINDLIPRMPADQPRYLMGVGTPEDLVEGVRRGIDMFDCVMPTRNARNGFLFVSNGILKIRNSQFADDTRPPDESCSCYTCQNFSRAYLRHLDKCGEMLGPRLNTIHNLHHYQKLMTDLRQAIHSQTLDSFVQSFYRQRRKTTPFMS

SEQ ID NO: 57576 - protein, 374 aa, Methylocystaceae bacterium
  misc_feature (1)..(374): tr|A0A5C9DBM0|A0A5C9DBM0_9RHIZ Queuine tRNA-ribosyltran sferase OS=Methylocystaceae bacterium OX=2052174 GN=tgt PE=3 SV=1
MTQAFSFSVLATDGLARQGEIHTPRGIIRTPAFMPVGTAATVKAMFVEDVHAAGADILLGNVYHLMLRPGAERIARLGGLHEFMRWPYPILTDSGGFQVMSLAKLRKLDESGVTFQSHIDGSRHHLSPERSMEIQDLLGSDIQMQLDECVRLPCSESEAERAMRLSLRWAERSRKAFCERPGRAVFGIVQGGESKRLRIESAQALAGMDFHGIAVGGLAVGEPQDVMLDMLETTAPHLPESKPRYLMGVGAPDDIVQAVARGIDMFDCVMPTRAGRHGLAYTRHGRVTLRNARHADDPRPLDAQSSCPAARDYSRAYLHHLVKAGEILGMMLLTQANVAYYQELMAGLRAAIGAGRLADFIAETRANWIEGESA

SEQ ID NO: 57577 - protein, 371 aa, Methylocystaceae bacterium
  misc_feature (1)..(371): tr|A0A4P5SXG5|A0A4P5SXG5_9RHIZ Queuine tRNA-ribosyltran sferase OS=Methylocystaceae bacterium OX=2052174 GN=tgt PE=3 SV=1
MSLKFTVQSTDKNARTGIITTSRGVIKTPVFMPVGTAATVKAMVLDDVRLAGADIILGNVYHLMLRPGAERIARLGGLHKFMNWPYPILTDSGGFQVMSLSKLRKLSEEGVVFQSHIDGSKHLLSPERSLEIQDLLGSDIQMQFDECIKLPCSDDEASRAMNLSLRWAARSREAFHNVDGRGIFGIVQGGSNKELRHQSAKFLAEMDFDGLAVGGLAVGEPQQIMLEMLESTLPHLPTNKPHYLMGVGTPDDIIKAVCRGIDMFDCVMPTRAGRHGLAYTRYGAINIRNAKYADDPRPLDPQSACVATNGYSRAYLHHLVRSHEILGMMLLTQSNIAYYLNLMQGIRDAITNKSFEEFALKTTEDWKTGDI

SEQ ID NO: 57578 - protein, 376 aa, Methylocystis bryophila
  misc_feature (1)..(376): tr|A0A1W6MSQ0|A0A1W6MSQ0_9RHIZ Queuine tRNA-ribosyltran sferase OS=Methylocystis bryophila OX=655015 GN=tgt PE= 3 SV=1
MTGRFAFEIDSGDGDARSGRIFTARGVVRTPAFMPVGTAATVKAMFPQDVRDAGADIVLGNVYHLMLRPGAERIASLGGLHEFMRWPGPILTDSGGFQVMSLSKLRKLDERGVAFQSHIDGSKHLLTPERSMEIQALLGSDIQMQLDECVPLPCTDAEAERAMRLSLRWAERSRKSFAEAPGRAIFGIVQGGAVKPLRIESAKALSSMDFHGLAIGGLAVGEPQDVMIDMIRTVMPHLPEHKPHYLMGVGTPDDIVEAVMRGVDMFDCVMPTRAGRHGLAYTRFGKVNLMNARHADDRAPLDPQSSCAAARDYSRAYLHHLFKAREILGMMLLTQVNIAYYQELMAGLREAIAMRRLADFVAEIKEGWARGLEASV

SEQ ID NO: 57579 - protein, 376 aa, Methylocystis heyeri
  misc_feature (1)..(376): tr|A0A4S4MGL8|A0A4S4MGL8_9RHIZ Queuine tRNA-ribosyltran sferase OS=Methylocystis heyeri OX=391905 GN=tgt PE=3 S V=1
MTQGFSFEVQATDGAARKGEITTPRGVIRTPAFMPVGTAATVKAMFVEDVRAAGADILLGNVYHLMLRPGAERIARLGGLHHFMRWPYPILTDSGGFQVMSLAKLRKLNEDGVTFQSHIDGSKHVLTPERSMEIQALLGSDIQMQFDECVRLPCSDAEAERAMRLSLRWAERSRKAFDSARGQAVFGIVQGGAVKSLRIESARALSEMDFHGLAIGGLAVGEPQEVMLEMLETVMPYLPANKPHYLMGVGTPDDIVKAVARGVDMFDCVMPTRAGRHGLAYTRFGKINLMNARHAEDSSPLDPESSCPAARNYSRAYLHHLFKAGEILGMMLLTQINVAYYQELMAGLRAAIEAKRLADFIIQTSEAWARGSQSGD

SEQ ID NO: 57580 - protein, 375 aa, Methylocystis hirsuta
  misc_feature (1)..(375): tr|A0A3M9XTM4|A0A3M9XTM4_9RHIZ Queuine tRNA-ribosyltran sferase OS=Methylocystis hirsuta OX=369798 GN=tgt PE=3 SV=1
MTQAFSFSVLATDGLARQGEIQTPRGIIRTPVFMPVGTAATVKAMFAEDVRAAGADILLGNVYHLMLRPGAERIARLGGLHEFMRWPYPILTDSGGFQVMSLAKLRKLDESGVTFQSHIDGSRHHLSPERSMEIQDLLGSDIQMQLDECVRLPCSESEAERAMRLSLRWAERSRKAFRERPGRAVFGIVQGGESKRLRIESAKALAGMEFHGIAVGGLAVGEPQDVMLDMLETTAPHLPESKPRYLMGVGAPDDIVQAVARGIDMFDCVMPTRAGRHGLAYTRHGRVTLRNARHADDPRPLDEQSSCPAARDYSRAYLHHLVKAGEILGMMLLTQANVAYYQELMAGLRAAIGAGRLADFIAETRAKWIEGESAS

SEQ ID NO: 57581 - protein, 374 aa, Methylocystis rosea
  misc_feature (1)..(374): tr|A0A3G8M6G7|A0A3G8M6G7_9RHIZ Queuine tRNA-ribosyltran sferase OS=Methylocystis rosea OX=173366 GN=tgt PE=3 SV =1
MTQGFSFSVLATDDLARQGEIVTPRGTIRTPAFMPVGTAATVKAMFVEDVRAAGADVLLGNVYHLMLRPGAERIARLGGLHEFMRWPYPILTDSGGFQVMSLAKLRKLDESGVTFQSHIDGSRHHLSPERSMEIQDLLGSDIQMQLDECVRLPCSESEAERAMRLSLRWAERSRKAFCERPGRAVFGIVQGGESKRLRIESAQALAGMDFHGIAVGGLAVGEPQEVMLDMLETTAPHLPESKPRYLMGVGAPDDIVEAVARGIDMFDCVMPTRAGRHGLAYTRHGRVTLRNARHADDPRPLDAQSSCPAARDYSRAYLHHLVKAGEILGMMLLTQANVAYYQELMAGLRAAIGAGRLADFIAETRANWIEGESA

SEQ ID NO: 57582 - protein, 301 aa, Methylocystis sp.
  misc_feature (1)..(301): tr|A0A2S5LYL6|A0A2S5LYL6_9RHIZ Queuine tRNA-ribosyltran sferase (Fragment) OS=Methylocystis sp. OX=1911079 GN=C TY36_12445 PE=3 SV=1
IARLGGLHEFMRWPYPILTDSGGFQVMSLAKLRKLDESGVTFQSHIDGSRHHLSPERSMEIQDLLGSDIQMQLDECVRLPCSESEAERAMRLSLRWAERSRKAFCERPGRAVFGIVQGGESKRLRIESAQALAGMDFHGIAVGGLAVGEPQDVMLDMLETTAPHLPESKPRYLMGVGAPDDIVQAVARGIDMFDCVMPTRAGRHGLAYTRHGRVTLRNARHADDLRPLDERSSCPAARDYSRAYLHHLVKAGEILGMMLLTQANVAYYQELMAGLRAAIGAGRLADFIAETRANWIEGESA

SEQ ID NO: 57583 - protein, 374 aa, Methylocystis sp.
  misc_feature (1)..(374): tr|A0A2U1SHB8|A0A2U1SHB8_9RHIZ Queuine tRNA-ribosyltran sferase OS=Methylocystis sp. MitZ-2018 OX=2127046 GN=tg t PE=3 SV=1
MTQAFSFSVLATDYLARQGEIVTPRGTIRTPAFMPVGTAATVKAMFVEDVRAAGADVLLGNVYHLMLRPGAERIARLGGLHEFMRWPYPILTDSGGFQVMSLAKLRKLDESGVTFQSHIDGSRHHLSPERSMEIQDLLGSDIQMQLDECVRLPCSESEAERAMRLSLRWAERSRKAFCERPGRAVFGIVQGGESKRLRIESAQALAGMDFHGIAVGGLAVGEPQDVMLDMLETTAPHLPESKPRYLMGVGAPDDIVQAVARGIDMFDCVMPTRAGRHGLAYTRHGRVTLRNARHADDPRPLDAQSSCPAARDYSRAYLHHLVKAGEILGMMLLTQANVAYYQELMAGLRAAIGVGRLADFIAETRANWIEGESA

SEQ ID NO: 57584 - protein, 371 aa, Methyloglobulus morosus
  misc_feature (1)..(371): tr|V5C015|V5C015_9GAMM Queuine tRNA-ribosyltransferase OS=Methyloglobulus morosus KoM1 OX=1116472 GN=tgt PE=3 SV=1
MEFKLTTQDGYARRGQLTLTHGTVETPVFMPVGTYGTVKALTPDDLTSLGAQIILGNTFHLMLRPGTDVIRAHQDLHGFMNWQKPILTDSGGFQVFSLGDLRKITEEGVTFKSPINGSKIFMGPEESMQVQRDLGSDIVMIFDECTPYPATVDEAASSMRLSLRWAQRSKNAHGDNPNALFGIVQGGMYEHLRAESIDGLVDIGFDGYAIGGLSVGEPKEEMMQTLDAIHKLMPADKPRYLMGVGTPEDLVESVRRGIDMFDCVMPTRNARNGHLFTTFGVVKIRNSQYEFDTNPVDECCTCYTCRNYSRAYLRHLDKCKEMLGSRLNTLHNLHYYLNLMQELRDAIENKELEFFVKRFYQQRGKVAPVVA

SEQ ID NO: 57585 - protein, 378 aa, Methyloligella halotolerans
  misc_feature (1)..(378): tr|A0A1E2S2I8|A0A1E2S2I8_9RHIZ Queuine tRNA-ribosyltran sferase OS=Methyloligella halotolerans OX=1177755 GN=tg t PE=3 SV=1
MTKDFTFRLLARDGAARRGEIATPRGPIRTPAFMPVGTAATVKAMFPETVEATGADIILGNTYHLMLRPGAERVARLGGLHRFMHWEKPILTDSGGYQVMSLSKLRKITEEGVAFQSHIDGSRHMLTPERAVEIQCLLGSDIQMVLDECTPFPATRDEAKRSLDLSMRWAARCKTAFAEMSKPGQALFGIVQGSTYPDLRKESAGALVEIGFPGYAIGGLAVGEGHETMVEMVGITTQFLPEDKPRYLMGVGTPQDLIAAIGQGVDMFDCVMPTRSGRHGQAFTWAGRCNLRNSQYAEDETPLDAESSCPAAQYSRAYLHHLVKSGEMLGAMLLSWANIHFYQELMARARTAIEVGEFDDFSKEMGRRYGDTGPKGSE

SEQ ID NO: 57586 - protein, 368 aa, Methylomagnum ishizawai
  misc_feature (1)..(368): tr|A0A1Y6CZW4|A0A1Y6CZW4_9GAMM Queuine tRNA-ribosyltran sferase OS=Methylomagnum ishizawai OX=1760988 GN=tgt PE =3 SV=1
MEFNISSTCGAARRGELVFPRGRVRTPAFMPVGTYGTVKAMTPEELAGLGADIILGNTFHLMLRPGTEIIRLHGDLHGFMHWQGPILTDSGGFQVFSLGAMRKIGEAGVRFRSPVDGSEVFLGPEESMAVQRELGSDIVMIFDECTPYPATYEQAAQSMRLSLRWARRSREAHGDNPAALFGIVQGGVYEELRLESVEGLQAIGFDGYAIGGLSVGEPKEDRARVLDALMPRMPQGRPRYLMGVGTPEDIVEAVRVGIDMFDCVMPTRNARNGHLFTRNGAIRIRNSPYQRDTRPLDEECGCYTCRHYSRSYLRHLDKCGEILGARLNTIHNLFYYQELMAGLRAAIEAGNLDGFVADFYARQRNGGA

SEQ ID NO: 57587 - protein, 371 aa, Methylomicrobium album
  misc_feature (1)..(371): tr|H8GPB1|H8GPB1_METAL Queuine tRNA-ribosyltransferase OS=Methylomicrobium album BG8 OX=686340 GN=tgt PE=3 SV= 1
MEFNLIATDGAARRGQLTFARGTVETPIFMPVGTYGAVKSLTPEDLVGIGAQIILGNTFHLMLRPGMDVIRAHGSLHEFMRWDRPILTDSGGFQVFSLGALRKITEQGVTFRSPVDGSRIFMGPEESMQVQMGLGSDIVMIFDECTPYPATVQQAADSMRLSLRWAERSKKAHGGNPSALFGIVQGGMYEHLRRESLAGLVDIGFDGYAIGGLSVGEPKEEMLAALDFIAPQMPADKPRYLMGVGTPEDLVEAVRRGVDMFDCVMPTRNARNGHLFTRFGVVKIRNSRYQADTRPLDEACGCYTCRNYSRAYLRHLDKCGEMLGSRLNTIHNLYYYLSLMREIREAIENRDFDRFAHEFYRQRGKVAPDMA

SEQ ID NO: 57588 - protein, 371 aa, Methylomicrobium alcaliphilum
  misc_feature (1)..(371): tr|G4SZ42|G4SZ42_META2 Queuine tRNA-ribosyltransferase OS=Methylomicrobium alcaliphilum (strain DSM 19304 / NC IMB 14124 / VKM B-2133 / 20Z) OX=1091494 GN=tgt PE=3 SV =1
MQFDLLNTDGLARRGRLTFARGVVETPVFMPVGTYGSVKAMTPEELNDVGAQIILGNTFHLMLRPGVEVMNAHGDLHDFMHWDKPILTDSGGFQVFSLGALRKITEQGVTFKSPINGSSIFMGPEESMSVQRHLGSDIVMIFDECTPYPASVDQAADSMRLSLRWAERSKKAHGDNPSALFGIVQGGMYEHLRRESLAGLVDIGFDGYAIGGLSVGEPKEEMLAMLDAVQPMMPSDKPRYLMGVGTPEDLVEAVRRGVDMFDCVMPTRNARNGHLFTRSGVIKIRNSRYQFDTGPLDENCGCYTCRHYSRSYLRHLDKCGEMLGSRLNTIHNLYYYLQLMQELRQAIETRSLDDYVKQFYQQRGKNVPDVA

SEQ ID NO: 57589 - protein, 371 aa, Methylomicrobium buryatense
  misc_feature (1)..(371): tr|A0A4P9URN4|A0A4P9URN4_9GAMM Queuine tRNA-ribosyltran sferase OS=Methylomicrobium buryatense OX=95641 GN=tgt PE=3 SV=1
MQFDLLNTDGLARRGRLTFARGVVETPVFMPVGTYGSVKAMTPEELNDVGAQIILGNTFHLMLRPGVEVMNAHGDLHDFMHWDKPILTDSGGFQVFSLGALRKITEQGVTFKSPINGSSIFMGPEESMSVQRHLGSDIVMIFDECTPYPASVDQAADSMRLSLRWAERSKKAHGENPSALFGIVQGGMYEHLRRESLAGLVDIGFDGYAIGGLSVGEPKEEMLAMLDVVQPMMPSDKPRYLMGVGTPEDLVEAVRRGVDMFDCVMPTRNARNGHLFTRSGVIKIRNSRYQFDTGPLDENCGCYTCRHYSRSYLRHLDKCGEMLGSRLNTIHNLFYYLQLMQELRQAIETRSLDDYVKQFYQQRGKNVPDVA

SEQ ID NO: 57590 - protein, 371 aa, Methylomicrobium kenyense
  misc_feature (1)..(371): tr|A0A543VBW5|A0A543VBW5_9GAMM Queuine tRNA-ribosyltran sferase OS=Methylomicrobium kenyense OX=269709 GN=tgt P E=3 SV=1
MQFDLLNTDGLARRGRLTFARGVVETPIFMPVGTYGSVKAMTPEELNDVGAQIILGNTFHLMLRPGIEVMNAHGDLHDFMHWDKPILTDSGGFQVFSLGALRKITEQGVTFKSPVNGSTIFMGPEESMAVQRHLGSDIVMIFDECTPYPASVDQAADSMRLSLRWAERSKQAHGDNPSALFGIVQGGMYEHLRQESLAGLVDIGFDGYAIGGLSVGEPKTEMLAMLDVVQPMMPTDKPRYLMGVGTPEDLVEAVRRGVDMFDCVMPTRNARNGHLFTRNGVIKIRNSRYQFDTGPLDENCGCYTCRHYSRSYLRHLDKCGEMLGSRLNTIHNLFYYLQLMQELRGAIETRSLDDYVKQFYQQRGKNVPDVA

SEQ ID NO: 57591 - protein, 369 aa, Methylomonas denitrificans
  misc_feature (1)..(369): tr|A0A140E4H5|A0A140E4H5_9GAMM Queuine tRNA-ribosyltran sferase OS=Methylomonas denitrificans OX=1538553 GN=tgt PE=3 SV=1
MEFKLKATDGHARRGQLTFARGVVETPIFMPVGTYGTVKSLTPEDLTELGAQIILGNTFHLLLRPGMDVMKAHGDLHDFMRWQKPILTDSGGFQVFSLGALRKISEQGVTFKSPVNGSKIFMGPEESMQVQRDLGSDIVMIFDECTPYPATYQEAADSMRLSLRWAERSKRAHEGNSSALFGIVQGGMYPQLREESIAGLTDIGFDGYAIGGLSVGEPKHEMLATLDAIHQKMPVDKPRYLMGVGTPEDLVEGVRRGIDMFDCVMPTRNARNGHLFTRHGVIKIRNQQYQYDTRPLDEDCSCYTCRNYSRSYLKHLDKCKEMLGSRLNTIHNLHYYLELMQGLRDAIDEQRFDTFVAEFYDLRGSREPI

SEQ ID NO: 57592 - protein, 370 aa, Methylomonas koyamae
  misc_feature (1)..(370): tr|A0A177NP75|A0A177NP75_9GAMM Queuine tRNA-ribosyltran sferase OS=Methylomonas koyamae OX=702114 GN=tgt PE=3 S V=1
MQFTLKSADGFARRGQLSFARGVVETPIFMPVGTYGTVKSLTPEDLEALGAQIILGNTFHLLLRPGMEVMKAHGDLHDFMRWQKPILTDSGGFQVFSLGALRKINEQGVTFKSPVNGSKIFMGPEESMQVQRDLGSDIVMIFDECTPYPATFQEAADSMRLSLRWAERSKRAHEGNDSALFGIVQGGMYPQLREESIAGLTGIGFDGYAIGGLSVGEPKHEMLATLDAIHQKMPADKPRYLMGVGTPEDLVESVRRGIDMFDCVMPTRNARNGHLFTRHGTIKIRNQQYQFDTRPLDENCACYTCRNYSRSYLKHLDKCKEMLGSRLNTIHNLHYYLELMAGIRAAIEAGRFAQFAEEFYALRGMRPPAA

SEQ ID NO: 57593 - protein, 369 aa, Methylomonas koyamae
  misc_feature (1)..(369): tr|A0A177P044|A0A177P044_9GAMM Queuine tRNA-ribosyltran sferase OS=Methylomonas koyamae OX=702114 GN=tgt PE=3 S V=1
MEFKLKTHDGQARRGQLTFARGVVETPIFMPVGTYGTVKALTPEDLEALGAQIILGNTFHLLLRPGMEVMKAHGDLHDFMRWQKPILTDSGGFQVFSLGALRKISEQGVTFKSPVNGSKIFMGPEESMQVQRDLGSDIVMIFDECTPYPATYQQAADSMRLSLRWAERSKRAHEGNDSALFGIVQGGMFPELRRESINGLTNIGFDGYAIGGLSVGEPKHEMLATLDAIMPNMPQDTPRYLMGVGTPEDLVEAVRRGVDMFDCVMPTRNARNGHLFTRYGVIKIRNQQYQFDTRPLDENCNCYTCRNYSRSYLKHLDKCKEMLGARLNTIHNLHYYLELMQGIRDAIEAGRFDEFVRAFYELRGVTMPH

SEQ ID NO: 57594 - protein, 369 aa, Methylomonas lenta
  misc_feature (1)..(369): tr|A0A177N7L2|A0A177N7L2_9GAMM Queuine tRNA-ribosyltran sferase OS=Methylomonas lenta OX=980561 GN=tgt PE=3 SV= 1
MEFKLKTRDGQARRGQLTFSRGVVETPIFMPVGTYGTVKSLTPEDLDELGAQIILGNTFHLMLRPGMDVMKAHGDLHDFMRWQKPILTDSGGFQVFSLGALRKISEQGVTFKSPVNGSKIFMGPEESMQVQRDLGSDIVMIFDECTPYPATFQQAADSMRLSLRWAERSKRAHEGNPSALFGIVQGGMYPELRRESINGLTNIGFDGYAIGGLSVGEPKHEMLSTLDAIMPDMPQDKPRYLMGVGTPEDLVEGVRRGVDMFDCVMPTRNARNAHLFTRHGVIKIRNNQYQFDTRPLDEDCSCYTCRNYSRSYLKHLDKCKEMLGSRLNTIHNLHYYLELMQGIRDAIEAQRLDEFVREFYDLRGVSMPD

SEQ ID NO: 57595 - protein, 369 aa, Methylomonas methanica; identical to SEQ ID NO: 57591
  misc_feature (1)..(369): tr|A0A4R3Y3P4|A0A4R3Y3P4_METMH Queuine tRNA-ribosyltran sferase OS=Methylomonas methanica OX=421 GN=tgt PE=3 SV =1

SEQ ID NO: 57596 - protein, 369 aa, Methylomonas methanica
  misc_feature (1)..(369): tr|A0A177MRJ0|A0A177MRJ0_METMH Queuine tRNA-ribosyltran sferase OS=Methylomonas methanica OX=421 GN=tgt PE=3 SV =1
MEFKLKATDGHARRGQLTFARGVVETPIFMPVGTYGTVKSLTPEDLNELGAQIILGNTFHLLLRPGMEVMKAHGDLHDFMRWQKPILTDSGGFQVFSLGALRKISEQGVTFKSPVNGSKIFMGPEESMQVQRDLGSDIVMIFDECTPYPATYQEAADSMRLSLRWAERSKRAHEGNSSALFGIVQGGMYPQLREESIAGLTDIGFDGYAIGGLSVGEPKHEMLATLDAIHQKMPVDKPRYLMGVGTPEDLVEGVRRGIDMFDCVMPTRNARNGHLFTRHGVIKIRNQQYQFDTRPLDEDCSCYTCRNYSRSYLKHLDKCKEMLGSRLNTIHNLHYYLELMQGLRDAIENQTFDTFVAAFYDQRDSRSPV

SEQ ID NO: 57597 - protein, 369 aa, Methylomonas sp.
  misc_feature (1)..(369): tr|A0A2P5MWE0|A0A2P5MWE0_METSP Queuine tRNA-ribosyltran sferase OS=Methylomonas sp. OX=418 GN=tgt PE=3 SV=1
MEFKLSTTDDQARRGQLIFARGVVETPIFMPVGTYGTVKALTPEDLEALGAQIILGNTFHLMLRPGMDVMKAHGDLHDFMRWQKPILTDSGGFQVFSLGALRKISEQGVTFKSPVNGSKIFMGPEESMQVQRDLGSDIVMIFDECTPYPATYQQAADSMRLSLRWAERSKRAHDGNPSALFGIVQGGMYPELRRESINGLTNIGFDGYAIGGLSVGEPKHEMLATLDAIMPQMPQDKPRYLMGVGTPEDLVEAVRRGVDMFDCVMPTRNARNGHLFTRYGVIKIRNNQYQFDTRPLDENCSCYTCRNYSRAYLKHLDKCREMLGSRLNTIHNLHYYLELMQGLRDAIEAQRLHEFVSEFYALRGTNMPN

SEQ ID NO: 57598 - protein, 369 aa, Methylomonas sp.
  misc_feature (1)..(369): tr|A0A2P5N1W5|A0A2P5N1W5_METSP Queuine tRNA-ribosyltran sferase OS=Methylomonas sp. OX=418 GN=tgt PE=3 SV=1
MQFKLDTTDGQARRGQLSFARGVVETPIFMPVGTYGAVKSLTPDDLNELGAQIILGNTFHLLLRPGMEVMKAHGDLHDFMRWQKPILTDSGGFQVFSLGALRKISEQGVTFKSPIDGSTIFMGPEQSMQVQRDLGSDIVMIFDECTPYPATYSQAADSMRLSLRWAERSKRAHAGNESALFGIVQGGMYADLRHESITGLTSIGFDGYAIGGLSVGEPKHEMLATLDALMPAMPVDKPRYLMGVGTPEDLVEAVRRGVDMFDCVMPTRNARNGHLFTRHGVIKIRNKQYQFDTRPLDEQCSCYTCRNYSRSYLKHLDKCQEMLGSRLNTIHNLHYYLELMQAMRDAIEAQRFDDFVREFYELRGMTMPT

SEQ ID NO: 57599 - protein, 370 aa, Methylomusa anaerophila
  misc_feature (1)..(370): tr|A0A348AP67|A0A348AP67_9FIRM Queuine tRNA-ribosyltran sferase OS=Methylomusa anaerophila OX=1930071 GN=tgt PE =3 SV=1
MAITYELIKRCSQTGARVGKLYTPHGVFDTPIFMPVGTQATVKSMSPRELKDMGTGIILSNTYHLYLRPGHQLIAEAGGLHTFMHWDGGILTDSGGFQVFSLGPLRKITEDGVTFRSHIDGSKHFLSPEKATEVQMALGADIIMAFDECVPYPADYEYARLSTARTSRWAERCKAAHTRKDQGLFGIVQGGMHKDLRRISVSDLVSLDFPGYAIGGLSVGEPKPLMYEMLAYTVPLLPEKKPRYLMGVGTPDCLVEGVMYGIDMFDCVFPTRVARNGTVMTSRGRLVVKNAEYARDFQPIDPDCGCYTCRNFTRAYIRHLLKAEEIFGLRLTTIHNLYFLLSFMKNMRKAILEDKFLAFREEFWSHYRRQ

SEQ ID NO: 57600 - protein, 368 aa, Methylophaga aminisulfidivorans
  misc_feature (1)..(368): tr|F5SZX7|F5SZX7_9GAMM Queuine tRNA-ribosyltransferase OS=Methylophaga aminisulfidivorans MP OX=1026882 GN=tgt PE=3 SV=1
MKFDLLAQDGFARRGRLTFERGTIETPAFMPVGTYGSVKSMTPEEVKATGAEIILGNTFHLMLRPGTEIISAHGDLHDFMQWQGPILTDSGGFQVFSLGELRKITEQGVHFSSPVNGSKVFLGPEESMAVQRALGSDIVMIFDECTPYPADVDTAAKSMELSLRWAKRSKEAHGDNPSALFGIVQGGMHEQLRHISLDGLMEIGFDGYAIGGLSVGEPKEDMLRILDFLAPVMPQDKPHYLMGVGRPEDLVEGVMRGVDMFDCVMPTRNARNGHLFVHQGVIKIRNSRFKSDTKPLDPYCDCYTCQNYSRAYLHHLDKTGEMLGPRLNTIHNLHYYQTLMSGLRQAIENNTLTQFREEFYALRETEIV

SEQ ID NO: 57601 - protein, 369 aa, Methylophaga frappieri
  misc_feature (1)..(369): tr|I1YKQ2|I1YKQ2_METFJ Queuine tRNA-ribosyltransferase OS=Methylophaga frappieri (strain ATCC BAA-2434 / DSM 2 5690 / JAM7) OX=754477 GN=tgt PE=3 SV=1
MQFEQFAQDGLARRGRLTFARGSIETPAFMPVGTYGSVKSMTPEEVRKTGAEIILGNTFHLMLRPGTEVISAHGDLHDFMQWSGPILTDSGGFQVFSLGDLRKITEQGVHFRSPISGDKVFMGPEESMAVQRALGSDIVMIFDECTPYPADEHTAAKSMQLSLRWAQRSKAAHGDNPSALFGIVQGGMHETLRTVSLQGLVEIGFDGYAIGGLSVGEPKEDMLRILQHLSDKMPVDKPRYLMGVGRPEDLIEAVRLGVDMFDCVMPTRNARNGHLFVHDGVIKIRNSRFKYDTSPLDPECDCETCQNYSRAYLHHMDKTGEILGPRLNTIHNLHYYQKLMRDIRQSIVDGQFADYRQQFYAKRGQSLPD

SEQ ID NO: 57602 - protein, 368 aa, Methylophaga lonarensis
  misc_feature (1)..(368): tr|M7PS51|M7PS51_9GAMM Queuine tRNA-ribosyltransferase OS=Methylophaga lonarensis MPL OX=1286106 GN=tgt PE=3 S V=1
MKFEHFSSDGFARRGRITFSRGSIETPAFMPVGTYGSVKSMTPEEVADTGAEILLGNTFHLMLRPGTDVISAHGDLHDFMRWQKPILTDSGGFQVFSLGDLRKITEQGVHFRSPVNGDKVFMGPEESMAVQRALGSDIVMIFDECTPYPADEGTAAESMRLSLRWAERSKQAHGDNQSALFGIVQGGMHEALRDESLAGLKKIGFDGYAIGGLSVGEPKEDMLRILTHLADKMPTDKPRYLMGVGRPEDLVEAVCLGVDMFDCVMPTRNARNGHLFVHEGVIKIRNSRFKDDTSALDPYCDCYTCQNYSRAYLHHLDRTGEMLGPRLNTIHNLHYYQTLMRGLREAIASGSLQAFRQQFYALRGQSVE

SEQ ID NO: 57603 - protein, 368 aa, Methylophaga muralis
  misc_feature (1)..(368): tr|A0A1E3GPS7|A0A1E3GPS7_9GAMM Queuine tRNA-ribosyltran sferase OS=Methylophaga muralis OX=291169 GN=tgt PE=3 S V=1
MKFATSAQDGLARRGQLSFDRGTIETPAFMPVGTYGSVKAMTPEEVKATGAEIILGNTFHLMLRPGTDVIQRHGDLHDFMRWDKPILTDSGGFQVFSLGDLRKITEQGVHFRSPVSGDKVFMGPEESMAVQRALGSDIVMIFDECTPYPADEKTAAISMRLSLRWAARSKIAHGDNPSALFGIVQGGMHEALRDESLAGLTEIGFDGYAIGGLSVGEPKEDMLRILHHLSDKMPTDKPRYLMGVGRPEDLVEAVCLGVDMFDCVMPTRNARNGHLFVHEGVIKIRNSRHKTDTGPLDPYCDCYTCKNYSRAYLHHLDRTGEMLGPRLNTIHNLHYYQRLMQQLRTAIESGTLQQFRQSFYAMRQQQPQ

SEQ ID NO: 57604 - protein, 368 aa, Methylophaga nitratireducenticrescens
  misc_feature (1)..(368): tr|I1XL88|I1XL88_METNJ Queuine tRNA-ribosyltransferase OS=Methylophaga nitratireducenticrescens OX=754476 GN=t gt PE=3 SV=1
MKFATSAQDGLARRGQLSFDRGTIETPAFMPVGTYGSVKAMTPEEVKATGAEIILGNTFHLMLRPGTDIIQRHGDLHDFMRWDKPILTDSGGFQVFSLGELRKITEQGVHFRSPVSGDKVFMGPEESMAVQRALGSDIVMIFDECTPYPADEKTAAISMRLSLRWAARSKAAHGNNPSALFGIVQGGMHEALRDESLAGLTEIGFDGYAIGGLSVGEPKEDMLRILNHLSEKMPTDKPRYLMGVGRPEDLVEAVCLGVDMFDCVMPTRNARNGHLFVHEGVIKIRNSRHKTDIGPLDPYCDCYTCKNYSRAYLHHLDRTGEMLGPRLNTIHNLHYYQRLMQQLRDAIAAGNLQQFRQSFYAMRQDRAD

SEQ ID NO: 57605 - protein, 366 aa, Methylophaga sp.
  misc_feature (1)..(366): tr|A0A1Y5EXC4|A0A1Y5EXC4_9GAMM Queuine tRNA-ribosyltran sferase OS=Methylophaga sp. 42_8_T64 OX=1856286 GN=tgt PE=3 SV=1
MKFDVLAQDGVARRGQLTFPRGTIETPAFMPVGTYGSVKSMTPEEVTATGAEIILGNTFHLMLRPGTEIISLHGDLHDFMHWQGPILTDSGGFQVFSLGELRKITEQGVHFKSPINGSKIFLGPEESMEVQRALGSDIVMIFDECTPYPADVATAEKSMQLSLRWAQRSKDAHGDNPSALFGIVQGGMHEELRDESLAGLTEIGFDGYAIGGLSVGEPKEDMLRILDHLSTRLPQDKPHYLMGVGRPEDLVEAVNLGIDMFDCVMPTRNARNGHLFVHHGVIKIRNSRYKNDTGTLDPMCDCYTCQNYSRAYLHHLDRTGEMLGPRLNTIHNLHYYQTLMQGIRDAIEAGNLAQFTRDFYALRATN

SEQ ID NO: 57606 - protein, 368 aa, Methylophaga sp.
  misc_feature (1)..(368): tr|A0A2G2ELT5|A0A2G2ELT5_9GAMM Queuine tRNA-ribosyltran sferase OS=Methylophaga sp. OX=2024840 GN=tgt PE=3 SV=1
MKFATSAQDGLARRGQLSFDRGTIETPAFMPVGTYGSVKAMTPEEVKATGAEIILGNTFHLMLRPGTDIIQRHGDLHDFMRWDKPILTDSGGFQVFSLGELRKITEQGVHFRSPVSGDKVFMGPEESMAVQRALGSDIVMIFDECTPYPADEKTAAISMRLSLRWAARSKAAHGDNPSALFGIVQGGMHEDLRDESLAGLTEIGFDGYAIGGLSVGEPKADMLRILNHLSEKMPTDKPRYLMGVGRPEDLVEAVCLGVDMFDCVMPTRNARNGHLFVHEGVIKIRNSRHKTDTGPLDPYCDCYTCKNYSRAYLHHLDRTGEMLGPRLNTIHNLHYYQRLMQQLRDAIAAGNLQQFRQSFYAMRQDRAD

SEQ ID NO: 57607 - protein, 368 aa, Methylophaga sulfidovorans
  misc_feature (1)..(368): tr|A0A1I3WQX6|A0A1I3WQX6_9GAMM Queuine tRNA-ribosyltran sferase OS=Methylophaga sulfidovorans OX=45496 GN=tgt P E=3 SV=1
MKFDLLAQDGFARRGRLTFERGTIETPAFMPVGTYGSVKSMTPEEVKATGAEIILGNTFHLMLRPGTEIISAHGDLHDFMQWQGPILTDSGGFQVFSLGELRKITEQGVHFSSPVNGSKVFLGPEESMAVQRALGSDIVMIFDECTPYPADVDTAANSMELSLRWAKRSKEAHGDNPSALFGIVQGGMHEQLRQISLDGLMDIGFDGYAIGGLSVGEPKEDMLRILDFLAPVMPQDKPHYLMGVGRPEDLVEGVMRGVDMFDCVMPTRNARNGHLFVHQGVIKIRNSRFKTDTKPLDPYCDCYTCQNYSRAYLHHLDKTGEMLGPRLNTIHNLHYYQTLMNGLRQAIENNTLTQFRQEFYALRETEIV

SEQ ID NO: 57608 - protein, 368 aa, Methylophaga thiooxydans
  misc_feature (1)..(368): tr|C0N4C0|C0N4C0_9GAMM Queuine tRNA-ribosyltransferase OS=Methylophaga thiooxydans DMS010 OX=637616 GN=tgt PE= 3 SV=1
MKFDLLAQDGHARRGRLTFDRGTIETPAFMPVGTYGSVKSMTPEEVADTGAEIILGNTFHLMLRPGTEIIAAHGDLHDFMRWQGPILTDSGGFQVFSLGELRKITEEGVHFRSPVNGNKVFLGPEESMAVQRELGSDIVMIFDECTPYPADERTAAKSMALSLRWAKRSKEAHADNPSALFGIVQGGMHESLRDESLAGLTDIGFDGYAIGGLSVGEPKEDMLRILDHLATKMPTDKPHYLMGVGRPEDLVEAVMLGVDMFDCVMPTRNARNGHLFVHQGVIKIRNSRFKHDTGPLDPYCDCYTCQNYSRAYLHHLDRTGEMLGPRLNTIHNLHYYQTLMQGLRQAIENQSLAQFRKEFYALRETPIS

SEQ ID NO: 57609 - protein, 368 aa, Methylophaga thiooxydans
  misc_feature (1)..(368): tr|A0A0A0BMF8|A0A0A0BMF8_9GAMM Queuine tRNA-ribosyltran sferase OS=Methylophaga thiooxydans OX=392484 GN=tgt PE =3 SV=1
MKFDLLAQDGHARRGRLTFDRGTIETPAFMPVGTYGSVKSMTPEEVADTGAEIILGNTFHLMLRPSTEIIAAHGDLHDFMRWQGPILTDSGGFQVFSLGELRKITEEGVHFRSPVNGNKVFLGPEESMAVQRELGSDIVMIFDECTPYPADERTAAKSMALSLRWAKRSKEAHADNSSALFGIVQGGMHESLRDESLAGLTDIGFDGYAIGGLSVGEPKEDMLRILDHLATKMPTDKPHYLMGVGRPEDLVEAVMLGVDMFDCVMPTRNARNGHLFVHQGVIKIRNSRFKHDTGSLDPYCDCYTCKNYSRAYLHHLDRTGEMLGPRLNTIHNLHYYQTLMQGLRQAIENQSLAQFRKEFYALRETPIS

SEQ ID NO: 57610 - protein, 368 aa, Methylophilaceae bacterium
  misc_feature (1)..(368): tr|Y0KF43|Y0KF43_9PROT Queuine tRNA-ribosyltransferase OS=Methylophilaceae bacterium 11 OX=1101195 GN=tgt PE=3 SV=1
MQFTLHQQDGRARRGTVHLAHGDVQTPAFMPVGTYGTVKAMSPQELNEIDAHIVLGNTFHLWLRPGLEVVAAHGGLHTFMGWDKPILTDSGGFQVWSLGDLRKISEEGVKFRSPINGDSCFLTPEESMRIQKVLNSDIVMIFDECTPYPATHQEANDSMQLSLRWAKRSKQAHQGNPNALFGIIQGGMYEDLRDISLNGLVDIDFDGFAIGGLSVGEPKEDMLRILAHTAPQMPAHKPRYLMGVGTPEDLVAAVSQGVDMFDCVMPTRNARNGWLFTQYGDVKIKNAFYKQDTAPLDADCACYTCQHFTRAYLHHLHKVGEILGARLNTIHNLHYYQVLMQSMRSAIENATFEAFKLEFARKRAQLNG

SEQ ID NO: 57611 - protein, 368 aa, Methylophilaceae bacterium
  misc_feature (1)..(368): tr|A0A388PUG5|A0A388PUG5_9PROT Queuine tRNA-ribosyltran sferase OS=Methylophilaceae bacterium OX=2030816 GN=tgt PE=3 SV=1
MQFKLIQKDGEARRGELKLQHGTVQTPVFMPVGTYGAVKSLSPQDLESIGFEIILGNTFHLWLRPGLDTISAFKGLHDFIQWHRSMLTDSGGFQVWSLGKMRKITEEGVEFKSPINGDTCFLSPEESMRIQKTLNSDIVMIFDECTPYPASHEEAKASMELSLKWAYRSKVAHATNKNALFGIIQGGMFEDLREHSLDELKKINFDGYAIGGLSVGEPKEEMRKVIDFIAPKMPEDKPRYLMGVGTPEDIIEAIAHGIDMFDCVMPTRNARNGWLFTKYGDLKLKNTQYKNDTNPIDSDCGCYTCQNYSRAYLHHLFRIGEMLGSRLNTIHNLFYYQKIIQEARLAIENGTFETFRKIFHQNRQRGIQ

SEQ ID NO: 57612 - protein, 367 aa, Methylophilales bacterium
  misc_feature (1)..(367): tr|A0A0R2VES1|A0A0R2VES1_9PROT Queuine tRNA-ribosyltran sferase OS=Methylophilales bacterium BACL14 MAG-120920- bin58 OX=1655631 GN=tgt PE=3 SV=1
MKFNLLAQDGEARLGSIKTKHSTIQTPVFMPVGTYGAVKSLTPDHLHNIQFDVILGNTFHLWLRPGLEVIESHEGLHKFINWNKSILTDSGGFQVWSLGKLRKITQEGVTFQSPINGDSCFLSPEISMEIQKKLNSDIAMIFDECTPYPASFEEAKKSMQLSEDWAYRSKVTFQDSNNALFGIVQGGMHEELRDQSLKTLTNIGFDGYAIGGLSVGEPKQDMHRIVKYIAPRMPADKPRYLMGVGTPEDLINSIEHGVDMFDCVMPTRNARNGWLFTRYGDIKIKNARYRNDLSPIDPTCQCHTCQNYTRAYLHHLFKIGEMLASTLHTIHNLYFYKQMMLEIGEGIKNQSFQTYKSNFLKERKTNE

SEQ ID NO: 57613 - protein, 367 aa, Methylophilales bacterium
  misc_feature (1)..(367): tr|A0P5Q3|A0P5Q3_9PROT Queuine tRNA-ribosyltransferase OS=Methylophilales bacterium HTCC2181 OX=383631 GN=tgt PE=3 SV=1
MKFNLLAQDGEARLGLIHTNHSTIQTPVFMPVGTYGAVKSLTPDHLHSIKFDVILGNTFHLWLRPGLEVIGNHGGLHQFINWNKSILTDSGGFQVWSLGKLRKITTEGVTFQSPINGDSCFLSPEISMEIQKKLNSDIAMIFDECTPYPASFEEAKNSMQLSEEWAYRSRVTFQGSNNALFGIIQGGMHEELRDQSLKTLVDIGFDGYAIGGLSVGEPKHDMHRIVKHIAPKMPADKPRYLMGVGTPEDLINSIEQGVDMFDCVMPTRNARNGWLFTRYGDIKIKNSRYRNDLSPIDATCKCHTCQNFTRAYLHHLFKIGEMLASTLHTIHNLYFYKQMMLEIGAAIKSQTFQTYKSNFLKERKTNE

SEQ ID NO: 57614 - protein, 396 aa, Methylophilus medardicus
  misc_feature (1)..(396): tr|A0A5B8CQG0|A0A5B8CQG0_9PROT Queuine tRNA-ribosyltran sferase OS=Methylophilus medardicus OX=2588534 GN=tgt P E=3 SV=1
MQFSLHNTDGLARRGTVSLPHGEVQTPAFMPVGTYGTVKAMSPQELQEIQAHIVLGNTFHLWLRPGLEVIAAHEGLHQFMGWQQPILTDSGGFQVWSLGDLRKITEEGVKFQSPINGDRCFLTPEESMRIQRVLNSDIVMIFDECTPYPASHDQARVSMALSLRWAQRSRDAFNVYQTHTIQETLSMQGGPAQIQQLHTDQPPSNGNALFGIIQGGMFEDLRDVSRQGLEAIGFDGYAIGGLSVGEPKEDMLRILAHTAPQMPKDKPRYLMGVGTPEDLVDAVSYGIDMFDCVMPTRNARNGWLFTQYGDVKIKNASYKTDIRPLDDECACYTCQHFSRAYLHHLHRIGEILGARLNTIHNLHYYQVLMQGMRAAIEENRFAAFKDEFAKKRAEKR

SEQ ID NO: 57615 - protein, 396 aa, Methylophilus methylotrophus
  misc_feature (1)..(396): tr|A0A5C7WLF7|A0A5C7WLF7_METME Queuine tRNA-ribosyltran sferase OS=Methylophilus methylotrophus OX=17 GN=tgt PE =3 SV=1
MQFSLHNTDGLARRGTVSLPHGEVQTPAFMPVGTYGTVKAMSPQELNDIQAHIVLGNTFHLWLRPGLDVIAAHDGLHQFMGWNNPILTDSGGFQVWSLGELRKITEEGVKFQSPINGDRCFLTPEESMRIQRVLNSDIVMIFDECTPYPASHDQARRSMELSLRWAQRSRDAFNVYQTQTITHTLTMVGGPAEVNQLRSDNTPTNGNALFGIIQGGMYEDLRDISRQGLEAIGFDGYAIGGLSVGEPKEDMLRILAHTAPQMPKDKPRYLMGVGTPEDLVDAVSYGIDMFDCVMPTRNARNGWLFTQYGDVKIKNASYKTDTRPLDDECECYTCQNFSRAYLHHLHRIGEILGARLNTIHNLHYYQVLMQGMRAAIEENRFEAFKGEFARKRAEKR

SEQ ID NO: 57616 - protein, 396 aa, Methylophilus rhizosphaerae
  misc_feature (1)..(396): tr|A0A1G9EXZ1|A0A1G9EXZ1_9PROT Queuine tRNA-ribosyltran sferase OS=Methylophilus rhizosphaerae OX=492660 GN=tgt PE=3 SV=1
MQFSLHNTDGLARRGTVHLPHGDVQTPAFMPVGTYGTVKAMSPQELNDIQAHIVLGNTFHLWLRPGLEVIAAHEGLHKFMGWENPILTDSGGFQVWSLGDLRKITEAGVKFKSPINGDSCFLTPEESMRIQRVLNSDIVMIFDECTPYPASHDQAQKSMELSLRWAQRSRDAFNVYQTQTIAHTLTMQGGPEEVGQLRSGNAPTNGNALFGIIQGGMYEDLRDISRLGLETIGFDGYAIGGLSVGEPKEDMLRILAHTAPQMPKDKPRYLMGVGTPEDLVDAVSYGIDMFDCVMPTRNARNGWLFTQYGDVKIKNASYKTDTRPLDDECVCYTCQNFSRAYLHHLHRIGEILSARLNTIHNLHYYQVLMQGIRAAIEENRFEAFKVEFARKRAEKR

SEQ ID NO: 57617 - protein, 396 aa, Methylophilus sp.
  misc_feature (1)..(396): tr|A0A2S5N3X8|A0A2S5N3X8_9PROT Queuine tRNA-ribosyltran sferase OS=Methylophilus sp. OX=29541 GN=tgt PE=3 SV=1
MQFSLHNTDGLARRGTVSLPHGEVQTPAFMPVGTYGTVKAMSPQELNDIQAHIVLGNTFHLWLRPGLDVIAAHDGLHQFMGWNNPILTDSGGFQVWSLGELRKITEEGVKFQSPINGDRCFLTPEESMRIQRVLNSDIVMIFDECTPYPASHDQARRSMELSLRWAQRSRDAFNVYQTQTITHTLTMVGGPAEVNQLRSDNRPTNGNALFGIIQGGMYEDLRDISRQGLEAIGFDGYAIGGLSVGEPKEDMLRILAHTAPQMPKDKPRYLMGVGTPEDLVDAVSYGIDMFDCVMPTRNARNGWLFTQYGDVKIKNASYKTDTRPLDDECECYTCQNFSRAYLHHLHRIGEILGARLNTIHNLHYYQVLMQGMRAAIEENRFEAFKAEFARKRAEKR

SEQ ID NO: 57618 - protein, 407 aa, Methylophilus sp.
  misc_feature (1)..(407): tr|A0A0Q6BN41|A0A0Q6BN41_9PROT Queuine tRNA-ribosyltran sferase OS=Methylophilus sp. Leaf416 OX=1736373 GN=tgt PE=3 SV=1
MQFSLHNTDDLARRGTVYLPHGEVQTPAFMPVGTYGTVKAMSPLELNEIQAHIVLGNTFHLWLRPGLEVVAAHEGLHKFMGWNKPILTDSGGFQVWSLGELRKISEAGVKFKSPINGDSCFLTPEESMRIQRVLNSDIVMIFDECTPYPATHHEARQSMELSLRWAQRSRDAFNVYQNQTIPQAMALQGGEDELRQLVQHSEQANDNGNAVTTSQEKNALFGIIQGGMFEDLRDISRQGLEKIGFDGYAIGGLSVGEPKEDMLRILAHTAPQMPKYKPRYLMGVGTPEDLVDAVSYGIDMFDCVMPTRNARNGWLFTQYGDVKIKNATYKTDTRPLDEECECYTCRNFSRSYLHHLYRIGEILGARLNTIHNLHYYQFLMQGMRAAIEENRFETFKLEFAKKRAEKR

SEQ ID NO: 57619 - protein, 374 aa, Methylopila sp.
  misc_feature (1)..(374): tr|A0A2H6BFI3|A0A2H6BFI3_9RHIZ Queuine tRNA-ribosyltran sferase OS=Methylopila sp. Yamaguchi OX=1437817 GN=tgt PE=3 SV=1
MNLIPFTVSATDGAARTGALVFPRGTIRTPAFMPVGTAATVKAMYADQVRDTGADVVLGNVYHLMLRPGAERVAALGGLHKFMGWSGPILTDSGGFQVMSLSALRKLDPDGVTFRSHIDGSQHRLTPERSIEIQRLLGADVSMQFDECVRLPATPEEVERAMRLSIAWGERSKAAFGAPEGRALFGIVQGGDVAELRRQSARALVGIGFDGYAIGGLAVGEPQATMLAMLEETTPELPADRPRYLMGVGSPDDLLKSVARGVDMFDCVMPTRAGRHGLAYTRFGRINLKNARHADDPRPLDPESDCPAARDYSRAYLHHLVKAGEILGMMLLTWANVAYYQRLMAGARAAIAEGRFADYALETSKGWADGDRGS

SEQ ID NO: 57620 - protein, 369 aa, Methyloprofundus sedimenti
  misc_feature (1)..(369): tr|A0A1V8M3H9|A0A1V8M3H9_9GAMM Queuine tRNA-ribosyltran sferase OS=Methyloprofundus sedimenti OX=1420851 GN=tgt PE=3 SV=1
MQFDLLNNDGQARRGRLTFDRGVVETPIFMPVGTYGSVKSLTPHELTDIGAQIILGNTFHLMLRPTTDVIKAHGDLHDFMNWQGPILTDSGGFQVFSLGELRKITEAGVTFKSPIDGSKIFMGPEESMQVQRELGSDIVMIFDECTPYPATVQEAADSMRLSLRWAERSKKAHADNPSALFGIVQGGMYEHLRHESIAGLVDIGFDGYAIGGLSVGEPKDEMMATLDVVHPQLPVDKPRYLMGVGTPEDLIEAVRRGIDMFDCVMPTRNARNGHIFTTTGVIKIRNSQYQFDTRPLDENCACYTCQNFSRSYLRHLDKCHEILGARLNTIHNLYYYLNLMQEVREAIENKVFTQYVSLFYTQRGKVVPE

SEQ ID NO: 57621 - protein, 383 aa, Methylorubrum extorquens
  misc_feature (1)..(383): tr|H1KMJ2|H1KMJ2_METEX Queuine tRNA-ribosyltransferase OS=Methylorubrum extorquens DSM 13060 OX=882800 GN=tgt PE=3 SV=1
MTEPLDPPTDFSFTVSATDGQARTGHIAMPRGKIRTPAFMPVGTAATVKAMYPEQVRDLGADVVLGNTYHLMLRPGAERMARLGGLHRFMRWEGPILTDSGGFQVMSLSALRKIDEEGVTFRSHIDGTAHRMSPERSIEIQGLLGSDIQMQLDECVRLPAERPEIEKAMHLSLRWAERCRVAFGEQPGKALFGIVQGGDVPELRVESARALTDLGLKGYAIGGLAVGEPQAVMLAMIETVEPHLPAGKPRYLMGVGTPDDLMQSVMRGIDMFDCVMPTRAGRHGLAYTRHGRINLRNARHAEDTRPLDEASDCPAARDYSRAYLHHLVRSDEILGMMLLTWNNLAYYQALMAGMRAAIAAGRLADFVAETKDGWARAEAAAKG

SEQ ID NO: 57622 - protein, 383 aa, Methylorubrum extorquens
  misc_feature (1)..(383): tr|B7KTS3|B7KTS3_METC4 Queuine tRNA-ribosyltransferase OS=Methylorubrum extorquens (strain CM4 / NCIMB 13688) OX=440085 GN=tgt PE=3 SV=1
MTEPLDPPTDFSFTVSATDGQARTGHIAMPRGKIRTPAFMPVGTAATVKAMYPEQVRDLGADVVLGNTYHLMLRPGAERMARLGGLHRFMRWDGPILTDSGGFQVMSLSALRKIDEEGVTFRSHIDGTAHRMSPERSIEIQGLLGSDIQMQLDECVRLPAERPEIEKAMHLSLRWAERCRVAFGEQSGKAMFGIVQGGDVPELRVESARALTDLGLKGYAIGGLAVGEPQAVMLAMIETVEPHLPAGKPRYLMGVGTPDDLMQSVMRGIDMFDCVMPTRAGRHGLAYTRHGRINLRNARHAEDTRPLDEASDCPAARDYSRAYLHHLVRSDEILGMMLLTWNNLAYYQALMAGMRAAIAAGRLADFVAETKDGWARAEAAAKG

SEQ ID NO: 57623 - protein, 379 aa, Methylorubrum populi
  misc_feature (1)..(379): tr|B1ZIL4|B1ZIL4_METPB Queuine tRNA-ribosyltransferase OS=Methylorubrum populi (strain ATCC BAA-705 / NCIMB 13 946 / BJ001) OX=441620 GN=tgt PE=3 SV=1
MTDPLDFSFTVSATDGQARTGHIAMPRGNIRTPAFMPVGTAATVKAMYPEQVRDLGADVVLGNTYHLMLRPGAERMARLGGLHRFMRWDGPILTDSGGFQVMSLSALRKIDEEGVTFRSHIDGTAHRMSPERSIEIQGLLGSDIQMQLDECVRLPAERPEIEKAMHLSLRWAERCRVAFGEQPGKAMFGIVQGGDVPELRVESARALTDLGLKGYAIGGLAVGEPQAVMLAMIETVEPHLPSTKPRYLMGVGTPDDLMQSVMRGIDMFDCVMPTRAGRHGLAYTRHGRINLRNARHAEDTRPLDEASDCPAARDYSRAYLHHLVRSDEILGMMLLTWNNLAYYQALMAGMRAAIAAGRLADFVAETKDGWARAESAAKA

SEQ ID NO: 57624 - protein, 379 aa, Methylorubrum populi; identical to SEQ ID NO: 57623
  misc_feature (1)..(379): tr|A0A177J1L2|A0A177J1L2_9RHIZ Queuine tRNA-ribosyltran sferase OS=Methylorubrum populi OX=223967 GN=tgt PE=3 S V=1

SEQ ID NO: 57625 - protein, 383 aa, Methylorubrum salsuginis
  misc_feature (1)..(383): tr|A0A1I4D3K2|A0A1I4D3K2_9RHIZ Queuine tRNA-ribosyltran sferase OS=Methylorubrum salsuginis OX=414703 GN=tgt PE =3 SV=1
MTDPRSTSPDFNFAIHARDGQARTGAIAMPRGTIRTPAFMPVGTAATVKAMYPEQVRELGADVVLGNTYHLMLRPGPERMERLGGLHKFMRWDGPILTDSGGFQVMSLSALRKIDEDGVTFRSHVDGSAHRMSPERSIEIQGLLGSDIQMQLDECVRLPAERPAIEKAMHLSLRWAERCRVAFGEQPGKALFGIVQGGDVPELRVESARALTDLGLKGYAIGGLAVGEPQAVMLAMIETVEPHLPADKPRYLMGVGTPDDLMQSVLRGIDMFDCVMPTRAGRHGLAYTRHGRINLRNARHAEDVRPLDEASDCPAARDYSRAYLHHLVRSDEILGMMLLTWNNLAYYQALMAGMRAAIAEGRLVDFVGETKEGWARAEAAEKA

SEQ ID NO: 57626 - protein, 383 aa, Methylorubrum sp.
  misc_feature (1)..(383): tr|A0A4Z0E6N7|A0A4Z0E6N7_9RHIZ Queuine tRNA-ribosyltran sferase OS=Methylorubrum sp. Q1 OX=2562453 GN=tgt PE=3 SV=1
MTEPLDPPTDFSFTVSATDGQARTGHIAMPRGKIRTPAFMPVGTAATVKAMYPEQVRDLGADVVLGNTYHLMLRPGAERMARLGGLHRFMRWDGPILTDSGGFQVMSLSALRKIDEAGVTFRSHIDGTAHRMSPQRSIEIQGLLGSDIQMQLDECVRLPAERLEIEKAMHLSLRWAERCRVAFGEQPGKALFGIVQGGDVPEFRVESARALTELDLKGYAIGGLAVGEPQAVMLAMIETVEPHLPAGKPRYLMGVGTPDDLMQSVMRGIDMFDCVMPTRAGRHGLAYTRHGRINLRNARHAEDTRPLDEASDCPAARDYSRAYLHHLVRSDEILGMMLLTWNNLAYYQALMAGMRAAIAAGRLADFVAETKDGWARAEAAAKA

SEQ ID NO: 57627 - protein, 383 aa, Methylorubrum zatmanii
  misc_feature (1)..(383): tr|A0A1W6RPA9|A0A1W6RPA9_9RHIZ Queuine tRNA-ribosyltran sferase OS=Methylorubrum zatmanii OX=29429 GN=tgt PE=3 SV=1
MTEPLDPPTDFSFTVSATDGQARTGHIAMPRGKIRTPAFMPVGTAATVKAMYPEQVRDLGADVVLGNTYHLMLRPGAERMARLGGLHRFMRWDGPILTDSGGFQVMSLSALRKIDEEGVTFRSHIDGTAHRMSPERSIEIQGLLGSDIQMQLDECVRLPAERPEIEKAMHLSLRWAERCRVAFGEQPGKALFGIVQGGDVPELRVESARALTDLGLKGYAIGGLAVGEPQAVMLAMIETVEPHLPAGKPRYLMGVGTPDDLMQSVMRGIDMFDCVMPTRAGRHGLAYTRHGRINLRNARHAEDTRPLDEASDCPAARDYSRAYLHHLVRSDEILGMMLLTWNNLAYYQALMAGMRAAIAAGRLADFVAETKDGWARAEAAAKA

SEQ ID NO: 57628 - protein, 376 aa, Methylosinus sp.
  misc_feature (1)..(376): tr|A0A177PN41|A0A177PN41_9RHIZ Queuine tRNA-ribosyltran sferase OS=Methylosinus sp. R-45379 OX=980563 GN=tgt PE =3 SV=1
MTEQFEFRLLAKDGAARRGLVSTPRGEIRTPAFMPVGTAATVKAMFPQDVRATGADIVLGNVYHLMLRPGAERVAALGGLHKFMNWPHPILTDSGGFQVMSLSKLRKLNEEGVAFQSHIDGSRHMLTPERSMEIQRLLDSDIHMQFDECVRLPCTDAEAERAMRLSLRWAERSRKAFGDAKGKALFGIVQGGASPPLRIESAKALAGMDFHGLAIGGLAVGEPQDVMLAMLDIVIPHLPEEKPRYLMGVGTPDDIVQSVLRGVDMFDCVMPTRAGRHGLAYTRFGRVNLRNARHADDAAPLDEGAACASARDYSRAYLHHLVKAQEILGMMLLTEINVAYYQELMAGLREAIEQGRLADFIAETKEGWARGEAKAL

SEQ ID NO: 57629 - protein, 384 aa, Methylosinus sp.
  misc_feature (1)..(384): tr|A0A1A6FP53|A0A1A6FP53_9RHIZ Queuine tRNA-ribosyltran sferase OS=Methylosinus sp. 3S-1 OX=1849840 GN=tgt PE=3 SV=1
MTAGSSNASPQAFAFRVLSRDGAARRGLVSTPRGEIRTPAFMPVGTAATVKAMFPQDVRATGADIVLGNVYHLMLRPGAERVAALGGLHDFMNWPHPILTDSGGFQVMSLAKLRKLDEQGVAFQSHIDGSRHLLTPERSMEIQRLLDSDIHMQLDECVRLPCTEQEAERAMRLSLRWAERSRKAFGDQTGKAIFGIVQGGETPALRVESARALAAMDFHGLAIGGLAVGEPQEVMLAMLETVMPHLPESKPRYLMGVGTPDDIVQSVARGVDMFDCVMPTRAGRHGLAYTRFGRVNLRNARHAGDPAPLDAESPCESARIYSRAYLHHLMKAGEILGMMLLTEINVAYYQQLMAGLRGAIEAGRLADFIGATKEGWARGEGARS

SEQ ID NO: 57630 - protein, 376 aa, Methylosinus sporium
  misc_feature (1)..(376): tr|A0A2U1SNM3|A0A2U1SNM3_METSR Queuine tRNA-ribosyltran sferase OS=Methylosinus sporium OX=428 GN=tgt PE=3 SV=1
MTEQFSFRLLAKDGAARRGLVSTPRGDIRTPAFMPVGTAATVKAMFPQDVRATGADIVLGNVYHLMLRPGAERVAALGGLHKFMNWPHPILTDSGGFQVMSLSKLRKLNEEGVAFQSHIDGSRHMLTPERSMEIQRLLDSDIHMQFDECVRLPCTDAEAERAMRLSLRWAERSRKAFGDAKGKALFGIVQGGASEPLRIESAKALAGMDFHGLAIGGLAVGEPQDVMLAMLDIVIPHLPEEKPRYLMGVGTPDDIVQSVLRGVDMFDCVMPTRAGRHGLAYTRFGRVNLRNARHADDAAPLDEGAACASARDYSRAYLHHLVKAQEILGMMLLTEINVAYYQELMAGLREAIEQGRLADFIAETKEGWARGEAKAL

SEQ ID NO: 57631 - protein, 375 aa, Methylosinus sporium
  misc_feature (1)..(375): tr|A0A549T1J3|A0A549T1J3_METSR Queuine tRNA-ribosyltran sferase OS=Methylosinus sporium OX=428 GN=tgt PE=3 SV=1
MTEQFSFRLLAKDGAARRGLVSTPRGDIRTPAFMPVGTAATVKAMFPQDVRATGADIVLGNVYHLMLRPGAERVAALGGLHKFMNWPHPILTDSGGFQVMSLSKLRKLNEEGVAFQSHIDGSRHMLTPERSMEIQRLLDSDIHMQFDECVRLPCTDAETERAMRLSLRWAERSRKAFGDAKGKALFGIVQGGASPPLRIESAKALAGMDFHGLAIGGLAVGEPQDVMLAMLDIVIPHLPEEKPRYLMGVGTPDDIVQSVLRGVDMFDCVMPTRAGRHGLAYTRFGRVNLRNARHADDAAPLDEGAACASARDYSRAYLHHLVKAQEILGMMLLTEINVAYYQELMAGLREAIEQGRLADFIAETKEGWARGEARP

SEQ ID NO: 57632 - protein, 384 aa, Methylosinus trichosporium; identical to SEQ ID NO: 57629
  misc_feature (1)..(384): tr|A0A2D2CVF6|A0A2D2CVF6_METTR Queuine tRNA-ribosyltran sferase OS=Methylosinus trichosporium OB3b OX=595536 GN =tgt PE=3 SV=1

SEQ ID NO: 57633 - protein, 396 aa, Methylotenera mobilis
  misc_feature (1)..(396): tr|C6WYB9|C6WYB9_METML Queuine tRNA-ribosyltransferase OS=Methylotenera mobilis (strain JLW8 / ATCC BAA-1282 / DSM 17540) OX=583345 GN=tgt PE=3 SV=1
MQQHASASLADKYKHIMLVSRHSKYYCFSMQFTLQTQDGLARRGTLELAHGKVETPAFMPVGTYGTVKAMSPLELTEIDAHIVLGNTFHLWLRPGLEVIAAHGGLHKFMGWNKPILTDSGGFQVWSLGDLRKITEEGVKFRSPINGDSCFLTPEESMRIQRVLNSDIVMIFDECTPYPATLKEASDSMQLSLRWAKRSKQAHEGNPNALFGIIQGGMHEELRDVSREGLEQIGFDGYAIGGLSVGEPKEDMLRILAHTAPKMPQDKPRYLMGVGTPEDLVAAVSQGVDMFDCVMPTRNARNGWLFTQYGDVKIKNASYKNDTNPLDTDCSCYTCRNFTRAYLHHLHRIGEILGSRLNTIHNLHYYQQLMSGMRNAIEAGTFETFKQEFAAKRKSLS

SEQ ID NO: 57634 - protein, 229 aa, Methylotenera mobilis
  misc_feature (1)..(229): tr|A0A351RAQ2|A0A351RAQ2_9PROT Queuine tRNA-ribosyltran sferase (Fragment) OS=Methylotenera mobilis OX=359408 G N=tgt PE=3 SV=1
MQFTLHKQDGLARRGTLELAHGKVETPAFMPVGTYGTVKAMSPLELTEIDAHIVLGNTFHLWLRPGLEVIAAHGGLHKFMGWDKPILTDSGGFQVWSLGDLRKISEEGVKFRSPINGDSCFLTPEESMKIQRVLNSDIVMIFDECTPYPATLKEADISMQLSLRWAKRSKQAHEGNPNALFGIIQGGMHEELRDISREGLEQIGFDGYAIGGLSVGEPKEDMLRILAHT

SEQ ID NO: 57635 - protein, 367 aa, Methylotenera sp.
  misc_feature (1)..(367): tr|A0A2S5L2M5|A0A2S5L2M5_9PROT Queuine tRNA-ribosyltran sferase OS=Methylotenera sp. OX=2051956 GN=tgt PE=3 SV= 1
MKFTLHKQDGLARRGTLELTHGKVETPAFMPVGTYGTVKAMSPLELTEIDAHIVLGNTFHLWLRPGLEIIAAHGGLHKFMGWDKPILTDSGGFQVWSLGDLRKITEEGVKFRSPINGDSCFLTPEESMRIQRVLNSDIVMIFDECTPYPATLKEANDSMQLSLRWAKRSKQAHEGNPNALFGIIQGGMHEELRDVSREGLEQIGFDGYAIGGLSVGEPKEDMLRILAHTAPKMPQDKPRYLMGVGTPEDLVAAVSQGVDMFDCVMPTRNARNGWLFTQYGDVKIKNASYKNDTNPLDADCNCYTCRNFTRAYLHHLHRIGEILGSRLNTIHNLHYYQQLMRGMREAIEAGTFETFKQAFAANRSRLS

SEQ ID NO: 57636 - protein, 368 aa, Methylotenera sp.
  misc_feature (1)..(368): tr|A0A2S5R616|A0A2S5R616_9PROT Queuine tRNA-ribosyltran sferase OS=Methylotenera sp. OX=2051956 GN=tgt PE=3 SV= 1
MQFTLHRTDGQARRGTVHLAHGDVQTPAFMPVGTYGTVKAMSPLELAEIDAHIVLGNTFHLWLRPGLEVVAAHGGLHKFMGWDKPILTDSGGFQVWSLGAMRKISEEGVKFKSPINGDTCFLTPEESMRIQKVLNSDIVMIFDECTPYPATHKEANDSMQLSLRWAKRSKDAHQGNPNALFGIIQGGMFEDLRDVSLAGLVDIDFDGFAIGGLSVGEPKEDMLRILAHTAPKMPQNKPRYLMGVGTPEDLVAAVSNGVDMFDCVMPTRNARNGWLFTQYGDIKIKNAFYKQDTKPLDDDCACYTCRNFTRAYLHHLHKVGEILGARLNTIHNLHYYQVLMQGMRSAIENGSFEQFKSEFSAKRARLSS

SEQ ID NO: 57637 - protein, 368 aa, Methylotenera versatilis
  misc_feature (1)..(368): tr|D7DM22|D7DM22_METV0 Queuine tRNA-ribosyltransferase OS=Methylotenera versatilis (strain 301) OX=666681 GN=t gt PE=3 SV=1
MQFTLHKQDGLARRGTVHLAHGDVQTPAFMPVGTYGTVKAMSPLELKEIDAHIVLGNTFHLWLRPGLEVIAAHGGLHKFMGWDGPILTDSGGFQVFSLGAMRKISEEGVKFKSPINGDTCFLTPEESMRIQKVLNSDIVMIFDECTPFPATLKEANDSMQLSLRWAKRSKDAHQGNSNALFGIIQGGMFEELRDVSLAGLTEIDFDGFAIGGLSVGEPKEDMLRILAHTAPKMPQNKPRYLMGVGTPEDLVAAVSQGIDMFDCVMPTRNARNGWLFTQYGDVKIKNTRYKTDIQPLDADCACYTCQNFSRAYLHHLHRVGEILGARLNTIHNLHYYQVLMASMRSAIEAGTFEAFKTEFAIKRTQLNT

SEQ ID NO: 57638 - protein, 371 aa, Methylothermaceae bacteria
  misc_feature (1)..(371): tr|A0A148NAN3|A0A148NAN3_9GAMM Queuine tRNA-ribosyltran sferase OS=Methylothermaceae bacteria B42 OX=1798802 GN =tgt PE=3 SV=1
MQFRLFRTDQSARRGRLEFPRGRVETPAFMPVGTYGTVKAMTTEEVRESGAEILLGNTFHLMLRPGVEIIRAHGGLHSFMHWLGPILTDSGGFQVFSLGKIRKIREEGVYFRSPINGDEIFMGPEESMAVQRGLGSDIVMIFDECTPYPAEFEQARLSMKLSLRWAERSKVAHGDNSAALFGIVQGGVYESLREQSLQGLVSIGFDGYAIGGLSVGEPKEDRYRILDALLPQMPEDKPRYLMGVGTPEDIVECVRRGVDMFDCVLPTRNARNGHLFTREGVVKIRNSRFKEDTLPLDEACECYTCRHYSRAYLHHLDRCGEILGARLNTTHNLHYYQQLMRGLREAIEAGALEDFVQQFYLQRGKQAPLMA

SEQ ID NO: 57639 - protein, 369 aa, Methyloversatilis sp.
  misc_feature (1)..(369): tr|A0A1B3LIT8|A0A1B3LIT8_9PROT Queuine tRNA-ribosyltran sferase OS=Methyloversatilis sp. RAC08 OX=1842540 GN=tg t PE=3 SV=1
MKFDLLARDGLARRGRLTLAHGTVDTPVFMPVGTYGTVKGMDPAELKDMGAKIVLGNTFHLWLRPGTEVIRKHGGLHRFMGWDRPILTDSGGFQVFSLDALRKISEDGVRFSSPINGDKLLLTPEESMRIQHDLNSDVVMIFDECTPYPADLEQAATSMRLSLRWAQRSRDAHDALGNANALFGIVQGGMHESLRDESLAALTGIGFDGYAIGGLSVGEPKDDMQRILAHTAPRLPENAPHYLMGVGTPEDLINAIAHGIDMFDCVMPTRNARNGWLFTRYGDIKLKNARYKDDTGPVDPSCECHTCAHYTRAYLHHLHRCNEMLGARLNTLHNLHFYQQFTREAREAIETGRYAPWSAAFLADRQRGV

SEQ ID NO: 57640 - protein, 369 aa, Methyloversatilis universalis
  misc_feature (1)..(369): tr|F5R7F9|F5R7F9_METUF Queuine tRNA-ribosyltransferase OS=Methyloversatilis universalis (strain ATCC BAA-1314 / JCM 13912 / FAM5) OX=1000565 GN=tgt PE=3 SV=1
MKFDLLARDGLARRGRLTLAHGTVDTPVFMPVGTYGTVKGMDPVELEDMGARIVLGNTFHLWLRPGTDIVRRHGGLHRFMGWERPILTDSGGFQVFSLGALRKISEEGVRFASPINGDRLMLTPEESMRIQHDLNSDVVMIFDECTPYPADHPTAAESMRLSLRWARRSRDAHDSLGNTNALFAIVQGGMHEDLRDESLAGLKDIGFDGYAIGGLSVGEPKEDMQRILAHTGPKLPEGAPHYLMGVGTPEDIVHAIAHGIDMFDCVMPTRNARNGWLFTRYGDLKLKNARYKDDTGPVDASCECHTCSRYTRAYLHHLHRCNEMLGARLNTLHNLHFYQQFTREAREAIEAGRYAEWSAAFLADRQRGV

SEQ ID NO: 57641 - protein, 377 aa, Methylovirgula ligni
  misc_feature (1)..(377): tr|A0A3D9Z208|A0A3D9Z208_9RHIZ Queuine tRNA-ribosyltran sferase OS=Methylovirgula ligni OX=569860 GN=tgt PE=3 S V=1
MTELTFDIHAKDGDARTGTITLPRGRIRTPAFMPVGTAATVKAMYPQDVHALGADVVLANTYHLMLRPGAERIDALGGLHKFMNWPWPILTDSGGFQVMSLAKLRKLDESGVTFQSHIDGARHHLTPERAMEIQRLLGSDIQMQLDECVRLPAPEADVERAMRLSLRWAERCKAAFGTQPGHALFGIVQGGESPALRRASAEALVGIGFDGYALGGLAVGEPQDVMLAMIEASAAYLPAARPRYLMGVGSPDDLIESVRRGIDMFDCVMPTRAGRHGLVYSRHGRINLRNAKHADDPRPIDPESSCEAARIYSRAYLHHLVKAGEILAMMLLTTINLAYYETLMTDIRAAIAAGRYADFCAETKARWARGEGPESRA

SEQ ID NO: 57642 - protein, 379 aa, Methylovirgula sp.
  misc_feature (1)..(379): tr|A0A371WUL4|A0A371WUL4_9RHIZ Queuine tRNA-ribosyltran sferase OS=Methylovirgula sp. 4M-Z18 OX=2293567 GN=tgt PE=3 SV=1
MTDPLFSFSVHKTDGAARTGAISTPRGTIRTPAFMPVGTAATVKAMHPEEVRQLGADVVLGNVYHLMLRPGAERVAALGGLHTFMNWQQPILTDSGGFQVMSLAKLRKLDENGVTFQSHIDGRKFELTPERSIEIQRLLGSDIQMQLDECVKLPCSDEEAARAMRLSLRWAERSLKAFGHQPGRAIHGIVQGGAVRTLRVESAKALSDMPFHGYSIGGLAVGEPQDVMLAMIEEVMPHLPEDKQRYLMGVGTPDDLLESVARGVDMFDCVMPTRAGRHGLAYSRYGKINLLNARHADDPRPIDEESRWAATRTYSRAYLHHLMKAGEILGMMLLTSINLAYYQDLMAGARAAIAAGTYKQYVADTKAGWERGDLTPLQP

SEQ ID NO: 57643 - protein, 376 aa, Methylovorus glucosetrophus
  misc_feature (1)..(376): tr|C6X9T2|C6X9T2_METGS Queuine tRNA-ribosyltransferase OS=Methylovorus glucosetrophus (strain SIP3-4) OX=58274 4 GN=tgt PE=3 SV=1
MQFTLHKQDGAARRGTVSLAHGEVQTPAFMPVGTYGSVKTLSPQEVHDIGAHILLGNTFHLWLRPGLDVIEAHGGLHGFMGWDGPILTDSGGFQVWSLGDLRKISEEGVKFRSPINGDSCFLTPEESMRIQRVLNSDIVMIFDECTPYPATHEQAMTSMQLSLRWARRSKDAHAGNPNALFGIIQGGMYEDLRDISLAGLTDIEFDGYAIGGLSVGEPKEDMLRILAHTTPQMPQDKPRYLMGVGTPEDLVDAVSHGVDMFDCVMPTRNARNGWLFTQYGDIKLKNARYKLDTGPLDADCSCYTCRHFSRAYLHHLHRTGEILGARLNTLHNLHYYQQLMAGMRKAIENGTLSSFVAEFKAKRQQLKAESLATASN

SEQ ID NO: 57644 - protein, 370 aa, Methylovorus sp.
  misc_feature (1)..(370): tr|A0A1A9T0I9|A0A1A9T0I9_9PROT Queuine tRNA-ribosyltran sferase OS=Methylovorus sp. MM2 OX=1848038 GN=tgt PE=3 SV=1
MDFTLIKQDGAARRGTVSLAHGDVQTPAFMPVGTYGSVKTLSPVEVRDIGAHILLGNTFHLWLRPGLDVIEAHGGLHQFMGWDGPILTDSGGFQVWSLGKLRKITEEGVKFRSPINGDSCFLTPEESMRIQKVLNSDIVMIFDECTPYPATHDEAKDSMRLSKRWAARSKVAHAGNPNALFGIIQGGMYEDLRDESLAGLVDIGFDGYAIGGLSVGEPKEDMLRILAHTAPKMPQDKPRYLMGVGTPEDLVAAVSRGVDMFDCVMPTRNARNGWLFTQHGDVKLKNARHRSDTSPLDADCSCYTCRNFSRAYLHHLFRTGEILGARLNTIHNLHYYQELMAGMRLAIEQGNFAGFVAEFAQKREGIKAAA

SEQ ID NO: 57645 - protein, 370 aa, Methylovulum psychrotolerans
  misc_feature (1)..(370): tr|A0A1Z4C4M7|A0A1Z4C4M7_9GAMM Queuine tRNA-ribosyltran sferase OS=Methylovulum psychrotolerans OX=1704499 GN=t gt PE=3 SV=1
MEFNLLNTDGYARRGRLTFARGVVETPIFMPVGTYGTVKSLTPEELTGIGAQIILGNTFHLMLRPTTAVIQAHGDLHDFMRWQKPILTDSGGFQVFSLGALRKISEQGVTFQSPINGSKIFMGPEESMQVQRELGSDIVMIFDECTPYPATVDEAAASMRLSLRWAARSKAAHGDNPSALFGIVQGGMYPQLRQESINGLVDIGFDGYAIGGLSVGEPKDEMMATLDAIHTQMPSDKPRYLMGVGTPEDLVEAVQRGIDMFDCVMPTRNARNGHLFTRFGVIKIRNSQYEFDNRPLDEECPCYTCQNYSRAYLRHLDKCQEMLGPRLNTIHNLYYYLSLMQGLRDAIERQELTAFVKEFYRLREPANRPA

SEQ ID NO: 57646 - protein, 370 aa, Methylovulum psychrotolerans
  misc_feature (1)..(370): tr|A0A2S5CP01|A0A2S5CP01_9GAMM Queuine tRNA-ribosyltran sferase OS=Methylovulum psychrotolerans OX=1704499 GN=t gt PE=3 SV=1
MEFNLLNTDGYARRGRLTFARGVVETPIFMPVGTYGTVKSLTPEELTGIGAQIILGNTFHLMLRPTTAVIQAHGDLHDFMRWQKPILTDSGGFQVFSLGALRKISEQGVTFQSPINGSKIFMGPEESMQVQRELGSDIVMIFDECTPYPATVDEAAASMRLSLRWAARSKAAHGDNPSALFGIVQGGMYPQLRQESINGLVDIGFDGYAIGGLSVGEPKDEMMATLDAIHTQMPSDKPRYLMGVGTPEDLVEAVQRGIDMFDCVMPTRNARNGHLFTRFGVIKIRNSQYEFDNRPLDEECPCYTCRNYSRAYLRHLDKCQEMLGPRLNTIHNLYYYLSLMQGLRDAIERQELTAFVKEFYRQREPANRPA

SEQ ID NO: 57647 - protein, 370 aa, Methylovulum sp.
  misc_feature (1)..(370): tr|A0A522DVH4|A0A522DVH4_9GAMM Queuine tRNA-ribosyltran sferase OS=Methylovulum sp. OX=1916980 GN=tgt PE=3 SV=1
MKFNLLNTDGHARRGRLHFARGVVETPIFMPVGTYGAVKSLTPDDLMSIGAQIILGNTFHLMLRPSTAVIKAHGDLHDFMRWEKPILTDSGGFQVFSLGALRKISEQGVTFQSPVNGSKIFMGPEESMQVQRELGSDIVMIFDECTPYPATIDEAADSMRLSLRWAERSKKAHDDNPSALFGIVQGGMYEHLRQESIDGLVDIGFDGYAIGGLSVGEPKDEMMATLDAVHPKMPADKPRYLMGVGTPEDLVEAVSRGIDMFDCVMPTRNARNGHLFTRFGVIKIRNSQYEFDNRPLDEECACYTCRNYSRAYLRHLDKCKEMLGCRLSTIHNLYYYLSLMQGLRDAIEKRELSAFIKQFYRQREAGNASQ

SEQ ID NO: 57648 - protein, 394 aa, Micavibrio aeruginosavorus
  misc_feature (1)..(394): tr|M4VF46|M4VF46_9PROT Queuine tRNA-ribosyltransferase OS=Micavibrio aeruginosavorus EPB OX=349215 GN=tgt PE=3 SV=1
MLTYPNFAFDVLHRDQNGTRARIGRLVTPHGTIETPNYIFCGTKGAIKNLSPMQMREAGADIILGNTYHLMIQPGADLIERMGGLHEFNRWDGPMMTDSGGFQIFSMGHGGVADEIKGRSNNKGRGKSLLEISEEGARFKSYWDGSILNLTPEESISIQRKVGADLIYQFDECTAYHVERSYTEESMYRSHRWGERSIAEFERGHDGRQALYGIVQGGVYKDLRDISCEWTAEKPFFGTAIGGCLGGSTEEFYEITGWCVEKIHPDRPVHLLGIGAIRDIFTCVRLGIDTFDCVSPTRIARHGWALTKGGSGRMNLRNAQYREDKEPLDASLGIPASAHFSRAYIHHLLKAGELLASQLIAQHNVAVMTRLMREIRAAIKNGTLDSLEREWIED

SEQ ID NO: 57649 - protein, 412 aa, Micavibrio aeruginosavorus
  misc_feature (1)..(412): tr|A0A2W5A4U4|A0A2W5A4U4_9PROT Queuine tRNA-ribosyltran sferase OS=Micavibrio aeruginosavorus OX=349221 GN=tgt PE=3 SV=1
MTRAKKKKLPTPVLAATFDTKIEYPNHKFEVTFKDPKSGARLGKLTTPHGTIETPNYIFCGTKASIKNLSPYQMREAKTDIILANTYHLMIQPGADLVEKMGGLHKFTGWNGPMLTDSGGFQVFSMGNGSCADEIKGRNRQQRENLLKINEEGAFFRSYLDGRKLCLNPEISMDIQRKLGADLIVQMDECTAYQVTKDYTARSMEMSMRWGDRSLHAFNAMHDGKQALYGVVQGGVYDDLRKQSADYVRSRPFFGTAIGGCLGGSDDEMYGILEVSQPHNHPDRPIHFLGIGRMKDVFRSVRYGIDTFDCVMPTRIARHGMALMKGAPNERINLLNAKYRDDPTPLDETLDLPMSRDFSKAYIHHLLKAGELLAYQILSQHNVAVINRLMRDVRAAIANGTLDQLEKEYLVD

SEQ ID NO: 57650 - protein, 402 aa, Micavibrio sp.
  misc_feature (1)..(402): tr|A0A2E0Q882|A0A2E0Q882_9PROT Queuine tRNA-ribosyltran sferase OS=Micavibrio sp. OX=2024841 GN=tgt PE=3 SV=1
MTNLYPNHSFEILKKAPDSRARLGKIHTPHGVIETPNYIFCGTKGAIRCATPREVKEAGAQIILSNTYHMMLQPGADLVAEMGGLHKFIGWDGPMLTDSGGFQIFAMGEGTVADEIKGRRNEAKPKMLEKITEEGAIFRSYTDGTKQMLSPERAMDVQHKLGADLIMPLDECPPYHLDREYSAKSMEMSHRWELRSLEKFKELNNGTQGLYGIVQGGVYEDLRLQSAEFVSSHPFFGTAIGGSLGVTIDQIYDEVVSWCMHNVPEERPVHLLGIGMIRDIFAGVRYGIDTFDCVIPTRIARHGWALVKGEPRERINLRNAQFKNDPTPLDETQDCYYSQFSRGYLNHLIRANEALAMHILSLHNIATMTRLMREVREAIADNSLDALEMVWRGEVTKIKMAA

SEQ ID NO: 57651 - protein, 417 aa, Micavibrio sp.
  misc_feature (1)..(417): tr|A0A2E2WIS8|A0A2E2WIS8_9PROT Queuine tRNA-ribosyltran sferase OS=Micavibrio sp. OX=2024841 GN=tgt PE=3 SV=1
MAKSSTAKSAAPKGTSGLFDSNYNPDLKYPGFGFDITHKDPNSRARVGKLKTPHGTIETPNYIFCGTKASVKNLSPIQMKEAQTDIILANTYHLMIQPGADLVQKMGGLHKFMNWNGPMLTDSGGFQVFSMGHGTCADEIKGRNINNKESLLKITEEGAFFKSYHDGKTLMLNPEVSMELQHKLGADLIMQMDECTAYQVTKDYTAKSMEMSMRWGDRSLTAFEKHHNGTQALYGIVQGGVYEDLRKISAEYVASRPFFGTAMGGCLGGSDEEMYGILDWCQNYNHPDRPIHFLGIGRLKDVITSVRYGIDTFDCVMPTRIARHGMALMKGAPNERINLLNKRYKDDPEPLDPSLDIPCSRDYSKAYIHHLFKAKEMLAYQIVSQHNVAVINKLMREVREAIKNDTLHQLEKEWLVD

SEQ ID NO: 57652 - protein, 379 aa, Microbacterium sp.; identical to SEQ ID NO: 52091
  misc_feature (1)..(379): tr|A0A542GXG9|A0A542GXG9_9BACI Queuine tRNA-ribosyltran sferase OS=Microbacterium sp. SLBN-1 OX=1489561 GN=tgt PE=3 SV=1

SEQ ID NO: 57653 - protein, 377 aa, Microbulbifer agarilyticus
  misc_feature (1)..(377): tr|A0A1Q2MA30|A0A1Q2MA30_9GAMM Queuine tRNA-ribosyltran sferase OS=Microbulbifer agarilyticus OX=260552 GN=tgt PE=3 SV=1
MSRECFMKFELDTTDGKARRGRLHFPRGTVETPAFMPVGTYGTVKGMLPRDVEDIGAHIILGNTFHLMLRPGTEVIKAHGSLHEFMQWKGPILTDSGGFQVFSLGKMRKISEEGVSFKSPVDGSPVFVGPEESMQVQKDLGSDVVMIFDECTPYPATTDEARKSMELSLRWAKRSKDAHGDSPSALFGIVQGGMYPELRDVSLAGLTDIGFDGYAIGGLSVGEPKEEMIKVLDHLAHKMPADKPRYLMGVGKPEDLVEGVRRGVDMFDCVMPTRNARNGHLFTFEGVVKIRNAKHRHDTGPLEEGCDCYTCENFSRSYLHHLDKCGEILGSQLNTIHNLRHYQRLMQRLRDAIAAGTLEEYVASFYAGLGRPVPPLD

SEQ ID NO: 57654 - protein, 377 aa, Microbulbifer aggregans
  misc_feature (1)..(377): tr|A0A1C9W853|A0A1C9W853_9GAMM Queuine tRNA-ribosyltran sferase OS=Microbulbifer aggregans OX=1769779 GN=tgt PE =3 SV=1
MSRECFMQFELDTSDGKARRGRLRFPRGVVETPAFMPVGTYGTVKGMLPRDVEAIGAHIILGNTFHLMLRPGTEVIEEHGDLHDFMQWQGPILTDSGGFQVFSLGKMRKITEEGVSFKSPVDGSPVFMDPEESMRVQRSLGSDIVMIFDECTPYPATPEEARKSMELSLRWADRSKKAHGDSPSALFGIVQGGMYPELRDVSLRGLTEIGFDGYAIGGLSVGEPKDEMIKVLDHLAHKMPADKPRYLMGVGKPEDIVEAVRRGVDMFDCVMPTRNARNGHLFTFEGVVKIRNAKHRHDTRPLEEDCDCYTCEHFSRSYLHHLDRCGEILGSQLNTIHNLRHYQRLMQNLRDAIAAGELETYVAAFYERLGREVPPLD

SEQ ID NO: 57655 - protein, 378 aa, Microbulbifer donghaiensis
  misc_feature (1)..(378): tr|A0A1M5I230|A0A1M5I230_9GAMM Queuine tRNA-ribosyltran sferase OS=Microbulbifer donghaiensis OX=494016 GN=tgt PE=3 SV=1
MSRQCFMQFELDTTDGKARRGRLRFPRGVVETPAFMPVGTYGTVKGMLPRDVEAIGAHIILGNTFHLMLRPGTQVIEEHGDLHDFMQWSGPILTDSGGFQVFSLGDLRKITEEGVSFRSPIDGSPVFMGPEESMQVQKSLGSDIVMIFDECTPYPATTDEARKSMELSLRWAERSKKAHGDSPSALFGIVQGGMYPELRDVSLRGLTEIGFDGYAIGGLSVGEPKDEMIKVLDHLAYKMPADKPRYLMGVGKPEDIVEGVRRGVDMFDCVMPTRNARNGHLFTAEGVVKIRNARHRHDTGPLEEGCDCYTCENFSRAYLHHLDRCGEILGAQLNTIHNLRHYQRLMQGLRDAIAAGELDAFVAEFYRRLGREVPPLAA

SEQ ID NO: 57656 - protein, 378 aa, Microbulbifer marinus
  misc_feature (1)..(378): tr|A0A1H4A7Z7|A0A1H4A7Z7_9GAMM Queuine tRNA-ribosyltran sferase OS=Microbulbifer marinus OX=658218 GN=tgt PE=3 SV=1
MSRQCFMQFELDTTDGKARRGRLRFPRGVVETPAFMPVGTYGTVKGMLPRDVEAIGAHIILGNTFHLMLRPGTEVIEEHGDLHDFMQWSGPILTDSGGFQVFSLGDLRKITEEGVSFRSPIDGSPVFMGPEESMQVQKSLGSDIVMIFDECTPYPATTDEARKSMELSLRWAERSKKAHGDSPSALFGIVQGGMYPELRDISMRGLTEIGFDGYAIGGLSVGEPKDEMIKVLDHLAHKMPADKPRYLMGVGKPEDIVEAVRRGVDMFDCVMPTRNARNGHLFTAEGVVKIRNARHRHDTGPLEEGCDCYTCENFSRAYLHHLDRCGEILGSQLNTIHNLRHYQRLMQGLRDAIAAGELETFVAEFYRRLGREVPPLEG

SEQ ID NO: 57657 - protein, 372 aa, Microbulbifer sp.
  misc_feature (1)..(372): tr|A0A2S1JY74|A0A2S1JY74_9GAMM Queuine tRNA-ribosyltran sferase OS=Microbulbifer sp. A4B17 OX=359370 GN=tgt PE= 3 SV=1
MQFEVDTTDGKARRGRLRFPRGVVETPAFMPVGTYGTVKGMLPRDIEGIGAQIILGNTFHLMLRPGTEVVKAHGDLHDFTQWSGPILTDSGGFQVFSLGELRKITEEGVSFRSPIDGSPVFLDPEESMRVQRDLGSDIVMIFDECTPYPATTDEARKSMELSLRWAERSKKAHGDSPSALFGIVQGGMYPELRDVSLRGLTEIGFDGYAIGGLSVGEPKEEMIKVLDHLAHKMPEDKPRYLMGVGKPEDIVEAVRRGVDMFDCVMPTRNARNGHLFTFEGVVKIRNARHRHDTGPLEEECDCYTCENFSRAYLHHLDRCGEILGAQLNTIHNLRHYQRLMQKLRDAIAANELEAYVAEFYRGLGREVPVLEA

SEQ ID NO: 57658 - protein, 371 aa, Microbulbifer sp.
  misc_feature (1)..(371): tr|A0A0X3U3Z0|A0A0X3U3Z0_9GAMM Queuine tRNA-ribosyltran sferase OS=Microbulbifer sp. ZGT114 OX=1685377 GN=tgt P E=3 SV=1
MQFELDTSDGKARRGRLRFPRGVVETPAFMPVGTYGTVKGMLPRDVEAIGAHIILGNTFHLMLRPGTEVIEEHGDLHDFMQWQGPILTDSGGFQVFSLGKMRKITEEGVSFKSPVDGSPVFMDPEESMRVQRSLGSDIVMIFDECTPYPATPDEASKSMELSLRWAERSKNAHGDSPSALFGIVQGGMYPELRDVSLRGLTEIGFDGYAIGGLSVGEPKDEMIKVLDHLAHKMPADKPRYLMGVGKPEDIVEAVRRGVDMFDCVMPTRNARNGHLFTFEGVVKIRNAKHRHDTRPLEEDCDCYTCQHFSRSYLHHLDRCGEILGSQLNTIHNLRHYQRLMQHLRDAIAAGELETYVAAFYKRLGREVPPLG

SEQ ID NO: 57659 - protein, 378 aa, Microbulbifer thermotolerans
  misc_feature (1)..(378): tr|A0A1I1L805|A0A1I1L805_9GAMM Queuine tRNA-ribosyltran sferase OS=Microbulbifer thermotolerans OX=252514 GN=tg t PE=3 SV=1
MSRQCFMQFELDTTDGKARRGRLRFPRGVVETPAFMPVGTYGTVKGMLPRDIEAIGAQIILGNTFHLMLRPGAQVVQEHGDLHDFMQWQGPILTDSGGFQVFSLGDLRKITEEGVSFRSPVDGSPVFMGPEESMQVQRALGSDIVMIFDECTPYPATPEEARKSMELSLRWAERSKRAHGDSPSALFGIVQGGMYPELRDISLRGLTDIGFDGYAIGGLSVGEPKEEMIRVLDHLAHRMPADRPRYLMGVGKPEDIVEAVRRGVDMFDCVMPTRNARNGHLFTAEGVVKIRNARHRHDTGPLEADCDCYTCKNFSRAYLHHLDRCGEMLGAQLNTIHNLRHYQRLMQGLREAIAAGALETFVIDFYRRLGRDVPPLSS

SEQ ID NO: 57660 - protein, 372 aa, Microbulbifer thermotolerans
  misc_feature (1)..(372): tr|A0A143HMT5|A0A143HMT5_9GAMM Queuine tRNA-ribosyltran sferase OS=Microbulbifer thermotolerans OX=252514 GN=tg t PE=3 SV=1
MQFELDTTDGKARRGRLRFPRGVVETPAFMPVGTYGTVKGMLPRDIEAIGAQIILGNTFHLMLRPGAQVVQEHGDLHDFMQWQGPILTDSGGFQVFSLGDLRKITEEGVSFRSPVDGSPVFMGPEESMQVQRALGSDIVMIFDECTPYPATPEEARKSMELSLRWAERSKRAHGDSPSALFGIVQGGMYPELRDISLRGLTDIGFDGYAIGGLSVGEPKEEMIRVLDHLAHRMPADRPRYLMGVGKPEDIVEAVRRGVDMFDCVMPTRNARNGHLFTAEGVVKIRNARHRHDTGPLEADCDCYTCKNFSRAYLHHLDRCGEMLGAQLNTIHNLRHYQRLMQGLREAIAAGALETFVIDFYRRLGRDVPPLSS

SEQ ID NO: 57661 - protein, 378 aa, Microbulbifer yueqingensis
  misc_feature (1)..(378): tr|A0A1G8WUG2|A0A1G8WUG2_9GAMM Queuine tRNA-ribosyltran sferase OS=Microbulbifer yueqingensis OX=658219 GN=tgt PE=3 SV=1
MSRQCFMEFELDTSDGKARRGRLRFPRGVVETPAFMPVGTYGTVKGMLPRDVEAIGAHIILGNTFHLMLRPGTQVIEEHGDLHDFMQWQGPILTDSGGFQVFSLGKMRKITEEGVSFKSPVDGSPVFMDPEESIRVQRSLGSDIVMIFDECTPYPATPEEARKSMELSLRWAERSKKAHGDSPSALFGIVQGGMYPELRDISLRGLTEIGFDGYAIGGLSVGEPKDEMIKVLDHLAHKMPADRPRYLMGVGKPEDIVEAVRRGVDMFDCVMPTRNARNGHLFTFEGVVKIRNAKHRHETGPLEADCDCYTCQHFSRSYLHHLDRCGEILGSQLNTIHNLRHYQRLMQQLRDAIAGGDLEGYVAKFYAGLGREVPPLEA

SEQ ID NO: 57662 - protein, 447 aa, Micrococcaceae bacterium
  misc_feature (1)..(447): tr|A0A2A9K5Z0|A0A2A9K5Z0_9MICC Queuine tRNA-ribosyltran sferase OS=Micrococcaceae bacterium JKS001869 OX=193887 2 GN=tgt PE=3 SV=1
MPETPAAPTPQPASGAPAHPSQFGFEVTHRLETGGADGAPLGRTGVITTPHGRIQTPAFIPVATQASVKAVLPESMADLGAQALLANAYHLYLQPGDDLLDEAGGLGAFMNWPGPTFTDSGGFQVMSLGSGFKKVIDMKGPGAPEGQGADDAVAPGKERLANVDDDGVWFKSHLTGDRHRFTPEVSVGIQHNLGADIMFAFDELTTLHNSRGYQEEALERTRRWAQRCLDEHARLTGVRASRPYQALFGVIQGAQYEDLRRKACRDLAGMRAEFPAAGELDGVASGFDGYGVGGALEKENLGTIVGWCAQELPEDKPRHLLGISEPDDLFTAVENGADTFDCVSPTRVARTGAFYTRDGRYNLPGAKYRRDFGPLDPECDCYTCAHYSRAYLRHLFKAKEMVAHTLLSIHNERFTVSLVDRIRAAMQDGTLAELKAETLGRYYAPKG

SEQ ID NO: 57663 - protein, 430 aa, Micrococcaceae bacterium; identical to SEQ ID NO: 55722
  misc_feature (1)..(430): tr|A0A358IUU7|A0A358IUU7_9MICC Queuine tRNA-ribosyltran sferase OS=Micrococcaceae bacterium OX=1904863 GN=tgt P E=3 SV=1

SEQ ID NO: 57664 - protein, 410 aa, Micrococcales bacterium
  misc_feature (1)..(410): tr|A0A2G6JWD9|A0A2G6JWD9_9MICO Queuine tRNA-ribosyltran sferase OS=Micrococcales bacterium OX=2026762 GN=tgt PE =3 SV=1
MSAPAGDFGFTVTSGLTGRPGRAGVIRTPHGRIRTPAFVAVGTKATVKAVLPEMLAQHGAQAVLANAYHLYLQPGADVVEEAGGLAAFMNWPGPTFTDSGGFQVLSLGAGFKKMLAMSSEQLTSDDVIAAGKDRLATVDEDGVTFKSHLDGSMHRFTPEVSMRIQHRLGADIIFAFDECTTLLNSRRYQEAAVRRTEDWAARCLAEHDLLSRQRADRPYQALFGVIQGAQYEDLRRNAARGLLELDSDRGGFDGYGIGGALEKENLGTIVGWCAQELPADKPRHLLGISEPDDIITAVANGADTFDCVSPSRVARNGAVYSPDGRFNITRAQHKRQHMPVDEHCDCYTCAHYTRAYLHHLFKANERIAATLATIHNERFVIRLVDSLREAIETGTFDTVAAGIRSRYYGT

SEQ ID NO: 57665 - protein, 406 aa, Micrococcales bacterium
  misc_feature (1)..(406): tr|A0A2E0W9T3|A0A2E0W9T3_9MICO Queuine tRNA-ribosyltran sferase OS=Micrococcales bacterium OX=2026762 GN=tgt PE =3 SV=1
MFAFEVVDSLPGPDGLPTLGRTGTITTPHGEIKTPAFIPVGTKATLKALTPADLAASESQAVLANAYHLYLQPGSDLIDQAGGLGQFMGWDGPTFTDSGGFQVMSLGVGFKKVLAMDAKGIANDEVIAKGKDRLAHVDDDGVTFKSHLDGSMHRFTPEVSMQVQHQIGADIIFAFDECTTLMNTRAYQEQSLDRTAAWARRCILEHERLTEQRADHPYQALFGVIQGAQYEDLRRAAARDLAGLGFDGFGIGGALEKERLGEIVGWVNQELPRDKPRHLLGIGEPDDLFVAIEQGADTFDCVTPSRVARNASLFTDTGRFNITSAINRRTFEPVQDDCDCYTCTHFTRAYLHHLFKAKEMLASTLATIHNVRYIVRLVDRIRQAISDGHFYPFRDEFLGQFYSTRA

SEQ ID NO: 57666 - protein, 421 aa, Micrococcus aloeverae
  misc_feature (1)..(421): tr|A0A5F0UKK0|A0A5F0UKK0_9MICC Queuine tRNA-ribosyltran sferase OS=Micrococcus aloeverae OX=1391911 GN=tgt PE=3 SV=1
MTHRLETPGHDGAPLGRTGVITTPHGRIQTPAFIPVATQATVKAVLPESMKDLGAQALLANAYHLYLQPGDDLLDEAGGLGAFMNWPGPTFTDSGGFQVMSLGSGFKKVIDMKGPGAPEGQGADDAVAPGKERLANVDDDGVWFKSHLTGDRHRFTPEVSVGIQHNLGADIMFAFDELTTLHNSRGYQEEALERTRRWAQRCLDEHARLTGVRAARPYQALFGVIQGAQYEDLRRKACRDLAGMRAEFPAAGELDGVTSGFDGYGVGGALEKENLGTIVGWCAQELPEDKPRHLLGISEPDDLFTAVENGADTFDCVSPTRVARTGAFYTRDGRYNLPGAKYRRDFGPLDPECDCYTCAHYSRAYLRHLFKAKEMVAHTLLSIHNERFTVSLVDRIRAAMQDGTLAELKAETLGRYYAPKG

SEQ ID NO: 57667 - protein, 447 aa, Micrococcus aloeverae
  misc_feature (1)..(447): tr|A0A5F0IB52|A0A5F0IB52_9MICC Queuine tRNA-ribosyltran sferase OS=Micrococcus aloeverae OX=1391911 GN=tgt PE=3 SV=1
MPETPAAPTPQPASGAPAHPSQFGFEVTHRLETGGADGAPLGRTGVITTPHGRIQTPAFIPVATQATVKAVLPESMAELGAQALLANAYHLYLQPGDDLLDEAGGLGAFMNWPGPTFTDSGGFQVMSLGSGFKKVIDMKGPGAPEGQGADDAVAPGKERLANVDDDGVWFKSHLTGDRHRFTPEVSVGIQHNLGADIMFAFDELTTLHNSRGYQEEALERTRRWAQRCLDEHARLTGVRAARPYQALFGVIQGAQYEDLRRKACRDLAAMRAEFPAAGELDGVTSGFDGYGVGGALEKEILGTIVGWCAQELPEDKPRHLLGISEPDDLFTAVENGADTFDCVSPTRVARTGAFYTRDGRYNLPGAKYRRDFGPLDPECDCYTCAHYSRAYLRHLFKAKEMVAHTLLSIHNERFTVSLVDRIRAAMQDGTLAELKAETLGRYYAPKG

SEQ ID NO: 57668 - protein, 404 aa, Micrococcus endophyticus
  misc_feature (1)..(404): tr|A0A4Y8ZI47|A0A4Y8ZI47_9MICC Queuine tRNA-ribosyltran sferase (Fragment) OS=Micrococcus endophyticus OX=45534 3 GN=tgt PE=3 SV=1
TGVISTPHGQIQTPAFIPVATQATVKAVLPESMAELGAQALLANAYHLYLQPGDDLLDEAGGLGAFMNWPGPTFTDSGGFQVMSLGSGFKKVIDMKGPSAPDGQGADDAVAPGKERLANVDDDGVWFKSHLTGDRHRFTPEVSVGIQHRLGADVMFAFDELTTLHNSRGYQEEALERTRRWAQRCLAEHARLTRERADRPYQALFGVIQGAQYEDLRRKACRDLAGMRTEFAGGGDVDGVSTGFDGYGVGGALEKENLGTIVGWCAQELPEDRPRHLLGISEPDDLFTAVENGADTFDCVSPTRVARTGAFYTRDGRYNLPGAKYKRDFGPLDPECDCYTCAHYSRAYIRHLFKAKEMVAHTLISIHNERFTVSLVDRIRASMQDGTFADLKAETLGRYYAPKG

SEQ ID NO: 57669 - protein, 438 aa, Micrococcus flavus
  misc_feature (1)..(438): tr|A0A4Y8WW58|A0A4Y8WW58_9MICC Queuine tRNA-ribosyltran sferase OS=Micrococcus flavus OX=384602 GN=tgt PE=3 SV= 1
MPDTPQPPAAPAHPDHFGFEVTHRLETSGHDGAGLGRTGVITTPHGTIQTPAFIPVATQATVKAVLPESMADLGAQALLANAYHLYLQPGDDLLDEAGGLGAFMNWPGPTFTDSGGFQVMSLGSGFKKVIDMQGPAAPEGAGADDAVAPGKERLANVDDDGVWFKSHLTGDRHRFTPERSLQIQHNLGADVMFAFDELTTLHNSRGYQEEALERTRRWAQRCLDEHARLTAARAHRPYQALFGVVQGAQYEDLRRKACRDLAAMDTEFAGDDAVRRGFDGYGIGGAIEKANLGTIVGWCAQELPEDRPRHLLGISEPDDLFLAVENGADTFDCVSPTRVARTGAFYTRDGRFNLPGAKYKRDFGPLDPECDCYTCAHYSRAYIRHLYKAKEMVSHTLISIHNERFTVSLVDRIRAAMQDGTYAELKAETLGRYYAPKG

SEQ ID NO: 57670 - protein, 441 aa, Micrococcus luteus
  misc_feature (1)..(441): tr|C5C8R3|C5C8R3_MICLC Queuine tRNA-ribosyltransferase OS=Micrococcus luteus (strain ATCC 4698 / DSM 20030 / J CM 1464 / NBRC 3333 / NCIMB 9278 / NCTC 2665 / VKM Ac-2 230) OX=465515 GN=tgt PE=3 SV=1
MPDTPQPPAVPAHPDHFGFEVTHRLETPGHDGAPLGRTGVITTPHGRIQTPAFIPVATQATVKAVLPESMAELGAQALLANAYHLYLQPGDDLLDEAGGLGAFMNWPGPTFTDSGGFQVMSLGSGFKKVIDMKGPGAPEGQGADDAVAPGKERLANVDDDGVWFKSHLTGDRHRFTPEVSVGIQHNLGADIMFAFDELTTLHNSRGYQEEALERTRRWAQRCLDEHARLTGVRAARPYQALFGVIQGAQYEDLRRKACRDLAAMRAEFPAAGELNGVASGFDGYGVGGALEKENLGTIVGWCAQELPEDKPRHLLGISEPDDLFTAVENGADTFDCVSPTRVARTGAFYTRDGRFNLPGAKYRRDFGPLDPECDCYTCAHYSRAYLRHLFKAKEMVAHTLLSIHNERFTVSLVDRIRAAMQDGTLAELKAETLGRYYAPKG

SEQ ID NO: 57671 - protein, 445 aa, Micrococcus luteus
  misc_feature (1)..(445): tr|A0A378NND2|A0A378NND2_MICLU Queuine tRNA-ribosyltran sferase OS=Micrococcus luteus OX=1270 GN=tgt PE=3 SV=1
MPSPESPSSPSQQAPAHPSQFGFEVTHRLETGGADGAPLGRTGVITTPHGRIQTPAFIPVATQASVKAVLPESMAELGAQALLANAYHLYLQPGDDLLDEAGGLGAFMNWPGPTFTDSGGFQVMSLGSGFKKVIDMKGPGAPEGQGADDAVAPGKERLANVDDDGVWFKSHLTGDRHRFTPEVSVGIQHNLGADIMFAFDELTTLHNSRGYQEEALERTRRWAQRCLDEHARLTGVRAARPYQALFGVIQGAQYEDLRRKACRDLAAMWAEFPAAGELDGVTSGFDGYGVGGALEKENLGTIVGWCAQELPEDKPRHLLGISEPDDLFTAVENGADTFDCVSPTRVARTGAFYTRDGRFNLPGAKYRRDFGPLDPECDCYTCAHYSRAYLRHLFKAKEMVAHTLLSIHNERFTVSLVDRIRAAMQDGTLAELKAETLGRYYAPKG

SEQ ID NO: 57672 - protein, 437 aa, Micrococcus lylae
  misc_feature (1)..(437): tr|A0A4Y8WW93|A0A4Y8WW93_9MICC Queuine tRNA-ribosyltran sferase OS=Micrococcus lylae OX=1273 GN=tgt PE=3 SV=1
MDPMPHHDAETPAPQPAHPSHFGYEVTGRLEDGPGHGRTGVITTPHGQIQTPAFIPVATQATVKAVLPESMEDLGAQALLANAYHLYLQPGDELLDEAGGLGRFMNWGGPTFTDSGGFQVMSLGSGFKKVIDMKGPSAPDGQGADDAVAPGKERLANVDDDGVWFKSHLTGDRHRFTPERSVQIQHNLGADIMFAFDELTTLHNSRGYQEEALERTRRWAQRCLDEHARLTAERADRPYQALFGVIQGAQYEDLRRKACADLSAMTTRYADGTEAGFDGYGVGGALEKENLGTIVGWCAEVLPEDRPRHLLGISEPDDLFTAVENGADTFDCVSPTRVARTGAFYTRDGRYNLPGAKYRRDWGPLDPECDCYTCAHYSRAYIRHLMKAKEMVAHTLVSIHNERFTVSLVDRIRASIGDGTFAELKTETLGRYYAGKK

SEQ ID NO: 57673 - protein, 379 aa, Micrococcus lylae; identical to SEQ ID NO: 57164
  misc_feature (1)..(379): tr|A0A378NZY1|A0A378NZY1_9MICC Queuine tRNA-ribosyltran sferase OS=Micrococcus lylae OX=1273 GN=tgt PE=3 SV=1

SEQ ID NO: 57674 - protein, 445 aa, Micrococcus sp.
  misc_feature (1)..(445): tr|A0A1F1TI32|A0A1F1TI32_9MICC Queuine tRNA-ribosyltran sferase OS=Micrococcus sp. HMSC30C05 OX=1581070 GN=tgt PE=3 SV=1
MPSPESPSPPSQQAPAHPSQFGFEVTHRLETGGADGAPLGRTGVITTPHGRIQTPAFIPVATQASVKAVLPESMAELGAQALLANAYHLYLQPGDDLLDEAGGLGAFMNWPGPTFTDSGGFQVMSLGSGFKKVIDMKGPGAPEGQGADDAVAPGKERLANVDDDGVWFKSHLTGDRHRFTPEVSVGIQHNLGADIMFAFDELTTLHNSRGYQEEALERTRRWAQRCLDEHARLTGVRASRPYQALFGVIQGAQYEDLRRKACRDLAAMRAEFPAAGELDGVTSGFDGYGVGGALEKENLGTIVGWCAQELPEDKPRHLLGISEPDDLFTAVENGADTFDCVSPTRVARTGAFYTRDGRYNLPGAKYRRDFGPLDPECDCYTCAHYSRAYLRHLFKAKEMVAHTLLSIHNERFTVSLVDRIRAAMQDGTFAELKAETLGRYYAPKG

SEQ ID NO: 57675 - protein, 447 aa, Micrococcus sp.
  misc_feature (1)..(447): tr|A0A151CX02|A0A151CX02_9MICC Queuine tRNA-ribosyltran sferase OS=Micrococcus sp. CH7 OX=1770210 GN=tgt PE=3 S V=1
MPETPAAPTPQPASGAPAHPSQFGFEVTHRLETGGADGAPLGRTGVITTPHGRIQTPAFIPVATQASVKAVLPESMAELGAQALLANAYHLYLQPGDDLLDEAGGLGAFMNWPGPTFTDSGGFQVMSLGSGFKKVIDMKGPGAPEGQGADDAVAPGKERLANVDDDGVWFKSHLTGERHRFTPEVSVGIQHNLGADIMFAFDELTTLHNSRGYQEEALERTRRWAQRCLDEHARLTGVRAARPYQALFGVIQGAQYEDLRRKACRDLAGMRAEFPAAGELDGVTSGFDGYGVGGALEKENLGTIVGWCAQELPEDKPRHLLGISEPDDLFTAVENGADTFDCVSPTRVARTGAFYTRDGRYNLPGAKYRRDFGPLDPECDCYTCAHYSRAYLRHLFKAKEMVAHTLLSIHNERFTVSLVDRIRAAMQDGTLAELKAETLGRYYAPKG

SEQ ID NO: 57676 - protein, 471 aa, Micrococcus terreus
  misc_feature (1)..(471): tr|A0A1I7MN64|A0A1I7MN64_9MICC Queuine tRNA-ribosyltran sferase OS=Micrococcus terreus OX=574650 GN=tgt PE=3 SV =1
MPSEQPSAPTVTDQTPGSTLGEPGPAPAAASPRDFSFAVGKRLTGPDGSPRLGRTGTITTPHGQIQTPAFIPVATQATVKAVLPEAMSALGAQALLANAYHLYLQPGADLLDEAGGLGAFMNWRGPTFTDSGGFQVMSLGSGFKKVIDMSGPKAPEGQGADDAVAPGKERLANVDEDGVWFTSHLNGDRHRFTPEVSVGIQHQLGADIMFAFDELTTLHNSRGYQEEALERTRKWAQRCLDEHARLTQERAGKPYQALFGVIQGAQYEDLRRKACQDLAGMRTEFSVDQAGLPDDGQSTPSAASGTLENGFDGYGIGGALEKENLGTIVGWCCQELPEDKPKHLLGISEPDDIFTAVENGADTFDCVSPTRVARTGAFYTWDGRFNLPGAKYKRDFGPLMEGCDCYTCAHYSRAYIHHLIKAKEMVAHTLMSIHNERFTVNLVDRVRASIQDGTFYELKDEVLGRYYAAKA

SEQ ID NO: 57677 - protein, 447 aa, Micrococcus yunnanensis
  misc_feature (1)..(447): tr|A0A4Y8PMR7|A0A4Y8PMR7_9MICC Queuine tRNA-ribosyltran sferase OS=Micrococcus yunnanensis OX=566027 GN=tgt PE= 3 SV=1
MPETPAAPTPQPASGAPAHPSQFGFEVTHRLETGGADGAPLGRTGVITTPHGRIQTPAFIPVATQASVKAVLPESMAELGAQALLANAYHLYLQPGDDLLDEAGGLGAFMNWPGPTFTDSGGFQVMSLGSGFKKVIDMKGPGAPEGQGADDAVAPGKERLANVDDDGVWFKSHLTGDRHRFTPEVSVGIQHNLGADIMFAFDELTTLHNSRGYQEEALERTRRWAQRCLDEHARLTGVRAARPYQALFGVIQGAQYEDLRRKACRDLAAMRAEFPAAGELDGVTSGFDGYGVGGALEKENLGTIVGWCAQELPEDKPRHLLGISEPDDLFTAVENGADTFDCVSPTRVARTGAFYTRDGRYNLPGAKYRRDFGPLDPECDCYTCAHYSRAYLRHLFKAKEMVAHTLLSIHNERFTVSLVDRIRAAMQDGTFAELKAETLGRYYAPKG

SEQ ID NO: 57678 - protein, 373 aa, Microcoleaceae bacterium
  misc_feature (1)..(373): tr|A0A349JGQ1|A0A349JGQ1_9CYAN Queuine tRNA-ribosyltran sferase OS=Microcoleaceae bacterium UBA11344 OX=2055792 GN=tgt PE=3 SV=1
MSEKFSFQCQANCSHTQARAGVFHTPHGVVETPKFMPVGTLANVKTLTPAHLKDAGSQMVLANTYHLHLQPGEAIVAGAGGLHKFMAWPGPILTDSGGFQVFSLSQMRTISDQGVTFRSPRDGRMINLTPERSIQIQNELGADVIMAFDECPPYPATREAVEAATDRTYRWLKRCIQAHSRPDQALFGIVQGGVFPDLRSRAANQLVDLDLPGYAIGGVSVGESGDLIAEIVKVTAPLLPANKPRYLMGIGTYREMALAVASGVDLFDCVIPTRLARHGTALVGGGRLNLKNSRFREDFSPLDESCPCYTCQNFSRAYLAHLARANEVLGYTLLAIHNVTELIRFTRRMREAIFADRFTEEFAHWLAPMVDRS

SEQ ID NO: 57679 - protein, 373 aa, Microcoleaceae bacterium
  misc_feature (1)..(373): tr|A0A3D5GA90|A0A3D5GA90_9CYAN Queuine tRNA-ribosyltran sferase OS=Microcoleaceae bacterium UBA9251 OX=2055794 GN=tgt PE=3 SV=1
MSEKFSFQCQAHCSHTKARAGVFHTPHGVVETPKFMPVGTLANVKTLTPAHLKDAGSQMVLANTYHLHLQPGEAIVAGAGGLHKFMAWPGPILTDSGGFQVFSLSQMRTISDEGVTFRSPRDGRMINLTPERSIQIQNELGADVIMAFDECPPYPATRQEVEAATDRTYRWLKRCIQAHSRPDQALFGIVQGGVYPDLRSRAANQLVDLDLPGYAIGGVSVGESGDLIAEIVKVTAPLLPANKPRYLMGIGTYREMALAVASGVDMFDCVIPTRLARHGTAFVGGGRLNLKNSRFREDFSPLDESCPCYTCQNFSRAYLAHLARANEVLGYTLLAIHNVTELIRFTGRMREAIFADRFTEEFGHWLAPAVDRS

SEQ ID NO: 57680 - protein, 377 aa, Microcoleus sp.
  misc_feature (1)..(377): tr|K9WGR2|K9WGR2_9CYAN Queuine tRNA-ribosyltransferase OS=Microcoleus sp. PCC 7113 OX=1173027 GN=tgt PE=3 SV=1
MEQQTIQFSFKCQASCSQTKARAGVFVTPHGLVETPKFMPVGTLATVKTLTPAQLETAGAQMVLANTYHLHLQPGEGIVNQAGGLHRFMGWKGPMLTDSGGFQVFSLSKIRTISEEGVTFRSPRDGRMINLTPERSIEIQNTLGADVIMAFDECPPYPAERSEVEAATERTYRWLKRCIDAHARPTEQALFGIVQGGVYLDLRRAAAESLVSLDLPGYAIGGVSVGEPAELIHEIVDATAPYLPVDKPRYLMGVGTYREMVRAIAAGVDLFDCVIPTRLGRHGAALVQGERWNLKNARFREDFTPLDATCPCYGCQNFTRAYLNHLVRCKEVLGFMLLSLHNVTELIRFTQHIREAILSDRFTTEFAHWLNRETGQP

SEQ ID NO: 57681 - protein, 374 aa, Microcoleus vaginatus
  misc_feature (1)..(374): tr|F5ULP6|F5ULP6_9CYAN Queuine tRNA-ribosyltransferase OS=Microcoleus vaginatus FGP-2 OX=756067 GN=tgt PE=3 SV =1
MTEDNARFSFKCQANCSHTQARAGVFTTPHGVVETPKFMPVGTLANVKTLTPAHLEAAGSQMVLANTYHLHLQPGEAIVAGAGGLHKFMAWPGPMLTDSGGFQVFSLSQMRTISENGVTFRSPRDGRMINLTPERSIEIQNELGADVIMAFDECPPYPATREEVEAATNRTYRWLQRCIQAHSRPDQALFGIVQGGVFPDLRSRAANQLVDLDLPGYAIGGVSVGESGDLIAEIVKVTAPLLPANKPRYLMGIGTYREMALAVASGVDMFDCVIPTRLARHGTAFVGGERWNLKNARFREDFAPLDESCPCYTCQKFSRAYLAHLARANEVLGYTLLAIHNVTELIRFTGRMREAIFADRFTEEFAHWLAPRVD

SEQ ID NO: 57682 - protein, 374 aa, Microcystis aeruginosa
  misc_feature (1)..(374): tr|A0A552D7V8|A0A552D7V8_MICAE Queuine tRNA-ribosyltran sferase OS=Microcystis aeruginosa Ma_QC_B_20070730_S2 O X=2486256 GN=tgt PE=3 SV=1
MGFSFELIAQCPQTGARVGVWHTPHGLVETPRFMPVGTLATVKGLTPAQIASTGAQMILANTYHLHLQPGESIIEKAGGLHDFMAWNQPILTDSGGFQVFSLSQLRQIKESGVTFRSPRDGRIIEITPEKSIQIQNALGADVIMAFDECPPTGVSHETMKASIERTYRWLERCLTAHQRPQEQALFAIVQGGIYEDLRAAAAQSLVKLDLPGYAIGGVSVGEETSLIHRIVQITAPLLPENKPRYLMGVGTYREMAKAIASGIDLFDCVIPTRFGRHGTALVRGERWNLKNARFKEDFAPLDETCPCYTCQHFSRAYLNHLIKSGEMLGYILLSLHNIAELIRFTREIRQSILGGTFAQDFAPWLEDAVDVTPT

SEQ ID NO: 57683 - protein, 374 aa, Microcystis aeruginosa
  misc_feature (1)..(374): tr|A0A5J5LTY3|A0A5J5LTY3_MICAE tRNA guanosine(34) trans glycosylase Tgt OS=Microcystis aeruginosa EAWAG127a OX= 2529855 GN=tgt PE=4 SV=1
MGFSFELIAQCPQTGARVGVWHTPHGPVETPRFMPVGTLATVKGLTPAQIASTGAQMILANTYHLHLQPGESIIEKAGGLHGFMAWNQPILTDSGGFQVFSLSQLRQIKESGVTFRSPRDGRIIEITPEKSIQIQNALGADVIMAFDECPPTGVSHETMKASIERTYRWLERCLGAHQRPQEQALFAIVQGGIYEDLRTTAAQSLVKLDLPGYAIGGVSVGEETSLIHRIVQITAPLLPENKPRYLMGVGTYREIAKAIASGIDLFDCVIPTRFGRHGTALVRGERWNLKNARFKEDFAPLDETCPCYTCQHFSRAYLNHLIKSGEMLGYILLSLHNIAELIRFTREIRQSILGGTFAQDFAPWLEDAVDVTPT

SEQ ID NO: 57684 - protein, 374 aa, Microcystis flosaquae
  misc_feature (1)..(374): tr|A0A552KWP2|A0A552KWP2_9CHRO Queuine tRNA-ribosyltran sferase OS=Microcystis flos-aquae Mf_QC_C_20070823_S10D OX=2486236 GN=tgt PE=3 SV=1
MGFSFELIAQCPQTGARVGVWHTPHGPVETPRFMPVGTLATVKGLTPAQIASTGAQMILANTYHLHLQPGESIIEKAGGLHDFMAWNQPILTDSGGFQVFSLSQLRQIKESGVTFRSPRDGRIIEITPEKSIQIQNALGADVIMAFDECPPTGVSHETMKASIERTYRWLERCLGAHQRPQEQALFAIVQGGIYEDLRAAAAESLVKLDLPGYAIGGVSVGEETSLIHRIVQITAPLLPENKPRYLMGVGTYGEMAKAIASGIDLFDCVIPTRFGRHGTALVRGERWNLKNARFKEDFAPLDETCPCYTCQHFSRAYLNHLIKSGEMLGYILLSLHNIAELIRFTREIRQSILGGTFTQDFAPWLEDAVDVTPT

SEQ ID NO: 57685 - protein, 374 aa, Microcystis flosaquae
  misc_feature (1)..(374): tr|A0A552LSJ0|A0A552LSJ0_9CHRO Queuine tRNA-ribosyltran sferase OS=Microcystis flos-aquae Mf_WU_F_19750830_S460 OX=2486237 GN=tgt PE=3 SV=1
MGFSFELIAQCPQTGARVGVWHTPHGPVETPRFMPVGTLATVKGLTPAQIASTGAQMILANTYHLHLQPGESIIERAGGLHDFMAWNQPILTDSGGFQVFSLSQLRQIKESGVTFRSPRDGRIIEITPEKSIQIQNALGADVIMAFDECPPTGVSHETMKASIERTYRWLERCLGAHQRPQEQALFAIVQGGIYEDLRAAAAESLVKLDLPGYAIGGVSVGEETTLIHRIVQITAPLLPENKPRYLMGVGTYGEMAKAIASGIDLFDCVIPTRFGRHGTALVRGERWNLKNARFKEDFAPLDETCPCYTCQHFSRAYLNHLIKSGEMLGYILLSLHNIAELIRFTREIRQSILGGTFAQDFAPWLEDAVDVTPT

SEQ ID NO: 57686 - protein, 374 aa, Microcystis novacekii
  misc_feature (1)..(374): tr|A0A552ILF6|A0A552ILF6_9CHRO Queuine tRNA-ribosyltran sferase OS=Microcystis novacekii Mn_MB_F_20050700_S1D O X=2486266 GN=tgt PE=3 SV=1
MGFSFELIAQCPQTGARVGVWHTPHGPVETPRFMPVGTLATVKGLTPAQIASTGAQMILANTYHLHLQPGESIIEKAGGLHEFMAWNQPILTDSGGFQVFSLSQLRQIKESGVTFRSPRDGRIIEITPEKSIQIQNALGADVIMAFDECPPTGVSHETMKASIERTYRWLERCLTAHQRPQEQALFAIVQGGIYEDLRAAAAQSLVKLDLPGYAIGGVSVGEETSLIHRIVQITAPLLPENKPRYLMGVGTYREMAKAIASGIDLFDCVIPTRFGRHGTALVRGERWNLKNARFKEDFAPLDETCPCYTCQHFSRAYLNHLIKSGEMLGYILLSLHNIAELIRFTREIRQSILGGTFAQDFAPWLEDAVDVTPT

SEQ ID NO: 57687 - protein, 341 aa, Microcystis panniformis
  misc_feature (1)..(341): tr|A0A0K1S9L3|A0A0K1S9L3_9CHRO Queuine tRNA-ribosyltran sferase OS=Microcystis panniformis FACHB-1757 OX=163878 8 GN=tgt PE=3 SV=1
MPVGTLATVKGLTPAQIASTGAQMILANTYHLHLQPGESIIEKAGGLHEFMAWNQPILTDSGGFQVFSLSQLRQIKESGVTFRSPRDGRIIEITPEKSIQIQNALGADVIMAFDECPPTGVSHETMKASIERTYRWLERCLTAHQRPQEQALFAIVQGGIYEDLRAAAAESLVKLDLPGYAIGGVSVGEETSLIHRIVQITAPLLPENKPRYLMGVGTYREMAKAIASGIDLFDCVIPTRFGRHGTALVRGERWNLKNARFKEDFAPLDETCPCYTCQHFSRAYLNHLIKSGEMLGYILLSLHNIAELIRFTREIRQSILGGTFAQDFAPWLEDAVDVTPT

SEQ ID NO: 57688 - protein, 374 aa, Microcystis panniformis
  misc_feature (1)..(374): tr|A0A552Q265|A0A552Q265_9CHRO Queuine tRNA-ribosyltran sferase OS=Microcystis panniformis Mp_MB_F_20051200_S9 OX=2486223 GN=tgt PE=3 SV=1
MGFSFELIAQCPQTGARVGVWHTPHGPVETPRFMPVGTLATVKGLTPAQIASTGAQMILANTYHLHLQPGESIIEKAGGLHEFMAWNQPILTDSGGFQVFSLSQLRQIKESGVTFRSPRDGRIIEITPEKSIQIQNALGADVIMAFDECPPTGVSYETMKASIERTYRWLERCLTAHQRPQQQALFAIVQGGIYEDLRAAAAQSLVKLDLPGYAIGGVSVGEETSLIHRIVQITAPLLPENKPRYLMGVGTYREMAKAIASGIDLFDCVIPTRFGRHGTALVRGERWNLKNARFKEDFAPLDETCACYTCQHFSRAYLNHLIKSGEMLGYILLSLHNIAELIRFTREIRQSILGGTFAQDFAPWLEDAVDVTPT

SEQ ID NO: 57689 - protein, 374 aa, Microcystis sp.
  misc_feature (1)..(374): tr|A0A2P1UI00|A0A2P1UI00_9CHRO Queuine tRNA-ribosyltran sferase OS=Microcystis sp. MC19 OX=1967666 GN=tgt PE=3 SV=1
MGFSFELIARCPQTGARVGVWHTPHGPVETPRFMPVGTLATVKGLTPAQIASTGAQMILANTYHLHLQPGESIIEKAGGLHDFMAWNQPILTDSGGFQVFSLSQLRQIKESGVTFRSPRDGRIIEITPEKSIQIQNALGADVIMAFDECPPTGVSHETMKASIERTYRWLERCLGAHQRPQEQALFAIVQGGIYEDLRAAAAESLVKLDLPGYAIGGVSVGEETSLIHRIVQITAPLLPENKPRYLMGVGTYGEMAKAIASGIDLFDCVIPTRFGRHGTALVRGERWNLKNARFKEDFAPLDETCPCYTCQHFSRAYLNHLIKSGEMLGYILLSLHNIAELIRFTREIRQSILGGTFAQDFAPWLEDAADVTPT

SEQ ID NO: 57690 - protein, 374 aa, Microcystis sp.
  misc_feature (1)..(374): tr|A0A552C160|A0A552C160_9CHRO Queuine tRNA-ribosyltran sferase OS=Microcystis sp. Msp_OC_L_20101000_S702 OX=24 86218 GN=tgt PE=3 SV=1
MGFSFELIAQCPQTGARVGVWHTPHGPVETPRFMPVGTLATVKGLTPAQIASTGAQMILANTYHLHLQPGESIIEKAGGLHDFMAWNQPILTDSGGFQVFSLSQLRQIKESGVTFRSPRDGRIIEITPEKSIQIQNALGADVIMAFDECPPTGVSHETMKASIERTYRWLERCLTAHQRPQEQALFAIVQGGIYEDLRAAAAQSLVKLDLPGYAIGGVSVGEETSLIHRIVQITAPLLPENKPRYLMGVGTYREMAKAIASGIDLFDCVIPTRFGRHGTALVRGERWNLKNARFKEDFAPLDETCPCYTCQHFSRAYLNHLIKSGEMLGYILLSLHNIAELIRFTREIRQSILGGTFAQDFAPWLEDAVDVTPT

SEQ ID NO: 57691 - protein, 374 aa, Microcystis viridis
  misc_feature (1)..(374): tr|A0A3G9K2Y8|A0A3G9K2Y8_MICVR Queuine tRNA-ribosyltran sferase OS=Microcystis viridis NIES-102 OX=213615 GN=tg t PE=3 SV=1
MGFSFELIARCPQTGARVGVWHTPHGPVETPRFMPVGTLATVKGLTPAQIASTGAQMILANTYHLHLQPGESIIEKAGGLHEFMAWNQPILTDSGGFQVFSLSQLRQIKESGVTFRSPRDGRIIEITPEKSIQIQNALGADVIMAFDECPPTGVSHETMKASIERTYRWLERCLRAHQRPQQQALFAIVQGGIYEDLRAAAAESLVKLDLPGYAIGGVSVGEETSLIHRIVQITAPLLPENKPRYLMGVGTYREMAKAIASGIDLFDCVIPTRFGRHGTALVRGERWNLKNARFKEDFAPLDETCPCYTCQHFSRAYLNHLIKSGEMLGYILLSLHNIAELIRFTREIRQSILGGTFAQDFAPWLEDALDVTPT

SEQ ID NO: 57692 - protein, 374 aa, Microcystis viridis
  misc_feature (1)..(374): tr|A0A552HFG0|A0A552HFG0_MICVR Queuine tRNA-ribosyltran sferase OS=Microcystis viridis Mv_BB_P_19951000_S68D OX =2486270 GN=tgt PE=3 SV=1
MGFSFELIARCPQTGARVGVWHTPHGPVETPRFMPVGTLATVKGLTPAQIASTGAQMILANTYHLHLQPGESIIEKAGGLHEFMAWNQPILTDSGGFQVFSLSQLRQIKESGVTFRSPRDGRIIEITPEKSIQIQNALGADVIMAFDECPPTGVSHETMKASIERTYRWLERCLRAHQRPQEQALFAIVQGGIYEDLRAAAAESLVKLDLPGYAIGGVSVGEETSLIHRIVQITAPLLPENKPRYLMGVGTYREMAKAIASGIDLFDCVIPTRFGRHGTALVRGERWNLKNARFKEDFAPLDETCPCYTCQQFSRAYLNHLIKSGEMLGYILLSLHNIAELIRFTREIRQSILGGTFAQDFAPWLEDAVDVTPT

SEQ ID NO: 57693 - protein, 374 aa, Microcystis wesenbergii
  misc_feature (1)..(374): tr|A0A552LUQ8|A0A552LUQ8_9CHRO Queuine tRNA-ribosyltran sferase OS=Microcystis wesenbergii Mw_MB_S_20031200_S10 9D OX=2486241 GN=tgt PE=3 SV=1
MGFSFELIAQCPQTGARVGVWHTPHGPVETPRFMPVGTLATVKGLTPAQIASTGAQMILANTYHLHLQPGESIIEKAGGLHEFMAWNQPILTDSGGFQVFSLSQLRQIKESGVTFRSPRDGRIIEITPEKSIQIQNALGADVIMAFDECPPTGVSHETMKASIERTYRWLERCLRAHQRPQQQALFAIVQGGIYEDLRVTAAESLVKLDLPGYAIGGVSVGEETSLIHRIVQITAPLLPENKPRYLMGVGTYREMAKAIASGIDLFDCVIPTRFGRHGTALVRGERWNLKNARFKEDFAPLDETCPCYTCQHFSRAYLNHLIKSGEMLGYILLSLHNIAELIRFTCEIRQSILGGTFAQDFAPWLEDAVDVTPT

SEQ ID NO: 57694 - protein, 374 aa, Microcystis wesenbergii
  misc_feature (1)..(374): tr|A0A3E0LUP4|A0A3E0LUP4_9CHRO Queuine tRNA-ribosyltran sferase OS=Microcystis wesenbergii TW10 OX=2060474 GN=t gt PE=3 SV=1
MGFSFELIAQCPRTGARVGVWHTPHGPVETPRFMPVGTLATVKGLTPAQIASTGAQMILANTYHLHLQPGESIIEKAGGLHEFMAWNQPILTDSGGFQVFSLSQLRQIKESGVTFRSPRDGRIIEITPEKSIQIQNALGADVIMAFDECPPTGVSHETMKASIERTYRWLERCLRAHQRPQEQALFAIVQGGIYEDLRAAAAESLVKLDLPGYAIGGVSVGEETSLIHRIVQITAPLLPENKPRYLMGVGTYREMAKAIASGIDLFDCVIPTRFGRHGTALVRGERWNLKNARFKQDFAPLDDTCPCYTCQQFSRAYLNHLIKSGEMLGYILLSLHNIAELIRFTREIRQSILGGTFAQDFAPWLEDAVDVTPT

SEQ ID NO: 57695 - protein, 266 aa, Microgenomates bacterium
  misc_feature (1)..(266): tr|A0A136KHW3|A0A136KHW3_9BACT Queuine tRNA-ribosyltran sferase OS=Microgenomates bacterium OLB22 OX=1617428 GN =tgt_2 PE=4 SV=1
MEFRSHIDGRKVLFTPEFSISAQKKIGADFIVAFDEDILNKASEKYTKESTERTHRWALRSLAEFEKKKDAPPHRQRMYGVLHGGRYEDLRKWSAQTIAAMPFECLALGGVSVGIENKELREEVSWVSDVLHSDPRPRHLLGISTLPDVLFGVKLGFDTFDCVLPTRYARMGRLYDADYSSLELYERPRRDVDFTLDILSKKYKRDMGHISSHCDCYVCKTYTRAYLHHLFTQRELLAYRLGTIHNLFWIEQFFAEIRRSVEGGKM

SEQ ID NO: 57696 - protein, 399 aa, Microgenomates bacterium
  misc_feature (1)..(399): tr|A0A136KNX9|A0A136KNX9_9BACT Queuine tRNA-ribosyltran sferase OS=Microgenomates bacterium OLB23 OX=1617429 GN =tgt PE=3 SV=1
MKEFVFDVLHKSSMSRARRGKIVTPHGVVETPAFVTVGTKGTVKALAPEDLEKTGTQFVFANTYHLVLSPGAEMVHKLGGVHSMSGISKPMITDSGGFQAFSLAFPDRKNMYELLPQHDDGSAEEMKRKPMAKITDDGVEFTSHIDGKKYLFTPESSIQAQQHIGADFVVAFDECIYNGATKEYTKRSTERTHEWALRSLATLAGPGLKKVVPGRQQQMYGVIQGGKFKDLREMSTNFIAAQAFFGIALGGVSVGETNAELRDEITWMMDVLHQDARPRHLLGISTLDDVLFSVKHGVDTFDCILPTRDARIGRLYIHTPGTQQDPLKGYEAIDILKSSFKTNTEPINPHILGSVTYAYLHHLFKQRELLAYRLASMNNLYMIEQFFAEIRKAIEEDRL

SEQ ID NO: 57697 - protein, 388 aa, Microgenomates group
  misc_feature (1)..(388): tr|A0A0G1J8W9|A0A0G1J8W9_9BACT Queuine tRNA-ribosyltran sferase OS=Microgenomates group bacterium GW2011_GWF1_4 4_10 OX=1618537 GN=tgt PE=3 SV=1
MFSFRVLATKGRARAGEFVTEHGVVKTPIYMPVGTRGTVKALSSEDVAQTQAQILLGNTYHLYLKPRLDVIREAGGLHEFMRWDRPILTDSGGFQVFSLGEQIVRKGGVRTTHISENGVEFTSIYDGSKHLFTPERAVEIQQVIGADIMMCFDQLSHDSASVEEVEEAVDRTTRWAERCVNTWENAQRKTAYGKYQSLFGIIQGGMVRALRERSAREISALPFDGIAVGGETVGYNMEGTVELMEWIESMLPKDKPRYAMGLGHDPQNIIDAVRAGFDMFDCVAPTRIARNGALYVGELVGDADPESWRFSSPYPNGRLQIGNATFTHDHAVIDQTCDCATCVAGYSRAYLRHLFYAKELAYYRLASIHNVRSMIRLCEQLRERMLRV

SEQ ID NO: 57698 - protein, 389 aa, Microgenomates group
  misc_feature (1)..(389): tr|A0A1G1CNE8|A0A1G1CNE8_9BACT Queuine tRNA-ribosyltran sferase OS=Microgenomates group bacterium RBG_16_45_19 OX=1817747 GN=A2W24_04540 PE=3 SV=1
MRAKAWRGLGQQGLARAGELITSHGVVPTPVFMPVGTQATVKALAPADLERAGASLILANTYHLHLRPGEQVISQFKGLHRFMNWPGAILTDSGGYQVSSLGWFKKAGTDRLVKITDEGADFVSHLDGSKHFLSPEKAIQIQLQLGADIIMAFDEATPNKGKDYARAALRRTNRWLTQSVQTWRASQPGQGKRPHLFGIIQGGNYPELRREAAKWVIQSGVAGVALGGATIGQSVTQTQTNAAWVMEIIRQTTLPLYLMGVGVAPSHLIGAVQAGADMVDCVAPTKLARCGLLYVGQLVIPAGQVKRARFESEYRQERLDISKKGFETDQRPVEAKCDCDTCQQGFSRAYLHHLFKARELLYYRLASIHNVRMMIRTAELLRQAILCED

SEQ ID NO: 57699 - protein, 424 aa, Microlunatus phosphovorus
  misc_feature (1)..(424): tr|F5XMH3|F5XMH3_MICPN Queuine tRNA-ribosyltransferase OS=Microlunatus phosphovorus (strain ATCC 700054 / DSM 10555 / JCM 9379 / NBRC 101784 / NCIMB 13414 / VKM Ac-1 990 / NM-1) OX=1032480 GN=tgt PE=3 SV=1
MLDQRQQARGFGFEIGDRLPDALGRTGRITTPHGVIETPAFVVVGTKATVKTVLPESVAQLGAQAVLANAYHLYLQPGSELIEEAGGLGRFMNWPGPTYTDSGGFQVMSLGVGFKKVLAMDTTGLRSDEVVAEGKSRLARVDDDGVTFTSHLDGSRHRFTPEVSMQVQHQLGADIIFAFDELTTLMNTRGYQESSVERTHAWAIRCLREHRRLTEERVGRPYQALFGVVQGAQYEDLRRRAARGLAELEVDGQTFDGFGIGGALEKENLGTITGWVSSELPENKPRHMLGISEPDDLFTCVENGADTFDCVSPSRVARNSAVYSRDGRYNVSAATSRRAFEPIDPECDCYTCANYTRAYLHHLFKAKEMLAATLCTIHNERFVISLVDRIRSSIGDGTYAELKAETLGRYYAGRSLSVSSGTTR

SEQ ID NO: 57700 - protein, 433 aa, Microlunatus soli
  misc_feature (1)..(433): tr|A0A1H1YRN1|A0A1H1YRN1_9ACTN Queuine tRNA-ribosyltran sferase OS=Microlunatus soli OX=630515 GN=tgt PE=3 SV=1
MDSNDRGPVNGPAGFSFDVADEIPGGLGRTGVLHTPHGDIVTPAFTPVGTKATIKSVLPESMAELGAQALLANAYHLFLQPGSDIVDEAGGLGAFMNWPGPTFTDSGGFQVMSLGSGHKKVISMSLVDKGSGASGAGQQLPKEVYTSSGKSGKLVQVDDDGVTFTSHIDGSRHRFTPEVSMGIQHQLGADVMFAFDELTTLSDPRSYQELSLDRTTAWAQRCLDEHERLTAERSHRPYQALFGVIQGAQYEDLRRKAVRDLLALRSPADRPFDGYGIGGALEKENLGTIVGWVCSELPVEAPRHLLGISEPDDFFAAIENGADTFDCVSPARVARNAALYTRDGRFNVNTAAQRRNFTPVDEDCDCYTCTHYTRAYLHHLFKAHEMLANTLATIHNERFIVRLVDDIRASITAGDFAELKADFLGRYYAGRRG

SEQ ID NO: 57701 - protein, 415 aa, Microlunatus sp.
  misc_feature (1)..(415): tr|A0A516PYB9|A0A516PYB9_9ACTN Queuine tRNA-ribosyltran sferase OS=Microlunatus sp. KUDC0627 OX=2596828 GN=tgt PE=3 SV=1
MTETVPFSFTPQAELPDSQGRTGVIHTPHGDISTPAFTPVGTKATIKAVLPESMAELGAQALLANAYHLFLQPGSDIVDEAGGLGVFMNWPGPTYTDSGGFQVMSLGSGHKKVISMNLPGSTDRPQEVFSSSGKSGKLVKIDDDGVTFTSHIDGSKHRFTPEISMRIQHQLGADVMFCFDELTTLSDPREYQELSLDRTLAWAQRCLDEHVRLTAERSHRPYQALFGVVQGAHYEDLRRKATRDLVALRSADDQQRPFDGYGIGGALEKENLGTIVGWVCSELPAEAPRHLLGISEPDDFFAAVENGADTFDCVSPARVARNAALYSRDGRFNVNTAANRRNFAPVDEDCDCYTCTHYTRAYLHHLFKAHEMLANTLATIHNERFIVRLVDDIRGAIAGGYFADFKIEFLGRYYG

SEQ ID NO: 57702 - protein, 405 aa, Micropruina glycogenica
  misc_feature (1)..(405): tr|A0A2N9JDB1|A0A2N9JDB1_9ACTN Queuine tRNA-ribosyltran sferase OS=Micropruina glycogenica OX=75385 GN=tgt PE=3 SV=1
MSDFGFEVTATLPDGRGRAGTIHTPHGTINTPAFVAVGTKATVKAVLPEAVRDLGAQAVLANAYHLYLQPGSDIVDAAGGLGAFMNWPGPTFTDSGGFQVMSLGAGFKKVLAMDTVGLADDDVIAEGKTRLAHVDDDGVTFTSHLNGDRHRFTPEVSMRIQHELGADIMFAFDELTTLMNTRGYQEQSVARTQAWAVRCLAAHAELTRSRADKPYQALFGVVQGAQYEDLRRRAARDLAALEVDGASFDGFGIGGALEKENLGTIVGWVADELPRDKPRHLLGISEPDDFFAAVAAGADTFDCVMPSRVARNAALYTRDGRFNVNTAAHRRAFEPIEPGCDCYTCAHYTRAYLHHLFKAKEMLASTLATIHNERFTVRLVDDIRASIEAGDFDAFRTEFLGRFYR

SEQ ID NO: 57703 - protein, 376 aa, Microscilla marina
  misc_feature (1)..(376): tr|A1ZXQ7|A1ZXQ7_9BACT Queuine tRNA-ribosyltransferase OS=Microscilla marina ATCC 23134 OX=313606 GN=tgt PE=3 SV=1
MKFELKATDPNSSARAGVMTTAHGDIQTPIFMPVGTAGTVKAVHQREIKEDINAQIILGNTYHLYLRPGLDILKKFGGLHKFNGWDRPILTDSGGYQVYSLAGIRKIKEEGVTFQSHIDGSKHHFSPETVMDIQRAIGADIMMAFDECTPYPCEYDYAKKSMEMTHRWLKRCCDRFDATQPLYGYDQTLFPIVQGSTYKDLRKQSAEVIASFERDGNAIGGLSVGEPHELMYESTELVCSILPKDKPRYLMGVGTPENILEGIALGVDMFDCVMPTRNARNGMLFTTQGVINIKNKKWEDDQTPIDEHLGGYVSTFYSKGYLRHLVHCKEMLGAQIASVHNLTFYLWLVKQAREQILAGTFLEWKNKMVKHLMQRL

SEQ ID NO: 57704 - protein, 376 aa, Microscillaceae bacterium
  misc_feature (1)..(376): tr|A0A3C0I8N3|A0A3C0I8N3_9BACT Queuine tRNA-ribosyltran sferase OS=Microscillaceae bacterium OX=2053581 GN=tgt PE=3 SV=1
MFFELKAQDTQTAARAGQITIDHGIIETPIFMPVGTVGSVKAVHPRELAQDIEAQIILGNTYHLYLRPGLPVLEKFGGLHRFNQWNKPILTDSGGYQVYSLAGRRKITEEGVVFQSHIDGSRHTFTPERVMDIQRSIGADIVMAFDECPPFPAEYGYVEKSMHLTHRWLKRCLTHFAQSPPRYGYQQWLFPIVQGGTYKDLRQASAQFVAEQNCAGNAIGGLSVGEPAELMYEMTEWVCQFLPTDRPRYLMGVGTPANILEAIALGVDMFDCVMPTRNGRNGMLFTTQGIINIKNEKWKTDTSPLDPGLASYASQTYSKGYLRHLIVSQEILGLQIATLQNLSLYLWLVKQARLHIQQGDFGAWKKTMVEQLMQRL

SEQ ID NO: 57705 - protein, 289 aa, Microscillaceae bacterium
  misc_feature (1)..(289): tr|A0A349DVA1|A0A349DVA1_9BACT Queuine tRNA-ribosyltran sferase (Fragment) OS=Microscillaceae bacterium OX=2053 581 GN=DCS93_27295 PE=3 SV=1
PILTDSGGYQVYSLSEMRKIKEEGVTFQSHIDGSKHQFSPEIVMDIQRTIGADIIMAFDECTPYPCEYDYAKKSMEMTHRWLKRCCDRFDSTEPLYGYEQTLFPIVQGSTYKDLRKQSAEVIASFERDGNAIGGLSVGEPHEMMYESTELVCGILPKDKPRYLMGVGTPENILECIALGVDMFDCVMPTRNARNGMLFTTQGIINIKNKKWENDDTPIDPVLGGYASTFYSKGYLRHLVQSKEILAAQIASIHNLSFYLWLVGQAREQILAGTFLPWKNKMVKQVMQRL

SEQ ID NO: 57706 - protein, 393 aa, Microvirga aerophila
  misc_feature (1)..(393): tr|A0A512BZP7|A0A512BZP7_9RHIZ Queuine tRNA-ribosyltran sferase OS=Microvirga aerophila OX=670291 GN=tgt PE=3 S V=1
MTTDQFTFTVNKTDGAARTGEIRMPRGVIRTPAFMPVGTAATVKAMYPDQVKALGADVVLGNTYHLMLRPGAERVARLGGLHQFMNWPYPILTDSGGFQVMSLSALRKIDETGVTFQSHIDGSTHVLTPERSIEIQGLLGSDIQMQLDECVKLPCPDEVAEKAMRLSLRWAERCKVAFGEQPGKAMFGIVQGGAVEHLRIESARELAALDLKGYAIGGLAVGEPQDVMLRMIETVEPHMPKEKPRYLMGVGTPDDIVEAVRRGVDMFDCVMPTRAGRHGQVFTRHGRMNLRNAKFAEDTSPLDPESKCTASNTYSRAYLHHLVRSNEILGMMLLTWNNLAYYQDLMAGLRKAIAEGRLEDYVGEVKEGWSKGERDSKAEVGEHADNTAMAVED

SEQ ID NO: 57707 - protein, 393 aa, Microvirga guangxiensis
  misc_feature (1)..(393): tr|A0A1G5AYY6|A0A1G5AYY6_9RHIZ Queuine tRNA-ribosyltran sferase OS=Microvirga guangxiensis OX=549386 GN=tgt PE= 3 SV=1
MTTDQFTFTVNKTDGMARTGEIRMPRGVIRTPAFMPVGTAATVKAMYPDQVKALGADVVLGNTYHLMLRPGAERVARLGGLHKFMNWPYPILTDSGGFQVMSLAALRKVDETGVTFQSHIDGSKHFMSPERSIEIQGLLGSDIQMQLDECVRLPCSDEEAERAMRLSLRWAERCRIAFGEQPGKAMFGIVQGGAVERLRIESARELAALDLKGYAIGGLAVGEPQDVMLRMIETVEPHMPKEKPRYLMGVGTPDDIVEAVRRGVDMFDCVMPTRAGRHGQVFTKHGRMNLRNARFAEDTRPLDESSKCTASNTYSRAYLHHLVRSNEILGMMLLTWNNLAYYQELMAGLRKAIAEGRLEDHIGEIKEGWAKGERDGKAEIGHHADNIATPAEG

SEQ ID NO: 57708 - protein, 393 aa, Microvirga lotononidis
  misc_feature (1)..(393): tr|I4YMX8|I4YMX8_9RHIZ Queuine tRNA-ribosyltransferase OS=Microvirga lotononidis OX=864069 GN=tgt PE=3 SV=1
MTTDTFSFTVNKTDGAARTGEIRMPRGVIRTPAFMPVGTAATVKAMYPDQVKALGADVVLGNTYHLMLRPGAERVARLGGLHQFMNWPYPILTDSGGFQVMSLSALRKIDETGVTFQSHIDGSTHVLTPERSIEIQGLLDSDIQMQLDECVKLPCSDDVAEKAMRLSLRWAERCRVAFGEQPGKAMFGIVQGGAVERLRIESAKELATLDLKGYAIGGLAVGEPQDVMLRMIETVEPHMPREKPRYLMGVGTPDDIVEAVRRGVDMFDCVMPTRAGRHGQVFTRHGRMNLRNARFAEDTGPLDPESKCTASNTYSRAYLHHLVRSNEILGMMLLTWNNLAYYQELMAGLRKAIAEGRLEDHIGEVKEGWAKGERDSKADIGRHADNIAMADEA

SEQ ID NO: 57709 - protein, 393 aa, Microvirga ossetica
  misc_feature (1)..(393): tr|A0A1B2EKM2|A0A1B2EKM2_9RHIZ Queuine tRNA-ribosyltran sferase OS=Microvirga ossetica OX=1882682 GN=tgt PE=3 S V=1
MTTETFTFTVNKTDGAARTGEIRMPRGVIRTPAFMPVGTAATVKAMYPDQVKALGADVVLGNTYHLMLRPGAERVAKLGGLHQFMNWPYPILTDSGGFQVMSLSALRKIDETGVTFQSHIDGSTHVLTPERSIEIQGLLGSDIQMQLDECVKLPCTDEVAEKAMRLSLRWAERCRIAFGEQPGKAMFGIVQGGAVERLRVESAKELAGLDLKGYAIGGLAVGEPQEVMLRMIETVEPHMPKEKPRYLMGVGTPDDIVEAVRRGVDMFDCVMPTRAGRHGQVFTRNGRMNLRNARFAEDTSPLDESSKCTASNTYSRAYLHHLVRSNEILGMMLLTWNNLAYYQDLMAGLRKAIAEGRLEDYVGEVKEGWARGERDSKAEIGHHADNIAMVAEG

SEQ ID NO: 57710 - protein, 393 aa, Microvirga sp.
  misc_feature (1)..(393): tr|A0A2T7U4T9|A0A2T7U4T9_9RHIZ Queuine tRNA-ribosyltran sferase OS=Microvirga sp. KLBC 81 OX=1862707 GN=tgt PE= 3 SV=1
MTTDQFTFTVTKSDGTARTGEIRMPRGVIRTPAFMPVGTAATVKAMYPDQVKALGADVVLGNTYHLMLRPGAERVARLGGLHQFMNWPYPILTDSGGFQVMSLSALRKVDESGVTFQSHIDGSKHFMSPERSIEIQGLLGSDIQMQLDECVRLPCSDEEAERAMRLSLRWAERCRIAFGDQPGKAMFGIVQGGAVERLRIESARELAVMDLKGYAIGGLAVGEPQDVMLRMIETVEPHMPKEKPRYLMGVGTPDDIVEAVRRGVDMFDCVMPTRAGRHGQVFTKHGRMNLRNARFAEDTRPLDESSKCTASNTYSRAYLHHLVRSNEILGMMLLTWNNLAYYQELMAGLRKAIAEGRLEDHIGEIKEAWAKGERDSKPEIGHHADNIAMPAEG

SEQ ID NO: 57711 - protein, 393 aa, Microvirga sp.
  misc_feature (1)..(393): tr|A0A086MIW3|A0A086MIW3_9RHIZ Queuine tRNA-ribosyltran sferase OS=Microvirga sp. BSC39 OX=1549810 GN=tgt PE=3 SV=1
MTTETFTFSVNKTDGTARTGEIRMPRGVIRTPAFMPVGTAATVKAMYPDQVKALGADVVLGNTYHLMLRPGAERVARLGGLHHFMNWPYPILTDSGGFQVMSLSALRKIDETGVTFQSHIDGSTHVLTPERSIEIQGLLGSDIQMQLDECVKLPCSDEVAEKAMRLSLRWAERCRVAFGEQPGKAMFGIVQGGAVERLRIESARELAALDLKGYAIGGLAVGEPQEVMLRMIETVEPHMPKEKPRYLMGVGTPDDIVEAVRRGVDMFDCVMPTRAGRHGQVFTRHGRMNLRNARFAEDTAPLDPESKCTASNTYSRAYLHHLVRSNEILGMMLLTWNNLAYYQELMAGLRKAIADGRLESYIGEVKEGWAKGERDSKAEAGQHADNTAMVTEG

SEQ ID NO: 57712 - protein, 393 aa, Microvirga subterranea
  misc_feature (1)..(393): tr|A0A370HND7|A0A370HND7_9RHIZ Queuine tRNA-ribosyltran sferase OS=Microvirga subterranea OX=186651 GN=tgt PE=3 SV=1
MTTDTFTFTVSKTDGAARTGEIRMPRGVIRTPAFMPVGTAATVKAMYPDQVKALGADVVLGNTYHLMLRPGAERVARLGGLHQFMNWPYPILTDSGGFQVMSLSALRKIDETGVTFQSHIDGSTHVLTPERSIEIQGLLGSDIQMQLDECVKLPCSDEIAEKAMHLSLRWAERCRVAFGEQPGKAMFGIVQGGAVERLRIESARELADLGLKGYAIGGLAVGEPQDVMLRMIETVEPHMPKEKPRYLMGVGTPDDIVEAVRRGVDMFDCVMPTRAGRHGQVFTRHGRMNLRNARFAEDTRPLDPESKCTASNTYSRAYLHHLVRSNEILGMMLLTWNNLAYYQELMAGLRKAIAEGRLETYVGEVKEGWAKGERDGKAEIGHHADNTSMTAEG

SEQ ID NO: 57713 - protein, 393 aa, Microvirga vignae
  misc_feature (1)..(393): tr|A0A0H1R3Q8|A0A0H1R3Q8_9RHIZ Queuine tRNA-ribosyltran sferase OS=Microvirga vignae OX=1225564 GN=tgt PE=3 SV= 1
MTTDQFTFTVTKTDGTARTGEIRMPRGVIRTPAFMPVGTAATVKAMYPDQVKALGADVVLGNTYHLMLRPGAERVARLGGLHKFMNWPYPILTDSGGFQVMSLAALRKVDESGVTFQSHIDGSKHFMSPERSIEIQGLLGSDIQMQLDECVRLPCSDEEAERAMRLSLRWAERCRIAFGDQPGKAMFGIVQGGAVERLRIESARELAAMNLKGYAIGGLAVGEPQDVMLRMIETVEPYMPKDKPRYLMGVGTPDDIVEAVRRGVDMFDCVMPTRAGRHGQVFTKHGRMNLRNARFAEDTRPLDESSKCTASNTYSRSYLHHLVRSNEILGMMLLTWNNLAYYQELMAGLRKAIAEGRLEDHIGEIKEGWAKGERDSKTEIGHHADNIAMPAEG

SEQ ID NO: 57714 - protein, 370 aa, Microvirgula aerodenitrificans
  misc_feature (1)..(370): tr|A0A2S0P763|A0A2S0P763_9NEIS Queuine tRNA-ribosyltran sferase OS=Microvirgula aerodenitrificans OX=57480 GN=t gt PE=3 SV=1
MLEFKLLKQSGAARRGELTLNHGVVQTPVFMPVGTYGSVKAMTPDNLHDIGAQIILGNTFHLWLRPGLDIVGKFGGLHDFIGWQKPILTDSGGFQVFSLGQLRKITEEGVTFQSPINGDKLFLSPEVSMQIQTVLNSDIVMQLDECTPGQVDHRTAGESMRMSLRWAERSRNAFNDLKNPNALFGIVQGNLYTDLRQESLEGLMKIGFDGIAIGGLSVGEPKPEMYRMMRELQPMLPADKPHYLMGVGTPEDLVHGVANGIDMFDCVMPTRNARNGWLFTQWGDIKIKNARHRDDKRPLDEQCDCYACRHFSRAYLHHLHRAGEILGAQLNTIHNLHYYQQLMAEMRQAIEDDRFADYEAGFHERRARGA

SEQ ID NO: 57715 - protein, 370 aa, Microvirgula sp.; identical to SEQ ID NO: 57714
  misc_feature (1)..(370): tr|A0A329B4S8|A0A329B4S8_9NEIS Queuine tRNA-ribosyltran sferase OS=Microvirgula sp. AG722 OX=2183901 GN=tgt PE= 3 SV=1

SEQ ID NO: 57716 - protein, 353 aa, Midichloria mitochondrii
  misc_feature (1)..(353): tr|F7XV01|F7XV01_MIDMI Queuine tRNA-ribosyltransferase OS=Midichloria mitochondrii (strain IricVA) OX=696127 G N=tgt PE=3 SV=1
MAVKFTLIKEVGKTRVGFIETAHGVINTPAFMPVGTLAAVKAMTPDAISSTGTEIVLSNTYHLMLRPGEDRIERLGGLHKFMNWQKPILTDSGGFQVMSLASLRKVTEEGVMFRSHIDGHKYNLTPEYSIQIQHKLGSTITMAFDECIPYPATFQEAKRAMELSMRWALRSKNSYQNKDGYGIFAIVQGSAYQELRESSANFLSAIDFDGYAIGGLAVGEPQAVMFDVLDYTIPLLPKFKPRYLMGVGKPSDVVGAVERGVDMFDCVIPTRSGRNGQAFVRNGTINIRNAQYVEDIRPLDSECSCYTCSNFHRAYLRHLVRAKEILGSILMTWHNIHYYQDLMKELREKIIRS

SEQ ID NO: 57717 - protein, 377 aa, Minicystis rosea
  misc_feature (1)..(377): tr|A0A1L6KZL2|A0A1L6KZL2_9DELT Queuine tRNA-ribosyltran sferase OS=Minicystis rosea OX=888845 GN=tgt PE=3 SV=1
MSALVTSGYAFTVHERDGNARTGVLVTPHGEVPTPTFMPVGTQGSVKTLTPGEVAATGARIVLGNTYHLWLRPGPEIVALTGGLHKFTQWPHSMLTDSGGFQAFSLAERRSVGPDGFVFRSHLDGSKRALSPEVAMQVQGALGADIAMQLDVCPPGESPRAEIEQACRMTTIWAKRCLAAKRVDQAVFGIVQGGTHADLRRAHADELGAMPFDGLALGGFSVGEPIERMHEVVGEVASHLDPARPRYLMGVGTPRDLVVAIGAGVDMFDCVLPTRNARNGQALLKRGKVVIKQARYREDLSPLDPTCDCPTCTGGYTRAYLRHLFLAGEILVLRLFTQHNLHLYGQLVREAREAIARGAYAAFARDWAEAGSASVTA

SEQ ID NO: 57718 - protein, 375 aa, Minwuia thermotolerans
  misc_feature (1)..(375): tr|A0A2M9G163|A0A2M9G163_9PROT Queuine tRNA-ribosyltran sferase OS=Minwuia thermotolerans OX=2056226 GN=tgt PE= 3 SV=1
MSAFGFRLEAQDGRARAGRLETAHGPVETPVFMPVGTAGTVKAMLPESVKATGASIILGNTYHLMLRPGAERVAALGGLHRFMNWPGPILTDSGGFQVMSLAGLRKLDEDGVTFASHIDGAKVRLTPEGSTEIQDLLDATITMAFDECTEYPASHEAAARSMRLSMRWAERCRTAFRRREGYGQFGIVQGGTFEDLRGESVEALTAIDFEGYAIGGLAVGEGQPEMFRVLDFTAPALPADRPRYLMGVGKPDDLVGGVERGVDMFDCVAPTRSGRNGQAFTRRGTVNIRNSRHRDDPRPLDEACGCPACRDYSRAYLHHLVKAKEILAAMLLTWHNLHYYQELMRGMRAAILAGAFADFAAAFRRELAQGDIAPL

SEQ ID NO: 57719 - protein, 375 aa, Mitsuaria sp.
  misc_feature (1)..(375): tr|A0A1A9HQM8|A0A1A9HQM8_9BURK Queuine tRNA-ribosyltran sferase OS=Mitsuaria sp. 7 OX=1658665 GN=tgt PE=3 SV=1
MLKFELLKTEGRARRGVMTLNHGVVQTPIFMPVGTYGTVKGVMPRSLEEMGAQIILGNTFHLWMRPGLDIMKQFGGLHRFESWNKPILTDSGGFQVWSLGEMRKITEEGVKFASPVNGDKLFLTPEISMQIQTVLNSDIVMQFDECTPYESKGQLTTEKEARLSMEMSLRWARRCQDEFTKLQNPNALFGIVQGGMFENLRDVSLAGLKDLDLPGYAIGGLSVGEPKTDMLRILDHIAHQLPADKPRYLMGVGTPEDLVEGVRQGVDMFDCVMPTRNARNGHMFTRFGDLRLRNARYKSDEKPVDETCTCYCCQNFSRAYLHHLDRCGEMLGPMLTSVHNLHYYLNLMKEVRESLDAGDFEGFRQRFAADRARGV

SEQ ID NO: 57720 - protein, 375 aa, Mitsuaria sp.
  misc_feature (1)..(375): tr|A0A1I6KRQ0|A0A1I6KRQ0_9BURK Queuine tRNA-ribosyltran sferase OS=Mitsuaria sp. PDC51 OX=1881035 GN=tgt PE=3 S V=1
MLKFELLKTEGRARRGVVTLNHGVVQTPIFMPVGTYGTVKGVMPRSLEEMGAQIILGNTFHLWMRPGLDIMKQFGGLHKFESWNKPILTDSGGFQVWSLGEMRKISEEGVKFASPVNGDKLFLTPEISMQIQTILNSDIVMQFDECTPYETKGQLTTEKEARLSMEMSLRWAKRCQDEFARLQNPNALFGIVQGGMFEQLRDVSLAGLKDLDLPGYAIGGLSVGEPKADMLRILDHIAHQLPDNKPRYLMGVGTPEDLVEGVRQGVDMFDCVMPTRNARNGHLFTRFGDLRLRNARYKADEKPVDETCSCYCCQNFSRAYLHHLDRCGEMLGPMLTSVHNLHYYLNLMKEVRESLDAGDFEGFRTRFLADRARGI

SEQ ID NO: 57721 - protein, 375 aa, Mitsuokella jalaludinii
  misc_feature (1)..(375): tr|A0A174BPA0|A0A174BPA0_9FIRM Queuine tRNA-ribosyltran sferase OS=Mitsuokella jalaludinii OX=187979 GN=tgt PE= 3 SV=1
MTAITYELVKKDERTGARAGIIHTPHDSFPTPIFMPVGTQASVKGVSPDELRDLGAGIILSNTYHLFLRPGMDLIREAGGLHKFMHWDRAILTDSGGFQVFSLGDLRKITEEGVTFRSHIDGSKKFLSPEVSMEVQMALGSDIVMAFDECVPYPADYNYAKQSTERTIRWLQRCKEAMTAPNQGLFGIVQGGMYKDLREWSARETTAMDLPGYAVGGLSVGEPKELMYEMLEYSTSLLPQDKPRYLMGVGTPDCLVEGVQRGIDMFDCVYPTRVARNGMAMTWTGRLVMKNAQFTHDHTVLEEGCGCYACRNGYTRAYIRHLVRANEIFGLRLLSLHNLYFLQEFMRRMRQAILDDRFTEFRSDFFNHYQMHGKQ

SEQ ID NO: 57722 - protein, 375 aa, Mitsuokella multacida
  misc_feature (1)..(375): tr|A0A414NZM2|A0A414NZM2_9FIRM Queuine tRNA-ribosyltran sferase OS=Mitsuokella multacida OX=52226 GN=tgt PE=3 S V=1
MTAITYELVKKDERTGARAGIIHTPHGSFPTPIFMPVGTQASVKGVSPDELRDLGAGIILSNTYHLFLRPGMDLIREAGGLHKFMHWDGAILTDSGGFQVFSLGDLRKITEEGVTFRSHIDGSKKFLSPEVSMEVQMALGSDIVMAFDECVPYPADYDYAKKSTERTIRWLKRCKEAMTAPNQGLFGIVQGGMYKELREWSARETTAMDLPGYAVGGLSVGEPKELMYEMLEYSTSLLPQDKPRYLMGVGTPDCLVEGVQRGIDMFDCVYPTRVARNGMAMTWTGRLVMKNAQFTHDHHVLEEGCGCYACRNGYTRAYIRHLVRANEIFGLRLLSLHNLYFLQDFMRRMRQAILDDRFTEFRSDFFNHYQMHGKQ

SEQ ID NO: 57723 - protein, 375 aa, Mitsuokella multacida
  misc_feature (1)..(375): tr|C9KKG5|C9KKG5_9FIRM Queuine tRNA-ribosyltransferase OS=Mitsuokella multacida DSM 20544 OX=500635 GN=tgt PE= 3 SV=1
MTAITYELVKKDERTGARAGIIHTPHGSFPTPIFMPVGTQASVKGVSPDELRDLGAGIILSNTYHLFLRPGMDLIREAGGLHKFMHWDRAILTDSGGFQVFSLGDLRKITEEGVTFRSHIDGSKKFLSPEVSMEVQMALGSDIVMAFDECVPYPADYDYAKKSTERTIRWLKRCKEAMTAPNQGLFGIVQGGMYKELREWSARETTAMDLPGYAVGGLSVGEPKELMYEMLEYSTSLLPQDKPRYLMGVGTPDCLVEGVQRGIDMFDCVYPTRVARNGMAMTWTGRLVMKNAQFTHDHHVLEEGCGCYACRNGYTRAYIRHLVRANEIFGLRLLSLHNLYFLQDFMRRMRQAILDDRFTEFRSDFFNHYQMHGKQ

SEQ ID NO: 57724 - protein, 375 aa, Mitsuokella sp.
  misc_feature (1)..(375): tr|A0A415RBJ2|A0A415RBJ2_9FIRM Queuine tRNA-ribosyltran sferase OS=Mitsuokella sp. AF33-22 OX=2292047 GN=tgt PE =3 SV=1
MTAITYELVKKDAATGARAGIIHTPHGSFPTPIFMPVGTQASVKGVSPDELKDLGAGIILSNTYHLFLRPGMDLVREAGGLHKFMHWDRAILTDSGGFQVFSLGDLRKITEEGVTFRSHIDGSKKFLSPEVSMDVQMALGSDIVMAFDECVPYPADFQYAKQSTERTLRWLKRCKQAMTAPNQGLFGIVQGGMYKELREWSARETVALDLPGYAVGGLSVGEPKELMYEMLEYSTSLLPENKPRYLMGVGTPDCLVEGVQRGIDMFDCVYPTRVARNGMAMTWTGRLVMKNAQFTHDHHVLEEGCGCYACRNGYTRAYIRHLVRAGEIFGLRLLSLHNLWFLQEFMRRMRQAILEDRFGAFREEFLAHYVMHGKQ

SEQ ID NO: 57725 - protein, 343 aa, Mitsuokella sp.
  misc_feature (1)..(343): tr|U2TGB2|U2TGB2_9FIRM Queuine tRNA-ribosyltransferase OS=Mitsuokella sp. oral taxon 131 str. W9106 OX=1321781 GN=tgt PE=3 SV=1
MPVGTQATVKGVSPDELKDLGAGIVLSNTYHLFLRPGMDLVREAGGLHAFMHWDRAILTDSGGFQVFSLGDLREITEEGVTFRSHIDGSKKFLSPEVSMEVQKCLGADIVMAFDECVPYPADFAYAKASTERTIRWLERCKSVLGKSDRQGLFGIVQGGMYKELRAWSAKKTTSLDLPGYAIGGLSVGEPKELMYEMLAYTTDYLPKQKPRYLMGVGTPDCLVEGVARGIDMFDCVFPTRVARNGMAMTHIGRLVMKNAVFTHDHHVLEEGCGCYACRNGYTRAYIRHLIRAGEIFGLRLLSLHNLWFLQVFMRRMREAILADSFVSFCKEFMRGYQPHGQIN

SEQ ID NO: 57726 - protein, 374 aa, Mixta gaviniae
  misc_feature (1)..(374): tr|A0A1X1DT82|A0A1X1DT82_9GAMM Queuine tRNA-ribosyltran sferase OS=Mixta gaviniae OX=665914 GN=tgt PE=3 SV=1
MKFELDTKDGRARRGRLVFDRGVVETPAFMPVGTYGTVKGMTPEEVKETGAQILLGNTFHLWLRPGQEIMKLHGDLHDFMQWHGPILTDSGGFQVFSLGDIRKITEAGVHFRNPINGDAIFLDPEKSMEIQYDLGSDIVMIFDECTPYPADWDYAKRSMEMSLRWAKRSRDHFDKLGNKNALFGIIQGSVYEDLRDVSVKGLVDIGFDGYAVGGLAVGEPKEDMHRILEHVCPQIPEDKPRYLMGVGKPEDLVEGVRRGIDMFDCVMPTRNARNGHLFVTDGVVKIRNAKHKDDTSPLDAECDCYTCRNYSRAYLHHLDRCNEILGARLNTIHNLRYYQRVMAGLRQAIEEGKLERFVSDFYTRKGKAVPPLNA

SEQ ID NO: 57727 - protein, 374 aa, Mixta sp.
  misc_feature (1)..(374): tr|A0A506V7B6|A0A506V7B6_9GAMM Queuine tRNA-ribosyltran sferase OS=Mixta sp. BIT-26 OX=2562439 GN=tgt PE=3 SV=1
MKFELDTKDGRARRGRLIFERGVVETPAFMPVGTYGTVKGMTPEEVKETGAQILLGNTFHLWLRPGQEIMKLHGDLHDFMQWQGPILTDSGGFQVFSLGDIRKITEAGVHFRNPINGDAIFLDPEKSMEIQYDLGSDIVMIFDECTPYPADWDYAKRSMEMSLRWAKRSREHFDKLGNKNALFGIIQGSVYEDLRDVSVKGLVEIGFDGYAVGGLAVGEPKEDMHRILEHVCPQIPEDKPRYLMGVGKPEDLVEGVRRGIDMFDCVMPTRNARNGHLFVTDGVVKIRNAKHKDDTSPLDAECDCYTCRNYSRAYLHHLDRCNEILGARLNTIHNLRYYQRVMAGLRKAIEEGKLEHFVSDFYTRKGKAVPPLND

SEQ ID NO: 57728 - protein, 374 aa, Mixta theicola
  misc_feature (1)..(374): tr|A0A2K1QC68|A0A2K1QC68_9GAMM Queuine tRNA-ribosyltran sferase OS=Mixta theicola OX=1458355 GN=tgt PE=3 SV=1
MKFELDTKDGRARRGRLVFDRGVVETPAFMPVGTYGTVKGMTPEEVKETGAQILLGNTFHLWLRPGQEIMKLHGDLHDFMQWKGPILTDSGGFQVFSLGDIRKITEAGVHFRNPINGDAIFLDPEKSMEIQYDLGSDIVMIFDECTPYPADWDYAKRSMEMSLRWAKRSRDHFDKLGNKNALFGIIQGSVYEDLRDVSVKGLVEIGFDGYAVGGLAVGEPKEDMHRILEHVCPQIPEDKPRYLMGVGKPEDLVEGVRRGIDMFDCVMPTRNARNGHLFVTDGVVKIRNAKHKDDTSPLDAECDCYTCRNYSRAYLHHLDRCNEILGARLNTIHNLRYYQRLMAGLRKAIEEGKLECFVSEFYTRTGKAVPPLNA

SEQ ID NO: 57729 - protein, 376 aa, Mizugakiibacter sediminis
  misc_feature (1)..(376): tr|A0A0K8QQQ7|A0A0K8QQQ7_9GAMM Queuine tRNA-ribosyltran sferase OS=Mizugakiibacter sediminis OX=1475481 GN=tgt PE=3 SV=1
MQFDLLATDGAARRGRLTFPRGTIETPAFMPVGTYGSVKAMTPRDLREVGAEIILGNTFHLWLRPGLDVIGAFGGLHRFIGWDGPILTDSGGFQVFSLAHKRKITEEGVAFASPVDGARVFLSPEESMRIQRVLDSDIAMIFDECTPYLIDGAPASEAEARRSMELSLRWAERSRLAFDALGNPNALFGIVQGGVHEELRRRSAEGLCAIGFDGYAVGGLAVGEPEEARNRTLDATVPLLPAERPRYLMGVGRPQDIVEAVRRGIDMFDCVMPTRNARNGFLFTRRGTLRIRNAKYERDTRPIEEGCTCYACRSGFSRAYLRHLDRCNEILGAQLATIHNLHHYQRLMADLRAAIAAGTLEDFAAAFHAGLAAGVD

SEQ ID NO: 57730 - protein, 379 aa, Mobilisporobacter senegalensis
  misc_feature (1)..(379): tr|A0A3N1XEV5|A0A3N1XEV5_9FIRM Queuine tRNA-ribosyltran sferase OS=Mobilisporobacter senegalensis OX=1329262 GN =tgt PE=3 SV=1
MYKLINKDGNAKRGEFKTVHGTIQTPVFMNVGTAAAIKGAVSTMDLHEIKTQVELSNTYHLHVRPGDKVIKQLGGLHKFMVWDKPILTDSGGFQVFSLAKLRKIKEEGVYFNSHIDGRKIFMGPEESMQIQSHLASTIAMAFDECPPHPATREYMQNSVDRTTRWLKRCKIEMNRLNSLDDTINKNQMLFGINQGGTFEDIRIEHAKKISDLELDGYALGGLAVGESHEEMYHIIEKTIPYLPLEKPTYLMGVGTPENILEAVERGVDFFDCVYPARNGRHGHAYTNKGKMNLLNAKYELDSGPIEENCGCPACKHYSRAYIRHLLKAKEMLGLRLLVMHNLYFYNTMMEEIRDAIEKNCYQEYKKVKLEGFKEYNSKS

SEQ ID NO: 57731 - protein, 437 aa, Mobiluncus curtisii
  misc_feature (1)..(437): tr|A0A2X2YP98|A0A2X2YP98_9ACTO Queuine tRNA-ribosyltran sferase OS=Mobiluncus curtisii OX=2051 GN=tgt PE=3 SV=1
MSENFEVVARLGQLGRAGVIHTPHGDIPTPAFVPVGTKATVKALIPEMIRELGASAVLANAYHLYLQPGPELVDKAGGLAAFMHWDGPTFTDSGGFQVLSLGAGYKKVLSQEFAASSRERTASREHGNHERSGDKRKLLEQAEESAELTPPDKRQAHPGLARVDDDGVNFRSHLDGTKHRFTPEISMQIQHHLGADIIFAFDELTSLLHSYDYQVISLERTRRWAERCLAEHERLTVERAGKPYQMLFGVIQGAQWEDLRRKAAHDLGKMEISGRHFDGFGIGGALEKENLGLICSWVCQELPEDRPRHLLGISEPEDFFAGIENGADTFDCVSPSRVARTGAAYLPTGRTNMARAAFREDFSPLQEGCGCYTCTNYTRAYLHHLLKAKEMLASTLLTIHNEYYTVHLVDSIRQAIIAGEDAYQDFKHRTLIQLGRA

SEQ ID NO: 57732 - protein, 437 aa, Mobiluncus curtisii
  misc_feature (1)..(437): tr|E6LYR5|E6LYR5_9ACTO Queuine tRNA-ribosyltransferase OS=Mobiluncus curtisii ATCC 51333 OX=887326 GN=tgt PE=3 SV=1
MSENFEVVARLGQLGRAGVIHTPHGDIPTPAFVPVGTKATVKALIPEMIRELGASAVLANAYHLHLQPGPELVDKAGGLAAFMHWDGPTFTDSGGFQVLSLGAGYKKVLSQEFAASSRERTASREHGNHERSGDKRKLLEQAEESAELAPPDKRQAHPGLARVDDDGVNFRSHLDGTKHRFTPEISMQIQHHLGADIIFAFDELTSLLHSYDYQVISLERTRRWAERCLAEHERLTVERAGKPYQMLFGVIQGAQWEDLRRKAAHDLGKMEISGRHFDGFGIGGALEKENLGLICSWVCQELPEDRPRHLLGISEPEDFFAGIENGADTFDCVSPSRVARTGAAYLPTGRTNMARAAFREDFSPLQEGCGCYTCTNYTRAYLHHLLKAKEMLASTLLTIHNEYYTVHLVDSIRQAIIAGEDAYQDFKHQTLSQLGRA

SEQ ID NO: 57733 - protein, 441 aa, Mobiluncus holmesii
  misc_feature (1)..(441): tr|E6M3A2|E6M3A2_9ACTO Queuine tRNA-ribosyltransferase OS=Mobiluncus holmesii ATCC 35242 OX=887899 GN=tgt PE=3 SV=1
MSENFEVVARLGQLGRAGVIHTPHGDIPTPAFVPVGTKATVKALIPEMIRELGASAVLANAYHLYLQPGPELVDKAGGLAAFMHWDGPTFTDSGGFQVLSLGAGYKKVLSQEFAASSRERTASREHGNHERSGDKRKLLEQAEESAELAPPDKRQAHPGLARVDDDGVNFRSHLDGTKHRFTPEISMQIQHHLGADIIFAFDELTSLLHSYDYQVISLERTRRWAERCLAEHERLTVERADKPYQMLFGVIQGAQWEDLRRKAAHDLGKMEISGRHFDGFGIGGALEKENLGLIGSWVCQELPEDRPRHLLGISEPEDFFAGIENGADTFDCVSPSRVARTGAAYLPTGRTNMARAAFREDFSPLQEGCGCYTCTNYTRAYLHHLLKAKEMLASTLLTIHNEYYTVHLVDSIRQAIIAGEDAYQDFKHQTLSQLGRACLPR

SEQ ID NO: 57734 - protein, 447 aa, Mobiluncus mulieris
  misc_feature (1)..(447): tr|A0A2J9KRT9|A0A2J9KRT9_9ACTO Queuine tRNA-ribosyltran sferase OS=Mobiluncus mulieris OX=2052 GN=tgt PE=3 SV=1
MNAKFEICARLGALGRAGVIHTPHGDIPTPAFVPVGTKATVKALVPEQVRDLGASAVLANAYHLYLQPGPELVDRAGGLGAFMNWDGPTFTDSGGFQVLSLGAGYKKVLSQEFAGKVKSGGNPDSGMAPHEPADPGNRHDRSGQKRNELEESEENAQLAEPNRNKAHPGLARVDEDGVNFRSHLDGTHHRFSPEISMQIQHLLGADIIFAFDELTSLLHSYDYQVESLERTRRWAERCLREHRRLTEVREGKPYQMLFGVIQGAQWEDLRRKAARDLGLMCVDGQAFDGFGIGGALEKENLGRICAWVAEELPEDRPRHLLGISEPEDFFAGIEAGADTFDCVSPSRVARNGAAYLETGRTNMSRAAFREDFSPVQPGCGCYTCRNYTRAYIHHLLKAKEILASTLLTIHNEYYTVHLVQNIRAAILAGEDAYREFKQETLGKLGRL

SEQ ID NO: 57735 - protein, 447 aa, Mobiluncus mulieris
  misc_feature (1)..(447): tr|E0QQL4|E0QQL4_9ACTO Queuine tRNA-ribosyltransferase OS=Mobiluncus mulieris ATCC 35239 OX=871571 GN=tgt PE=3 SV=1
MNAKFEICARLGALGRAGVIHTPHGDIPTPAFVPVGTKATVKALVPEQVRDLGASAVLANAYHLYLQPGPELVDRAGGLGAFMNWDGPTFTDSGGFQVLSLGAGYKKVLSQEFAGKVKSGGNPDSGMTPHEPADPGNRHDQSGQKRNELEESEENAQLAEPNRNKAHPGLARVDEDGVNFRSHLDGTHHRFSPEISMQIQHLLGADIIFAFDELTSLLHSYDYQVESLERTRRWAERCLREHRRLTEVREGKPYQMLFGVIQGAQWEDLRRKAARDLGLMCVDGQAFDGFGIGGALEKENLGRICAWVAEELPEDRPRHLLGISEPEDFFAGIEAGADTFDCVSPSRVARNGAAYLETGRTNMSRAAFREDFSPVQPGCGCYTCRNYTRAYIHHLLKAKEILASTLLTIHNEYYTVHMVQNIRAAILAGEDAYREFKQETLGKLGRL

SEQ ID NO: 57736 - protein, 375 aa, Moellerella wisconsensis
  misc_feature (1)..(375): tr|A0A0N1KI74|A0A0N1KI74_9GAMM Queuine tRNA-ribosyltran sferase OS=Moellerella wisconsensis ATCC 35017 OX=13542 67 GN=tgt PE=3 SV=1
MKYELQTTDGNARRGRLIFERGTVETPAFMPVGTYGTVKGMTPEEVKETGAEILLGNTFHLWLRPGQEIMKLHGDLHDFMQWQGPILTDSGGFQVFSLGATRKIKEEGVHFRNPINGEKIFLSPEKSMEIQYDLGSDIVMIFDECTPYPADWDYAKNSMEMSLRWAARSRQRFDELKNKNSLFGIIQGGIYEDLRDISVKGLVEIGFDGYAVGGLAVGEPKEDMHRILEHVCPQIPQDKPRYLMGVGKPEDLVEGVRRGIDMFDCVMPTRNARNGHLFVTTGVVKIRNAKYKSDTATLDDECDCYTCRHYSRAYLHHLDRCNEILGARLNTIHNLRYYQRLMSGIRSAIEAGNFDQFVQDFYQRIGKPVPPIKGE

SEQ ID NO: 57737 - protein, 375 aa, Moellerella wisconsensis; identical to SEQ ID NO: 57736
  misc_feature (1)..(375): tr|A0A0H2QT42|A0A0H2QT42_9GAMM Queuine tRNA-ribosyltran sferase OS=Moellerella wisconsensis OX=158849 GN=tgt PE =3 SV=1

SEQ ID NO: 57738 - protein, 385 aa, Mogibacterium diversum
  misc_feature (1)..(385): tr|A0A2S0L324|A0A2S0L324_9FIRM Queuine tRNA-ribosyltran sferase OS=Mogibacterium diversum OX=114527 GN=tgt PE=3 SV=1
MKESLSFELIKKDARTGARRGRITTPHGTIETPVFMPVGTQATVKAMKPEDVEKTGAEIILGNTYHLYLRPGEDIVREAGGLHKFMNWHRPILTDSGGFQVFSLGKFRKITEEGAKFKSYIDGSSHMMTPESSVEVQTALGSDIMMAFDECVAYPAEKKYVARSLERTTRWLRRCDDHHRRLEAKSAMETGADTMKQALFGIMQGGMFKDLRELSAKQITEIDLPGYAIGGLSVGEPKEIMLDVLDDCVDLLPEDKPRYLMGVGTPDYLFESVERGVDMFDCVLPTRLARHGMAMTSRGKINIKNAAFARDFSTLDPDCDCYCCRNYSRAYLRHLFKNDEILCSMLLSEHNIHFLVNMMKNIRKAIEEDRFLEYKREFYNKYGEF

SEQ ID NO: 57739 - protein, 385 aa, Mogibacterium pumilum
  misc_feature (1)..(385): tr|A0A223ASF3|A0A223ASF3_9FIRM Queuine tRNA-ribosyltran sferase OS=Mogibacterium pumilum OX=86332 GN=tgt PE=3 S V=1
MKESLSFELIKKDSRTGARRGRITTPHGTIETPVFMPVGTQATVKAMKPEDVEKTGAEIILGNTYHLYLRPGEDIVREAGGLHKFMNWHRPILTDSGGFQVFSLGKFRKITEEGAKFKSYIDGSSHMMTPESSIEVQTALGSDIMMAFDECVAYPAEKKYVERSLERTTRWLKRCDDHHKRLETKAAMESGSDTMKQALFGIMQGGMFKDLREISAKQITEIDLPGYAIGGLSVGEPKEIMLDILDDCVDLLPEDKPRYLMGVGTPDYLFESVERGVDMFDCVLPTRLARHGMAMTSRGKINIKNAVFARDFSTLDPDCDCYCCRNYSRAYLRHLFKNDEILCSMLLSEHNIHFLVNMMKNIRKAIEEDRFLEYKRKFYNKYGEF

SEQ ID NO: 57740 - protein, 385 aa, Mogibacterium sp.
  misc_feature (1)..(385): tr|J5U883|J5U883_9FIRM Queuine tRNA-ribosyltransferase OS=Mogibacterium sp. CM50 OX=936375 GN=tgt PE=3 SV=1
MKESLSFELLKRDYRTRARRGRITTPHGTIETPVFMPVGTQATVKAMKPEDVEKTGAEIILGNTYHLYLRPGEEIIREAGGLHKFMNWHRPILTDSGGFQVFSLGKFRKITEEGAKFKSYIDGSSHMMTPESSVEVQRALGSDIMMAFDECVAYPAERKYVERSLARTTRWLKRCDDHHRRLETKAATESGSDTMKQALFGIMQGGMYKELREASAKQITEFDLPGYAIGGLSVGEPKDIMLDVLDECTDLLPEDKPRYLMGVGTPDYLFEGVERGVDMFDCVLPTRLARHGVAMTSRGNINIKNAAFARDFRTLDHDCECYCCSNYSRAYLRHLFKNEEILCSMLLSEHNIHFLVNMMKNIRKAIEEDRFLEYKREFYNKYGEF

SEQ ID NO: 57741 - protein, 385 aa, Mogibacterium timidum
  misc_feature (1)..(385): tr|X8INY7|X8INY7_9FIRM Queuine tRNA-ribosyltransferase OS=Mogibacterium timidum ATCC 33093 OX=1401079 GN=tgt P E=3 SV=1
MKESLSFELLKRDYRTRARRGRITTPHGTIETPVFMPVGTQATVKAMKPEDVEKTGAEIILGNTYHLYLRPGEEIIREAGGLHKFMNWHRPILTDSGGFQVFSLGKFRKITEEGAKFKSYIDGSSHMMTPESSVEVQRALGSDIIMAFDECVAYPAERKYVERSLARTTRWLKRCDDHHRRLETKAATESGSDTMKQALFGIMQGGMYKELREASAKQITEFDLPGYAIGGLSVGEPKDIMLDVLDECTDLLPEDKPRYLMGVGTPDYLFEGVERGVDMFDCVLPTRLARHGVAMTSRGNINIKNAAFARDFRTLDHDCECYCCSNYSRAYLRHLFKNEEILCSMLLSEHNIHFLVNMMKNIRKAIEEDRFLEYKREFYNKYGEF

SEQ ID NO: 57742 - protein, 376 aa, Moheibacter sediminis
  misc_feature (1)..(376): tr|A0A1W1YAX1|A0A1W1YAX1_9FLAO Queuine tRNA-ribosyltran sferase OS=Moheibacter sediminis OX=1434700 GN=tgt PE=3 SV=1
MNFQIEQSDTHSKARAGEITTAHGKIQTPIFMPVGTVASVKSVHQRELRDDIKAQIILGNTYHLYLRPGIEILNKAGGLHKFMNWDLPILTDSGGFQVYSLSDRRKVSEEGVRFKSHIDGSYHMFSPEYSMEIQRNIGADIIMAFDELTGIPAQYKDAKRAMNVTHRWLERCKTWLNENPSLYGYEQTLYPIVQGNSFHDLRKESAEYIANFGAEGNAIGGLSVGEPEDVMYEITDLVTEILPKEKPRYLMGVGTPWNILECIALGIDQFDCVMPTRNARNGMLFTWNGVMNMKNAKWKDDFTPLDELGTSYVDSEYSKAYVRHLFISDEYLGKQIASVHNLAFYLDLVRTARKHILDGDFTQWKNQVVPKLRQRL

SEQ ID NO: 57743 - protein, 375 aa, Monaibacterium marinum
  misc_feature (1)..(375): tr|A0A2C9CW79|A0A2C9CW79_9RHOB Queuine tRNA-ribosyltran sferase OS=Monaibacterium marinum OX=1690039 GN=tgt PE= 3 SV=1
MSRFSFTIAATDGKARTGQIDTPRGEIRTPAFMPVGTAATVKAMMPENVRATGADILLGNTYHLMLRPGAERVANLGGLHKFMNWDRPILTDSGGFQVMSLADLRKMSEDGVRFKSHIDGSEHFLSPERSMEIQKLLGSDIVMCFDECPALPADRAAITKSMELSMRWAQRSRDAFGDRPGHALFGIQQGGLEEDLRGKSAEALTSIGFDGYAVGGLAVGEGQEAMFGCLDYAPDQLPQDKPRYLMGVGKPDDIVGAVQRGIDMFDCVLPSRSGRTGQAQTRFGQVNIRNARHADDPRPLDPECTCPACSNYSRAYLHHVNKAQEIIASMLLTWHNLHYYQELMQGLRDAISVGQLDQFVAAFHAKRAEGDMERL

SEQ ID NO: 57744 - protein, 376 aa, Mongoliibacter ruber
  misc_feature (1)..(376): tr|A0A2T0WQJ9|A0A2T0WQJ9_9BACT Queuine tRNA-ribosyltran sferase OS=Mongoliibacter ruber OX=1750599 GN=tgt PE=3 SV=1
MKFNLEATDPKSKARAGVIKTDHGDIATPIFMPVGTAGSVKAVHQRELTYDVKAQIILGNTYHLYLRPGLDILERAGGLHKFNGWSKPILTDSGGYQVFSLAENRKLTEEGAVFKSHIDGSKHLFSPEGVMDIQRIIGADIIMAFDECPPYPCTHDYARNSMELTHRWLKRCIQRFDTTEGKYGYSQALFPIVQGSVFKDLRRQSAEFVASCDREGNAIGGLSVGEPVEDMYEMTDMVTDILPADKPRYLMGVGTPANILEGIALGVDMFDCVMPTRNARNGMLFTSEGIMNMRNEKWKDDFSPIDPHINSYVSSFYSKAYLRHLVISKEILAAQIASIHNLSFYLWLVTQAREHIIAGDFAVWKNQMVEKVSRRL

SEQ ID NO: 57745 - protein, 376 aa, Monoglobus pectinilyticus
  misc_feature (1)..(376): tr|A0A2K9P123|A0A2K9P123_9FIRM Queuine tRNA-ribosyltran sferase OS=Monoglobus pectinilyticus OX=1981510 GN=tgt PE=3 SV=1
MYRLISKHGRARRGEFKTVHGTIQTPVFMNVGTAAAIKGALDTFDLKDIGCQVELSNTYHLHLRPGDEVIRDMGGLHKFMNWDRPILTDSGGFQVFSLAKLRNIKEEGVYFSSHIDGHKIFMGPEESMRIQSNLASTIAMAFDECVENPCERQYAQDSADMTVRWLKRCKDELARLNSLDNTINKNQMLFGINQGSTYRDIRIEHMKQIVDLDLNGYAIGGLAVGESTEDMYNIIEAVEPYMPEDKPRYLMGVGTPINIIEAVYRGVDFFDCVMPSRNARHGTIFTSEGILNIRNAKYERDDRPVDPNCGCHTCRNFSRAYFRHLFKANEMLAMRLAVIHNLYFYNNLMAEIRSALDNGKFSEYRQSKLGVLDRHI

SEQ ID NO: 57746 - protein, 369 aa, Moorea bouillonii
  misc_feature (1)..(369): tr|A0A1U7N7M2|A0A1U7N7M2_9CYAN Queuine tRNA-ribosyltran sferase OS=Moorea bouillonii PNG OX=568701 GN=tgt PE=3 SV=1
MNQQKNNFSFQCQASCSHTKARAGVFVTPHGVVETPRFMPVGTLATVKTLTPAQLEVAGAQMVLANTYHLHLQPGEAIIKQAGGLHRFMGWHGPILTDSGGFQVFSLSQLCTITEEGVTFRSPRDGRMIDLTPERCMEIQHALGADVIMAFDECPPYPAERTEVELATQRTYRWLKRCIVAHNRPDQQALFGIVQGGVYLDLRQKAAESLVELDLPGYAIGGVSVGEPAELIHQIVQTTAPLLPWHKPRYLMGVGTYREMVLAIASGIDLFDCVIPTRLGRHGTALVQGERWNLKNARFREDFSPLDASCPCYCCQNFSRAYLNHLVRSRESLGYMLLSHHNVTELIRFTQAIRAAILSDQFTTQFAHP

SEQ ID NO: 57747 - protein, 374 aa, Moorea producens
  misc_feature (1)..(374): tr|A0A1D8TZD3|A0A1D8TZD3_9CYAN Queuine tRNA-ribosyltran sferase OS=Moorea producens PAL-8-15-08-1 OX=1458985 GN =tgt PE=3 SV=1
MNQQKINFSFQCQASCSHTKARAGVFVTPHGVVETPRFMPVGTLATVKTLTPAQLEVAGAQMVLANTYHLHLQPGEAIIKKAGGLHRFMGWNGPILTDSGGFQVFSLSQLRTITEEGVRFKSPRDGRMIDITPERCMEIQHALGADVIMAFDECPPYPAERTEVELATQRTYRWLKRCIVAHNRPNAQALFGIVQGGVYLDLRQKAAESLVELDLPGYAIGGVSVGEPAELIHQIVETTAPLLPWHKPRYLMGVGTYREMVLAIASGIDLFDCVIPTRLGRHGTALVQGERWNLKNARFREDFSPLDASCPCYCCQNFSRAYLNHLVRSRESLGYMLLSHHNVTELIRFTQAIRAAILSDQFTTQFARWLFTSC

SEQ ID NO: 57748 - protein, 374 aa, Moorea producens
  misc_feature (1)..(374): tr|A0A1D9G6E8|A0A1D9G6E8_9CYAN Queuine tRNA-ribosyltran sferase OS=Moorea producens JHB OX=1454205 GN=tgt PE=3 SV=1
MNQQKINFSFQCQASCSHTKARAGVFVTPHGVVETPRFMPVGTLATVKTLTPAQLEVAGAQMVLANTYHLHLQPGEAIIKQAGGLHRFMGWYGPILTDSGGFQVFSLSQLRTITEEGVTFRSPRDGRMINLTPERCMEIQNALGADVIMAFDECPPYPAERTEVELATQRTYRWLKRCIVAHNRSDQQALFGIVQGGVYLDLRQRAAESLVELDLPGYAIGGVSVGEPAELIHQIVQTTAPLLPWHKPRYLMGVGTYREMVLAIASGIDLFDCVIPTRLGRHGTALVQGERWNLKNAQFREDFSPLDASCPCYCCQNFSRAYLNHLVRSRESLGYMLLSQHNVTELIRFTQAIRAAILSDQFTTQFAHWLSTSC

SEQ ID NO: 57749 - protein, 373 aa, Moorella glycerini
  misc_feature (1)..(373): tr|A0A0C7N259|A0A0C7N259_9THEO Queuine tRNA-ribosyltran sferase OS=Moorella glycerini OX=55779 GN=tgt PE=3 SV=1
MPAVTFTVLKRDRATGARLGRLKTPHGTIETPIFMPVGTQATVKTMTPEEVAGVGAQIILANTYHLYLRPGADIIREAGGLHNFMHWEKPILTDSGGFQVFSLADLREISDAGVTFRSHLDGSTHFMGPAESMAVQEALGSDIAMAFDECVAYPASREEVEAGVERTSRWAEICLQVHRREDQAVFGIIQGGVIPELRRRSAREITALDFPGYGIGGLSVGEPKELMYSILEDLQGYLPENKPRYLMGVGSPDCLIEGVKRGVDMFDCVLPTRIARNGTVMTTYGKLVVRNAAYARDFRPLDPECDCYTCRHYSRAYIRHLLKVDEILGLRLTTIHNLYFLLKLMHRIRQAIASNDLEAFEADFYAKYNSGKI

SEQ ID NO: 57750 - protein, 373 aa, Moorella humiferrea
  misc_feature (1)..(373): tr|A0A2T0AY51|A0A2T0AY51_9THEO Queuine tRNA-ribosyltran sferase OS=Moorella humiferrea OX=676965 GN=tgt PE=3 SV =1
MPPVTFTLQKKDRNTGARLGLLQTPHGTVKTPVFMPVGTQATVKTMTPEEVAEVGAEIILANTYHLYLRPGADVVREAGGLHKFMHWERPILTDSGGFQVFSLAGLREISDDGVTFRSHLDGSTHFMGPKESMAVQEALGSDIAMAFDECVAYPAGREEVEAGVKRTSRWAEICLEVHQREDQAVFGIIQGGVFPDLRRRSAREITALDFPGYGIGGLSVGEPKELMYSVLDELQEYLPENKPRYLMGVGSPDCLIEGVKRGVDMFDCVLPTRIARNGTVMTTYGKLVVRNAAYARDFRPLDPECACYTCRNYTRAYIRHLLKAGEILGLRLTTIHNLYFLLKLMERIRRAIEANDLEAMAAEFYAKYNSGKI

SEQ ID NO: 57751 - protein, 373 aa, Moorella mulderi
  misc_feature (1)..(373): tr|A0A151AXR7|A0A151AXR7_9THEO Queuine tRNA-ribosyltran sferase OS=Moorella mulderi DSM 14980 OX=1122241 GN=tgt PE=3 SV=1
MPAVTFTVLKRDRATGARLGRLKTPHGTIETPVFMPVGTQATVKTMTPEEVAGVGAQIILANTYHLYLRPGADIIREAGGLHNFMHWEKPILTDSGGFQIFSLADLREISDAGVTFRSHLDGSTHFMGPVESMAVQESLGSDIAMAFDECVAYPASREEVEAGVERTSRWAEICLEVHRREDQAVFGIIQGGVIPELRRRSAREITALDFPGYGIGGLSVGEPKELMYSILEDLQGYLPENKPRYLMGVGSPDCLIEGVKRGVDMFDCVLPTRIARNGTVMTTYGKLVVRNAAYARDFRPLDPECDCYTCRHYSRAYIRHLLKADEILGLRLTTIHNLYFLLKLMHRIRQAIANNDLEAFEADFYAKYNSGKI

SEQ ID NO: 57752 - protein, 375 aa, Moorella sp.
  misc_feature (1)..(375): tr|A0A101EBW7|A0A101EBW7_9THEO Queuine tRNA-ribosyltran sferase OS=Moorella sp. 60_41 OX=1635264 GN=tgt PE=3 SV =1
MAAVTFEVLKEEKTFGARLGRLLTPHGVVHTPVFMPVGTQATVKTMTPEEVEELGAEIILSNTYHLYLRPGAEIIREAGGLHKFMNWHRPILTDSGGFQVFSLSPLREVRPEGVVFRSHLDGSTHFMGPEESIAVQEALGSDIAMAFDECVAYPATYEEVAAGVERTTRWAERCLTVHSRKDQALFGIIQGGTFPELRRRSAREITSLDFPGYGIGGLSVGEPKDVMYRILEELRALLPEDRPRYLMGVGSPDCLIEGVKRGIDMFDCVLPTRIARNGTVLTSRGKLVVRNAAYARDFRPLDPECDCYACRNFSRAYIRHLLKANEVLGLRLTTIHNLHFSLRLMERIRRAIADNCLEEMAREFYARYNSPGENL

SEQ ID NO: 57753 - protein, 373 aa, Moorella sp.
  misc_feature (1)..(373): tr|A0A4P6B879|A0A4P6B879_9THEO Queuine tRNA-ribosyltran sferase OS=Moorella sp. E306M OX=2572683 GN=tgt PE=3 SV =1
MPAVTFTVLKRDRATGARLGRLKTPHGTVETPVFMPVGTQATVKTMTPEEVAGVGAEIILANTYHLYLRPGADIIREAGGLHKFMHWDKPILTDSGGFQVFSLADLREISDAGVTFRSHLDGSTHFMGPAESMAVQEALGSDIAMAFDECVAYPASREEVEAGVERTSRWAEICLEVHRREDQAVFGIIQGGVIPELRRRSAREITALDFPGYGIGGLSVGEPKELMYSILEDLQGYLPEGKPRYLMGVGSPDCLIEGVKRGVDMFDCVLPTRIARNGTVMTTYGKLVVRNAAYARDFRPLDPECECYTCRHYTRAYIRHLLKADEILGLRLTTIHNLYFLLKLMHQIRQAIANNDLEAMAAEFYAKYNSGKI

SEQ ID NO: 57754 - protein, 373 aa, Moorella thermoacetica
  misc_feature (1)..(373): sp|Q2RHU3|TGT_MOOTA Queuine tRNA-ribosyltransferase OS= Moorella thermoacetica (strain ATCC 39073 / JCM 9320) O X=264732 GN=tgt PE=3 SV=1
MPAVTFTVLKRDRSTGARLGRLTTPHGTIETPVFMPVGTQATVKTMTPEEVAGLGAEIILANTYHLYLRPGADIIREAGGLHRFMHWERPILTDSGGFQVFSLADLREISDEGVTFRSHLDGSIHFLGPAESMAVQEALGSDIAMAFDECVAYPASPEEVAAGVERTSRWAEACLRAHRREDQAVFGIIQGGTIPELRRRSAREITALDFPGYGIGGLSVGEPKELMYSILEELQGYLPENKPRYLMGVGSPDCLIEGVKRGVDMFDCVLPTRIARNGTVMTTYGKLVVRNAAYARDFRPLDPECDCYTCRNYTRAYIRHLLKAEEILGLRLTTIHNLHFLIKLMQRLRQAIAEGRLEEVAADFYERYNSGKI

SEQ ID NO: 57755 - protein, 373 aa, Moorella thermoacetica; identical to SEQ ID NO: 57754
  misc_feature (1)..(373): tr|A0A1J5P764|A0A1J5P764_MOOTH Queuine tRNA-ribosyltran sferase OS=Moorella thermoacetica OX=1525 GN=tgt PE=3 S V=1

SEQ ID NO: 57756 - protein, 377 aa, Moranella endobia
  misc_feature (1)..(377): tr|F7XY24|F7XY24_MOREP Queuine tRNA-ribosyltransferase OS=Moranella endobia (strain PCIT) OX=903503 GN=tgt PE= 3 SV=1
MEYQLLNTDSKARRGRLVFDRGVVETPAFMPVGTYGTVKGMTPTEITETGTQILLGNTFHLWLRPGQAVIKLHGDLHNFMQWHGPILTDSGGFQVFSLSNIRNITEAGVHFRNLINGNDIFLSPEKSMEIQYDLGSDIVMIFDECTPYPSTWDYAKRSMEMSLRWAVRSRQRFDELENTNALFGIIQGGIYEQLRYASINKLVEIGFDGYAIGGLAVGETKADMHRILAHLCPQIPADKPRYLMGVGKPEDLVEGVRHGIDMFDCVIPTRNARNGQLFVTNGVVKIRNARYKDDVAPPDAECDCYTCRNYSRAYLHHLDSCKEILGARLNTIHNLYYYQHLLNILRQAIADGKLEQVVGEFYRRTKISSTNGSNDTN

SEQ ID NO: 57757 - protein, 378 aa, Moraxella atlantae
  misc_feature (1)..(378): tr|A0A1B8QG67|A0A1B8QG67_9GAMM Queuine tRNA-ribosyltran sferase OS=Moraxella atlantae OX=34059 GN=tgt PE=3 SV=1
MQFTLHKTATGESRARRGTLKLAHGEVQTPVFMPVGTYGTVKGMLPRDLHAIEAQIILGNTFHLWLRPTPAVIEQFGGLHDFMGWDKPILTDSGGFQVFSLGAMRKIREEGVYFRSPIDGARVFLSPEVSMQIQHSLNSDIVMQFDECTPYPATRTEAEASLQLSLRWGKRCRDEHHRLGNHNALFGIIQGSMYADLRAQSLAGLLEIGFDGYAIGGLSVGEPKEEMRAVLSYLPHQMPAERPRYLMGVGTPADIVEAVRCGVDMFDCVMPTRNARNGHYFTSTGVVKIKNAANRFDESPLDAECDCYTCQNFSRAYLHHLFKCGEMLSAQLGTIHNLRYYQNLMQHIRTAIEQDRFDEFVSEFYAKQGLLAPELVLA

SEQ ID NO: 57758 - protein, 378 aa, Moraxella atlantae
  misc_feature (1)..(378): tr|A0A1B8Q8K7|A0A1B8Q8K7_9GAMM Queuine tRNA-ribosyltran sferase OS=Moraxella atlantae OX=34059 GN=tgt PE=3 SV=1
MQFTLHKTATGESRARRGTLKLAHGEVQTPVFMPVGTYGTVKGMLPRDLHAIEAQIILGNTFHLWLRPTPAVIEQFGGLHGFMGWDKPILTDSGGFQVFSLGAMRKIREEGVYFRSPIDGARVFLSPEVSMQIQHSLNSDIVMQFDECTPYPATRTEAEASLQLSLRWGKRCRDEHHRLGNHNALFGIIQGSMYADLRAQSLAGLLEIGFDGYAIGGLSVGEPKEEMRAVLSYLPHQMPADRPRYLMGVGTPADIVEAVRCGVDMFDCVMPTRNARNGHYFTSTGVVKIKNAANRFDESPLDAECDCYTCQNFSRAYLHHLFKCGEMLSAQLGTIHNLRYYQNLMQHIRTAIEQDRFDEFVSEFYAKQGLLAPELVLA

SEQ ID NO: 57759 - protein, 377 aa, Moraxella bovis
  misc_feature (1)..(377): tr|A0A378PXL1|A0A378PXL1_MORBO Queuine tRNA-ribosyltran sferase OS=Moraxella bovis OX=476 GN=tgt PE=3 SV=1
MKFTLHKTDTKTRARRGTVHLAHGDVATPAFMPVGTYGTVKSMLPRDIHAIGADIILGNTFHLWLRPTTSVIDEFGGLHEFIGWDKPILTDSGGFQVFSLGAMRKITEEGVHFRSPVDGSKVFLSPEISMQIQHSLNSDIVMQFDECTPYPTTHTDAQKSLELSLRWGQRCLDEHHKLGNKNALFGIVQGSMYEDLRMQSLTALTDMHFDGYAIGGLSVGEPKDEMIKVLNYLPNRMPSDKPRYLMGVGTPSDIVEAVRRGVDMFDCVMPTRNARNGHLFTRTGAVKIKNAVHRHDKNPLDSECDCYTCQNFSRAYLHHLHKCGEMLSAQLNTIHNLRYYQNLMKGIRESLENETFDEFVATFYAKQGLDVPELGLV

SEQ ID NO: 57760 - protein, 377 aa, Moraxella bovis
  misc_feature (1)..(377): tr|A0A2Z4R613|A0A2Z4R613_MORBO Queuine tRNA-ribosyltran sferase OS=Moraxella bovis OX=476 GN=tgt PE=3 SV=1
MKFTLYKTDTKTRARRGTVHLAHGDVATPAFMPVGTYGTVKSMLPRDIHAIGADIILGNTFHLWLRPTTSVIDEFGGLHEFIGWDKPILTDSGGFQVFSLGAMRKITEEGVHFRSPVDGSKVFLSPEISMQIQHSLNSDIVMQFDECTPYPTTHTDAQKSLELSLRWGQRCLDEHHKLGNKNALFGIVQGSMYEDLRMQSLTALTDMHFDGYAIGGLSVGEPKDEMIKVLNYLPNRMPSDKPRYLMGVGTPSDIVEAVRRGVDMFDCVMPTRNARNGHLFTRTGAVKIKNAVHRHDKNPLDSECDCYTCQNFSRAYLHHLHKCGEMLSAQLNTIHNLRYYQNLMKGIRESLENETFDEFVATFYAKQGLDVPELGLV

SEQ ID NO: 57761 - protein, 377 aa, Moraxella bovoculi
  misc_feature (1)..(377): tr|A0A3F3A812|A0A3F3A812_9GAMM Queuine tRNA-ribosyltran sferase OS=Moraxella bovoculi OX=386891 GN=tgt PE=3 SV= 1
MKFTLHKTDTKTRARRGTVHLAHGEVQTPAFMPVGTYGTVKGMLPRDIHAIGADIILGNTFHLWLRPTTSVIDEFGGLHEFIGWDKPILTDSGGFQVFSLGAMRKITEEGVHFRSPVDGSKVFLSPEISMQIQNSLNSDIVMQFDECTPYPATYTDAQKSLELSLRWGQRCLDEHQKLGNKNALFGIVQGSMYEDLRMQSLTALTDMPFDGYAIGGLSVGEPKDEMIKVLNYLPNRMPSDKPRYLMGVGTPSDIVEAVRRGVDMFDCVMPTRNARNGHLFTSTGAVKIKNAVHRHDKNPLDSECDCYTCQNFSRAYLHHLHKCGEMLSAQLNTIHNLRYYQNLMKGIRESLENETFDEFVATFYAKQGLQAPALSLK

SEQ ID NO: 57762 - protein, 377 aa, Moraxella bovoculi
  misc_feature (1)..(377): tr|A0A066UEA5|A0A066UEA5_9GAMM Queuine tRNA-ribosyltran sferase OS=Moraxella bovoculi 237 OX=743974 GN=tgt PE=3 SV=1
MKFTLHKTDTKTRARRGTVHLAHGEVQTPAFMPVGTYGTVKGMLPRDIHAIGADIILGNTFHLWLRPTTSVIDEFGGLHEFIGWDKPILTDSGGFQVFSLGAMRKITEEGVHFRSPVDGSKVFLSPEISMQIQHSLNSDIVMQFDECTPYPATYTDARKSLELSLRWGQRCLEEHHKLGNKNALFGIVQGSMYEDLRMQSLTALTDMPFDGYAIGGLSVGEPKDEMIKVLNYLPNRMPSDKPRYLMGVGTPSDIVEAVRRGVDMFDCVMPTRNARNGHLFTSTGAVKIKNAVHRHDKNPLDSECDCYTCQNFSRAYLHHLHKCGEMLSAQLNTIHNLRYYQNLMKGIRESLENETFDEFVATFYAKQGLQAPALSLK

SEQ ID NO: 57763 - protein, 385 aa, Moraxella canis
  misc_feature (1)..(385): tr|A0A1S9ZMI3|A0A1S9ZMI3_9GAMM Queuine tRNA-ribosyltran sferase OS=Moraxella canis OX=90239 GN=tgt PE=3 SV=1
MKFTLHNTDGGNNHARRGTVSLAHGEVQTPAFMPVGTYGTVKGMLPRDIEGIGADIILGNTFHLWLRPGMEVVREFGGLHDFMGWNKPILTDSGGFQVFSLGAMRKITEEGVAFRSPVDGAKVFLSPETSMQIQNDLNSDIVMQFDECTPYPATHEDAKKSLELSLRWGQRCIDEHQRLGNKNALFGIIQGSMYQDLRMQSLDGLLKMPFDGYAIGGLSVGEPKEEMIKVLNYLPNAMPHDKPRYLMGVGKPADIVEAVRRGVDMFDCVMPTRNARNGHYFVTGNSDNKGVIRIKNSQYRTDTAPLDEHCDCYTCQNFSRAYLYHLHKCKEMLSAQLATIHNLRYYQRLMADIRQAIENNRFDEFVAQFYANWGMQVPDFDKNAD

SEQ ID NO: 57764 - protein, 377 aa, Moraxella caprae
  misc_feature (1)..(377): tr|A0A378R1R5|A0A378R1R5_9GAMM Queuine tRNA-ribosyltran sferase OS=Moraxella caprae OX=90240 GN=tgt PE=3 SV=1
MKFTLHKTDTKTRARRGTVHLAHGDVATPAFMPVGTYGTVKGMLPRDIHTIGADIILGNTFHLWLRPTTSVIDEFGGLHEFIGWDKPILTDSGGFQVFSLGAMRKITEEGVHFRSPVDGSKVFLSPEISMQIQHSLNSDIVMQFDECTPYPATHTDAQKSLELSLRWGQRCLDEHHKLGNKNALFGIVQGSMYEDLRMQSLTALTDMPFDGYAIGGLSVGEPKDEMIKVLNYLPNRMPSDKPRYLMGVGTPSDIVEAVRRGVDMFDCVMPTRNARNGHLFTSTGAVKIKNAVHRHDKNPLDSECDCYTCQNFSRAYLHHLHKCGEMLSAQLNTIHNLRYYQNLMKGIRESLENETFDEFVVTFYAKQGLDVPELGLV

SEQ ID NO: 57765 - protein, 382 aa, Moraxella catarrhalis
  misc_feature (1)..(382): tr|A0A3A9LH00|A0A3A9LH00_MORCA Queuine tRNA-ribosyltran sferase OS=Moraxella catarrhalis OX=480 GN=tgt PE=3 SV= 1
MKFTLHHTDGGNNHARRGTVSLAHGNVQTPAFMPVGTYGTVKGMLPRDIHGIGADIILGNTFHLWLRPGMEVIRHFGGLHHFIGWDKPILTDSGGFQVFSLGAMRKISEEGVAFRSPVDGAKVFLSPETSMQIQNDLNSDIIMQFDECTPYPATHDDAKKSLELSLRWGQRCLDEHHRLGNKNALFGIIQGSMYKDLRMQSLQGLLKMPFDGYAIGGLSVGEPKEEMIKVLDYLPCAMPNDKPRYLMGVGKPADIVEAVRRGVDMFDCVMPTRNARNGHYFVTGNHDNKGVIRIKNSQYRTDDTPLDEHCDCYTCQNFSRAYLYHLHKCKEMLSAQLATIHNLRYYQRLMVDIRQAIEHHAFDEFVVQFYARWGMVVPPFNS

SEQ ID NO: 57766 - protein, 382 aa, Moraxella catarrhalis
  misc_feature (1)..(382): tr|A0A3A9P4B8|A0A3A9P4B8_MORCA Queuine tRNA-ribosyltran sferase OS=Moraxella catarrhalis OX=480 GN=tgt PE=3 SV= 1
MKFTLHHTDGGNNHARRGTVSLAHGNVQTPAFMPVGTYGTVKGMLPRDIHGIGADIILGNTFHLWLRPGMEVIRHFGGLHHFIGWDKPILTDSGGFQVFSLGAMRKISEEGVAFRSPVDGAKVFLSPETSMQIQNDLNSDIVMQFDECTPYPATHDDAKKSLELSLRWGQRCLDEHHRLGNKNALFGIIQGSMYKDLRMQSLQGLLKMPFDGYAIGGLSVGEPKEEMIKVLDYLPCAMPNDKPRYLMGVGKPADIVEAVRRGVDMFDCVMPTRNARNGHYFVTGNHDNKGVIRIKNSQYRTDDTPLDEHCDCYTCQNFSRAYLYHLHKCKEMLSAQLATIHNLRYYQRLMVDIRQAIEHHAFDEFVVQFYARWGMAVPPFNS

SEQ ID NO: 57767 - protein, 385 aa, Moraxella caviae
  misc_feature (1)..(385): tr|A0A1T0A2G7|A0A1T0A2G7_9GAMM Queuine tRNA-ribosyltran sferase OS=Moraxella caviae OX=34060 GN=tgt PE=3 SV=1
MKFTLHNTDNGNNHARRGTVHLAHGDVQTPAFMPVGTYGTVKGMLPRDIHGIGADIILGNTFHLWLRPGMEVIREFGGLHQFIGWDKPMLTDSGGFQVFSLGAMRKISEEGVAFRSPVDGAKVFLSPETSMQIQHTLNSDIVMQFDECTPYPATHLEAQKSLELSLRWGQRCLDEHHKLGNKNALFGIVQGSMYKDLRMQSLEGLLAMPFDGYAIGGLSVGEPKDEMIGVLNYLPKAMPADKPRYLMGVGKPADIVEAVRRGVDMFDCVMPTRNARNGHYFVTGSTENKGVVRIKNSQYRTDHAPLDEHCDCYTCQNFSRAYLYHLHKCGEMLSAQLATIHNLHYYQRLMADIRSSIEQGKFDEFVSEFYGRWGIDVPAYDKNAH

SEQ ID NO: 57768 - protein, 382 aa, Moraxella cuniculi
  misc_feature (1)..(382): tr|A0A448GYM2|A0A448GYM2_9GAMM Queuine tRNA-ribosyltran sferase OS=Moraxella cuniculi OX=34061 GN=tgt PE=3 SV=1
MKFTLHNVDGGNNHARRGTVSLAHGQVQTPAFMPVGTYGTVKGMLPRDIEGIGADIILGNTFHLWLRPGMEVIREFGGLHNFAQWHKPILTDSGGFQVFSLGAMRKISEEGVAFRSPVDGAKVFLSPETSMQIQKDLNSDIVMQFDECTPYPATHEAAKASLELSLRWGQRCLDEHQRLGNKNALFGIIQGSMYQDLRMQSLEGLLAMPFDGYAIGGLSVGEPKEEMIQVLNYLPNAMPSDKPRYLMGVGKPADIVEAVRRGVDMFDCVMPTRNARNGHYFVTGDASNKGVVRIKNSQYRTDTAPLDSQCDCYTCQNFSRAYLYHLHKCKEMLSAQLATIHNLRYYQRLMAQIRTAIEQQQFDKFLSEFYGNWGMAVPEFDK

SEQ ID NO: 57769 - protein, 382 aa, Moraxella cuniculi
  misc_feature (1)..(382): tr|A0A1N7FZB3|A0A1N7FZB3_9GAMM Queuine tRNA-ribosyltran sferase OS=Moraxella cuniculi DSM 21768 OX=1122245 GN=t gt PE=3 SV=1
MKFTLHNVDGGNNHARRGTVSLAHGQVQTPAFMPVGTYGTVKGMLPRDIEGIGADIILGNTFHLWLRPGMEVIREFGGLHNFAQWHKPILTDSGGFQVFSLGAMRKISEEGVAFRSPVDGAKVFLSPETSMQIQKDLNSDIVMQFDECTPYPATHEAAKASLELSLRWGQRCLDEHQRLGNKNALFGIIQGSMYQDLRMQSLEGLLAMPFDGYAIGGLSVGEPKEEMIQVLNYLPNAMPSDKPRYLMGVGKPADIVEAVRRGVDMFDCVMPTRNARNGHYFVTGDANNKGVVRIKNSQYRTDTAPLDSQCDCYTCQNFSRAYLYHLHKCKEMLSAQLATIHNLRYYQRLMAQIRTAIEQQQFDKFLSEFYGNWGMAVPEFDK

SEQ ID NO: 57770 - protein, 377 aa, Moraxella equi
  misc_feature (1)..(377): tr|A0A378QPW9|A0A378QPW9_9GAMM Queuine tRNA-ribosyltran sferase OS=Moraxella equi OX=60442 GN=tgt PE=3 SV=1
MKFTLHKTDTKTRARRGTVHLAHGDVATPAFMPVGTYGTVKGMLPRDIHAIGADIILGNTFHLWLRPTTSVIDEFGGLHEFIGWDKPILTDSGGFQVFSLGAMRKITEEGVHFRSPVDGSKVFLSPEISMQIQHSLNSDIVMQFDECTPYPATHTDAQKSLELSLRWGQRCLDEHHKLGNKNALFGIVQGSMYEDLRMQSLTALTQMPFDGYAIGGLSVGEPKDEMIKVLNYLPNRMPSDKPRYLMGVGTPSDIVEAVRRGVDMFDCVMPTRNARNGHLFTSTGAVKIKNAVHRHDKNPLDGECDCYTCQNFSRAYLHHLHKCGEMLSAQLNTIHNLRYYQNLMKGIRESLENETFDEFVATFYAKQGLDVPELGLV

SEQ ID NO: 57771 - protein, 377 aa, Moraxella lacunata
  misc_feature (1)..(377): tr|A0A378TSN9|A0A378TSN9_MORLA Queuine tRNA-ribosyltran sferase OS=Moraxella lacunata OX=477 GN=tgt PE=3 SV=1
MKFTLHKTDTKTRARRGTVHLAHGDVATPAFMPVGTYGTVKGMLPRDIHAIGADIILGNTFHLWLRPTTSVIDEFGGLHDFIGWDKPILTDSGGFQVFSLGAMRKITEEGVHFRSPVDGSKVFLSPEISMQIQHSLNSDIVMQFDECTPYPATHTDAQKSLELSLRWGQRCLDEHHKLGNKNALFGIVQGSMYEDLRMQSLTALTEMPFDGYAIGGLSVGEPKDEMIKVLNYLPNRMPSDKPRYLMGVGTPSDIVEAVRRGVDMFDCVMPTRNARNGHLFTSTGAVKIKNAVHRHDKNPLDSECDCYTCQNFSRAYLHHLHKCGEMLSAQLNTIHNLRYYQNLMKGIRESLENETFDEFVATFYAKQGLDVPELGVC

SEQ ID NO: 57772 - protein, 377 aa, Moraxella lacunata
  misc_feature (1)..(377): tr|A0A1V4H0P8|A0A1V4H0P8_MORLA Queuine tRNA-ribosyltran sferase OS=Moraxella lacunata OX=477 GN=tgt PE=3 SV=1
MKFTLHKTDTKTRARRGTVHLAHGDVATPAFMPVGTYGTVKGMLPRDIHAIGADIILGNTFHLWLRPTTSVIDEFGGLHDFIGWDKPILTDSGGFQVFSLGAMRKITEEGVHFRSPVDGSKVFLSPEISMQIQHSLNSDIVMQFDECTPYPATHTDAQKSLELSLRWGQRCLDEHHKLGNKNALFGIVQGSMYEDLRMQSLTALTDMPFDGYAIGGLSVGEPKDEMIKVLNYLPNRMPSDKPRYLMGVGTPSDIVEAVRRGVDMFDCVMPTRNARNGHLFTSTGAVKIKNAVHRHDKNPLDSECDCYTCQNFSRAYLHHLHKCGEMLSAQLNTIHNLRYYQNLMKGIRESLENDTFDEFVATFYAKQELEVPELGLV

SEQ ID NO: 57773 - protein, 383 aa, Moraxella lincolnii
  misc_feature (1)..(383): tr|A0A1T0CKM6|A0A1T0CKM6_9GAMM Queuine tRNA-ribosyltran sferase OS=Moraxella lincolnii OX=90241 GN=tgt PE=3 SV= 1
MQFTLHKTATGNSRARRGTVHLNHGDVQTPAFMPVGTYGTVKGMLPRDIHDIGADIILGNTFHLWLRPGTDVIDQFGGLHSFIHWDKPILTDSGGFQVFSLGQMRKITEEGVYFKSPIDGAKVFLSPEKSMQIQYSLNSDIVMQFDECTPYPASHDEAKKSLELSLRWGQRCVDEHRKLGNDNALFGIIQGSMYPDLRRTSLDGLLNIGFDGYAIGGLSVGEPKEEMMAVLNYLPNDMPSDKPRYLMGVGKPEDILEAVRRGVDMFDCVMPTRNARNGHYFVTGNPDNQGVVRIRNSQYRTDERPLDPECDCHTCQNFSRAYLYHLNKCKEMLGAQLATIHNLRYYQRLMAGIRQSIEENRFDAFVTAFYAKRGQSVPKLMLK

SEQ ID NO: 57774 - protein, 369 aa, Moraxella macacae
  misc_feature (1)..(369): tr|L2F6X7|L2F6X7_9GAMM Queuine tRNA-ribosyltransferase OS=Moraxella macacae 0408225 OX=1230338 GN=tgt PE=3 SV= 1
MKFTLHTTDKSSLARRGTVHLAHGDVQTPAFMPVGTYGTVKGMLPRDIHAIGAEIILGNTFHLWLRPTTAVIDKFGGLHDFIGWHKPILTDSGGFQVFSLGAMRKIKEEGVYFRSPIDGAKVFLSPEISMQIQNSLNSDIVMQFDECTPYPATHLEADKSLELSLRWGERCINEHQKLGNKNALFGIIQGSMYRDLREKSLNGLLAMPFDGYAIGGLSVGEPKDEMTCVLNYLPNMMPTDKPRYLMGVGTPTDIVEAVRRGVDMFDCVMPTRNARNGHLFVSTGVVKIKNAMHRFDDSPLDNECDCYTCQNFSRSYLHHLHKCGEMLSAQLNTIHNLRFYQNLMQNIRDSLDNGMFDKFVNEFYQKQSV

SEQ ID NO: 57775 - protein, 377 aa, Moraxella nonliquefaciens
  misc_feature (1)..(377): tr|A0A1B8QJ46|A0A1B8QJ46_MORNO Queuine tRNA-ribosyltran sferase OS=Moraxella nonliquefaciens OX=478 GN=tgt PE=3 SV=1
MKFTLHKTDKNTHARRGTVHLAHGDVATPAFMPVGTYGTVKGMLPRDIHATGADIILGNTFHLWLRPTTSVIDEFGGLHDFIGWDKPILTDSGGFQVFSLGAMRKITEEGVHFRSPVDGRGVFLSPEISMQIQKSLNSDIVMQFDECTPYPATHTESQKSLELSIRWGQRCLDEHHKLGNKNALFGIVQGSMYEDLRMQSLTDLMQMPFDGYAIGGLSVGEPKDEMMKVLNYLPNRMPSDKPRYLMGVGTPSDIVEAVKRGVDMFDCVMPTRNARNGHLFTSTGVVKIKNAAHRHDKNPPDGECDCHTCQNFSRAYLHHLHKCGEMLSAQLNTIHNLHYYQNLMKGIRKSLENDTFDEFVATFYAKQGLDVPKFGAC

SEQ ID NO: 57776 - protein, 377 aa, Moraxella nonliquefaciens
  misc_feature (1)..(377): tr|A0A1B8PML2|A0A1B8PML2_MORNO Queuine tRNA-ribosyltran sferase OS=Moraxella nonliquefaciens OX=478 GN=tgt PE=3 SV=1
MKFTLHKTDTKTRARRGTVHLAHGDVATPAFMPVGTYGTVKGMLPRDIHATGADIILGNTFHLWLRPTTSVIDEFGGLHDFIGWDKPILTDSGGFQVFSLGAMRKITEEGVHFRSPVDGRGVFLSPEISMQIQKSLNSDIVMQFDECTPYPATHTESQKSLELSIRWGQRCLDEHHKLGNKNALFGIVQGSMYEDLRMQSLMALMQMPFDGYAIGGLSVGEPKDEMMKVLNYLPNRMPSDKPRYLMGVGTPSDIVEAVKRGVDMFDCVMPTRNARNGHLFTSTGVVKIKNAAHRHDKNPPDGECDCHTCQNFSRAYLHHLHKCGEMLSAQLNTIHNLHYYQNLMKGIRKSLENDTFDEFVATFYAKQGLDVPKFGAC

SEQ ID NO: 57777 - protein, 378 aa, Moraxella osloensis
  misc_feature (1)..(378): tr|A0A173MVI5|A0A173MVI5_9GAMM Queuine tRNA-ribosyltran sferase OS=Moraxella osloensis OX=34062 GN=tgt PE=3 SV= 1
MQFTLHKNATGESRARRGTVHLAHGDVQTPAFMPVGTYGTVKGMLPRDIHEIGAEIILGNTFHLWLRPTTDVIDKFGGLHDFIGWNKPILTDSGGFQVFSLGAMRKIVEEGVHFRSPIDGAKVFLSPEISMQIQYSLNSDIVMQFDECTPYPATPSEADTSLELSLRWGERCKNAHEKLGNKNALFGIIQGSMYRNLREKSLEGLLAIGFDGYAIGGLSVGEPKEEMMAVLDYLPDDMPADKPRYLMGVGKPEDIVEAVRRGVDMFDCVMPTRNARNGHYFTTFGAVKIKNAVHRFDQSPLDSECDCYTCQNFSRAYLHHLFKCNEMLSAQLGTIHNLRYYQRLMADIRQSIEDDKFDAFVDTFYQQQNLPKPDLHLT

SEQ ID NO: 57778 - protein, 378 aa, Moraxella osloensis
  misc_feature (1)..(378): tr|A0A1B8Q0M6|A0A1B8Q0M6_9GAMM Queuine tRNA-ribosyltran sferase OS=Moraxella osloensis OX=34062 GN=tgt PE=3 SV= 1
MQFTLHKNALGESRARRGTVHLAHGDVQTPAFMPVGTYGTVKGMLPRDIHEIGAEIILGNTFHLWLRPTTDVIDKFGGLHDFIGWNKPILTDSGGFQVFSLGAMRKIKEEGVHFRSPIDGAKVFLSPEISMQIQYSLNSDIVMQFDECTPYPATPSEADTSLELSLRWGERCKNAHEKLGNQNALFGIIQGSMYRNLREKSLEGLLAIGFDGYAIGGLSVGEPKEEMMAVLDYLPDDMPADKPRYLMGVGKPEDIVEAVRRGVDMFDCVMPTRNARNGHYFTTFGAVKIKNAVHRFDQSPLDSACDCYTCQNFSRAYLHHLFKCNEMLSAQLGTIHNLRYYQRLMADIRQSIEDDKFDVFVDTFYQQQNLPKPDLHLT

SEQ ID NO: 57779 - protein, 377 aa, Moraxella ovis
  misc_feature (1)..(377): tr|A0A378PJC1|A0A378PJC1_9GAMM Queuine tRNA-ribosyltran sferase OS=Moraxella ovis OX=29433 GN=tgt PE=3 SV=1
MKFTLHKTDTKTRARRGTVHLAHGEVQTPAFMPVGTYGTVKGMLPRDIHAIGADIILGNTFHLWLRPTTSVIDEFGGLHEFIGWDKPILTDSGGFQVFSLGAMRKITEEGVHFRSPVDGSKVFLSPEISMQIQNSLNSDIVMQFDECTPYPATYKEAQKSLELSLRWGQRCLDEHHKLGNKNALFGIVQGSMYEDLRMQSLTALTDMPFDGYAIGGLSVGEPKDEMIKVLDYLPNRMPSDKPRYLMGVGTPSDIVEAVRRGVDMFDCVMPTRNARNGHLFTSTGAVKIKNAVHRHDKNPLDSECDCYTCQNFSRAYLHHLHKCGEMLSAQLNTIHNLRYYQNLMKGIRESLENGTFDEFVATFYAKQGLEAPALSLK

SEQ ID NO: 57780 - protein, 387 aa, Moraxella pluranimalium
  misc_feature (1)..(387): tr|A0A1T0CVB8|A0A1T0CVB8_9GAMM Queuine tRNA-ribosyltran sferase OS=Moraxella pluranimalium OX=470453 GN=tgt PE= 3 SV=1
MKFTLHNTDGGNNHARRGTVHLAHGDVQTPAFMPVGTYGTVKGMLPRDIHGIGADIILGNTFHLWLRPGMDVIREFGGLHKFINWDKPILTDSGGFQVFSLGAMRKISEEGVAFRSPVDGAKVFLSPETSMQIQNDLNSDIVMQFDECTPYPATHSDAQKSLELSLRWGQRCIDEHQRLGNKNALFGIIQGSMYKDLRAQSLKGLLEMPFDGYAIGGLSVGEPKEEMIGVLNYLPNAMPSDKPRYLMGVGKPADIVEAVRRGVDMFDCVMPTRNARNGHYFVTGNSENKGIVRIKNSQYRNDLAPLDEHCDCYTCQNFSRAYLYHLHKCKEMLSAQLATIHNLRYYQRLMADIRKAIEENRFDEFVAEFYANWGMAVPEYDKDQHSL

SEQ ID NO: 57781 - protein, 387 aa, Moraxella porci
  misc_feature (1)..(387): tr|A0A1T0CSX2|A0A1T0CSX2_9GAMM Queuine tRNA-ribosyltran sferase OS=Moraxella porci DSM 25326 OX=573983 GN=tgt P E=3 SV=1
MKFTLHNTDGGNNHARRGTVHLAHGDVQTPAFMPVGTYGTVKGMLPRDIHGIGADIILGNTFHLWLRPGMDVIREFGGLHKFINWDKPILTDSGGFQVFSLGAMRKISEEGVAFRSPVDGAKVFLSPETSMQIQHDLNSDIVMQFDECTPYPATHIDAQKSLELSLRWGQRCIDEHQRLGNKNALFGIIQGSMYKDLRAQSLKGLLDMPFDGYAIGGLSVGEPKDEMIGVLNYLPKAMPSDKPRYLMGVGKPADIVEAVRRGVDMFDCVMPTRNARNGHYFVTGNSENKGIVRIKNSQYRTDLAPLDEHCDCYTCQNFSRAYLYHLHKCKEMLSAQLATIHNLRYYQRLMADIRKAIEENRFDEFVAEFYANWGMAVPEYDKDAHQL

SEQ ID NO: 57782 - protein, 380 aa, Moraxella sp.
  misc_feature (1)..(380): tr|A0A496NDH8|A0A496NDH8_MORSP Queuine tRNA-ribosyltran sferase OS=Moraxella sp. OX=479 GN=tgt PE=3 SV=1
MKFSLHNTDNGNNHARRGTVHLAHGDVQTPAFMPVGTYGTVKGMLPRDIHAIGADIILGNTFHLWLRPTTAVIKEFGGLHSFIGWNKPILTDSGGFQVFSLGAMRKISEEGVAFRSPVDGQKVFLSPEVSMQIQYDLNSDIVMQFDECTPYPATHDEAKNSLELSLRWGQRCLDEHHKLGNKNALFGIIQGGMYQDLRMQSLSGLLDMPFDGYAIGGLSVGEPKEMMMQVLDYLPKTMPNDKPRYLMGVGKPEDIVEAVRRGVDMFDCVMPTRNARNGHYFTSSGVVKIKNASHRYNHEPLDKECDCYTCQNFSLAYLHHLHKCGEMLSAQLGTIHNLAYYQKLMKDIRASIENQKFDEFVALFYQKRGMSVPDFDKHKS

SEQ ID NO: 57783 - protein, 387 aa, Moraxella sp.
  misc_feature (1)..(387): tr|A0A2K0XU63|A0A2K0XU63_9GAMM Queuine tRNA-ribosyltran sferase OS=Moraxella sp. RCAD0137 OX=1775913 GN=tgt PE= 3 SV=1
MKFTLHNTDGGNNHARRGTVHLAHGDVQTPAFMPVGTYGTVKGMLPRDIHGIGADIILGNTFHLWLRPGMDVIREFGGLHKFINWDKPILTDSGGFQVFSLGAMRKISEEGVAFRSPVDGAKVFLSPETSMQIQNDLNSDIVMQFDECTPYPATHLDAQKSLELSLRWGQRCIDEHQRLGNKNALFGIIQGSMYKDLREQSLKGLLDMPFDGYAIGGLSVGEPKDEMIGVLNYLPSAMPSDKPRYLMGVGKPADIVEAVRRGVDMFDCVMPTRNARNGHYFVTGNSENKGIVRIKNSQYRTDLAPLDEHCDCYTCQNFSRAYLYHLHKCKEMLSAQLATIHNLRYYQRLMADIRKAIEENRFDEFVADFYANWGMAVPEYDKDAHQL

SEQ ID NO: 57784 - protein, 387 aa, Moraxellaceae bacterium
  misc_feature (1)..(387): tr|A0A345P7Q9|A0A345P7Q9_9GAMM Queuine tRNA-ribosyltran sferase OS=Moraxellaceae bacterium HYN0046 OX=2283318 G N=tgt PE=3 SV=1
MTAATPAQPALNATDKPLIFEKLAQDGLARRGRVTLAHGVVETPAFMPVGTYGTVKGMLPRDVEEIGAHIVLGNTFHLYLRPGLEVIAEHGGLHNFMQWNKPILTDSGGFQVFSLGAKIKEEGVTFRSPIDGSKVFLSPEKSMEIQKTLNSDIVMIFDECTPYPATYSQARMSLQLSLRWAKRCKVAHEGNPNALFGIVQGGMYPELRDESLEGLTDIGFDGYAIGGLSVGEPKEEMIKILDYLPRKLPADKPRYLMGVGKPEDIVEAVRRGVDMFDCVMPTRNARNGHYFISTGIVRIRNSQYRHDMRPLDANCSCYTCKNFTRSYLYHLDKTGEMLGAMLGTIHNLAYYQTLMQGLRSAIEQGQLESFVQAFYAAREMEVPAFAG

SEQ ID NO: 57785 - protein, 238 aa, Moraxellaceae bacterium
  misc_feature (1)..(238): tr|A0A2A5C0P3|A0A2A5C0P3_9GAMM Queuine tRNA-ribosyltran sferase (Fragment) OS=Moraxellaceae bacterium OX=188977 5 GN=tgt PE=3 SV=1
MKFEKFAEDGLARRGRLEFDRGTVETPAFMPVGTYGTVKGMSPKDVEEIGADIILGNTFHLMLRPGTEVIKQHGGLHDFMGWKGPILTDSGGFQVFSLGKMRTITEDGVIFQSPINGDKVSLNPESSMQVQRDLGSDIVMIFDECTPFPATETEARDSMELSMRWAKRSKTAHGDNPNALFGIVQGGMYENLRVESIQGLAEIGFDGYAIGGLSVGEPKEEMMAVLDYLSPHMPQDKP

SEQ ID NO: 57786 - protein, 374 aa, Morganella morganii
  misc_feature (1)..(374): tr|M7CFA9|M7CFA9_MORMO Queuine tRNA-ribosyltransferase OS=Morganella morganii SC01 OX=1239989 GN=tgt PE=3 SV=1
MKYELQTTDGRARRGRLIFDRGVVETPAFMPVGTYGTVKGMTPEEVKETGAQILLGNTFHLWLRPGQEIMKLHGDLHDFMQWKGPILTDSGGFQVFSLGAMRKIKEEGVHFRNPINGEKIFLSPEKSMEIQYDLGSDIVMIFDECTPYPADWDYAKKSMEMSLRWAKRSRDRFDELGNPNALFGIIQGSVYEDLRDVSVKGLVEIGFDGYAVGGLAVGEPKEDMHRILEHVCPQIPEDKPRYLMGVGKPEDLVEGVRRGIDMFDCVMPTRNARNGHLFVTDGVVKIRNAKYKSDTSPLDAECDCYTCRNYTRAYLHHLDRCNEILGARLNTIHNLRYYQRLMAGIRQAIEEGRLEAFAAEFYQRIGKPVPPLSE

SEQ ID NO: 57787 - protein, 374 aa, Morganella morganii; identical to SEQ ID NO: 57786
  misc_feature (1)..(374): tr|M1SD06|M1SD06_MORMO Queuine tRNA-ribosyltransferase OS=Morganella morganii subsp. morganii KT OX=1124991 GN =tgt PE=3 SV=1

SEQ ID NO: 57788 - protein, 374 aa, Morganella psychrotolerans
  misc_feature (1)..(374): tr|A0A1B8HTA3|A0A1B8HTA3_9GAMM Queuine tRNA-ribosyltran sferase OS=Morganella psychrotolerans OX=368603 GN=tgt PE=3 SV=1
MKYELQTTDGRARRGRLIFDRGVVETPAFMPVGTYGTVKGMTPEEVKETGAQILLGNTFHLWLRPGQEIMKLHGDLHDFMQWKGPILTDSGGFQVFSLGAMRKIKEEGVHFRNPINGEKIFLSPEKSMEIQYDLGSDIVMIFDECTPYPADWDYAKQSMEMSLRWAQRSRQRFDELENPNALFGIIQGSVYEDLRDVSVKGLVEIGFDGYAVGGLAVGEPKEDMHRILEHVCPQIPEDKPRYLMGVGKPEDLVEGVRRGIDMFDCVMPTRNARNGHLFVTDGVVKIRNARYKSDVSTLDAECDCYTCRNYTRAYLHHLDRCNEILGARLNTIHNLRYYQRLMAGIRQAIEEGRLEAFAAEFYQRIGKPVPPLSA

SEQ ID NO: 57789 - protein, 374 aa, Morganella psychrotolerans
  misc_feature (1)..(374): tr|A0A1B8H199|A0A1B8H199_9GAMM Queuine tRNA-ribosyltran sferase OS=Morganella psychrotolerans OX=368603 GN=tgt PE=3 SV=1
MKYELQTTDGRARRGRLIFDRGVVETPAFMPVGTYGTVKGMTPEEVKETGAQILLGNTFHLWLRPGQEVMKLHGDLHDFMQWKGPILTDSGGFQVFSLGATRKIKEEGVHFRNPINGEKIFLSPEKSMEIQYDLGSDIVMIFDECTPYPADWDYAKQSMEMSLRWAQRSRQRFDELENPNALFGIIQGSVYEDLRDVSVKGLVEIGFDGYAVGGLAVGEPKEDMHRILEHVCPQIPEDKPRYLMGVGKPEDLVEGVRRGIDMFDCVMPTRNARNGHLFVTDGVVKIRNARYKSDVSTLDAECDCYTCRNYTRAYLHHLDRCNEILGARLNTIHNLRYYQRLMAGIRQAIEEGRLEAFAAEFYQRIGKPVPPLSA

SEQ ID NO: 57790 - protein, 374 aa, Morganella sp.; identical to SEQ ID NO: 57788
  misc_feature (1)..(374): tr|A0A3D3HTF2|A0A3D3HTF2_9GAMM Queuine tRNA-ribosyltran sferase OS=Morganella sp. (in: Bacteria) OX=1912315 GN= tgt PE=3 SV=1

SEQ ID NO: 57791 - protein, 379 aa, Moritella marina
  misc_feature (1)..(379): tr|A0A5J6WPM6|A0A5J6WPM6_MORMI tRNA guanosine(34) trans glycosylase Tgt OS=Moritella marina ATCC 15381 OX=12029 62 GN=tgt PE=4 SV=1
MKLKYELDKTTGNARRGRLIFERGVVETPAFMPVGTYGTVKGMTPEEVDATGADILLGNTFHLWLRPGQEVMKQHGGLHNFMNWQGPILTDSGGFQVFSLGKMRKITEAGVHFRHPVNGSKIFLDPETSMEIQDDLGSDVVMIFDECTPYPATESEAEKSMRMSLRWAQRSRDHFDKLDNKNNLFGIIQGGVYEHLRDISVKGLLDIGFDGYAVGGLAVGEPKEDMHRILEHTCPQIPEDKPRYLMGVGKPEDLVEGVRRGVDMFDCVMPTRNARNGHLFTSEGVIKIRNAKHKTDTSTLDPECDCYTCKNYTRSYLNHLDKCNEILGARLNTMHNLRYYQNLMQGIRDAIDSDTFEEFVTDFYAKQGREVPPLAKADA

SEQ ID NO: 57792 - protein, 379 aa, Moritella sp.
  misc_feature (1)..(379): tr|A0A2I0F395|A0A2I0F395_9GAMM Queuine tRNA-ribosyltran sferase OS=Moritella sp. Urea-trap-13 OX=2058327 GN=tgt PE=3 SV=1
MKLKYELDKTIGNARRGRLIFERGVVETPAFMPVGTYGTVKGMTPEEVDDTGADILLGNTFHLWLRPGQEVMKLHGGLHNFMNWQGPILTDSGGFQVFSLGKMRKITEAGVHFRHPINGSKIFLDPETSMEIQDDLGSDVVMIFDECTPYPATESEAEKSMSMSLRWAQRSRDHFDKLENKNNLFGIIQGGVYEHLRDISVKGLLDIGFDGYAVGGLAVGEPKEDMHRILEHTCPQIPEDKPRYLMGVGKPEDLVEGVRRGVDMFDCVMPTRNARNGHLFTSEGVIKIRNAKHKTDTSTLDPECDCYTCKNYTRSYLNHLDKCNEILGARLNTMHNLRYYQNLMQGIRDAIDSDTFEQFVTDFYTKQGREVPPLAKSDA

SEQ ID NO: 57793 - protein, 379 aa, Moritella sp.
  misc_feature (1)..(379): tr|A6F9N0|A6F9N0_9GAMM Queuine tRNA-ribosyltransferase OS=Moritella sp. PE36 OX=58051 GN=tgt PE=3 SV=1
MKLKYELDKTNGNARRGRLIFERGVVETPAFMPVGTYGTVKGMTPEEVDDTGADILLGNTFHLWLRPGQEVMKLHGGLHNFMNWQGPILTDSGGFQVFSLGKTRKITEAGVHFRHPVNGSKIFLDPEISMEIQDDLGSDVVMIFDECTPYPATESEAEKSMRMSLRWAQRSRDHFDKLENKNNLFGIIQGGVYEHLRDISVKGLLDIGFDGYAVGGLAVGEPKEDMHRILEHTCPQLPEDKPRYLMGVGKPEDLIEGVRRGVDMFDCVMPTRNARNGHLFTSEGVIKIRNAKHKTDTGTLDPECDCYTCKNYSRSYLNHLDKCNEILGARLNTMHNLRYYQNLMQSIRDAIDSDTFEQFVTDFYAKQGREVPPLAKSDA

SEQ ID NO: 57794 - protein, 379 aa, Moritella viscosa
  misc_feature (1)..(379): tr|A0A090IAK9|A0A090IAK9_9GAMM Queuine tRNA-ribosyltran sferase OS=Moritella viscosa OX=80854 GN=tgt PE=3 SV=1
MKLKYELDKTTGNARRGRLIFERGVVETPAFMPVGTYGTVKGMTPEEVDATGADILLGNTFHLWLRPGQEVMKQHGGLHNFMNWQGPILTDSGGFQVFSLGKMRKITEAGVHFRHPVNGSKIFLDPETSMEIQDDLGSDVVMIFDECTPYPATESEAEKSMRMSLRWAQRSRDHFDKLDNKNNLFGIIQGGVYEHLRDISVKGLLDIGFDGYAVGGLAVGEPKEDMHRILEHTCPQIPEDKPRYLMGVGKPEDLIEGVRRGVDMFDCVMPTRNARNGHLFTSEGVIKIRNAKHKTDTGTLDPECDCYTCKNYSRSYLNHLDKCNEILGARLNTMHNLRYYQNLMQGIRDAIDSDTFEEFVTDFYTKQGREVPPLAKSGA

SEQ ID NO: 57795 - protein, 379 aa, Moritella yayanosii
  misc_feature (1)..(379): tr|A0A330LQB6|A0A330LQB6_9GAMM Queuine tRNA-ribosyltran sferase OS=Moritella yayanosii OX=69539 GN=tgt PE=3 SV= 1
MKLKYELDKTNGNARRGRLIFERGVVETPAFMPVGTYGTVKGMTPEEVDATGADILLGNTFHLWLRPGQEVMKLHGGLHNFMNWQGPILTDSGGFQVFSLGKTRKITEAGVHFRHPVNGSKIFLDPETSMEIQDDLGSDVVMIFDECTPYPATESEAEKSMRMSLRWAQRSRDHFDKLENKNNLFGIIQGGVYEHLRDISVKGLLDIGFDGYAIGGLAVGEPKEDMHRILEHTCPQIPEDKPRYLMGVGKPEDLIEGVRRGVDMFDCVMPTRNARNGHLFTSEGVIKIRNAKHKTDTGTLDPECDCYTCKNYSRSYLNHLDKCNEILGARLNTMHNLRYYQNLMQGIRDAIDSDTFEQFVTDFYTKQGREVPPLAKSDA

SEQ ID NO: 57796 - protein, 371 aa, Morococcus cerebrosus
  misc_feature (1)..(371): tr|A0A0C1EV51|A0A0C1EV51_9NEIS Queuine tRNA-ribosyltran sferase OS=Morococcus cerebrosus OX=1056807 GN=tgt PE=3 SV=1
MLKFTLHKKDGHARRGTLELNHGKIETPVFMPVGTYGSVKAMNPQNLHDIKAQIILGNTYHLWLRPGLEVIEQFGGLHDFIGWNKPILTDSGGFQVFSLSDMRKLTEEGCTFQSPINGDRLFLSPEISMKIQTVLNSDIVMQLDECTPGEATHEQAQKSLQMSLRWAERSKKAFEDLKNPNALFGIVQGAMYEDLREESLRGLEQFDFPGLAIGGLSVGEPKPEMYRMLRTVGPMLPEHKPHYLMGVGTPEDLVYGVAHGVDMFDCVMPTRNARNGWLFTRFGDLKIKNAKHKLDKRPIDESCTCYACQNFSRAYLHHLHRAGEILGAQLNTIHNLHFYQVIMAEMREAIEQGKFADWQAQFHENRARGVD

SEQ ID NO: 57797 - protein, 375 aa, Motilimonas sp.
  misc_feature (1)..(375): tr|A0A418YEK7|A0A418YEK7_9GAMM Queuine tRNA-ribosyltran sferase OS=Motilimonas sp. PLHSC7-2 OX=2303987 GN=tgt P E=3 SV=1
MKYELLNTDGRARRGRLVFERGTVETPAFMPVGTYGTVKGMTPEEVASIGAEIILGNTFHLWLRPGQEIMRQHGDLHDFMNWHGPILTDSGGFQVFSLGHIRKITEEGVHFRNPVNGDKIFLSPEGSMDIQYDLGSDIVMIFDECTPYPATEAEAEKSMQMSLRWAKRSRQQFEQKQNPNALFGIIQGGVYEHLRDVSLAGLMDIGFDGYAIGGLAVGEPKEDMHRILEHITPKIPADKPRYLMGVGKPEDLVEGVRRGVDMFDCVMPTRNARNGHLFTSEGVIKIRNAKHRDDTNTLDAECDCYTCKNYSRSYLHHLDKCNEILGARLNTIHNLRHYQRVMQGLRNAIEQGKLDDFVTEFYGKLGKPVPPLDEK

SEQ ID NO: 57798 - protein, 373 aa, Motiliproteus coralliicola
  misc_feature (1)..(373): tr|A0A369W9T1|A0A369W9T1_9GAMM Queuine tRNA-ribosyltran sferase OS=Motiliproteus coralliicola OX=2283196 GN=tgt PE=3 SV=1
MDYELLATDGKARRGRLSFPRGDVETPAFMPVGTYGTVKGMLPRDIEESGAHIILGNTFHLMLRPGTQVVQEHGDLHGFVQWKGPILTDSGGFQVFSLGAMRKITEHGVKFQSPVDGSKVELTPERSMEVQRELGSDIVMIFDECTPYPATEQQAAESMRLSLRWAKRSKDAHGDNPSALFGIVQGGMYEALRDESLAGLTEIGFDGYAIGGLSVGEPKDEMMKVLDYTTPKMPEDKPRYLMGVGKPEDLVEGVRRGVDMFDCVMPTRNARNGHLFTSEGVIKIRNATHRHDTRPLDPECDCYTCQNFSRAYLYHLDKCKEMLGAQLNTIHNLRYYQNLMSGLRSAIEQGKLSDFVTDFYRKRGQDVPALAQD

SEQ ID NO: 57799 - protein, 371 aa, Motiliproteus sp.
  misc_feature (1)..(371): tr|A0A1R1LLU9|A0A1R1LLU9_9GAMM Queuine tRNA-ribosyltran sferase OS=Motiliproteus sp. MSK22-1 OX=1897630 GN=tgt PE=3 SV=1
MSYELLATDGKARRGRLTFPRGEVETPAFMPVGTYGTVKGMLPRDIEEIGAHMILGNTFHLMLRPGTEVVKAHGDLHDFVQWKGPILTDSGGFQVFSLGDMRKITEAGVNFQSPVDGSPVTLNPEISMQVQKDLGSDVVMIFDECTPYPATETQSAESMRLSLRWAKRSKEAHGDSPAALFGIVQGGMFPELRDESLAGLTEIGFDGYAIGGLSVGEPKDEMMKILDHTTPKMPEDRPRYLMGVGRPEDLVEGVKRGVDMFDCVMPTRNARNGHLFVSTGVVKIRNAAHKHDDGPLDRECDCYTCKNFSRAYLHHLDKCKEMLGAQLNTIHNLRHYQNLMSGLRTAIEQGRLGDFVEEFYKKRGQETPALD

SEQ ID NO: 57800 - protein, 376 aa, Mucilaginibacter auburnensis
  misc_feature (1)..(376): tr|A0A2H9VUC7|A0A2H9VUC7_9SPHI Queuine tRNA-ribosyltran sferase OS=Mucilaginibacter auburnensis OX=1457233 GN=t gt PE=3 SV=1
MKFNLTAQDPLSKARAGEITTDHGTIPTPIFMPVGTAGTVKAVHQRELKDDIEAKIILGNTYHLYLRPGLDVLERAGGLHKFNGWEGPILTDSGGYQVYSLSEVRKIKEEGVTFRSHIDGSKHLFTPENVMDIQRVIGADIIMAFDECTPYPCDYNYAKRSIEMTHRWLKRCCDRFDSTGPKYGYSQTLFPIVQGSVYKDLRVRSAEVIASFEREGNAIGGLSVGEPAEEMYAMTEIVCNILPQQKPRYLMGVGTPINLLENIALGIDMFDCVMPTRNARNGMLFTKNGVINIKNEKWKDDFSPIEEDSTLFADKQYTKAYLRHLIHSGEMLGAQIATLHNLHFYLWLVAEARAKIISGEFSSWKNTMVNRLGQRL

SEQ ID NO: 57801 - protein, 376 aa, Mucilaginibacter frigoritolerans
  misc_feature (1)..(376): tr|A0A562UG45|A0A562UG45_9SPHI Queuine tRNA-ribosyltran sferase OS=Mucilaginibacter frigoritolerans OX=652788 G N=tgt PE=3 SV=1
MKFNLTAKDPLSKARAGEIVTDHGTIQTPIFMPVGTAGTVKAVHQHELKNDIKAQIILGNTYHLYLRPGLHTLESAGGLHRFNGWEGPILTDSGGYQVYSLTEVRKIKEEGVTFRSHIDGSKHLFTPENVMDIQRIIGADIIMAFDECTPYPCEYGYARKSIEMTHRWLKRCCDRFDSTEPKYGYNQTLFPIVQGSVYKDLRIKSAEVIASYEREGNAIGGLSVGEPAEEMYAMTEVVCNILPEQKPRYLMGVGTPVNILENIALGIDMFDCVMPTRNARNGMLFTKDGIINIKNEKWKNDFSAIEENSELFSDKVYSKAYLRHLIHSGEILGAQIATLHNLHFYLWLVKEARGKIIAGEFYNWKKIMVNRLGQRL

SEQ ID NO: 57802 - protein, 376 aa, Mucilaginibacter ginsenosidivorans
  misc_feature (1)..(376): tr|A0A5B8V039|A0A5B8V039_9SPHI Queuine tRNA-ribosyltran sferase OS=Mucilaginibacter ginsenosidivorans OX=398053 GN=tgt PE=3 SV=1
MKFNLTAQDPLSKARAGEITTDHGAIQTPIFMPVGTAGTVKAVHQRELKNDIEAQIILGNTYHLYLRPGLDTLEKAGGLHKFNGWDGPILTDSGGYQVYSLTDVRKIKEEGVTFRSHIDGSKHLFTPENVMDTQRIIGADIIMALDECTPYPCEYGYARKSIEMTHRWLKRCCDRFDSTEPKYGYSQTLFPIVQGSVYKDLRVRSAEVIASFEREGNAIGGLSVGEPAEEMYAMTEVVCDILPKQKPRYLMGVGTPVNILENIALGIDMFDCVMPTRNARNGMLFTKEGIINIRNEKWKNDFTPIEADSDLFADVCYTKAYLRHLVHSGEILGAQIATLHNLHFYLWLVKEARKKIIAGEFYDWKEKMVKRLGQRL

SEQ ID NO: 57803 - protein, 376 aa, Mucilaginibacter ginsenosidivorax
  misc_feature (1)..(376): tr|A0A5B8VUT0|A0A5B8VUT0_9SPHI Queuine tRNA-ribosyltran sferase OS=Mucilaginibacter ginsenosidivorax OX=862126 GN=tgt PE=3 SV=1
MKFKLAAQDPLSKARAGEITTDHGTIETPIFMPVGTAGTVKAVHQRELKTDIQAQIILGNTYHLYLRPGLNTLESAGGLHKFNGWDGPILTDSGGYQVYSLTEVRKIKEEGVTFRSHIDGSKHLFTPENVMDIQRVIGADIIMAFDECTPYPCEYGYARRSIEMTHRWLKRCCDRFDSTEPKYGYNQTLFPIVQGSVYKDLRVKSAEVIASFEREGNAIGGLSVGEPAEEMYAMTEIVCNILPEHKPRYLMGVGTPINLLENIALGIDMFDCVMPTRNARNGMLFTKNGIINIKNEKWKNDLSPIEDDSDLFADKEYSKAYLRHLIHSGEMLGAQIATLHNLHFYLWLVKEARKKIISGEFYAWKNVMVGRLGQRL

SEQ ID NO: 57804 - protein, 376 aa, Mucilaginibacter gossypii
  misc_feature (1)..(376): tr|A0A1G7N348|A0A1G7N348_9SPHI Queuine tRNA-ribosyltran sferase OS=Mucilaginibacter gossypii OX=551996 GN=tgt P E=3 SV=1
MKFNLTAQDPLSKARAGEITTDHGTIQTPIFMPVGTAGTVKAVHQHELKQDISAQIILGNTYHLYLRPGLNTLESVGGLHKFNGWDGPILTDSGGYQVYSLTEVRKIKEEGVTFRSHIDGSKHLFTPENVMDIQRIIGADIIMAFDECTPYPCDYNYAKRSIEMTHRWLKRCCDRFDSTGPKYGYSQTLFPIVQGSVYKDLRVRSAEVIASYEREGNAIGGLSVGEPAEEMYAMTEIVCNILPQQKPRYLMGVGTPVNILENIALGIDMFDCVMPTRNARNGMLFTKNGIINIKNEKWKNDFSAIEDDSDLFADRDYSKAYLRHLIHSGEMLGAQIATLHNLHFYLWLVKEARKKIIAGEFYDWKNMMVKRLGQRL

SEQ ID NO: 57805 - protein, 376 aa, Mucilaginibacter gossypii
  misc_feature (1)..(376): tr|A0A5C1ID31|A0A5C1ID31_9SPHI Queuine tRNA-ribosyltran sferase OS=Mucilaginibacter gossypii OX=551996 GN=tgt P E=3 SV=1
MKFNLTAQDPLSKARAGEITTDHGTIQTPIFMPVGTAGTVKAVHQHELKQDISAQIILGNTYHLYLRPGLNTLESVGGLHKFNGWDGPILTDSGGYQVYSLTEVRKIKEEGVTFRSHIDGSKHLFTPENVMDIQRIIGADIIMAFDECTPYPCDYNYAKRSIEMTHRWLKRCCDRFDSTGPKYGYSQTLFPIVQGSVYKDLRVRSAEVIASYEREGNAIGGLSVGEPAEEMYAMTEIVCNILPQQKPRYLMGVGTPVNILENIALGIDMFDCVMPTRNARNGMLFTKNGIINIKNEKWKNDFSAIEDDSDLFADRDYSKAYLRHLIHSGEMLGAQIATLHNLHFYLWLVKEARKKIIAGEFYDWKNMMAKRLGQRL

SEQ ID NO: 57806 - protein, 376 aa, Mucilaginibacter gossypiicola
  misc_feature (1)..(376): tr|A0A1H8H1K6|A0A1H8H1K6_9SPHI Queuine tRNA-ribosyltran sferase OS=Mucilaginibacter gossypiicola OX=551995 GN=t gt PE=3 SV=1
MKFNLTAQDPLSKARAGEITTDHGTIQTPIFMPVGTAGTVKAVHQHELKQDISAQIILGNTYHLYLRPGLNTLESAGGLHKFNGWDGPILTDSGGYQVYSLTEVRKIKEEGVTFRSHIDGSKHLFTPENVMDIQRIIGADIIMAFDECTPYPCDYNYAKRSIEMTHRWLKRCCDRFDSTEPKYGYSQTLFPIVQGSVYKDLRVRSAEVIASYEREGNAIGGLSVGEPAEEMYAMTEVVCNILPEQKPRYLMGVGTPVNILENIALGIDMFDCVMPTRNARNGMLFTKNGIINIKNEKWKNDFSAIEDDSDLFADRDYSKAYLRHLIHSGEMLGAQIATLHNLHFYLWLVKEARKKIIAGEFYNWKNIMVKRLGQRL

SEQ ID NO: 57807 - protein, 376 aa, Mucilaginibacter gotjawali
  misc_feature (1)..(376): tr|A0A0X8X3Z5|A0A0X8X3Z5_9SPHI Queuine tRNA-ribosyltran sferase OS=Mucilaginibacter gotjawali OX=1550579 GN=tgt PE=3 SV=1
MKFNLTAQDPHSKARAGELITDHGTIQTPIFMPVGTAGTVKAVHQRELRDDIKAQIILGNTYHLYLRPGLDTIEKAGGLHKFNGWEKPILTDSGGYQVYSLTDVRKIKEEGVTFRSHIDGSKHLFTPENVMDIQRIIGADIIMAFDECTPYPCDYNYAKRSIEMTHRWLKRCCDRFDSTEPKYGYSQTLFPIVQGSVYKDLRIRSAEFIASMDREGNAIGGLSVGEPAEEMYAMTEIVCNILPEQKPRYLMGVGTPVNILENIALGIDMFDCVMPTRNARNGMLFTKNGIINIKNEKWKNDFSAIEEDSDLFSDTAYSKSYLRHLIHSGEMLGAQIATLHNLHFYLWLVTEARNKIIAGEFYNWKNIMVNRLGQRL

SEQ ID NO: 57808 - protein, 383 aa, Mucilaginibacter gracilis
  misc_feature (1)..(383): tr|A0A495J982|A0A495J982_9SPHI Queuine tRNA-ribosyltran sferase OS=Mucilaginibacter gracilis OX=423350 GN=tgt P E=3 SV=1
MLILPFQMKFKLTANDPLSKARAGEITTDHGTIQTPIFMPVGTAGTVKAVHQRELKNDIEAQIILGNTYHLYLRPGLDTLEKAGGLHKFNGWDGPILTDSGGYQVYSLTEVRKIKEEGVTFRSHIDGSKHLFTPENVMDIQRTIGADIIMAFDECTPYPCEYGYARRSLDMTHRWLKRCCDRFDSTEPKYGYSQTFFPIVQGSVYKDLRMKSAEVIASFEREGNAIGGLSVGEPAEEMYAMTEVVCDILPKEKPRYLMGVGTPVNLLENIALGIDMFDCVMPTRNGRNGMLFTKNGIINIKNEKWKNDFSPVDEDSDLFADISYSKAYLRHLIHSGEMLGAQIATLHNLHFYLWLVKQAREKIIAGNFYDWKNSMVKSLAQRL

SEQ ID NO: 57809 - protein, 376 aa, Mucilaginibacter lappiensis
  misc_feature (1)..(376): tr|A0A1N7CTU8|A0A1N7CTU8_9SPHI Queuine tRNA-ribosyltran sferase OS=Mucilaginibacter lappiensis OX=354630 GN=tgt PE=3 SV=1
MKFNLTAQDPLSKARAGEITTDHGTIQTPIFMPVGTAGTVKAVHQHELKNDIEAQIILGNTYHLYLRPGLNTLEQAGGLHKFNGWDGPILTDSGGYQVYSLTEVRKIKEEGVTFRSHIDGSKHLFTPENVMDIQRIIGADIIMAFDECTPYPCDYHYARRSIDMTHRWLKRCCDRFDSTEAKYGYSQTLFPIVQGSVYKDLRVKSAEVIASFEREGNAIGGLSVGEPAEEMYAMTEIVCNILPEQKPRYLMGVGTPINILENIALGIDMFDCVMPTRNARNGMLFTKNGIINIKNEKWKNDFSVIEDDSDLFADKNYTKAYLRHLIHSGEMLGAQIATLHNLHFYLWLVKEARKKIISGEFYNWKNIMVKQLGQRL

SEQ ID NO: 57810 - protein, 376 aa, Mucilaginibacter mallensis
  misc_feature (1)..(376): tr|A0A1H1YJV3|A0A1H1YJV3_9SPHI Queuine tRNA-ribosyltran sferase OS=Mucilaginibacter mallensis OX=652787 GN=tgt PE=3 SV=1
MKFNLKAQDPLSKARAGEITTDHGTIQTPIFMPVGTAGTVKAVHQHELKNDIKAQIILGNTYHLYLRPGLDTIEKAGGLHKFNGWDGPILTDSGGYQVYSLTEVRKIKEEGVTFRSHIDGSKHLFTPENVMDIQRTIGADIIMAFDECTPYPCEYNYAKRSIEMTHRWLKRCCDRFDSTQPKYGYDQTFFPIVQGSVYKDLRVRSAEVIASFEREGNAIGGLSVGEPAEEMYAMTEIVCDILPEQKPRYLMGVGTPVNILENIALGIDMFDCVMPTRNARNGMLFTKDGIINIKNEKWKNDFSPIEADSDLFADTAYTKAYLRHLIHSGEMLGAQIATLHNLHFYLWLVAEAREKIIAGEFYNWKKIMVNRLGQRL

SEQ ID NO: 57811 - protein, 376 aa, Mucilaginibacter oryzae
  misc_feature (1)..(376): tr|A0A316HC87|A0A316HC87_9SPHI Queuine tRNA-ribosyltran sferase OS=Mucilaginibacter oryzae OX=468058 GN=tgt PE= 3 SV=1
MKFTLTTQDPLSKARAGEITTDHGSIQTPIFMPVGTAGTVKAVHQHELKNDIEAQIILGNTYHLYLRPGLNTLESAGGLHKFNGWDGPILTDSGGYQVYSLTEVRKIKEEGVTFRSHIDGSKHLFTPENVMDIQRVIGADIIMAFDECTPYPCDYNYAKRSIEMTHRWLKRCCDRFDSTAPKYGYSQTLFPIVQGSVYKDLRVRSAEVIASFEREGNAIGGLSVGEPAEEMYAMTEIVCNILPEQKPRYLMGVGTPVNILENIALGIDMFDCVMPTRNARNGMLFTKNGIINIKNEKWKNDFSAIEDDSDLFADKAYTKAYLRHLIHSGEMLGAQIATLHNLHFYLWLVKEARKKIIAGEFYDWKNTMVKRFGQRL

SEQ ID NO: 57812 - protein, 376 aa, Mucilaginibacter paludis
  misc_feature (1)..(376): tr|H1YDZ6|H1YDZ6_9SPHI Queuine tRNA-ribosyltransferase OS=Mucilaginibacter paludis DSM 18603 OX=714943 GN=tgt PE=3 SV=1
MKFKLTATDPSSKARAGEITTDHGTIQTPIFMPVGTAGTVKAVHQRELKQDIEAQIILGNTYHLYLRPGLDTLERAGGLHKFNGWDGPILTDSGGYQVYSLTEVRKIKEEGVTFRSHIDGSKHLFTPENVMDIQRTIGADIIMAFDECTPYPCDYGYARRSIEMTHRWLQRCCTRFDETEPKYGYNQTLFPIVQGSVYKDLRVKSAEVIASFEREGNAIGGLSVGEPAEEMYAMTEVVCNILPEEKPRYLMGVGTPVNLLENIALGIDMFDCVMPTRNGRNGMLFTKNGIINIKNEKWKNDFSAIDEDSDLFADISYSKAYLRHLIHSGEMLGAQIATLHNLHFYLWLVKQAREKIISGEFYNWKNTMVKSLSQRL

SEQ ID NO: 57813 - protein, 376 aa, Mucilaginibacter pedocola
  misc_feature (1)..(376): tr|A0A1S9P7H9|A0A1S9P7H9_9SPHI Queuine tRNA-ribosyltran sferase OS=Mucilaginibacter pedocola OX=1792845 GN=tgt PE=3 SV=1
MKFTLKAQDPLSKARAGELVTDHGVIQTPIFMPVGTAGTVKAVHQRELKDDIKAQIILGNTYHLYLRPGLDIIESAGGLHKFNGWNGPILTDSGGYQVYSLTDVRKIKEEGVTFRSHVDGSKHLFTPENVMDIQRTIGADIIMAFDECTPYPCEYNYAKRSIEMTHRWLKRCCDRFDSTEPKYGYNQTLFPIVQGSVYKDLRIRSAEVIASFEREGNAIGGLSVGEPAEEMYAMTEIVCDILPQNKPRYLMGVGTPVNILENIALGIDMFDCVMPTRNARNGMLFTKNGIINMRNKKWENDFSPIEADSDLYADTQYSKAYLRHLIHSGEMLGAQIATLHNLHFYLWLVTEARNKIISGEFYEWKKTMVNRLGQRL

SEQ ID NO: 57814 - protein, 376 aa, Mucilaginibacter phyllosphaerae
  misc_feature (1)..(376): tr|A0A4Y8A8D6|A0A4Y8A8D6_9SPHI Queuine tRNA-ribosyltran sferase OS=Mucilaginibacter phyllosphaerae OX=1812349 G N=tgt PE=3 SV=1
MKFNLTAQDPLSKARAGELTTDHGVIQTPIFMPVGTAGTVKAVHQRELKDDIKAQIILGNTYHLYLRPGLNTIEQAGGLHKFNGWDGPILTDSGGYQVYSLSEVRKIKEEGVTFRSHVDGSKHLFTPENVMDIQRTIGADIIMAFDECTPYPCDYNYAKRSIEMTHRWLKRCCDRFDTTEPKYGYSQTFFPIVQGSVYKDLRVRSAEVIASFEREGNAIGGLSVGEPAEEMYAMTEVVCNILPEHKPRYLMGVGTPINLLENIALGIDMFDCVMPTRNARNGMLFTKNGIINMRNEKWKNDFSPIEADSDLYADVCYTKAYLRHLIHSGEMLGAQIATLHNLHFYLWLVKEARNKIISGEFYDWKKVMVNRLGQRL

SEQ ID NO: 57815 - protein, 376 aa, Mucilaginibacter pineti
  misc_feature (1)..(376): tr|A0A1G7HZ84|A0A1G7HZ84_9SPHI Queuine tRNA-ribosyltran sferase OS=Mucilaginibacter pineti OX=1391627 GN=tgt PE =3 SV=1
MKFKLTAQDPLSKARAGEMTTDHGVIETPIFMPVGTAGTVKAVHQRELKTDIEAQIILGNTYHLYLRPGLDTIERAGGLHKFNGWDGPILTDSGGYQVYSLAEVRKIKEEGVTFRSHIDGSKHLFTPENVMDIQRTIGADIIMAFDECTPYPCEYGYARRSIDMTHRWLKRCCDRFDSTEPKYGYNQTFFPIVQGSVYKDLRVKSAEAIASFEREGNAIGGLSVGEPAEEMYAMTEIVCNILPEQKPRYLMGVGTPINILENIALGIDMFDCVMPTRNARNGMLFTKNGIINIKNEKWKNDFSAIEDDSDLFADKEYSKSYLRHLIHSGEMLGAQIATLHNLHFYLWLVKEARKKIIAGEFYDWKNKMVKLLGQRL

SEQ ID NO: 57816 - protein, 376 aa, Mucilaginibacter polytrichastri
  misc_feature (1)..(376): tr|A0A1Q5ZUM8|A0A1Q5ZUM8_9SPHI Queuine tRNA-ribosyltran sferase OS=Mucilaginibacter polytrichastri OX=1302689 G N=tgt PE=3 SV=1
MKFNLTAQDPLSKARAGEITTDHGTIKTPIFMPVGTAGTVKAVHQHELRDDIKAQIILGNTYHLYLRPGLDTLEKAGGLHKFIGWDRPILTDSGGYQVYSLSDVRKIKEEGVTFRSHIDGSKHLFTPENAIDTQRTIGGDIIMAFDECTPYPCEYNYARRSIEMTHRWLKRCCDRFDTTEPKYGYNQTFFPIVQGSVYKDLRVKSAEVIASFEREGNAIGGLSVGEPAEEMYAMTELVCNILPTDKPRYLMGVGTPVNILENIALGIDMFDCVMPTRNARNGMLFTKDGILNMRNEKWKNDFSPIEADSDLWSDREYSKGYLRHLMTSKEILGAQIATLHNLHFYLWLVTTAREKIISGEFYDWKNIMVKRLAQRL

SEQ ID NO: 57817 - protein, 376 aa, Mucilaginibacter psychrotolerans
  misc_feature (1)..(376): tr|A0A4Y8SBX9|A0A4Y8SBX9_9SPHI Queuine tRNA-ribosyltran sferase OS=Mucilaginibacter psychrotolerans OX=1524096 GN=tgt PE=3 SV=1
MEFTLTAQDPLSKARAGELVTDHGVIQTPIFMPVGTAGTVKAVHQRELKNDIKAQIILGNTYHLYLRPGLDIIESAGGLHKFNGWEGPILTDSGGYQVYSLTDVRKIKEEGVTFRSHVDGSKHLFTPENVMDIQRVIGADIIMAFDECTPYPCDYNYAKRSIEMTHRWLKRCCDRFDNTQPKYDYNQTLFPIVQGSVYKDLRVRSAEVIASFEREGNAIGGLSVGEPAEEMYAMTEIVCDILPQSKPRYLMGVGTPVNILENIALGIDMFDCVMPTRNARNGMLFTKNGILNMRNKKWENDFSPIEADSDLYADTQYTKAYLRHLIHSGEMLGAQIATLHNLHFYLWLVTEARNKIISGEFYHWKKIMVSRLGQRL

SEQ ID NO: 57818 - protein, 376 aa, Mucilaginibacter rubeus
  misc_feature (1)..(376): tr|A0A364WKF8|A0A364WKF8_9SPHI Queuine tRNA-ribosyltran sferase OS=Mucilaginibacter rubeus OX=2027860 GN=tgt PE =3 SV=1
MKFNLTAQDPLSKARAGEITTDHGTIQTPIFMPVGTAGTVKAVHQHELKQDISAQIILGNTYHLYLRPGLNTLESAGGLHKFNGWDGPILTDSGGYQVYSLTEVRKIKEEGVTFRSHIDGSKHLFTPENVMDIQRIIGADIIMAFDECTPYPCDYNYAKRSIEMTHRWLKRCCDRFDSTGPKYGYSQTLFPIVQGSVYKDLRVRSAEVIASYEREGNAIGGLSVGEPAEEMYAMTEIVCNILPQQKPRYLMGVGTPVNILENIALGIDMFDCVMPTRNARNGMLFTKNGIINIKNEKWKNDFSAIEDDSDLFADRDYSKAYLRHLIHSGEMLGAQIATLHNLHFYLWLVKEARKKIIAGEFYDWKSMMVKRLGQRL

SEQ ID NO: 57819 - protein, 376 aa, Mucilaginibacter rubeus
  misc_feature (1)..(376): tr|A0A5C1HWF4|A0A5C1HWF4_9SPHI Queuine tRNA-ribosyltran sferase OS=Mucilaginibacter rubeus OX=2027860 GN=tgt PE =3 SV=1
MKFNLTAQDPLSKARAGEITTDHGTIQTPIFMPVGTAGTVKAVHQHELKQDISAQIILGNTYHLYLRPGLNTLESAGGLHKFNGWDGPILTDSGGYQVYSLTEVRKIKEEGVTFRSHIDGSKHLFTPENVMDIQRIIGADIIMAFDECTPYPCDYNYAKRSIEMTHRWLKRCCDRFDSTEPKYGYSQTLFPIVQGSVYKDLRVRSAEVIASYEREGNAIGGLSVGEPAEEMYAMTEIVCNILPQQKPRYLMGVGTPVNILENIALGIDMFDCVMPTRNARNGMLFTKNGIINIKNEKWKNDFSAIEDDSDLFSDRDYSKAYLRHLIHSGEMLGAQIATLHNLHFYLWLVKEARKKIIAGEFYDWKNMMVKRLGQRL

SEQ ID NO: 57820 - protein, 376 aa, Mucilaginibacter sp.
  misc_feature (1)..(376): tr|A0A556ML64|A0A556ML64_9SPHI Queuine tRNA-ribosyltran sferase OS=Mucilaginibacter sp. MAH-19 OX=2597670 GN=tg t PE=3 SV=1
MKFNLTVQDPNSKARAGEITTDHGTIQTPIFMPVGTAGTVKAVHQHELKNDIQAQIILGNTYHLYLRPGLDVLEGAGGLHKFNGWEGPILTDSGGYQVYSLSEVRKIKEEGVTFRSHIDGSKHLFTPENVMDIQRVIGADIIMAFDECTPYPCDYIYAKKSIEMTHRWLKRCCDRFDSTEPKYGYSQTLFPIVQGSVYKDLRVRSAEVIASFEREGNAIGGLSVGEPAEEMYAMTELVCDILPEQKPRYLMGVGTPINLLENIALGVDMFDCVMPTRNARNGMLFTKNGVINIKNEKWKNDFSAIEDDSDLYADKVYTKAYLRHLIHSGEMLGAQIATLHNLHFYLWLVKEARNKIIEGEFYNWKKVMVNRLGQRL

SEQ ID NO: 57821 - protein, 376 aa, Mucilaginibacter sp.
  misc_feature (1)..(376): tr|A0A1C2GJG0|A0A1C2GJG0_9SPHI Queuine tRNA-ribosyltran sferase OS=Mucilaginibacter sp. PPCGB 2223 OX=1886027 G N=tgt PE=3 SV=1
MQFKLTTTDPLSKARAGEITTDHGTIQTPIFMPVGTAGTVKAVHQRELRDDIKAQIILGNTYHLYLRPGLDTLEKAGGLHKFNGWDRPILTDSGGYQVYSLTEVRKIKEEGVTFRSHIDGSKHLFTPEGVMDIQRTIGADIIMAFDECTPYPCDYGYARRSLDMTHRWLKRCCDRFDSTEPKYGYSQTLFPIVQGSVYKDLRIKSAETIAGFGREGNAIGGLSVGEPAEEMYAMTEVVCDILPGDKPRYLMGVGTPVNILENIALGVDMFDCVMPTRNGRNGMLFTRNGIINIKNEKWKNDFSAIDEESDLYADTCYSKAYLRHLIHSGEMLGAQIATLHNLHFYLWLVKQAREKIISGEFYDWKNKMVKTLAQRL

SEQ ID NO: 57822 - protein, 376 aa, Mucilaginibacter yixingensis
  misc_feature (1)..(376): tr|A0A2T5JG12|A0A2T5JG12_9SPHI Queuine tRNA-ribosyltran sferase OS=Mucilaginibacter yixingensis OX=1295612 GN=t gt PE=3 SV=1
MNFKLQAQDPLSKARAGEITTDHGTIQTPIFMPVGTAGTVKAVHQHELLNDVNAQIILGNTYHLYLRPGLNTLEQAGGLHKFNGWDKPILTDSGGYQVYSLTEVRKIKEEGVTFRSHIDGSKHLFTPENVMDTQRTIGADIIMAFDECTPYPCDYNYARRSLDMTHRWLKRCCDRFDSTEPKYGYSQTLFPIVQGSVYKDLRIKSAETIASFEREGNAIGGLSVGEPAEEMYAMTEVVCNILPEQKPRYLMGVGTPVNILENIALGIDMFDCVMPTRNARNGMLFTKDGIINIRNEKWKNDFSAIEANSDLHVDRHHTKAYLRHLITSGEILGAQIASLHNLHFYLWLVNTAREKIIAGEFYEWKKTMVNRLGQRL

SEQ ID NO: 57823 - protein, 374 aa, Mucinivorans hirudinis
  misc_feature (1)..(374): tr|A0A060RAR0|A0A060RAR0_9BACT Queuine tRNA-ribosyltran sferase OS=Mucinivorans hirudinis OX=1433126 GN=tgt PE= 3 SV=1
MKFTIEKVCGKARAARFSTDHGVVQTPIFMPVGTLGSVKGVFHNQLAEDIKAQIILGNTYHLYLRPGRETLEMAGGLHKFSAWDRPILTDSGGFQVFSLADCRKITEEGCRFSSHIDGSKHLFTPENVVDTQRIIGADIMMAFDECPPGTAEYKYAEKSLDLTNRWLERCFNQYEKSAPKYGHYQSLFPIVQGVTYPDLRVKSAEFVQQFGADGYAIGGLAVGEPAPMMYEMIEVVNGVLPEDKPRYLMGVGTPVNLLEAIERGVDMFDCVMPTRNGRNGMLFTSEGIINIRNEKWKNDFTPIDTAGVSFVDCTYTKAYLRHLSIAGEMLASQIASIHNLAFYLWLVGEARNQIICGTFAEWKTVMVEKLQRRL

SEQ ID NO: 57824 - protein, 370 aa, Mucispirillum schaedleri
  misc_feature (1)..(370): tr|V2Q1M0|V2Q1M0_9BACT Queuine tRNA-ribosyltransferase OS=Mucispirillum schaedleri ASF457 OX=1379858 GN=tgt PE =3 SV=1
MFSFDIEYKDSETSARAGRIKTPHGEIETPIFMPVGTVGSVKALSPEDLNNAGAQIILGNTYHLYLRPGTEVLKHFGGLAAFSSWNKPTLTDSGGFQVFSLAELNKITEDGVSFKSHLDGSSLYLNPEKSIEIQEAIGSDIIMSFDECIPYPATYEYVKNSVDRTARWALRGKNAKKRDEQALFGIVQGGIYEDMRKRSAEQLTSIGFDGYSIGGLSVGEEISTMYEICGYTASLLPQDKPRYLMGVGTPEDILTCIGLGVDMFDCVMPTRNARNGTLFTSSGKFSIKRADLAFSDEKIDENCSCYTCRNFSRGYLRHLYKAGEILALRLNSIHNISFYLSIVKNSRNAVKEGKFKSFQQEMLYRLKNNN

SEQ ID NO: 57825 - protein, 402 aa, Mumia flava
  misc_feature (1)..(402): tr|A0A2M9BDA4|A0A2M9BDA4_9ACTN Queuine tRNA-ribosyltran sferase OS=Mumia flava OX=1348852 GN=tgt PE=3 SV=1
MSFTFTVGDRLDGRHGRTGTISTPHGEIRTPAFVPVGTKATVKAVLPETMREIGSQALLANAYHLYLQPGSDIVDEAGGLGAFMNWDGPTFTDSGGFQVLSLGAGFRKVLAMDTAGRAADDVIAEGKERLAHIDDDGVTFKSHLDGSKHRFTPETSMQIQHRLGADIIFAFDECTTLMNTRDYQERSVERTQAWAVRCVAEHRRLTEERADKPYQALFGVVQGAQFEDLRRQSARGLVELGFDGYGIGGALEKDQLGTIVSWVCDELPEDRPRHLLGIGEPDDLFAGIENGADTFDCVSPSRVARTSRVYTVDGQRNLLVAASKRRFEPIDDACDCYTCGHYTVAYLHHLFKAKEYLAATLVTIHNERFIVRLVDRIRDAVGDGSYDALKSEFLGRYYASRS

SEQ ID NO: 57826 - protein, 406 aa, Mumia sp.
  misc_feature (1)..(406): tr|A0A5C4MLJ6|A0A5C4MLJ6_9ACTN Queuine tRNA-ribosyltran sferase OS=Mumia sp. 527 OX=2585212 GN=tgt PE=3 SV=1
MTFSFSVSARLADSVDGAQGRTGVISTPHGEISTPAFIPVGTKATVKAVLPETMADLGSQALLANAYHLYLQPGSDIVDEAGGLGAFMNWPGPTFTDSGGFQVLSLGAGFRKVLAMDTTGRKADDVIAEGKERLAHIDDEGVTFKSHLDGSKHRFTPEVSMQIQHQLGADIIFAFDECTTLMNTRDYQERSVARTQAWAVRCVAEHEKLTAERAAKPYQALFGVVQGAQYEDLRRRSARGLVDLGFDGFGIGGALEKEQLGTIVGWVSEELPEDKPRHLLGIGEPDDLFTGVENGADTFDCVSPSRVARSSRVYTHDGQRNLAVASSRRSFAPIDAECDCYTCAHYTEAYLHHLFKAKEYNAATLVTIHNERFIVRLVDRIRASIEDGTYADLKAEFLGRYYARRG

SEQ ID NO: 57827 - protein, 382 aa, Muribacter muris
  misc_feature (1)..(382): tr|A0A4Y9K6C3|A0A4Y9K6C3_9PAST Queuine tRNA-ribosyltran sferase OS=Muribacter muris OX=67855 GN=tgt PE=3 SV=1
MKYELKKTSGNARRGRLTFSRPKGEFHVETPAFMPVGTYGTVKGMTPEEVQATGAQIILGNTFHLWLRPGQEVMRQHGDLHDFMQWHGPILTDSGGFQVFSLGKLRKIKEEGVHFQNPISGEKIFLSPEKSMEIQYDLGSDIVMIFDECTPYPATFDYAKQSMEMSLRWAKRSRDRFDELENPNALFGIIQGGVYEELRKISVEGLVEIGFDGYAVGGLAVGEPKEDMHRILEYVCPQIPADKPRYLMGVGKPEDLIEGVRRGIDMFDCVMPTRNARNGHLFVTNGVVKIRNAKYRNDTTPLDAECDCYTCKNYTKAYLYHLDKCNEILGARLNTIHNLRYYQRLMAEIRQAIEDDRFDDFVVEFYQRIGKDVPPLQLAQSD

SEQ ID NO: 57828 - protein, 382 aa, Muribacter muris
  misc_feature (1)..(382): tr|A0A0J5P8S7|A0A0J5P8S7_9PAST Queuine tRNA-ribosyltran sferase OS=Muribacter muris OX=67855 GN=tgt PE=3 SV=1
MKYELKKTSGNARRGRLTFSRPKGEFHVETPAFMPVGTYGTVKGMTPEEVQATGAQIILGNTFHLWLRPGQEVMRQHGDLHDFMQWHGPILTDSGGFQVFSLGKLRKIKEEGVHFQNPISGEKIFLSPEKSMEIQYDLGSDIVMIFDECTPYPATFDYAKQSMEMSLRWAKRSRDRFDELENPNALFGIIQGGVYEELRKISVEGLVKIGFDGYAVGGLAVGEPKEDMHRILEYVCPQIPADKPRYLMGVGKPEDLVEGVRRGIDMFDCVMPTRNARNGHLFVTNGVVKIRNAKYRNDTTPLDAECDCYTCKNYTKAYLYHLDKCNEILGVRLNTIHNLRYYQRLMAEIRQAIEDDRFDDFVVEFYQRIGKDVPPLQLAQSD

SEQ ID NO: 57829 - protein, 376 aa, Muribaculaceae bacterium
  misc_feature (1)..(376): tr|A0A4Q0IKZ9|A0A4Q0IKZ9_9BACT Queuine tRNA-ribosyltran sferase OS=Muribaculaceae bacterium Isolate-007 (NCI) O X=2489217 GN=tgt PE=3 SV=1
MEFQLQATDALSNARAGLITTDHGRIETPVFMPVGTVGSVKAVHQHELRDDVNAQIILGNTYHLYLRPGTEILRQAGGLHKFIGWERPILTDSGGFQVFSLSSNRKLKEEGAYFRSHIDGSKHLFTPENVVDIERIIGADIMMALDECPPGTAEYDYAKKSLGLTMRWLQRGWKRYKETEGLYGYRQAYFPIVQGCTYPDLRRQAAREVAELGADGNAIGGLAVGEPAEVMYDMIDIVNEILPADRPRYLMGVGTPANILEAIERGVDMMDCVMPTRNGRNGMLFTRHGVMNMRNKKWADDFSPLQEDGPSYVDRAYSKAYVRHLFASQEILGMQIASIHNLAFYLWLTREARAHILAGDFKQWKAEMLECVTRKL

SEQ ID NO: 57830 - protein, 376 aa, Muribaculaceae bacterium
  misc_feature (1)..(376): tr|A0A3N2NNS2|A0A3N2NNS2_9BACT Queuine tRNA-ribosyltran sferase OS=Muribaculaceae bacterium Isolate-114 (HZI) O X=2486475 GN=tgt PE=3 SV=1
MKFKIDATTPFSSARAGEITTDHGVIPTPIFMPVGTVGSVKGVHMRELREDIDAKIILGNTYHLYLRPGLDVIRGAGGLHKFNSWNRPILTDSGGFQVFSLSSNRKLKEEGAYFRSHIDGSKHLFTPEGVVDIQRTIGSDIMMALDECPPGTSDFSYARKSLDLTHRWLKRGWQRYQETEGLYGYSQAYFPIVQGCVYPELRKESARFVSDLGADGNAIGGLAVGEPTEKMYEMIEVVNDILPSDRPRYLMGVGTPANILEAIDRGVDMMDCVMPTRNGRNGMLFTSNGIMNMRNKKWADDFSELDPDGTAWVDHEYSRAYVRHLFVSQELLAMQIASVHNLAFYLHLVKEARKHIVAGDFASWKKEMIERVTRRL

SEQ ID NO: 57831 - protein, 376 aa, Muribaculum intestinale
  misc_feature (1)..(376): tr|A0A4S1ZM06|A0A4S1ZM06_9BACT Queuine tRNA-ribosyltran sferase OS=Muribaculum intestinale OX=1796646 GN=tgt PE =3 SV=1
MEFQLQATDALSNARAGLITTDHGRIETPVFMPVGTVGSVKAVHQHELRDDVNAQIILGNTYHLYLRPGTEILRQAGGLHKFIGWERPILTDSGGFQVFSLSSNRKLKEEGAYFRSHIDGSKHLFTPENVVDIERIIGADIMMALDECPPGTAEYDYAKKSLGLTMRWLQRGWKRYKETEGLYGYRQAYFPIVQGCTYPDLRRQAAREVAELGADGNAIGGLAVGEPAEVMYDMIDIVNEILPADRPRYLMGVGTPANILEAIERGVDMMDCVMPTRNGRNGMLFTRHGVMNMRNKKWADDFSPLQEDGPSYVDRAYSKAYVRHLFASQEILGMQIASIHNLAFYLWLTREARAHILAGDFKQWKTEMLECVTRKL

SEQ ID NO: 57832 - protein, 376 aa, Muribaculum intestinale; identical to SEQ ID NO: 57829
  misc_feature (1)..(376): tr|A0A1B1S6M0|A0A1B1S6M0_9BACT Queuine tRNA-ribosyltran sferase OS=Muribaculum intestinale OX=1796646 GN=tgt PE =3 SV=1

SEQ ID NO: 57833 - protein, 376 aa, Muribaculum sp.
  misc_feature (1)..(376): tr|A0A4P7VD49|A0A4P7VD49_9BACT Queuine tRNA-ribosyltran sferase OS=Muribaculum sp. TLL-A4 OX=2530390 GN=tgt PE= 3 SV=1
MKFELQATDKFSNARAGLITTDHGPIETPIFMPVGTVGSVKAVHQRELDEDIRAQIILGNTYHLYLRPGIDILERAGGLHRFNGWKKPILTDSGGFQVFSLSANRKLKEEGAYFRSHIDGSKHLFTPEGVVDIQRSIGADIMMALDECPSGTADYDYAKKSLGLTTRWLQRGWKRYKETEGRYGYSQAYFPIVQGCTYADLRRESAKTVADLGADGNAIGGLAVGEPAEVMYDMIEVVNEILPADKPRYLMGVGTPANILEAIERGVDMMDCVMPTRNGRNGMLFTAHGIMNMRNKKWADDFSPLQEDGPSYVDRFYTKAYVRHLFAAQEILGMQIASIHNLAFYLWLVGEARKHILAGDFKAWKDVMVERVTRRL

SEQ ID NO: 57834 - protein, 376 aa, Muribaculum sp.
  misc_feature (1)..(376): tr|A0A4V3RBN0|A0A4V3RBN0_9BACT Queuine tRNA-ribosyltran sferase OS=Muribaculum sp. NM65_B17 OX=2516961 GN=tgt P E=3 SV=1
MKFELQATDKFSNARAGLITTDHGPIETPIFMPVGTVGSVKAVHQRELDEDIKAQIILGNTYHLYLRPGIDILERAGGLHRFNGWKKPILTDSGGFQVFSLSANRKLKEEGAYFRSHIDGSKHLFTPEGVVDIQRSIGADIMMALDECPSGTADYDYAKKSLGLTTRWLQRGWKRYKETEGRYGYSQAYFPIVQGCTYADLRRESAKTVADLGADGNAIGGLAVGEPAEVMYDMIEVVNEILPADKPRYLMGVGTPANILEAIERGVDMMDCVMPTRNGRNGMLFTAHGIMNMRNKKWADDFSPLQEDGPSYVDRFYTKAYVRHLFAAQEILGMQIASIHNLAFYLWLVGEARKHILAGDFKAWKDVMVERVTRRL

SEQ ID NO: 57835 - protein, 376 aa, Muricauda antarctica
  misc_feature (1)..(376): tr|A0A1M6WH00|A0A1M6WH00_9FLAO Queuine tRNA-ribosyltran sferase OS=Muricauda antarctica OX=1055723 GN=tgt PE=3 SV=1
MKFTLLQKDNKSKARAGEITTDHGTIQTPIFMPVGTVASVKGVHQRELRDDIDPDIILGNTYHLYLRPSTGILEEAGGLHKFMGWDRNILTDSGGYQVYSLSGNRKIKEEGVKFKSHIDGSNHFFTPENVMEIQRTIGADIIMAFDECTPYPCDYQYAKRSMHLTHRWLDRCISHLEKLPFKYGYSQSFFPIVQGSTYKDLRKQSAEYIASVGAEGNAIGGLSVGEPAEEMYEMAELVCDILPEDKPRYLMGVGTPINILENIALGVDMFDCVMPTRNARNGMLFTAHGTINIKNKKWENDFSPLDEMGITFVDTEYSKAYLRHLFAANEYLGKQIATIHNLGFYLWLVRTARERILAGDFQEWKTKMVQQMDKRL

SEQ ID NO: 57836 - protein, 394 aa, Muricauda lutaonensis
  misc_feature (1)..(394): tr|A0A0D5YVN3|A0A0D5YVN3_9FLAO Queuine tRNA-ribosyltran sferase OS=Muricauda lutaonensis OX=516051 GN=tgt PE=3 SV=1
MLRYCCGQDGYICVQILRLRFTLEQTDPKSKARAGKLVTDHGTIETPIFMPVGTVASVKGVHQRELRDEVDPDIILGNTYHLYLRPGMDILEKAGGLHKFMGWDRNILTDSGGYQVYSLSANRKIKEEGVKFKSHIDGSLHFFTPENVMEIQRTIGADIIMAFDECTPYPCDYGYAKRSMQMTHRWLDRCLAHLEKLPFKYGYSQTFFPIVQGSTYKDLRIQSAEYIASVGAEGNAIGGLSVGEPAEEMYKMAEAVCDILPEDKPRYLMGVGTPINILENIALGVDMFDCVMPTRNARNGMLFTAEGTINIKNKKWEDDFSPIDEMGITFVDTEYSKAYLRHLFAANEYLGKQIATIHNLGFYRWLVKTAREHILTGDFAEWKQTMVTKMNKRL

SEQ ID NO: 57837 - protein, 376 aa, Muricauda lutimaris
  misc_feature (1)..(376): tr|A0A3A1N716|A0A3A1N716_9FLAO Queuine tRNA-ribosyltran sferase OS=Muricauda lutimaris OX=475082 GN=tgt PE=3 SV =1
MDFTLIQKDNKTKARAGELTTDHGIIDTPIFMPVGTVASVKGVHQRELKDEINPDIILGNTYHLYLRPKTGILQEAGGLHKFMGWDRPILTDSGGYQVYSLSDNRKIKEEGVKFKSHIDGSRHLFTPENVMEIQRTIGADIIMAFDECTPYPCDYQYAKRSMHMTHRWLDRCINHLEKLPYTYDYSQSFFPIVQGSTYKDLRKQSAEYIASVEAEGNAIGGLSVGEPAEEMYEMAELVCDILPEDKPRYLMGVGTPINILENIALGVDMFDCVMPTRNARNGMLFTAHGTINIKNKKWENDFSPLDEMGITFVDTEYSKAYLRHLFAANEYLGKQIATIHNLGFYLWLVRTARERILAGDFLEWKTKMVNQMDKRL

SEQ ID NO: 57838 - protein, 376 aa, Muricauda olearia
  misc_feature (1)..(376): tr|A0A444VHE7|A0A444VHE7_9FLAO Queuine tRNA-ribosyltran sferase OS=Muricauda olearia OX=552546 GN=tgt PE=3 SV=1
MKFTLVQKDTKSKARAGEMTTDHGTIQTPIFMPVGTVASVKGVHQRELTDEINPDIILGNTYHLYLRPGTSILQQAGGLHKFMGWERPILTDSGGYQVYSLSDNRKIKEEGVKFKSHIDGSHHVFTPENVMEIQRTIGADIIMAFDECTPYPCDYNYAKRSMHMTHRWLDRCMAHLEKLPYTYDYTQTFFPIVQGSTYKDLRKQSAEYIASVGAEGNAIGGLSVGEPAEEMYEMAELVCDILPEDKPRYLMGVGTPINILENIALGVDMFDCVMPTRNARNGMLFTAHGTINIKNKKWENDFSPIDEMGITFVDTEYSKAYLRHLFAANEYLGKQIATIHNLGFYLWLVRTARERILAGDFLEWKNQMVQQMDKRL

SEQ ID NO: 57839 - protein, 376 aa, Muricauda pacifica
  misc_feature (1)..(376): tr|A0A2T0M6Y3|A0A2T0M6Y3_9FLAO Queuine tRNA-ribosyltran sferase OS=Muricauda pacifica OX=1080225 GN=tgt PE=3 SV =1
MKFDLIQKDKATKARAATLETDHGVIQTPIFMPVGTVASVKAVHQRELKEDINPDIILGNTYHLYLRPGLDVLEKAGGLHQFMGWDRNILTDSGGYQVYSLSDNRKIKEEGVTFKSHIDGSKHFFSPESAMDIQRTIGADIIMAFDECTPYPCDYDYAKKSMHMTHRWLDRCISHFNSTPPKYGYEQTLFPIVQGSTYKDLRKQSAEYIASVEAEGNAIGGLSVGEPAEEMYEMSEIVCDILPEDKPRYLMGVGTPINILENIALGVDMFDCVMPTRNARNGMLFTAHGTINIKNKKWEADFSPIDEMGITFVDTEYSKSYLRHLFAANEFLGKQIATIHNLGFYLWLVRTARERILAGDFLEWKIKMVQQMDKRL

SEQ ID NO: 57840 - protein, 376 aa, Muricauda ruestringensis
  misc_feature (1)..(376): tr|G2PMW9|G2PMW9_MURRD Queuine tRNA-ribosyltransferase OS=Muricauda ruestringensis (strain DSM 13258 / CIP 107 369 / LMG 19739 / B1) OX=886377 GN=tgt PE=3 SV=1
MDFTLVQKDSKSKARAGELTTDNGNIQTPIFMPVGTVASVKGVHQRELKDEINPDIILGNTYHLFLRPGTGILEEAGGLHKFMGWDRPILTDSGGYQVYSLSDNRKIKEEGVKFKSHIDGSRHFFTPENVMEIQRTIGADIIMAFDECTPYPCDYQYAKRSMHMTHRWLDRCINHLEKLPFKYGYSQSFFPIVQGSTYKDLRKQSVEYIASVEAEGNAIGGLSVGEPAEEMYEMAELVCDILPEDKPRYLMGVGTPINILENIALGVDMFDCVMPTRNARNGMLFTAHGTINIKNKKWENDFSPIDEMGITFVDTEYSKAYLRHLFAANEYLGKQIATIHNLGFYLWLVRTARERILAGDFLEWKTKMVNQMDKRL

SEQ ID NO: 57841 - protein, 376 aa, Muricauda sp.
  misc_feature (1)..(376): tr|A0A2N0GIX9|A0A2N0GIX9_9FLAO Queuine tRNA-ribosyltran sferase OS=Muricauda sp. ES.050 OX=1798204 GN=tgt PE=3 SV=1
MDFTLLQKDSKTKARAGELITDHGNIQTPIFMPVGTVATVKGVHQRELKDEINPDIILGNTYHLYLRPKTGILEEAGGLHNFMGWDRPILTDSGGYQVYSLSDNRKIKEEGVKFKSHIDGSRHLFTPENVMEIQRTIGADIIMAFDECTPYPCDYQYAKRSMHMTHRWLDRCIDHLEKLPFKYGYSQSFFPIVQGSTYKDLRKQSAEYIASMEAEGNAIGGLSVGEPAEEMYEMAELVCDILPEDKPRYLMGVGTPINILENIALGVDMFDCVMPTRNARNGMLFTAHGTINIKNKKWENDFSPIDEMGITYVDTEYSKAYLRHLFAANEYLGKQIATIHNLGFYLWLVRTARERILAGDFLEWKTKMVDQMDKRL

SEQ ID NO: 57842 - protein, 376 aa, Muricauda sp.
  misc_feature (1)..(376): tr|A0A3R7W284|A0A3R7W284_9FLAO Queuine tRNA-ribosyltran sferase OS=Muricauda sp. TMED12 OX=1986608 GN=tgt PE=3 SV=1
MDFTLIQKDSKTKARAGKLITDHGTIDTPIFMPVGTVASVKGVHQRELKDEINPDIILGNTYHLYLRPKTGILQEAGGLHKFMGWDRPILTDSGGYQVYSLSDNRKIKEEGVKFKSHIDGSRHLFTPENVMEIQRTIGADIIMAFDECTPYPCDYQYAKRSMHMTHRWLDRCINHLEKLPYTYDYSQSFFPIVQGSTYKDLRKQSAEYIASVEAEGNAIGGLSVGEPAEEMYEMAELVCDILPEDKPRYLMGVGTPINILENIALGVDMFDCVMPTRNARNGMLFTAHGTINIKNKKWENDFSPLDEMGITFVDTEYSKAYLRHLFAANEYLGKQIATIHNLGFYLWLVRTARERILAGDFLEWKTKMVNQMDKRL

SEQ ID NO: 57843 - protein, 376 aa, Muricauda taeanensis
  misc_feature (1)..(376): tr|A0A3A1NVH5|A0A3A1NVH5_9FLAO Queuine tRNA-ribosyltran sferase OS=Muricauda taeanensis OX=1005926 GN=tgt PE=3 SV=1
MKFTLLQKDNKSKARAGEITTDHGTIQTPIFMPVGTVASVKGVHQRELRDDIDPDIILGNTYHLYLRPGTGILEEAGGLHKFMGWDRNILTDSGGYQVYSLSGNRKIKEEGVKFKSHIDGSNHFFTPENVMEIQRTIGADIIMAFDECTPYPCDYQYAKRSMHLTHRWLDRCISHLEKLPFKYGYSQSFFPIVQGSTYKDLRKQSAEYIASVGAEGNAIGGLSVGEPAEEMYEMAELVCDILPEDKPRYLMGVGTPINILENIALGVDMFDCVMPTRNARNGMLFTAHGTINIKNKKWENDFSPLDEMGITFVDTEYSKAYLRHLFAANEYLGKQIATIHNLGFYLWLVRTARERILAGDFQEWKTKMVQQMDKRL

SEQ ID NO: 57844 - protein, 376 aa, Muricauda zhangzhouensis
  misc_feature (1)..(376): tr|A0A1H2Z761|A0A1H2Z761_9FLAO Queuine tRNA-ribosyltran sferase OS=Muricauda zhangzhouensis OX=1073328 GN=tgt P E=3 SV=1
MDFTLVQKDKQSKARAGIMTTDHGEIQTPIFMPVGTVASVKGVHQRELKDEINPDIILGNTYHLYLRPSTGILEEAGGLHKFMGWDRNILTDSGGYQVYSLSDNRKIKEEGVKFKSHIDGSHHVFTPENVMEIQRTIGADIIMAFDECTPYPCDYQYAKRSMHLTHRWLDRCINHLETLPFKYGYSQSFFPIVQGSTYKDLRKQSAEYIASVGAEGNAIGGLSVGEPAEEMYEMTEIVCDILPEDKPRYLMGVGTPINILENIALGIDMFDCVMPTRNARNGMLFTAHGTINIKNKKWENDFSPIDEMGITFVDTEYSKAYLRHLFAANEYLGKQIATIHNLGFYLWLTRTARERILAGDFYEWKNKMVQQMDKRL

SEQ ID NO: 57845 - protein, 378 aa, Muricomes intestini
  misc_feature (1)..(378): tr|A0A4R3KHV7|A0A4R3KHV7_9FIRM Queuine tRNA-ribosyltran sferase OS=Muricomes intestini OX=1796634 GN=tgt PE=3 S V=1
MYELLKRDGLAKRGRLHTVHGIIETPVFMNVGTAAAIKGAVSADDLKTIKTQVELSNTYHLHVRPGDKVVKKLGGLHRFMSWDKPILTDSGGFQVFSLADLRKIKEEGVHFHSHIDGRKIFMGPEESMQIQSNLASTIAMAFDECPSSVADREYMTNSVARTTRWLKRCKAEMARLNALPDTINKEQMLFAINQGGIYEDIRVEHAKQIAEFDMEGYAVGGLAVGESHEEMYNILDVVVPYLPAEKPVYLMGVGTPANILEGVERGVDFFDCVYPSRNGRHGHVYTNRGKLNLFNARYELDDRPIEEGCKCPACQSYSRAYIRHLLKAKEMLGMRLCVLHNLYFYNTMMEEIRNAIDAGEFKGYKKRKLDGMAGTEGP

SEQ ID NO: 57846 - protein, 376 aa, Muriicola sp.
  misc_feature (1)..(376): tr|A0A411ED79|A0A411ED79_9FLAO Queuine tRNA-ribosyltran sferase OS=Muriicola sp. MMS17-SY002 OX=2507538 GN=tgt PE=3 SV=1
MQFKLQHTDPGSKARAAEMITDHGSIKTPIFMPVGTVASVKGVHQRELREEIDPDIILGNTYHLYLRPKPEILQQAGGLHAFMGWDRNILTDSGGYQVYSLSGNRKIREEGVKFKSHIDGSTHMFTPERVMEIQRIIGADIIMAFDECTPYPCDYKYAERSMHMTHRWLERCITHLEKTPLLYDYSQTFFPIVQGSTYKDLRKQSAEYIAGVGAEGNAIGGLSVGEPAEEMYGMTEVVCDILPEDKPRYLMGVGTPINLLENIALGIDMFDCVMPTRNGRNGMLFTAEGTINIKNKKWENDFSAIDEHGPTFVDKEYSKAYLRHLFVANEYLGKQIATIHNLGFYLWLVREARNHILAGDFTPWKAKMVKQMDKRL

SEQ ID NO: 57847 - protein, 376 aa, Mycoavidus cysteinexigens
  misc_feature (1)..(376): tr|A0A2Z6EXK7|A0A2Z6EXK7_9BURK Queuine tRNA-ribosyltran sferase OS=Mycoavidus cysteinexigens OX=1553431 GN=tgt PE=3 SV=1
MLTFDLLNVDGQARRGRLKLNHGVIETPVFMPVGTYGAVKAMAPVELAQIEAQIILGNTFHLWLRPGLDAIAAHGGLHRFIGWQKPILTDSGGFQVFSLGALRKITEEGVAFASPLNGDRLFLSPEVSMQIQHQLNSDIVMQFDECTPYTTAGIPTTLSQAADSMHLSLRWARRSINEFNQLSNPNALFGIVQGGMHESLRDESLAGLMELDFAGYAIGGLSVGEPKEDMMRILNHVAPRLPADKPHYLMGVGTPEDLVAGVAAGIDMFDCVMPTRNARNGWLFTRFGDLKIKNAVHRKDPRPLDETCPCYTCSHFSRAYLHHLHRIGEILGARLNTLHNLYYYLELMREMRSAISARRFGTFVQKFKAERARGVG

SEQ ID NO: 57848 - protein, 399 aa, Mycobacteriaceae bacterium
  misc_feature (1)..(399): tr|A0A1A0N0A8|A0A1A0N0A8_9MYCO Queuine tRNA-ribosyltran sferase (Fragment) OS=Mycobacteriaceae bacterium 148226 8.1 OX=1834080 GN=A5662_22600 PE=3 SV=1
MSEPSFTIEAELPGRLGRAGVIRTPHGDIHTPAFIAVGTQATVKAVLPETMKEHGAQAILANAYHLYLQPGADIIEEAGGLGAFMNWPGPTFTDSGGFQVLSLGAGFRKVLAMDADRVQADDVIAEGKERLARVDDDGVTFTSHLNGSTHRFTPEVSIGIQHQIGADIIFAFDELTTLVNTRGYQEESVQRTHRWAVRCLAEHRRLAAAHPDRHPQALFGVVQGAQYEDLRRQATRGLVSIVDDDGRGFDGYGIGGALEKQNLATIIGWVSSELPADKPRHLLGISEPDDLFDAIAAGADTFDCVSPSRVARNAAVYSAAGRFNITGARYRRDFSPIDADCDCYTCGHYTRAYLHHLFKAKEMLAATLCTIHNERFIIRLVDQIRMAIRAGEFDELRAE

SEQ ID NO: 57849 - protein, 410 aa, Mycobacterium aquaticum
  misc_feature (1)..(410): tr|A0A1X0AXJ4|A0A1X0AXJ4_9MYCO Queuine tRNA-ribosyltran sferase OS=Mycobacterium aquaticum OX=1927124 GN=tgt PE =3 SV=1
MGEPYFTVEAELPGRLGRVGVIHTPHGDIRTPAFIAVGTAATVKSVLPETMKQLGAQAILANAYHLYLQPGPEIVAEAGGLGAFMNWPGPTFTDSGGFQVMSLGVGFKKVLAMDTSRLQTDDIIAKGKERLAVVDEDGVTFRSHLDGSKHRFTPEVSIGIQHQLGADIIFAFDELTTLVNTRGYQERSVQRTHEWAVRCLAEHQRLQSSTPERPRQALFGVVQGAQYEDLRRQAASGLAGIRTADGHGFDGYGIGGALEKQNLATIVGWVSSELPADKPRHLLGISEPDDLFDAVAAGADTFDCVSPSRVARNAAVYSATGRFNITGARYKRDFTPIDAECDCYTCANYSRAYIRHLFKAKEMLSATLCTIHNERFVIRLVDQIRAAIVAGEFDELRAHVLGRYYGAPVR

SEQ ID NO: 57850 - protein, 420 aa, Mycobacterium chubuense
  misc_feature (1)..(420): tr|I4BQP6|I4BQP6_MYCCN Queuine tRNA-ribosyltransferase OS=Mycobacterium chubuense (strain NBB4) OX=710421 GN=t gt PE=3 SV=1
MAAPSTPRPRDSSEPFFTVESHLPGRLGRSGVIHTPHGDIHTPAFIAVGTQATVKAVLPEMIEQLGAQAVLANAYHLYLQPGPDVVEEAGGLGTFMNWPGPTFTDSGGFQVMSLGVGFKKVLAMDTERVQADDIMASGKERLAHVDDDGVTFRSHLNGSTHRFTPEVSIGIQHQLGADIIFAFDELTTLVNTRGYQERSVRRTHDWAVRCLAEHRRLSALRPDKPPQALFGVVQGAQYEDLRRQAARGLTEIVDPDGRGFDGYGIGGALEKQNLATIVGWVGEELPDDKPRHLLGISEPDDLFAAVEAGADTFDCVSPSRVARNGAVYSVTGRFNITGARYRRDFTPIDAECDCYTCANYTRAYLHHLFKAKEMLASTLCTIHNERFVIRLVDDIRAAIPAGRFDELREHVLGRYYARAI

SEQ ID NO: 57851 - protein, 411 aa, Mycobacterium dioxanotrophicus
  misc_feature (1)..(411): tr|A0A1Y0BXQ0|A0A1Y0BXQ0_9MYCO Queuine tRNA-ribosyltran sferase OS=Mycobacterium dioxanotrophicus OX=482462 GN= tgt PE=3 SV=1
MGEPYFTVEAELPGRLGRVGVIHTPHGDIRTPAFIAVGTAATVKSVLPETMKQLGAQAILANAYHLYLQPGPEIVAEAGGLGAFMNWAGPTFTDSGGFQVMSLGVGFKKVLAMDTSRLQTDDIIAKGKERLAVVDEDGVTFRSHLDGSKHRFTPEVSIGIQHQLGADIIFAFDELTTLVNTRGYQERSVQRTHEWAVRCLAEHQRLQSSTPERPRQALFGVVQGAQYEDLRRQAASGLAGIRTADGHSFDGYGIGGALEKQNLATIVGWVSSELPADKPRHLLGISEPDDLFDAVAAGADTFDCVSPSRVARNAAVYSATGRFNITGARYKRDFTPIDAECDCYTCANYSRAYIRHLFKAKEMLSATLCTIHNERFVIRLVDQIRAAIVAGEFDELRAHVLGRYYGTAVRK

SEQ ID NO: 57852 - protein, 415 aa, Mycobacterium goodii
  misc_feature (1)..(415): tr|A0A2M9FD73|A0A2M9FD73_MYCGD Queuine tRNA-ribosyltran sferase OS=Mycobacterium goodii OX=134601 GN=tgt PE=3 S V=1
MDQPYFTVTAELDDGRLGRVGTIHTPHGDINTPAFIPVGTAATVKSVLPETMEQLGAQAVLANAYHLYLQPGPDIVAEAGGLGAFMNWRGPTFTDSGGFQVLSLGVGFKKVLAMDTNRVQADDIIAEGKERLAHVDDDGVTFRSHLNGSLHRFTPEVSIGIQYQLGADIIFAFDELTTLVNTRAYQERSVQRTHEWAVRCLAEHHRLQEQSPERPRQALFGVVQGAQYEDLRRQAARGLAGIGEHEGPAAGLSFDGFGIGGALEKQNLATIVGWVSSELPRDKPRHMLGISEPDDLFAAVAAGADTFDCVSPSRVARNAAIYTATGRYNITGARYKRDFTPLDPECDCYTCANYSRAYIRHLFKAKEMLSATLCTIHNERFVIRLVDRIRAAMLAGEFDELRAEVLGRYYGTAVR

SEQ ID NO: 57853 - protein, 417 aa, Mycobacterium goodii
  misc_feature (1)..(417): tr|A0A0K0X1E4|A0A0K0X1E4_MYCGD Queuine tRNA-ribosyltran sferase OS=Mycobacterium goodii OX=134601 GN=tgt PE=3 S V=1
MEQPYFTVTAELDGRLGRVGTIHTPHGDIHTPAFIPVGTAATVKSVLPETMEQLGAQAILANAYHLYLQPGPDIVAEAGGLGAFMNWPGPTFTDSGGFQVLSLGVGFKKVLAMDTNRVQADDIIAEGKERLAHVDDDGVTFRSHLNGSLHRFTPEVSIGIQYQLGADIIFAFDELTTLVNTRAYQERSVQRTHEWAVRCLAEHHRLQEQSPERPRQALFGVVQGAQYEDLRRRAARGLATIGEREGPAEGLSFDGFGIGGALEKQNLATIVGWVSGELPRDKPRHMLGISEPDDLFAAVAAGADTFDCVSPSRVARNAAIYTSTGRYNITGARYKRDFTPLDPECDCYTCANYSRAYIRHLFKAKEMLSATLCTIHNERFVIRLVDRIRAAMLAGEFDELRAEVLGRYYGSRVPEAP

SEQ ID NO: 57854 - protein, 401 aa, Mycobacterium grossiae
  misc_feature (1)..(401): tr|A0A1E8PY36|A0A1E8PY36_9MYCO Queuine tRNA-ribosyltran sferase OS=Mycobacterium grossiae OX=1552759 GN=tgt PE= 3 SV=1
MSAQLPDRAGRVGVIHTPHGDVHTPAFVAVGTQATVKAVLPEAMQAAGAQAVLANAYHLYLQPGPDVVDEAGGLGAFMNWPGPTYTDSGGFQVMSLGVGFKKVLAMDTERVRADDVIAEGKERLAHVDDDGVTFRSHLDGSTHRFTPEVSIGIQHQLGADVIFAFDELTTLVNTRAYQETSVQRTHEWAVRCLAEHRRQTRARAHRPYQALFGVVQGAQYEDLRRRAARGLTEIRDADGNGFDGYGIGGALEKQNLATIVGWVTDELPEDKPRHLLGISEPDDLFAAVAAGADTFDCVSPSRVARNAAVYSADGRYNITGARYKRDWAPLDPECDCYTCAHYTRAYVHHLFKAKEMLASTLCTIHNERFVIHLVDRIREAITAGSFDDLRDEVLGRYYARH

SEQ ID NO: 57855 - protein, 403 aa, Mycobacterium lehmannii
  misc_feature (1)..(403): tr|A0A101AAL4|A0A101AAL4_9MYCO Queuine tRNA-ribosyltran sferase OS=Mycobacterium lehmannii OX=2048550 GN=tgt PE =3 SV=1
MPGRAGRTGVIRTPHGEIRTPAFIPVGTQATVKAVLPETMKELGAQALLANAYHLYLQPGPDIIDEAGGLSAFMNWPGPTFTDSGGFQVLSLGAGFRKVLAMDAERIQADDIIAEGKERLANVDDDGVTFRSHLDGSSHRFTPEVSIRIQHQLGADIIFAFDELTTLVNTRGYQERSVQRTHDWAVRCLAEHRRQHEARPDKPEQALFGVVQGAQYEDLRRRAARGLVTIGAHAGPAEGLEFDGYGIGGALEKQNLATIVGWVVDELPADKPRHLLGISEPDDLFDAIAAGADTFDCVSPSRVARNAAVYSTTGRFNITNARFRRDFTPIDADCDCYTCAHYTKAYIHHLFKAKEILSATLCTIHNERFVVRLVDRIRAAIETGDFDELRADVLGRYYATRTP

SEQ ID NO: 57856 - protein, 408 aa, Mycobacterium sp.
  misc_feature (1)..(408): tr|A0A1H4DU97|A0A1H4DU97_9MYCO Queuine tRNA-ribosyltran sferase OS=Mycobacterium sp. 283mftsu OX=1761810 GN=tgt PE=3 SV=1
MSQQFFEVTAQLPDRRGRAGVIHTPHGDIQTPAFIAVGTAATVKGVLPETMKSLGVQALLSNAYHLYLQPGPDVVDEAGGLGAFMNWPGPTFTDSGGFQVMSLGVGFKKVLAMDTARLQADDIIAEGKERLAHVDEDGVTFRSHLNGDKHRFTPEVSIGIQHQLGADIIFAFDELTTLVNTRAYQERSVERTHRWAVRCLAEHRRLTIERAGKPAQALFGVVQGAQYEDLRRQATKGLVGIVDEDGHGFDGYGIGGALEKQNLATIVGWVTDELPDDKPRHLLGISEPDDLFAAIEAGADTFDCVSPSRVARNAAMYSATGRFNVTNARFKRDFNPIDAECDCYTCANYTRAYMHHLFKAKEILASTLGTIHNERFIIRLVDQIRAAIIAGEFDELRDHVLGRYYGSR

SEQ ID NO: 57857 - protein, 416 aa, Mycobacterium sp.
  misc_feature (1)..(416): tr|A0A1A3T906|A0A1A3T906_9MYCO Queuine tRNA-ribosyltran sferase OS=Mycobacterium sp. 1274761.0 OX=1834077 GN=tg t PE=3 SV=1
MAEPSFSIEAELPGRLGRAGVIRTPHGDIHTPAFIAVGTQATVKAVLPEAMKELGAQAILANAYHLYLQPGADIIEEAGGLGAFMNWPGPTFTDSGGFQVLSLGAGFRKVLAMDAERVQADDVIAEGKQRLARVDDDGVTFTSHLNGSTHRFTPEVSIGIQHRIGADIIFAFDELTTLVNTRGYQEESVQRTHRWAVRCLAEHRRLAAAHPDRHPQALFGVVQGAQYEDLRRQAARGLVSIVDEDGRGFDGYGIGGALEKQNLATIIGWVSNELPADKPRHLLGISEPDDLFDAVAAGADTFDCVSPSRVARNAAVYSTAGRFNITGARYRRDFTPIDAECDCYTCAHYTRAYLHHLFKAKEILASTLATIHNERFIIRLVDQIRMAIRTGEFDELRAEVLGRYYAQTDKRAGKFE

SEQ ID NO: 57858 - protein, 411 aa, [Mycobacterium] stephanolepidis
  misc_feature (1)..(411): tr|A0A1Z4ERL3|A0A1Z4ERL3_9MYCO Queuine tRNA-ribosyltran sferase OS=[Mycobacterium] stephanolepidis OX=1520670 G N=tgt PE=3 SV=1
MTDQYFSIDATLPGTAGRAGVIHTPHGDIHTPAFIAVGTKATVKAVLPETMAALGAQAVLANAYHLYLQPGPDIVDEAGGLGAFMNWPGPTFTDSGGFQVLSLGSGARKVMAMDVNRARSDDVMGSLGGGKKKDKLAHVDDDGVTFTSYLDGSTHRFTPEVSMQIQHQLGADIIFAFDELTTLINTREYQEDSVQRTHEWAQRCLDEHEKLTRERADKPYQALFGVVQGAQYEDLRRRAARGLESLVSEEGRGFDGYGIGGALEKQNLGTIVGWVTSELPEHKPRHLLGISEPDDLFAAVAAGADTFDCVSPSRVARNAAVYTRDGRVNITGSKYRRDFTPIDAECDCYTCTHYTRAYMHHLFKAKEILASTLATIHNERFTIGLVDRIRAGIMDGHFEELREETLGRYYR

SEQ ID NO: 57859 - protein, 416 aa, Mycobacterium syngnathidarum
  misc_feature (1)..(416): tr|A0A1S1JXG0|A0A1S1JXG0_9MYCO Queuine tRNA-ribosyltran sferase OS=Mycobacterium syngnathidarum OX=1908205 GN=t gt PE=3 SV=1
MDQPYFTVEAELPGRLGRVGTIHTPHGDIHTPAFIAVGTAATVKSVLPEAMKQLGAQAILANAYHLYLQPGPDIVAEAGGLGAFMNWPGPTFTDSGGFQVMSLGVGFKKVLAMDTDRLQTDDIIAKGKERLAVVDDDGVTFRSHLDGSKHRFTPEVSIGIQNQLGADIIFAFDELTTLVNTRGYQESSVQRTHEWAVRCLAEHHRLQGLSPERPRQALFGVVQGAQYEDLRRQAARGLATIGQETGVAEGLGFDGYGIGGALEKQNLATIVGWVSSELPADKPRHLLGISEPDDLFDAVAAGADTFDCVSPSRVARNAAVYSATGRFNITGAKYKRDFTPIDAECDCYTCANYSRAYIRHLFKAKEMLSATLCTIHNERFVIRLVDQIRASIVAGEFDELRADVLGRYYGVAQERR

SEQ ID NO: 57860 - protein, 406 aa, Mycobacteroides abscessus
  misc_feature (1)..(406): tr|A0A1N2FTP1|A0A1N2FTP1_9MYCO Queuine tRNA-ribosyltran sferase OS=Mycobacteroides abscessus subsp. abscessus O X=1185650 GN=tgt PE=3 SV=1
MTDPYFSIDATLSGTAGRAGVIHTPHGDIQTPAFIAVGTKATVKAVLPETMAALGAQAVLANAYHLYLQPGPDIVDEAGGLGAFMNWPGPTFTDSGGFQVLSLGSGVRKVMAMDVNRARADDVTVAGKDKLAHVDDDGVTFTSHLDGSAHRFTPEVSMQIQHQLGADIMFAFDELTTLINTREYQEDSVQRTHEWAQRCLDEHEKLTRERADKPYQALFGVVQGAQYEDLRRQAARGLESLAGPSGRGFDGYGIGGALEKQNLGTIVGWVTSELPEHKPRHLLGISEPDDLFAAVAAGADTFDCVSPSRVARNAAVYTRDGRVNITGARYRRDFTPIDAECDCYTCAHYTRAYMHHLFKAKEILASTLATIHNERFTIGLVDRIRASIVEGCFQELREDTLGRYYR

SEQ ID NO: 57861 - protein, 406 aa, Mycobacteroides abscessus
  misc_feature (1)..(406): tr|A0A1T6PXT5|A0A1T6PXT5_9MYCO Queuine tRNA-ribosyltran sferase OS=Mycobacteroides abscessus subsp. massiliense OX=1962118 GN=tgt PE=3 SV=1
MTDPYFSIDATLPGTAGRAGVIHTPHGDIQTPAFIAVGTKATVKAVLPETMAALGAQAVLANAYHLYLQPGPDIVDEAGGLGAFMNWPGPTFTDSGGFQVLSLGSGVRKVMAMDVNRARADDVTVAGKDKLAHVDDDGVTFTSHLDGSAHRFTPEVSMQIQHQLGADIMFAFDELTTLINTREYQEDSVQRTHEWAQRCLDEHEKLTRERADKPYQALFGVVQGAQYEDLRRQAARGLESLAGPSGRGFDGYGIGGALEKQNLGTIVGWVTSELPEHKPRHLLGISEPDDLFAAVAAGADTFDCVSPSRVARNAAVYTRDGRVNITGARYRRDFTPIDAECDCYTCAHYTRAYMHHLFKAKEILASTLATIHNERFTIGLVDRIRASIVDGCFQELREDTLGRYYR

SEQ ID NO: 57862 - protein, 410 aa, Mycobacteroides chelonae
  misc_feature (1)..(410): tr|A0A3S4UKQ5|A0A3S4UKQ5_MYCCH Queuine tRNA-ribosyltran sferase OS=Mycobacteroides chelonae OX=1774 GN=tgt PE=3 SV=1
MPAPYFSVTAELPGRLGRTGVIRTPHGEIRTPAFIPVGTQATVKAVLPETMKELGAQAILANAYHLYLQPGPDIVDEAGGLGAFMNWPGPTFTDSGGFQVLSLGAGFRKVLAMDANRVQADDVIAEGKERLAAVDDDGVTFRSHLDGSTHRFTPEVSIGIQHKLGADIIFAFDELTTLVNTRGYQERSVQRTHEWAVRCLAEHRRLTAARPDKPKQALFGVVQGAQYEDLRRQATRGLLTIVDENGEGFDGYGIGGALEKQNLATIVGWVCEELPRDKPRHLLGISEPDDLFAAVAAGADTFDCVSPSRVARNAAVYTTYGRVNITNSRFRRDFTPIDENCDCYTCTHYTRAYLHHLFKAKEILSKTLATIHNERFIVRLVDRIRDAIEAGDFDELRDDVLGRYYSARGQ

SEQ ID NO: 57863 - protein, 406 aa, Mycobacteroides chelonae
  misc_feature (1)..(406): tr|A0A1S1LL75|A0A1S1LL75_MYCCH Queuine tRNA-ribosyltran sferase OS=Mycobacteroides chelonae OX=1774 GN=tgt PE=3 SV=1
MTDQYFSIDATLPGTAGRAGVIHTPHGDIQTPAFIAVGTKATVKAVLPETMAALGAQAVLANAYHLYLQPGPDIVDEAGGLGAFMNWPGPTFTDSGGFQVLSLGSGARKVMAMEVDRARADNHVVAGKDKLAHVDDEGVTFTSHLDGSTHRFTPEVSMQIQHQLGADIMFAFDELTTLINTREYQENSVQRTHEWAQRCLDEHEKLTRERADKPYQALFGVVQGAQYEDLRRQAARGLESLVSEEGRGFDGYGIGGALEKQNLGTIVGWVTSELPEHKPRHLLGISEPDDLFAAVAAGADTFDCVSPSRVARNAAVYTRDGRVNITGSKYRRDFTPIDAECDCYTCAHYTRAYMHHLFKAKEILASTLATIHNERFTIGLVDRIRASIVDGRFEELREETLGRYYR

SEQ ID NO: 57864 - protein, 406 aa, Mycobacteroides franklinii
  misc_feature (1)..(406): tr|A0A4R5PEQ6|A0A4R5PEQ6_9MYCO Queuine tRNA-ribosyltran sferase OS=Mycobacteroides franklinii OX=948102 GN=tgt PE=3 SV=1
MTDQYFSIDATLPGTAGRAGVIHTPHGDIQTPAFIAVGTKATVKAVLPETMAALGAQAVLANAYHLYLQPGPDIVDEAGGLGAFMNWPGPTFTDSGGFQVLSLGSGARKVMAMDVDRARADDHVIAGKDKLAHVDDDGVTFTSHLDGSTHRFTPEVSMQIQHQLGADIMFAFDELTTLINTREYQEDSVQRTHEWAQRCLDEHEKLTRERADKPYQALFGVVQGAQYEDLRRQAARGLESLVSSGDRGFDGYGIGGALEKQNLGTIVGWVTSELPEHKPRHLLGISEPDDLFAAVAAGADTFDCVSPSRVARNAAVYTRDGRVNITGAKYRRDFTPIDAECDCYTCAHYTRAYLHHLFKAKEILASTLATIHNERFTIGLVDRIRASIVDGRFDELRDDTLGRYYG

SEQ ID NO: 57865 - protein, 406 aa, Mycobacteroides franklinii
  misc_feature (1)..(406): tr|A0A1S1L2B1|A0A1S1L2B1_9MYCO Queuine tRNA-ribosyltran sferase OS=Mycobacteroides franklinii OX=948102 GN=tgt PE=3 SV=1
MTDQYFSIDATLPGTAGRAGVIHTPHGDIQTPAFIAVGTKATVKAVLPETMAALGAQAVLANAYHLYLQPGPDIVDEAGGLGAFMNWPGPTFTDSGGFQVLSLGSGARKVMAMEVDRARADDHVIAGKDKLAHVDDDGVTFTSHLDGSTHRFTPEVSMQIQHQLGADIMFAFDELTTLINTREYQEDSVQRTHEWAQRCLDEHEKLTRERADKPYQALFGVVQGAQYEDLRRQAARGLESLVSSGDRGFDGYGIGGALEKQNLGTIVGWVTSELPEHKPRHLLGISEPDDLFAAVAAGADTFDCVSPSRVARNAAVYTRDGRVNITGAKYRRDFTPIDAECDCYTCAHYTRAYLHHLFKAKEILASTLATIHNERFTIGLVDRIRASMVDGRFDELRDDTLGRYYG

SEQ ID NO: 57866 - protein, 406 aa, Mycobacteroides immunogenum
  misc_feature (1)..(406): tr|A0A179V743|A0A179V743_9MYCO Queuine tRNA-ribosyltran sferase OS=Mycobacteroides immunogenum OX=83262 GN=tgt PE=3 SV=1
MTDQYFSIDATLPGTAGRAGVIHTPHGDIQTPAFIAVGTKATVKAVLPETMSALGAQAVLANAYHLYLQPGPDIVDEAGGLGAFMNWPGPTFTDSGGFQVLSLGSGARKVMAMEVDRARADNHVVAGKDKLAHVDDEGVTFTSHLDGSTHRFTPEVSMRIQHQLGADIMFAFDELTTLINTREYQEDSVQRTHEWAQRCLDEHEKLTRERADKPYQALFGVVQGAQYEDLRRQAARGLESLASAQGRGFDGYGIGGALEKQNLGTIVGWVTSELPEHKPRHLLGISEPDDLFAAVAAGADTFDCVSPSRVARNAAVYTRDGRVNITGAKYRRDFTPIDAECDCYTCAHYTRAYLHHLFKAKEILASTLATIHNERFTIGLVDRIRASIVDGCFDELREDTLGRYYS

SEQ ID NO: 57867 - protein, 406 aa, Mycobacteroides immunogenum
  misc_feature (1)..(406): tr|A0A0N0KNA7|A0A0N0KNA7_9MYCO Queuine tRNA-ribosyltran sferase OS=Mycobacteroides immunogenum OX=83262 GN=tgt PE=3 SV=1
MTDQYFSIDATLPGTAGRAGVIHTPHGDIQTPAFIAVGTKATVKAVLPETMAALGAQAVLANAYHLYLQPGPDIVDEAGGLGAFMNWPGPTFTDSGGFQVLSLGSGARKVMAMDVNRARADDVTVAGKDKLAHVDDEGVTFTSHLDGSTHRFTPEVSMRIQHQLGADIMFAFDELTTLINTREYQEDSVQRTHEWAQRCLDEHEKLTRERADKPYQALFGVVQGAQYEDLRRQAARGLESLASAQGRGFDGYGIGGALEKQNLGTIVGWVTSELPEHKPRHLLGISEPDDLFAAVAAGADTFDCVSPSRVARNAAVYTRDGRVNITGARYRRDFTPIDAECDCYTCAHYTRAYLHHLFKAKEILASTLATVHNERFTIGLVDRIRASIVDGCFDELREDTLGRYYR

SEQ ID NO: 57868 - protein, 411 aa, Mycobacteroides salmoniphilum
  misc_feature (1)..(411): tr|A0A4R8SQM0|A0A4R8SQM0_9MYCO Queuine tRNA-ribosyltran sferase OS=Mycobacteroides salmoniphilum OX=404941 GN=t gt PE=3 SV=1
MTDQYFSIDATLPGTAGRAGVIHTPHGDLQTPAFIAVGTKATVKAVLPETMAALGAQAVLANAYHLYLQPGPDIVDEAGGLGAFMNWPGPTFTDSGGFQVLSLGSGARKVMAMDVDRARSDDVLGALGTGAKKDKLAHVDDDGVTFTSHLDGSTHRFTPEVSMRIQHQLGADIIFAFDELTTLINTREYQEDSVQRTHEWAQRCLDEHEKLTRERADKPYQALFGVVQGAQYEDLRRQAARGLESLATEEGRGFDGYGIGGALEKQNLGTIVGWVTSELPEHKPRHLLGISEPDDLFAAVAAGADTFDCVSPSRVARNAAVYTRDGRVNITGARYRRDFTPIDAECDCYTCTHYTRAYMHHLFKAKEMLACTLATIHNERFTIGLVDRIRASIVDGHFDELREETLGRYYS

SEQ ID NO: 57869 - protein, 411 aa, Mycobacteroides salmoniphilum
  misc_feature (1)..(411): tr|A0A4R8SLE1|A0A4R8SLE1_9MYCO Queuine tRNA-ribosyltran sferase OS=Mycobacteroides salmoniphilum OX=404941 GN=t gt PE=3 SV=1
MTDQYFSVDATLPGTAGRAGVIHTPHGDIQTPAFIAVGTKATVKAVLPETMAALGAQAVLANAYHLYLQPGPDIVDEAGGLGAFMNWPGPTFTDSGGFQVLSLGSGARKVMAMDVDRARSDDVLGALGTGAKKDKLAHVDDDGVTFTSHLDGSAHRFTPEVSMRIQHQLGADIIFAFDELTTLINTREYQEDSVQRTHEWAQRCLDEHEKLTRERADKPYQALFGVVQGAQYEDLRRQAARGLESLATEEGRGFDGYGIGGALEKQNLGTIVGWVTSELPEHKPRHLLGISEPDDLFAAVAAGADTFDCVSPSRVARNAAVYTRDGRVNITGARYRRDFTPIDAECDCYTCTHYTRAYMHHLFKAKEMLACTLATIHNERFTIGLVDRIRASIVDGHFDELREETLGRYYS

SEQ ID NO: 57870 - protein, 406 aa, Mycobacteroides saopaulense
  misc_feature (1)..(406): tr|A0A1S4VBX2|A0A1S4VBX2_9MYCO Queuine tRNA-ribosyltran sferase OS=Mycobacteroides saopaulense OX=1578165 GN=tg t PE=3 SV=1
MTDPYFSIDATLPGTAGRAGVIHTPHGDIQTPAFIAVGTKATVKAVLPETMAALGAQAVLANAYHLYLQPGPDIVDEAGGLGAFMNWPGPTFTDSGGFQVLSLGSGARKVMAMEVDRARADNHVVAGKDKLAHVDDEGVTFTSHLDGSTHRFTPEVSMRIQHQLGADIMFAFDELTTLINTREYQEDSVQRTHEWAQRCLDEHEKLTRERADKPYQALFGVVQGAQYEDLRRQAARGLETLASEEGRGFDGYGIGGALEKQNLGTIVGWVTSELPEHKPRHLLGISEPDDLFAAVAAGADTFDCVSPSRVARNAAVYTRDGRVNITGARYRRDFTPIDAECDCYTCTHYTRAYMHHLFKAKEILASTLATIHNERFTIGLVDRIRASIVDGRFEELREDTLGRYYR

SEQ ID NO: 57871 - protein, 406 aa, Mycobacteroides sp.
  misc_feature (1)..(406): tr|A0A0R3HGV8|A0A0R3HGV8_9MYCO Queuine tRNA-ribosyltran sferase OS=Mycobacteroides sp. H054 OX=1720567 GN=tgt P E=3 SV=1
MTDQYFSIDATLPGTAGRAGVIHTPHGDIQTPAFIAVGTKATVKAVLPETMAALGAQAVLANAYHLYLQPGPDIVDEAGGLGAFMNWPGPTFTDSGGFQVLSLGSGARKVMAMEVDRARADNHVVAGKDKLAHVDDEGVTFTSHLDGSTHRFTPEVSMRIQHQLGADIMFAFDELTTLINTREYQENSVQRTHEWAQRCLDEHEKLTRERADKPYQALFGVVQGAQYEDLRRQAARGLESLVSEEGRGFDGYGIGGALEKQNLGTIVGWVTSELPEHKPRHLLGISEPDDLFAAVAAGADTFDCVSPSRVARNAAVYTRDGRVNITGSKYRRDFTPIDAECDCYTCAHYTRAYMHHLFKAKEILASTLATIHNERFTIGLVDRIRASIVDGRFEELREETLGRYYR

SEQ ID NO: 57872 - protein, 406 aa, Mycobacteroides sp.; identical to SEQ ID NO: 57871
  misc_feature (1)..(406): tr|A0A0R3FR95|A0A0R3FR95_9MYCO Queuine tRNA-ribosyltran sferase OS=Mycobacteroides sp. H002 OX=1720566 GN=tgt P E=3 SV=1

SEQ ID NO: 57873 - protein, 407 aa, Mycolicibacterium agri
  misc_feature (1)..(407): tr|A0A2A7N602|A0A2A7N602_MYCAG Queuine tRNA-ribosyltran sferase OS=Mycolicibacterium agri OX=36811 GN=tgt PE=3 SV=1
MVEPSFSIEAQLPGRAGRAGVIRTPHGDIHTPAFIAVGTQATVKAVLPETMKELGAQAILANAYHLYLQPGPEVIAEAGGLGAFMNWPGPTFTDSGGFQVLSLGAGFRKVLAMDTERVQADDVIAKGKERLARVDDDGVTFTSHLDGSTHRFTPEVSIQIQHQIGADIIFAFDELTTLVNTRGYQEDSVQRTHRWAERCLAEHRRLAAQHPDRPPQALFGVVQGAQYEDLRREAARGLTAIVDDEGRGFDGYGIGGAIEKQNLAAIVGWVSDELPDDKPRHMLGISEPDDLFDAVAAGADTFDCVSPSRVARNAAVYSTKGRYNITNARYRLDFTPIDDECDCYTCGHYTRAYIGHLFKAKEILAATLCTIHNERFVIRLVDQIREAIKNDEFDELRAHVLGRYYGT

SEQ ID NO: 57874 - protein, 410 aa, Mycolicibacterium aichiense
  misc_feature (1)..(410): tr|A0A378RDV2|A0A378RDV2_9MYCO Queuine tRNA-ribosyltran sferase OS=Mycolicibacterium aichiense OX=1799 GN=tgt P E=3 SV=1
MPFFTVDAELPGRRGRSGVIHTPHGDIHTPAFVAVGTKATVKAVLPETMRELGAQAVLANAYHLYLQPGPDIVDEAGGLGAFMNWPGPTFTDSGGFQVLSLGAGFRKVLSMDANRVQADDVIAEGKQRLAHVDDDGVTFISHLDGSTHRFTPEVSMQIQHKIGADIIFAFDELTTLVNTRGYQEESVARTQAWAVRCIAEHRRLTAERPERPAQALFGVVQGAQYEDLRRQASRDLAGIVDSEGRGFDGYGIGGALEKQNLATIVGWCVDELPDDKPRHLLGISEPDDLFAAIAAGADTFDCVSPSRVARNAAVYSPTGRFNITGARYRRDFTPIDADCDCYTCANYTRAYLHHLFKAKEILSATLCTIHNERFIIRLVDQIRAAIVAGEFDELREDALGNYYGHSTRAQ

SEQ ID NO: 57875 - protein, 410 aa, Mycolicibacterium aromaticivorans
  misc_feature (1)..(410): tr|A0A064CL98|A0A064CL98_9MYCO Queuine tRNA-ribosyltran sferase OS=Mycolicibacterium aromaticivorans JS19b1 = J CM 16368 OX=1440774 GN=tgt PE=3 SV=1
MPFFTVDAELPGRRGRSGVIHTPHGDIQTPAFVAVGTKATVKAVLPETMRELGAQAVLANAYHLYLQPGPDIVDEAGGLGAFMNWPGPTFTDSGGFQVLSLGAGFRKVLSMDANRVQADDVIAEGKQRLAHVDDDGVTFISHLDGSTHRFTPEVSMQIQHKIGADIIFAFDELTTLVNTRGYQEESVARTQAWAVRCIAEHRRLTADRPERPAQALFGVVQGAQYEDLRRQASRDLAGIVDSEGRGFDGYGIGGALEKQNLATIVGWCVDELPDDKPRHLLGISEPDDLFAAIAAGADTFDCVSPSRVARNAAIYSPTGRFNITGARYRRDFTPIDGDCDCYTCANYTRAYLHHLFKAKEILSATLCTIHNERFIIRLVDQIRAAIVAGEFDELREDVLGSYYGHSTRAQ

SEQ ID NO: 57876 - protein, 414 aa, Mycolicibacterium aurum
  misc_feature (1)..(414): tr|A0A448J103|A0A448J103_MYCAU Queuine tRNA-ribosyltran sferase OS=Mycolicibacterium aurum OX=1791 GN=tgt PE=3 SV=1
MSRPFCADPLFSVNAELPGRLGRTGTIRTPHGDIQTPAFVAVGTAATVKAVLPETMKEVGAQAILANAYHLYLQPGPDIVDEAGGLGAFMNWPGPTYTDSGGFQVMSLGVGFKKVLAMDTERVQTDDIIAEGKERLAHVDDDGVTFRSHLDGSTHRFTPEVSIGIQHQLGADIIFAFDELTTLVNTRGYQESSVQRTHDWAVRCLAEHRRLSIERAGKPPQALFGVVQGAQYEDLRRQAARGLAEIRDEDGNGFAGYGIGGALEKQNLATIVGWVSSELPDDKPRHLLGISEPDDLFAAVASGADTFDCVSPSRVARNAAVYSVHGRYNITGSRYRRDFTPIDAECDCYTCAHYTRAYLHHLFKAKEILASTLCTIHNERFVIRLVDDIRAAIPAGRFDELREHVLGRYYAKSS

SEQ ID NO: 57877 - protein, 401 aa, Mycolicibacterium austroafricanum
  misc_feature (1)..(401): tr|A0A2S8LNA4|A0A2S8LNA4_MYCAO Queuine tRNA-ribosyltran sferase OS=Mycolicibacterium austroafricanum OX=39687 G N=tgt PE=3 SV=1
MDVELPGRLGRTGTIRTPHGDIQTPAFIAVGTQATVKAVLPETMKEIGAQAVLANAYHLYLQPGADVVDEAGGLGAFMNWPGPTFTDSGGFQVMSLGVGFKKVLAMDTSRVQADDIIAEGKSRLAHVDDDGVTFRSHLNGSSHRFTPEVSIGIQHQLGADIIFAFDELTTLVNTRGYQERSVQRTHEWAVRCLAEHRRLSRVRSHTPPQALFGVVQGAQYEDLRRQAARGLTQIVDEEGRGFDGYGIGGALEKQNLATIVGWVSSELPDDKPRHLLGISEPDDLFAAIEAGADTFDCVSPSRVARNAAVYSADGRFNITGSRYRRDFTPIDAECDCYTCTHYTRAYLHHLFKAKEMLSATLCTIHNERFVIRLVDDIRVAIREGRFDELREHVLGRYYAKA

SEQ ID NO: 57878 - protein, 412 aa, Mycolicibacterium bacteremicum
  misc_feature (1)..(412): tr|A0A1W9YR57|A0A1W9YR57_9MYCO Queuine tRNA-ribosyltran sferase OS=Mycolicibacterium bacteremicum OX=564198 GN= tgt PE=3 SV=1
MSEQFFDVQAELPGRPGRVGTIHTPHGDIQTPAFIAVGTQATVKAVLPETMKEIGAQAVLANAYHLYLQPGPDVVDEAGGLGAFMNWPGPTFTDSGGFQVLSLGVGFKKVLSMDATRVQADDIIAEGKERLAHVDDDGVTFRSHLDGSTHRFTPEVSIGIQHQLGADIIFAFDELTTLVNTRSYQEQSVQRTHEWAVRCLAEHRRLTEVRHDKPYQALFGVVQGAQYEDLRRQATRGLVDIRDADGRGFDGYGIGGALEKQNLATIVEWVTSELPADKPRHLLGISEPDDLFAAVAAGADTFDCVSPSRVARNAAVYSVNGRYNITGARYKRDFTPIDAECDCYTCAHYTRAYIHHLFKAKEMLASTLCTIHNERFTIALVDRIRASILAGEFDELREHVLGRYYGGDLRSS

SEQ ID NO: 57879 - protein, 423 aa, Mycolicibacterium boenickei
  misc_feature (1)..(423): tr|A0A2A7P577|A0A2A7P577_9MYCO Queuine tRNA-ribosyltran sferase OS=Mycolicibacterium boenickei OX=146017 GN=tgt PE=3 SV=1
MDQPYFTVEAELPGRFGRVGTIHTPHGDIQTPAFIAVGTAATVKSVLPETMKQLGAQAILANAYHLYLQPGPDIVAEAGGLGAFMNWPGPTFTDSGGFQVMSLGVGFKKVLAMDTERLQKDDIIAKGKERLAVVDDDGVTFRSHLDGSKHRFTPEVSIGIQNQLGADIIFAFDELTTLVNTRGYQESSVQRTHEWAVRCLAEHHRLQGLSPERPRQALFGVVQGAQYEDLRRQAARGLAEIGQEAGPAEGLSFDGYGIGGALEKQNLATIVGWVSSELPADKPRHLLGISEPDDLFDAVAAGADTFDCVSPSRVARNAAVYSATGRFNITGAKYKRDFTPIDSECDCYTCANYSRAYIRHLFKAKEMLSATLCTIHNERFVIRLVDQIRASIVAGEFDELRAHVLGRYYGVPADERLREERKA

SEQ ID NO: 57880 - protein, 410 aa, Mycolicibacterium brisbanense
  misc_feature (1)..(410): tr|A0A100W369|A0A100W369_9MYCO Queuine tRNA-ribosyltran sferase OS=Mycolicibacterium brisbanense OX=146020 GN=t gt PE=3 SV=1
MGEPYFTVEAELPGRLGRVGVIHTPHGDIHTPAFIAVGTAATVKSVLPETMKQLGAQAILANAYHLYLQPGPEIVAEAGGLGAFMNWPGPTFTDSGGFQVMSLGVGFKKVLAMDTSRLQTDDIIAKGKERLAVVDEDGVTFRSHLDGSKHRFTPEVSIGIQHQLGADIIFAFDELTTLVNTRGYQESSVQRTHEWAVRCLAEHHRLQDSAPQRPRQALFGVVQGAQYEDLRRQAAHGLTTIRTADGHGFDGYGIGGALEKQNLATIVGWVSSELPADKPRHLLGISEPDDLFDAVAAGADTFDCVSPSRVARNAAVYSATGRFNITGARYKRDFTPIDAECDCYTCANYSRAYIRHLFKAKEMLSATLCTIHNERFVIRLVDQIRAAIVAGEFDELRAHVLGRYYGAPVR

SEQ ID NO: 57881 - protein, 402 aa, Mycolicibacterium brumae
  misc_feature (1)..(402): tr|A0A2G5PDF9|A0A2G5PDF9_9MYCO Queuine tRNA-ribosyltran sferase OS=Mycolicibacterium brumae OX=85968 GN=tgt PE= 3 SV=1
MADGAGRTGTIHTPHGDIDTPAFVPVGTKATVKAVLPETMADLGAQAVLANAYHLYLQPGPDIVDEAGGLGAFMNWPGPTFTDSGGFQVLSLGSGFRKVLAMDTERHRADDIVAPGKDRLARVDDDGVTFTSHLDGSTHRFTPEVSMGIQHRLGADIIFAFDELTTLVNTREYQQRSVQRTHEWAIRCLVEHRRLTAAAPDRPAQALFGVVQGAQYEDLRRAATRGLVGIGNEAGPAQGCEFDGYGIGGALEKQNLATIIGWVVDELPEDKPRHLLGISEPDDLFAAVAAGADTFDCVSPSRVARNAAIYSADGRYNITGARYRRDFTPLDPECDCHTCAHYTRAYIHHLFKAKEILSATLCTIHNERFIVRLVDRIRTSIGAGDFAELREETLGRYYSKSS

SEQ ID NO: 57882 - protein, 412 aa, Mycolicibacterium canariasense
  misc_feature (1)..(412): tr|A0A100WKF5|A0A100WKF5_9MYCO Queuine tRNA-ribosyltran sferase OS=Mycolicibacterium canariasense OX=228230 GN= tgt PE=3 SV=1
MSEQYFEVRAQLPGRKGRAGVIHTPHGDIQTPAFIAVGTQATVKAVLPETMKEIGAQAVLANAYHLYLQPGPDIVDEAGGLGAFMNWPGPTFTDSGGFQVLSLGVGFKKVLAMDATRLQNDDIIAEGKERLAHVDEDGVTFRSHIDGSSHRFTPEVSIGIQHQLGADIIFAFDELTTLVNTRGYQEQSVRRTHDWAVRCLAEHRKLTVARPDKPPQALFGVVQGAQYEDLRRQATRGLVSILDEDGRGFDGYGIGGALEKQNLATIVGWVTSELPDDKPRHLLGISEPDDLFAAVAAGADTFDCVSPSRVARNAAVYSARGRYNITGARYRRDFTPIDAECDCYTCAHYTRAYIHHLFKAKEMLAATLCTIHNERFTIRLVDQIRAAILAGEFDELREHVLGRYYGTDQRSS

SEQ ID NO: 57883 - protein, 415 aa, Mycolicibacterium celeriflavum
  misc_feature (1)..(415): tr|A0A1X0C0B9|A0A1X0C0B9_9MYCO Queuine tRNA-ribosyltran sferase OS=Mycolicibacterium celeriflavum OX=1249101 GN =tgt PE=3 SV=1
MAVPNSSAPRESSAPSFSVVTELPGRFGRTGVIRTPHGEIHTPAFIPVGTQATVKAVLPEMMKELGAQAILANGYHLYLQPGADIVDEAGGLGAFMNWPGPTFTDSGGFQVLSLGAGFRKVLAMDTERVQADDIIAEGKERLAAVDDDGVTFRSHLDGSTHRFTPEVSIGIQHRLGADIIFAFDELTTLVNTRGYQERSVQRTHDWAVRCLAEHRRLQASRPDKPKQALFGVVQGAQYEDLRRQAARGLVSLGFDGYGIGGALEKQNLATIVGWVCEELPVDKPRHLLGISEPDDLFDAVAAGADTFDCVSPSRVARNAALYSTSGRFNITNARFRRDFTPVDAECDCYTCAHYTRAYLHHLFKAKEILSATLCTIHNQRFVVRLVDRMRAAIDAGEFDELRADVLGRYYATRTR

SEQ ID NO: 57884 - protein, 406 aa, Mycolicibacterium chitae
  misc_feature (1)..(406): tr|A0A3S4R911|A0A3S4R911_MYCCI Queuine tRNA-ribosyltran sferase OS=Mycolicibacterium chitae OX=1792 GN=tgt PE=3 SV=1
MGELFEVRETLPDGRGRAGVIRTPHGDVETPAFIAVGTKATVKAVLPETMKSLGAQAVLANAYHLYLQPGPDVVDEAGGLGKFMNWSGPTFTDSGGFQVLSLGAGFRKVLSMDANRVQADDVIAEGKERLARVDDDGVTFTSHLDGSRHRFTPEVSMGIQHQLGADIIFAFDELTTLVNTRGYQEQSVRRTHAWAQRCVDEHRRLTRERADKPYQALFGVVQGAQYEDLRRKAARGLVEIRDADGRGFDGYGIGGALEKQNLATIVGWVTDELPDDKPRHLLGISEPDDLFAAVAAGADTFDCVSPSRVARNAAIYAATGRYNITGACYKRDFTPLDPECDCYTCAHYTRAYIHHLFKAKEMLASTLCTIHNERFIIRLVDDIRAAIGDGRFEDLREHVLGRYYRS

SEQ ID NO: 57885 - protein, 423 aa, Mycolicibacterium chlorophenolicum
  misc_feature (1)..(423): tr|A0A0J6VKF6|A0A0J6VKF6_9MYCO Queuine tRNA-ribosyltran sferase OS=Mycolicibacterium chlorophenolicum OX=37916 GN=tgt PE=3 SV=1
MAAPDISDPFFRVEAELPGSLGRAGVINTPHGDIATPAFIAVGTQATVKAVLPDSMKQLGAQAILANAYHLYLQPGPDIVEEAGGLGAFMNWPGPTFTDSGGFQVMSLGVGFKKVLAMDTARVQADDVIADGKERLAHVDDDGVTFRSHLNGSTHRFTPEVSIGIQHQLGADIIFAFDELTTLVNTRGYQERSVQRTHEWAVRCLAEHRRLAALRPDRPAQALFGVVQGAQYEDLRRQAARGLTEIVDAHGNGFDGYGIGGALEKQNLATIVGWVSSELPADKPRHLLGISEPDDLFAAVAAGADTFDCVSPSRVARNAAVYTHTGRFNITGSRYRRDFTPIDPECDCYTCAHYTRAYLHHLFKAKEILASTLATIHNERFVVRLVDDIRAAILAGRFDDLRDHVLGRYYGVSEATSAPSSAQ

SEQ ID NO: 57886 - protein, 419 aa, Mycolicibacterium chubuense
  misc_feature (1)..(419): tr|A0A0J6VW13|A0A0J6VW13_MYCCU Queuine tRNA-ribosyltran sferase OS=Mycolicibacterium chubuense OX=1800 GN=tgt P E=3 SV=1
MAAPDISDPFFRVEAELPGSLGRAGVIHTPHGDIATPAFIAVGTQATVKAVLPDSMKQLGAQAILANAYHLYLQPGPDIVEEAGGLGAFMNWPGPTFTDSGGFQVMSLGVGFKKVLAMDTARVQADDVIADGKERLAHVDDDGVTFRSHLNGSTHRFTPEVSIGIQHQLGADIIFAFDELTTLVNTRGYQERSVQRTHEWAVRCLAEHRRLTAMRPDKPTQALFGVVQGAQYEDLRRQAARGLTEIVDAHGNGFDGYGIGGALEKQNLATIVGWVSSELPADKPRHLLGISEPDDLFAAVAAGADTFDCVSPSRVARNAAVYTHTGRFNITGSRYRRDFTPIDPECDCYTCAHYTRAYLHHLFKAKEILASTLATIHNERFVVRLVDDIRAAILAGRFDDLRDHVLGRYYGASEVTSAQ

SEQ ID NO: 57887 - protein, 414 aa, Mycolicibacterium conceptionense
  misc_feature (1)..(414): tr|A0A0J8U5M5|A0A0J8U5M5_9MYCO Queuine tRNA-ribosyltran sferase OS=Mycolicibacterium conceptionense OX=451644 G N=tgt PE=3 SV=1
MDQPYFTVEAELPGRLGRVGTIHTPHGDIHTPAFIAVGTAATVKSVLPETMKQLGAQAILANAYHLYLQPGPDIVAEAGGLGAFMNWPGPTFTDSGGFQVMSLGVGFKKVLAMDTERLQTDDIIAKGKERLAVVDDDGVTFRSHLDGSKHRFTPEVSIGIQNQLGADIIFAFDELTTLVNTRGYQESSVQRTHEWAVRCLAEHHRLQALSPERPRQALFGVVQGAQYEDLRRQAARGLATIGQEAGAAAGLSFDGYGIGGALEKQNLATIVGWVSSELPADKPRHLLGISEPDDLFDAVAAGADTFDCVSPSRVARNAAVYSATGRFNITGARYKRDFTPIDAECDCYTCANYSRAYIRHLFKAKEMLSATLCTIHNERFVIRLVDQIRASIVAGEFDELKAHVLGRYYGVPIS

SEQ ID NO: 57888 - protein, 404 aa, Mycolicibacterium confluentis
  misc_feature (1)..(404): tr|A0A1X1S917|A0A1X1S917_9MYCO Queuine tRNA-ribosyltran sferase OS=Mycolicibacterium confluentis OX=28047 GN=tg t PE=3 SV=1
MGDFFEVRDTLPGGRGRTGVIHTPHGDVHTPAFIAVGTKATVKAVLPETMKSLGAQAVLANAYHLYLQPGADIVDEAGGLGAFMNWSGPTFTDSGGFQVLSLGAGFRKVLAMDANRVQADDIIAAGKERLARVDDDGVTFTSHLDGSTHRFTPEVSMGIQHQLGADIIFAFDELTTLVNTRSYQEQSVRRTHDWAVRCVAEHRRLTEVRAHKPYQALFGVVQGAQYEDLRRAATRGLVDIGGFDGFGIGGALEKQNLATIVGWVTDELPEDKPRHLLGISEPDDLFAAVAAGADTFDCVSPSRVARNAAIYSRTGRYNITGARYKRDFTPLDPECDCYTCGNYTRAYLHHLFKAKEMLASTLATIHNERFIVRLVDQIRESISAGSFDELRAEVLGRYYAGARI

SEQ ID NO: 57889 - protein, 416 aa, Mycolicibacterium cosmeticum
  misc_feature (1)..(416): tr|W9AYT7|W9AYT7_9MYCO Queuine tRNA-ribosyltransferase OS=Mycolicibacterium cosmeticum OX=258533 GN=tgt PE=3 S V=1
MSEQYFEVRAQLPGRKGRAGVIHTPHGDIQTPAFIAVGTQATVKAVLPETMKEIGAQAVLANAYHLYLQPGPDVVDEAGGLGAFMNWPGPTFTDSGGFQVLSLGVGFKKVLAMDATRLQNDDIIAEGKERLAHVDEDGVTFRSHIDGSSHRFTPEVSIGIQHQLGADIIFAFDELTTLVNTRGYQEQSVRRTHDWAVRCLIEHHKLTAARPDKPRQALFGVVQGAQYEDLRRQATRGLVGIGEGPGPAEGLSFDGYGIGGALEKQNLATIVGWVTSELPDDKPRHLLGISEPDDLFAAVAAGADTFDCVSPSRVARNAAVYSARGRYNITGARYRRDFTPIDAECDCYTCAHYTRAYIHHLFKAKEMLAATLCTIHNERFTIRLVDQIRAAIVAGEFDELREHVLGRYYGTDQRSS

SEQ ID NO: 57890 - protein, 405 aa, Mycolicibacterium diernhoferi
  misc_feature (1)..(405): tr|A0A1Q4HBN6|A0A1Q4HBN6_9MYCO Queuine tRNA-ribosyltran sferase OS=Mycolicibacterium diernhoferi OX=1801 GN=tgt PE=3 SV=1
MSEQFFEVRAELPGRSGRVGTIHTPHGDIQTPAFIAVGTAATVKSVLPETMKDLGAQAVLSNAYHLYLQPGPDVVDEAGGLGAFMNWPGPTFTDSGGFQVMSLGVGFKKVLAMDASRVQADDVIAEGKERLAHVDEDGVTFRSHRDGSKHRFTPEVSIGIQHQLGADIIFAFDELTTLVNTRSYQEESVRRTHDWAVRCVAEHRRLTEVRHDKPYQALFGVVQGAQYEDLRRKAARGLADLGFDGFGIGGALEKQNLATIVGWVTDELPDDKPRHLLGISEPDDLFAAVAAGADTFDCVSPSRVARNAAVYSARGRFNITGSQYKRDFTPIDAECDCYTCAHYTRAYIHHLFKAKEMLSSTLCTIHNERFIIRLVDRIRESIIAGEFDELREDVLGRYYGSSGAS

SEQ ID NO: 57891 - protein, 400 aa, Mycolicibacterium doricum
  misc_feature (1)..(400): tr|A0A1X1T2V7|A0A1X1T2V7_9MYCO Queuine tRNA-ribosyltran sferase OS=Mycolicibacterium doricum OX=126673 GN=tgt P E=3 SV=1
MHQQFFTVEARLAGQRGRVGVIHTPHGDIRTPAFIAVGTQATVKAVLPETMKLLGAQAILANAYHLYLQPGPDIVDAAGGLGAFMNWPGPTFTDSGGFQVMSLGVGFKKVLAMDTTRVQTDDIIAEGKERLAHVDDDGVTFRSHLDGSRHRFTPEVSIGIQHQLGADIIFAFDELTTLVNTRGYQERSVQRTHEWAVRCLAEHRRLRAKRSHKPSQALFGVVQGAQYEDLRRHAARGLAGLGFDGFGIGGALEKQNLATIVGWVTDELPEDKPRHLLGISEPDDLFAAVAAGADTFDCVSPSRVARNAAVYSATGRYNITGSRYRRDFSPIDGECDCYTCAHYTRAYIHHLFKAKEILASTLCTIHNERFVVRLVESIRAAILAGEFDELREHVVGRYYG

SEQ ID NO: 57892 - protein, 398 aa, Mycolicibacterium duvalii
  misc_feature (1)..(398): tr|A0A2A7NHM8|A0A2A7NHM8_9MYCO Queuine tRNA-ribosyltran sferase OS=Mycolicibacterium duvalii OX=39688 GN=tgt PE =3 SV=1
MEAELPGRHGRTGIIHTPHGDIHTPAFIAVGTQATVKAVLPETMKQLGAQAVLANAYHLYLQPGPDIVDEAGGLGAFMNWPGPTFTDSGGFQVMSLGVGFKKVLAMDAERVQADDIIAEGKQRLAHVDDDGVTFRSHLNGSTHRFTPEVSIGIQHRLGADIIFAFDELTTLVNTRAYQEQSVERTHRWAVRCVAEHRRLRELRPDRPPQALFGVVQGAQYEDLRRNAARGLAELDFDGFGIGGALEKQNLATIVGWVIDELPVDKPRHLLGISEPDDLFAAIEAGADTFDCVSPSRVARNAAVYSADGRFNITGSRYRRDFTPIDADCDCYTCAHYTRAYLHHLFKAKEILSATLCTIHNERFVIRLVDRIRAAIPDGRFDDLREHVLGRYYATPRAQ

SEQ ID NO: 57893 - protein, 419 aa, Mycolicibacterium elephantis
  misc_feature (1)..(419): tr|A0A439DYR6|A0A439DYR6_9MYCO Queuine tRNA-ribosyltran sferase OS=Mycolicibacterium elephantis DSM 44368 OX=13 35622 GN=tgt PE=3 SV=1
MTAPNTACPNDSSARFFTVDAELPGRFGRAGTIRTPHGDIHTPAFIPVGTQATVKAVLPEAMKELGAQAILANAYHLYLQPGPDIVAEAGGLGAFMNWPGPTFTDSGGFQVLSLGAGFRKVLAMDTERVQADDIIAEGKERLAAVDDDGVTFRSHLDGSTHRFTPELSIGIQHRLGADIIFAFDELTTLVNTRGYQEQSVRRTHAWAVRCLAEHRRLTAADRHRPPQALFGVVQGAQYEDLRRQAARGLTTIVDDDGVGFDGYGIGGALEKQNLATIVGWVSSELPPDKPRHMLGISEPDDLFATVAAGADTFDCVSPSRVARNAAVYSATGRFNVTNSRYRRDFGPIDAECDCYTCAHYTRAYLHHLFKAKELLSATLCTIHNERFIVRLVDQIRAAIRAGEFDELRAHVLGRYYAQA

SEQ ID NO: 57894 - protein, 419 aa, Mycolicibacterium elephantis
  misc_feature (1)..(419): tr|A0A0M2ZLA6|A0A0M2ZLA6_9MYCO Queuine tRNA-ribosyltran sferase OS=Mycolicibacterium elephantis OX=81858 GN=tgt PE=3 SV=1
MTAPNTACPNDSSARFFTVEAELPGRFGRAGTIRTPHGDIHTPAFIPVGTQATVKAVLPEAMKELGAQAILANAYHLYLQPGPDIVAEAGGLGAFMNWPGPTFTDSGGFQVLSLGAGFRKVLAMDTERVQADDIIAEGKERLAAVDDDGVTFRSHLDGSTHRFTPEVSIGIQHRLGADIIFAFDELTTLVNTRGYQEESVRRTHSWAVRCLAEHRRLTAADRHQPPQALFGVVQGAQYEDLRRQAARGLTTIVDDDGVGFDGYGIGGALEKQNLATIVGWVSSELPPDKPRHMLGISEPDDLFAAVAAGADTFDCVSPSRVARNAAVYSATGRFNVTNSRYRRDFGPIDAECDCYTCAHYTRAYLHHLFKAKELLSATLCTIHNERFIVRLVDQIRAAIRAGEFDELRAHVLGRYYAQA

SEQ ID NO: 57895 - protein, 414 aa, Mycolicibacterium fallax
  misc_feature (1)..(414): tr|A0A1X1RJ36|A0A1X1RJ36_MYCFA Queuine tRNA-ribosyltran sferase OS=Mycolicibacterium fallax OX=1793 GN=tgt PE=3 SV=1
MAAVGDYFTVGDRLEGRDGRTGVIHTPRGDIATPAFIPVGTKATVKAVLPETMKSLGAQAVLANAYHLYLQPGPDIVDEAGGLGRFMNWPGPTFTDSGGFQVLSLGSGFRKVLAMDTTRHRADDIVAPGKDRLARVDDDGVTFTSHLDGSTHRFTPEVSMGIQHRLGADIIFAFDELTTLVNTRAYQEDSVRRTHDWAIRCLAEHHRLAAAAPDRPAQALFAVVQGAQYEDLRRAATRGLVGMGEQDGPAHGLSFDGYGIGGALEKQNLATIIGWVIDELPEDKPRHLLGISEPDDLFAAIEAGADTFDCVSPSRVARNAAIYSGTGRYNITGARYRRDFGPLDPDCDCYTCANYTRAYIHHLFKAKEILSATLCTIHNERFIIALVDRIRAAIADGSFDELRAEVLGRYYGTG

SEQ ID NO: 57896 - protein, 425 aa, Mycolicibacterium flavescens
  misc_feature (1)..(425): tr|A0A448HL87|A0A448HL87_MYCFV Queuine tRNA-ribosyltran sferase OS=Mycolicibacterium flavescens OX=1776 GN=tgt PE=3 SV=1
MAVPKSPAPKESSAPFFSVTAQLPGRAGRTGVIRTPHGEIRTPAFIPVGTQATVKAVLPETMKELGAQALLANAYHLYLQPGPDIVDEAGGLSAFMNWPGPTFTDSGGFQVLSLGAGFRKVLAMDAERVQADDIIAEGKERLANVDDDGVTFRSHLDGSTHRFTPEVSIRIQHQLGADIIFAFDELTTLVNTRGYQERSVQRTHDWAVRCLTEHRRQHEARPDKPGQALFGVVQGAQYEDLRRQATRGLVTIGAQAGPAEGLEFDGYGIGGALEKQNLATIVGWVVDELPADKPRHLLGISEPDDLFDAIAAGADTFDCVSPSRVARNAAVYSTTGRFNITNARFRRDFTPIDADCDCYTCAHYTKAYIHHLFKAKEILSATLCTIHNERFVVRLVDRIRAAIETGDFDELRADVLGRYYATRTR

SEQ ID NO: 57897 - protein, 404 aa, Mycolicibacterium flavescens
  misc_feature (1)..(404): tr|A0A1E3R9A5|A0A1E3R9A5_MYCFV Queuine tRNA-ribosyltran sferase OS=Mycolicibacterium flavescens OX=1776 GN=tgt PE=3 SV=1
MAEPFFSVAAELPGRPGRTGVIRTPHGQIRTPAFIPVGTQATVKAVLPETVAALGAQALLANAYHLYLQPGPDIVEDAGGLGAFMNWPGPTFTDSGGFQVLSLGAGFRKVLAMDTERIQADDIIAEGKERLADVDDDGVTFRSHLDGTTHRFTPEVSIGIQNKLGADIIFAFDELTTLVNTRGYQERSVQRTHEWALRCLAEHQRLQAQRTDRPRQALFGVVQGAQYEDLRRQAARGLAALDFDGFGVGGALEKQNLATIVGWVTSELPADKPRHLLGISEPDDLFAAVAAGADTFDCVSPSRVARNAAVYSATGRFNITNSRFRRDFTPIDDECDCYTCGHYTRAYLHHLFKAKEMLSATLCTIHNERFVVRLVDRIRDAIEAGEFDELRDHTLGRYYSTSAQ

SEQ ID NO: 57898 - protein, 414 aa, Mycolicibacterium fortuitum
  misc_feature (1)..(414): tr|A0A100WSK9|A0A100WSK9_MYCFO Queuine tRNA-ribosyltran sferase OS=Mycolicibacterium fortuitum subsp. acetamido lyticum OX=144550 GN=tgt PE=3 SV=1
MDQPYFTVEAELPGRFGRVGTIHTPHGDIHTPAFIAVGTAATVKSVLPETMKQIGAQAILANAYHLYLQPGPDIVAEAGGLGAFMNWPGPTFTDSGGFQVMSLGVGFKKVLAMDTERLQTDDIIAKGKERLAVVDDDGVTFRSHLDGSKHRFTPEVSIGIQNKLGADIIFAFDELTTLVNTRGYQESSVQRTHEWAVRCLAEHHRLQALSPERPRQALFGVVQGAQYEDLRRQAARGLASIGQEAGPAEGLSFDGYGIGGALEKQNLATIVGWCSSELPADKPRHLLGISEPDDLFDAVAAGADTFDCVSPSRVARNAAVYSATGRFNITGARYKRDFTPIDAECDCYTCANYSRAYIRHLFKAKEMLSATLCTIHNERFVIRLVDQIRASIVAGEFDELKAHVLGRYYGVPIS

SEQ ID NO: 57899 - protein, 414 aa, Mycolicibacterium fortuitum; identical to SEQ ID NO: 57898
  misc_feature (1)..(414): tr|K0VMY4|K0VMY4_MYCFO Queuine tRNA-ribosyltransferase OS=Mycolicibacterium fortuitum subsp. fortuitum DSM 466 21 = ATCC 6841 OX=1214102 GN=tgt PE=3 SV=1

SEQ ID NO: 57900 - protein, 409 aa, Mycolicibacterium gilvum
  misc_feature (1)..(409): tr|A0A378SW38|A0A378SW38_9MYCO Queuine tRNA-ribosyltran sferase OS=Mycolicibacterium gilvum OX=1804 GN=tgt PE=3 SV=1
MTAELPGRLGRTGVIRTPHGDIQTPAFIAVGTQATVKAVLPETMKQVGAQAVLANAYHLYLQPGPDIVDEAGGLGAFMNWPGPTFTDSGGFQVMSLGVGFKKVLAMDTERVRADDIIAEGKERLAHVDDDGVTFRSHLDGSSHRFTPEVSIGIQHQLGADIIFAFDELTTLVNTREYQERSVQRTHEWAVRCLAEHHRLSEVRSHTPPQALFGVVQGAQYEDLRRQAARGLAEIGRDKGPAEGLSFDGYGIGGALEKQNLATIVGWVSSELPDDKPRHLLGISEPDDLFAAVAAGADTFDCVSPSRVARNAAVYSADGRYNITGARYRRDFTPIDAECDCYTCAHYTRAYLHHLFKAKELLAATLCTIHNERFIIRLVDDIRAAIPAGRFDELREHVLGRYYATRPSAQ

SEQ ID NO: 57901 - protein, 402 aa, Mycolicibacterium gilvum
  misc_feature (1)..(402): tr|E6TKM2|E6TKM2_MYCSR Queuine tRNA-ribosyltransferase OS=Mycolicibacterium gilvum (strain DSM 45189 / LMG 245 58 / Spyr1) OX=278137 GN=tgt PE=3 SV=1
MTAELPGRLGRTGVIRTPHGEIRTPAFIAVGTQATVKAVLPETMKQVGAQAVLANAYHLYLQPGPDIVDEAGGLGAFMNWPGPTFTDSGGFQVMSLGVGFKKVLAMDTERVRADDIIAEGKERLAHVDDDGVTFRSHLDGSSHRFTPEVSIGIQHQLGADIIFAFDELTTLVNTREYQESSVQRTHEWAVRCLVEHRRLSDVRSHTPQQALFGVVQGAQYEDLRRQAARGLTGIVDEHGRGFDGYGIGGALEKQNLATIVGWVSSELPDDKPRHLLGISEPDDLFAAVEAGADTFDCVSPSRVARNAAVYSADGRYNITGARYRRDFTPIDAECDCYTCANYTRAYLHHLFKAKELLAATLCTIHNERFIIRLVDDIRASIPAGRFDELREHVLGRYYAAKS

SEQ ID NO: 57902 - protein, 407 aa, Mycolicibacterium hassiacum
  misc_feature (1)..(407): tr|K5B9N2|K5B9N2_MYCHD Queuine tRNA-ribosyltransferase OS=Mycolicibacterium hassiacum (strain DSM 44199 / CIP 105218 / JCM 12690 / 3849) OX=1122247 GN=tgt PE=3 SV=1
MQDSSRPAFFTVDTELPGRLGRTGVIRTPHGDIHTPAFVPVGTQATVKAVLPETMKELGAQAILANAYHLYLQPGPDIVAEAGGLGAFMNWPGPTFTDSGGFQVLSLGAGFRKVLAMDANRVQADDVIAKGKERLAHVDDDGVTFRSHLNGSIHRFTPEVSIGIQHKLGADIIFAFDELTTLVNTRGYQERSVRRTHEWAVRCMAEHRRLSEAHPDKPPQALFGVVQGAQYEDLRRAAARGLTEIGFDGYGIGGALEKQNLAAIVEWVCSELPPDKPRHMLGISEPDDLFAAIAAGADTFDCVSPSRVARNAALYSPTGRFNITNARFRRDFTPIDDECDCYTCAHYTRAYLHHLFKAKELLANTLATIHNERFIIRLVDRIRAAIKAGEFDDLREEVLGRYYGSRR

SEQ ID NO: 57903 - protein, 411 aa, Mycolicibacterium hodleri
  misc_feature (1)..(411): tr|A0A544VYA6|A0A544VYA6_9MYCO Queuine tRNA-ribosyltran sferase OS=Mycolicibacterium hodleri OX=49897 GN=tgt PE =3 SV=1
MSTPPYFEVKAQLPGRSGRVGVIHTPHGDVHTPAFVAVGTAATVKAVLPESMKDVGAQAVLSNAYHLYLQPGPDVVDEAGGLGAFMNWPGPTFTDSGGFQVLSLGVGFKKVLSMDTGRVQADDVIAEGKERLAHVDDDGVTFRSHKDGSIHRFTPEVSIGIQHQLGADIIFAFDELTTLMNTRGYQETSVQRTHDWAVRCLAEHRRLGIARAHKPAQALFGVVQGAQYEDLRRQAAKGLTEIRDEDGRGFDGYGIGGALEKQNLATIVGWVTDELPDDKPRHLLGISEPDDLFAAVAAGADTFDCVSPSRVARNAAVYSATGRYNITGARYKRDFTPIDAECDCYTCANYTRAYIHHLFKAKEMLSSTLCTIHNERFVIRMVDQIRAAITAGEFDELREHVLGRYYSARAQ

SEQ ID NO: 57904 - protein, 408 aa, Mycolicibacterium hodleri
  misc_feature (1)..(408): tr|A0A502DVB0|A0A502DVB0_9MYCO Queuine tRNA-ribosyltran sferase OS=Mycolicibacterium hodleri OX=49897 GN=tgt PE =3 SV=1
MSTPSFFEVEAHLPGRAGRAGVIHTPHGDIRTPAFIAVGTAATVKAVLPESMKDVGAQAVLANAYHLYLQPGPDVVDEAGGLGAFMNWPGPTFTDSGGFQVLSLGVGFKKVLSMDAGRVQADDVIAEGKQRLAHVDDDGVTFRSHTDGSTHRFTPEVSIGIQHQLGADIIFAFDELTTLMNTRGYQESSVRRTHDWAVRCLAEHRRLGVERSDKPAQALFGVVQGAQYEDLRRQASSGLTKIVDADGRGFDGYGIGGALEKQNLATIVGWCTEELPDDKPRHLLGISEPDDLFAAVEAGADTFDCVSPSRVARNAAVYSANGRYNITGARYKRDFTPIDAECDCYTCANYTRAYIHHLFKAKEMLSSTLCTIHNERFVIRLVDQIRSAIVADDFDELREHVLGRYYSS

SEQ ID NO: 57905 - protein, 427 aa, Mycolicibacterium holsaticum
  misc_feature (1)..(427): tr|A0A1E3S2P8|A0A1E3S2P8_9MYCO Queuine tRNA-ribosyltran sferase OS=Mycolicibacterium holsaticum OX=152142 GN=tg t PE=3 SV=1
MTAPNTARPSDSPARFFTVEAELPGRLGRAGTIRTPHGDIHTPAFIPVGTQATVKAVLPETMKELGAQAILANAYHLYLQPGPDIVAAAGGLGAFMNWPGPTFTDSGGFQVLSLGAGFRKVLAMDTERVQADDIIAEGKERLAAVDDDGVTFRSHLDGSTHRFTPEVSIGIQHRLGADIIFAFDELTTLVNTRGYQEQSVQRTHAWAVRCLAEHRRLAAADPDQPRQALFGVVQGAQYEDLRRQAARGLTTIVDDEGAGFDGYGIGGALEKQNLATIVGWVSSELPDDKPRHMLGISEPDDLFAAVAAGADTFDCVSPSRVARNAAVYSVTGRFNITNSRYRRDFTPIDAECDCYTCAHYTRAYLHHLFKAKEILSATLCTIHNERFTVRLVDQIRAAIRAGEFDELRAHTLGRFYAERDHRAGKCE

SEQ ID NO: 57906 - protein, 411 aa, Mycolicibacterium insubricum
  misc_feature (1)..(411): tr|A0A1X0DAW9|A0A1X0DAW9_9MYCO Queuine tRNA-ribosyltran sferase OS=Mycolicibacterium insubricum OX=444597 GN=tg t PE=3 SV=1
MGENFTVGDRLPGRRGRTGTLRTPHGEIATPAFVPVGTKATVKAMLPETVKSLGAQAVLANAYHLYLQPGADIVDEAGGLGRFMNWPGPTFTDSGGFQVLSLGSGFRKVLAMDTERVRADDVIAKGKDRLARVDDDGVTFTSHLDGSTHRFTPEVSMGIQHQLGADIIFAFDELTTLINTRKYQEDSVARTHAWAIRCLVEHHRLRSAAPQRPAQALFGVIQGAQYEDLRRAATRGLVDIGEQPGPAEGLSFDGYGIGGALEKQNLGTIVGWVVDELPEDKPRHLLGISEPDDLFAAIEAGADTFDCVSPSRVARNAAIYSHAGRYNVTGARYKRDFTPLDPECDCYTCANYTRAYIHHLFKAKEILSATLCTIHNERFTISLVDRIRASITDGTFDELRAEVLGRYYRDR

SEQ ID NO: 57907 - protein, 409 aa, Mycolicibacterium iranicum
  misc_feature (1)..(409): tr|A0A1X1WFW6|A0A1X1WFW6_9MYCO Queuine tRNA-ribosyltran sferase OS=Mycolicibacterium iranicum OX=912594 GN=tgt PE=3 SV=1
MTGPFFTVDAYLPGRLGRTGTIRTPHGDIQTPAFIAVGTQATVKAVLPETMKQVGAQAVLANAYHLYLQPGPDIVDEAGGLGAFMNWPGPTFTDSGGFQVMSLGVGFKKVLAMDTERVQADDIIAEGKERLAHVDDDGVTFRSHLDGSTHRFTPEVSIGIQHQLGADIIFAFDELTTLVNTRAYQKSSVQRTHEWAVRCLAEHRRLSEVRSHKPPQALFGVVQGAQYEDLRRQATRGLLGIVDEDGRGFDGYGIGGALEKQNLATIVSWVTSELPADKPRHLLGISEPDDLFAAVEAGADTFDCVSPSRVARNAAVYSVHGRYNITGSRYRRDFTPIDAECDCYTCANYTRAYLHHLFKAKELLAATLCTIHNERFVIRLLDDIRAAIPAGRFDELREHVLGRYYAAKT

SEQ ID NO: 57908 - protein, 409 aa, Mycolicibacterium iranicum
  misc_feature (1)..(409): tr|A0A178LXK9|A0A178LXK9_9MYCO Queuine tRNA-ribosyltran sferase OS=Mycolicibacterium iranicum OX=912594 GN=tgt PE=3 SV=1
MTGPFFSVDADLPGRLGRTGTIRTPHGDIQTPAFIAVGTQATVKAVLPETMKQVGAQAVLANAYHLYLQPGPDIVDEAGGLGAFMNWPGPTFTDSGGFQVMSLGVGFKKVLAMDTDRVQADDIIAEGKERLAHVDDDGVTFRSHLDGSTHRFTPEVSIGIQHQLGADIIFAFDELTTLVNTRAYQESSVQRTHEWAVRCLVEHRRLSKVRSHKPPQALFGVVQGAQYEDLRRQATRGLTEIVDEDGRGFDGYGIGGALEKQNLATIVGWVTSELPADKPRHLLGISEPDDLFAAVEAGADTFDCVSPSRVARNAAVYSVYGRYNITGSRYRRDFAPIDAECDCYTCANYTRAYLHHLFKAKELLAATLCTIHNERFVIRLLDDIRAAIPAGRFDELREHVLGRYYASKV

SEQ ID NO: 57909 - protein, 405 aa, Mycolicibacterium litorale
  misc_feature (1)..(405): tr|A0A4R8J132|A0A4R8J132_9MYCO Queuine tRNA-ribosyltran sferase OS=Mycolicibacterium litorale OX=758802 GN=tgt PE=3 SV=1
MLNTRVGQQFFTVEARLPGQRGRVGVIHTPHGDIHTPAFIAVGTQATVKAVLPETMKELGAQAVLANAYHLYLQPGPDIVDAAGGLGAFMNWPGPTFTDSGGFQVMSLGVGFKKVLAMDANRVQTDDVIAKGKERLAHVDEDGVTFRSHLDGTTHRFTPEASIGIQHQLGADIIFAFDELTTLVNTRGYQEQSVQRTHEWAVRCLAEHRRLREERSHKPPQALFGVVQGAQYEDLRRRGARGLAELGFDGFGIGGALEKQNLATIVGWVTDELPEDKPRHLLGISEPDDLFAAVAAGADTFDCVSPSRVARNAAVYSATGRYNITGARYRRDFTPIDAECDCYTCAHYTRAYIRHLFKAKEMLASTLCTIHNERFVIRLVDQIRAAITAGEFDELRDHVLGRYYG

SEQ ID NO: 57910 - protein, 415 aa, Mycolicibacterium litorale
  misc_feature (1)..(415): tr|A0A1U9PNA0|A0A1U9PNA0_9MYCO Queuine tRNA-ribosyltran sferase OS=Mycolicibacterium litorale OX=758802 GN=tgt PE=3 SV=1
MRPFFTVDAQLPGRRGRTGVIHTPHGDIATPAFVAVGTKASVKAVLPETMAQLGAQAVLANAYHLYLQPGPDIVDEAGGLGAFMNWPGPTFTDSGGFQVLSLGAGFRKVLSMDANRVQTDEVIAEGKQRLAHVDDDGVTFISHLDGSTHRFTPEVSMQIQHKIGADIIFAFDELTTLVNTRGYQEESVARTHAWAVRCLTEHRRLTAERPQRPAQALFGVVQGAQYEDLRRQAARELAGIVDADGRGFDGYGIGGALEKQNLATIVGWCIDELPDDKPRHLLGISEPDDLFAAIAAGADTFDCVSPSRVARNAAVYSPTGRFNITGARYRRDFTPIDADCDCYTCGHYTRAYLHHLFKAKEILSATLCTIHNERFVIRLVDQIRAAIVAGEFDELRDHMLGNYYRQSPGHSTRAQ

SEQ ID NO: 57911 - protein, 408 aa, Mycolicibacterium llatzerense
  misc_feature (1)..(408): tr|A0A0D1J1P4|A0A0D1J1P4_9MYCO Queuine tRNA-ribosyltran sferase OS=Mycolicibacterium llatzerense OX=280871 GN=t gt PE=3 SV=1
MNQQFFEVTAQLPGRRGRAGVIHTPHGDIQTPAFIAVGTAATVKGVLPETMKELGAQALLANAYHLYLQPGPDVVDEAGGLGAFMNWPGPTFTDSGGFQVMSLGVGFKKVLAMDTARLQADDIIAEGKERLAHVDEDGVTFRSHLNGDKHRFTPEVSIGIQHQLGADIIFAFDELTTLVNTRAYQERSVERTHRWAVRCLAEHRRLSIERAGKPAQALFGVVQGAQYEDLRRQATKGLVGIVDEDGHGFDGYGIGGALEKQNLATIVGWVTDELPDDKPRHLLGISEPDDLFAAIEAGADTFDCVSPSRVARNAAMYSATGRFNVTNARFKRDFNPIDAECDCYTCANYTRAYLHHLFKAKEILASTLGTIHNERFIIRLIDQIRAAIGAGEFDELRDHVLGRYYGTK

SEQ ID NO: 57912 - protein, 410 aa, Mycolicibacterium mageritense
  misc_feature (1)..(410): tr|A0A5C7YPG6|A0A5C7YPG6_9MYCO Queuine tRNA-ribosyltran sferase OS=Mycolicibacterium mageritense OX=53462 GN=tg t PE=3 SV=1
MDQPYFTVEAELAGRLGRVGTIHTPHGDIQTPAFIAVGTQATVKSVLPETMKQLGAQAILANAYHLYLQPGPDIVAEAGGLGAFMNWPGPTFTDSGGFQVMSLGVGFKKVLAMDTERLQTDDIIAKGKERLAVVDDDGVTFRSHLDGSKHRFTPEISIGIQHQLGADIIFAFDELTTLVNTRGYQESSVQRTHEWAVRCLIEHHRLQDSTPERPRQALFGVVQGAQYEDLRRQAARGLTEIRTADGHGFDGYGIGGALEKQNLATIVGWVSSELPADKPRHLLGISEPDDLFDAVAAGADTFDCVSPSRVARNAAVYSSTGRFNITGARYKRDFTPIDAECDCYTCANYSRAYIRHLFKAKEMLSATLCTIHNERFVIRLVDQIRAAIVAGEFDELRAHVLGRYYGTPVS

SEQ ID NO: 57913 - protein, 410 aa, Mycolicibacterium mageritense; identical to SEQ ID NO: 57912
  misc_feature (1)..(410): tr|X5L9H0|X5L9H0_9MYCO Queuine tRNA-ribosyltransferase OS=Mycolicibacterium mageritense DSM 44476 = CIP 104973 OX=1209984 GN=tgt PE=3 SV=1

SEQ ID NO: 57914 - protein, 410 aa, Mycolicibacterium monacense
  misc_feature (1)..(410): tr|A0A1X0GV50|A0A1X0GV50_9MYCO Queuine tRNA-ribosyltran sferase OS=Mycolicibacterium monacense DSM 44395 OX=122 6751 GN=tgt PE=3 SV=1
MDQQFFTVEAELPGRRGRAGVIRTPHGEIRTPAFIAVGTQATVKAVLPETMRELGAQAVLANAYHLYLQPGPDVVAAAGGLGAFMNWPGPTFTDSGGFQVLSLGAGFRKVLAMDANRVQADDVIAKGKERLAVVDDDGVTFRSHLNGTTHRFTPEVSIGIQHQLGADIIFAFDELTTLVNTRGYQEDSVRRTHRWAERCLAEHRKLSLENHEKPPQALFGVVQGAQYEDLRRQAARELTEILDEDGRGFDGYGIGGALEKQNLATIVGWVTSELPDDKPRHLLGISELDDLFAAVEAGADTFDCVSPSRVARNAAVYSATGRYNITGSRYRRDFTPIDAECDCYTCAHYTRGYIHHLFKAKEMLASTLCTIHNERFVVRLVDQIRASIVAGNFDELREHVLGRYYAARGQ

SEQ ID NO: 57915 - protein, 405 aa, Mycolicibacterium moriokaense
  misc_feature (1)..(405): tr|A0A370CXP7|A0A370CXP7_9MYCO Queuine tRNA-ribosyltran sferase OS=Mycolicibacterium moriokaense OX=39691 GN=tg t PE=3 SV=1
MEAELPGRLGRAGVIRTPHGDIRTPAFVAVGTQATVKAVVPEVMKELGAQAILANAYHLYLQPGPDIIEQAGGLGTFMNWPGPTFTDSGGFQVLSLGAGFRKVLAMDTERVQADDIIAEGKQRLARVDEDGVTFTSHLNGSSHRFTPEVSIGIQHQIGADIIFAFDELTTLVNTRGYQEESVARTHRWAARCLAEHRRLTAARPDRDPQALFGVVQGAQYEDLRRQAARGLVSIVDDGGRGFDGYGIGGALEKQNLATIVGWVSSELPADKPRHMLGISEPDDLFAAVAAGADTFDCVSPSRVARNAAVYCATGRYNITGARYRRDFTPIDAECDCYTCANYTRAYLHHLFKAKEILAATLCTIHNERFVIRLVDQIRAAIKAGEFDELRAHVLGRYYAQTDKRA

SEQ ID NO: 57916 - protein, 418 aa, Mycolicibacterium moriokaense
  misc_feature (1)..(418): tr|A0A1X0H2I5|A0A1X0H2I5_9MYCO Queuine tRNA-ribosyltran sferase OS=Mycolicibacterium moriokaense OX=39691 GN=tg t PE=3 SV=1
MAAPNSSAPKDSSAPFFSIDAELPDRPGRAGVIRTARGDIHTPAFIPVGTQATVKAVLPEIMKSLGAQAILANAYHLYLQPGPDIVDEAGGLGAFMNWPGPTFTDSGGFQVLSLGAGFRKVLAMDTKRVQADDIIAEGKERLANVDDDGVTFRSHLDGSTHRFTPESSIRIQHQLGADIIFAFDELTTLVNTRGYQEQSVQRTHDWAVRCVIEHRRLTAAAPDRPKQALFGVVQGAQYEDLRRAAARGLTKIVGEDGVGFDGYGIGGALEKQNLATIVGWVTSELPEDKPRHLLGISEPDDLFDAIAAGADTFDCVSPSRVARNAAVYSATGRFNITNARYRRDFTPIDADCDCYTCENYTRAYLHHLFKAKEILSATLCTIHNERFVIRMVDKIRAAIRTGEFDELRAEVLGRYYST

SEQ ID NO: 57917 - protein, 407 aa, Mycolicibacterium mucogenicum
  misc_feature (1)..(407): tr|A0A1A0MH75|A0A1A0MH75_9MYCO Queuine tRNA-ribosyltran sferase OS=Mycolicibacterium mucogenicum OX=56689 GN=tg t PE=3 SV=1
MSQQFFEVTAQLPDRRGRAGVIHTPHGDIQTPAFIAVGTAATVKGVLPETMKELGAQALLANAYHLYLQPGPDVVDEAGGLGAFMNWPGPTFTDSGGFQVMSLGVGFKKVLAMDTARLQADDIIAEGKERLAHVDEDGVTFRSHLNGDKHRFTPEVSIGIQHQLGADIIFAFDELTTLVNTRAYQERSVERTHRWAVRCLAEHRRLSIERAGKPAQALFGVVQGAQYEDLRRQATKGLVGIVDDDGHGFDGYGIGGALEKQNLATIVGWVTDELPDDKPRHLLGISEPDDLFAAIEAGADTFDCVSPSRVARNAAMYSATGRFNVTNARFKRDFNPIDAECDCYTCANYTRAYLHHLFKAKEILASTLGTIHNERFIIRLVDQIRAAITAGEFDELRDHVLGRYYRS

SEQ ID NO: 57918 - protein, 407 aa, Mycolicibacterium mucogenicum
  misc_feature (1)..(407): tr|A0A4R5WJS4|A0A4R5WJS4_9MYCO Queuine tRNA-ribosyltran sferase OS=Mycolicibacterium mucogenicum OX=56689 GN=tg t PE=3 SV=1
MSQQFFEVTAQLPDRRGRAGVIHTPHGDIQTPAFIAVGTAATVKGVLPETMKELGAQALLANAYHLYLQPGPDVVDEAGGLGAFMNWPGPTFTDSGGFQVMSLGVGFKKVLAMDTARLQADDIIAEGKERLAHVDEDGVTFRSHLNGDKHRFTPEVSIGIQHQLGADIIFAFDELTTLVNTRAYQERSVERTHRWAVRCLAEHRRLSIERAGKPAQALFGVVQGAQYEDLRRQATKGLVGIVDDDGHGFDGYGIGGALEKQNLATIVGWVTDELPDDKPRHLLGISEPDDLFAAIEAGADTFDCVSPSRVARNAAMYSATGRFNVTNARFKRDFNPIDAECDCYTCANYTRAYLHHLFKAKEILASTLGTIHNERFIIRLVDQIRAAITAGEFDELRNHVLGRYYRS

SEQ ID NO: 57919 - protein, 409 aa, Mycolicibacterium neoaurum
  misc_feature (1)..(409): tr|A0A024QLV6|A0A024QLV6_MYCNE Queuine tRNA-ribosyltran sferase OS=Mycolicibacterium neoaurum OX=1795 GN=tgt PE =3 SV=1
MFFEVQAELPGRPGRVGTIHTPHGDIQTPAFIAVGTQATVKAVLPETMKEIGAQAVLANAYHLYLQPGPDVVDEAGGLGAFMNWPGPTFTDSGGFQVLSLGVGFKKVLSMDATRVQADDIIAEGKERLAHVDEDGVTFRSHLDGSTHRFTPEVSIGIQHQLGADIIFAFDELTTLVNTRSYQEQSVRRTHRWAERCLAEHHRLTEVRHDKPYQALFGVVQGAQYEDLRRQATRDLVRIGEGTGPAEGLSFDGYGIGGALEKQNLATIVEWVTSELPADKPRHLLGISEPDDLFAAVAAGADTFDCVSPSRVARNAAVYSVHGRYNITGARYKRDFTPIDAECDCYTCAHYTRAYIHHLFKAKEMLASTLCTIHNERFTIRLVDQIRAAILAGEFDELRAEVLGRYYGSK

SEQ ID NO: 57920 - protein, 405 aa, Mycolicibacterium neoaurum
  misc_feature (1)..(405): tr|V5XIR4|V5XIR4_MYCNE Queuine tRNA-ribosyltransferase OS=Mycolicibacterium neoaurum VKM Ac-1815D OX=700508 GN =tgt PE=3 SV=1
MQAELPGRPGRVGTIHTPHGDIQTPAFIAVGTQATVKAVLPETMKEIGAQAVLANAYHLYLQPGPDVVDEAGGLGAFMNWPGPTFTDSGGFQVLSLGVGFKKVLSMDATRVQADDIIAEGKERLAHVDDDGVTFRSHLDGSTHRFTPEVSIGIQHQLGADIIFAFDELTTLVNTRSYQEQSVRRTHRWAERCLAEHHRLTEVRHDKPYQALFGVVQGAQYEDLRRQATRDLVRIGEGAGPAEGLSFDGYGIGGALEKQNLATIVEWVTSELPADKPRHLLGISEPDDLFAAVAAGADTFDCVSPSRVARNAAVYSVHGRYNITGARYKRDFTPIDAECDCYTCAHYTRAYIHHLFKAKEMLASTLCTIHNERFTIRLVDRIRAAILAGEFDELRAEVLGRYYGSR

SEQ ID NO: 57921 - protein, 414 aa, Mycolicibacterium neworleansense
  misc_feature (1)..(414): tr|A0A0H5RUP6|A0A0H5RUP6_9MYCO Queuine tRNA-ribosyltran sferase OS=Mycolicibacterium neworleansense OX=146018 G N=tgt PE=3 SV=1
MDQPYFTVEAELPGRLGRVGTIHTPHGDIHTPAFIAVGTAATVKSVLPETMKELGAQAVLANAYHLYLQPGPDIVAEAGGLGAFMNWPGPTFTDSGGFQVMSLGVGFKKVLAMDTERLQTDDIIAKGKERLAVVDDDGVTFRSHLDGSKHRFTPEVSIGIQNKLGADIIFAFDELTTLVNTRAYQESSVQRTHEWALRCLAEHHRLQALSPERPRQALFGVVQGAQYEDLRRQAARGLATIGQEAGPAEGLSFDGYGIGGALEKQNLATIVGWVSSELPADKPRHLLGISEPDDLFDAVAAGADTFDCVSPSRVARNAAVYSATGRFNITGARYKRDFTPIDAECDCYTCANYSRAYIRHLFKAKEMLSATLCTIHNERFVIRLVDQIRASIVAGEFDELRAHVLGRYYGVPIS

SEQ ID NO: 57922 - protein, 423 aa, Mycolicibacterium novocastrense
  misc_feature (1)..(423): tr|A0A100ZC19|A0A100ZC19_9MYCO Queuine tRNA-ribosyltran sferase OS=Mycolicibacterium novocastrense OX=59813 GN= tgt PE=3 SV=1
MPKSSAPKESSAPFFSVTAELRGRAGRTGVIRTPHGEIRTPAFIPVGTQATVKAVLPETMKELGAQALLANAYHLYLQPGPDIVDEAGGLSVFMNWPGPTFTDSGGFQVLSLGAGFRKVLAMDAERVQADDIIAEGKERLANVDDDGVTFRSHLDGSTHRFTPEVSIGIQHQLGADIIFAFDELTTLVNTRGYQERSVQRTHEWAVRCLVEHRRQQAARPDKPEQALFGVVQGAQYEDLRRQAARGLVTIGAQAGPAEGLEFDGYGIGGALEKQNLATIVGWVVDELPVDKPRHLLGISEPDDLFDAIAAGADTFDCVSPSRVARNAAVYSTTGRFNITNARFRRDFTPIDAECDCYTCAHYTRAYIHHLFKAKEILSATLCTIHNERFVVRLVDRIRAAIETGEFDELRADVLGRYYATRTP

SEQ ID NO: 57923 - protein, 407 aa, Mycolicibacterium novocastrense
  misc_feature (1)..(407): tr|A0A100X2H8|A0A100X2H8_9MYCO Queuine tRNA-ribosyltran sferase OS=Mycolicibacterium novocastrense OX=59813 GN= tgt PE=3 SV=1
MTAELPGRAGRTGVIRTPHGQIRTPAFIPVGTQATVKAVLPETMKQLGAQALLANAYHLYLQPGPDIVDEAGGLSAFMNWPGPTFTDSGGFQVLSLGAGFRKVLAMDAERIQADDIIAEGKERLANVDDDGVTFRSHLDGSTHRFTPEVSIGIQHQLGADIIFAFDELTTLVNTRGYQERSVQRTHDWAVRCLVEHRRLRAERPDKLEQALFGIVQGAQYEDLRRQAARGLVTIGAQAGPAEGLEFDGYGIGGALEKQNLATIVGWVVDELPVDKPRHLLGISEPDDLFDAIAAGADTFDCVSPSRVARNAAVYSTTGRFNITNARFRRDFAPIDAECDCYTCAHYTRAYIHHLFKAKEILSATLCTIHNERFVVRLVDRIRAAIETGEFDELRADVLGRYYATRTP

SEQ ID NO: 57924 - protein, 417 aa, Mycolicibacterium obuense
  misc_feature (1)..(417): tr|A0A4R5X2L9|A0A4R5X2L9_9MYCO Queuine tRNA-ribosyltran sferase OS=Mycolicibacterium obuense OX=1807 GN=tgt PE= 3 SV=1
MPPPDTRDPFFCVDAELPGRRGRAGVIHTPHGEIRTPAFIAVGTQATVKAVLPETMKDLGAQAILANAYHLYLQPGADIVDEAGGLGAFMNWPGPTFTDSGGFQVMSLGVGFKKVLAMDTTRVQTDDIIAEGKQRLAHVDDDGVTFRSHLNGSMHRFTPEVSIGIQHQLGADIIFAFDELTTLVNTRGYQEQSVERTHRWAQRCLVEHRRLTEVRAHKPRQALFGVVQGAQYEDLRRQAARGLTEIVDDDGAGFDGYGIGGALEKQNLATIVGWVTSELPDDKPRHLLGISEPDDLFAAVEAGADTFDCVSPSRVARNAAIYSADGRYNITGSRYRRDFTPLDAECDCYTCAHYTRAYLRHLFKAKEILASTLATIHNERFVVRLVDDMRAAILAGRFDELREHVLGRYYGRAHNRA

SEQ ID NO: 57925 - protein, 417 aa, Mycolicibacterium obuense
  misc_feature (1)..(417): tr|A0A0M2K4F5|A0A0M2K4F5_9MYCO Queuine tRNA-ribosyltran sferase OS=Mycolicibacterium obuense OX=1807 GN=tgt PE= 3 SV=1
MPPPDTRDPFFCVDAELPGRRGRAGVIHTPHGEIRTPAFIAVGTQATVKAVLPETMKGLGAQAILANAYHLYLQPGADIVDEAGGLGAFMNWPGPTFTDSGGFQVMSLGVGFKKVLAMDTTRVQTDDIIAEGKQRLAHVDDDGVTFRSHLNGSMHRFTPEVSIGIQHQLGADIIFAFDELTTLVNTRGYQEQSVERTHRWAQRCLVEHRRLTEVRAHKPRQALFGVVQGAQYEDLRRQAARGLTEIVDDDGAGFDGYGIGGALEKQNLATIVGWVTSELPDDKPRHLLGISEPDDLFAAVEAGADTFDCVSPSRVARNAAIYSADGRYNITGSRYRRDFTPLDAECDCYTCAHYTRAYLRHLFKAKEILASTLATIHNERFVVRLVDDMRAAILAGRFDELREHVLGRYYGRAHNRA

SEQ ID NO: 57926 - protein, 409 aa, Mycolicibacterium parafortuitum
  misc_feature (1)..(409): tr|A0A375YCE5|A0A375YCE5_MYCPF Queuine tRNA-ribosyltran sferase OS=Mycolicibacterium parafortuitum OX=39692 GN= tgt PE=3 SV=1
MPVPFFTVNSQLPGQLGRTGTIRTPHGDIQTPAFIAVGTQATVKAVLPETMKEIGAQAVLANAYHLYLQPGPDIVDAAGGLGAFMNWDGPTFTDSGGFQVMSLGVGFKKVLAMDTKRVQADDIIAEGKQRLAHVDDDGVTFRSHLDGSTHRFTPEVSIGIQHQLGADIIFAFDELTTLVNTRAYQEQSVQRTHEWAVRCLAEHRRLSVERSHKPPQALFGVVQGAQYEDLRRKAARGLTEIVDADGRGFDGYGIGGALEKQNLSTIVGWVSSELPEDKPRHLLGISEPDDLFAAVAAGADTFDCVSPSRVARNAAVYSRDGRFNITGARYRRDFTPIDADCDCYTCANYTRAYLHHLFKAKEILSKTLCTIHNERFIIRLVDQIRESIPAGRFDELREDVLGRYYATKV

SEQ ID NO: 57927 - protein, 414 aa, Mycolicibacterium peregrinum
  misc_feature (1)..(414): tr|A0A1X2B868|A0A1X2B868_MYCPR Queuine tRNA-ribosyltran sferase OS=Mycolicibacterium peregrinum OX=43304 GN=tgt PE=3 SV=1
MDQPYFTVKAELPGRLGRVGTIHTPHGDIQTPAFIAVGTAATVKSVLPETMKQLGAQAILANAYHLYLQPGPDVVAEAGGLGAFMNWPGPTFTDSGGFQVMSLGVGFKKVLAMDTERLQADDIIAKGKERLAHVDDDGVTFRSHLDGSKHRFTPEISIGIQNKLGADIIFAFDELTTLVNTRAYQESSVQRTHEWAVRCLAEHHRLQALSPERPRQALFGVVQGAQYEDLRRQAASGLASIGQEAGPAEGLSFDGYGIGGALEKQNLATIVGWVSSELPADKPRHLLGISEPDDLFDAVAAGADTFDCVSPSRVARNAAVYSATGRFNITGARYKRDFTPIDAECDCYTCANYSRAYIRHLFKAKEMLSATLCTIHNERFVIRLVDQIRASILAGEFDELRSHVLGRYYGVPVN

SEQ ID NO: 57928 - protein, 414 aa, Mycolicibacterium peregrinum
  misc_feature (1)..(414): tr|A0A1A0VRK3|A0A1A0VRK3_MYCPR Queuine tRNA-ribosyltran sferase OS=Mycolicibacterium peregrinum OX=43304 GN=tgt PE=3 SV=1
MDQPYFTVEAELPGRLGRVGTIHTPHGDIQTPAFIAVGTAATVKSVLPETMKQLGAQAILANAYHLYLQPGPDVVAEAGGLGAFMNWPGPTFTDSGGFQVMSLGVGFKKVLAMDTERLQADDIIAKGKERLAHVDDDGVTFRSHLDGSKHRFTPEISIGIQNKLGADIIFAFDELTTLVNTRAYQESSVQRTHEWAVRCLAEHHRLQALSPERPRQALFGVVQGAQYEDLRRQAASGLASIGQEAGPAEGLSFDGYGIGGALEKQNLATIVGWVSSELPADKPRHLLGISEPDDLFDAVAAGADTFDCVSPSRVARNAAVYSATGRFNITGARYKRDFTPIDAECDCYTCANYSRAYIRHLFKAKEMLSATLCTIHNERFVIRLVDQIRASILAGEFDELRSHVLGRYYGVPVN

SEQ ID NO: 57929 - protein, 411 aa, Mycolicibacterium phlei
  misc_feature (1)..(411): tr|A0A3S4R727|A0A3S4R727_MYCPH Queuine tRNA-ribosyltran sferase OS=Mycolicibacterium phlei OX=1771 GN=tgt PE=3 SV=1
MTDPYFSIDATLPGTAGRAGVIHTPHGDIQTPAFIAVGTKATVKAVLPETMAALGAQAVLANAYHLYLQPGPDIVDEAGGLGAFMNWPGPTFTDSGGFQVLSLGSGARKVMAMDLDRARSDDVMGSLGGGKKKDKLAHVDDDGVTFTSHLDGSTHRFTPEVSMQIQHQLGADIIFAFDELTTLINTREYQEDSVQRTHEWAQRCLDEHEKLTRERADKPYQALFGVVQGAQYEDLRRQAARGLESLASAQGRGFDGYGIGGALEKQNLGTIVGWVTSELPEHKPRHLLGISEPDDLFAAVAAGADTFDCVSPSRVARNAAVYTRDGRVNITGSKYRRDFTPIDAECDCYTCTHYTRAYMHHLFKAKEILASTLATIHNERFTIGLVDRIRASIVDGRFEELREETLGRYYR

SEQ ID NO: 57930 - protein, 410 aa, Mycolicibacterium phlei; identical to SEQ ID NO: 57862
  misc_feature (1)..(410): tr|A0A139VFN2|A0A139VFN2_MYCPH Queuine tRNA-ribosyltran sferase OS=Mycolicibacterium phlei DSM 43239 = CCUG 210 00 OX=1226750 GN=tgt PE=3 SV=1

SEQ ID NO: 57931 - protein, 423 aa, Mycolicibacterium porcinum
  misc_feature (1)..(423): tr|A0A1Q8XZ27|A0A1Q8XZ27_9MYCO Queuine tRNA-ribosyltran sferase OS=Mycolicibacterium porcinum OX=39693 GN=tgt P E=3 SV=1
MDQPYFTVEAELPGRLGRVGTIHTPHGDIQTPAFIAVGTAATVKSVLPETMKQIGAQAILANAYHLYLQPGPDIVAEAGGLGTFMNWPGPTFTDSGGFQVMSLGVGFKKVLAMDTERLQKDDIIAKGKERLAVVDDDGVTFRSHLDGSKHRFTPEVSIGIQNKLGADIIFAFDELTTLVNTRAYQESSVQRTHDWAVRCLAEHHRLQALSPERPRQALFGVVQGAQYEDLRRQAARGLAAIGQESGPAEGLSFDGYGIGGALEKQNLATIVGWVSSELPADKPRHLLGISEPDDLFDAVAAGADTFDCVSPSRVARNAAVYSATGRFNITGAKYKRDFTPIDAECDCYTCANYSRAYIRHLFKAKEMLSATLCTIHNERFVIRLVDQIRASIVAGEFDELRAHVLGRYYGVPADERLREERKA

SEQ ID NO: 57932 - protein, 414 aa, Mycolicibacterium porcinum
  misc_feature (1)..(414): tr|A0A393Y933|A0A393Y933_9MYCO Queuine tRNA-ribosyltran sferase OS=Mycolicibacterium porcinum OX=39693 GN=tgt P E=3 SV=1
MDQPYFTVEAELPGRFGRVGTIHTPHGDIHTPAFIAVGTAATVKSVLPETMKQLGAQAILANAYHLYLQPGPDIVAEAGGLGAFMNWPGPTFTDSGGFQVMSLGVGFKKVLAMDTERLQKDDIIAKGKERLAVVDDDGVTFRSHLDGSKHRFTPEVSIGIQNQLGADIIFAFDELTTLVNTRGYQESSVQRTHEWAVRCLAEHHRLQGLSPERPRQALFGVVQGAQYEDLRRQAARGLATIGQEAGPAEGLSFDGYGIGGALEKQNLATIVGWVSSELPADKPRHLLGISEPDDLFDAVAAGADTFDCVSPSRVARNAAVYSATGRFNITGAKYKRDFTPIDAECDCYTCANYSRAYIRHLFKAKEMLSATLCTIHNERFVIRLVDQIRASIVAGEFDELRAHVLGRYYGVPIS

SEQ ID NO: 57933 - protein, 417 aa, Mycolicibacterium rhodesiae
  misc_feature (1)..(417): tr|G8RPR1|G8RPR1_MYCRN Queuine tRNA-ribosyltransferase OS=Mycolicibacterium rhodesiae (strain NBB3) OX=710685 GN=tgt PE=3 SV=1
MVAPNSPAPSDSSAPFFSIDAELSGRRGRAGVIRTPHGDIHTPAFIPVGTQATVKAVLPETMRSLNAQAVLANAYHLYLQPGPDIVAEAGGLGAFMNWPGPTFTDSGGFQVLSLGAGFRKVLAMDTERVQADDIIAEGKERLANVDDDGVTFRSHLDGSTHRFTPEVSIGIQHQLGADIIFAFDELTTLVNTRGYQERSVQRTHEWAIRCVVEHRKLTNANPDKPPQALFGVVQGAQYEDLRRQATRGLTSIVGEDGIGFDGYGIGGALEKQNLATIVGWVTSELPDDKPRHLLGISEPDDLFDAVAAGADTFDCVSPSRVARNAAVYSTTGRFNITNARYRRDFTPIDADCDCYTCAHYTRAYLHHLFKAKEILSATLCTIHNERFVVRMVDQIRAAIRAGEFDELRADVLGRYYS

SEQ ID NO: 57934 - protein, 410 aa, Mycolicibacterium rhodesiae
  misc_feature (1)..(410): tr|A0A1X0IRC1|A0A1X0IRC1_MYCRH Queuine tRNA-ribosyltran sferase OS=Mycolicibacterium rhodesiae OX=36814 GN=tgt PE=3 SV=1
MPFFTVDAELPGRRGRSGVIHTPHGDIHTPAFIAVGTKATVKAVLPETMRELGAQAVLANAYHLYLQPGPDIVDEAGGLGAFMNWPGPTFTDSGGFQVLSLGAGFRKVLSMDANRVQADDVIAEGKQRLAHVDDDGVTFISHLDGSTHRFTPEVSMQIQHKIGADIIFAFDELTTLVNTRGYQEESVARTQAWAVRCIAEHRRLTAERPERPAQALFGVVQGAQYEDLRRQASRDLAGIVDSEGRGFDGYGIGGALEKQNLATIVGWCVDELPDDKPRHLLGISEPDDLFAAIAAGADTFDCVSPSRVARNAAVYSPTGRFNITGARYRRDFTPIDADCDCYTCANYTRAYLHHLFKAKEILSATLCTIHNERFIVRLVDQIRAAIVAGEFDELREDALGNYYGHSTRAQ

SEQ ID NO: 57935 - protein, 409 aa, Mycolicibacterium rutilum
  misc_feature (1)..(409): tr|A0A1H6JAV7|A0A1H6JAV7_9MYCO Queuine tRNA-ribosyltran sferase OS=Mycolicibacterium rutilum OX=370526 GN=tgt P E=3 SV=1
MADPFFSVAAELPGRLGRTGVIRTPHGEIRTPAFIPVGTQATVKAVLPETMKELGAQALLANAYHLYLQPGPDIVEEAGGLGAFMNWPGPTFTDSGGFQVLSLGAGFRKVLAMDTERVQADDIIAEGKERLASVDDDGVTFRSHLDGSTHRFTPEVSIGIQNKLGADIIFAFDELTTLVNTRGYQERSVQRTHEWAVRCLAEHHRLQAERTDRPKQALFGVVQGAQYEDLRRQATRGLVSIEHDGAGFDGYGIGGALEKQNLATIVGWVCEELPADKPRHLLGISEPDDLFAAVAAGADTFDCVSPSRVARNAAVYSATGRFNITNSRFRRDFTPIDDGCDCYTCAHYTRAYLHHLFKTKEILSATLCTIHNERFVVRLVDRIRAAIEAGEFDELRDDVLGRYYSTSAQ

SEQ ID NO: 57936 - protein, 414 aa, Mycolicibacterium senegalense; identical to SEQ ID NO: 57887
  misc_feature (1)..(414): tr|A0A378WA54|A0A378WA54_9MYCO Queuine tRNA-ribosyltran sferase OS=Mycolicibacterium senegalense OX=1796 GN=tgt PE=3 SV=1

SEQ ID NO: 57937 - protein, 422 aa, Mycolicibacterium setense
  misc_feature (1)..(422): tr|A0A0B2YAK6|A0A0B2YAK6_9MYCO Queuine tRNA-ribosyltran sferase OS=Mycolicibacterium setense OX=431269 GN=tgt P E=3 SV=1
MDQPYFTVEAELPGRLGRVGTIHTPHGDIQTPAFIAVGTAATVKSVLPETMKQIGAQAILANAYHLYLQPGPDIVAEAGGLGAFMNWPGPTFTDSGGFQVMSLGVGFKKVLAMDTERLQTDDIIAKGKERLAVVDDDGVTFRSHLDGSTHRFTPEVSIGIQNQLGADIIFAFDELTTLVNTRAYQESSVRRTHEWAVRCLAEHHRLQGLSPERPRQALFGVVQGAQYEDLRRQAASGLARIGEEAGPAEGLSFDGYGIGGALEKQNLATIVGWVSSELPADKPRHLLGISEPDDLFAAVAAGADTFDCVSPSRVARNAAVYSATGRFNITGARYKRDFTPIDAECDCYTCANYSRAYIRHLFKAKEMLSATLCTIHNERFVIRLVDQIRASIVAGEFDELRAHVLGRYYGVPDERVREEPQV

SEQ ID NO: 57938 - protein, 414 aa, Mycolicibacterium smegmatis
  misc_feature (1)..(414): tr|A0R5U3|A0R5U3_MYCS2 Queuine tRNA-ribosyltransferase OS=Mycolicibacterium smegmatis (strain ATCC 700084 / mc (2)155) OX=246196 GN=tgt PE=3 SV=1
MDQPYFTVTAELEGRLGRVGTIHTPHGDIHTPAFIPVGTAATVKSVLPETMKQLGAQAILANAYHLYLQPGPDIVAEAGGLGAFMNWPGPTFTDSGGFQVLSLGVGFKKVLAMDTNRVQADDIIAEGKERLAHVDDDGVTFRSHLNGSLHRFTPEVSIGIQYQLGADIIFAFDELTTLVNTRAYQERSVQRTHEWAERCLAEHHRLQNQAPERPRQALFGVVQGAQYEDLRRKAARGLATIGEQAGPAEGLAFDGYGIGGALEKQNLATIVGWVSSELPKDKPRHMLGISEPDDLFAAVAAGADTFDCVSPSRVARNAAIYTSTGRYNITGARYKRDFTPLDPECDCYTCANYSRAYIRHLFKAKEMLSATLCTIHNERFVVRLVDRIRAAMLAGEFDALRDEVLGRYYGTSVR

SEQ ID NO: 57939 - protein, 414 aa, Mycolicibacterium smegmatis; identical to SEQ ID NO: 57938
  misc_feature (1)..(414): tr|A0A0D6J1E6|A0A0D6J1E6_MYCSM Queuine tRNA-ribosyltran sferase OS=Mycolicibacterium smegmatis OX=1772 GN=tgt P E=3 SV=1

SEQ ID NO: 57940 - protein, 408 aa, Mycolicibacterium sp.
  misc_feature (1)..(408): tr|A0A391PGW2|A0A391PGW2_9MYCO Queuine tRNA-ribosyltran sferase OS=Mycolicibacterium sp. NCC-Tsukiji OX=2185272 GN=tgt PE=3 SV=1
MSQQFFEVTAQLPDRRGRAGVIHTPHGDIQTPAFIAVGTAATVKGVLPETMKSLGAQALLSNAYHLYLQPGPDVVDEAGGLGAFMNWPGPTFTDSGGFQVMSLGVGFKKVLAMDTARLQADDIIAEGKERLAHVDEDGVTFRSHLNGDKHRFTPEVSIVIQHQLGADIIFAFDELTTLVNTRAYQERSVERTHRWAVRCLAEHRRLSIERAGKPAQALFGVVQGAQYEDLRRQATKGLVGIVDDDGHGFDGYGIGGALEKQNLATIVGWVTDELPDDKPRHLLGISEPDDLFAAIEAGADTFDCVSPSRVARNAAMYSATGRFNVTNARFKRDFNPIDAECDCYTCANYTRAYMHHLFKAKEILASTLGTIHNERFIIRLVDQIRAAIGAGEFDELRDHVLGRYYGSR

SEQ ID NO: 57941 - protein, 410 aa, Mycolicibacterium sp.
  misc_feature (1)..(410): tr|A0A5A7YMG6|A0A5A7YMG6_9MYCO Queuine tRNA-ribosyltran sferase OS=Mycolicibacterium sp. P1-5 OX=2024617 GN=tgt PE=3 SV=1
MPFFTVDAELPGRRGRTGVIHTPHGDIHTPAFIAVGTKASVKAVLPETMRELGAQAVLANAYHLYLQPGPDIVDEAGGLGAFMNWPGPTFTDSGGFQVLSLGAGFRKVLSMDANRVQADDVIAEGKQRLAHVDDDGVTFISHLDGSTHRFTPEVSMQIQHKIGADIIFAFDELTTLVNTRGYQEDSVARTQAWAVRCLTEHRRLTAAHPERPAQALFGVVQGAQYEDLRRQASRDLAGIVDSEGRGFDGYGIGGALEKQNLATIVGWCVDELPDDKPRHLLGISEPDDLFAAIAAGADTFDCVSPSRVARNAAVYSPTGRFNITGARYRRDFTPIDADCDCYTCANYTRAYLHHLFKAKEILSATLCTIHNERFIIRLVDQIRAAIGAGEFDDLREHVLGGYYGHSTRAQ

SEQ ID NO: 57942 - protein, 410 aa, Mycolicibacterium sphagni
  misc_feature (1)..(410): tr|A0A255DD36|A0A255DD36_9MYCO Queuine tRNA-ribosyltran sferase OS=Mycolicibacterium sphagni OX=1786 GN=tgt PE= 3 SV=1
MPFFTVDAELPGRRGRTGVIRTPHGDIHTPAFVAVGTKASVKAVLPETMRELGAQAVLANAYHLYLQPGPDIVDEAGGLGVFMNWPGPTFTDSGGFQVLSLGAGFRKVLSMDANRVQADDVIAEGKQRLAHVDDDGVTFISHLDGSTHRFTPEVSMQIQHKIGADIIFAFDELTTLVNTRGYQEESVARTQAWAVRCLTEHRRLTAERPERPAQALFGVVQGAQYEDLRRQASRDLAGIVDAEGRGFDGYGIGGALEKQNLATIVGWCTDELPDDKPRHLLGISEPDDLFAAVAAGADTFDCVSPSRVARNAAVYSPAGRFNITGARYRRDFTPIDADCDCYTCGHYTRAYLHHLFKAKEILSATLCTIHNERFVIRLVDQIRAAIVAGEFDELREHVLGNYYGSSTRAQ

SEQ ID NO: 57943 - protein, 428 aa, Mycolicibacterium thermoresistibile
  misc_feature (1)..(428): tr|A0A100XAS0|A0A100XAS0_MYCTH Queuine tRNA-ribosyltran sferase OS=Mycolicibacterium thermoresistibile OX=1797 GN=tgt PE=3 SV=1
MNTGVTSDSSGPFFSVGTELPGRLGRTGVIRTPHGEIHTPAFIPVGTQATVKAVLPETMKELGAQAVLANAYHLYLQPGPDIVAEAGGLGAFMNWPGPTFTDSGGFQVLSLGAGFRKVLAMDANRVQADDVIAEGKERLAHVDDDGVTFRSHLDGSTHRFTPEKSIGIQRRLGADIIFAFDELTTLVNTRGYQERSVRRTHEWAVRCLVEHHRLRAAHPELPRQALFGVVQGAQYEDLRRQAARGLTEIGAGPGPAEGLGFDGYGIGGALEKQNLATIVGWVSSELPPDKPRHLLGISEPDDLFAAVAAGADTFDCVSPSRVARNAAVYSSTGRFNVTNARFRRDFNPIDDGCDCYTCAHYTRAYLHHLFKARELLSATLATIHNQRFIIRLVDRIRESIVAGEFDELREHTLGRYYGGRRRYGTMAT

SEQ ID NO: 57944 - protein, 424 aa, Mycolicibacterium thermoresistibile
  misc_feature (1)..(424): tr|G7CFL6|G7CFL6_MYCT3 Queuine tRNA-ribosyltransferase OS=Mycolicibacterium thermoresistibile (strain ATCC 195 27 / DSM 44167 / CIP 105390 / JCM 6362 / NCTC 10409 / 3 16) OX=1078020 GN=tgt PE=3 SV=1
MTSDSSGPFFSVGTELPGRLGRTGVIRTPHGEIHTPAFIPVGTQATVKAVLPETMKELGAQAVLANAYHLYLQPGPDIVAEAGGLGAFMNWPGPTFTDSGGFQVLSLGAGFRKVLAMDANRVQADDVIAEGKERLAHVDDDGVTFRSHLDGSTHRFTPEKSIGIQRRLGADIIFAFDELTTLVNTRGYQERSVRRTHEWAVRCLVEHHRLRAAHPELPRQALFGVVQGAQYEDLRRQAARGLTEIGAGPGPAEGLGFDGYGIGGALEKQNLATIVGWVSSELPPDKPRHLLGISEPDDLFAAVAAGADTFDCVSPSRVARNAAVYSSTGRFNVTNARFRRDFNPIDDGCDCYTCAHYTRAYLHHLFKARELLSATLATIHNQRFIIRLVDRIRESIVAGEFDELREHTLGRYYGGRRRYGTMAT

SEQ ID NO: 57945 - protein, 387 aa, Mycolicibacterium tokaiense
  misc_feature (1)..(387): tr|A0A378TFD5|A0A378TFD5_9MYCO Queuine tRNA-ribosyltran sferase OS=Mycolicibacterium tokaiense OX=39695 GN=tgt PE=3 SV=1
MIRTPHGDIETPAFVAVGTKATVKAVLPETMKSLGAQAVLANAYHLYLQPGPAIVDEAGGLGAFMNWGGPTFTDSGGFQVLSLGSGFRKVLAMDTTRVQADDVIAAGKDRLARVDDDGVTFTSHLDGSTHRFTPEVSMQIQHQLGADIIFAFDELTTLVNTRAYQESSVQRTHEWAIRCLAEHRRLENERDDKPSQALFGVVQGAQYEDLRRQATRGLVGLRDAEGRGFDGYGIGGALEKQNLATIVGWVTDELPEDKPRHLLGISEPDDLFAAVEAGADTFDCVSPSRVARNAAIYSATGRYNITGARYKRDFTPLDPECDCYTCAHYTRAYVHHLFKAKEMLASMLSTIHNERFIIRLVDQIRAAITDGTFDDLREHVLGRYYRS

SEQ ID NO: 57946 - protein, 418 aa, Mycolicibacterium tusciae
  misc_feature (1)..(418): tr|A0A1X0JP10|A0A1X0JP10_9MYCO Queuine tRNA-ribosyltran sferase OS=Mycolicibacterium tusciae OX=75922 GN=tgt PE =3 SV=1
MTAPNTPRPRDSSVPFFSVDAELPGRAGRAGVIRTPHGDIHTPAFIPVGTQATVKAVLPETMRSLGAQAILANAYHLYLQPGSDIVAEAGGLGEFMNWPGPTFTDSGGFQVLSLGAGFRKVLAMDTERVQADDIIAEGKERLANVDDDGVTFRSHLDGSTHRFTPEVSIQIQHQLGADIIFAFDELTTLVNTRGYQERSVQRTHEWAIRCVVEHRRRSAANPDKPPQALFGVVQGAQYEDLRRQATRGLTQIVGDDGIGFDGYGIGGALEKQNLATIVGWVTSELPDDKPRHLLGISEPDDLFDAVAAGADTFDCVSPSRVARNAAVYSSGGRFNVTNARYRRDFTPIDAECDCYTCANYTRAYLHHLFKAKEILSATLCTIHNERFVVRMVDQIRAAIRTGEFDELRADVLGRYYSS

SEQ ID NO: 57947 - protein, 401 aa, Mycolicibacterium vaccae
  misc_feature (1)..(401): tr|K0V328|K0V328_MYCVA Queuine tRNA-ribosyltransferase OS=Mycolicibacterium vaccae ATCC 25954 OX=1194972 GN=tg t PE=3 SV=1
MTADLPGGPGRAGVIRTPHGDIQTPAFIAVGTQATVKAVLPETMKQLGAQAVLANAYHLYLQPGPDVVDEAGGLGAFMNWPGPTFTDSGGFQVMSLGVGFKKVLAMDTARVQADDVIAEGKERLAHVDDDGVTFRSHLNGSIHRFTPEVSIGIQHQLGADIIFAFDELTTLVNTRDYQERSVQRTHEWAVRCLAEHRRLSAVRAHKPPQALFGVVQGAQYEDLRRQAARGLTQIVDEDGRGFDGYGIGGALEKQNLATIVGWVSSELPDDKPRHLLGISEPDDLFAAVEAGADTFDCVSPSRVARNAAVYSADGRFNITGARYRRDFTPIDPECDCYTCAHYTRAYLHHLFKAKEMLSATLCTIHNERFIVRLVDQIRASIPEGRFGDLREHVLGRYYANA

SEQ ID NO: 57948 - protein, 401 aa, Mycolicibacterium vanbaalenii
  misc_feature (1)..(401): tr|A1TGP5|A1TGP5_MYCVP Queuine tRNA-ribosyltransferase OS=Mycolicibacterium vanbaalenii (strain DSM 7251 / JCM 13017 / NRRL B-24157 / PYR-1) OX=350058 GN=tgt PE=3 SV =1
MDVELPGRLGRTGTIRTPHGDIQTPAFIAVGTQATVKAVLPETMKEIGAQAVLANAYHLYLQPGADVVDEAGGLGAFMNWPGPTFTDSGGFQVMSLGVGFKKVLAMDTSRVQADDIIAEGKSRLAHVDDDGVTFRSHLNGSSHRFTPEVSIGIQHQLGADIIFAFDELTTLVNTRGYQERSVQRTHDWAVRCLAEHRRLSRVRSHTPPQALFGVVQGAQYEDLRRQAARGLTQIVDEEGRGFDGYGIGGALEKQNLATIVGWVSSELPDDKPRHLLGISEPDDLFAAIEAGADTFDCVSPSRVARNAAVYSADGRFNITGSRYRRDFTPIDAECDCYTCTHYTRAYLHHLFKAKEMLSATLCTIHNERFVIRLVDDIRVAIREGRFDELREHVLGRYYAKA

SEQ ID NO: 57949 - protein, 423 aa, Mycolicibacterium vulneris
  misc_feature (1)..(423): tr|A0A1B9D4V0|A0A1B9D4V0_9MYCO Queuine tRNA-ribosyltran sferase OS=Mycolicibacterium vulneris OX=547163 GN=tgt PE=3 SV=1
MDQPYFTVEAELPGRFGRVGTIHTPHGDIQTPAFIAVGTAATVKSVLPETMKQLGAQAILANAYHLYLQPGPDIVAEAGGLGAFMNWPGPTFTDSGGFQVMSLGVGFKKVLAMDTERLQKDDIIAKGKERLAVVDDDGVTFRSHLDGSKHRFTPEVSIGIQNQLGADIIFAFDELTTLVNTRGYQESSVQRTHEWAVRCLAEHHRLQGLSPERPRQALFGVVQGAQYEDLRRQAARGLATIGQEDGPAEGLSFDGYGIGGALEKQNLATIVGWVSSELPADKPRHLLGISEPDDLFDAVAAGADTFDCVSPSRVARNAAVYSATGRFNITGAKYKRDFTPIDAECDCYTCANYSRAYIRHLFKAKEMLSATLCTIHNERFVIRLVDQIRASIVAGEFDELRAHVLGRYYGVPADERLREERKA

SEQ ID NO: 57950 - protein, 410 aa, Mycolicibacterium wolinskyi
  misc_feature (1)..(410): tr|A0A1X2FH31|A0A1X2FH31_9MYCO Queuine tRNA-ribosyltran sferase OS=Mycolicibacterium wolinskyi OX=59750 GN=tgt PE=3 SV=1
MDQPYFTVEAELAGRLGRVGTIHTPHGDIHTPAFIAVGTQATVKSVLPETMKQIGAQAILANAYHLYLQPGPDIVAEAGGLGAFMNWPGPTYTDSGGFQVLSLGVGFKKVLAMDTQRVQADDIIADGKERLAVVDDDGVTFRSHLNGSTHRFTPEVSIGIQHQLGADIIFAFDELTTLVNTRGYQERSVQRTHEWAVRCLAEHQRLQESTPERPRQALFGVVQGAQYEDLRRQAAHGLTTIVGPNGEGFDGYGIGGALEKQNLATIVGWVSSELPADKPRHLLGISEPDDLFDAVAAGADTFDCVSPSRVARNAAVYSATGRFNITGARYKRDFTPIDAECDCYTCANYSRAYIRHLFKAKEMLSATLCTIHNERFVIRLVDQIRAAIVADEFDELRAHVLGRYYGTPVR

SEQ ID NO: 57951 - protein, 410 aa, Mycolicibacterium wolinskyi
  misc_feature (1)..(410): tr|A0A132PJT5|A0A132PJT5_9MYCO Queuine tRNA-ribosyltran sferase OS=Mycolicibacterium wolinskyi OX=59750 GN=tgt PE=3 SV=1
MDQPYFTVEAELAGRLGRVGTIHTPHGDIHTPAFIAVGTQATVKSVLPETMKQIGAQAILANAYHLYLQPGPDIVAEAGGLGAFMNWPGPTYTDSGGFQVLSLGVGFKKVLAMDTQRVQADDIIADGKERLAVVDDDGVTFRSHLNGSTHRFTPEVSIGIQHQLGADIIFAFDELTTLVNTRGYQERSVQRTHEWAVRCLAEHQRLQESTPERPRQALFGVVQGAQYEDLRRQAAHGLTTIVGPNGEGFDGYGIGGALEKQNLATIVGWVSSELPADKPRHLLGISEPDDLFDAVAAGADTFDCVSPSRVARNAAVYSATGRFNITGARYKRDFTPIDAECDCYTCANYSRAYIRHLFKAKEMLSATLCTIHNERFVIRLVDQIRAAIVAGEFDELRAHVLGRYYGTPVR

SEQ ID NO: 57952 - protein, 380 aa, Mycoplana dimorpha
  misc_feature (1)..(380): tr|A0A2T5B7T2|A0A2T5B7T2_MYCDI Queuine tRNA-ribosyltran sferase OS=Mycoplana dimorpha OX=28320 GN=tgt PE=3 SV=1
MTERFEFKLLATDGKARRGEVTMPRGTIRTPAFMPVGTVGTVKAMYLGQVRELGADIILGNTYHLMLRPGAERVARLGGLHEFIRWPYPILTDSGGFQVMSLEGLRKLDEQGVTFKSHVDGSLHHMSPERSIEIQGLLDSDIQMQLDECVRLPAEPKEIERAMEMSYRWAERCKVAFGDQPGKAMFGIVQGGDIPELRVRSAQALAGLDLKGYAIGGLAVGEPQGVMLDMIDTTCPHLPTEKPRYLMGVGTPDDILKSVAHGIDMFDCVMPTRSGRHGLAFTRHGRINIRNARHAEDTRPLDEQSACPASRDYSRAYLHHLVRANESLGGMLLTWNNLAYYQELMAGIRAAIEQGRYADFMAETQEAWARGEAEAKRAAA

SEQ ID NO: 57953 - protein, 373 aa, Mycoplasma sp.
  misc_feature (1)..(373): tr|R7NF22|R7NF22_9MOLU Queuine tRNA-ribosyltransferase OS=Mycoplasma sp. CAG:776 OX=1262906 GN=tgt PE=3 SV=1
MKFTYKLEKKEKNTNARLGSFIYNGIQYETPMFMPVGTQATVKTLAPEELKEVRAGIILANTYHLWLRPGEDVIDHAGGLHKFMNWDQPILTDSGGFQVFSLAKPKDITEEGVHFKNQLNGDSLFLTPEKSIAIQNKLDSDIAMSFDECIGYPATYEYCKESTERTVRWAKRGKEVHNNPNQMLFGIVQGGNYEDLRKYCALELAKMDFDGYSVGGTSVGEDKTTMYQMVEYATRYMPEDKIRYLMGVGDPIDLIENTIRGIDIFDCVSPTRLARHGHALTKYGKINLKNAKYKEDFTPVSEVCDCYACKHYTKAYIRHLIQSNETFGARLLSIHNIRFLTHLMEEIREAIKKDSLLELKEQFIKDYYGEQDE

SEQ ID NO: 57954 - protein, 370 aa, Mycoplasma sp.
  misc_feature (1)..(370): tr|R5YPV2|R5YPV2_9MOLU Queuine tRNA-ribosyltransferase OS=Mycoplasma sp. CAG:611 OX=1262905 GN=tgt PE=3 SV=1
MSKMEFNLLHKNNNARYGIIKSKYGEFETPMFMPVGTRATVKTLSPEELYDCNTGIVLANTYHLWLKPGEDIVNKAGGLHKFMNYNRPMLTDSGGFQVFSLAKPKDIKEEGVTFKSHIDGSKLFLTPEKSIEIQNKLGADIIMSFDECPYYPCTYDYMKQSVERTIRWAKRGKEKHSNPDQMLFGIVQGGEFKDLRKYSAEKTVEMDFDGYSIGGTSVGEDKKTMYEMIDNCINYLPENKLRYLMGVGEPIDILEGVTRGVDLFDCVLPTRIARHANAFTRTGKINLKNAKYKEDFTPIEISCDCYACKNYTKAYIRHLITVDETFGQRLLSIHNIRFLTKMMEEIRLAIKDDRFLEYKSEFLEKYNAKK

SEQ ID NO: 57955 - protein, 376 aa, Myroides guanonis
  misc_feature (1)..(376): tr|A0A1I3QSM7|A0A1I3QSM7_9FLAO Queuine tRNA-ribosyltran sferase OS=Myroides guanonis OX=1150112 GN=tgt PE=3 SV= 1
MKFDLLHTDPLSRARAGKITTDHGVIETPIFMPVGTVGTVKGLHQRELRDEVNPDVILGNTYHLYLRPKTPILEKAGGLHKFINWDRNILTDSGGFQVYSLSANRKIKEEGVKFKSHIDGSYHFFSPESVMEIQRTIGADIIMAFDECTPYPCDYRYAKRSMHMTHRWLDRCINHLEKVPFKYDYEQTFFPIVQGSTYKDLRAQSAEYIANAGAAGNAIGGLSVGEPAEEMYEMTEVVTNILPVDKPRYLMGVGTPINILENIALGIDMFDCVMPTRNARNGMLFTSEGIINIKNKKWEDDLSPIDAMGHTWVDLEYSKAYLRHLFAANESLGKQIASIHNLGFYMWLVREARVQILAGTFYDWKNKMVKKLGERL

SEQ ID NO: 57956 - protein, 376 aa, Myroides indicus
  misc_feature (1)..(376): tr|A0A4R7F1Z9|A0A4R7F1Z9_9FLAO Queuine tRNA-ribosyltran sferase OS=Myroides indicus OX=1323422 GN=tgt PE=3 SV=1
MEFELLHTDVNSRARAGKITTDHGVIETPIFMPVGTVATVKGVHQRELQQEINPDIILGNTYHLYLRPKTEILKQAGGLHKFMNWDRNILTDSGGFQVYSLSANRKIKEEGVKFKSHIDGSYHFFSPENVMEIQRTIGADIIMAFDECTPYPCDYKYARRSMHMTHRWLDRCVEHLKKTPELYGYSQTLFPIVQGSTYKDLRKQSAEYIAGVGAEGNAIGGLSVGEPAEEMYAMTEVVTDILPVDKPRYLMGVGTPINILENIALGIDMFDCVMPTRNARNGMLFTANGIINIKNKKWVADFSPIDEMGHTWVDTEYSKAYLRHLFAANESLGKQIASIHNLGFYMWLVREARQQILSGTFYDWKAKMVKQLGERL

SEQ ID NO: 57957 - protein, 376 aa, Myroides marinus
  misc_feature (1)..(376): tr|A0A163X9F3|A0A163X9F3_9FLAO Queuine tRNA-ribosyltran sferase OS=Myroides marinus OX=703342 GN=tgt PE=3 SV=1
MKFELLHTDAGSRARAGKITLDHGVIETPIFMPVGTVASVKGVHQRELADEINPDIILGNTYHLYLRPKMEILKQAGGLHKFMNWDRNILTDSGGFQVYSLSSNRKIKEEGVKFKSHIDGSYHFFSPESVMEIQRTIGADIIMAFDECTPYPCDYRYAKRSMHRTHRWLDRCVEHLTKVPEMYGYSQTLFPIVQGSTFKDLRQQSAEYIANIGADGNAIGGLSVGEPAEEMYAMTELVTDILPKDKPRYLMGVGTPINILENIALGVDMFDCVMPTRNARNGMLFTANGSINMKNKKWENDFSPIDENAYTWVDTAYSKAYLRHLFAANESLGKQIATIHNLGFYLWLVREARRQILAGTFTEWKNKMVKQMDNRL

SEQ ID NO: 57958 - protein, 376 aa, Myroides odoratimimus
  misc_feature (1)..(376): tr|A0A0E1Z6W3|A0A0E1Z6W3_9FLAO Queuine tRNA-ribosyltran sferase OS=Myroides odoratimimus CCUG 10230 OX=883150 G N=tgt PE=3 SV=1
MKFDLLHTDVNSRARAGKITLDHGVIETPIFMPVGTVASVKGVHQRELSEEINPDIILGNTYHLYLRPKMEILKQAGGLHKFMNWDRNILTDSGGFQVYSLSSNRKIKEEGVKFKSHIDGSYHFFSPESVMEIQRTIGADIIMAFDECTPYPCDYRYAKRSMHRTHRWLDRCVDHLTKVPEMYGYSQTLFPIVQGSTFKDLREQSAEYIANIGADGNAIGGLSVGEPAEEMYAMTELVTNILPKDKPRYLMGVGTPINILENIALGVDMFDCVMPTRNARNGMLFTAHGSMNMKNKKWEDDFSPIDENGYTWVDTAYSKAYLRHLFAANESLGKQIATIHNLGFYLWLVREARRQILAGTFTEWKNKMVKQMDNRL

SEQ ID NO: 57959 - protein, 376 aa, Myroides odoratimimus
  misc_feature (1)..(376): tr|A0A0U3GQ83|A0A0U3GQ83_9FLAO Queuine tRNA-ribosyltran sferase OS=Myroides odoratimimus OX=76832 GN=tgt PE=3 S V=1
MKFDLLHTDVNSRARAGKITLDHGVIETPIFMPVGTVASVKGVHQRELSEEINPDIILGNTYHLYLRPKMEILKQAGGLHKFMNWDRNILTDSGGFQVYSLSSNRKIKEEGVKFKSHIDGSYHFFSPESVMEIQRTIGADIIMAFDECTPYPCDYRYAKRSMHRTHRWLDRCVDHLTKVPEMYGYSQTLFPIVQGSTFKDLREQSAEYIANIGADGNAIGGLSVGEPAEEMYAMTELVTNILPQDKPRYLMGVGTPINILENIALGVDMFDCVMPTRNARNGMLFTAHGSMNMKNKKWEDDFSPIDENGYTWVDTAYSKAYLRHLFAANESLGKQIATIHNLGFYLWLVREARRQILAGTFTEWKNKMVKQMDNRL

SEQ ID NO: 57960 - protein, 376 aa, Myroides odoratus
  misc_feature (1)..(376): tr|A0A378U4A8|A0A378U4A8_MYROD Queuine tRNA-ribosyltran sferase OS=Myroides odoratus OX=256 GN=tgt PE=3 SV=1
MKFELLHTDVQSRARAGKITTDHGVIETPIFMPVGTVATVKGVHQRELKEEINPDIILGNTYHLYLRPKVEILKQAGGLHKFMNWDRNILTDSGGFQVYSLSANRKIKEEGVKFKSHIDGSYHFFSPENVMEVQRAIGADIIMAFDECTPYPCDYRYAKRSMHMTHRWLDRCVTHFNKTPELYGYSQALFPIVQGSTYKDLRQQSAEYIANVGAEGNAIGGLSVGEPAEEMYAMTDVVTSILPEDKPRYLMGVGTPINILENIALGIDMFDCVMPTRNARNGMLFTSEGIINIKNKKWEDDFSPIDAMGHTWVDTEYSKAYLRHLFAANESLGKQIASIHNLGFYMWLVREAREQILAGTFAAWKNKMVKQLGERL

SEQ ID NO: 57961 - protein, 376 aa, Myroides odoratus
  misc_feature (1)..(376): tr|H1ZA59|H1ZA59_MYROD Queuine tRNA-ribosyltransferase OS=Myroides odoratus DSM 2801 OX=929704 GN=tgt PE=3 SV= 1
MKFELLHTDVQSRARAGKITTDHGVIETPIFMPVGTVATVKGVHQRELKEEINPDIILGNTYHLYLRPKVEILKQAGGLHKFMNWDRNILTDSGGFQVYSLSANRKIKEEGVKFKSHIDGSYHFFSPENVMEVQRAIGADIIMAFDECTPYPCDYRYAKRSMHMTHRWLDRCVTHFNKTPELYGYSQALFPIVQGSTYKDLRQQSAEYIANVGAEGNAIGGLSVGEPAEEMYAMTDVVTSILPEDKPRYLMGVGTPINILENIALGIDMFDCVMPTRNARNGMLFTAEGIINIKNKKWEDDFSPIDAMGHTWVDTEYSKAYLRHLFAANESLGKQIASIHNLGFYMWLVREARQQILAGTFATWKNKMVKQLGERL

SEQ ID NO: 57962 - protein, 376 aa, Myroides phaeus
  misc_feature (1)..(376): tr|A0A1G8DRJ4|A0A1G8DRJ4_9FLAO Queuine tRNA-ribosyltran sferase OS=Myroides phaeus OX=702745 GN=tgt PE=3 SV=1
MKFDLLHTDANSRARAGKVTLDHGVIETPIFMPVGTVASVKGVHQRELKEEVNPDIILGNTYHLYLRPKMEILKQAGGLHKFMNWDRNILTDSGGFQVYSLSGNRKIKEEGVKFKSHIDGSYHFFSPESVMEVQRTIGADIIMAFDECTPYPCDYRYAKRSMHRTHRWLDRCVDHLAKVPEMYGYSQTLFPIVQGSTFKDLRQQSAEYIANVGAAGNAIGGLSVGEPAEEMYAMTELVTDILPKEKPRYLMGVGTPINILENIALGVDMFDCVMPTRNARNGMLFTVNGTINMKNKKWENDFSPIDENGYTWVDTEYSKAYLRHLFAANESLGKQIATIHNLGFYMWLVREARRQILAGTFTEWKNKMVKQLGQRL

SEQ ID NO: 57963 - protein, 376 aa, Myroides profundi
  misc_feature (1)..(376): tr|A0A0B5S3I9|A0A0B5S3I9_9FLAO Queuine tRNA-ribosyltran sferase OS=Myroides profundi OX=480520 GN=tgt PE=3 SV=1
MKFDLLHTDVNSRARAGKITLDHGVIETPIFMPVGTVASVKGVHQRELSEEINPDIILGNTYHLYLRPKMEILKQAGGLHKFMNWDRNILTDSGGFQVYSLSSNRKIKEEGVKFKSHIDGSYHFFSPESVMEIQRTIGADIIMAFDECTPYPCDYRYAKRSMHRTHRWLDRCVDHLAKVPEMYGYSQTLFPIVQGSTFKDLREQSAEYIANIGAEGNAIGGLSVGEPAEEMYAMTELVTNILPQDKPRYLMGVGTPINILENIALGVDMFDCVMPTRNARNGMLFTAHGSMNMKNKKWEDDFSPIDENGYTWVDTAYSKAYLRHLFAANESLGKQIATIHNLGFYLWLVREARRQILAGTFTEWKNKMVKQMDNRL

SEQ ID NO: 57964 - protein, 383 aa, Myxococcaceae bacterium
  misc_feature (1)..(383): tr|A0A521U186|A0A521U186_9DELT Queuine tRNA-ribosyltran sferase OS=Myxococcaceae bacterium OX=2484252 GN=tgt PE =3 SV=1
MSFRFSVSAVDPGSRARRGAILTPHGRAETPAFMTVGTRATVTGLTPADLREVGAQVVLGNTYHLMLRPGVELFRRVGGIHRFMGWDGPMLTDSGGYQIFSLPGDRTINERGARFRSYIDQRVHVLSPERSIEVQTAIGADIMMVLDVCVDARSDEATTRAAMERTHRWALRSLAARTDSPQALFAIMQGGVFPELRKASAGFLTDHPFDGFAIGGLAVGDTRSQREDITHLAAELLPPDRPRYLMGVGTPPDLLHAMLGGVDMFDCILPTNLGWQATAFTSTGRVKLTRGAHCHDDNPLDVTCSCATCATFSRSYLHHLFKCDEPLGARLVSMHNLHHYQALMAEARAAITAGTFAAYAREKLEAIDRHEHSGRRMGASDLP

SEQ ID NO: 57965 - protein, 374 aa, Myxococcaceae bacterium
  misc_feature (1)..(374): tr|A0A3N5HIK6|A0A3N5HIK6_9DELT Queuine tRNA-ribosyltran sferase OS=Myxococcaceae bacterium OX=2484252 GN=tgt PE =3 SV=1
MSVRFERLHVDAGTRARRGRLHTPHGTVETPVFMPVGTQATVKAVGQDDLRTLGAEILLGNTYHLMLRPGEELVGALGGLHRFMAWDRALLTDSGGFQVYSLAQNRKITEEGASFQSHLDGSRWMLTPERSIQIQEVLGADVIMAFDECAPSRSERRYMEESLARTTRWLHRCAAAWTRGRSALFGIVQGGLDLELRRRHVEEVCAVELPGYALGGYSVGERPEEMHASVADVAVLLPADRPRYLMGVGTPVDLVTAMAAGVDMFDCVLPTRCARNGLLFTHLGRLNLRNATHARDERAPDPECGCYTCRTHSRAYLRHLFAADELLALRLATLHNLHHYLELMRGARAAIEEDRYAAFAEDVRRRESGRAPSG

SEQ ID NO: 57966 - protein, 378 aa, Myxococcales bacterium
  misc_feature (1)..(378): tr|A0A0S8EWJ4|A0A0S8EWJ4_9DELT Queuine tRNA-ribosyltran sferase OS=Myxococcales bacterium SG8_38_1 OX=1703408 G N=tgt PE=3 SV=1
MSLPTTGFSFRVDAIDGAARCGELQTPRAVVETPAFMPVGTQATVKALTPEEVASTGARIILANTYHLWLRPGAESIAAHGGVVGFMKWPHALLTDSGGYQVFSLAKQRTIDEDGITFRSHLDGTLHRLTPEEAMRVQALLGSDVAMVLDECPPGNAPRDVIERAISRTTAWAKRCLQTEPAEGQARFGIVQGGTELDLRLEHLQTIAALDFDGVALGGFSVGEPPAQMYELLAEIGPAMPVDRPRYLMGVGTPSDLLRALSSGIDLFDCVLPTRNARNGQALTWGGRVNLRQARHRDDESPLDARCDCSVCATYSRAYLRHLIKADEMLGPRLLSLHNLHFYGALMRKAREMIRLGRLQTWVDATLAQMHEQDEVGD

SEQ ID NO: 57967 - protein, 281 aa, Myxococcales bacterium
  misc_feature (1)..(281): tr|A0A3C1L0P6|A0A3C1L0P6_9DELT Queuine tRNA-ribosyltran sferase (Fragment) OS=Myxococcales bacterium OX=2026763 GN=tgt PE=3 SV=1
MAYRFTLEHVCAQSGARAGRVETTHGVIETPIFMPVATQAALKGGVQFRDVKSAGAQVVLANTYHLMLRPGSERIRDAGGLHEFMRWKGPILTDSGGFQVFSLSGMRKISDEGVVFQSHIDGSRFHLNAEEAVRLQENFGSDIAMAFDECPPAKADVNAIRTAMNRTTAWLDRAIAARRRSDEVALYGIVQGGVNKQLRREHVEAICSRDACEGFAIGGLSVGESVEELHDICGFTAELMPEDKARYLMGVGTPRDLLVCIGHGVDQFDCGMPSRNGRHGK

SEQ ID NO: 57968 - protein, 359 aa, Myxococcus fulvus
  misc_feature (1)..(359): tr|F8CRZ2|F8CRZ2_MYXFH Queuine tRNA-ribosyltransferase OS=Myxococcus fulvus (strain ATCC BAA-855 / HW-1) OX=48 3219 GN=LILAB_30945 PE=3 SV=1
MFMPVATHAGFRHLAMEEVKETGASILLANTYHLMLRPGAEVFKRFGGIHPFMQWDGGVLTDSGGFQIFSLPEDRLITEKGAHFRSFYDNSRQLLSPESSIAMQQAINSEIMMVLDVCIDSRTDEAGTREAMERTHRWAVRSLEAKAARDTGQAMFGIVQGGVFPHLRDESAAFLTKLPFDGFAIGGLAVGETKVERESMTLRTTASLPQDKPRYLMGVGTPTDLVEAVLRGVDMFDCIIPTKMAQQGYAYTFSGLVRVSRSVFRLSDEPLDAACDCYVCKRYTRGYLQHLMRGKHHLGSRFLSVHNVRHYQKLMGRIRDGILNGTYAQVYRELKAAIATPKDLKDEANAREVTLKEVG

SEQ ID NO: 57969 - protein, 405 aa, Myxococcus fulvus
  misc_feature (1)..(405): tr|A0A511T592|A0A511T592_MYXFU Queuine tRNA-ribosyltran sferase OS=Myxococcus fulvus OX=33 GN=tgt_2 PE=3 SV=1
MGEQHEQDAGTPREATREKGDTRVAPGMVKFELLHEDASGTKARRGRLNTPHGPIETPIFMPVGTVGSVKGVGPDDLLTMDAQIILGNTYHLMLRPGEQLVGEMGGLHQFVSWNRPMLTDSGGFQVFSLSEKRKITEEGAAFQSHLDGARHFLTPERSIDIQETLGADVIMAFDECPPSTAERSYLEKSLARTTRWLHRCEKAWSRGRSSLFGIVQGGLHEDLRKRHAEEVCAVDLPGYALGGYSVGEAPEAMHAGVAYSAPLLPRDKPRYLMGVGTPVDLVTCVEHGVDMFDCVLPTRCARNGLLFTSEGKLTIRNAAFAKDPRPVDPECSCYTCRNFSRAYLRHLFAAGEILAMRLNTLHNLHYFLGLMAQVRRAIAEDRYAAFARDFRERARAQEAERTRGR

SEQ ID NO: 57970 - protein, 402 aa, Myxococcus hansupus
  misc_feature (1)..(402): tr|A0A0H4WUL8|A0A0H4WUL8_9DELT Queuine tRNA-ribosyltran sferase OS=Myxococcus hansupus OX=1297742 GN=tgt PE=3 S V=1
MNAMGEQQDAKQSGEKGDTRVAPGMVRFELLHEDASGTKARRGRLHTPHGPVETPIFMPVGTVGSVKGVGPDDLLTLDAQIILGNTYHLMLRPGEKLVGEMGGLHRFVSWDRPMLTDSGGFQVFSLSGKRKITEEGATFQSHLDGARHFLTPERSIDIQETLGADVIMAFDECPPSTEDRPYLEASLARTTRWLHRCVKAWSRQRSSLFGIVQGGLHEDLRKRHAEEVCAVDLPGYALGGYSVGEAPEAMHDGVAYSAPLLPRDKPRYLMGVGTPVDLVTCVEHGVDMFDCVLPTRCARNGLLFTSEGKVVIRNAAYARDPRPVDPACSCYTCRNFSRAYLRHLFAAQELLAMRLNTIHNLHYFLGLMAEVRRAVAEDRFAAFARDFRARAKAQEAERTRGR

SEQ ID NO: 57971 - protein, 389 aa, Myxococcus hansupus
  misc_feature (1)..(389): tr|A0A0H4WPG0|A0A0H4WPG0_9DELT Queuine tRNA-ribosyltran sferase OS=Myxococcus hansupus OX=1297742 GN=tgt PE=3 S V=1
MAVRFELLTTDPTGARAGILHTRRGSFKTPMFMPVATHAGFRHLAMEEVKEAGASILLANTYHLMLRPGAEVFKRFGGIHPFMQWDGGVLTDSGGFQIFSLPEDRLITEKGAHFRSFYDNSRQLLSPESSIAMQQAINSEIMMVLDVCIDSRTDEAGTREAMERTHRWAVRSLEAKAAHDTGQAMFGIVQGGVFPNLRDESAAFLTKLPFDGFAIGGLAVGETKVERESMTLRSAALLPQDKPRYLMGVGTPTDLVEAVLRGVDMFDCIIPTKMAQQGYAYTFSGLVRISRSVFRLSDEPLDAECDCYVCKRYTRGYLQHLMRGKHHLGSRFLSVHNVRHYQKLMGRIREGILGGTYAQVYRELKAAIATPKDLKDEAAAREVTLKEVG

SEQ ID NO: 57972 - protein, 389 aa, Myxococcus macrosporus
  misc_feature (1)..(389): tr|A0A250JZC8|A0A250JZC8_9DELT Queuine tRNA-ribosyltran sferase OS=Myxococcus macrosporus DSM 14697 OX=1189310 GN=tgt PE=3 SV=1
MAVRFELLTTDPTGARAGILHTRRGSFKTPMFMPVATHAGFRHLAMEEVKETGASILLANTYHLMLRPGAEVFKRFGGIHPFMQWDGGVLTDSGGFQIFSLPEDRLITEKGAHFRSFYDNSRQLLSPESSIAMQQAINSEIMMVLDVCIDSRTDEAGTREAMERTHRWAVRSLEAKAARDTGQAMFGIVQGGVFPNLRDESAAFLTKLPFDGFAIGGLAVGETKVERESMTLRTTASLPQDKPRYLMGVGTPTDLVEAVLRGVDMFDCIIPTKMAQQGYAYTFSGLVRVSRSVFRLSDEPLDAACDCYVCKRYTRGYLQHLMRGKHHLGSRFLSVHNVRHYQKLMGRIRDGILTGTYAQVYRELKAAIATPKDLKDEANAREVTLKEVG

SEQ ID NO: 57973 - protein, 399 aa, Myxococcus macrosporus
  misc_feature (1)..(399): tr|A0A250JZQ4|A0A250JZQ4_9DELT Queuine tRNA-ribosyltran sferase OS=Myxococcus macrosporus DSM 14697 OX=1189310 GN=tgt PE=3 SV=1
MGEQQEVKQQGGKGDTRVEPGMVRFELLHEDASGTKARRGRLHTPHGPVETPIFMPVGTVGSVKGVGPDDLLTLDAQIILGNTYHLMLRPGEALVGELGGLHRFVSWNRPMLTDSGGFQVFSLSGKRKITEEGAAFQSHLDGARHFLTPERSIDIQETLGADVIMAFDECPPSTEDRAYLEASLARTTRWLHRCVKAWSRERSSLFGIVQGGLHEDLRKRHAEEVCAVDLPGYALGGYSVGEAPEAMHDGVAYSAPLLPRDKPRYLMGVGTPVDLVTCVEHGVDMFDCVLPTRCARNGLLFTSEGKVVIRNAAYARDPRPVDPACACYTCRNFSRAYLRHLFAAQELLAMRLNTIHNLHYFLGLMAEVRRAVAEDRFAAFARDFRARARAQEAERTRGR

SEQ ID NO: 57974 - protein, 402 aa, Myxococcus sp.
  misc_feature (1)..(402): tr|A0A540X1A7|A0A540X1A7_9DELT Queuine tRNA-ribosyltran sferase OS=Myxococcus sp. AM401 OX=2590453 GN=tgt PE=3 SV=1
MSEQDAGVRETAREKGDTRVAPGLVRFDLLHEDASGTKARRGRLNTPHGPIETPIFMPVGTVGSVKGVGPDDLLALDAQIILGNTYHLMLRPGEALMREMGGLHQFVSWNRPMLTDSGGFQVFSLSEKRKITEEGAAFQSHLDGARHFLTPERSIEIQETLGADVIMAFDECPPSTEDRPYLENSLARTTRWLHRCVKAWNREGRSSLFGIVQGGLHEDLRKRHAEEVCAVDLPGYALGGYSVGEAPEAMHAGVAYAAPLLPRDKPRYLMGVGTPVDLVTCVEHGVDMFDCVLPTRCARNGLLFTSEGKLTIRNAAFARDPRPVDPACSCYTCRNFSRAYLRHLFAAGEILAMRLNTLHNLHYFLGLMADVRKAIAEDRYAAFAREFRERARAQEAERTRGR

SEQ ID NO: 57975 - protein, 389 aa, Myxococcus sp.
  misc_feature (1)..(389): tr|A0A540X017|A0A540X017_9DELT Queuine tRNA-ribosyltran sferase OS=Myxococcus sp. AM401 OX=2590453 GN=tgt PE=3 SV=1
MAVRFELLTTDPTGARAGVLHTRRGSFSTPMFMPVATHAAFRHLGMEEVKETGASILLANTYHLMLRPGAEVFQRFGGIHSFMQWDGGVLTDSGGFQIFSLPEDRLITEKGAHFRSFYDNSRQLLSPESSIAMQQSINSEIMMVLDVCIDSRTDEAGTREAMERTHRWAVRSLAAKAKVDTGQAMFGIVQGGVFPNLRDESAEFLTKLPFDGFAIGGLAVGETKAERESMTLRTTASLPADKPRYLMGVGTPTDLIEAVLRGVDMFDCIIPTKMAQQGYAYTFQGLVRITRNVFRLADEPLDAECDCYVCKRYTRGYLHHLMRGKHHLGSRFLSVHNVRHYQKLMARIRAGILSGTYEQVARELKVAIATPKDLKEVASANEVTLKEVG

SEQ ID NO: 57976 - protein, 401 aa, Myxococcus stipitatus
  misc_feature (1)..(401): tr|L7UF15|L7UF15_MYXSD Queuine tRNA-ribosyltransferase OS=Myxococcus stipitatus (strain DSM 14675 / JCM 12634 / Mx s8) OX=1278073 GN=tgt PE=3 SV=1
MGEQDAGTSKPSREKGDTRVAPGLVRFELLHEDASGTKARRGRLHTPHGPVETPIFMPVGTVGSVKGVGPDDLVNLDAQIILGNTYHLMLRPGEALVGEMGGLHQFVSWNRPMLTDSGGFQVFSLSEKRKITEEGAAFQSHLDGARHFLTPERSIEIQETLGADVIMAFDECPPSMSERSYLEKSLDRTTRWLHRCVKAWGRERSSLFGIVQGGLHEDLRKRHAEEVCAVDLPGYALGGYSVGEVPEAMHAGVAYSAPLLPRDKPRYLMGVGTPVDLVTCVEHGVDMFDCVLPTRCARNGLLFTSEGKLTIRNAAFAKDPRPVDPACSCYTCRNFSRAYLRHLFAAGEILAMRLNTLHNLHYFLGLMADVRRAIAEDRFAAFAREFRERARAQEAERTRGR

SEQ ID NO: 57977 - protein, 389 aa, Myxococcus stipitatus
  misc_feature (1)..(389): tr|L7UFH4|L7UFH4_MYXSD Queuine tRNA-ribosyltransferase OS=Myxococcus stipitatus (strain DSM 14675 / JCM 12634 / Mx s8) OX=1278073 GN=tgt PE=3 SV=1
MAVRFELLTTDPTGARAGILHTRRGSFRTPMFMPVATHAAFRHLAMEEVKETGASILLANTYHLMLRPGAEVFKRFGGIHPFMQWDGGVLTDSGGFQIFSLPEDRLITEKGAHFRSFYDNSRQLLSPESSIAMQQAINSEIMMVLDVCIDSRTDEAGTREAMDRTHRWAVRSLAAKNKVDSGQALFGIVQGGVFPHLRDESAAFLTKLPFDGFAIGGLAVGETKVEREEMTLRTTASLPVDKPRYLMGVGTPTDLIEAVLRGVDMFDCIIPTKMAQQGYAYTFQGLVRITRSVFRLADEPLDAECDCYVCKRYTRGYLQHLMRGKHHLGSRFLSVHNVRHYQKLMGRIREGILSGTYDQVSRELKAAVATPKDLKEEASARDLTLKEVG

SEQ ID NO: 57978 - protein, 399 aa, Myxococcus virescens
  misc_feature (1)..(399): tr|A0A511HDB7|A0A511HDB7_9DELT Queuine tRNA-ribosyltran sferase OS=Myxococcus virescens OX=83456 GN=tgt PE=3 SV =1
MGEQQEAKQSGGKGDTRVEPGMVRFELLHEDASGTKARRGRLHTPHGPVETPIFMPVGTVGSVKGVGPDDLLTLDAQIILGNTYHLMLRPGEALVGEMGGLHRFVSWNRPMLTDSGGFQVFSLSEKRKITEEGAAFQSHLDGARHFLTPERSIDIQETLGADVIMAFDECPPSTENRAYLEASLARTTRWLHRCVKAWSRERSSLFGIVQGGLHEDLRKRHAEEVCAVDLPGYALGGYSVGEAPEAMHDGVAYSAPLLPRDKPRYLMGVGTPVDLVTCVEHGVDMFDCVLPTRCARNGLLFTSEGKVVIRNAAYARDNRPVDPACSCYTCRNFSRAYLRHLFAAQELLAMRLNTIHNLHYFLGLMAEVRRAVAEDRFATFAREFRARAKAQEAERTRGR

SEQ ID NO: 57979 - protein, 404 aa, Myxococcus virescens
  misc_feature (1)..(404): tr|A0A511HDN7|A0A511HDN7_9DELT Queuine tRNA-ribosyltran sferase OS=Myxococcus virescens OX=83456 GN=tgt PE=3 SV =1
MDAVPAGHDGYKGRPMAVRFELLTTDPTGARAGILHTRRGSFKTPMFMPVATHAGFRHLAMEEVKEAGASILLANTYHLMLRPGAEVFKRFGGIHPFMQWDGGVLTDSGGFQIFSLPEDRLITEKGAHFRSFYDNSRQLLSPESSIAMQQAINSEIMMVLDVCIDSRTDEAGTREAMERTHRWAVRSLEAKAARDTGQAMFGIVQGGVFPHLRDESADFLTKLPFDGFAIGGLAVGETKVERESMTLRATASLPADKPRYLMGVGTPTDLVEAVLRGVDMFDCIIPTKMAQQGYAYTFSGLVRISRSVFRLSDEPLDAECDCYVCKRYTRGYLQHLMRGKHHLGSRFLSVHNVRHYQKLMGRIREGILGGTYAQVYRELKAAIATPKDLKDEANAREVTLKEVG

SEQ ID NO: 57980 - protein, 389 aa, Myxococcus xanthus
  misc_feature (1)..(389): tr|A0A4Y6D615|A0A4Y6D615_MYXXA Queuine tRNA-ribosyltran sferase OS=Myxococcus xanthus OX=34 GN=tgt PE=3 SV=1
MAVRFELLTTDPTGARAGILHTRRGSFKTPMFMPVATHAGFRHLAMEEVKEAGASILLANTYHLMLRPGAEVFKRFGGIHPFMQWDGGVLTDSGGFQIFSLPEDRLITEKGAHFRSFYDNSRQLLSPESSIAMQQAINSEIMMVLDVCIDSRTDEAGTREAMERTHRWAVRSLEAKAARDTGQAMFGIVQGGVFPNLRDESAAFLTKLPFDGFAIGGLAVGETKVERESMTLRATASLPADKPRYLMGVGTPTDLVEAVLRGVDMFDCIIPTKMAQQGYAYTFSGLIRISRSVFRLSDEPLDAECDCFVCKRYTRGYLQHLMRGKHHLGSRFLSVHNVRHYQKLMGRIREGILSGTYAQVYRELKAAIATPKDLKDEANAREVTLKEVG

SEQ ID NO: 57981 - protein, 389 aa, Myxococcus xanthus
  misc_feature (1)..(389): tr|Q1D3M0|Q1D3M0_MYXXD Queuine tRNA-ribosyltransferase OS=Myxococcus xanthus (strain DK 1622) OX=246197 GN=tgt PE=3 SV=1
MAVRFELLTTDPTGARAGILHTRRGSFKTPMFMPVATHAGFRHLAMEEVKEAGASILLANTYHLMLRPGAEVFKRFGGIHPFMQWDGGVLTDSGGFQIFSLPEDRLITEKGAHFRSFYDNSRQLLSPESSIAMQQAINSEIMMVLDVCIDSRTDEAGTREAMERTHRWAVRSLEAKAARDTGQAMFGIVQGGVFPHLRDESAAFLTKLPFDGFAIGGLAVGETKVERESMTLRATASLPADKPRYLMGVGTPTDLVEAVLRGVDMFDCIIPTKMAQQGYAYTFSGLIRISRSVFRLSDEPLDAECDCYVCKRYTRGYLQHLMRGKHHLGSRFLSVHNVRHYQKLMGRIREGILSGTYAQVYRELKAAIATPKDLKDEANAREVTLKEVG

SEQ ID NO: 57982 - protein, 424 aa, Nakamurella multipartita
  misc_feature (1)..(424): tr|C8X7A7|C8X7A7_NAKMY Queuine tRNA-ribosyltransferase OS=Nakamurella multipartita (strain ATCC 700099 / DSM 4 4233 / CIP 104796 / JCM 9543 / NBRC 105858 / Y-104) OX= 479431 GN=tgt PE=3 SV=1
MHNGSGFGFVVGSRLPDRQGRTGVITTPHGTIRTPAFVAVGTKATVKSLLPESVAQLGAQAVLANAYHLYLQPGPDIVEAAGGLGAFMHWPGPTFTDSGGFQVMSLGVGFKKVLAMNTAGLQSDDVIAPGKNRLATVDEDGVTFKSHLDGSLHRFSPEISMGIQHQLGADIIFAFDECTTLMNTRGYQERSVVRTHEWAARCVAEHRRLTDERVGRPYQALFGVVQGAQYEDLRRQATRDLLTLGFDGFGIGGALEKENLGTIVRWVCEELPEHLPRHLLGISEPDDMFTAIENGTDTFDCVSPSRVARNGSLYTERGRINITNARFKRDFGPLDEDCDCHTCAHYTRAYVHHLFRAKEMLSATLATIHNERFVVRLVDRIRDSIDDGSFDEFRAHFLGRYYAARGGAPAPVLLPGPVNGGENP

SEQ ID NO: 57983 - protein, 408 aa, Nakamurella panacisegetis
  misc_feature (1)..(408): tr|A0A1H0MLU3|A0A1H0MLU3_9ACTN Queuine tRNA-ribosyltran sferase OS=Nakamurella panacisegetis OX=1090615 GN=tgt PE=3 SV=1
MTTSTSTSFTVTSRLPDAQGRTGTLSTPHGDIRTPAFIAVGTKATVKAVLPESMSDLGAQAVLANAYHLYLQPGADIVEAGGGLGRFMNWSGPTFTDSGGFQVLSLGAGFKKVLAMDTRGLGTDDVIAAGKTRLATVDDDGVTFKSHLDGSKHRFTPEISMQIQHRLGADIIFAFDECTTLMNTREYQESSVRRTQEWAVRCVDEHRRLTAERAGMPYQALFGVIQGAQYEDLRRRAVRDLLPLGFDGFGIGGALEKENLGTIVRWCCEEMPETMPRHLLGISEPDDIFTAIENGTDTFDCVSPSRVARNGAIYSPDGRYNLVAARFRRDFTPLAQDCDCYTCANYTRAYLHHLFKGNEMVSCTLATIHNERFIVKLVDDIRRSIDAGSFAEFKSEFLGRYYDGTRRP

SEQ ID NO: 57984 - protein, 409 aa, Nakamurella silvestris
  misc_feature (1)..(409): tr|A0A399USM8|A0A399USM8_9ACTN Queuine tRNA-ribosyltran sferase OS=Nakamurella silvestris OX=1645681 GN=tgt PE= 3 SV=1
MTDIQAPDQTTGFTVGTRLENGLGRTGTIHTPHGEIQTPAFIAVGTKATVKAVLPETVAELGAQAVLANAYHLFLQPGSDIVDEAGGLGAFMNWPGPTFTDSGGFQVLSLGAGFKKVLAMNSSTVRADDVIAEGKTRLAHVDEDGVTFKSHLDGSRHRFTPEVSMQIQHQLGADIIFAFDECTTLMNTREYQERSVERTQRWAVRCVDEHTRLTAERTHRPYQMLFGVVQGAQYEDLRRQAARDLAALGFDGFGIGGALEKDVLGTIVRWVNEELPEDKPRHLLGIGEPDDIFTAVENGVDTFDCVSPSRVARNGAIYSENGRFNVASATNRRDFGPLTQDCACYTCTHYSKAYLHHLLKAKEMLASTLATIHNEHFIVNLVDRVRASIVDGTFAEFREDFLGRYYPHR

SEQ ID NO: 57985 - protein, 403 aa, Nakamurella sp.
  misc_feature (1)..(403): tr|A0A3G8ZL95|A0A3G8ZL95_9ACTN Queuine tRNA-ribosyltran sferase OS=Nakamurella sp. s14-144 OX=1902245 GN=tgt PE =3 SV=1
MSDAESNFQLTTELGHSELGRSGVISTPHGTIATPAFIAVGTKATVKAVLPESMVGLGAQAVLANAYHLYLQPGSDLIDEAGGLGKFMNWTGPTFTDSGGFQVLSLGAGFKKVLAMDAGNVRADDVIAEGKTRLAHVDDDGVTFKSHLDGSLHRFTPEVSMQIQHQLGADIIFAFDELTTLMNTREYQEMSLERTRLWALRCIAEHRTLTESRAEKPYQSLFGVIQGAQYEDLRRKAARDLGQMGFDGFGIGGALEKENLGTIVRWVNEELPVDKPRHLLGISEPDDIFVAVQNGIDTFDCVSPSRVARNGAIYTPVGRVNVTNSRFRRDFGPLSQDCGCYTCSHYSRAYLHHLFKAKEMISCTLATIHNEAFIVKLVDDIRVSINDGTFFDFKEQFLGSYYS

SEQ ID NO: 57986 - protein, 409 aa, Nakamurella sp.
  misc_feature (1)..(409): tr|A0A4U6Q991|A0A4U6Q991_9ACTN Queuine tRNA-ribosyltran sferase OS=Nakamurella sp. N5BH11 OX=2576308 GN=tgt PE= 3 SV=1
MAEPADFGFTVDHRLPGRLGRTGTITTPHGEIRTPAFIAVGTKATVKAVLPESMAALGAQAVLANAYHLYLQPGSDLIDEAGGLGAFMNWPGPTFTDSGGFQVMSLGVGFKKVLAMDVSGLQSDSVIAAGKTRLAAVDDDGVTFKSHLDGSRHRFTPEVSMGIQHQLGADVMFAFDELTTLMNTREYQELSVRRTHEWAIRCLAEHRRLTAQRVGKPYQALFAVVQGAQYEDLRRQATADLAALRVDGQAFDGYGIGGAIEKQILGDIVGWVCEELPEDKPRHLLGISEPDDFFNAIANGADTFDCVSPSRVARNGRIFADRGYYNVNNARFRRDLTPLDEGCDCYVCAHYTRAYLHHLFKAKEMLSATLATIHNERWVVRLVDRIRASIADGTFDEFRDEMLGRFYRS

SEQ ID NO: 57987 - protein, 419 aa, Nannocystis exedens
  misc_feature (1)..(419): tr|A0A1I1T118|A0A1I1T118_9DELT Queuine tRNA-ribosyltran sferase OS=Nannocystis exedens OX=54 GN=tgt PE=3 SV=1
MTTRADPRLDLSCETSGLQPRPPGTFEVLAQAPGSPARAGRLWTAHGPIDTPCFMPVGTYGAVKGLDADDLREVGAQIILGNSYHLGHRPGAARVAALGGLHRMMAWDRPILTDSGGFQVFSLRGLQKIDDAGVSYQTHFDGSRHRMTPESVLATQAALGSDICMILDHCPPADAEPALIRAAVDRSTRWAEEAARRRGEILQPGQLCFGIVQGGTNVALRREHLKALADLPFEGLALGGLSVGEPIPEMHATMAAIGPEMPQDRPRYVMGIGTPHDLLAAVSSGIDMFDCVMPTRHARNGQLFTFSGRLNIRQARFRDDDAPIDPACRCRCCARYSRAYLRHLHEQNEPLYGRLATIHNLYFYQQWVGALRRALRSGRFEALRGEFSSIISTVYAEGAGAEGDVDAAAAAAVAAPEPA

SEQ ID NO: 57988 - protein, 381 aa, Nannocystis exedens
  misc_feature (1)..(381): tr|A0A1I2GWY8|A0A1I2GWY8_9DELT Queuine tRNA-ribosyltran sferase OS=Nannocystis exedens OX=54 GN=tgt PE=3 SV=1
MRFPFHVSALDPGSRARRGALDTPHGRIETPVFMAVGTRASVTGLTPAELHEVGAEVVLGNTYHLMLRPGPDLFRRVGGIHRFMGWNGPMLTDSGGYQIFSLSADRVISERGARFRSYTNQQFHMLSPEASIAMQEAIGADIMMVLDVCVDARSDEATTRAAMQRTHRWALRSLAARTGTPQALFAIMQGGIFPGLRRESAAFLTDHPFDGFAIGGLAVGDTRAEREDITHMAADLLPADRPRYLMGVGTPPDLLHAILAGVDMFDCILPTSLAWQGTAFTSTGRVKLMRASTRDDDRPLDAACACSTCKLYTRAYLHHLFRCGEPLGPRLVSLHNLHHYHALMAEARAAIAAGRFATYARDKLEAIDRYEHSDRRIGATA

SEQ ID NO: 57989 - protein, 370 aa, Natranaerobius thermophilus
  misc_feature (1)..(370): sp|B2A5K8|TGT_NATTJ Queuine tRNA-ribosyltransferase OS= Natranaerobius thermophilus (strain ATCC BAA-1301 / DSM 18059 / JW/NM-WN-LF) OX=457570 GN=tgt PE=3 SV=1
MAISYQLEQTSSESRARLGKLKTPRGEIQTPVFMPVGTQATVKTMTPEELKNLDAEIILGNTYHLHLRPGNDIVREADGLHKFMNWDRPILTDSGGFQVFSLGKLRQISEQGVEFRSHIDGSKLFMTPEKSIEIQEDLGSDIMMVFDECPPYPAEYDYVKESMDRTIRWSKRCLQHQKHPEKQALFGIVQGGMYPELRKESALKTTELDFPGYAVGGLSVGEPKEMMLEVLNTTIPYLPEEKPRYLMGVGTPDYIIEAVRMGIDMFDCVYPTRVARNGTAMTRFGNLTVRNAVFQRDFQPIEEDCDCYVCQNYSRAYLRHLIKANEILGFRLLTWHNLFFLIKLIKELRQAIADDNFLAWRDSFYKNYQN

SEQ ID NO: 57990 - protein, 371 aa, Natranaerobius trueperi
  misc_feature (1)..(371): tr|A0A226BWV7|A0A226BWV7_9FIRM Queuine tRNA-ribosyltran sferase OS=Natranaerobius trueperi OX=759412 GN=tgt PE= 3 SV=1
MAVSYIVNQKSSECDARVGTLKTPHGEVETPVFMPVGTQATVKTMTPDELKELESEIILSNTYHLYLRPGSKLIKEAGGLHKFMNWDRPILTDSGGFQVFSLGNRRNITEQGVEFRSHIDGSKMFLSPEKAVEIQEDLGSDIMMVFDECPPYPADEIYVKKSLDRTLRWAKRCKDSQNHADKQALFGIVQGGMYPKLRKESALRTVELDFPGYAVGGLSVGEPKELMLEVLENTTPFLPEEKPRYLMGVGTADYLVEGVYRGIDMFDCVFPTRVARNGTAMTWTGKMTVRNASYKKDFSPIDKSCECYTCKNYSRAYIRHLVKTNEILGFRLITWHNLYFLVQLMKEIRQAIKNDNFKDWRESFYKSYQHN

SEQ ID NO: 57991 - protein, 376 aa, Natranaerovirga hydrolytica
  misc_feature (1)..(376): tr|A0A4R1MYV9|A0A4R1MYV9_9FIRM Queuine tRNA-ribosyltran sferase OS=Natranaerovirga hydrolytica OX=680378 GN=tgt PE=3 SV=1
MYKLLNIDGKAKRGEFHTTHGVIQTPVFMNVGTAAAIKGAVSTKDLEDVKCQVELSNTYHLHLRPGDEVIKKLGGLHQFMVWDKPILTDSGGFQVFSLTSLRKIKEEGVYFSSHIDGKKIFMGPEESMQIQSNLGSTIAMAFDECPPYPATREYMKSSVDRTTRWLERCKVELNRLNKLEDTINPNQLLFGINQGGTYEDMRIEHAKVISELDLPGYAIGGLAVGESHSEMYRILEAVVPHLPQEKPTYLMGVGTPENILEAVDRGVDFFDCVYPTRNGRHGHVYINQGKLNLFNAKFQLDDRPIEEGCQCPACQSYSRAYIRHLLKAKEMLGMRLCVLHNLYFYNTMMEEIREAIANNRYQEYKQAKIDGFNVKV

SEQ ID NO: 57992 - protein, 376 aa, Natranaerovirga pectinivora
  misc_feature (1)..(376): tr|A0A4R3MQH5|A0A4R3MQH5_9FIRM Queuine tRNA-ribosyltran sferase OS=Natranaerovirga pectinivora OX=682400 GN=tgt PE=3 SV=1
MYKLHNIDGKAKRGELHTVHGVIQTPVFMNVGTAAAIKGAVSTEDLKQVKCQVELSNTYHLHVRPGDGVIRKLGGLHKFMVWDKPILTDSGGFQVFSLTSLRKIKEEGVYFSSHIDGKKIFMGPEESMQIQSNLASTIAMAFDECPPYPATREYMKDSVDRTTRWLVRCKDELNRLNGLDDTINKNQLLFGINQGGTYEDMRIEHAKVISELDLPGYAIGGLAVGESHHEMYRILEAVVPHLPQNKPTYLMGVGTPQNILEAVERGVDFFDCVYPTRNGRHGHVYTNHGKMNMLNAKFELDDRPIEEGCGCPACTTYSRAYIRHLLKAKEMLGMRLCVLHNLYFYNSMMEEIREAIENNRYSDYKAEKLERYNNGN

SEQ ID NO: 57993 - protein, 381 aa, Natribacillus halophilus
  misc_feature (1)..(381): tr|A0A1G8NXZ4|A0A1G8NXZ4_9BACI Queuine tRNA-ribosyltran sferase OS=Natribacillus halophilus OX=549003 GN=tgt PE =3 SV=1
MTAAISYEHIKTCRQSGARLGRIHTPHGVIDTPIFMPVGTLATVKMMSPEELKEMGAQIILSNTYHLWLRPGEDLVAEAGGLHTFMNWDRPVLTDSGGFQVFSLSDLRDIDEEGVRFRNHISGERLFLTPEKATRIQQSLGADMIMAFDECPPYPASYDYLRDSVARTSRWAERCLEAQAGNDDRQALFGIVQGGEYEDLRRRSAEDLVSLDFPGYAIGGLSVGEPKAVMNDVLEQTVQHLPTDKPRYLMGVGSADALIDGAIRGVDMFDCVLPTRIGRNGTCMTSEGRKVIRNAAFTRDFRPIDEACDCYTCRNYTRAYIRHLIKSKESFGFRLTSYHNLYFLIELMGKIRLAIKEDRLLDFRASFFEQYGFNRPDAKNF

SEQ ID NO: 57994 - protein, 372 aa, Natronincola ferrireducens
  misc_feature (1)..(372): tr|A0A1G9CXW1|A0A1G9CXW1_9CLOT Queuine tRNA-ribosyltran sferase OS=Natronincola ferrireducens OX=393762 GN=tgt PE=3 SV=1
MALTYELIKECKQSGARLGKIHTARGVIETPIFMPVGTQATVKTMTPEELKDIKSQIILSNTYHLYLRPGHELVKKAGGLHRFMNWDKPILTDSGGFQVFSLGDLRKISEEGVEFRSHLDGSKHFISPEKAVEIQNALGSDIMMVFDECAPYPADREYVKNSLERTTRWAKRCKDAHKNIENQSLFGIIQGGMYGDLRKQSAEELLELDFPGYAVGGLSVGEPKPLMYEVLEYTTPFMPKNKPRYLMGVGSPDCLIEGVIRGIDMFDCVLPTRIARNGTAMTSHGKVVIKNAKHTEDFTGLDPECDCYTCKNYSKAYLRHLFKANEVLGLRLMSHHNLYFLLKLMEEIRQAIKEDRLLDYRKNFFVKYGYDV

SEQ ID NO: 57995 - protein, 372 aa, Natronincola peptidivorans
  misc_feature (1)..(372): tr|A0A1H9YYI4|A0A1H9YYI4_9CLOT Queuine tRNA-ribosyltran sferase OS=Natronincola peptidivorans OX=426128 GN=tgt PE=3 SV=1
MALTYELIKECKQSGARLGKIHTKRGVIETPIFMPVGTQATVKTMTPEELIEIESQIILSNTYHLYLRPGHHLIDRAGGLHKFMNWNKPILTDSGGFQVFSLGDLRKISEEGVEFRSHLDGSKHFISPEKAIEIQTSLGSDIMMVFDECAPYPADETYVKNSLERTTRWAIRCKEAHKNFENQSLFGIIQGGMYPNLRKQSAEALIELDFPGYAVGGLSVGEPKPLMYEVLEHTTPLMPKNKPRYLMGVGSPDCLLEGVIRGIDMFDCVLPTRIARNGTAMTSQGKVVIKNAKHTEDFQGLDPECSCNTCKNYSKAYLRHLFKSNEVLGLRLLSYHNLYFLLQLMKNIREAIHEDRLLDYRDNFFEKYGYNA

SEQ ID NO: 57996 - protein, 376 aa, Natronoflexus pectinivorans
  misc_feature (1)..(376): tr|A0A4R2GH09|A0A4R2GH09_9BACT Queuine tRNA-ribosyltran sferase OS=Natronoflexus pectinivorans OX=682526 GN=tgt PE=3 SV=1
MDFVLHKKDAFSKARAGEISTDHGKIETPVFMPVGTVGSVKGIHVRDLEQEVRARIILGNTYHLYLRPGIDVLRKAGGLHKFNSWDKPILTDSGGFQVFSLSHRRKLKEEGAEFQSHIDGSKHVFTPENVVDIQRVIGADIIMAFDECPPGDSDFNYAKKSMELTHRWLLRGIERFDSTEPLYDYGQTFFPIVQGAGFPDLRRQSAEFIANQNREGNAIGGLAVGEPEEVMYKMIQVVNEILPEDKPRYLMGVGTPANILEAISLGVDMFDCVMPTRNGRNGMLFTSKGIINIRNEKWKYDFSPIDPDGNSAFDLIYSKAYLRHLFIAGEMLGPQIASIHNLSFYMWLVDEARRQINQGTFFDWKEQMVKQLKVRL

SEQ ID NO: 57997 - protein, 369 aa, Natronospirillum operossus
  misc_feature (1)..(369): tr|A0A4Z0W1T6|A0A4Z0W1T6_9BACT Queuine tRNA-ribosyltran sferase OS=Natronospirillum operossus OX=2562806 GN=tgt PE=3 SV=1
MDFTLHREEGSARRGTLTFPRGKVETPCFMPVGTYGTVKGMLPRDIEAIGAQIILGNTFHLMLRPGTEVIRAHGDLHDFNGWSGPILTDSGGFQVFSLGAMRKITEQGVTFQSPVDGSPVELNPEIAMQVQRDLGSDIVMIFDECTPYPATREEARSSMELSLRWAERSKQAHGDSPSALFGIVQGGMYADLRRASLAGLEQIGFDGYAIGGLSVGEPKAEMMQVLEDTTPHMPRARPRYLMGVGTPEDLVEGVLRGVDMFDCVMPTRNARNGHLFTTEGVVKIRNAAHRHDTRPPDPDCDCYTCQNFSRAYLHHLDRCREILGSQLNTIHNLRYYQRLMAGLRQAIESGRLSDFVADFYARRGRKGAA

SEQ ID NO: 57998 - protein, 404 aa, Naumannella halotolerans
  misc_feature (1)..(404): tr|A0A4R7J8Q2|A0A4R7J8Q2_9ACTN Queuine tRNA-ribosyltran sferase OS=Naumannella halotolerans OX=993414 GN=tgt PE =3 SV=1
MSFGFEVGSRLDGQLGRTGVITTPHGQIETPAFIAVGTKATVKAVLPESMAELGAQAVLANAYHLYLQPGSDIVESAGGLGRFMNWPGPTFTDSGGFQVMSLGVGFKKVLAMDAKGVTGDDVIAAGKERMAHVDDDGVTFKSHLDGTMHRFTPEVSMKVQHQIGADIIFAFDELTTLMNTRGYQEQSLARTQAWAQRCLAEHSRLLAAHPDRPQQALFGVVQGAQYEDLRRKACRDLAATEIDGRHFEGYGIGGALEKENLGTIVGWCAEELPENRPRHLLGISEPDDFFAAIAAGADTFDCVSPSRVARNAALYSRDGRFNVNTAANRRNFGPVDEDCDCYTCAHYTRAYLHHLFKAKEMVVNTLATIHNERFIVRLVDDIRDSIRTGDFEAFREEFLGRYYG

SEQ ID NO: 57999 - protein, 378 aa, Nautilia profundicola
  misc_feature (1)..(378): sp|B9L8E1|TGT_NAUPA Queuine tRNA-ribosyltransferase OS= Nautilia profundicola (strain ATCC BAA-1463 / DSM 18972 / AmH) OX=598659 GN=tgt PE=3 SV=1
MEFRIDSIDGNARACTIKTEHSEIKTPIFMPVGTAAAVKSLDAIDMMEILDAPIILGNTYHLYLRPGDEIISKLGGLHGFSGYKRSFLTDSGGFQAFSLGDNVKFTDEGIWFKSHIDGSKHFFSPEKVIDIEYNLNSDIMMVLDDLIALPNTKERIKKSIERTTEWAYRSLVHHVNRGKKNNLFAIIQGGTDFEFRRISAESLVSLEYKGYTFDGFAIGGLSVGEENQLMYDTIEATTPYMPKDKPRYLMGVGTPEDIIEAVERGVDMFDCVMPTRNARNGYLFTTFGTLRIKNAKYKLDESPIDPKCNCYTCRNFSRAYLNHLFKAKELTYFRLASIHNLHYYLNFVKEIREAILEGRFKEYKKEFYSLRAMNSLEI

SEQ ID NO: 58000 - protein, 378 aa, Nautilia sp.
  misc_feature (1)..(378): tr|A0A3T0L0U7|A0A3T0L0U7_9PROT Queuine tRNA-ribosyltran sferase OS=Nautilia sp. PV-1 OX=2579250 GN=tgt PE=3 SV= 1
MEFKIDKTDGNARACTIKTAHSEIKTPIFMPVGTAAAVKSLDAVDMTEILDAPIILGNTYHLYLRPGDETVAKLGGLHGFSGYKRSFLTDSGGFQAFSLGDNVKFTDEGIWFKSHIDGSRHFFSPEKVIDIEYNLGSDIMMVLDDLIALPNTKERIKKSIERTTQWAYRSLVHHVKKGKKNNLFAIIQGGTDFEFRRISAESLVSLEYEGHTFDGFAIGGLSVGEENQLMYDTIEATTPYMPQDKPRYLMGVGTPEDIIEAVERGVDMFDCVMPTRNARNGYLFTTFGTLRIKNAKYKLDDSPIDPKCNCYTCRNFSRAYLNHLFKAKELTYFRLASIHNLHYYLNLVREIREAILEGRFKEYKKEFYSLRAINSFEI

SEQ ID NO: 58001 - protein, 379 aa, Negativibacillus sp.; identical to SEQ ID NO: 52205
  misc_feature (1)..(379): tr|A0A3A8XP04|A0A3A8XP04_9FIRM Queuine tRNA-ribosyltran sferase OS=Negativibacillus sp. 1xD8-3 OX=2320085 GN=tg t PE=3 SV=1

SEQ ID NO: 58002 - protein, 370 aa, Negativicoccus succinicivorans
  misc_feature (1)..(370): tr|W1U0H3|W1U0H3_9FIRM Queuine tRNA-ribosyltransferase OS=Negativicoccus succinicivorans DORA_17_25 OX=1403945 GN=tgt PE=3 SV=1
MAVITYELVHEDAQTGARAGRIHTPHGSFDTPMFMPVGTQATVKTLSPEEVADTGAGIILSNTYHLFLRPGTELIKEAGGLHQFMKWPRAMLTDSGGFQVFSLGAMRKIKEEGVYFRSHIDGSKQFLSPEVATHAQMDLGADIAMAFDECIPYPADYEYAKQSTERTTRWAKRCLEVHEHPAQGMFGIIQGGMYRDLRAQSAREITALPFDGFAIGGLSVGEPHDLMYEMLDYTTHLMPRDKARYLMGVGTPDCLVEGVARGVDMFDCVYPTRVARNGMAMLKTGRLNIKNKQFERDFSPLDEECDCYACRHYTRAYIRHLYKAEEIFAFRLLSVHNIHFLQRFMRGLREAILEDRFGDFQRDFWAQWQR

SEQ ID NO: 58003 - protein, 371 aa, Neisseria animalis
  misc_feature (1)..(371): tr|A0A3N3EEW7|A0A3N3EEW7_NEIAN Queuine tRNA-ribosyltran sferase OS=Neisseria animalis OX=492 GN=tgt PE=3 SV=1
MLKFTLHKTDGHARRGTLELNHGTIETPVFMPVGTYGSVKAMTPDNLHDIKAQIILGNTYHLWLRPGLEVIEQFGGLHGFIGWNKPILTDSGGFQVFSLSDMRKLTEEGCTFKSPINGDKLFLSPEISMKIQTVLNSDIVMQLDECTPGEAGREQARLSLQMSLRWAERSKKAFEDLKNPNALFGIVQGAMYEDLREESLKGLEQFDFPGLAIGGLSVGEPKPEMYRMIRAVGPMLPAHKPHYLMGVGTPEDLVYGVAHGIDMFDCVMPTRNARNGWLFTRFGDIKIKNAKHKHDTRPLDESCTCYACRNFSRAYLHHLHRAGEILGAQLNTIHNLHFYQVIMAEMREAIEQGKFADWQAQFHENRARGTD

SEQ ID NO: 58004 - protein, 370 aa, Neisseria animaloris
  misc_feature (1)..(370): tr|A0A3S4YB59|A0A3S4YB59_9NEIS Queuine tRNA-ribosyltran sferase OS=Neisseria animaloris OX=326522 GN=tgt PE=3 S V=1
MLKFTLHKKDGYARRGTLELNHGKIETPVFMPVGTYGSVKAMTPQNLHDIKAQIILGNTYHLWLRPGLEVIEQFGGLHHFIGWDKPILTDSGGFQVFSLSDMRKLTEEGCTFKSPINGDKLFLSPEISMKIQTVLNSDIVMQLDECTPGEASHPQAQKSLQMSLRWAERSKKAFEDLNNPNALFGIVQGAMYEDLREESLKGLEQFDFPGLAIGGLSVGEPKPEMYRMLRTVGPILPEHKPHYLMGVGTPEDLVYGVAHGVDMFDCVMPTRNARNGWLFTRFGDLKIKNAKHKLDTRPIDETCTCYACRNFSRSYLHHLHRAGEILGAQLNTIHNLHYYQTLMAEMREAIEQGKFADWQARFHENRARGV

SEQ ID NO: 58005 - protein, 370 aa, Neisseria arctica
  misc_feature (1)..(370): tr|A0A0J1C599|A0A0J1C599_9NEIS Queuine tRNA-ribosyltran sferase OS=Neisseria arctica OX=1470200 GN=tgt PE=3 SV= 1
MLKFTLHKTDGYARRGTLELNHGKIETPVFMPVGTYGSVKAMTPQHLHDIKAQIILGNTYHLWLRPGLEVIEQFGGLHDFIGWNKPILTDSGGFQVFSLSDMRKLTEEGCTFKSPINGDKLFLSPEISMKIQTVLNSDIVMQLDECTPGEASHSQAQKSLQMSLRWAERSKKAFEDLNNPNALFGIVQGAMYEDLREESLRGLEEFDFPGLAIGGLSVGEPKPEMYRMLRAVGPILPAHKPHYLMGVGTPEDLVYGVAHGVDMFDCVMPTRNARNGWLFTRFGDLKIKNAKHKHDPRPIDESCTCYACQNFSRAYLHHLHRAGEILGAQLNTIHNLHYYQVLMTEMREAIEQGKFAEFQAQFHKNRARGS

SEQ ID NO: 58006 - protein, 380 aa, Neisseria bacilliformis
  misc_feature (1)..(380): tr|F2BB88|F2BB88_9NEIS Queuine tRNA-ribosyltransferase OS=Neisseria bacilliformis ATCC BAA-1200 OX=888742 GN=t gt PE=3 SV=1
MFSRAHTMLRFTLRATDGHARRGTLELNHGIIETPVFMPVGTYGSVKAMSPANLADIKAQIILGNTYHLWLRPGLEVIEQFGGLHRFIGWDKPILTDSGGFQVFSLADMRKLTEEGCTFKSPINGDKLFLSPEISMKIQTVLNSDIAMQLDECTPGEATREQAKASLQMSLRWAERSKKAFEDLRNPNALFGIVQGAMYEDLREQSLRGLEQFDFPGLAIGGLSVGEPKPEMYRMLRAVGPMLPAHKPHYLMGVGTPEDLVYGVAHGVDMFDCVMPTRNARNGWLFTRLGDVKIKNAKHKHDTAPLDETCTCYTCQNFSRAYLHHLHRAGEILGAQLNTIHNLHFYQTIMAEMREAIEQGRFADWRARFHELRGSQPEAE

SEQ ID NO: 58007 - protein, 370 aa, Neisseria canis
  misc_feature (1)..(370): tr|A0A448DAP4|A0A448DAP4_9NEIS Queuine tRNA-ribosyltran sferase OS=Neisseria canis OX=493 GN=tgt PE=3 SV=1
MLKFTLHKTDGHARRGTLELNHGTIETPVFMPVGTYGSVKAMTPQNLHDIKAQIILGNTYHLWLRPGLEVIEEFGDLHQFIGWNKPILTDSGGFQVFSLSDMRKLTEEGCTFKSPINGDKLFLSPEISMKIQTVLNSDIAMQLDECTPGEASHEQARKSLQMSLRWAERSKKAFEDLRNPNALFGIVQGAMYEDLREESLKGLEAFDFPGLAIGGLSVGEPKPEMYRMLRAIGPILPAHKPHYLMGVGTPEDLVYGVAHGVDMFDCVMPTRNARNGWLFTRFGDLKIKNAVHKHDTRPIDESCSCYACQNFSRAYLHHLHKAGEILGAQLNTIHNLHFYQVIMAEMREAIEQGKFADWQAQFHENRARGV

SEQ ID NO: 58008 - protein, 371 aa, Neisseria cinerea
  misc_feature (1)..(371): tr|A0A2X4BLD1|A0A2X4BLD1_NEICI Queuine tRNA-ribosyltran sferase OS=Neisseria cinerea OX=483 GN=tgt PE=3 SV=1
MLKFTLHKKDGHARRGTLELNHGKIETPVFMPVGTYGSVKAMNPQNLHDIKARIILGNTYHLWLRPGLEVIEQFGGLHEFIGWDKPILTDSGGFQVFSLSDMRKLTEEGCTFQSPINGDKLFLSPEVSMKIQTVLNSDIVMQLDECTPGEATHSQAQKSLQMSLRWAERSKKAFEGLKNPNALFGIVQGAMYEDLREESLKGLEELDFPGLAIGGLSVGEPKPEMYRMLRAVGPILPEHKPHYLMGVGTPEDLVYGVAHGVDMFDCVMPTRNARNGWLFTRFGDLKIKNAKHKLDKRPIDESCTCYACQNFSRSYLHHLHRVGEILGAQLNTIHNLHFYQVIMAEMREAIEQGKFADWQAQFHENRARGVD

SEQ ID NO: 58009 - protein, 371 aa, Neisseria cinerea
  misc_feature (1)..(371): tr|D0W1L5|D0W1L5_NEICI Queuine tRNA-ribosyltransferase OS=Neisseria cinerea ATCC 14685 OX=546262 GN=tgt PE=3 S V=1
MLKFTLHKKDGHARRGTLELNHGKIETPVFMPVGTYGSVKAMNPQNLHDIKAQIILGNTYHLWLRPGLEVIEQFGGLHEFIGWDKPILTDSGGFQVFSLSDMRKLTEEGCTFQSPINGDKLFLSPEVSMKIQTVLNSDIVMQLDECTPGEATHSQAQKSLQMSLRWAERSKKAFEDLKNPNALFGIVQGAMYEDLREESLKGLEELDFPGLAIGGLSVGEPKPEMYRMLRAVGPILPEHKPHYLMGVGTPEDLVYGVAHGVDMFDCVMPTRNARNGWLFTRFGDLKIKNAKHKLDKRPIDESCTCYACQNFSRSYLHHLHRVGEILGAQLNTIHNLHFYQVIMAEMREAIEQGKFTDWQAQFHENRARGVD

SEQ ID NO: 58010 - protein, 371 aa, Neisseria dentiae
  misc_feature (1)..(371): tr|A0A1X3D573|A0A1X3D573_9NEIS Queuine tRNA-ribosyltran sferase OS=Neisseria dentiae OX=194197 GN=tgt PE=3 SV=1
MLKFTLHTTDGHARRGTLELNHGTIETPVFMPVGTYGSVKAMTPQNLHDINAQIILGNTYHLWLRPGLEVIEQFGGLHQFIGWDKPILTDSGGFQVFSLSDMRKLTEEGCTFKSPINGDKLFLSPEISMKIQTVLNSDIVMQLDECTPGEASHEQAKKSLQMSLRWAERSKKAFEDLNNPNALFGIVQGAMYEDLREESLRGLEQFDFPGLAIGGLSVGEPKPEMYRMLRAVGPMLPAHKPHYLMGVGTPEDLVYGVAHGVDMFDCVMPTRNARNGWLFTRFGDIKIKNAKHKHDTRPLDETCTCYACKNFSRAYLYHLHKAGEILGAQLNTIHNLHFYQVIMAEMREAIEQGRFADWQAQFHENRARGTD

SEQ ID NO: 58011 - protein, 371 aa, Neisseria dumasiana
  misc_feature (1)..(371): tr|A0A1X3DK98|A0A1X3DK98_9NEIS Queuine tRNA-ribosyltran sferase OS=Neisseria dumasiana OX=1931275 GN=tgt PE=3 S V=1
MLKFTLHKTDGHARRGTLELNHGTIETPVFMPVGTYGSVKAMTPANLHDIKAQIILGNTYHLWLRPGLEVIEQFGGLHQFIGWNKPILTDSGGFQVFSLSDMRQLTEEGCTFKSPINGDKLFLSPEISMKIQTVLNSDIAMQLDECTPGEATHEQARQSLQMSLRWAERSKKAFEDLNNPNALFGIVQGAMYEDLREESLKGLEEFDFPGLAIGGLSVGEPKPEMYRMLRAVGPMLPARKPHYLMGVGTPEDLVYGVAHGVDMFDCVMPTRNARNGWLFTRFGDIKIKNAKHKHDTRPLDESCTCYACQNFSRAYLYHLHKAGEILGAQLNTIHNLHFYQVIMAEMREAIEQGKFAEWQAQFHENRARGTD

SEQ ID NO: 58012 - protein, 371 aa, Neisseria elongata
  misc_feature (1)..(371): tr|A0A0B5CPA5|A0A0B5CPA5_NEIEG Queuine tRNA-ribosyltran sferase OS=Neisseria elongata subsp. glycolytica ATCC 2 9315 OX=546263 GN=tgt PE=3 SV=1
MLKFTLHKKDGHARRGTLELNHGSIETPVFMPVGTYGSVKAMTPQNLHDIKAQIILGNTYHLWLRPGLEVIEQFGGLHDFIGWNKPILTDSGGFQVFSLSDMRKLTEEGCTFKSPINGDKLFLSPEISMKIQTVLNSDIAMQLDECTPGEATHEQAKKSLQMSLRWAERSKKAFEDLNNPNALFGIIQGAMYEDLREESLRGLEDIGFKGIAIGGLSVGEPKPEMYRMLRALAPMLPEHKPHYLMGVGTPEDLVYGVAHGVDMFDCVMPTRNARNGWLFTRFGDLKIRNAKHRHDKRPLDESCTCYACQNFSRSYLHHLDKVGEILGAQLFTIHNLHFYQVIMAEMREAIEQGKFTDWQARFHENRARGTD

SEQ ID NO: 58013 - protein, 181 aa, Neisseria elongata
  misc_feature (1)..(181): tr|D4DUG3|D4DUG3_NEIEG tRNA-guanine transglycosylase OS =Neisseria elongata subsp. glycolytica ATCC 29315 OX=54 6263 GN=NEIELOOT_02723 PE=4 SV=1
MYEDLREESLRGLEDIGFKGIAIGGLSVGEPKPEMYRMLRALAPMLPEHKPHYLMGVGTPEDLVYGVAHGVDMFDCVMPTRNARNGWLFTRFGDLKIRNAKHRHDKRPLDESCTCYACQNFSRSYLHHLDKVGEILGAQLFTIHNLHFYQVIMAEMREAIEQGKFTDWQARFHENRARGTD

SEQ ID NO: 58014 - protein, 371 aa, Neisseria flavescens
  misc_feature (1)..(371): tr|A0A154UAB1|A0A154UAB1_NEIFL Queuine tRNA-ribosyltran sferase OS=Neisseria flavescens OX=484 GN=tgt PE=3 SV=1
MLKFTLHKKDGHARRGTLELNHGKIETPVFMPVGTYGSVKAMNPQNLHDIKAQIILGNTYHLWLRPGLEVIEQFGGLHEFIGWDKPILTDSGGFQVFSLSDMRKLTEEGCTFQSPINGDKLFLSPEVSMKIQTVLNSDIVMQLDECTPGEATHSQAQKSLQMSLRWAERSKKAFEDLKNPNALFGIVQGAMYEDLREESLKGLEELDFPGLAIGGLSVGEPKPEMYRMLRAVGPILPEHKPHYLMGVGTPEDLVYGVAHGVDMFDCVMPTRNARNGWLFTRFGDLKIKNAKHKLDKRPIDESCTCYACQNFSRSYLHHLHRVGEILGAQLNTIHNLHFYQVIMAEMREAIEQGKFADWQAQFNENRARGVD

SEQ ID NO: 58015 - protein, 371 aa, Neisseria flavescens
  misc_feature (1)..(371): tr|C5TIW2|C5TIW2_NEIFL Queuine tRNA-ribosyltransferase OS=Neisseria flavescens SK114 OX=596320 GN=tgt PE=3 SV= 1
MLKFTLHKKDGHARRGTLELNHGKIETPVFMPVGTYGSVKAMNPQNLHDIKAQIILGNTYHLWLRPGLEVIEQFGGLHEFIGWNKPILTDSGGFQVFSLSDMRKLTEEGCTFQSPINGDKLFLSPEVSMKIQTVLNSDIVMQLDECTPGEATHSQAQKSLQMSLRWAERSKKAFEDLKNPNALFGIVQGAMYEDLREESLKGLEELDFPGLAIGGLSVGEPKPEMYRMLRAVGPILPEHKPHYLMGVGTPEDLVYGVAHGVDMFDCVMPTRNARNGWLFTRFGDLKIKNAKHKLDKRPIDESCTCYACQNFSRSYLHHLHRVGEILGAQLNTIHNLHFYQVIMAEMREAIEQGKFTDWQAQFHENRARGVD

SEQ ID NO: 58016 - protein, 371 aa, Neisseria gonorrhoeae
  misc_feature (1)..(371): sp|Q5F9U5|TGT_NEIG1 Queuine tRNA-ribosyltransferase OS= Neisseria gonorrhoeae (strain ATCC 700825 / FA 1090) OX =242231 GN=tgt PE=3 SV=1
MLKFTLHKKDGLARRGTLELNHGKIETPVFMPVGTYGSVKAMNPQNLHDIKAQIILGNTYHLWLRPGLEVVEQFGGLHGFIGWDKPILTDSGGFQVFSLSDMRKLTEEGCTFKSPINGDKLFLSPEISMKIQTVLNSDIAMQLDECTPGETTREQARKSLQMSLRWAERSKKAFEDLKNPNALFGIVQGAMYEDLREESLRGLEEFDFPGLAVGGLSVGEPKPEMYRMLHAVGPMLPERKPHYLMGVGTPEDLVYGVAHGIDMFDCVMPTRNARNGWLFTRFGDLKIKNAKHKPDKRPIDESCTCYACQNFSRAYLHHLHRAGEILGAQLNTIHNLHFYQVIMAEMRDAVEQGKFADWQAQFHENRARGVD

SEQ ID NO: 58017 - protein, 371 aa, Neisseria gonorrhoeae
  misc_feature (1)..(371): sp|B4RJY2|TGT_NEIG2 Queuine tRNA-ribosyltransferase OS= Neisseria gonorrhoeae (strain NCCP11945) OX=521006 GN=t gt PE=3 SV=1
MLKFTLHKKDGLARRGTLELNHGKIETPVFMPVGTYGSVKAMNPQNLHDIKAQIILGNTYHLWLRPGLEVVEQFGGLHGFIGWDKPILTDSGGFQVFSLSDMRKLTEEGCTFKSPINGDKLFLSPEISMKIQTVLNSDIAMQLDECTPGETTREQARKSLQMSLRWAERSKKAFEDLKNPNALFGIVQGAMYEDLREESLRGLEEFDFPGLAVGGLSVGEPKPEMYRMLHAVGPILPEHKPHYLMGVGTPEDLVYGVAHGIDMFDCVMPTRNARNGWLFTRFGDLKIKNAKHKLDKRPIDESCTCYACQNFSRAYLHHLHRAGEILGAQLNTIHNLHFYQVIMAEMREAVEQGKFADWQAQFHENRARGVD

SEQ ID NO: 58018 - protein, 371 aa, Neisseria iguanae
  misc_feature (1)..(371): tr|A0A2P7TYQ9|A0A2P7TYQ9_9NEIS Queuine tRNA-ribosyltran sferase OS=Neisseria iguanae OX=90242 GN=tgt PE=3 SV=1
MLKFTLHKKDGLARRGTLELNHGKIETPVFMPVGTYGSVKAMTPQNLHDINARIILGNTYHLWLRPGLEVIEQFGGLHRFIGWDKPILTDSGGFQVFSLSEMRKLTEEGCTFKSPINGDKLFLSPEISMKIQTVLNSDIVMQLDECTPGEATHEQARKSLQMSLRWAERSKKAFEDLNNPNALFGIVQGAMYEDLREESLRGLEQFDFPGLAIGGLSVGEPKPEMYRMLRTVGPVLPEQKPHYLMGVGTPEDLVYGVAHGVDMFDCVMPTRNARNGWLFTRFGDLKIKNAKHRLDNRPLDESCTCYACQNFSRSYLHHLHKVGEILGAQLNTIHNLHFYQAIMAEMREAIDQGKFNDWQAQFHENRAHGMS

SEQ ID NO: 58019 - protein, 371 aa, Neisseria lactamica
  misc_feature (1)..(371): tr|E4ZEE2|E4ZEE2_NEIL0 Queuine tRNA-ribosyltransferase OS=Neisseria lactamica (strain 020-06) OX=489653 GN=tgt PE=3 SV=1
MLKFTLHKKDGHARRGTLELNHGKIETPVFMPVGTYGSVKAVNPQNLHDIKAQIILGNTYHLWLRPGLEVIGQFGGLHGFIGWDKPILTDSGGFQVFSLSDMRKLTEEGCTFKSPINGDKLFLSPEISMKIQTVLNSDIAMQLDECTPGEATREQARKSLQMSLRWAERSKKAFEDLKNPNALFGIVQGAMYEDLREESLRGLEQFDFPGLAVGGLSVGEPKPEMYRMLRAVGPMLPEHKPHYLMGVGTPEDLVYGVAHGIDMFDCVMPTRNARNGWLFTRFGDLKIKNAKHKSDKRPIDESCTCYACRNFSRAYLHHLHRTGEILGAQLNTIHNLHFYQVIMAEMREAVEQGKFADWQAQFHENRARGTD

SEQ ID NO: 58020 - protein, 371 aa, Neisseria lactamica
  misc_feature (1)..(371): tr|D0W7W9|D0W7W9_NEILA Queuine tRNA-ribosyltransferase OS=Neisseria lactamica ATCC 23970 OX=546265 GN=tgt PE=3 SV=1
MLKFTLHKKDGHARCGTLELNHGKIETPVFMPVGTYGSVKAMNPQNLHDIKAQIILGNTYHLWLRPGLEVIGQFGGLHGFIGWDKPILTDSGGFQVFSLSDMRKLTEEGCTFKSPINGDKLFLSPEISMKIQTVLNSDIAMQLDECTPGEATREQARKSLQMSLRWAERSKKTFEDLKNPNALFGIVQGAMYEDLREESLRGLEQFDFPGIAVGGLSVGEPKPEMYRMLRAVGPMLPAHKPHYLMGVGTPEDLVYGVAHGIDMFDCVMPTRNARNGWLFTRFGDLKIKNAKHKSDKRPIDESCTCYACRNFSRAYLHHLHRAGEILGAQLNTIHNLHFYQVIMAEMREAVEQGKFADWQAQFHENRARGTD

SEQ ID NO: 58021 - protein, 371 aa, Neisseria macacae
  misc_feature (1)..(371): tr|F9EY42|F9EY42_9NEIS Queuine tRNA-ribosyltransferase OS=Neisseria macacae ATCC 33926 OX=997348 GN=tgt PE=3 S V=1
MLKFTLHKKDGHARRGTLELNHGKIETPVFMPVGTYGSVKAMNPQNLHDIKAQIILGNTYHLWLRPGLEVIEQFGGLHEFIGWNKPILTDSGGFQVFSLSDMRKLTEEGCTFQSPINGDRLFLSPEISMKIQTVLNSDIVMQLDECTPGEATHEQAQKSLQMSLRWAERSKKAFEDLKNPNALFGIVQGAMYEDLREESLHGLEQFDFPGLAIGGLSVGEPKPEMYRMLRAVGPMLPEHKPHYLMGVGTPEDLVYGVAHGVDMFDCVMPTRNARNGWLFTRFGDLKIKNAKHKLDKRPIDESCTCYACQNFSRAYLHHLHRAGEILGAQLNTIHNLHFYQVIMAEMREAIEQGKFADWQAQFHENRARGID

SEQ ID NO: 58022 - protein, 371 aa, Neisseria meningitidis
  misc_feature (1)..(371): sp|Q9K096|TGT_NEIMB Queuine tRNA-ribosyltransferase OS= Neisseria meningitidis serogroup B (strain MC58) OX=122 586 GN=tgt PE=3 SV=1
MLKFTLHKKDGLARRGTLELNHGKIETPVFMPVGTYGSVKAMNPQNLHDIKAQIILGNTYHLWLRPGLEVIGQFGGLHGFIGWDKPILTDSGGFQVFSLSDMRKLTEEGCTFKSPINGDKLFLSPEISMKIQTVLNSDIAMQLDECTPGEATREQARKSLQMSLRWAERSKKAFEDLKNPNALFGIVQGAMYEDLREESLRGLEQFDFPGLAVGGLSVGEPKPEMYRMLRAVGPILPEHKPHYLMGVGTPEDLVYGVAHGIDMFDCVMPTRNARNGWLFTRFGDLKIKNAKHKLDKRPIDESCTCYACQNFSRAYLHHLHRTGEILGAQLNTIHNLHFYQVIMAEMREAVEQGKFADWQARFHENRARGTD

SEQ ID NO: 58023 - protein, 371 aa, Neisseria meningitidis
  misc_feature (1)..(371): sp|A9M374|TGT_NEIM0 Queuine tRNA-ribosyltransferase OS= Neisseria meningitidis serogroup C (strain 053442) OX=3 74833 GN=tgt PE=3 SV=1
MLKFTLHKKDGYARRGTLELNHGKIETPVFMPVGTYGSVKAMNPQNLHDIKAQIILGNTYHLWLRPGLEVIGQFGGLHGFIGWDKPILTDSGGFQVFSLSDMRKLTEEGCTFKSPINGDKLFLSPEISMKIQTVLNSDIAMQLDECTPGEATREQARKSLQMSLRWAERSKKAFEDLKNPNALFGIVQGAMYEDLREESLRGLEQFDFPGLAVGGLSVGEPKPEMYRMLRAVGPILPEHKPHYLMGVGTPEDLVYGVAHGIDMFDCVMPTRNARNGWLFTRFGDLKIKNAKHKLDKRPIDESCTCYACQNFSRAYLHHLHRAGEILGAQLNTIHNLHFYQVIMAEMRDAIEQGKFADWQAQFHENRARGTD

SEQ ID NO: 58024 - protein, 371 aa, Neisseria mucosa
  misc_feature (1)..(371): tr|A0A2R4ASZ1|A0A2R4ASZ1_NEIMU Queuine tRNA-ribosyltran sferase OS=Neisseria mucosa OX=488 GN=tgt PE=3 SV=1
MLKFTLHKKDGHARRGTLELNHGKIETPVFMPVGTYGSVKAMNPQNLHDIKAQIILGNTYHLWLRPGLEVIEQFGGLHDFIGWNKPILTDSGGFQVFSLSDMRKLTEEGCTFQSPINGDRLFLSPEISMKIQTVLNSDIVMQLDECTPGEATHEQAQKSLQMSLRWAERSKKAFEDLKNPNALFGIVQGAMYEDLREESLRGLEQFDFPGLAIGGLSVGEPKPEMYRMLRTVGPMLPEHKPHYLMGVGTPEDLVYGVAHGVDMFDCVMPTRNARNGWLFTRFGDLKIKNAKHKLDKRPIDESCTCYACQNFSRAYLHHLHRAGEILGAQLNTIHNLHFYQVIMAEMREAIEQEKFADWQAQFHENRARGVD

SEQ ID NO: 58025 - protein, 371 aa, Neisseria mucosa
  misc_feature (1)..(371): tr|D2ZZK4|D2ZZK4_NEIMU Queuine tRNA-ribosyltransferase OS=Neisseria mucosa ATCC 25996 OX=546266 GN=tgt PE=3 SV =1
MLKFTLHKKDGHARRGTLELNHGKIETPVFMPVGTYGSVKAMNPQNLHDIKAQIILGNTYHLWLRPGLEVIEQFGGLHEFIGWNKPILTDSGGFQVFSLSDMRKLTEEGCTFQSPINGDRLFLSPEISMKIQTVLNSDIVMQLDECTPGEATHEQAQKSLQMSLRWAERSKKAFEDLKNPNALFGIVQGAMYEDLREESLRGLEQFDFPGLAIGGLSVGEPKPEMYRMLRAVGPMLPEHKPHYLMGVGTPEDLVYGVAHGVDMFDCVMPTRNARNGWLFTRFGDLKIKNAKHKLDKRPIDESCTCYSCQNFSRAYLHHLHRAGEILGAQLNTIHNLHFYQVIMAEMREAIEQGKFADWQAQFHENRARGVD

SEQ ID NO: 58026 - protein, 371 aa, Neisseria perflava
  misc_feature (1)..(371): tr|A0A2I1QZ89|A0A2I1QZ89_NEIPE Queuine tRNA-ribosyltran sferase OS=Neisseria perflava OX=33053 GN=tgt PE=3 SV=1
MLKFTLHKKDGHARRGTLELNHGKIETPVFMPVGTYGSVKAMNPQNLHDIKAQIILGNTYHLWLRPGLEVIEQFGGLHGFIGWDKPILTDSGGFQVFSLSDMRKLTEEGCTFQSPINGDKLFLSPEVSMKIQTVLNSDIVMQLDECTPGEATHSQAQKSLQMSLRWAERSKKAFEDLKNPNALFGIVQGAMYEDLREESLKGLEELDFPGLAIGGLSVGEPKPEMYRMLRAVGPILPEHKPHYLMGVGTPEDLVYGVAHGVDMFDCVMPTRNARNGWLFTRFGDLKIKNAKHKFDKRPIDESCTCYACQNFSRSYLHHLHRVGEILGAQLNTIHNLHFYQVIMAEMREAIEQGKFADWQAQFHENRARGVD

SEQ ID NO: 58027 - protein, 371 aa, Neisseria polysaccharea
  misc_feature (1)..(371): tr|E2PGJ4|E2PGJ4_NEIPO Queuine tRNA-ribosyltransferase OS=Neisseria polysaccharea ATCC 43768 OX=546267 GN=tgt PE=3 SV=1
MLKFTLHKKDGLARRGTLELNHGKIETPVFMPVGTYGSVKAMNPQNLHDIKAQIILGNTYHLWLRPGLEVIGQFGGLHGFIGWDKPILTDSGGFQVFSLSDMRKLTEEGCTFKSPINGDKLFLSPEISMKIQTVLNSDIAMQLDECTPGEATREQAKKSLQMSLRWAERSKKAFEDLKNPNALFGIVQGAMYEDLREESLRGLEEFDFPGLAVGGLSVGEPKPEMYRMLRAVGPILPEHKPHYLMGVGTPEDLVYGVAHGVDMFDCVMPTRNARNGWLFTRFGDLKIKNAKHKLDKRPIDESCTCYACQNFSRSYLHHLHRVGEILGAQLNTIHNLHFYQVIMAEMREAIEQGKFTDWQAQFHENRARGVD

SEQ ID NO: 58028 - protein, 400 aa, Neisseria shayeganii
  misc_feature (1)..(400): tr|G4CGX3|G4CGX3_9NEIS Queuine tRNA-ribosyltransferase OS=Neisseria shayeganii 871 OX=1032488 GN=tgt PE=3 SV=1
MCPAAGYLKTRCGKIRYNPPPCFRKEPPAMLQFTLHKKDGHARRGTLTLNHGSIETPVFMPVGTYGSVKAMTPQNLHDIQAQIILGNTYHLWLRPGLDVIEQFGGLHQFIGWNKPILTDSGGFQVFSLSDMRQLTEEGCTFKSPINGDKLFLSPEISMKIQTVLNSDIAMQLDECTPGEATHEQARQSLQMSLRWAERSKKAFEDLNNPNALFGIVQGAMYEDLREESLRGLEELDFPGLAIGGLSVGEPKPEMYRMLRAVGPILPEHKPHYLMGVGTPEDLVYGVAHGIDMFDCVMPTRNARNGWLFTRFGDIKIKNAKHKHDTRPLDESCSCYTCRNFSRAYLYHLHKAGEILGAQLNTIHNLHFYQVIMEEMREAIEQGTFADWQAQFHENRARGSD

SEQ ID NO: 58029 - protein, 371 aa, Neisseria sicca
  misc_feature (1)..(371): tr|C6M4L5|C6M4L5_NEISI Queuine tRNA-ribosyltransferase OS=Neisseria sicca ATCC 29256 OX=547045 GN=tgt PE=3 SV= 1
MLKFTLHKKDGHARRGTLELNHGKIETPVFMPVGTYGSVKAMNPQNLHDIKAQIILGNTYHLWLRPGLEVIEQFGGLHDFIGWDKPILTDSGGFQVFSLSDMRKLTEEGCTFQSPINGDRLFLSPEISMKIQTVLNSDIVMQLDECTPGEATHEQAQKSLQMSLRWAERSKKAFEDLKNPNALFGIVQGAMYEDLREESLRGLEQFDFPGLAIGGLSVGEPKPEMYRMLRAVGPMLPEHKPHYLMGVGTPEDLVYGVAHGVDMFDCVMPTRNARNGWLFTRFGDLKIKNAKHKLDKRPIDESCTCYACQNFSRAYLHHLHRVGEILGAQLNTIHNLHFYQVIMAEMREAIEQGKFADWQVQFHENRARGVD

SEQ ID NO: 58030 - protein, 371 aa, Neisseria sicca
  misc_feature (1)..(371): tr|I2NME3|I2NME3_NEISI Queuine tRNA-ribosyltransferase OS=Neisseria sicca VK64 OX=1095748 GN=tgt PE=3 SV=1
MLKFTLHKKDGHARRGTLELNHGKIETPVFMPVGTYGSVKAMNPQNLHDIKAQIILGNTYHLWLRPGLEVIEQFGGLHDFIGWNKPILTDSGGFQVFSLSDMRKLTEEGCTFQSPINGDRLFLSPEISMKIQTVLNSDIVMQLDECTPGEATHEQAQKSLQMSLRWAERSKKAFEDLKNPNALFGIVQGAMYEDLREESLRGLEQFDFPGLAIGGLSVGEPKPEMYRMLRTVGPMLPEHKPHYLMGVGTPEDLVYGVAHGVDMFDCVMPTRNARNGWLFTRFGDLKIKNAKHKLDKRPIDESCTCYACQNFSRAYLHHLHRVGEILGAQLNTIHNLHFYQVIMAEMREAIEQGKFADWQAQFHENRARGVD

SEQ ID NO: 58031 - protein, 371 aa, Neisseria sp.
  misc_feature (1)..(371): tr|A0A1F1HZG2|A0A1F1HZG2_9NEIS Queuine tRNA-ribosyltran sferase OS=Neisseria sp. HMSC073G10 OX=1739369 GN=tgt P E=3 SV=1
MLKFTLHKKDGHARRGTLELNHGKIETPVFMPVGTYGSVKAMNPQNLHDIKAQIILGNTYHLWLRPGLEVIEQFGGLHEFIGWDKPILTDSGGFQVFSLSDMRKLTEEGCTFQSPINGDKLFLSPEVSMKIQTVLNSDIVMQLDECTPGEATHSQAQKSLQMSLRWAERSKKAFEDLKNPNALFGIVQGAMYEDLREESLKGLEELDFPGLAIGGLSVGEPKPEMYRMLRAVGPILPEHKPHYLMGVGTPEDLVYGVAHGVDMFDCVMPTRNARNGWLFTRFGDLKIKNAKHKLDKRPIDESCTCYACQNFSRSYLHHLHRVGEILGAQLNTIHNLHFYQVIMAEMREAIEQGKFADWQAQFHENRARGVD

SEQ ID NO: 58032 - protein, 371 aa, Neisseria sp.
  misc_feature (1)..(371): tr|A0A1E8SYD4|A0A1E8SYD4_9NEIS Queuine tRNA-ribosyltran sferase OS=Neisseria sp. HMSC072F04 OX=1739348 GN=tgt P E=3 SV=1
MLKFTLHKKDGYARRGTLELNHGKIETPVFMPVGTYGSVKAMNPQNLHDIKAQIILGNTYHLWLRPGLEVIEQFGGLHEFIGWDKPILTDSGGFQVFSLSDMRKLTEEGCTFQSPINGDRLFLSPEISMKIQTVLNSDIVMQLDECTPGEATHEQAQKSLQMSLRWAERSKKAFEDLKNPNALFGIVQGAMYEDLRAESLRGLEQFDFPGLAIGGLSVGEPKPEMYRMLRAVGPMLPEHKPHYLMGVGTPEDLVYGVAHGVDMFDCVMPTRNARNGWLFTRFGDLKIKNAKHKLDKRPIDESCTCYACQNFSRAYLHHLHRTGEILGAQLNTIHNLHFYQVIMAEMREAIEQGKFADWQAQFHENRARGVD

SEQ ID NO: 58033 - protein, 371 aa, Neisseria subflava
  misc_feature (1)..(371): tr|A0A4D7WZI8|A0A4D7WZI8_NEISU Queuine tRNA-ribosyltran sferase OS=Neisseria subflava OX=28449 GN=tgt PE=3 SV=1
MLKFTLHKKDGHARRGTLELNHGKIETPVFMPVGTYGSVKAMNPQNLHDIKAQIILGNTYHLWLRPGLEVIEQFGGLHEFIGWDKPILTDSGGFQVFSLSDMRKLTEEGCTFQSPINGDKLFLSPEVSMKIQTVLNSDIVMQLDECTPGEATHSQAQKSLQMSLRWAERSKKAFEDLKNPNALFGIVQGAMYEDLREESLKGLEELDFPGLAIGGLSVGEPKPEMYRMLRAVGPILPEHKPHYLMGVGTPEDLVYGVAHGVDMFDCVMPTRNARNGWLFTRFGDLKIKNTKHKLDKRPIDESCTCYACQNFSRSYLHHLHRVGEILGAQLNTIHNLHFYQVIMAEMREAIEQGKFTDWQAQFHENRARGVD

SEQ ID NO: 58034 - protein, 371 aa, Neisseria subflava; identical to SEQ ID NO: 58031
  misc_feature (1)..(371): tr|D3A3I3|D3A3I3_NEISU Queuine tRNA-ribosyltransferase OS=Neisseria subflava NJ9703 OX=546268 GN=tgt PE=3 SV=1

SEQ ID NO: 58035 - protein, 404 aa, Neisseria wadsworthii
  misc_feature (1)..(404): tr|G4CQG1|G4CQG1_9NEIS Queuine tRNA-ribosyltransferase OS=Neisseria wadsworthii 9715 OX=1030841 GN=tgt PE=3 SV =1
MIIFAFLARCLRAFRQAFQVFGYNLRQINYMTINMLKFTLHKTDGHARRGTLELNHGTIETPVFMPVGTYGSVKAMTPQNLHDIRAQIILGNTYHLWLRPGLEVIEQFSGLHQFIGWNKPILTDSGGFQVFSLSDMRKLTEEGCTFKSPINGDKLFLSPEISMKIQTVLNSDIVMQLDECTPGEATHEQARKSLQMSLRWAERSKKAFEDLRNPNALFGIVQGAMYEDLREESLKGLEAFDFPGLAIGGLSVGEPKPEMYRMLRAVGPILPAHKPHYLMGVGTPEDLVCGVAHGVDMFDCVMPTRNARNGWLFTRFGDLKIKNAVHKHDTRPIDESCSCYACQNFSRAYLHHLHKTGEILGAQLNTIHNLHFYQVIMAEMREAIEQGKFADWQAQFHENRARGV

SEQ ID NO: 58036 - protein, 372 aa, Neisseria weaveri
  misc_feature (1)..(372): tr|A0A448VJ48|A0A448VJ48_9NEIS Queuine tRNA-ribosyltran sferase OS=Neisseria weaveri OX=28091 GN=tgt PE=3 SV=1
MLKFTLHKKDGLARRGTLELNHGKIETPVFMPVGTYGSVKAMTPQNLHDIKAQIILGNTYHLWLRPGLEVIEQFGGLHQFIGWDKPILTDSGGFQVFSLSDMRKLTEEGCTFKSPLNGDKLFLSPEISMKIQTVLNSDIVMQLDECTPGEASHDQARKSLQMSLRWAERSKKAFEDLKNPNALFGIVQGAMYEDLREESLKGLEQFDFPGLAIGGLSVGEPKPEMYRMLRAVGPMLPEHKPHYLMGVGTPEDLVYGVAHGMDMFDCVMPTRNARNGWLFTRFGDLKIKNAKHKLDTRPVDESCTCYACQNFSRAYLQHLHRTGEILGAQLNTIHNLHFYQAIMAEMREAIEQGTFSDWQAKFHENRSRGVDA

SEQ ID NO: 58037 - protein, 372 aa, Neisseria zalophi
  misc_feature (1)..(372): tr|A0A5J6PXU7|A0A5J6PXU7_9NEIS tRNA guanosine(34) trans glycosylase Tgt OS=Neisseria zalophi OX=640030 GN=D0T92 _04935 PE=4 SV=1
MLKFTLHKTDGHARRGTLELNHGTIETPVFMPVGTYGSVKAMTPQNLHDIQAQIILGNTYHLWLRPGLEVIEQFGGLHDFIGWNKPILTDSGGFQVFSLAEMRKLTEEGCTFRSPINGDKLFLSPEISMKIQTVLNSDIAMQLDECTPGEADHKQAQKSLQMSLRWADRSKKAFEDLKNPNALFGIVQGAMFEDLREESLKGLEEFDFPGLAIGGLSVGEPKPEMYRMMRAVGPMLPAHKPHYLMGVGTPEDLVYGVAHGIDMFDCVMPTRNARNGWLFTRFGDIKIKNAKHKLDNRPLDESCTCYTCQNFSRAYLHHLHKAGEILGAQLNTIHNLHFYQTIMAEMREAIEQGRFSDWQAEFHENRARKADA

SEQ ID NO: 58038 - protein, 371 aa, Neisseria zoodegmatis
  misc_feature (1)..(371): tr|A0A378WH79|A0A378WH79_9NEIS Queuine tRNA-ribosyltran sferase OS=Neisseria zoodegmatis OX=326523 GN=tgt PE=3 SV=1
MLKFTLHKTDGHARRGTLELNHGTIETPVFMPVGTYGSVKAMTPANLHDIKAQIILGNTYHLWLRPGLEVIEQFGGLHQFIGWNKPILTDSGGFQVFSLSDMRQLTEEGCTFKSPINGDKLFLSPEISMKIQTVLNSDIAMQLDECTPGEATHEQARKSLQMSLRWAERSKKAFEDLNNPNALFGIVQGAMYEDLREESLKGLEEFDFPGLAIGGLSVGEPKPEMYRMLRAVGPMLPAHKPHYLMGVGTPEDLVYGVAHGVDMFDCVMPTRNARNGWLFTRFGDIKIKNAKHKHDTRPLDESCTCYACQNFSRAYLYHLHKAGEILGAQLNTIHNLHFYQVIMAEMREAIEQGKFAEWQAQFHENRARGTD

SEQ ID NO: 58039 - protein, 371 aa, Neisseria zoodegmatis
  misc_feature (1)..(371): tr|A0A1X3CUH9|A0A1X3CUH9_9NEIS Queuine tRNA-ribosyltran sferase OS=Neisseria zoodegmatis OX=326523 GN=tgt PE=3 SV=1
MLKFTLHKTDGHARRGTLELNHGTIETPVFMPVGTYGSVKAMTPANLHDIKAQIILGNTYHLWLRPGLEVIEQFGGLHQFIGWSKPILTDSGGFQVFSLSDMRKLTEEGCTFKSPINGDKLFLSPEISMKIQTVLNSDIAMQLDECTPGEATHEQARQSLQMSLRWAERSKKAFEDLKNPNALFGIVQGAMYEDLREESLKGLEAFDFPGLAIGGLSVGEPKPEMYRMLRAVGPMLPAHKPHYLMGVGTPEDLVYGVAHGVDMFDCVMPTRNARNGWLFTRFGDIKIKNAKHKHDTRPLDESCTCYACQNFSRAYLYHLHKAGEILGAQLNTIHNLHFYQVIMAEMREAIEQGKFAEWQAQFHENRARGTD

SEQ ID NO: 58040 - protein, 372 aa, Neisseriaceae bacterium
  misc_feature (1)..(372): tr|A0A2I7N8G6|A0A2I7N8G6_9NEIS Queuine tRNA-ribosyltran sferase OS=Neisseriaceae bacterium DSM 100970 OX=205283 7 GN=tgt PE=3 SV=1
MLKFELLKKDGNARRGRVHLNHGVVETPIFMPVGTYGAVKALAPTDLEASEAQIILGNTFHLWLRPGLDIISKFNGLHKFNGWDKPILTDSGGFQVFSLGKLRKIKEEGVYFQSPVDGSKLFLSPEKSMEIQTVLNSDIVMIFDECTPYPADYKTARESMELSLRWAQRSRDAFNEYNNPNALFGIVQGGMYMDLRKQSLDGLMQIGFDGIAIGGLSVGEPKEEMERMLSELVDILPEDKPHYLMGVGTPEDLVYGVKNGIDMFDCVMPTRNARNGWLFTRFGDVKIKNAKYKDDTAPLDETCSCYTCKNFSRAYLHHLFKIGEILGSRLNTIHNIHYYLQLMAEIRQAIDEGKFSQFEQRFYAERSQLASN

SEQ ID NO: 58041 - protein, 375 aa, Neisseriaceae bacterium
  misc_feature (1)..(375): tr|A0A431HSL7|A0A431HSL7_9NEIS Queuine tRNA-ribosyltran sferase OS=Neisseriaceae bacterium OX=2014784 GN=tgt PE =3 SV=1
MLKFEILEQDGYARLGKMTLNHGVVETPIFMPVGTYGAVKAMSPQELDESEAQIILGNTFHLWLRPGNDIISKFGGLHKFNGWSKPILTDSGGFQVFSLGKLRKIKEEGVYFQNPIDGSKLFLSPEKSMEIQTVLNSDIVMIFDECTPYPADYNTAKQSMELSLRWAERSRQAFDEYKNPNALFGIVQGGMYADLRQHSLNELMKIGFDGIAIGGLSVGEPKEEMERMLDEMKDMLPKEKPHYLMGVGTPEDLIYGVSKGIDMFDCVMPTRNARNGWLFTRFGDVKIKNAKYKDDTKPLDSSCDCYTCKNFSRAYLHHLFKIGEILGARLHTIHNIHYYLALMKEVRQAIKDKRFNDFVAEFHENRQKLKQGIVE

SEQ ID NO: 58042 - protein, 374 aa, Neisseriales bacterium
  misc_feature (1)..(374): tr|A0A5C8B9D8|A0A5C8B9D8_9NEIS Queuine tRNA-ribosyltran sferase OS=Neisseriales bacterium OX=2053582 GN=tgt PE= 3 SV=1
MLKFELLKKDGNARRGRVHLNHGVVETPIFMPVGTYGAVKALAPTDLEASEAQIILGNTFHLWLRPGLDIISKFNGLHKFNGWDKPILTDSGGFQVFSLGKLRKIKEEGVYFQSPVDGSKLFLSPEKSMEIQTVLNSDIVMIFDECTPYPADYKTARESMELSLRWAQRSRDAFNEYNNPNALFGIVQGGMYIDLRKQSLDGLMQIGFDGIAIGGLSVGEPKEEMERMLSELVDILPEDKPHYLMGVGTPEDLVYGVKHGIDMFDCVMPTRNARNGWLFTRFGDVKIKNAKYKDDTAPLDETCSCYTCKNFSRAYLHHLFKIGEILGSRLNTIHNIHYYLQLMAEIRQAIDEGKFSQFEERFHSERSQVGNISV

SEQ ID NO: 58043 - protein, 373 aa, Neisseriales bacterium
  misc_feature (1)..(373): tr|A0A5C8BBV0|A0A5C8BBV0_9NEIS Queuine tRNA-ribosyltran sferase OS=Neisseriales bacterium OX=2053582 GN=tgt PE= 3 SV=1
MLKFELLKKDGHARLGRVHLNHGVVETPIFMPVGTYGAVKAMSPFELEQSNAQIILGNTFHLWLRPGLDVIGKFGGLHKFNGWNKPILTDSGGFQVFSLGKLRKIKEEGVHFQNPIDGSKLFLSPEKSMEIQTVLNSDIAMIFDECTPYPADYATARESMELSLRWAERSRKAFDEYKNPNALFGIIQGGMFNDLRQKSLTELMNIGFDGMAIGGLSVGEPKEEMERMLDEMKDMLPEHKPHYLMGVGTPEDLVYGVSKGIDMFDCVMPTRNARNGWLFTRFGDVKIKNAQYKDDTRPLDESCSCYTCQNFSRAYLHHLFKIGEILGARLNTIHNIHYYLTLMSEIREAISQGQFSSFTEQFLANRQILKKQK

SEQ ID NO: 58044 - protein, 386 aa, Neoasaia chiangmaiensis
  misc_feature (1)..(386): tr|A0A1U9KSL9|A0A1U9KSL9_9PROT Queuine tRNA-ribosyltran sferase OS=Neoasaia chiangmaiensis OX=320497 GN=tgt PE= 3 SV=1
MSPMRWMTEATCGNARAGHLHTAHGIVPTPTFMPVGTAGTVKAMTMDAVRSTGAGIVLGNTYHLMLRPGAERVRKMGGLHRMMDWSGPILTDSGGFQVMSLGALRKLDQDGVTFNSHIDGSKHRLTPEISTDIQHALDATITMCFDECPALPATPERIEQSMQLSMRWAARSREAFVPRLGYGQFGIVQGGTERELRERSVRALTDIGFEGYAIGGLAVGEGQELMFSTLDYTTPLLPGTHARYLMGVGTPDDLLGAVERGVDMFDCVMPTRAGRTARAYTERGTLNMRNARHAEDNRPISPHCDCLACTRHSRAYLHHLFRNNEILGPMLLTWHNLAYYQRLMRTIRAAIVASNLPAVAAGLRADWAAGDWTENEMPQPAIPPVP

SEQ ID NO: 58045 - protein, 366 aa, Neochlamydia sp.
  misc_feature (1)..(366): tr|A0A0C1KAT8|A0A0C1KAT8_9BACT Queuine tRNA-ribosyltran sferase OS=Neochlamydia sp. EPS4 OX=1478175 GN=tgt PE=3 SV=1
MKFTICKADACSRARVGIIETAHGAIETPVFMPVGTRAAVKTLTNQHLLDMKAQIILGNTYHLMLRPGVEILAKAGGLHAFMNWQSPLLTDSGGFQVFSLSALNKVTDKGVHFQSHIDGSRHFLGPDESMFIQKTIGSDIVMAFDECTPYPCEKKVVEKSLERTHRWAERCRNYDLQPHQNLFGIVQGGVHADLRQQSAQFLANLDFQGYAIGGLSVGEPASVMYEVLDHTVPFMPVEKPRYLMGVGTPRNLVESVMRGVDMFDCVMPTRNARNGTAFTWAGKVQIKAARYAEDFSPLDPSTPSYTSQFSKAYLRHLLNVDEMTGLTLVTLQNLAFYLDFMQKLREAIKNDTLADFYQKVCALYPH

SEQ ID NO: 58046 - protein, 366 aa, Neochlamydia sp.
  misc_feature (1)..(366): tr|A0A3Q9XV44|A0A3Q9XV44_9BACT Queuine tRNA-ribosyltran sferase OS=Neochlamydia sp. S13 OX=1353976 GN=tgt PE=3 SV=1
MKFTICKADACSRARVGIIETAHGAIETPVFMPVGTRAAVKTLTNQHLLDMKAQIILGNTYHLMLRPGVEILGKAGGLHAFMNWQSPLLTDSGGFQVFSLSALNKVTDKGVHFQSHIDGSRHFLGPDESMFIQKTIGSDIVMAFDECTPYPCEKKIVEKSLERTHRWAERCRNYDLQPHQNLFGIVQGGVHADLRQQSAQFLANLDFQGYAIGGLSVGEPASVMYEVLDHTVPFMPVEKPRYLMGVGTPRNLVESVMRGVDMFDCVMPTRNARNGTAFTWAGKVQIKAARYAEDFSPLDPSTPSYTSQFSKAYLRHLLNVDEMTGLTLVTLQNLAFYLDFMQKLREAIKNDTLADFYQKVCALYPH

SEQ ID NO: 58047 - protein, 404 aa, Neokomagataea sp.
  misc_feature (1)..(404): tr|A0A506URM3|A0A506URM3_9PROT Queuine tRNA-ribosyltran sferase OS=Neokomagataea sp. Jb2 OX=2558904 GN=tgt PE=3 SV=1
MTQQHDGLLSQDQALPRPDLTPSDRLYWQEEGRCSQARAGWLHTRHGRVPTPTFMPVGTVGTVKGMTADAVRATGAGVVLGNTYHLMLRPGADRVQKLGGLHRMMDWPGPILTDSGGFQVMSLGPLRKMDEDGVTFRSHIDGSSHRLTPEISTDIQFKLDATISMAFDECPALPATKERLEESMERSMRWAARSREAFTPRPGYGQFGIVQGGTEQDLRARSVKALTEIGFEGYAIGGLAVGEGQELMFSTLDFTTPLLPQDKPRYLMGVGTPDDLLGSVMRGCDMFDCVMPSRAGRTARAYTDRGPLNLRNARFAEDTRPLTPHEDGPLARTSRAYLHHLFRANEMLGPMLLTWHNLAYYQRLMRRIRAAIMNGTLEALAEQLRADWAQGDWSPEEWPLPHYS

SEQ ID NO: 58048 - protein, 379 aa, Neokomagataea tanensis
  misc_feature (1)..(379): tr|A0A4Y6VAY8|A0A4Y6VAY8_9PROT Queuine tRNA-ribosyltran sferase OS=Neokomagataea tanensis OX=661191 GN=tgt PE=3 SV=1
MVWKPESTCGQARAGHLHTRHGTVPTPTFMPVGTVGTVKGITTDSVRSTGAGIILGNTYHLMLRPTAERVAKLGGLHRMMDWQGPILTDSGGFQVMSLGALRKLDEDGVTFRSHIDGSAHRLTPEISTDIQHKLDATITMAFDECPALPATAESLRKSMEMSMRWAARSREAFVARPGYGQFGIVQGGTERDLREYSIKALTDIGFEGYAIGGLAVGEGQELMFSTLDFTTPMMPHDKARYLMGVGTPDDLLGAVMRGVDMFDCVMPSRAGRTARAYTERGTINLRNARFAEDTRPITPHDDSPMAGRYSRAYLHHLFRAGEMLGPMLLTWHNLAYYQRLMRQIRAAIVEGTLDELAVTLRAGWAQGDWSEDEWPMPVY

SEQ ID NO: 58049 - protein, 434 aa, Neomicrococcus aestuarii
  misc_feature (1)..(434): tr|A0A1L2ZRE0|A0A1L2ZRE0_9MICC Queuine tRNA-ribosyltran sferase OS=Neomicrococcus aestuarii OX=556325 GN=tgt PE =3 SV=1
MNPEPETFPAPVDYPESHEKQSEFGFEIGTRLTGANGERFEGRTGVIKTPHGDIKTPAFIAVGTKASVKALTPDQVRELGAQAVLSNAYHLYLAPGADVLDEAGGLSAFMNWNGPTYTDSGGFQVMSLGSGFKKIIDMTGTGPGGDDAVAPGKERLANVDNDGVWFKSHLDGSMHRFTPEVSMQVQHQIGADIMFAFDELTTLHNSRAYQEEALERTRLWARRCVKEHFRLTDEREGKDYQALFGVIQGAQYEDLRRKASQDLGEMPFDGFGIGGALEKENLGTIVRWCAEELPENKPRHLLGISEPDDVFTAIENGADTFDCVSPTRVARNSAFYSPNGRFNLTGKRYKRDFSPLVDGCGCYTCQNFTRAYIHHLHKANELLSHTLISIHNEYFTVGLVDAAREAIENGTFFELKDRVLSAYYAGGPDPQGLE

SEQ ID NO: 58050 - protein, 376 aa, Neorhizobium alkalisoli
  misc_feature (1)..(376): tr|A0A561QUW2|A0A561QUW2_9RHIZ Queuine tRNA-ribosyltran sferase OS=Neorhizobium alkalisoli OX=528178 GN=tgt PE= 3 SV=1
MTETFQFNLKATDGGARLGEITMPRGTIRTPAFMPVGTVGTVKAMYLDQVRDTGADIILGNTYHLMLRPGAERVARLGGLHDLIRWKHPILTDSGGFQVMSLSGLRKLDEKGVTFKSHVDGSLHHMSPERSIEIQGLLGSDIQMQLDECVALPAEPKEIERAMELSLRWAERCRVAFGEQPGKAMFGIVQGGDQPALRIRSAEGLKQLDLKGYAVGGLAVGEPQDVMLSMLETTLPVLPTEKPRYLMGVGTPDDMLKSVARGIDMFDCVMPTRSGRHGLAFTRRGKVNIRNARHAEDKRPLDEESNCPAARDYSRAYLHHLMRADEALGGMLLSWNNLNYYQDLMKGIRQAIAEGRFADFYAETQEAWAKGDIDPI

SEQ ID NO: 58051 - protein, 376 aa, Neorhizobium galegae
  misc_feature (1)..(376): tr|A0A0T7HLT0|A0A0T7HLT0_RHIGA Queuine tRNA-ribosyltran sferase OS=Neorhizobium galegae bv. orientalis OX=32365 5 GN=tgt PE=3 SV=1
MTETFQFNLKATDGGARLGEITMPRGTIRTPAFMPVGTVGTVKAMYLDQVRDTGADIILGNTYHLMLRPGAERVARLGGLHELIRWKHPILTDSGGFQVMSLSGLRKLDEKGVTFKSHVDGSLHHMSPERSIEIQGLLGSDIQMQLDECVALPAEPKEIERAMELSLRWAERCRVAFGEQPGKAMFGIVQGGDQPELRIRSAEGLKQLDLKGYAVGGLAVGEPQDVMLKMLETTLPVLPFEKPRYLMGVGTPDDMLKSVARGIDMFDCVMPTRSGRHGLAFTRRGKVNIRNARHAEDMRPLDEESNCPAARDYSRAYLHHLVRADEALGGMLLSWNNLNYYQDLMKGIRQAIAEGRFADFYAETQEMWAKGDIDPV

SEQ ID NO: 58052 - protein, 376 aa, Neorhizobium galegae
  misc_feature (1)..(376): tr|A0A0T7FPI9|A0A0T7FPI9_RHIGA Queuine tRNA-ribosyltran sferase OS=Neorhizobium galegae bv. officinalis OX=3236 56 GN=tgt PE=3 SV=1
MTETFQFNLKATDGGARLGEITMPRGTIRTPAFMPVGTVGTVKAMYLDQVRDTGADIILGNTYHLMLRPGAERVARLGGLHELIRWKHPILTDSGGFQVMSLSGLRKLDEKGVTFKSHVDGSLHHMSPERSIEIQGLLGSDIQMQLDECVALPAEPKEIERAMELSLRWAERCRVAFGDQPGKAMFGIVQGGDQPELRIRSAEGLKQLDLKGYAVGGLAVGEPQDVMLKMLETTLPVLPFEKPRYLMGVGTPDDMLKSVARGIDMFDCVMPTRSGRHGLAFTRRGKVNIRNARHAEDMRPLDEESSCPAARDYSRAYLHHLVRADEALGGMLLSWNNLNYYQDLMKGIRQAIAEGRFADFYAETQEMWARGDIDPV

SEQ ID NO: 58053 - protein, 377 aa, Neorhizobium sp.
  misc_feature (1)..(377): tr|A0A386E0X1|A0A386E0X1_9RHIZ Queuine tRNA-ribosyltran sferase OS=Neorhizobium sp. NCHU2750 OX=1825976 GN=tgt PE=3 SV=1
MTTENFQFTLKKTDGGARLGEVSMPRGTIRTPAFMPVGTVGTVKAMYLDQVRDTGADIILGNTYHLMLRPGAERVARLGGLHELIRWKHPILTDSGGFQVMSLSGLRKLDEKGVTFKSHVDGSLHHMSPERSIEIQGLLGSDIQMQLDECVALPAEPKEIERAMELSLRWAERCRVAFGDQPGKAMFGIVQGGDQPALRIRSAEGLKQLDLKGYAVGGLAVGEPQDVMLSMLETTLPVLPTEKPRYLMGVGTPDDILKSVARGIDMFDCVMPTRSGRHGLAFTRRGKVNIRNARHAEDMRPLDEESDCPAARDYSRAYLHHLCRSDEALGGMLLSWNNLHYYQDLMKGIRKSIEEGRFADFYAETQEAWARGDIDKL

SEQ ID NO: 58054 - protein, 376 aa, Neorhizobium sp.
  misc_feature (1)..(376): tr|A0A4R3X8M3|A0A4R3X8M3_9RHIZ Queuine tRNA-ribosyltran sferase OS=Neorhizobium sp. S3-V5DH OX=2485166 GN=tgt P E=3 SV=1
MTETFQFNLKATDGGARLGEITNPRGAIRTPAFMPVGTVGTVKAMYLDQVRDTGADIILGNTYHLMLRPGAERVARLGGLHNLIRWSHPILTDSGGFQVMSLSGLRKLDEKGVTFKSHVDGSLHHMSPERSIEIQGLLGSDIQMQLDECVALPAEPKEIERAMELSLRWAERCRVAFGDQPGKAMFGIVQGGDQPDLRIRSAEGLKQLDLKGYAVGGLAVGEPQDVMLKMLETTLPVLPAEKPRYLMGVGTPDDILKSVARGIDMFDCVMPTRSGRHGLAFTRRGKVNIRNARHAEDLRPLDEESDCPAARDYSRAYLHHLVRSDEALGGMLLSWNNLHYYQDLMKGIRQSIAEGRFGDFYAETQETWAKGDIDPV

SEQ ID NO: 58055 - protein, 402 aa, Neorickettsia helminthoeca
  misc_feature (1)..(402): tr|X5HKZ7|X5HKZ7_9RICK Queuine tRNA-ribosyltransferase OS=Neorickettsia helminthoeca str. Oregon OX=1286528 GN =tgt PE=3 SV=1
MTDSETFPRFEYIQNGAGPSRIGTITTKHGVVHTPAFIFCATRGTIKGLGTHQVKEAGSQIILSNTYHLMLKPGGEYIENAGGIQRFTGWDGPMLTDSGGFQAFSLNSKDTAKVDELKRKYSCKQNKSGIIEISEEGIECKSYYDGTRFFLSPEKSIDVQIKLGADLIVVLDECTKFSKDKTYNTKALRRNERWADRSLAYAKMHKKRWQGLYGIIHGGTFNDLRRESAAFNNSREFFGHAIGGSLGRDKKEMMDVVEMSMEDLSKERPVHLLGIGGISDIFMGVARGIDTFDCVHPTRIARHGGALVKHSSSLEYINREYINLGNSVFKRCDLPIEESCDCKICKTYSRGYLNYLLSVKENIVFSLITYHNVYFMNVLMEKIRYTLKNNLDLKQLQKHYCG

SEQ ID NO: 58056 - protein, 408 aa, Neorickettsia risticii
  misc_feature (1)..(408): tr|C6V3P7|C6V3P7_NEORI Queuine tRNA-ribosyltransferase OS=Neorickettsia risticii (strain Illinois) OX=434131 G N=tgt PE=3 SV=1
MSTQDKMHESEVFPRFNYLKNGKNRSRTGRIITKHGVIHTPAFIFCATRAAIKGLEIHQVKEAGSQVILSNTYHLMLKPGGEHIEKAGGIQKFIGWNGPMLTDSGGFQAFSLNTKDETNVQELKRKYSRTFNSSGIVAISEEGITCKSYYDGAKFFLSPEKSMDVQIKLGADLIVVLDECTKFSLDREYNKEALERNERWADRSLLYAEKNRKAWQGVYGIIHGGTFEDLRKESVEFNNSREFFGNAIGGSLGRTKEEMKEVVEMSITNLNRERPVHLLGVGGLSDIFMGVSMGVDTFDCVHPTRIARHGGALIKYSSYPGNNSREYINLRNNIFKSSDSPIDESCDCKICETYSCGYLNYLLSVKENIAFNMITYHNIYFINKLMERIRHTIEEESDLEELKKLYCG

SEQ ID NO: 58057 - protein, 402 aa, Neorickettsia sennetsu
  misc_feature (1)..(402): tr|Q2GF37|Q2GF37_NEOSM Queuine tRNA-ribosyltransferase OS=Neorickettsia sennetsu (strain ATCC VR-367 / Miyayam a) OX=222891 GN=tgt PE=3 SV=1
MHESEVFPRFNYLENGKTRSRRGKITTKHGVIHTPAFIFCATRAAIKGLEIHQVKEAGSQVILSNTYHLMLKPGGEHIEKAGGIQKFMGWNGPMLTDSGGFQAFSLNTKDETNIQELKRKYSKAFNSSGILAISEEGITCKSYYDGAKFFLSPEKSMDVQIKLGADLIVVLDECTKFSLDREYNKEALERNKRWADRSLTYAEKNRKAWQGVYGIIHGGTFEDLRKESVEFNNSRELFGNAIGGSLGRTKEEMKEVVEMSVTNLNRERPIHLLGIGGISDIFTGVSMGVDTFDCVHPTRIARHGGALIKYSSHPENNGREYINLRNNIFKNSDSSIDESCDCKICETYSCGYLNYLLSVKENIAFNMITYHNIYFMNKLMERIRHTIEKDLDLEELKKLYCG

SEQ ID NO: 58058 - protein, 397 aa, Neorickettsia sp.
  misc_feature (1)..(397): tr|A0A151A0W6|A0A151A0W6_9RICK Queuine tRNA-ribosyltran sferase OS=Neorickettsia sp. 179522 OX=1714371 GN=tgt P E=3 SV=1
MFPRFNYLEYGKKRSRTGRIITKHGVIHTPAFIFCATRAAIKGLEIHQVKEAGSQIILSNTYHLMLKPGGEHIEKAGGIQKFTGWNGPMLTDSGGFQAFSLNTKDKTNVQELKRKYSRTSNSSGIIAISEEGITCKSYYDGTKFFLSPEKSMDVQIKLGADLIVVLDECTKFSLEKEYNKEALKRNERWADRSLSYAEKNRKAWQGVYGIIHGGTFEDLRKESVEFNNSRELFGNAIGGSLGRTKEEMKEVVEMSITNLNRERPVHLLGVGGISDIFMGVDMGVDTFDCVHPTRIARHGGALIKYSSYPENNGKEYINLRNSIFKNSDLPIDGSCDCKICKTYSRGYLNYLLSAKENIAFNIITYHNIYFMNELMEKIRHTIEKNLDLEELKKLYCG

SEQ ID NO: 58059 - protein, 337 aa, Neosynechococcus sphagnicola
  misc_feature (1)..(337): tr|A0A098TLB3|A0A098TLB3_9CYAN Queuine tRNA-ribosyltran sferase OS=Neosynechococcus sphagnicola sy1 OX=1497020 GN=tgt PE=3 SV=1
MPVGTLATVKAVTPAQLKATAAQMVLANTYHLHLQPGEELIAKAGGLHRFMAWEGPMLTDSGGFQVFSLSSLRQIAESGVTFRSPRDGRMIELTPERSIQIQNTLGADVIMAFDECPPYPAPREAVAAATARTYRWLERCITTHARPAEQALFGIVQGGVHLDLRQEAAQRLAALDLPGYAIGGVSVGEPSELIAQIVQATAPLLPARKPRYLMGIGTYREMAQAIAAGIDLFDCVIPTRLARHGSVLVQGERWNIKNAQFREDFAPLDATCSCYTCQTFSRAYLGHLWRTKELLVFTLLSIHNLTELIRFTQEIRQAIFKGTFATEFAHWLLPAQG

SEQ ID NO: 58060 - protein, 379 aa, Neptuniibacter sp.
  misc_feature (1)..(379): tr|A0A136HA50|A0A136HA50_9GAMM Queuine tRNA-ribosyltran sferase OS=Neptuniibacter sp. Phe_28 OX=1795871 GN=tgt PE=3 SV=1
MTRQCFMQFEKIAEDGKARRARLTFPRGTVETPAFMPVGTYGTVKGMTPRDIEATGAQILLGNTFHLMLRPGTEIIKQHGDLHDFMQWKGPILTDSGGFQVFSLGKMRKITEAGVTFQSPVNGSKVFMGPEESMQVQRDLGSDIVMIFDECTPYPATELEAAESMRLSMRWAKRSKDAHGDNPSALFGIVQGGMYPHLRDESMQGLEAIGFDGYAIGGLSVGEPKDEMVKVLDHLAHKMPTDKPRYLMGVGKPEDIVEAVRRGVDMFDCVMPTRNARNGFLFIDTGVVKIRNSVHKTDTSPLDSTCDCYTCKNFSRAYLHHLDKCKEILGAQLNTIHNLHYYQVLMAGLRQAIEQGKLGDFVDEFYSKRGLETPQLDSI

SEQ ID NO: 58061 - protein, 382 aa, Neptunomonas antarctica
  misc_feature (1)..(382): tr|A0A1N7N4M8|A0A1N7N4M8_9GAMM Queuine tRNA-ribosyltran sferase OS=Neptunomonas antarctica OX=619304 GN=tgt PE= 3 SV=1
MSRNCFMKFEKIATEGKARRGRLTFPRGVVETPAFMPVGTYGTVKGMLPRDVEAIGAHMILGNTFHLMLRPGTEIIQLHGDLHDFMQWQGPILTDSGGFQVFSLGKMRKITELGVTFQSPVNGSKVFIDPERSMQVQRELGSDVVMIFDECTPYPATELEAAESMRLSLRWAKRSKDAHGDSPSALFGIIQGGMYENLRDESLAGLTDIDFDGYAIGGLSVGEPKDEMVKVLDHLAYKMPEDKPRYLMGVGKPEDLVEGVRRGIDMFDCVMPTRNARNAHLFVSTGVVKLRNASNKTDIRPLDETCDCYTCQNFSRAYLHHLDKCKEILGSQLNTIHNLRYYQTLMAGLRGAIEQGKLSDFVAEFYSSRGMEVPSLAEQLAE

SEQ ID NO: 58062 - protein, 379 aa, Neptunomonas qingdaonensis
  misc_feature (1)..(379): tr|A0A1I2TZX0|A0A1I2TZX0_9GAMM Queuine tRNA-ribosyltran sferase OS=Neptunomonas qingdaonensis OX=1045558 GN=tgt PE=3 SV=1
MSRNCFMKFEKIATQGKARRGRITFPRGVVETPAFMPVGTYGTVKGVLPKDIEAIGAHMILGNTFHLMLRPGTEIIQMHGDLHDFMQWQGPILTDSGGFQVFSLGKMRKITEQGVTFQSPVNGSKVFIDPERSMQVQRELGSDVVMIFDECTPYPATETEAAQSMRLSLRWAKRSKEAHGDSPSALFGIIQGGMYEHLRDESLAGLTEIDFDGYAIGGLSVGEPKDEMVKVLDHLAHQMPEDKPRYLMGVGKPEDLVEGVRRGVDMFDCVMPTRNARNAHLFVSTGVVKLRNASNKTDTRPLDETCDCYTCQNFSRAYLHHLDKCHEILGAQLNTIHNLRYYQILMAGLRAAIEQGKLDDFVTEFYSNRGMEVPPLAKN

SEQ ID NO: 58063 - protein, 373 aa, Neptunomonas sp.
  misc_feature (1)..(373): tr|A0A437Q6L0|A0A437Q6L0_9GAMM Queuine tRNA-ribosyltran sferase OS=Neptunomonas sp. HPM-16 OX=1815562 GN=tgt PE =3 SV=1
MKFEKLAEQGKARRGRLTFPRGEVETPAFMPVGTYGTVKGMLPKDIKETGAQIILGNTFHLMLRPGTEIVKLHGDLHDFMQWQGPILTDSGGFQVFSLGKMRKITEKGVTFQSPVNGSQVFLDPEKSMQVQRDLGSDIVMIFDECTPYPATEQEAADSMRLSLRWAERSKKAHGDSPSALFGIVQGGMYEHLRDESLEGLVDIGFDGYAIGGLSVGEPKDEMMKVLDHVAYKLPEDKPRYLMGVGKPEDLVEGVRRGVDMFDCVMPTRNARNAHLFVDTGVVKLRNASNKTDTRPVDETCDCYTCQNFSRAYLHHLDKCHEILGSQLNTIHNLHFYQKVMAGLREALDQGKLDDFVAEFYAKRGMEVPPLSNN

SEQ ID NO: 58064 - protein, 382 aa, Nereida ignava
  misc_feature (1)..(382): tr|A0A0U1NIX2|A0A0U1NIX2_9RHOB Queuine tRNA-ribosyltran sferase OS=Nereida ignava OX=282199 GN=tgt PE=3 SV=1
MVKGNDMAQTFGFDLLATDGRARTGRISTPRGDIRTPAFMPVGTAATVKAMMPESVAATGADILLGNTYHLMLRPTAERIASLGGLHKFMNWDKPILTDSGGFQVMSLADLRKLTEDGVTFKSHIDGSKHMLSPERSMEIQKLLGSDIVMCFDECPALPADKARIAQSMELSMRWAKRSRDAFGDRPGYALFGIQQGGLEEDLRAQSAEALRDIGFEGYAVGGLAVGEGQEAMFGCLDFAPEQLPKDKPRYLMGVGKPDDIVGAVKRGIDMMDCVLPSRSGRTGQVFTRHGVVNIKNARHADDPRPLDEQCSCPACQKYSRAYLHHVYRSQEMISGMLLTWHNLHYFQQIMQEMRDAIAEQRFDVWEKGFHEGRAQGDIEPL

SEQ ID NO: 58065 - protein, 387 aa, Nesiotobacter exalbescens
  misc_feature (1)..(387): tr|A0A1U7JFH9|A0A1U7JFH9_9RHOB Queuine tRNA-ribosyltran sferase OS=Nesiotobacter exalbescens OX=197461 GN=tgt P E=3 SV=1
MSDQAQKPFSFKLLKTDGAARRGEITTPHGVVRTPAFMPVGTQATVKAMYPQQVRDLGADVILGNTYHLMLRPTAERVAKLGGLHHFMNWPHAILTDSGGFQVMSLAQLRKMSEEGVSFRSHHDGSKHMMSPERSIEIQGLLGSDIQMQLDQCIALPAERSEIEEAMNLSLRWADRSRTQFEKMGGPGKGQALYGIVQGGDNPELRVESAQRLGEMPFEGYSVGGLAVGEPQEVMLRMLEVTTPVMPVHKPRYLMGVGTPEDILESVARGIDQFDCVMPTRAGRHGLAYTRFGKVNLKNARHAEDPRPLDEEADCPATRDYSRAYLHHLVRVNEGLAAMLLTWNNLAYYQFLMQGIRDAIEAGTFEDFRQKTKEDWARGDLAPYVWS

SEQ ID NO: 58066 - protein, 443 aa, Nesterenkonia aurantiaca
  misc_feature (1)..(443): tr|A0A4R7G448|A0A4R7G448_9MICC Queuine tRNA-ribosyltran sferase OS=Nesterenkonia aurantiaca OX=1436010 GN=tgt P E=3 SV=1
MPNQLNTETPSAAPQEKAPQEKAPQQEAAHPQANRESFSFEVESRIEGALGRTGTIRTPHGDIKTPAFIPVATKATIKTVRPEEMLEIGAQAALANAYHLNLQPGTDVIDAAGGLGKFMNWPLPTFTDSGGFQVMSLGAGFKKVITMDSSVVPDDAAVAPKKVRLALVDDDGVTFKSHIDGSTHRFTPEISMRLQHEIGADIIFAFDELTTLFNTREYQETSLERTRLWAERCLSAHGRLTAERSHRPYQALFGVLQGAQYEDLRRKAAKDLGAMEIEGQSFDGFGIGGALDKENLGTIVGWMAEELPENKPRHLLGISEPEDFFTAIENGADTFDCVSPSRVARTGRVYHPDGRYNIPQARFKRDFSPIDAECSCYTCANYTRAYLHHLFKAKEMLYNTLCTIHNEHYTIKMVDDIRASIEQGRFYEFCDATLGRYQAGATP

SEQ ID NO: 58067 - protein, 403 aa, Nesterenkonia jeotgali
  misc_feature (1)..(403): tr|A0A0W8IE31|A0A0W8IE31_9MICC Queuine tRNA-ribosyltran sferase OS=Nesterenkonia jeotgali OX=317018 GN=tgt PE=3 SV=1
MEAKIPGALGRTGTIRTPHGDIRTPAFIPVATKATIKSVRPDEILEVGAQAALANAYHLNLQPGTDVLDAAGGLGRFMNWPLPTFTDSGGFQVMSLGAGFKKVISMDASVVPNDAAVAPNKQRLALVDDDGVTFKSHIDGTTHRFTPEISMKLQHEIGADIIFAFDELTTLFNTRDYQETSLERTRLWAERCLVAHRDLTEERSHRPYQALFGVLQGAQYEDLRRKAAKDLGSMEINGQSFDGFGIGGALDKENLGVIVSWMAEELPEDKPRHLLGISEPEDFFTAIENGADTFDCVSPSRVARTGRVYHPDGRFNIPQARFKRDFSPIDDECTCYTCQNYTRAYLHHLFKAKEMLYNTLCTIHNEHYTIKMVDDIRASIEQGRFYEFRDATLGRYQAGSNVR

SEQ ID NO: 58068 - protein, 457 aa, Nesterenkonia sandarakina
  misc_feature (1)..(457): tr|A0A2T0YTT0|A0A2T0YTT0_9MICC Queuine tRNA-ribosyltran sferase OS=Nesterenkonia sandarakina OX=272918 GN=tgt P E=3 SV=1
MPNQLNTETPSAARPDSTTQASTQSSASQNSVPQNPLPQEAGRHPQADRESFSFEVEARIDGALGRTGTIRTPHGDIKTPAFIPVATKATIKTVRPEEMLEVGAQAALANAYHLNLQPGTDVIDAAGGLGKFMNWPLPTFTDSGGFQVMSLGAGFKKVITMDASVVPDDTAVAPKKVRLALVDDDGVTFKSHIDGTTHRFTPEISMKLQHEIGADIIFAFDELTTLFNTRDYQETSLERTRLWAERCLSAHRGLTAERSHRPYQALFGVLQGAQYEDLRRKAAKDLGSMEIEGQSFDGFGIGGALDKENLGTIVGWMAEELPDNKPRHLLGISEPEDFFTAIENGADTFDCVSPSRVARTGRVYHPDGRFNIPQARFKRDFSPIDEECTCYTCQNYTRAYLHHLFKAKEMLYNTLCTIHNEHYTIKMVDDIRASIEQGRFYEFRDATLSRYQAGATP

SEQ ID NO: 58069 - protein, 425 aa, Nesterenkonia sp.
  misc_feature (1)..(425): tr|A0A3A4F968|A0A3A4F968_9MICC Queuine tRNA-ribosyltran sferase OS=Nesterenkonia sp. M8 OX=2174932 GN=tgt PE=3 SV=1
MLDPQTSSTRQPLHPDHVQGGFAFEVQDRVPGELGRTGTITTPHGIIRTPAFIPVATKATVKAVRPEEMSELGTQAVLANAYHLNLQPGTDVLDAAGGLSKFMNWPGPTFTDSGGFQVMSLGVGFKKVIQMDASRVTNDEAISAEHERRAFVDDDGVTFTSHIDGSKHRFTPEISMRLQHEIGADIIFAFDELTTLFNTRDYQEESLERTRLWAERCLSAHRDLTEQRCHKPYQALFGVLQGAQYEDLRRKAAGDLGRMVVDGQEFDGFGIGGALEKENLGTIVRWVSEELPENKPRHLLGISEPEDFFTAIENGADTFDCVQPSRVARTGRVYTPDGYFNIPQAKYKKDFSPIQEGCGCYTCQHYSKAYLHHLFKAKEMLYSTLCTIHNEYFTVKLVDDIRTSITEGRFAEFRDDALDRYKGKT

SEQ ID NO: 58070 - protein, 365 aa, Nevskiales bacterium
  misc_feature (1)..(365): tr|A0A2E9ZU88|A0A2E9ZU88_9GAMM Queuine tRNA-ribosyltran sferase OS=Nevskiales bacterium OX=2026766 GN=tgt PE=3 SV=1
MSFVCLQTDGGARRGRLTTQHGVIETPIFMPVGTYGTVKAMTPEELDSLGASIILGNTFHLMLRPGEQVVQALGGLHGFMHWDGPILTDSGGFQVWSLTELRKLTEQGVVFRSPVNGDRVELTPERSIQVQHALGSDIVMQFDECTAYPATEAEAAESMRLSLRWADRCRQAHADNPNLLFGIVQGGMHADLRRESLAGLETVGFDGYAIGGLSVGETREERLHVLETLSPLMPADRPRYLMGVGTPRDLIEGIDRGVDMFDCVMPTRNARNGHLFTSGGIVRIRNARHREDSAPLDANCSCYTCQHYSRAYLYHLNRCNEILGARLNTIHNLHFYLDLMRRAREAIEQGRWAGFRDGELKRWAD

SEQ ID NO: 58071 - protein, 379 aa, Niabella drilacis
  misc_feature (1)..(379): tr|A0A1G6UKX7|A0A1G6UKX7_9BACT Queuine tRNA-ribosyltran sferase OS=Niabella drilacis OX=1285928 GN=tgt PE=3 SV= 1
MAQLSFQLQHTDTGSAARAGLIQTDHGLIETPIFMPVGTAGSVKAVTQAQLESEVQAQIILGNTYHLYLRPGLEVLEKAGGLHRFNQWHRPILTDSGGFQVFSLAGTRKIKEEGVTFASHIDGSKHLFTPERVMDIQRVIGGDIIMAFDECPPGGSEYGYVRKSLDLTHRWLNRCWDRFTSTPDKYGYTQNLFPIVQGATFKDLRKESCDFVTQKDAPGNAIGGLSVGEPEDKMYEICDWCCQHLPVHKPRYLMGVGTPWNILECIGMGIDMFDCVMPTRNGRNAMLFTTEGVINIDNKKWEFDYSPIDEGLPNPMSNLYSKAYLRHLFKSGELLALTVASVHNLAFYLWLVQEARRQIISGNYHSWKNQMIVKLKRRL

SEQ ID NO: 58072 - protein, 379 aa, Niabella ginsenosidivorans
  misc_feature (1)..(379): tr|A0A1A9I4A1|A0A1A9I4A1_9BACT Queuine tRNA-ribosyltran sferase OS=Niabella ginsenosidivorans OX=1176587 GN=tgt PE=3 SV=1
MAQLSFQLQHTDAQSSARAGLITTDHGQIETPVFMPVGTAGSVKAVTQAQLENDIKAQIILGNTYHLYLRPGLEVLEKAGGLHRFNQWKRPILTDSGGFQVFSLAGTRKIKEEGVTFASHIDGSKHLFTPERVMDIQRIIGGDIIMAFDECPPGGSEYGYARKSLDLTHRWLDRCWDRFNSTPDRYGYTQNLFPIVQGATFKDLRKESCDFVAAKDAAGNAIGGLSVGEPEEKMYEICDWCCAHLPAQRPRYLMGVGTPWNILECIGMGIDMFDCVMPTRNGRNAMLFTTGGVINIDNKKWEFDYSPIDEELPNSMSNLYSKAYLRHLFKSGELLALTIASVHNLAFYLWLVGEARRQIRAGSYASWKNQMIVKLKTRL

SEQ ID NO: 58073 - protein, 379 aa, Niabella soli
  misc_feature (1)..(379): tr|W0EZP3|W0EZP3_9BACT Queuine tRNA-ribosyltransferase OS=Niabella soli DSM 19437 OX=929713 GN=tgt PE=3 SV=1
MAQLHFQLQHTDKDSSARAGMITTDHGTIQTPIFMPVGTAGSVKAVTQAQLENEVKAQIILGNTYHLYLRPGLEVLEKAGGLHQFNQWKHPVLTDSGGFQVFSLAGTRKIKEEGVTFASHIDGSKHLFTPERVMDIQRSIGGDIIMAFDECPPGGSEYEYARKSLDLTHRWLDRCFTQFNQTPDKYGYTQNLFPIVQGATYKDLRKESCEYVSEKNAPGNAIGGLSVGEPEDKMYEICDWCCQHLPKEKPRYLMGVGTPWNILECIGMGIDMFDCVMPTRNGRNAMLFTTEGVINIDNKKWEFDYSPIDAGLPNPMSHLYSKAYLRHLFKSGELLALTIASVHNLAFYLWLVGEARKQIIAGTYNAWKNQMIVKLKNRL

SEQ ID NO: 58074 - protein, 379 aa, Niabella sp.
  misc_feature (1)..(379): tr|A0A5C7WAC5|A0A5C7WAC5_9BACT Queuine tRNA-ribosyltran sferase OS=Niabella sp. OX=1962976 GN=tgt PE=3 SV=1
MARLHFQLEHKDKGSKARAGKITTDHGTIETPIFMPVGTAGSVKAVTQQHLVDDVQAQIILGNTYHLYLRPGTDILEKAGGLHQFINWQQPILTDSGGYQVFSLAGTRKIKEDGVTFQSHIDGSKHLFSPERVMDIQRSIGGDIVMAFDECPPGGSEYGYAQKSLALTQRWLDRCVARFAETPDKYGYTQNLFPIVQGAMFKDLRKQSCEYVIEKDAPGNAIGGLSVGEPEPVMYEICDWCCEHLPTDRPRYLMGVGTPWNILECIGMGVDMFDCVMPTRNGRNAMLFTTSGIINIDNKKWEYDFSPIDEGLPCEVSNHYSKAYLRHLFKSKEILGLTIASVHNLSFYLWLVGEARKQIVSGNYHSWKEEMIAKLKTRL

SEQ ID NO: 58075 - protein, 379 aa, Niastella koreensis
  misc_feature (1)..(379): tr|G8TH85|G8TH85_NIAKG Queuine tRNA-ribosyltransferase OS=Niastella koreensis (strain DSM 17620 / KACC 11465 / GR20-10) OX=700598 GN=tgt PE=3 SV=1
MAALQFTLQHTDNQTKARAGHIVTDHGEIATPIFMPVGTVGSVKAVSQQQLKEEVNASIILGNTYHLYLRPGTEVLEKAGGLHRFNGWERPILTDSGGYQVFSLAGTRKITEEGVLFQSHIDGSRHLFTPESVMDIQRNIGADIIMAFDECPPYPSDYQYAEKSMHLTHRWLDRCFKRFNETPDKYGYTQNLFPIVQGSTYTDLRKASCEFIASQEATGNAIGGLSVGEPDNMLYDLCGLCCDNLPVHKPRYLMGVGTPWNILECIALGVDMFDCVMPTRNGRNAMLFTSQGVINIDNKKWETDFSPLDDGIDCVVSNYYSKAYLRHLVKSKEILGLTLASVHNLAFYLWLVRQARHHILQGDFVSWKNEMVVRLQTRL

SEQ ID NO: 58076 - protein, 379 aa, Niastella populi
  misc_feature (1)..(379): tr|A0A1V9GA53|A0A1V9GA53_9BACT Queuine tRNA-ribosyltran sferase OS=Niastella populi OX=550983 GN=tgt PE=3 SV=1
MAALQFTLQHTDDQSKARAGHIVTDHGEIATPIFMPVGTVGSVKAVSQQQLREEVNASIILGNTYHLYLRPGTEVLQKAGGLHRFKGWDRPILTDSGGYQVFSLAGTRKITEDGVVFQSHIDGSRHLFTPESVMDIQRSIGADIIMAFDECPPYPSDYKYAEKSMHLTHRWLDRCFTRFNQTPDKYGYTQNLFPIVQGSTYTDLRKASCEYIASKDATGNAIGGLSVGEPDNMLYDLCGLCCDNLPAHKPRYLMGVGTPWNILECIALGVDMFDCVMPTRNGRNAMLFTSQGVINIDNKKWESDFTPIDNGIDAHISNHYSKAYLRHLVKSKEILGLTIASVHNLAFYLWLVRQARGHIMQGDFISWKNEMVPRLQTRL

SEQ ID NO: 58077 - protein, 379 aa, Niastella sp.
  misc_feature (1)..(379): tr|A0A4R2WBP3|A0A4R2WBP3_9BACT Queuine tRNA-ribosyltran sferase OS=Niastella sp. CF465 OX=2135684 GN=tgt PE=3 S V=1
MAALQFTLQHTDDQSKARAGHIVTDHGEIATPIFMPVGTVGSVKAVSQQQLKEEVNAEIILGNTYHLYLRPGTEVLQKAGGLHRFKGWDRPILTDSGGYQVFSLAGTRKLTEEGALFQSHIDGSRHMFSPEAVMDIQRTIGADIIMAFDECPPYPSDYKYAEKSMHLTHRWLDRCFKRFNETPDKYGYTQNLFPIVQGSTYTDLRKASCEYIASKDATGNAIGGLSVGEPENMLYDLCGLCCDNLPAHKPRYLMGVGTPWNILECIALGVDMFDCVMPTRNGRNAMLFTSLGVINIDNKKWENDFSPIDEGIDAHISNHYNKAYLRHLIKSKEILGLTIASVHNLAFYLWLVRQAREHIIKGDFVSWKNEMVPRLQTRL

SEQ ID NO: 58078 - protein, 379 aa, Niastella sp.
  misc_feature (1)..(379): tr|A0A1E4E5D9|A0A1E4E5D9_9BACT Queuine tRNA-ribosyltran sferase OS=Niastella sp. SCN 39-18 OX=1660119 GN=tgt PE =3 SV=1
MASLQFKIKATDAFSKARAGTILTDHGSIETPIFMPVGTVGSVKAVTQQQLKEQVRAEIILGNTYHLYLRPGLPVLEAAGGLHRFNGWNKPILTDSGGFQVFSLAKSRKINEEGVIFRSHIDGSKHLFTPEKAIDIQRSIGADIMMAFDECPPGASAYEYAKSSMLLTHRWLDRCFNQFNNTPDKYGYTQNLFPIVQGGIHHDLRKASCEYISAKAAAGNAIGGLSVGEPIETMYEICNLCCDHLPVNKPRYLMGVGTPWNILECIGMGIDMFDCVMPTRNGRNAMLFTSRGIINIDNKKWEHDFSVLDDGIDCETSQYYSKAYVRHLFKSKEYLGLIIASIHNLAFYLWLVKQARLHIEQGDFVSWKSGMISRLQQRL

SEQ ID NO: 58079 - protein, 379 aa, Niastella vici
  misc_feature (1)..(379): tr|A0A1V9G1U5|A0A1V9G1U5_9BACT Queuine tRNA-ribosyltran sferase OS=Niastella vici OX=1703345 GN=tgt PE=3 SV=1
MAALQFTLQHTDPSSKARAGHIVTDHGDILTPIFMPVGTVGSVKAVSQQQLKEEINAQIILGNTYHLYLRPGIDVLQKAGGLHQFKGWNRPILTDSGGYQVFSLAGTRKISEEGVLFQSHIDGSRHLFTPESVMDIQRAIGADIIMAFDECPPYPSDYKYAEKSMHLTHRWLDRCFTRFNETPDKYGYTQNLFPIVQGSTYTDLRKASCEYIASKDATGNAIGGLSVGEPDDMLYELCGLCCDNLPAHKPRYLMGVGTPWNILECIALGVDMFDCVMPTRNGRNAMLFTSQGVINIDNKKWESDFSPIDDGIDCHISNHYSKAYLRHLVKSKEILGLTIASVHNLAFYLWLVGEARKHIIEGDFVSWKNEMVPRLQTRL

SEQ ID NO: 58080 - protein, 379 aa, Niastella yeongjuensis
  misc_feature (1)..(379): tr|A0A1V9EMB7|A0A1V9EMB7_9BACT Queuine tRNA-ribosyltran sferase OS=Niastella yeongjuensis OX=354355 GN=tgt PE=3 SV=1
MAALQFTLQHTDNQSKARAGHIVTDHGEIATPIFMPVGTVGSVKAVSQQQLKEEVNASIILGNTYHLYLRPGTRVLEKAGGLHRFNGWDRPILTDSGGYQVFSLAGTRKITEEGALFQSHIDGSKHMFSPEAVMDIQRTIGADIIMAFDECPPYPSDYKYAEKSMHLTHRWLDRCFKRFNETPDKYGYTQNLFPIVQGSTYTDLRKASCEHIASKEATGNAIGGLSVGEPDNMLYDLCGLCCDNLPVHKPRYLMGVGTPWNILECIALGVDMFDCVMPTRNGRNAMLFTSQGVINIDNKKWEHDFSPLDDGIDCLVSNYYSKAYLRHLIKAKEILGLTIASVHNLAFYLWLVRQARHHILQGDFVSWKNEMVVRLQTRL

SEQ ID NO: 58081 - protein, 383 aa, Nibricoccus aquaticus
  misc_feature (1)..(383): tr|A0A290Q5N6|A0A290Q5N6_9BACT Queuine tRNA-ribosyltran sferase OS=Nibricoccus aquaticus OX=2576891 GN=tgt PE=3 SV=1
MPEHFQLLKTDSVTAARRGRLQTRHGVVETPIFMPVGTQGTVKAITPQHIQEIGAQIILGNTYHLNLRPTSELVKELGGLHAFMGWEGPILTDSGGFQVFSLAKLRDIREDGVAFQSHLDGAKLFLGPKEVMTIQANLGSDIAMVLDECPPWPCTRDECARAVERSFRWAKQCKEIATDNGFLAGGHHVFAIAQGSTFDDLRREAAESLASLDLPGYAVGGVSVGEPEPEMIKQVGATTPFMPADKPRYTMGLGTPPQILKMIALGVDMFDCVLPSRVARNGLVFTPDGPMNLRNEKYRTDPRPIAEGVTNYTSRFSRAYLRHLTVAGEMLSATLLTIHNLQFFIELTAQARAHIEAGDFGAWHRAWIARYEAGAAERLAGGK

SEQ ID NO: 58082 - protein, 696 aa, Nibricoccus aquaticus
  misc_feature (1)..(696): tr|A0A290Q8S2|A0A290Q8S2_9BACT Queuine tRNA-ribosyltran sferase OS=Nibricoccus aquaticus OX=2576891 GN=tgt PE=3 SV=1
MSRLNFTLEKEASGSSARAATFRTLHGEVKTPVFMPVGTQATVKSQTVETLKATGSSVLLANTYHLLLRPGPEVFKKFGGIHNFMKWDGPVLTDSGGFQIFSLPGERVMNEDGARFKSYVDGAMFMLSPESSIGMQKTIGSDIMMVLDQCIPSTAGYAEAEVAMELTHRWALRSLKARGDSPQALFGIVQGACHHDLRKKSAAFLRELPFDGLAIGGLAVGETHAERYEFTGLVTQHLPKNLPRYLMGVGTPIDILEAVHRGVDMFDCIIPSQLAQRGVAFTSQGKIQLRRAVYKFSEAPLDAKCDCHCCKNFSRAYLHHLVKSDELLGWQLLGIHNFAFYHRLMREMRQEILHGNFLAYYERMRPELMKSDEDNPVNPPKKLRHGKPKHLGDYDIVTSEQGFSSIRQISSGEVMHSVSAPSDEAQRLYVGQSRLAERLLKSSAGGEAVSGASAGGDGAARELVIWDVGLGAASNAMAAIQCFESRYAEKGGEALRPLRIVSFECDLDPLTLAAKFPGHFPHLRHGAPHALLESGRWRHASGLLEWELLKGDFLTFIETAVEPDVIFYDPFSAKTDTGLWTAEVFARVRARCGEKRAELFTYSAATAVRVALLAAGFYVAEGVGTGPKATTTVAFARERRETDAGVWPEARLLGAEWLARWGRSTSKSPSTLTEAERVVFEKRIEGHPQFRAVRQS

SEQ ID NO: 58083 - protein, 388 aa, Nicoletella semolina
  misc_feature (1)..(388): tr|A0A4V2SK47|A0A4V2SK47_9PAST Queuine tRNA-ribosyltran sferase OS=Nicoletella semolina OX=271160 GN=tgt PE=3 S V=1
MKYKLKKTSGNARRGRLTFSRPRGEFHVETPAFMPVGTYGTVKGMTPEEVTATGAEILLGNTFHLWLRPGQEIMKMHGDLHDFMQWHAPILTDSGGFQVFSLGKLRKIEEEGVTFQNPISGEKIFLSPEKSMEIQYDLGSDIVMIFDECTPYPATFDYAKKSMEMSLRWAKRSRDRFDELENPNALFGIIQGGVYEELRKISAEELIKIGFDGYAVGGLAVGEPKEDMHRILEYVCPQIPKDKPRYLMGVGKPEDLVEGVRRGIDMFDCVMPTRNARNGHLFVSNGIVKIRNAKYRSDTSPLDPECDCYTCKNYTKAYLYHLDKCGEILGARLNTIHNLRYYQRLMAQIREAIEQDRFDEFAQEFYAKIGKPMPPLQTDVIQQDAIES

SEQ ID NO: 58084 - protein, 377 aa, Nisaea sp.; identical to SEQ ID NO: 53258
  misc_feature (1)..(377): tr|A0A2D7JN02|A0A2D7JN02_9PROT Queuine tRNA-ribosyltran sferase OS=Nisaea sp. OX=2024842 GN=tgt PE=3 SV=1

SEQ ID NO: 58085 - protein, 381 aa, Nisaea sp.
  misc_feature (1)..(381): tr|A0A2D7Z6I2|A0A2D7Z6I2_9PROT Queuine tRNA-ribosyltran sferase OS=Nisaea sp. OX=2024842 GN=tgt PE=3 SV=1
MTKAFSFQLLGQDGPARRGRVSTAHGSFETPAFMPVGTAGTVKAMTMDGVAATGAEIILGNTYHLMLRPGAEIVAEMGGLQEFTRWSGPILTDSGGFQVMSLAELRKLTEEGVRFRSHVDGRHMMLTPEDSIRIQHQLGADITMVLDECTPYPATHEEAEKSMELSMRWAVRSKEAFVTRPGHGLFGIVQGSVYEDLRHRSIAALTDIGFDGYAVGGLAVGEGQAQMFSVLDFTMPAMPADRPRYLMGVGKPSDLVGAVARGVDMFDCVLPTRSGRTGQAFTRRGVVNIRNARHSRDPRPLDADCACQTCQNYSRAYLHHLFKAGEILGLMLMTAHNLRFYQDLMADLRAAIEAGRLTDQVARFHADQARGDIEPWVPGGP

SEQ ID NO: 58086 - protein, 374 aa, Nissabacter sp.
  misc_feature (1)..(374): tr|A0A4P8SHZ9|A0A4P8SHZ9_9GAMM Queuine tRNA-ribosyltran sferase OS=Nissabacter sp. SGAir0207 OX=2126321 GN=tgt PE=3 SV=1
MKYELMTKDGRARRGRLVFERGVVETPAFMPVGTYGTVKGMTPEEVKETGAQILLGNTFHLWLRPGQEIMKLHGDLHDFMQWHGPILTDSGGFQVFSLGAMRKIKEEGVHFRNPINGNPVFLSPEKSMEIQYDLGSDIVMIFDECTPYPADWDYAKRSMEMSLRWAARSRKRFDELENKNALFGIIQGSVYEDLRDVSVKGLVEIGFDGYAVGGLAVGEPKEDMHRILEHVCPQIPEDKPRYLMGVGKPEDLVEGVRRGIDMFDCVMPTRNARNGHLFVTEGVVKIRNAKYKEDTSPLDAECDCYTCRNYSRAYLHHLDRCNEILGARLNTIHNLRYYQRVMAGLRQAIEEGKLELFVADFYQRIGKPVPPLDA

SEQ ID NO: 58087 - protein, 374 aa, Nitratifractor salsuginis
  misc_feature (1)..(374): tr|E6WYV7|E6WYV7_NITSE Queuine tRNA-ribosyltransferase OS=Nitratifractor salsuginis (strain DSM 16511 / JCM 12 458 / E9I37-1) OX=749222 GN=tgt PE=3 SV=1
MQFRIDAQDGAARAATIQTAHSVIQTPVFMPVGTVGAVKALDALDLQNHLSPQIILGNTYHLYLRPGDEIVKAMGGLHGFTRFPKSFLTDSGGFQAFSLSDNVKIEEDGITFRSHIDGSKHHFTPQKVLDIQYNLGSDIMMILDDLVALPATRERIRESIERTTRWAQRSIDYHRRKQMEGIGVDQNIFAIIQGGTDKEFRKISATELCALDFDGFAIGGLSVGEANREMYDTVEWTTPFMPTDKPRYLMGVGTPEDLVENVERGVDMFDCVMPTRNARNGTLFTSFGKVTIKAARYATDEEPIDPECGCIVCRTYSRAYLRHLFRAKELTYFRLATIHNLYYYLDLMRQMREAILEGKFAEFKRKFYRKRDNG

SEQ ID NO: 58088 - protein, 376 aa, Nitratireductor basaltis
  misc_feature (1)..(376): tr|A0A084UB32|A0A084UB32_9RHIZ Queuine tRNA-ribosyltran sferase OS=Nitratireductor basaltis OX=472175 GN=tgt PE =3 SV=1
MSENFTFNLLARDGAARRGEITMPRGTVRTPAFMPVGTAGTVKAMYLDQVRELGSDIILGNTYHLMLRPGAERMARLGGLHEFARWPHPILTDSGGFQVMSLADLRKITEKGVTFRSHVDGQVFEMSPERSIEIQGLLDSDIQMQLDECIALPAERSEIERAMELSLRWAERCKTAFGDQPGKAMFGIVQGGDDVKLRERSAQALKALDLKGYAVGGLAVGEPQDVMFEMLEATCPQLPEEKPRYLMGVGTPDDILGAVARGIDMFDCVMPTRAGRHGLAYTRHGKINLKNARHAEDPRPLDEESNCPASRDYSRAYLHHLVRSNEALGGMLLTWNNLAYYQSLMADIRSAIEQGRFTERAAEIRAAWARGDIPPR

SEQ ID NO: 58089 - protein, 376 aa, Nitratireductor indicus
  misc_feature (1)..(376): tr|K2N8D7|K2N8D7_9RHIZ Queuine tRNA-ribosyltransferase OS=Nitratireductor indicus C115 OX=1231190 GN=tgt PE=3 SV=1
MSATFTFRLLATDGQARRGEISMPRGTIRTPAFMPVGTAGTVKAMYLDQVRELGSDIILGNTYHLMLRPGAERVARLGGLHEFARWPYPILTDSGGFQVMSLADLRKITEKGVTFRSHVDGQVFEMPPERSIEIQGLLDSDIQMQLDECVALPAEEAEIERAMELSLRWAERCKTAFGDQPGKAMFGIVQGGDKAHLRERSAHALADMGLKGYAVGGLAVGEPQAVMLEMLDATCPVLPFEKPRYLMGVGTPDDILKSVARGIDMFDCVMPTRAGRHGLAYTRHGKINLKNARHAEDMRPLDEESDCPASRDYSRAYLHHLVKSGESLGGMLLTWNNLAYYQSLMQDIRNAIEAGRFGERAGEIAQGWERGDIPAL

SEQ ID NO: 58090 - protein, 376 aa, Nitratireductor pacificus
  misc_feature (1)..(376): tr|K2M960|K2M960_9RHIZ Queuine tRNA-ribosyltransferase OS=Nitratireductor pacificus pht-3B OX=391937 GN=tgt PE =3 SV=1
MSDQFTFRLLAQDGAARRGAISMPRGTIRTPAFMPVGTGGTVKAMYMDQVRALGSDIILGNTYHLMLRPGAERMARLGGLHQFAGWPHPILTDSGGFQVMSLAELRKITEKGVTFRSHVDGQVFEMPPERSIEIQGLLGSDIQMQLDECVALPAEEAEIERAMEMSLRWAERCKTAFGDQPGKAMFGIVQGGDRAHLRQRSAQALAAMDLKGYAVGGLAVGEPQAVMLEMLEATCPELPAEKPRYLMGVGTPDDILKSVARGIDMFDCVMPTRAGRHGLAYTRRGKINLKNARHAEDLRPLDEESDCPASRDYSRAYLHHLVKSGESLGGMLLTWNNLAYYQALMQDIRDAIEAGRFTERSAEISAAWEKGDLPPL

SEQ ID NO: 58091 - protein, 376 aa, Nitratireductor sp.
  misc_feature (1)..(376): tr|A0A1H4ITM3|A0A1H4ITM3_9RHIZ Queuine tRNA-ribosyltran sferase OS=Nitratireductor sp. ES.061 OX=1855335 GN=tgt PE=3 SV=1
MSDRFTFRLLATDGDARRGEISMPRGTIRTPAFMPVGTAGTVKAMYMDQVRGLGADIILGNTYHLMLRPGAERVARLGGLHEFARWPYPILTDSGGFQVMSLADLRKITEKGVTFRSHVDGQVFEMPPERSIEIQGLLGSDIQMQLDECVALPAEESEIERAMELSLRWAERCRIAFGNQPGKAMFGIVQGGDKPHLRERSARALAAMELKGYAVGGLAVGEPQAVMLDMLEATCPVLPGEKPRYLMGVGTPDDILKSVARGIDMFDCVMPTRAGRHGLAYTRRGKINLKNARHAEDMRPLDEESDCPAARDYSRAYLHHLVKAGESLAGMLLTWNNLAYYQSLMQDIRDAIEAGRFQQRSAEISAAWEKGDLPPL

SEQ ID NO: 58092 - protein, 376 aa, Nitratireductor sp.
  misc_feature (1)..(376): tr|A0A2P8NJP8|A0A2P8NJP8_9RHIZ Queuine tRNA-ribosyltran sferase OS=Nitratireductor sp. StC3 OX=2126741 GN=tgt P E=3 SV=1
MTQSFEFSLLATDGAARRGEISTPRGTIRTPAFMPVGTAGTVKAMYMDQVRALGADIILGNTYHLMLRPGAERVARLGGLHAFARWPHPILTDSGGFQVMSLAQLRKLSEKGVTFKSHIDGAVHEMSPERSIEIQGLLGSDIQMQLDECVALPAERDVIERSMELSLRWAERCKTAFGDQPGRAMFGIVQGGDDEALRVRSAEALTALDLKGYAVGGLAVGEPQPVMLAMLDAVCPALPHQKPRYLMGVGTPDDIVKSVQRGIDMFDCVMPTRAGRHGLAYTRHGKINLRNARHAEDPRPLDAESDCPAARDYSRAYLHHLVKAGEALGGMLLTWNNLSYYQTLMQGLRDAIEAGRLADHAAGLAEGWARGDLAPV

SEQ ID NO: 58093 - protein, 373 aa, Nitratiruptor sp.
  misc_feature (1)..(373): sp|A6Q3Y5|TGT_NITSB Queuine tRNA-ribosyltransferase OS= Nitratiruptor sp. (strain SB155-2) OX=387092 GN=tgt PE= 3 SV=1
MDFFIDATDNNARACTIKTSHSTIKTPVFMPVGTAASVKSLDTVDLRDILQTQIILANTYHLYLRPGDNVVKKLGGLHGFTGYNRSFLTDSGGFQAFSLSDISKANERGIEFQSHIDGSKHFFTPQKVLDIQYNLGSDIMMILDDLVALPATKERLALSVDRTTRWAQESIKYHKKMQAQGIGTNQNIFAIIQGGTDYEFRKKSAMELTALDFDGFAIGGLSVGEENSVMYNTVEFTTPFMPKNKPRYLMGVGTPEDLVECIDRGVDMFDCVMPTRNARNGTIFTSFGRLNIKAAKYKLDQNPIDEACSCYTCQNYTRAYLNHLYRAKELTYYRLASIHNLHYYLTLMKEAREAIEKGEYKAFKKAFYARRQS

SEQ ID NO: 58094 - protein, 373 aa, Nitratiruptor tergarcus
  misc_feature (1)..(373): tr|A0A1W1WUI6|A0A1W1WUI6_9PROT Queuine tRNA-ribosyltran sferase OS=Nitratiruptor tergarcus DSM 16512 OX=1069081 GN=tgt PE=3 SV=1
MEFTLDATCGNARATTIKTYHSTIKTPVFMPVGTAASVKALDTRDLIDLLDTHIILANTYHLYLRPGDEIVKEFGGLHGFTKYNRSFLTDSGGFQAFSLSDISKANDEGIEFQSHIDGSRHFFTPQKVLDIQYNLGSDIMMILDDLIALPATKERLKLSVVRTTKWAKASITYHKKMQERGIGRTQNIFAIIQGGVDPAFRRQSAQELTALDFDGFAIGGLSVGEESQAMYDTVAWTTQFMPANKPRYLMGVGTPEDIVEAIDRGIDMFDCVMPTRNARNGTIFTTFGRLNIKAARFKKDHRPIDENCSCYTCQNYSRGYLNHLFRAKELTYYRLASIHNLHYYLQLTKDAREAIIQGDYATFKKDFYARRSQ

SEQ ID NO: 58095 - protein, 376 aa, Nitrincola lacisaponensis
  misc_feature (1)..(376): tr|A0A063Y5G1|A0A063Y5G1_9GAMM Queuine tRNA-ribosyltran sferase OS=Nitrincola lacisaponensis OX=267850 GN=tgt P E=3 SV=1
MQFECLTTEGKARRGRLTFPRGVVETPAFMPVGTYGTVKGMLPRDVKALGAQIILGNTFHLMLRPGTEIINLHGDLHDFMQWQGPILTDSGGFQVFSLGKMRKITEEGVSFRSPVDGSKVFLSPERSMEVQRALGSDIVMIFDECTPYPATEAEAAKSMRMSLRWAERSKAAHGDSPSALFGIVQGGMYPHLRDESLAGLTAIDFDGYAIGGLSVGEPKDEMIKVLDHLAYQMPADKPRYLMGVGKPEDIVEAVRRGVDMFDCVIPTRNARNGFLFTSTGVVKIRNSVNKTDTRPLDENCDCYTCKNFSRAYLHHLDKCGEMLGAQLSTLHNLHYYQTLMAGLRNALEQGKLCAFVDDFYRVRGMETPPLTDTASD

SEQ ID NO: 58096 - protein, 379 aa, Nitrincola nitratireducens
  misc_feature (1)..(379): tr|W9V1X6|W9V1X6_9GAMM Queuine tRNA-ribosyltransferase OS=Nitrincola nitratireducens OX=1229521 GN=tgt PE=3 SV =1
MSRQCFMQFEQLATDGKARRARLTFPRGTVETPAFMPVGTYGTVKGMLPRDIKALGAQIILGNTFHLMLRPGTDIINLHGDLHDFMQWQGPILTDSGGFQVFSLGKMRKITEEGVSFQSPVDGSKVFLSPERSMEVQKALGSDIVMIFDECTPYPATEDEAAKSMRMSLRWARRSKDAHGDSPSALFGIVQGGMYPDLRDESMAGLAEIDFDGYAIGGLSVGEPKDEMIKVLDHLAYKMPENKPRYLMGVGKPEDIVEAVRRGVDMFDCVIPTRNARNGFLFTSTGVVKIRNAVNKTDTRPLDENCDCYTCRNFSRAYLHHLDKCGEMLGAQLNTLHNLYYYQTLMAGLRKAIEQGKLCDFVDDFYQARGLETPPLTDQ

SEQ ID NO: 58097 - protein, 376 aa, Nitrincola sp.
  misc_feature (1)..(376): tr|A0A5J6LJ79|A0A5J6LJ79_9GAMM tRNA guanosine(34) trans glycosylase Tgt OS=Nitrincola sp. KXZD1103 OX=2614693 G N=tgt PE=4 SV=1
MQFECLTTEGKARRGRLTFPRGEVETPAFMPVGTYGTVKGMLPRDVKALGAQIVLGNTFHLMLRPGTEIINLHGDLHDFMQWQGPILTDSGGFQVFSLGKMRKITEEGVSFRSPVDGSKVFLSPEVSMQVQQALGSDIVMIFDECTPYPATETEAAESMRMSLRWAKRSKEAHGDSPSALFGIVQGGMYPHLRDESLAGLVETGFDGYAIGGLSVGEPKDEMISVLDHLAHRMPEDKPRYLMGVGKPEDIVEAVRRGVDMFDCVIPTRNARNGFLFTSNGVVKIRNSVNKTDTRPLDENCDCYTCKNFSRAYLHHLDKCGEMLGAQLSTLHNLHYYQTLMTGLRNALEQGKLSAFVDDFYRARGMETPPLIDTNTF

SEQ ID NO: 58098 - protein, 384 aa, Nitrincola sp.
  misc_feature (1)..(384): tr|A0A5A9WB46|A0A5A9WB46_9GAMM Queuine tRNA-ribosyltran sferase OS=Nitrincola sp. MEB193 OX=1708751 GN=tgt PE=3 SV=1
MQFECLAAEGKARRGRLTFPRGSVETPAFMPVGTYGTVKGMLPRDIKEIGAQMILGNTFHLMLRPGTEIIGLHGDLHDFMQWQGPILTDSGGFQVFSLGKMRKITEEGVSFRSPVDGSKVFLSPERSMEVQKALGSDVVMIFDECTPYPATEKEAADSMRLSLRWAERSKRAHGDNPSALFAIVQGGMYEHLRDESLKGLVEIGFDGYAIGGLSVGEPKEDMVRVLDHTAWKLPEDKPRYLMGVGKPEDIVEGVRRGVDMFDCVIPTRNARNGFLFTSTGVVKIRNSANKTDTRPLDENCDCYTCRNFSRAYLHHLDKCGEILGAQLNTLHNLHYYQTLMAGLRNALEQGKLCDFVDEFYAARGLQTPPLAPIDSITQPLENAE

SEQ ID NO: 58099 - protein, 373 aa, Nitrincola tibetensis
  misc_feature (1)..(373): tr|A0A364NR47|A0A364NR47_9GAMM Queuine tRNA-ribosyltran sferase OS=Nitrincola tibetensis OX=2219697 GN=tgt PE=3 SV=1
MQFEQLATDGKARRARLTFPRGTVETPAFMPVGTYGTVKGMLPRDIKALGAQIILGNTFHLMLRPGTDIINLHGDLHNFMQWQGPILTDSGGFQVFSLGKMRKITEEGVSFQSPVDGSKVFLSPERSMEVQKALGSDIVMIFDECTPYPATEEEAAKSMRMSLRWARRSKDAHGDSPSALFGIVQGGMYPELRDESMAGLAEIDFDGYAIGGLSVGEPKDEMIKVLDHLAYKMPENKPRYLMGVGKPEDIVEAVRRGVDMFDCVIPTRNARNGFLFTSTGVVKIRNAVNKTDTRPLDENCDCYTCRNFSRAYLHHLDKCGEMLGAQLNTLHNLYYYQTLMAGLRKAIEQGKLCDFVDDFYRARGLETPPLADQ

SEQ ID NO: 58100 - protein, 345 aa, Nitritalea halalkaliphila
  misc_feature (1)..(345): tr|I5C2G6|I5C2G6_9BACT Queuine tRNA-ribosyltransferase OS=Nitritalea halalkaliphila LW7 OX=1189621 GN=tgt PE=3 SV=1
MPVGTAGTVKAVHTRELEADIQAQIILGNTYHLYLRPGLEVLRQAGGLHRFNGWSKPILTDSGGYQVFSLAQSRKITEEGVTFKSHIDGSKHLFTPEGVMDIERTIGADIIMAFDECPPYPSTYAYAEQSMQLTHRWLKRCIERVDQTEPHYGYAQSLFPIVQGSTYKDLRAQSAEFIASCEREGNAIGGLSVGEPAEMMYEMTDHVNRILPRDKPRYLMGVGTPANILENIALGVDMFDCVMPTRNARNGMLFTTEGIINIRNEKWKSDFSPIDSGFPSYVSQFYSKAYLRHLVISKEILASQIASIHNLSFYLWLVGEARAQIQAGTFAGWKNRMVEVVSRRL

SEQ ID NO: 58101 - protein, 377 aa, Nitrobacter hamburgensis
  misc_feature (1)..(377): tr|Q1QMG2|Q1QMG2_NITHX Queuine tRNA-ribosyltransferase OS=Nitrobacter hamburgensis (strain DSM 10229 / NCIMB 1 3809 / X14) OX=323097 GN=tgt PE=3 SV=1
MSLANHFELLGRDGEARTGLLTTPHGAVRTPAFMPVGTQGAMKGLHWREMRDAGTDIVLGNTYHLMLRPGAERIAELGGLQKFTTWDGPMLTDSGGFQVMSLAQLRKVKEQGVTFRSHIDGTAIELTPERAVEVQRLLGSDIAMQLDECVRLPAERSDIERAVQLSLRWAERSKRAFEGAPAANMLFGIVQGGDSPELRRTSARGLTEIGFHGYAIGGLAVGEPQAVMLAMIEETIPSMPADRPRYLMGVGTPDDLLEAVARGIDMFDCVMPTRNGRHGMAFTRFGQINLRNARHANDPRPLDEESSWPASRNYSRAYLHHLVRSGETLGAMLLSGINVAYYQNLMQAMRTAITERNFQLFRERTRGDWARGDIAAR

SEQ ID NO: 58102 - protein, 65 aa, Nitrobacter sp.
  misc_feature (1)..(65): tr|A3WZL4|A3WZL4_9BRAD Queuine tRNA-ribosyltransferase OS=Nitrobacter sp. Nb-311A OX=314253 GN=NB311A_06151 PE =4 SV=1
MILSGKYADASAAIIESAQTGHVGRSLPRGAECSRAVDWISAIAGIVTSFVKMAVWTFGHGTRIV

SEQ ID NO: 58103 - protein, 377 aa, Nitrobacter sp.
  misc_feature (1)..(377): tr|A0A1Q3K2I8|A0A1Q3K2I8_9BRAD Queuine tRNA-ribosyltran sferase OS=Nitrobacter sp. 62-13 OX=1895797 GN=tgt PE=3 SV=1
MSLANHFKLLGRDGEARTGLLTTPHGAVRTPAFMPVGTQGAMKGLQWREVRDAGTDIVLGNTYHLMLRPGAERIDELGGLQKFTTWDGPMLTDSGGFQVMSLAQLRKVKEQGVTFRSHIDGTAIELTPERAIEVQRLLGSDIAMQLDECVRLPAERDDIERAMRLSLRWAERSKRAFEGAAEGHMLFGIVQGGDNPELRRASARELTGIGFHGYAIGGLAVGEPQTVMLAMIEETIPSMPADRPRYLMGVGTPDDLVEAVVRGIDMFDCVMPTRNGRHGMAFTRFGQINLRNARHADDPRPLDEESSWPPSRTYSRAYLHHLVRSGETLGAMLLSGINIAYYQSLMQAMRAAIAEGTFQQLRERTRADWARGDIAAR

SEQ ID NO: 58104 - protein, 377 aa, Nitrobacter vulgaris
  misc_feature (1)..(377): tr|A0A1V4HZC3|A0A1V4HZC3_NITVU Queuine tRNA-ribosyltran sferase OS=Nitrobacter vulgaris OX=29421 GN=tgt PE=3 SV =1
MSLANHFEILGRDGSARTGLLTTAHGAVRTPAFMPVGTQGAMKGLQWQEVRDAGTDIVLGNTYHLMLRPGAERIDELGGLQKFTTWGGPMLTDSGGFQVMSLAQLRKVKEQGVTFRSHIDGTAIELTPERAVEVQRLLGSDIAMQLDECVRLPAERTDIERAMQLSLRWAERSRRAFEGAPAANMLFGIVQGGDSSDLRRTSACRLTEIGFHGYAIGGLAVGEPQAIMLAMIEETAPWLPVDRPRYLMGVGTPDDLLEAVARGIDMFDCVMPTRNGRHGMAFTRFGQINLRNARHADDPRPLDEESSWPASRNYSRAYLHHLVRSGETLGAMLLSGINIAYYQSLMQAMRTAIKGGTFQQFRELTREGWARGDIAMR

SEQ ID NO: 58105 - protein, 377 aa, Nitrobacter winogradskyi
  misc_feature (1)..(377): tr|A0A4Y3W9R5|A0A4Y3W9R5_NITWI Queuine tRNA-ribosyltran sferase OS=Nitrobacter winogradskyi OX=913 GN=tgt PE=3 SV=1
MNPANHFEILGRDGDARSGLLTTAHGTVRTPAFMPVGTQGAMKGLQWQEVRDAGADIVLGNTYHLMLRPGAERIHELGGLQKFTSWGGPMLTDSGGFQVMSLAQLRKVKEQGVTFRSHIDGAVIELTPERAIEVQRLLGSDIAMQLDECVRLPAERGDIERAMQLSLRWAERSRRAFEGAPAADMLFGIVQGGDSPELRRTSACGLTGIGFHGYAIGGLAVGEPQATMLAMIEETVPWLPIERPRYLMGVGTPHDLLEAVARGIDMFDCVMPTRNGRHGTAFTRFGQINLRNARHADDPRPLDEESSWPAARDYSRAYLHHLVRSGETLGAMLLSGINIAYYQGLMQAMRSAIAAGAFQQFREQTREGWARGDIATR

SEQ ID NO: 58106 - protein, 377 aa, Nitrobacter winogradskyi
  misc_feature (1)..(377): tr|Q3SRN5|Q3SRN5_NITWN Queuine tRNA-ribosyltransferase OS=Nitrobacter winogradskyi (strain ATCC 25391 / DSM 10 237 / CIP 104748 / NCIMB 11846 / Nb-255) OX=323098 GN=t gt PE=3 SV=1
MSLANHFELLGRDGDARTGLLTTAHGTVRTPAFMPVGTQGAMKGLQWQDVRDAGADIVLGNTYHLMLRPGAERIHELGGLQKFTRWGGPMLTDSGGFQVMSLAQLRKVKEQGVTFRSHIDGTAIELTPERAIEVQRLLGSDIAMQLDECVRLPAERGDIERAMQLSLRWAERSRRAFEGAPAANMLFGIVQGGDIPELRRTSACGLTGIGFHGYAIGGLAVGEPQATMLAMIEEAAPWLPMERPRYLMGVGTPHDLLEAVARGIDMFDCVMPTRNGRHGMAFTRFGQINLRNARHADDPRPLDEESSWPAARDYSRAYLHHLVRSGETLGAMLLSGINIAYYQSLMQAMRSAIAGGVFQEFRERTREGWARGDIASR

SEQ ID NO: 58107 - protein, 370 aa, Nitrococcus mobilis
  misc_feature (1)..(370): tr|A4BSU0|A4BSU0_9GAMM Queuine tRNA-ribosyltransferase OS=Nitrococcus mobilis Nb-231 OX=314278 GN=tgt PE=3 SV= 1
MSMRFELLGQCGRARHGRLVFERGEVYTPAFMPVGTYGTVKAMTAEELRALGVEILLANTFHLMLRPGTEIIAAHGDLHAFMHWDGPILTDSGGFQVYSLGAMRRVTEQGVHFRSPVDGASVFMGPEESMAVQRALGADIVMVFDECLAHPASESAARTSMELSLRWAARSHQAHAGNSAALFGIVQGGLYEPLRVASLNALLEIGFDGYAVGGLAVGEPTEERLRILEFLDPHLPVAHPRYLMGVGKPEDIVEAVRRGVDLFDCVIPTRNARNGYLYTHAGTLRIRNSCYAHDTRPVDEQCGCYTCRHYTRAYLRHLDRCNEILGARLNTLHNLCYYQQLMDNLRTAISEGRLESHIREFYAKREPGMT

SEQ ID NO: 58108 - protein, 156 aa, Nitrococcus mobilis
  misc_feature (1)..(156): tr|A4BVV4|A4BVV4_9GAMM Queuine tRNA-ribosyltransferase (Fragment) OS=Nitrococcus mobilis Nb-231 OX=314278 GN=N B231_17550 PE=4 SV=1
MTRAAFTCTARSGAARAGELTVRGRTLQTPAFLPVGTYGAVKGLHPGTIRDHGAGMILANACHLHDRPGADVVASLGGLHAFMGWDGLILTDSGGFQVFSMMDIASLDEDGVTFRSPINGRPLRLGPDEVVDVQLALDSDIAMVFDHCPALPAPRR

SEQ ID NO: 58109 - protein, 407 aa, Nitrolancea hollandica
  misc_feature (1)..(407): tr|I4EI94|I4EI94_9CHLR Queuine tRNA-ribosyltransferase OS=Nitrolancea hollandica Lb OX=1129897 GN=tgt PE=3 SV= 1
MTNVERINSSQQHFRVITPDRETGARTGILTTRRGTVQTPAFMPVGTQASVRALSPDEVMRTGTEIILANTYHLMLRPGVDLIRAAGGLHRFMAWPGPILTDSGGFQVFSLAHRRSVSEQGVIFRSHIDGSLHELTPESAIDLQLGFDSDIIMPLDELIGFGAPEPVQQAAMERTHRWLQRAIDRFQSSVQDAGPDRPFLFGIAQGGFIPELRRESAAFIAAQPVDGWAIGGLSVGESKDVMDAMLAETISALPVEKPRYLMGVGSPEDLWRGVAAGVDMFDCVHPTRVARRGGLFTPDGRVNVTASRFRDHFGPVDETCDCVTCTTFIAAYLNHLFRARELLAYRLASIHNLRFIQREMAAIRRSIESGTFAADMAAFLGRYRPADAEAAREQRRHWAERHAPARP

SEQ ID NO: 58110 - protein, 371 aa, Nitrosococcus halophilus
  misc_feature (1)..(371): tr|D5BV95|D5BV95_NITHN Queuine tRNA-ribosyltransferase OS=Nitrosococcus halophilus (strain Nc4) OX=472759 GN=t gt PE=3 SV=1
MEFELLTRAGAARRGRLRFPRGTVETPAFMPVGTYGTVKAMTPEELRTGGAEIVLGNTFHLMLRPGTEVIAKHGGLHGFMHWEGPILTDSGGFQVWSLGAMGKITEQGVSFRSPIDGRPVFLGPEESMAVQRALGADIVMIFDDCTPYPATEEMTRQSMELSLRWAARSREAHGDSAAALFGIIQGGMYEDLRDQSLQGLLEIGFEGYAIGGLSVGEPKDAMARILTHTAPQMPADKPRYLMGVGRPEDMVEAVRQGIDMFDCVMPTRNARNGHLFVREGVIRIRNSTYRDDTRPLDEGCTCYTCRHYSRAYLHHLDKTREILGSRLNTLHNLHYYQNLMERLREAIEQNRLEAFVAEFYAARAQDPLPVP

SEQ ID NO: 58111 - protein, 371 aa, Nitrosococcus oceani
  misc_feature (1)..(371): tr|A0A0E2YYZ7|A0A0E2YYZ7_9GAMM Queuine tRNA-ribosyltran sferase OS=Nitrosococcus oceani C-27 OX=314279 GN=tgt P E=3 SV=1
MEFELLSCGGAARRGRLRFPRGSVETPAFMPVGTYGTVKAMTPEELRTGGAEIVLGNTFHLMLRPGTQVIAKHGGLHGFMHWDGPILTDSGGFQVWSLGAMRKITERGVNFRSPVDGRLIFLGPEESIAVQRELGADIVMVFDDCTPHPVSEEVARQSMELSLRWAARSREAHGDSPAALFGIIQGGMYEHLREESLQELLTIGFEGYAVGGLSVGEPKEDRERILTAIVSRMPADKPRYLMGVGRPEDIVEAVRRGMDMFDCVMPTRNARNGHLFVREGVIRIRNSTYRKDTRPLDESCTCYTCRHYSRAYLHHLDKSREILGARLNTIHNLHYYQALMEQLRQAIEQDGLERFSAEFYAARVQDRLSVS

SEQ ID NO: 58112 - protein, 391 aa, Nitrosococcus oceani
  misc_feature (1)..(391): tr|Q3J8N6|Q3J8N6_NITOC Queuine tRNA-ribosyltransferase OS=Nitrosococcus oceani (strain ATCC 19707 / BCRC 17464 / NCIMB 11848 / C-107) OX=323261 GN=tgt PE=3 SV=1
MLSSGGFSFYLHSSRVIAQKMEFELLSCGGAARRGRLRFPRGSVETPAFMPVGTYGTVKAMTPEELRTGGAEIVLGNTFHLMLRPGTQVIAKHGGLHGFMHWDGPILTDSGGFQVWSLGAMRKITERGVNFRSPVDGRLIFLGPEESIAVQRELGADIVMVFDDCTPHPVSEEVARQSMELSLRWAARSREAHGDSPAALFGIIQGGMYEHLREESLQELLTIGFEGYAVGGLSVGEPKEDRERILTAIVSRMPADKPRYLMGVGRPEDIVEAVRRGMDMFDCVMPTRNARNGHLFVREGVIRIRNSTYRKDTRPLDESCTCYTCRHYSRAYLHHLDKSREILGARLNTIHNLHYYQALMEQLRQAIEQDGLERFSAEFYAARVQDRLSVS

SEQ ID NO: 58113 - protein, 371 aa, Nitrosococcus wardiae
  misc_feature (1)..(371): tr|A0A4P7BWZ8|A0A4P7BWZ8_9GAMM Queuine tRNA-ribosyltran sferase OS=Nitrosococcus wardiae OX=1814290 GN=tgt PE=3 SV=1
MEFELLTRAGAARRGRLRFPRGTVETPAFMPVGTYGTVKAMTPEELRTGGAEIVLGNTFHLMLRPGTEIIAKHGGLHGFMHWERPILTDSGGFQVWSLGAMGKITEQGVSFRSPIDGRPVFLGPEESIAVQRQLGADIVMIFDDCTPYPATKEVTRQSMELSLRWAARSRETHGDSPAALFGIIQGGMYEDLRDQSLQGLLEIGFEGYAIGGLSVGEPKEAMARILAHTAPQMPADKPRYLMGVGRPEDIVEAVRQGIDMFDCVMPTRNARNGHLFVRGGVIRIRNSPYRDDTRPLDEGCTCYTCRHYSRAYLHHLDKTREILGSRLNTLHNLHYYQTLMEQLRQAIEQNRLEAFVAEFYAARAQDPLPVP

SEQ ID NO: 58114 - protein, 371 aa, Nitrosococcus watsoni
  misc_feature (1)..(371): tr|D8K803|D8K803_NITWC Queuine tRNA-ribosyltransferase OS=Nitrosococcus watsoni (strain C-113) OX=105559 GN=tg t PE=3 SV=1
MEFEVLAQAGMARRGRLRFPRGSVETPAFMPVGTYGTVKAMTPEELRTGGAEIVLGNTFHLMLRPGTQVIAKHGGLHGFMHWDGPILTDSGGFQVWSLGAMRKITERGVNFRSPVDGRLIFLGPEESIAVQRELGADIVMVFDDCTPHPVSEKVARRSMELSLRWATRSRDAHGDSPAALFGIIQGGMYEHLRAESLQELLTIGFEGYAVGGLSVGEPKEDRERILTAIVPPMPTDKPRYLMGVGRPEDIVEAVRRGMDMFDCVMPTRNARNGHLFVREGVIRIRNSTYRKDTRPLDESCTCYTCRHYSRAYLHHLDKSREILGARLNTIHNLHYYQALMEQLRQAIEQDGLERFSAEFYAARVQDRLSVS

SEQ ID NO: 58115 - protein, 369 aa, Nitrosomonadaceae bacterium
  misc_feature (1)..(369): tr|A0A2E6URY7|A0A2E6URY7_9PROT Queuine tRNA-ribosyltran sferase OS=Nitrosomonadaceae bacterium OX=2026767 GN=tg t PE=3 SV=1
MRFKVHANEGFARCGTLTSIHGKVETPAFMPVGTYGAVKAMSPRELQQINTHIVLGNTFHLWLQPGLEVIDAHGGLHKFIGWDGPILTDSGGFQVFSLGKIRKISEQGVKFQSPINGDKCFLTPEESMRIQRVLNSDIVMAFDECTPYPADEMMTKKSMELSLRWAERSRSAHDSDGGNPNALFGIVQGGMYENLRDLSLAELKDINFDGYAIGGLSVGEPKSDMRRILQHSVHQLPISKPRYLMGVGTPSDILNAVSQGVDMFDCVLPTRNARNGWLFTRNGIIKLRNSQYSRDMASPDERCGCYTCCNFTRSYLHHLQRINEILGSHLNTLHNLYYYQQLMSEIRTAIEAGQFGEYVQEFQANVASC

SEQ ID NO: 58116 - protein, 369 aa, Nitrosomonadaceae bacterium
  misc_feature (1)..(369): tr|A0A4P5UFF1|A0A4P5UFF1_9PROT Queuine tRNA-ribosyltran sferase OS=Nitrosomonadaceae bacterium OX=2026767 GN=tg t PE=3 SV=1
MKFQLHRSEGHARRGTLTLAHGVVETPAFMPVGTYGAVKTMSPEELHAVNAHIVLGNTFHLWLRPGLEVIAAHGGLHHFMGWNGPILTDSGGFQIFSLGDLRKISEEGVKFQSPVNGDKCFLTPEESMRIQRVLNSDIVMIFDECTPYPADERVSCISMEMSLRWAERSKRAHEDDGGNPNALFGIIQGGMHEDLRERSLAGLSDISFDGYAIGGLSVGEPKEDMQRILKHIAPQLPTDKPRYLMGVGTPADIVHAVAQGVDMFDCVLPTRNARNGWLFTRNGVIKLRNSKYRLDTASPDEQCGCYTCQNFSLAYLHHLQRINEILGARLNTLHNLYYYQQLMGDIRSAIEAGRFEEFKQEFQASAASC

SEQ ID NO: 58117 - protein, 369 aa, Nitrosomonadales bacterium
  misc_feature (1)..(369): tr|A0A524MPL6|A0A524MPL6_9PROT Queuine tRNA-ribosyltran sferase OS=Nitrosomonadales bacterium OX=2026761 GN=tgt PE=3 SV=1
MKFQVHSSDGLARRGTLTTAHGRVETPAFMPVGTYGAVKAMSPEELRETNAHIVLGNTFHLWLRPGLDVIDAHGGLHRFMGWDRPILTDSGGFQIFSLGRMRKITEEGVKFQSPVNGDAYFLTPEESMRIQRALNSDIVMIFDECTPYPADESIAKISMELSLRWAERSRRAHDNDGGNPNALFGIIQGGMYENLRDQSLAKLKDIGFDGYAIGGLSVGEPKGDMQRILKHSVQQLPVDKPRYLMGVGTPADILNAVSQGVDMFDCVLPTRNARNGWLFTRNGILKLRNNQYRTDISPPDEQCGCYTCRHFTRAYLHHLQRINEILGSRLNTLHNLHYYQQLMSEIRTAIETGRLEEYVQEFQANAASC

SEQ ID NO: 58118 - protein, 363 aa, Nitrosomonadales bacterium
  misc_feature (1)..(363): tr|A0A1E4GI46|A0A1E4GI46_9PROT Queuine tRNA-ribosyltran sferase OS=Nitrosomonadales bacterium SCN 54-20 OX=1660 164 GN=tgt PE=3 SV=1
MKFQLYRTDGLARRGTLSLAHGVVETPAFMPVGTYGAVKAMAPSDLQAINAHIVLGNTFHLWLRPGLEVIEAHGGLHRFMGWDGPILTDSGGFQVFSLGVLRKITEEGVKFKSPVNGDTCFLTPEESMRIQHVLNSDIVMIFDECTPYPADERAAGASMELSMRWAKRSRQAHDEGGNRNALFGIVQGGMYENLRDESLAGLLDIGFDGYAIGGLSVGEPKAEMRRILSHTAPRLPAEKPRYLMGVGTPADIVEAVAQGIDMFDCVLPTRNARNGWLYTRTGVIKLRNSQYRLDTRPADEQCTCYTCRHFSRAYLHHLQRTGEILGARLNTLHNLYYYQQLMGEIRTAIENGQFQEYARAFQA

SEQ ID NO: 58119 - protein, 364 aa, Nitrosomonas aestuarii
  misc_feature (1)..(364): tr|A0A1I4C4C3|A0A1I4C4C3_9PROT Queuine tRNA-ribosyltran sferase OS=Nitrosomonas aestuarii OX=52441 GN=tgt PE=3 SV=1
MKFEIQNTDHAARRGTLTLAHGRVETPAFMPVGTYGAVKGMSPAMLQSVHAQIILGNTFHLWLRPGLDVIEAHGGLHGFMNWQGPILTDSGGFQVYSLGDLRKITEEGVKFSSPVNGDRCFLTPEESMRIQRILNSDIVMIFDECTPYPADEATTKSSMQLSLRWAERSRQAHGDNSNALFGIVQGGMYESVRDQSLAGLMAIGFDGYAIGGLSVGEPKAEMRRILEHTAPLLPVDKPRYLMGVGTPVDLVHAVAQGIDMFDCVLPTRNARNGWLYTRQGVLKLRNSRYRLDTTAPDAHCACYTCRNFTRAYLHHLQRINEMLGAQLNTVHNLFYYQELMTEIRSAIEQNQLSQFMQKFTREFQ

SEQ ID NO: 58120 - protein, 361 aa, Nitrosomonas communis
  misc_feature (1)..(361): tr|A0A0F7KCQ0|A0A0F7KCQ0_9PROT Queuine tRNA-ribosyltran sferase OS=Nitrosomonas communis OX=44574 GN=tgt PE=3 S V=1
MKFELHHIDNKARRGTLTLAHGKVETPAFMPVGTYGAVKTVSPSELQEINAKIILGNTFHLWLRPGLDVIETHGGLHRFMGWNGPILTDSGGFQVFSLGKLRKINEKGVAFRSPVNGDMCFLTPEESMRIQRILNSDIVMIFDECTPYPVDIPIAKTSMELSLRWAERSKRAHDGNSNALFGIVQGGMHENLRDQSLAGLQQIGFDGYAIGGLSVGEPKADMQRILTYVAPQLPPDKPRYLMGVGTPADIVHAVAQGIDMFDCVLPTRNARNGWLYTRNGIIKLRNSRYRLDTSSPDEQCPCYTCRHFTRAYLHHLQRTNEILGARLNTLHNLYYYQQLMSDIRTAIELGQFEQYEREFQA

SEQ ID NO: 58121 - protein, 361 aa, Nitrosomonas communis
  misc_feature (1)..(361): tr|A0A1I4UQ24|A0A1I4UQ24_9PROT Queuine tRNA-ribosyltran sferase OS=Nitrosomonas communis OX=44574 GN=tgt PE=3 S V=1
MKFKLHNVDNSARRGILTFPHGKVETPAFMPVGTYGAVKTVSPTELQEINAKIILGNTFHLWLRPGLDVIETHGGLHRFMGWNGPILTDSGGFQVFSLGKLRKINEKGVAFRSPVNGDMCFLTPEESMRIQRILNSDVVMIFDECTPYPVDIPIAKASMELSLRWAERSKRAHDGNPNALFGIVQGGMHENLRDQSLADLQKIGFDGYAIGGLSVGEPKADMQRILTHVAPQLPPDKPRYLMGVGTPADIVHAVAQGIDMFDCVLPTRNARNGWLYTRNGIIKLRNSRYRLDTSSPDEQCPCYTCRHFTRAYLHHLQRTNEILGARLNTLHNLYYYQQLMSEIRNAIELGQFEQYQREFQA

SEQ ID NO: 58122 - protein, 361 aa, Nitrosomonas cryotolerans
  misc_feature (1)..(361): tr|A0A1N6I4P6|A0A1N6I4P6_9PROT Queuine tRNA-ribosyltran sferase OS=Nitrosomonas cryotolerans ATCC 49181 OX=1131 553 GN=tgt PE=3 SV=1
MRFQLHCTDHAARRGTLTLAHGEVETPAFMPVGTYGAVKTMPPAALQEVHAQIVLGNTFHLWLRPGLEVIEAHGGLHDFMGWNKPILTDSGGFQVFSLGALRNITEEGVKFKSPVNGDSCFLTPEESMRIQRTLNSDIVMIFDECTPYPANEATASTSMELSLRWAERSKRAHENNPNALFGIVQGGMFENLRDQSFAALYDIGFDGYAIGGLSVGEPKADMQRILKHIAPQLPIETPRYLMGVGTPADIVNAVAQGIDMFDCVIPTRNARNGWLYTRQGVIKLRNSQYRLDTAPPDEHCHCYTCRHFSRAYLHHLQRINEILGAHLNTLHNLFYYQQLMSEIRTAIEVGQFEEYAREFQA

SEQ ID NO: 58123 - protein, 371 aa, Nitrosomonas europaea
  misc_feature (1)..(371): sp|Q82VF0|TGT_NITEU Queuine tRNA-ribosyltransferase OS= Nitrosomonas europaea (strain ATCC 19718 / CIP 103999 / KCTC 2705 / NBRC 14298) OX=228410 GN=tgt PE=3 SV=1
MKFQLHCRDHEARRGTLTLAHGTVETPAFMPVGTYGAVKGLSPDELHTLGAGIILGNTFHLWLRPGLEVIGAHGGLHRLMNWDGPILTDSGGFQVFSLGALRKICEEGVRFRSPVNGDTCFLTPEESMRIQQVLNSDIVMIFDECTPYPVDMQIAESSMQLSLRWAERSKTAHAGNPNALFGIVQGGMYESLRDHSAAGLCAIGFDGYAIGGLSVGEPKADMQRILRHTAPQLPADKPRYLMGVGTPEDIVHAVAQGIDLFDCVLPTRNARNGWLYTSQGILRLRNSRYRLDTSPPDEHCDCYTCRHFTRAYLHHLQRTGEMLGARLNSLHNLHYYQRLMANIRKAIETGQFEQFARKFSGQDFMLKCASV

SEQ ID NO: 58124 - protein, 371 aa, Nitrosomonas europaea; identical to SEQ ID NO: 58123
  misc_feature (1)..(371): tr|A0A1I0C5R0|A0A1I0C5R0_NITER Queuine tRNA-ribosyltran sferase OS=Nitrosomonas europaea OX=915 GN=tgt PE=3 SV= 1

SEQ ID NO: 58125 - protein, 361 aa, Nitrosomonas eutropha
  misc_feature (1)..(361): sp|Q0AG55|TGT_NITEC Queuine tRNA-ribosyltransferase OS= Nitrosomonas eutropha (strain DSM 101675 / C91) OX=3352 83 GN=tgt PE=3 SV=1
MKFQLHCHDHHARRGTLTLAHGMIETPAFMPVGTYGAVKGLSPDELQTLGAEIILGNTFHLWLRPGLEVIEAHGGLHRFMHWDGPILTDSGGFQVFSLGALRKISEEGVRFRSPVNGDTCFLTPEESMRIQRVLNSDIVMIFDECTPYPVDMQIAEDSMQLSLRWAERSKAAHAGNPNALFGIVQGGMYESLRDRSIAGLYNIGFDGYAIGGLSVGEPKLEMQRILSHTAPQLPVDKPRYLMGVGTPEDIVRAVEQGIDMFDCVLPTRNARNGWLYTSQGVLKLRNSRYRLDTSPPDENCDCYTCRHFTRAYLHHLQRTGEMLGARLNSLHNLHYYQRLMSDIRKAIEAGQFEQFACRFSG

SEQ ID NO: 58126 - protein, 361 aa, Nitrosomonas eutropha; identical to SEQ ID NO: 58125
  misc_feature (1)..(361): tr|A0A1G4V450|A0A1G4V450_9PROT Queuine tRNA-ribosyltran sferase OS=Nitrosomonas eutropha OX=916 GN=tgt PE=3 SV= 1

SEQ ID NO: 58127 - protein, 361 aa, Nitrosomonas halophila
  misc_feature (1)..(361): tr|A0A1H3GFA7|A0A1H3GFA7_9PROT Queuine tRNA-ribosyltran sferase OS=Nitrosomonas halophila OX=44576 GN=tgt PE=3 SV=1
MNFQLHCSDRQARRGTLTLAHGVVETPAFMPVGTYGAVKGLSPEDLQTLGADIILSNTFHLWLRPGLEVIEAHGGLHRFMGWDGPILTDSGGFQVFSLGALRKISEQGVHFRSPVNGDACFLTPEESMRIQRVLNSDVVMIFDECTPYPVDIQTAEQSMQLSLRWAERSRAAHAGNHNALFGIVQGGMYESLRDRSVAALCDIGFDGYAIGGLSVGEPKQDMQRILTHTAPQLPVDQPRYLMGVGTPADIVYAVSQGIDLFDCVLPTRNARNGWLYTRHGILKLRNSRYRLDTAPPDAQCACYTCRHFSRAYLHHLQRTNEMLGARLNSLHNLHYYQQLMADIRQAIETGRFEQLVQEFSV

SEQ ID NO: 58128 - protein, 364 aa, Nitrosomonas marina
  misc_feature (1)..(364): tr|A0A1I0DDI6|A0A1I0DDI6_9PROT Queuine tRNA-ribosyltran sferase OS=Nitrosomonas marina OX=917 GN=tgt PE=3 SV=1
MNFNLKGTDQAARRGTLTLAHGQVETPAFMPVGTYGAVKGMSPEMLQNIHAQIILGNTFHLWLRPGLEVIAAHGGLHGFMHWNGPILTDSGGFQVYSLGDLRKITEQGVKFSSPVNGDRCFLTPEESMRIQRILNSDIVMIFDECTPYPADEAATKDSMELSLRWAERSRRAHEGNTNALFGIVQGGMYESLRDLSLAGLVSIGFDGYAIGGLSVGEPKADMRRILEHTAPLLPVDKPRYLMGVGTPADIVHAVAQGIDMFDCVLPTRNARNGWLYTRNGIIKLRNSRYRLDTAPPDDQCACYTCRNFTRAYLHHLQRINEMLGAHLNTVHNLFYYQHLMTEIRAAIEQKQFGELVEKFAREFQ

SEQ ID NO: 58129 - protein, 364 aa, Nitrosomonas marina
  misc_feature (1)..(364): tr|A0A1H8GMG4|A0A1H8GMG4_9PROT Queuine tRNA-ribosyltran sferase OS=Nitrosomonas marina OX=917 GN=tgt PE=3 SV=1
MKFNLKGTDQAARRGTLTLAHGQVETPAFMPVGTYGAVKGISPEMLQNIHAQIILGNTFHLWLRPGLEVIAAHGGLHGFMHWNGPILTDSGGFQVYSLGDLRKITEQGVKFSSPVNGDRCFLTPEESMRIQRILNSDIVMIFDECTPYPADETATKDSMELSLRWAERSRRAHEGNTNALFGIVQGGMYESLRDRSLAGLVSIGFDGYAVGGLSVGEPKADMRRILEHTAPLLPADKPRYLMGVGTPADIVHAVAQGIDMFDCVLPTRNARNGWLYTRNGIIKLRNSRYRLDTAPPDDQCACYTCRNFTRAYLHHLQRINEMLGAHLNTVHNLFYYQHLMTEIRTAIEQAQFGEFVEKFAREFQ

SEQ ID NO: 58130 - protein, 362 aa, Nitrosomonas mobilis
  misc_feature (1)..(362): tr|A0A1G5SE54|A0A1G5SE54_9PROT Queuine tRNA-ribosyltran sferase OS=Nitrosomonas mobilis OX=51642 GN=tgt PE=3 SV =1
MNFQLHYREQRARRGTLTLAHGKVETPAFMPVGTYGAVKGLSPAELVTLHAEIILGNTFHLWLRPGLEVIEAHGGLHGLMGWQGPILTDSGGFQVFSLGDLRKISEAGVHFRSPVNGDACFLTPELSMQIQRTLNADVVMIFDECTPYPVDLPIAETSMQLSLRWAERSKTAHAGNPNALFGIVQGGMFESLRDQSVQGLRDIDFDGYAIGGLSVGEPKEDMTRILTHTALQLPDDKPRYLMGVGTPADIVHAVAQGVDMFDCVLPTRNARNGWLYTSHGVLKLRNSQYRLDTSPPDETCGCYTCQHFTRAYLHHLQRTNEMLGARLNSLHNLHYYQHLMATIRQSIETGNFTTLSQQFLSV

SEQ ID NO: 58131 - protein, 367 aa, Nitrosomonas nitrosa
  misc_feature (1)..(367): tr|A0A3D0FDH6|A0A3D0FDH6_9PROT Queuine tRNA-ribosyltran sferase OS=Nitrosomonas nitrosa OX=52442 GN=tgt PE=3 SV =1
MRFELHQVDGGARRATLTLAHGTVETPAFMPVGTYGAVKTLSPAELREIHADIILSNTFHLWLRPGLDVIEAHGGLHRFMGWNGPILTDSGGFQVFSLGKLRKIDEHGVVFRSPVNGDKCLLTPEESMRIQKTLGSDIVMIFDECTPYPADISIAKASMELSLRWAERSRRAHEANSNALFGIVQGGMHEHLRDQSLAGLQQIGFDGYAIGGLSVGEPKQDMQRILKHTAPQLPSDKPRYLMGVGTPQDIVFAISHGIDMFDCVMPTRNARNGMLFTSQGIINIRNEKWRDDLTPIDPELGGYVSTVYSKAYLRHLIINKEILGAQIASIHNLTFYLWLVQTARTKIIEGDFYQWKNQMIKSVKQRL

SEQ ID NO: 58132 - protein, 372 aa, Nitrosomonas nitrosa
  misc_feature (1)..(372): tr|A0A1I4KS27|A0A1I4KS27_9PROT Queuine tRNA-ribosyltran sferase OS=Nitrosomonas nitrosa OX=52442 GN=tgt PE=3 SV =1
MRFELHQVDGDARRATLTLAHGTVETPAFMPVGTYGAVKTLSPAELREIHADIILSNTFHLWLRPGLDVIEAHGGLHRFMGWNGPILTDSGGFQVFSLGKLRKIDEHGVVFRSPVNGDKCLLTPEESMRIQKTLGSDIVMIFDECTPYPVDISIAKASMELSLRWAERSRRAHEANSNALFGIVQGGMHEYLRDQSLAGLQQIGFDGYAIGGLSVGEPKQDMQRILKHTAPQLPSDKPRYLMGVGTPQDIVFAISHGIDMFDCVLPTRNARNGWLYTRAGIIKLRNSRYRLDTAPPDEQCACYTCRHFTRAYLHHLQRTNEILGARLNSLHNLHYYQQLMTEIRAAIESRQFERYKQEFFANSHNIKPDCDY

SEQ ID NO: 58133 - protein, 361 aa, Nitrosomonas oligotropha
  misc_feature (1)..(361): tr|A0A5C7VVA2|A0A5C7VVA2_9PROT Queuine tRNA-ribosyltran sferase OS=Nitrosomonas oligotropha OX=42354 GN=tgt PE= 3 SV=1
MKFQLHSTDKAARRGTLTLAHGTVETPVFMPVGTYGAVKSMPPAALQATNAQIILGNTFHLWLRPGLEVIEAHGGLHDFMGWRGPILTDSGGFQVYSLGDLRKITEQGVHFKSPVNGDNCFLSPEESMRIQRTLNSDIVMIFDECTPYPADESTTQLSMELSLRWAERSKQAHHGNPNALFGIVQGGMYEQLRDQSFAGLYRIGFDGYAIGGLSVGEPKADMQRILKHTAPLLPVDQPRYLMGVGTPADIVHAVAHGIDMFDCVLPTRNARNGWLYTRHGIIKLRNSRYRLDTSPPDEHCGCYTCQHFSRAYLHHLQRINEMLGAHLNTVHNLYYYQQLMQEIRSAIENQQFEEYAQEFLA

SEQ ID NO: 58134 - protein, 361 aa, Nitrosomonas oligotropha
  misc_feature (1)..(361): tr|A0A2T5H9Y8|A0A2T5H9Y8_9PROT Queuine tRNA-ribosyltran sferase OS=Nitrosomonas oligotropha OX=42354 GN=tgt PE= 3 SV=1
MKFQLHSSDKAARRGTLTLAHGTVETPVFMPVGTYGAVKGMPPAALQATHAQIILGNTFHLWLRPGLEVIEAHGGLHDFMGWRGPILTDSGGFQVYSLGDLRKITEQGVHFKSPVNGDNCFLSPEESMRIQRTLNSDIVMIFDECTPYPADESTTQLSMELSLRWAERSKQAHHGNPNALFGIVQGGMHEHLRDQSFAGLYRIGFDGYAIGGLSVGEPKTDMQRILKHTAPLLPADKPRYLMGVGTPADIVHAVAHGIDMFDCVLPTRNARNGWLYTRHGIIKLRNSRYRLDTSPPDEQCGCYTCQHFSRAYLHHLQRINEMLGAHLNTLHNLYYYQQLMQEIRSAIENQQFEEYAQEFLA

SEQ ID NO: 58135 - protein, 361 aa, Nitrosomonas sp.
  misc_feature (1)..(361): tr|A0A2P7NUR8|A0A2P7NUR8_9PROT Queuine tRNA-ribosyltran sferase OS=Nitrosomonas sp. APG5 OX=2116706 GN=tgt PE=3 SV=1
MKFQLHSTDKAARRGTLALAHGIVETPVFMPVGTYGAVKSMSPAALQATHAQIILGNTFHLWLRPGLEVIEAHGGLHDFIGWHGPVLTDSGGFQVYSLGKLRKITEQGVHFKSPVNGDECFLSPEESMRIQRTLNSDIVMIFDECTPYPADETAARLSMELSLRWAERSKQAHNRNSNALFGIVQGGMYEHLREHSFAGLNQIGFDGYAIGGLSVGEPKADMQRILKHTTPLLPPDRPRYLMGVGTPADIVHAVAQGIDMFDCVLPTRNARNGWMYTRHGIIKLRNSRYRLDTLPPDEHCECYTCQNFSRSYLHHLQRINEMLGAHLNTVHNIYYYQQLMSEIRSAIENQQFEEYAQEFQA

SEQ ID NO: 58136 - protein, 361 aa, Nitrosomonas sp.
  misc_feature (1)..(361): tr|A0A1G8H082|A0A1G8H082_9PROT Queuine tRNA-ribosyltran sferase OS=Nitrosomonas sp. Nm132 OX=1881053 GN=tgt PE= 3 SV=1
MKFELHHIDSGARRGTLTLTHGKVETPAFMPVGTYGAVKTVSPAELQEINAKIILGNTFHLWLRPGLDVIETHGGLHRFMGWNGPILTDSGGFQVFSLGKLRKINEQGVAFRSPVNGDKCFLTPEESMRIQRALNSDIVMIFDECTPYPVDILTAKTSMELSLRWAERSKRAHDGNPNALFGIVQGGMHENLRDLSLAGLQHIGFDGYAVGGLSVGEPKQDMQRILNHIVPQLPPDKPRYLMGVGTPADIIHAVAQGIDMFDCVLPTRNARNGWLYTRNGIIKLRNSRYRLDTSPPDDQCLCYTCRHFTRAYLHHLQRINEILGARLNTLHNLYYYQQLMTEIRTAIESGQFERYAREFQA

SEQ ID NO: 58137 - protein, 361 aa, Nitrosomonas stercoris
  misc_feature (1)..(361): tr|A0A4Y1YSE0|A0A4Y1YSE0_9PROT Queuine tRNA-ribosyltran sferase OS=Nitrosomonas stercoris OX=1444684 GN=tgt PE= 3 SV=1
MKFKLHCQDHQARRGTLTLAHGTVETPAFMPVGTYGAVKGLSPETLQSLGAEIVLGNTFHLWLRPGLAVIEAHGGLHQFMHWNGPILTDSGGFQVFSLGELRKISEEGVRFRSPINGDACFLTPEISMHIQRVLNADIVMIFDECTPYPVDIHTAETSMQLSLRWAERSKAAHADNPNALFGIVQGSMYETLRDRSVAGLCDIDFDGYAIGGLSVGEPKADMQRILSHTAPQLPTDKPRYLMGVGTPEDIVHAVAQGIDMFDCVLPTRNARNGWLYTSEGIVKLRNSRYQLDTSPPDKNCDCYTCRHFTRAYLHHLQRTGEMLGAQLNSLHNLHYYQQLMANIRQAIETSQFEEFAYQFFN

SEQ ID NO: 58138 - protein, 361 aa, Nitrosomonas ureae
  misc_feature (1)..(361): tr|A0A1H5VZ60|A0A1H5VZ60_9PROT Queuine tRNA-ribosyltran sferase OS=Nitrosomonas ureae OX=44577 GN=tgt PE=3 SV=1
MKFQLHSTDKAARRGTLTLAHGTVETPVFMPVGTYGAVKSMSPAALRAVHAQIVLGNTFHLWLRPGLEVIEVHHGLHDFIDWHNPILTDSGGFQVYSLGKLRKITEQGVHFKSPVNGDNCFLSPEESMRIQRILNSDIVMIFDECTPYPADEATAKLSMELSLRWAERSKQAHGENPNALFGIVQGGMYEHLRTHSFAGLNQIGFDGYAIGGLSVGEPKVDMQRILKHTAPLLPTDKPRYLMGVGTPADIVHAVAQGVDMFDCVLPTRNARNGWLYTRNGIIKLRNSRYRLDTSPPDEHCGCYTCQNFSRAYLHHLQRINEMLGAHLNTVHNLFYYHNLMSEIRGAIENRRFEEYAQEFQA

SEQ ID NO: 58139 - protein, 361 aa, Nitrosomonas ureae
  misc_feature (1)..(361): tr|A0A0S3AJ78|A0A0S3AJ78_9PROT Queuine tRNA-ribosyltran sferase OS=Nitrosomonas ureae OX=44577 GN=tgt PE=3 SV=1
MKFQLHSTDKAARRGTLTLAHGTVETPVFMPVGTYGAVKSMSPAALRAVHAQIVLGNTFHLWLRPGLEVIEVHHGLHDFIDWHNPILTDSGGFQVYSLGKLRKITEQGVHFKSPVNGDNCFLSPEESMRIQRILNSDIVMIFDECTPYPADEATAKLSMELSLRWAERSKQAHGENPNALFGIVQGGMYEHLRTHSFAGLNQIGFDGYAIGGLSVGEPKVDMQRILRHTAPLLPTDKPRYLMGVGTPADIVHAVAQGVDMFDCVLPTRNARNGWLYTRNGIIKLRNSRYRLDTLPPDEHCGCYTCLNFSRAYLHHLQRINEMLGAHLNTVHNLFYYHNLMSEIRSAIENRRFEEYAQEFQA

SEQ ID NO: 58140 - protein, 368 aa, Nitrosospira briensis
  misc_feature (1)..(368): tr|A0A1I5C429|A0A1I5C429_9PROT Queuine tRNA-ribosyltran sferase OS=Nitrosospira briensis OX=35799 GN=tgt PE=3 S V=1
MKFKLHCSDGPARRGTLSLTHGTVETPAFMPVGTYGAVKTMSPAELREVNAHMVLGNTFHLWLRPGLEVVEAHGGLHRFMGWDAPILTDSGGFQVFSLGVMRKITEEGVRFKSPVNGDVCFLTPEESMRIQHVLDSDIVMIFDECTPYPADEPAASASMELSLRWAERSRRAHGDAGNHNALFGIVQGGMYENLRDQSLSRLLDIGFDGYAIGGLSVGEPKDDMQRILKHAAPQLPAEKPRYLMGVGTPADIVNAVSQGIDMFDCVLPTRNARNGWLYTRNGIIKLRNSQYRLDTAPPDEQCGCYTCRHFTRAYLHHLQRTSEILGARLNTLHNLHYYQQLMGEIRAAIEAGRFEEYVHAFQARAASC

SEQ ID NO: 58141 - protein, 369 aa, Nitrosospira lacus
  misc_feature (1)..(369): tr|A0A1W6SKS1|A0A1W6SKS1_9PROT Queuine tRNA-ribosyltran sferase OS=Nitrosospira lacus OX=1288494 GN=tgt PE=3 SV =1
MRFQLHRSDGLARRATLTLMHGVVETPAFMPVGTYGAVKTMSPAELREVNAHIVLGNTFHLWLRPGLDVIEAHGGLHGFMGWNGPILTDSGGFQVFSLGVLNKITEQGVKFRSPVNGDTCFLTPEESMRIQRILNSDIAMIFDECTPYPADEPRAGKSMELSLRWAERSKRAHDNDGGNPNALFGIVQGGMYENLRDKSLMELRDIGFDGYAIGGLSVGEPKDDMQRILRHVAPRLPAERPRYLMGVGTPADIVNAVAQGVDMFDCVLPTRNARNGWLFTRNGIIKLRNSRYRLDTAPPDAQCGCYTCRHFTRAYLHHLQRINEILGARLNTLHNLYYYQQLMGEIRVAIEMGKFEDYAQEFQARAASC

SEQ ID NO: 58142 - protein, 367 aa, Nitrosospira multiformis
  misc_feature (1)..(367): sp|Q2Y6A3|TGT_NITMU Queuine tRNA-ribosyltransferase OS= Nitrosospira multiformis (strain ATCC 25196 / NCIMB 118 49 / C 71) OX=323848 GN=tgt PE=3 SV=1
MKFQLHRTDGLARRGTLSLTHGVVETPAFMPVGTYGAVKTMSPADLQVINAHIVLGNTFHLWLRPGLQVIEAHGGLHRFMGWDGPILTDSGGFQVFSLGVLRKITEQGVKFKSPVNGDTCFLTPEESMRIQYVLNSDIVMIFDECTPYPADERAVGESMELSLRWAERSRQAHDEGGNRNGLFGIVQGGMYEKLRDESLAGLLDIGFDGYAIGGLSVGEPKADMRRILRHTAPGLPAGKPRYLMGVGTPADIVDAVAQGMDMFDCVLPTRNARNGWLYTRTGVIKLRNSQYRLDTRPADEQCTCYTCRHFSRAYLHHLQRTGEILGARLNTLHNLYYYQQLMGEIRTAIENGQFQEYAQAFQAQTAS

SEQ ID NO: 58143 - protein, 367 aa, Nitrosospira multiformis
  misc_feature (1)..(367): tr|A0A1I7IS47|A0A1I7IS47_9PROT Queuine tRNA-ribosyltran sferase OS=Nitrosospira multiformis OX=1231 GN=tgt PE=3 SV=1
MKFQLHRIDGLARRGTLSLTHGVVETPAFMPVGTYGAVKTMSPSDLRAINAHIVLGNTFHLWLRPGLEVIEAHGGLRRFMGWDGPILTDSGGFQVFSLGVLRKITEQGVKFKSPVNGDTCFLTPEESMRIQHVLNSDIVMIFDECTPYPADERAVGESMELSMRWAKRSRQAHDEGGNRNALFGIVQGGMYENLRDESLAGLLDIGFDGYAIGGLSVGEPKADMRRILRHTAPRLPAEKPRYLMGVGTPADIVDAVAQGIDMFDCVLPTRNARNGWLYTRAGVIKLRNSQYRLDTRPADEQCTCYTCRHFSRAYLHHLQRTGEILGARLNTLHNLYYYQQLMGEIRTAIESGQFQEYAQAFQAQTAS

SEQ ID NO: 58144 - protein, 368 aa, Nitrosospira sp.
  misc_feature (1)..(368): tr|A0A2T5JV96|A0A2T5JV96_9PROT Queuine tRNA-ribosyltran sferase OS=Nitrosospira sp. Nsp2 OX=136548 GN=tgt PE=3 SV=1
MKFQLHCTDGVARRGTLSLTHGKVETPAFMPVGTYGAVKTMSPWELREINAHIVLGNTFHLWLRPGLEVIEAHGGLHRFMGWEGPILTDSGGFQVFSLGVLRKITEEGVKFQSPVNGDACFLTPEESMRIQRILNSDIVMIFDECTPYPADEPAAHKSMELSVRWAERSRRAHDDGQNSNALFGIVQGGMYETLRDHSLARLLDIGFDGYAIGGLSVGEPKDDMQRILRHVAPQLPAEKPRYLMGVGTPADIVNAVARGVDMFDCVLPTRNARNGWLFTRKGVIKLRNSRYRLDMAPPDEQCGCYTCRNFTLAYLHHLQRIGEILGARLNTLHNLYYYQQLMGEIRSAIENGKFEEYAQAFQANPPSC

SEQ ID NO: 58145 - protein, 368 aa, Nitrosospira sp.
  misc_feature (1)..(368): tr|A0A495EPC5|A0A495EPC5_9PROT Queuine tRNA-ribosyltran sferase OS=Nitrosospira sp. Nsp44 OX=1945879 GN=tgt PE= 3 SV=1
MRFELHRTDGLARRGTLTLAHGTVETPAFMPVGTYGAVKTMSPAELREINAHIVLGNTFHLWLRPGLEVIEAHGGLHRFMGWERPILTDSGGFQVFSLGVLRKITEEGVKFQSPVNGDTCFLTPEESMRIQRILNSDIVMIFDECTPYPADELAASKSMELSVRWAERSRRAHDDGQNPNALFGIVQGGMYEKLRDRSLAELLGIGFDGYAIGGLSVGEPKDDMQRILKHAAPQLPSEKPRYLMGVGTPADIVNAVAQGVDMFDCVLPTRNARNGWLFTRNGVIKLRNSRYRLDMAPPDEQCGCYTCRNFTLAYLHHLQRIGEILGARLNTVHNLYYYQQLLGQIRAAIENGKFEEYAQAFQADPASC

SEQ ID NO: 58146 - protein, 368 aa, Nitrosovibrio sp.
  misc_feature (1)..(368): tr|A0A497X8M9|A0A497X8M9_9PROT Queuine tRNA-ribosyltran sferase OS=Nitrosovibrio sp. Nv12 OX=2135773 GN=tgt PE= 3 SV=1
MKFQLHCTDGPARRGTLTLAHGGVETPAFMPVGTYGAVKTMSPAELQEVNAHIVLGNTFHLWLRPGLEVIEAHGGLHRFMGWDGPILTDSGGFQVFSLGVMRKIEEEGVRFKSPVNGDACFLTPEESMRIQRTLNSDIVMIFDECTPYPADEEATRESMELSVRWAERSRRAHNDMGNSNALFGIVQGGMHENLRDRSLSSLLDIGFDGYAIGGLSVGEPKADMQRILKHVAPQLPAERPRYLMGVGTPADIVNAVSQGIDMFDCVLPTRNARNGWLFTRNGIIKLRNSQYRLDTAPPDEQCGCYTCRHFTRAYLHHLQRIGEILGARLNTLHNLYYYQQLMSEIRSAIETGQFEEYAQAFQAHAASC

SEQ ID NO: 58147 - protein, 372 aa, Nitrosovibrio sp.
  misc_feature (1)..(372): tr|A0A1K1M9D4|A0A1K1M9D4_9PROT Queuine tRNA-ribosyltran sferase OS=Nitrosovibrio sp. Nv17 OX=1855339 GN=tgt PE= 3 SV=1
MPAVRFQLHRVDGLARRATLTLAHGAVETPAFMPVGTYGAVKGVSPAELAQAGARIVLGNTFHLWLRPGLETIAAHGGLHGFMGWQGPLLTDSGGFQVFSLGALRRISEEGVRFRSPVNGDACMLTPEESMRIQRVLGSDVAMVFDECTPYPADERAAGASMELSLRWAERSRRAHDDDGGNPNALFGIVQGGMHETLRERSLAGLQAIGFDGYAIGGLSVGEPKHDMRRILRHIAPRLPAAQPRYLMGVGTPADIVEAVAQGVDMFDCVLPTRNARNGWLYTRDGVIRLRNSRYRHDTAPPDRRCGCYTCRHFSRAYLHHLQRIDEMLGARLNTLHNLHYYQELMEEIRDAIAAGMFEAYAREFQARAAPC

SEQ ID NO: 58148 - protein, 372 aa, Nitrosovibrio tenuis
  misc_feature (1)..(372): tr|A0A1H7G8W4|A0A1H7G8W4_9PROT Queuine tRNA-ribosyltran sferase OS=Nitrosovibrio tenuis OX=1233 GN=tgt PE=3 SV= 1
MEFKLHRTDGVARRGTLTLAHGTVETPAFMPVGTYGAVKTMSPADLREVDAHIVLGNTFHLWLRPGLEVIEAHGGLHRFMAWEGPILTDSGGFQVFSLGILRKISEEGVKFRSPVNGDACFLTPEESMRIQRVLNSDIAMIFDECTPYPADEPAAEKSMELSMRWAERSKRAHHDENNPNALFGIVQGGMYENLRDRSLGGLLNIGFDGYAIGGLSVGEPKDDMQRILKHVAPQLPGDKPRYLMGVGTPADIVNAVAQGVDMFDCVLPTRNARNGWLFTRHGIIKLRNSQYRLDTASPDEQCPCYTCRHFTRAYLHHLQRTGEILGARLNTLHNLYYYQQLMGEIRSAIETGRFDAYAQAYAQEFQACAASC

SEQ ID NO: 58149 - protein, 369 aa, Nitrospina gracilis
  misc_feature (1)..(369): tr|M1YNQ8|M1YNQ8_NITG3 Queuine tRNA-ribosyltransferase OS=Nitrospina gracilis (strain 3/211) OX=1266370 GN=tgt PE=3 SV=1
MFEFEIQKKHMHSGARLGTITTSHGRIQTPAFMPVGTQATVKALSPEDLKNCGAEIILGNTYHLYLRPGHKLIEQLGGLHRFMNWDRPILTDSGGYQVFSLNDLARVTEDGVTFRSHLDGSRHLLSPELAIEIQQSLGADIIMTFDEPTPPDADEAQTLQSLELSTRWARRCQEAHTRKGQTLFGIVQGGMFKNLRNESARQIIDLGFKGYAIGGLSVGEEKALMLELAEHTAPLLPENAPRYLMGVGTPDDLIDCVKMGIDMFDCVLPTRNARNGTIYTSEGKLNIRNARHRDSDRPLDPECTCYTCKHYSRAYLRHLYMADEIFAMRLNSLHNTAFFQKWMADIRRAIAEDRPLDWRLPESGENNGG

SEQ ID NO: 58150 - protein, 288 aa, Nitrospina sp.
  misc_feature (1)..(288): tr|A0A3D2UXJ5|A0A3D2UXJ5_9BACT Queuine tRNA-ribosyltran sferase (Fragment) OS=Nitrospina sp. OX=2024844 GN=DHW1 7_05835 PE=3 SV=1
MISFEVIKTHSHSSARLGILTTPRGKIETPCFMPVGTQATVKALTPEDLESFGAQIILGNTYHLYLRPGHDLIRSLGGLHKFMNWPHPILTDSGGYQVFSLNELAKVTEEGVTFQSHFDGSSHFISPERSIEIQQALGADIIMAFDEPTPHTADISQTEKSLQLTTLWAQRCKQALHSDTQALFGIVQGGMYPDLRKKSAEQIMEIDFPGYAIGGLSVGEEKNLMYDITEYTAPLLPANKPRYLMGVGTPEDLLQCSSMGVDMFDCVMPTRNARNGSLFVKGGKINIR

SEQ ID NO: 58151 - protein, 366 aa, Nitrospina sp.
  misc_feature (1)..(366): tr|A0A523MWN7|A0A523MWN7_9BACT Queuine tRNA-ribosyltran sferase OS=Nitrospina sp. OX=2024844 GN=tgt PE=3 SV=1
MFKFEVQHCHAHSSARLGSITTSHGTIDTPAFMPVGTQATVKALSPEDLVHCGAQIILGNTYHLYLRPGHEIIKKLGGLHRFMNWHRPILTDSGGFQVFSLSDLTKVTEEGVTFKSHLDGSTHLLSPEKSMEIQQALGADIIMAFDEPVAHDADHSKTARSLGLSTRWAKRCLESHATKSQALFGIVQGGMFKDLRQESAEQIVALDFPGFAIGGLSVGEEKSVMLEMAEHTTGFLPADRPRYLMGVGTPDDLLQCVKMGIDMFDCVMPSRNARNGSLFTSQGKMNIKNARYKMEDAPLDSECSCYTCKNYSRAYLRHLYTAEEILAMRLNTIHNIAFFQQWMQRIRTALAEDRPLDWEYPSQAEE

SEQ ID NO: 58152 - protein, 374 aa, Nitrospinae bacterium
  misc_feature (1)..(374): tr|A0A2H0MJK2|A0A2H0MJK2_9BACT Queuine tRNA-ribosyltran sferase OS=Nitrospinae bacterium CG11_big_fil_rev_8_21_ 14_0_20_56_8 OX=1974049 GN=tgt PE=3 SV=1
MFKFELIRSHSHSQARLGKIHTPHGTIDTPAFMPVGTQATVKALTPEDLLSCGVQVILGNTYHLYLRPGHEIIQNLGGLHRFMNWNGPILTDSGGFQIFSLNKLARVTEEGATFQSHLDGSSHFFTPEKAIEVQTSLGSDIIMPLDEPLAYPATWAEAEASLKLSTRWALRCREAHRSPSQALFGIVQGGMFKDLREQSAEQIVALDFPGYAIGGLSVGEDIELMREMARHTALLLPENKPRYLMGVGTPADLLAGSGMGIDMFDCVMPTRNARNGTLFTAKGKINIRNARFKTDPNPVDPNCDCYTCRNFSLAYLRHLFLADEILSMHLNTLHNIAFYQRWMKNIRDTIRADRPFDLAWTDDPAVTPGHPEFP

SEQ ID NO: 58153 - protein, 367 aa, Nitrospinae bacterium
  misc_feature (1)..(367): tr|A0A2H0CTH4|A0A2H0CTH4_9BACT Queuine tRNA-ribosyltran sferase OS=Nitrospinae bacterium CG22_combo_CG10-13_8_2 1_14_all_47_10 OX=1974050 GN=tgt PE=3 SV=1
MIKFEVLKKHSHSSARLGVLTTPHGKIDTPCFMPVGTQATVKALTPDDLESFGVQIILGNTYHLYLRPGHELIRSLGGLHKFMNWPRPMLTDSGGYQVFSLNELTKVTEEGVTFQSHLDGSSHFISPERSIEIQQALGADIIMAFDEPTPYPADISSTEKSLKLTTLWARRCKESLHSDTQALFGIVQGGMYPDLRKKSAEQIIEIGFPGYAIGGLSVGEEKNLMHDTTAYTAPLLPEYKPRYLMGVGTPEDLLQCSSSGVDMFDCVMPTRNARNGSLFVKGGKINIRNAQYKSDPGPIEPDCPCYTCANFSRAYLRHLAMAGEILAMRLLTLHNSTFYQKWMASIRKAIEEDIPFNLDWSNQTEPG

SEQ ID NO: 58154 - protein, 369 aa, Nitrospira bacterium
  misc_feature (1)..(369): tr|A0A0S8CDA1|A0A0S8CDA1_9BACT Queuine tRNA-ribosyltran sferase OS=Nitrospira bacterium SG8_3 OX=1704023 GN=tgt PE=3 SV=1
MTFSFEVVHKSQERSPRLGKIHTARGSVDTPVFIPVGTQATVKSLTPEDLSHLGVQIILANTYHLYLRPGHDVISALGGLHRFMHWEGPILTDSGGYQVFSLARLREVSEQGVTFQSHLDGSRHLLTPEKAVRIQEALGADIMMCLDECTAYPATHAEARRSLTLSIDWARRCKESLRTDHASLFGIVQGGMFQDLRAEGVKALMDIGFDGYALGGLSVGEPKEAMLDMAAFTLPLLPDELPRYVMGVGAPEDLVEMVSFGADMFDCVIPTRHARNGQLFSATGTLNICNARYRADERPVDATCPCYTCTHYSRAYLRHLFMAKELLAYRLNTIHNIHYFMTLMTEMREAIREGRFALFKKNFYAQRGS

SEQ ID NO: 58155 - protein, 396 aa, Nitrospira bacterium
  misc_feature (1)..(396): tr|A0A0S8D3P0|A0A0S8D3P0_9BACT Queuine tRNA-ribosyltran sferase OS=Nitrospira bacterium SG8_3 OX=1704023 GN=tgt PE=3 SV=1
MFSFEVIAKEGDARAGRLVTPRGVIQTPSFVSVGTLATVKAVTPEDLREIGSQVVITNAFHLHLRPGEDLISRMGGLHRFMHWEGPLITDSGGFQIFSLGAGKEHGVGKIAPIFPDENDRGGHYGLGKKPLVTVDEDGVQFISYLDGSIHRFTPEGVIGIGRKLDTDIILVLDECTSPLHDFQYTRRAMERTHRWAQRALEAFQRTSEGNQALWGIVQGGAYQDLRKESATFIVDIDFDGFAIGGSLGKSKNDMHRVLDWTVPYLPEHKPRHLLGIGKVEDIFEVVRRGIDLFDCVAPTRLAHTGTFFTKESEAFQMHILNAQFKDDPRPIEEGCNCGTCRNYSRAYLRHLFLARELLGMQLAAIHNLSFMESVMREIRAAIKEGTFDALSKAWKR

SEQ ID NO: 58156 - protein, 385 aa, Nitrospira defluvii
  misc_feature (1)..(385): tr|D8PI91|D8PI91_9BACT Queuine tRNA-ribosyltransferase OS=Nitrospira defluvii OX=330214 GN=tgt PE=3 SV=1
MLTFRITHEESGGRARVGVLTTARSEIATPAFMPVGSLGNVRSVDGEELLKMGYGLILNNAYHLYLRPGHKVVEELGGVHGFTAWPGAILTDSGGFQVFSLAKFCKISDEGVMFQSHIDGSSRFISPETSIEIQEALGADIIMAFDHVVALPSSLDQVREASKRTSLWARRCVSAKRRTDQSLFGIVQGGLDAGLRVESARDLVSVGFDGYAVGGLSVGEDKADMYGMLDVTVPELPSAKPRYLMGVGMPEDLVEGVARGIDMFDCVVPSRHGRTGWLFTSFGRVVIKQARYARDEQPIDPACRCPVCTRYTRAYLHHLFGVKEMLGARLNTIHNLWFFAKLMEEIRSAVRGGTFQEFRREFHRTYVVDRPADDGRSASQNTNGS

SEQ ID NO: 58157 - protein, 381 aa, Nitrospira japonica
  misc_feature (1)..(381): tr|A0A1W1HZW4|A0A1W1HZW4_9BACT Queuine tRNA-ribosyltran sferase OS=Nitrospira japonica OX=1325564 GN=tgt PE=3 S V=1
MEFTVKQTAGERHARLGVLTTAHGQIETPAFMPVGTLGPVKGIDPEELHQLGFRLFLNNAYHLYLRPGHKVISELGGLHRFAGWSGSILTDSGGFQIFSLAGLCRITDEGVTFRSHLDGSTHVITPESAIGIQEDLGADIIMAFDQCVALPADRDRVADAVRRTTLWAGRCQESRRRTDQALFGIVQGGLDPELRRKSARDIVALGFDGYAIGGLSVGETKEEMYRMLEICAPELPSVKPRYLMGVGMPENLIEGVARGVDLFDCVIPSRHGRTGWLFTESGRVSIKQARYTRDERPIDPNCACPVCRRYSRAYLHHLYNVKEMLASRLNTTHNLWYFSDFMRRLRGAIADGTFANFRDAFYRMRAEAPSEFVGTAETSGQ

SEQ ID NO: 58158 - protein, 388 aa, Nitrospira lenta
  misc_feature (1)..(388): tr|A0A330L7U5|A0A330L7U5_9BACT Queuine tRNA-ribosyltran sferase OS=Nitrospira lenta OX=1436998 GN=tgt PE=3 SV=1
MMQFTIRQQDRQTKGRLGQLRTARAVIDTPAFMPVGSLGPVKGLEPEDLHDLGFRLMLNNAYHLYLRPGHKVVAELGGLHAFTGWPGAILTDSGGFQIFSLAKLCKITDEGVTFQSHIDGSTHFITPETAIEIEEALGADIIMAFDQCVALPASRAAILEGVQRTTAWAKRCQASRRRNDQALFGIVQGGLEADLRRISAQELVALDFEGYAIGGLSVGESKADMYAMLDVTAPELPEAKPRYLMGVGLPEDLIEGVARGVDLFDCVVPSRHGRTGWLFTSFGRVSIKQAQYKQDERPIDPDCGCSVCKRYSRAYLHHLFNVKEMLGARLNTIHNLWYFADLMQRVRSSIERGTFLTMREEFYRARAEAERVGGATAVAAQEPRAGLD

SEQ ID NO: 58159 - protein, 381 aa, Nitrospira moscoviensis
  misc_feature (1)..(381): tr|A0A0K2GHD8|A0A0K2GHD8_NITMO Queuine tRNA-ribosyltran sferase OS=Nitrospira moscoviensis OX=42253 GN=tgt PE=3 SV=1
MQYQLRQRDRQTKARLGRLSTVRAVIETPAFMPVGSLGPVKGLEPDDLHALGFRLMLNNAYHLSLRPGHKVVAEFGGLHTFTGWPGAILTDSGGFQIFSLAKLRTVSDEGVTFQSHIDGSSHFISPETAIEIQEALGADIIMAFDECVALPADRAAVHEGVRRTTLWADRCQASRRRTDQALFGIVQGGLEPDLRVMSARQLVAMGFEGYAVGGLSVGESKTDMARMLEVTVPELPDDKPRYLMGVGLPEDLIEGVARGIDLFDCVVPSRHGRTGSLFTAAGRIVIKQAQYRRDERPIDAACACPVCKRFSRAYLHHLYNVKEMLGSRLNTMHNLWFFADLMQRVRGAIEQGTFAEFRDEFHRMRMAGEEADEHDQRAGTE

SEQ ID NO: 58160 - protein, 386 aa, Nitrospira sp.
  misc_feature (1)..(386): tr|A0A136JQN1|A0A136JQN1_9BACT Queuine tRNA-ribosyltran sferase OS=Nitrospira sp. OLB3 OX=1617410 GN=tgt PE=3 S V=1
MLSFRVTHEESTGCARVGVLSTGRGEIPTPAFMPVGSLGNVRTVDGDELLKMGYGLILNNAYHLYLRPGHKIVQELGGVHGFTAWPGAILTDSGGFQVFSLAKFCKVTDEGVTFQSHIDGSARFISPETAIEIQEALGADIIMAFDHVVALPSSPEQVRDAAVRSSLWAKRCADAKRRTDQSLFGIVQGGLDPGLRGRSARDLVSIGFDGYAVGGLSVGEAKVDMYAMLDVTVPELPSNKPRYLMGVGMPEDLVEGVARGIDLFDCVVPSRHGRTGWLFTSFGRVVIKQARYARDEQPIDPACRCPVCMRYTRAYLHHLFDVKEMLGARLNTIHNLWFFAQLMQDIRNALRNGTFQAFRQEFHRTYVVDRPGEDARPETSGADRLF

SEQ ID NO: 58161 - protein, 392 aa, Nitrospira sp.
  misc_feature (1)..(392): tr|A0A357ENQ4|A0A357ENQ4_9BACT Queuine tRNA-ribosyltran sferase OS=Nitrospira sp. OX=70125 GN=tgt PE=3 SV=1
MMQYHIHHPDPHSHGRIGELTTGHATIETPAFMPVGSLGPVKGLEPKDLQELGFGLMLNNAYHLYLRPGHKIVADMGGLHAFTGWAGAILTDSGGFQIFSLAKLCAITDDGVTFQSHIDGSTHVITPEKAIEIEEALGADIIMVLDQCVALPAGREVVQEGVRRTRLWAERCQAARRRTDQALFGIVQGGLEADVRVTSARDLVALGFEGYAIGGLSVGESKADMYKMLDVTVPELPESKPRYLMGVGLPEDLVEGVARGVDLFDCVVPSRHGRTGSLFTTSGRVVIKQAKYADDERPIDPDCGCPVCARYSRAYLHHLFMVKEMLGARLNTIHNLWYFSELMRGIRDAMREKRFPAFREAFYRHRDQSSPREDSGDGESNAHRECEHSHQT

SEQ ID NO: 58162 - protein, 383 aa, Nitrospiraceae bacterium
  misc_feature (1)..(383): tr|A0A353UDS6|A0A353UDS6_9BACT Queuine tRNA-ribosyltran sferase OS=Nitrospiraceae bacterium OX=2026770 GN=tgt P E=3 SV=1
MKFELLSKDGNARLGIISTRRGNINTPAFMPVGTQATVKAMSPEELKEIGAEIILSNTYHLYLRPGHETIASLGGLHKFMNWDKPILTDSGGFQVFSLSALRSISEKGVHFRSHLDGSMHFIGPDEAMEIQSDLGADICMAFDECTPYPASYEYAVKSLELTTKWAKRCKEWIQDARYRIQDKKSGIVHHESCIMNQSLFGIIQGGIYKDLRKRSLEELVEIDFDGYASGGLSVGEPKEEMHEIINFIAPLMPEDKPRYLMGIGDLNDMLAAVEAGFDMFDCVMPTRNARNGTLFTSTGRISIKRTEYKADSEPLDKECGCYTCRNFSKAYLRHLFLAKEILSMRLNTIHNLYFYVDFFRKMREAINKGQFKEFKDRWKMLLR

SEQ ID NO: 58163 - protein, 371 aa, Nitrospiraceae bacterium
  misc_feature (1)..(371): tr|A0A3C0V5S6|A0A3C0V5S6_9BACT Queuine tRNA-ribosyltran sferase OS=Nitrospiraceae bacterium OX=2026770 GN=tgt P E=3 SV=1
MKFSILNSDNKARRGVIETERGSIQTPAFMPVGTQGTVKAMSPEELKEMGAEIILSNTYHLYLRPGHEIIHRLGGLHKFINWERPILTDSGGFQVYSLSSLRKIREAGVEFRSHLDGSLHFLSPEKAMEIQAMLGSDIVMAFDECTPYPAEYEYAVKSLELTTKWARRCKEFSIQHSPVQSLFGIIQGGMYKDLRKRSLEDLMEIGFDGYAAGGLSVGEPKEEMHETIEFIGPLMPAEKPRYLMGVGDLSDVMTAVENGFDMFDCVMPTRNARNGTLFTSRGRISIKRTEFKADPAPLDPDCGCYTCRNYSRAYLRHLFLAKEILSMRLNTIHNLYFYLDFFGKMRDAINSGTFKQFKKYWEAVLQAGVIE

SEQ ID NO: 58164 - protein, 371 aa, Nitrospirae bacterium
  misc_feature (1)..(371): tr|A0A1G1HUH3|A0A1G1HUH3_9BACT Queuine tRNA-ribosyltran sferase OS=Nitrospirae bacterium RIFCSPLOW2_12_42_9 OX= 1801722 GN=tgt PE=3 SV=1
MKFNVLKEDSLTSARLGRLATTHGIVDTPAFMPVGTSGSVKGVTPEEVRHSGAQIILGNTFHLYLRPGSKLIASLGGLHKFTGWDGPILTDSGGYQVFSLAKLRKITGNGVIFQSPIDGSEHIFTPEMVIEIQETIGSDIIVCLDECIPFPATYEYTKESTDMTLQWAERSKKAIKRYDSGLFCVVQGGFFKDLREYCANELVNTGFDGYAIGGLSVGESKDMMYSVLDQTVPMLPADRPRYLMGVGLPENIIEGVIRGIDMFDCVVPTRHGRRGYLFTQSGHIIIKNAGYKDDESPVEDGCDCYTCSKYSRAYLRHLFMSGEILGLRLNTIHNLHYFGRLMNAIRGAIEEGRISQFRERFYSIRKEGDRC

SEQ ID NO: 58165 - protein, 380 aa, Nitrospirae bacterium
  misc_feature (1)..(380): tr|A0A3M1QG54|A0A3M1QG54_9BACT Queuine tRNA-ribosyltran sferase OS=Nitrospirae bacterium OX=2026887 GN=tgt PE=3 SV=1
MARPPRCIDFAQLAADPAGGRRCRFRTAHGWVETPGFMPVGSDGAVRTLTPAQVAGETGPHVVLANTFHLLLAPGPELVARHGGLHRFMGWRRAILTDSGGFQVFSLPGSEISDAGIRLPDPRKGREGRSVWLDPEESIRVQGLLGADIAMCLDECPGYPAPRERVAEAVARTTAWAERCLYAHDREGQLLFGIVQGGVHPELRARSVAEITRLGFDGYAIGGVSVGEGTERIHRVVAETAPQLPEDRPRYLMGVGPPEDILAAVAAGCDLFDCVIPTRFGRAGTLLTRGGKVRIGERRHRRDLRPVDAECRCYTCRTFSRAYLHHLFAVGEPLGATLASLHNLRFYQDLMAAIREAIEQRRFAAFRDRFLARYRHRRRG

SEQ ID NO: 58166 - protein, 392 aa, Nitrospirales bacterium
  misc_feature (1)..(392): tr|A0A524IIC7|A0A524IIC7_9BACT Queuine tRNA-ribosyltran sferase OS=Nitrospirales bacterium OX=2358460 GN=tgt PE =3 SV=1
MTFSDQQSLASSGVNRFQVHHTSASGARVGLLSTSHGHIDTPAFMPVGSQGTVKGLDPHEVRDCGFQMILANAYHLFLRPGHELIESQGGLHQFMQWPGGILTDSGGFQMVSLADLCKITEEGVRFRSHINGEWHMLSPEKSMGIQVALGSDIMMVLDHCPTFPCTKPQALEAMKRTTRWAKRCADVPKKAHQWMFGIVQGGVFPELRKEATQELVDLSMDGYALGGLSLGEEKPAMFEMIETVVGLLPADRPRYLMGVGLPEDRVEGVARGLDLFDCVIPTRHGRTGWLFTSTGRVLIKQARYKKDSNPIDADCECPVCQRFSRAYLRHLFISREMLGVRLNTVHNLWYYGQLMAELRAAVRENRFEDYRNDFYRRRELVPNEPLSQDAMN

SEQ ID NO: 58167 - protein, 420 aa, Nitrospirillum amazonense
  misc_feature (1)..(420): tr|A0A560FQC4|A0A560FQC4_9PROT Queuine tRNA-ribosyltran sferase OS=Nitrospirillum amazonense OX=28077 GN=tgt PE =3 SV=1
MSDLPTSYPGFSFEITHKAPDSRARLGRLTTPHGTISTPNFIFCGTKASIKGVTPAQMRAEKTDIILSNTYHLMIQPGADIVAKMGGLHRFMGWDGPMLTDSGGFQIFSMGHGSVADEIKGRRTQTRDTTLLKITEKGATFRSYMNGEKLFLSPELSIDIQRKLGADLIVQFDECTPFHVDRAYTAKSMALSHRWGDRSLKEFVKGGGMSYNGLPQALYGIIQGGVYEDLRKESATYTKDRPFFGTAVGGSLGANTAQMDEVVAMTMPHTHPDRPVHLLGIGGIRDIFAGVVQGIDTFDCVSPTRIARHGWALAPKAKGERLNMRNSRFREDPLPIDPACDCYACSNFSRAYIHHLLKAGELLAMQLLSIHNVATMNRLLRDVREAIATGTLAEARRRWVYDPQEQENGEGESAAQGGAA

SEQ ID NO: 58168 - protein, 420 aa, Nitrospirillum amazonense
  misc_feature (1)..(420): tr|A0A248JLA2|A0A248JLA2_9PROT Queuine tRNA-ribosyltran sferase OS=Nitrospirillum amazonense CBAmc OX=1441467 G N=tgt PE=3 SV=1
MSDLPTSYPGFSFEITHKAPDSRARLGRLTTPHGTISTPNFIFCGTKASIKGVTPAQMRAEKTDIILSNTYHLMIQPGADIVAKMGGLHRFMGWDGPMLTDSGGFQIFSMGHGSVADEIKGRRTQTRDTTLLKITEKGATFRSYMNGEKLFLSPELSIDIQRKLGADLIVQFDECTPFHVDRAYTAKSMALSHRWGDRSLKEFAKGGGMSYNGLPQALYGIIQGGVYEDLRKESATYTKDRPFFGTAVGGSLGANTAQMDEVVAMTMPYTHPDRPVHLLGIGGIRDIFAGVVQGIDTFDCVSPTRIARHGWALAPKAKGERLNMRNSRFREDPLPIDPACDCYACSNFSRAYIHHLLKAGELLAMQLLSIHNVATMNRLLRDVREAIATGTLAEARQRWVYDAQEQGNGEGEPAAQGGAA

SEQ ID NO: 58169 - protein, 405 aa, Niveispirillum cyanobacteriorum
  misc_feature (1)..(405): tr|A0A2K9NE40|A0A2K9NE40_9PROT Queuine tRNA-ribosyltran sferase OS=Niveispirillum cyanobacteriorum OX=1612173 G N=tgt PE=3 SV=1
MAISYPGFSFDITHRDPAGSKARIGTLSTPHGAIQTPNFIFCGTKAAIKGLTTEQMRDEKTDIILANTYHLMIQPGADLVAKLGGLHKMMNWHGPMLTDSGGYQIFAMGHGSVADEVKGRRTTTREKTLLKITEEGATFRSYTNGEKLFLTPEKSIDIQRKLGPDFVVQLDECTPFHVDRKYTARSMKMSHRWGDRSLTAFKEFGGISANGLPQAMYGIVQGGVYPDLRKESAEIVANQDFFATAVGGCLGATREQMHDVVGMAMAHVHPTRPVHLLGIGGIVDIFEGVALGIDTFDCVSPTRIARHGWALAPGVKGERLNMRNARFKDDDTPIDAECGCYACRTASRGYIHHLLKAEEMLGMQLLTMHNVHTMNRLMRDIRAAIITGTLAEARRKWVWQAGDSE

SEQ ID NO: 58170 - protein, 405 aa, Niveispirillum lacus
  misc_feature (1)..(405): tr|A0A255Z4S8|A0A255Z4S8_9PROT Queuine tRNA-ribosyltran sferase OS=Niveispirillum lacus OX=1981099 GN=tgt PE=3 SV=1
MAISYPGFSFDITHRDPAGSKARIGTLSTPHGSIQTPNFIFCGTKAAIKGLTTEQMREEKTDIILANTYHLMIQPGADLVAKLGGLHKMMNWHGPMLTDSGGYQIFAMGHGSVADEVKGRRTTTREKTLLKITEEGATFRSYTNGEKLFLTPEKSIDIQRKLGPDFVVQLDECTPFHVDRKYTARSMKMSHRWGDRSLTAFKEFGGISANGLPQAMYGIVQGGVYPDLRKESAEIVGSQDFFATAVGGCLGATREQMHEVVGMAMAHVHPTRPVHLLGIGGIVDIFEGVALGIDTFDCVSPTRIARHGWALAPGAKGERLNMRNARFKDDDTPIDPDCDCYACRTASRGYIHHLLKAEEMLGMQLLTLHNVHTMNRLMRDIRAAIITGTLAEARRKWVWQPGDSE

SEQ ID NO: 58171 - protein, 422 aa, Nocardia africana
  misc_feature (1)..(422): tr|A0A378WLH6|A0A378WLH6_9NOCA Queuine tRNA-ribosyltran sferase OS=Nocardia africana OX=134964 GN=tgt PE=3 SV=1
MSDPAQFSFTVGTSLPGAHGGGPPVRHGRTGVISTPHGQIATPAFIPVGTKATVKAVLPEAMAEIGAQALLANAYHLYLQPGSDIVDEAGGLSRFMNWPGPTFTDSGGFQVMSLGVGFKKVLAMEAVGVQSDEVIAKGKERLAVVDDDGVTFRSHLDGSSHRFTPEVSMGIQHRLGADIMFAFDELTTLFNTRGYQEKSLRRTHEWAQRCIDEHERLTAERAHRPYQALFAVIQGAQYEDLRRKACRDLDAMRGSGGTGFDGYGIGGALEKANLGTIVGWCCDELPPEKPRHLLGISEPEDFFVAIENGADTFDCVNPSRVARNAAIYVAAGRFNINTSRFRRDFTRIDDTCDCYTCAHYTRAYIHHLFKAKEMLAATLCTIHNERFTIRLVDDIRASIEGGYYDDFKAEFLGRWQGRIRFD

SEQ ID NO: 58172 - protein, 417 aa, Nocardia alba
  misc_feature (1)..(417): tr|A0A4R1G3S8|A0A4R1G3S8_9NOCA Queuine tRNA-ribosyltran sferase OS=Nocardia alba OX=225051 GN=tgt PE=3 SV=1
MADRSEFSFEVGTRLDGGRHGRTGVISTPHGEIATPAFIPVGTKASVKAVLPETMREIGAQALLANAYHLYLQPGADVVDEAGGLGKFMNWPGPTFTDSGGFQVMSLGVGFKKVLAMEAVDIRSDQVIAAGKERLATVDDDGVTFRSHLDGSKHRFTPEVSMGIQHELGADIMFAFDELTTLMNTRGYQEKSLQRTHEWAQRCIDEHERLTAVRGHRPYQALFAVIQGAQYEDLRRKACRELESIRGVGGTEFDGYGIGGALEKHNLGTTVGWCCDELPEAKPRHMLGISEPEDMFTAIENGADTFDCVNPSRVARNAAIYVDEGRFNINTARFRRDFTPIDEECDCYTCAHYTRAYLHHLFKAKEMLSATLCTIHNERFTIRLVDRIRGSIEGGYFDEFKKEFLGQWRGRIKVPGE

SEQ ID NO: 58173 - protein, 458 aa, Nocardia amikacinitolerans
  misc_feature (1)..(458): tr|A0A285LSI7|A0A285LSI7_9NOCA Queuine tRNA-ribosyltran sferase OS=Nocardia amikacinitolerans OX=756689 GN=tgt PE=3 SV=1
MAAGEQVGGNDHGRGRQWRWSSAGWRWQRTGGAGWVGAPERMRGVSAAESFSFSVGARLDGRHGRSGVIQTPHGAVATPAFIPVGTKATVKAVLPETMSELGAQALLANAYHLYLQPGADIVDEAGGLGAFMNWPGPTFTDSGGFQVMSLGVGFKKVLAMEAVDVRSDDVIAAGKERLATVDDDGVTFRSHLDGSTHRFTPEVSMGIQHQLGADIMFAFDELTTLLNTRAYQEKSLQRTHEWAQRCIDEHERLTAARTHRPYQALFAVIQGAQYEDLRRKACRELEAIRGIGGTGFDGYGIGGALEKHNLGAIVGWCCDELPQDKPRHMLGISEPEDIFVAVENGADTFDCVNPSRVARNAAIYVAEGRFNINTSRFRRDFTPIDETCDCYTCANYTRAYIHHLFKAKEMLAATLCTIHNERFTVRLVDRIRASIDDGTFDEFKAETLGRWKGRIRTP

SEQ ID NO: 58174 - protein, 417 aa, Nocardia asteroides
  misc_feature (1)..(417): tr|U5EEJ5|U5EEJ5_NOCAS Queuine tRNA-ribosyltransferase OS=Nocardia asteroides NBRC 15531 OX=1110697 GN=tgt PE= 3 SV=1
MADPSEFSFTVGTRLDGGRHGRTGVIGTPHGEIATPAFIPVGTKASVKAVLPETMKELGAQALLANAYHLYLQPGADIVDEAGGLGRFMNWSGPTFTDSGGFQVMSLGVGFKKVLAMEAVDIRSDEVIAEGKERLATVDDDGVTFRSHLDGSKHRFTPEVSMGIQHQLGADIVFAFDELTTLLNTRGYQEKSLQRTQDWAQRCIDEHEKLTGERGHRPYQALFAVIQGAQYEDLRRKACRDLEAVRGAGGTEFDGYGIGGALEKHNLGTIVGWCCDELPEHKPRHMLGISEPEDMFVAIENGADTFDCVNPSRVARNAAIYVDEGRFNINTSRFRRDFTPIDENCDCYTCAHYTRAYLHHLFKAKEMLSATLCTIHNERFTVRLVDRIRASIDGGYFDDFKAEFLGNWKGRLKAPGA

SEQ ID NO: 58175 - protein, 414 aa, Nocardia bhagyanarayanae
  misc_feature (1)..(414): tr|A0A543F6A3|A0A543F6A3_9NOCA Queuine tRNA-ribosyltran sferase OS=Nocardia bhagyanarayanae OX=1215925 GN=tgt P E=3 SV=1
MSAPESFSFTVGARLDGRHGRSGVIQTPHGAIATPAFIPVGTKATVKAVLPETMSELGAQALLANAYHLYLQPGADIVDEAGGLGAFMNWPGPTFTDSGGFQVMSLGVGFKKVLAMEAVDVRSDDVIAAGKERLATVDDDGVTFRSHLDGSKHRFTPEVSMGIQHQLGADIMFAFDELTTLLNTRAYQEKSLQRTHEWAQRCIDEHERLTAARTHRPYQALFAVIQGAQYEDLRRKACRELEAIRGAGGTGFDGYGIGGALEKHNLGAIVGWCCDELPQDKPRHMLGISEPEDIFVAVENGADTFDCVNPSRVARNAAIYVAEGRFNINTSRFRRDFTPIDETCDCYTCAHYTRAYLHHLFKAKEMLAATLCTIHNERFTVRLVDRIRASIDDGNFDEFKAETLGRWKGRIRTP

SEQ ID NO: 58176 - protein, 425 aa, Nocardia brasiliensis
  misc_feature (1)..(425): tr|A0A379A6A9|A0A379A6A9_9NOCA Queuine tRNA-ribosyltran sferase OS=Nocardia brasiliensis OX=37326 GN=tgt PE=3 S V=1
MREISTWEDIGVSDPGNFSFTVGNRLDGRHGRSGVISTPHGEIATPAFIPVGTKATVKAVLPETMREIGAQALLANAYHLYLQPGSDIVDEAGGLSKFMNWPGPTFTDSGGFQVMSLGVGFKKVLAMEAVDVRSDDVIAKGKERLATVDDDGVTFRSHLDGSKHRFTPEVSMGIQHELGADIMFAFDELTTLLNTRGYQEKSLQRTHEWAQRCIDEHERLTAARTHRPYQALFAVIQGAQYEDLRRKACRELEAIRGSGGTGFDGYGIGGALEKHNLGTIVGWCCDELPEDKPRHMLGISEPEDIFTAVENGADTFDCVNPSRVARNAAIYVAEGRFNINTSRFRRDFTPIDETCDCYTCANYTRAYLHHLFKAKEILAATLCTIHNERYTIRLVDRIRASIEGGYFDEHKAETLGRWKGRIATP

SEQ ID NO: 58177 - protein, 414 aa, Nocardia brasiliensis
  misc_feature (1)..(414): tr|K0EL46|K0EL46_9NOCA Queuine tRNA-ribosyltransferase OS=Nocardia brasiliensis ATCC 700358 OX=1133849 GN=tgt PE=3 SV=1
MSDPGNFSFTVGSRLDGRHGRSGVISTPHGEIATPAFIPVGTKATVKAVLPETMREIGAQALLANAYHLYLQPGSDIVDEAGGLSKFMNWPGPTFTDSGGFQVMSLGVGFKKVLAMEAVDVRSDDVIAKGKERLATVDDDGVTFRSHLDGSKHRFTPEVSMGIQHELGADIMFAFDELTTLLNTRGYQEKSLQRTHEWAQRCIDEHERLTAARTHRPYQALFAVIQGAQYEDLRRKACRELEAIRGSGGTGFDGYGIGGALEKHNLGTIVGWCCDELPEDKPRHMLGISEPEDIFTAVENGADTFDCVNPSRVARNAAIYVAEGRFNINTARFRRDFTPIDETCDCYTCANYTRAYLHHLFKAKEILAATLCTIHNERYTIRLVDRIRASIEGGYFDEHKAETLGRWKGRIATP

SEQ ID NO: 58178 - protein, 430 aa, Nocardia cerradoensis
  misc_feature (1)..(430): tr|A0A231HCS9|A0A231HCS9_9NOCA Queuine tRNA-ribosyltran sferase OS=Nocardia cerradoensis OX=85688 GN=tgt PE=3 S V=1
MSDPAQFSFTVGTSLPGRHGGGPPVGHGGGPPVRHGRTGVISTPHGQIATPAFIPVGTKATVKAVLPEAMAEIGAQALLANAYHLYLQPGSDIVDEAGGLGRFMNWPGPTFTDSGGFQVMSLGVGFKKVLAMEAVGVQSDEVIAKGKERLAVVDDDGVTFRSHLDGSSHRFTPEVSMGIQHRLGADIMFAFDELTTLFNTRGYQEKSLRRTHEWAQRCIDEHERLTAERAHRPYQALFAVIQGAQYEDLRRKACRDLDAMRGSGGTGFDGYGIGGALEKANLGTIVGWCCDELPPEKPRHLLGISEPEDFFVAIENGADTFDCVNPSRVARNAAIYVAAGRFNINTSRFRRDFTPIDDTCDCYTCAHYTRAYIHHLFKAKEMLAATLCTIHNERFTIRLVDDIRASIEGGYYDDFKAEFLGRWQGRIRFD

SEQ ID NO: 58179 - protein, 414 aa, Nocardia cyriacigeorgica
  misc_feature (1)..(414): tr|A0A4U8W3X0|A0A4U8W3X0_9NOCA Queuine tRNA-ribosyltran sferase OS=Nocardia cyriacigeorgica OX=135487 GN=tgt PE =3 SV=1
MSDRAAFSFTVGTRLDGQYGRTGVISTPHGDIATPAFIPVGTKATVKAVLPETMREIGAQALLANAYHLYLQPGADIVDEAGGLGRFMNWPGPTFTDSGGFQVMSLGVGFKKVLAMEAVDVRSDDVIAKGKERLATVDDDGVTFRSHLDGSKHRFTPEVSMGIQHQLGADIMFAFDELTTLLNTRAYQEKSLQRTHEWAQRCIDEHERLTHARAHRPYQALFAVIQGAQYEDLRRKACRELEAIRGQDGTEFDGYGIGGALEKHNLGTIVGWCSAELPEHKPRHMLGISEPEDVFTAVANGADTFDCVNPSRVARNAAIYVDAGRFNINTSRFRRDFTPIDENCDCYTCANYTRAYLHHLFKAKEMLAATLCTIHNERFTIRLVDRIRESIDGGYFEQFQAETLGRWKGRITAP

SEQ ID NO: 58180 - protein, 414 aa, Nocardia cyriacigeorgica
  misc_feature (1)..(414): tr|A0A2L2JN92|A0A2L2JN92_9NOCA Queuine tRNA-ribosyltran sferase OS=Nocardia cyriacigeorgica OX=135487 GN=tgt PE =3 SV=1
MSDRAAFSFTVGTRLDGQYGRTGVISTPHGDIATPAFIPVGTKATVKAVLPETMREIGAQALLANAYHLYLQPGADIVDEAGGLGRFMNWPGPTFTDSGGFQVMSLGVGFKKVLAMEAVDVRSDDVIAKGKERLATVDDDGVTFRSHLDGSKHRFTPEVSMGIQHQLGADIMFAFDELTTLLNTRAYQEKSLQRTHEWAQRCIDEHERLTHARAHRPYQALFAVIQGAQYEDLRRKACRELEAIRGQDGTEFDGYGIGGALEKHNLGTIVGWCSAELPEHKPRHMLGISEPEDVFTAVANGADTFDCVNPSRVARNAAIYVDAGRFNINTSRFRRDFTPIDENCDCYTCANYTRAYLHHLFKAKEMLAATLCTIHNESFTIRLVDRIRESIDGGYFEEFQAETLGRWKGRITAP

SEQ ID NO: 58181 - protein, 417 aa, Nocardia donostiensis
  misc_feature (1)..(417): tr|A0A1V2TAY7|A0A1V2TAY7_9NOCA Queuine tRNA-ribosyltran sferase OS=Nocardia donostiensis OX=1538463 GN=tgt PE=3 SV=1
MFCVSDRGKFSFTVGARLEGRHGRTGVLRTPHGDIATPAFIPVGTKATVKAVLPEAMRDLGAQALLANAYHLYLQPGPDIVDEAGGLGTFMNWPGPTFTDSGGFQVMSLGVGFKKVLAMETVDVRSDDVIAKGKERLATVDDDGVTFRSHLNGSKHRFTPEVSMGIQHQLGADIMFAFDELTTLMNTRGYQEKSLQRTHDWAQRCIDEHERLTEERVHRPYQALFAVVQGAQYEDLRRKASRELEEIRGKAGTEFDGYGIGGALEKHNLGTIVGWCSDELPESKPRHMLGISEPEDLFAAIEAGADTFDCVNPSRVGRNAGIYVDAGRFNIDTSRFRRDFTPIDETCDCYTCANYTRAYLHHLFKAKEMLAATLCTIHNERFTIRLVDRIRESIAGGYFDEFRDDTLGRWQGRITAP

SEQ ID NO: 58182 - protein, 416 aa, Nocardia farcinica
  misc_feature (1)..(416): tr|A0A0H5PDL9|A0A0H5PDL9_NOCFR Queuine tRNA-ribosyltran sferase OS=Nocardia farcinica OX=37329 GN=tgt PE=3 SV=1
MVAAETSSGFSFTVGTRLDGGRHGRTGVIRTPHGEIATPAFVPVGTKATVKAVLPETMRELGAQALLANAYHLYLQPGADIVDEAGGLGAFMNWPGPTFTDSGGFQVMSLGVGFKKVLAMESVGVANDDVIAAGKERLATVDDDGVTFRSHLDGSTHRFTPEVSMGIQHRLGADIMFAFDELTTLLNTRGYQEKSLQRTHEWAQRCIDEHERLTAARTHRPYQALFAVIQGAQYEDLRRKACRDLEAIRGAAGTAFDGYGIGGALEKHNLGTIVGWCSDELPEEKPRHMLGISEPEDLFVAVENGADTFDCVNPSRVARNAAIYRGDGRFNINTSRYRRDFTPIDEDCDCYTCANYTRAYLHHLFKAKEMLAATLCTIHNERFTVRLVDRIRASIDGGYFDEFKAETLGRWQGGRR

SEQ ID NO: 58183 - protein, 422 aa, Nocardia farcinica
  misc_feature (1)..(422): tr|A0A1C2B3V3|A0A1C2B3V3_NOCFR Queuine tRNA-ribosyltran sferase OS=Nocardia farcinica OX=37329 GN=tgt PE=3 SV=1
MLHVSSTGTEVADPTYTVGTTLAGTRGRTGTITTPHGQIHTPAFIPVGTKATVKTVLPESVSALGAQAVLANAYHLYLQPGPEIIDAAGGLGAFMNWRGPTYTDSGGFQVMSLGAGFKKVISMEATGTPDDDLTANGKERLSRVDDDGVTFKSHLDGSAHRFTPEVSMQIQHQLGADIIFAFDELTTLMNTREYQVNSLERTRLWAIRCLAEHNRLSVERAHRPQQSLWGVIQGAQYEDLRRKAARDLVALSEADRAAGGKGFGGYGIGGALEKDNLGTIVGWVNDELPEDSPKHLLGISEPDDIFTAIENGVDTFDCVSPTRVARNGAIYSLDGRYNVTNAKYRSDFRTLDPEVENYTSQYSRAYLHHLFKAKEGLGPTLATLHNVSFIVTLVDRARQAIENGTYTEYRDEFLRRYYGGPR

SEQ ID NO: 58184 - protein, 417 aa, Nocardia fluminea
  misc_feature (1)..(417): tr|A0A2N3VA21|A0A2N3VA21_9NOCA Queuine tRNA-ribosyltran sferase OS=Nocardia fluminea OX=134984 GN=tgt PE=3 SV=1
MADSSEFSFEVGTRLDGGRHGRTGVISTPHGEIATPAFIPVGTKASVKAVLPETMREIGAQALLANAYHLYLQPGADIVDEAGGLGKFMNWPGPTFTDSGGFQVMSLGVGFKKVLAMEAVDIRSDQVIAAGKERLATVDDDGVTFRSHLDGSKHRFTPEVSMGIQHELGADIMFAFDELTTLMNTRGYQEKSLQRTHEWAQRCIDEHERLTAVRGHRPYQALFAVIQGAQYEDLRRKACRELESIRGSGGTEFDGYGIGGALEKHNLGTTVGWCCDELPEAKPRHMLGISEPEDMFTAIENGADTFDCVNPSRVARNAAIYVDEGRFNINTARFRRDFTPIDENCDCYTCAHYTRAYLHHLFKAKEMLSATLCTIHNERFTIRLVDRIRASIEGGYFDEFKKEFLGRWRGRIKVPGE

SEQ ID NO: 58185 - protein, 417 aa, Nocardia ignorata
  misc_feature (1)..(417): tr|A0A4R6P887|A0A4R6P887_9NOCA Queuine tRNA-ribosyltran sferase OS=Nocardia ignorata OX=145285 GN=tgt PE=3 SV=1
MADSSEFSFTVGTRLDGDRHGRTGVISTPHGEIATPAFIPVGTKASVKAVLPETMKELGAQALLANAYHLYLQPGSDIVDEAGGLGKFMNWDGPTFTDSGGFQVMSLGVGFKKVLAMEAVGVRSDQVIAAGKERLATVDDDGVTFRSHLDGSKHRFTPEVSMGIQHQLGADIMFAFDELTTLMNTRGYQEKSLQRTHEWAQRCIDEHERLTGARTHRPYQALFAVIQGAQYEDLRRKACRELESIRGSGGTEFDGYGIGGALEKHNLGTIVGWCCDELPEAKPRHMLGISEPEDMFVAIENGADTFDCVNPSRVARNAAIYVDEGRFNINTSRFRRDFTPIDENCDCYTCAHYTRAYLHHLFKAKEMLSATLCTIHNERFTVRLVDRIRASIEGGYFDEFKKEFLGQWQGRIKAPGQ

SEQ ID NO: 58186 - protein, 391 aa, Nocardia mexicana
  misc_feature (1)..(391): tr|A0A370GJH6|A0A370GJH6_9NOCA Queuine tRNA-ribosyltran sferase OS=Nocardia mexicana OX=279262 GN=tgt PE=3 SV=1
MITTPHGTIATPAFIPVGTKATVKAVLPETMKELGAQALLANAYHLYLQPGSDIVDEAGGLSRFMNWPGPTFTDSGGFQVMSLGVGFKKVLAMEAVGVQNDDVIAKGKERLAVVDDDGVTFRSHLDGSKHRFTPEISMGIQHRLGADIMFAFDELTTLLNTRGYQEKSLQRTHEWAQRCIAEHERLTAERSHRPYQALFAVIQGAQYEDLRRKACSGLRAMRGSAGTGFDGYGIGGALEKQNLGTIVGWCSDELPEDKPRHLLGISEPEDLFVAVENGADTFDCVNPSRVARNAAIYVDAGRFNINTSRFRRDFTPIDETCDCYTCAHYTRAYIHHLFKAKEMLAATLCTIHNERFTVRLVDRIRAGIDGGYYDEFKAETLGRWQGRIRNP

SEQ ID NO: 58187 - protein, 417 aa, Nocardia neocaledoniensis
  misc_feature (1)..(417): tr|A0A317NNC2|A0A317NNC2_9NOCA Queuine tRNA-ribosyltran sferase OS=Nocardia neocaledoniensis OX=236511 GN=tgt P E=3 SV=1
MADPSEFSFTVGTRLDGGRHGRTGVIGTPHGEIATPAFIPVGTKASVKAVLPETMKDLGAQALLANAYHLYLQPGADIVDEAGGLGRFMNWAGPTFTDSGGFQVMSLGVGFKKVLAMEAVDIRSDEVIAEGKERLATVDDDGVTFRSHLDGSKHRFTPEVSMGIQHQLGADIMFAFDELTTLLNTRGYQEKSLQRTHEWAQRCIDEHEKLTGERGHRPYQALFAVIQGAQYEDLRRKACRDLETIRGSGGTEFDGYGIGGALEKHNLGTIVGWCCDELPEHKPRHMLGISEPEDMFVAIENGADTFDCVNPSRVARNAAIYVDEGRFNINTSRFRRDFTPIDENCDCYTCAHYTRAYLHHLFKAKEMLSATLCTIHNERFTVRLVDRIRASIEGGYFDEFKSEFLGRWQGRIKAPGA

SEQ ID NO: 58188 - protein, 414 aa, Nocardia ninae
  misc_feature (1)..(414): tr|A0A511MC10|A0A511MC10_9NOCA Queuine tRNA-ribosyltran sferase OS=Nocardia ninae NBRC 108245 OX=1210091 GN=tgt PE=3 SV=1
MVGPGSFSFAVRKRLEARHGRSGVISTPHGDIATPAFIPVGTKATVKAVLPETMKEIGAQALLANAYHLYLQPGSDIVDEAGGLGKFMNWPGPTFTDSGGFQVMSLGVGFKKVLAMEAVDVRSDDVIAKGKERLATVDDDGVTFRSHLDGSKHRFTPEVSMGIQHQLGADIMFAFDELTTLLNTRGYQEKSLQRTHEWAQRCLDEHERLTAARTHRPYQALFGVIQGAQYEDLRRKACRGLESLRGSAGTGFDGYGIGGALEKHNLGTIVGWCSDELPEDKPRHMLGISEPEDIFTAVENGADTFDCVNPSRVARNAAIYVAEGRFNINTSRFRRDFTPIDETCDCYTCANYTRAYLHHLFKAKEILAATLCTIHNERYTIRLVDRIRESIEGGYFDEHKAETLGRWKGRVPAP

SEQ ID NO: 58189 - protein, 424 aa, Nocardia nova
  misc_feature (1)..(424): tr|W5T775|W5T775_9NOCA Queuine tRNA-ribosyltransferase OS=Nocardia nova SH22a OX=1415166 GN=tgt PE=3 SV=1
MIAAAWQDDGVSDPAQFAFTIGTRLPGRHGRTGVISTPHGDIATPAFVPVGTKATVKAVLPETMAEIGAQALLANAYHLYLQPGSDIVDEAGGLSRFMNWPGPTFTDSGGFQVMSLGVGFKKVLAMEAVGVRSDEVIAEGKERLAVVDDDGVTFRSHLDGSKHRFTPEVSMGIQHRLGADVMFAFDELTTLFNTRGYQEKSLRRTHEWAQRCIDEHERLTTDRSHRPYQALFAVIQGAQYEDLRRKASRDLDAMRGSGGTAFDGFGIGGALEKANLGTIVGWCCDELPEEKPRHLLGISEPEDFFVAIENGADTFDCVNPSRVARNAAIYVRAGRFNINTSRFRRDFTPIDDECDCYTCAHYTRAYIHHLFKAKEMLAATLCTIHNERFTIRLVDDIRASIDGGHYDEFKTEFLGRWQGRIRFD

SEQ ID NO: 58190 - protein, 415 aa, Nocardia nova
  misc_feature (1)..(415): tr|A0A2S6AWT0|A0A2S6AWT0_9NOCA Queuine tRNA-ribosyltran sferase OS=Nocardia nova OX=37330 GN=tgt PE=3 SV=1
MSDPDQFSFTVGTSLPGRRGGRTGVIATPHGQIATPAFIPVGTKATVKAVLPEAMAEIGAQALLANAYHLYLQPGSDIVDEAGGLGRFMNWPGPTFTDSGGFQVMSLGVGFKKVLAMEAVGVRSDEVIAKGKERLAVVDDDGVTFRSHLDGSSHRFTPEVSMGIQHRLGADIMFAFDELTTLFNTRGYQEKSLRRTHEWAQRCIDEHERLTAERAHRPYQALFAVIQGAQYEDLRRKACRDLDAMRGSGGTGFDGYGIGGALEKANLGTIVGWCCDELPPEKPRHLLGISEPEDFFVAIENGADTFDCVNPSRVARNAAIYVAAGRFNINTSRFRRDFTPIDDTCDCYTCAHYTRAYIHHLFKAKEMLAATLCTIHNERFTIRLVDDIRASIEGGYYDDFKAEFLGRWQGRIRFD

SEQ ID NO: 58191 - protein, 416 aa, Nocardia otitidiscaviarum
  misc_feature (1)..(416): tr|A0A516NTZ5|A0A516NTZ5_9NOCA Queuine tRNA-ribosyltran sferase OS=Nocardia otitidiscaviarum OX=1823 GN=tgt PE= 3 SV=1
MSSPESFAFKVGTRLDGRHGRTGVISTPHGDIATPAFIPVGTKATVKAVLPEAMKELGSQALLANAYHLYLQPGPDIVDEAGGLSSFMNWPGPTFTDSGGFQVMSLGVGFKKVLAMEAVGVQNDDVIAKGKERLAHVDDDGVTFRSHLDGSKHRFTPEVSMGIQHQLGADIMFAFDELTTLMNTRGYQEESLERTRRWAQRCLDEHERLTAARAHRPYQALFGVIQGAQYEDLRRKACRDLEELRGAAGTGFDGYGIGGALEKHNLGTIVRWCCDELPERKPRHMLGISEPEDMFTAVENGADTFDCVNPSRVARNAAIYVDEGRFNINTSRFRRDFTPIDDTCDCYTCANYTRAYLHHLFKAKEILAATLCTIHNERFTVRLVDRIRGSIERGEFDAYKTDFLGRWKGRIKAPAN

SEQ ID NO: 58192 - protein, 416 aa, Nocardia otitidiscaviarum
  misc_feature (1)..(416): tr|A0A378YFG6|A0A378YFG6_9NOCA Queuine tRNA-ribosyltran sferase OS=Nocardia otitidiscaviarum OX=1823 GN=tgt PE= 3 SV=1
MSSPESFAFKVGTRLDGRHGRTGVISTPHGDIATPAFIPVGTKATVKAVLPEAMKELGSQALLANAYHLYLQPGPDIVDEAGGLSRFMNWPGPTFTDSGGFQVMSLGVGFKKVLAMEAVGVQNDDVIAKGKERLAHVDDDGVTFRSHLDGSKHRFTPEVSMGIQHQLGADIMFAFDELTTLMNTRGYQEESLERTRRWAQRCLDEHERLTAARSHRPYQALFGVIQGAQYEDLRRKACRDLEELRGAAGTGFDGYGIGGALEKHNLGTIVRWCCDELPERKPRHMLGISEPEDMFTAVENGADTFDCVNPSRVARNAAIYVDEGRFNINTSRFRRDFTPIDDTCDCYTCANYTRAYLHHLFKAKEILAATLCTIHNERFTVRLVDRIRGSIERGEFDAYKTDFLGRWKGRIKAPAN

SEQ ID NO: 58193 - protein, 418 aa, Nocardia pseudobrasiliensis
  misc_feature (1)..(418): tr|A0A370I535|A0A370I535_9NOCA Queuine tRNA-ribosyltran sferase OS=Nocardia pseudobrasiliensis OX=45979 GN=tgt PE=3 SV=1
MRHYCWVPDPASFSFTVNTRLDGRHGRTGVVSTPHGEIRTPAFIPVGTKATVKAVLPEMMKELGSQALLANAYHLYLQPGPDIVDEAGGLGKFMNWPGPTFTDSGGFQVMSLGVGFKKVLAMEAVGVQSDDVIAKGKERLAVVDDDGVTFRSHLDGSKHRFTPEVSMGIQHQLGADVMFAFDELTTLLNTRGYQEKSLQRTHEWAQRCIDEHERLTAERTHRPYQALFAVIQGAQYEDLRRKACRDLDAMRGIGGTGFDGYGIGGALEKHNLGTIVGWCCDELPEDKPRHLLGISEPEDIFVAVANGADTFDCVNPSRVARNAAIYIPEGRFNINTSRFRRDFTPIDENCDCYTCAHYTRAYIHHLFKAKEMLASTLCTIHNERFTVKLVDDIRASIDDNRFDEFEAEFFGRWRGRLR

SEQ ID NO: 58194 - protein, 414 aa, Nocardia puris
  misc_feature (1)..(414): tr|A0A366D2I2|A0A366D2I2_9NOCA Queuine tRNA-ribosyltran sferase OS=Nocardia puris OX=208602 GN=tgt PE=3 SV=1
MAASADFSFTVGTRLDGRHGRTGVIRTPHGEIATPAFIPVGTKATVKAVLPETMKELGAQALLANAYHLYLQPGADIVDEAGGLGAFMNWRGPTFTDSGGFQVMSLGVGFKKVLAMESVDVRSDDVIAKGKERLATVDDDGVTFRSHLDGSKHRFTPEVSMGIQHQLGADIMFAFDELTTLMNTRGYQEESLRRTHEWAQRCLDEHERLTTARAHRPYQALFAVIQGAQYEDLRRKACRELEELRGAEGTEFDGYGIGGALEKHNLGAIVGWCCDELPEAKPRHMLGISEPEDFFAAVENGADTFDCVNPSRVARNAAIYVPDGRFNINTSRFRRDFTPIDADCDCYTCAHYTRAYLHHLFKAKEMLAATLCTIHNERFTVRLVDRIRESIDGGYYDEFKAETLGRWGSRTRSS

SEQ ID NO: 58195 - protein, 419 aa, Nocardia seriolae
  misc_feature (1)..(419): tr|A0A1I9YZ67|A0A1I9YZ67_9NOCA Queuine tRNA-ribosyltran sferase OS=Nocardia seriolae OX=37332 GN=tgt PE=3 SV=1
MEAVSAASAFSFKVGTRLEGRQGRTGVISTPHGDIATPAFIPVGTKATVKAVLPETMKEIGSQALLANAYHLYLQPGPDIVDEAGGVAAFMNWNGPTFTDSGGFQVMSLGVGFKKVLAMEAVGVQNDDVIAKGKERLAHVDDDGVTFRSHLDGSRHRFTPEVSMGIQHQLGADVMMAFDELTTLMNTRGYQEESLERTRRWAKRCLDEHERLTAARSHRPYQALFGVIQGAQYEDLRRKACRDLEELRGEAGSGFDGYGIGGALEKHNLGAIVGWCCDELPENEPRHLLGISEPEDIFTSVENGADTFDCVNPSRVARNAALYTDEGRFNINTARFKRDFTPIDETCDCYTCANYTRAYIHHLFKAKEILAATLCTIHNERFTVRLVDRVRESLDGGYFDDYQADFLGRWRGRIKAPGL

SEQ ID NO: 58196 - protein, 419 aa, Nocardia seriolae
  misc_feature (1)..(419): tr|A0A0B8NFT7|A0A0B8NFT7_9NOCA Queuine tRNA-ribosyltran sferase OS=Nocardia seriolae OX=37332 GN=tgt PE=3 SV=1
MEAVSAASAFSFKVGTRLEGRQGRTGVISTPHGDIATPAFIPVGTKATVKAVLPETMKEIGSQALLANAYHLYLQPGPDIVDEAGGVAAFMNWNGPTFTDSGGFQVMSLGVGFKKVLAMEAVGVQNDDVIAKGKERLAHVDDDGVTFRSHLDGSRHRFTPEVSMGIQHQLGADVMMAFDELTTLMNTRGYQEESLERTRRWAKRCLDEHERLTAARSHRPYQALFGVIQGAQYEDLRRKACRDLEELRGEAGSGFDGYGIGGALEKHNLGAIVGWCCDELPENEPRHLLGISEPEDIFTAVENGADTFDCVNPSRVARNAALYTDEGRFNINTARFKRDFTPIDETCDCYTCANYTRAYIHHLFKAKEILAATLCTIHNERFTVRLVDRVRESLDGGYFDDYQADFLGRWRGRIKAPGL

SEQ ID NO: 58197 - protein, 416 aa, Nocardia sp.
  misc_feature (1)..(416): tr|A0A386ZKL0|A0A386ZKL0_9NOCA Queuine tRNA-ribosyltran sferase OS=Nocardia sp. CFHS0054 OX=2382165 GN=tgt PE=3 SV=1
MSSPSEFSFKVGTRLEGRHGRTGVISTPHGDIATPAFIPVGTKATVKAVLPETMKELGSQALLANAYHLYLQPGPDIVDEAGGVASFMNWHGPTFTDSGGFQVMSLGVGFKKVLAMEAVGVRSDDVIAKGKERLAHVDDDGVTFRSHLDGSKHRFTPEVSMGIQHQLGADVMMAFDELTTLMNTRGYQEESLERTRRWAQRCLDEHERLTAARSHRPYQALFGVIQGAQYEDLRRKACRDLEELRGAAGTGFDGYGIGGALEKHNLGTIVGWCCDELPESKPRHLLGISEPEDIFTAVENGADTFDCVNPSRVARNAALYTDEGRFNINTARFKRDFTPIDETCDCYTCANYTRAYIHHLFKAKEILAATLCTIHNERFTVRLVDRVRESLDGGYFDDYKTDFLGRWRGRIKAPGL

SEQ ID NO: 58198 - protein, 419 aa, Nocardia sp.
  misc_feature (1)..(419): tr|A0A3A4KWS3|A0A3A4KWS3_9NOCA Queuine tRNA-ribosyltran sferase OS=Nocardia sp. YIM PH 21724 OX=2340916 GN=tgt PE=3 SV=1
MEVVSDPAEFSFSVGTRLDGQYGRTGELRTPHGTIATPAFIPVGTKATVKSVLPETMREIGAQALLANAYHLYLQPGPDIVDEAGGLGRFMNWPGPTFTDSGGFQVMSLGVGFKKVIAMEAVDTPDDNAVAAGKERLAHVDDDGVTFRSHLDGSKHRFTPEVSMGIQHRLGADVMFAFDELTTLMNTRGYQERSLRRTHEWAQRCIDEHERLTVERGHRPYQALFAVIQGAQYEDLRRKACRELEDIRGRAGTGFDGYGIGGALEKHNLGTIVGWCSAELPEEKPRHLLGISEPEDLFVAVANGADTFDCVNPSRVARNAALYVDEGRFNINTARFRRDFTPIDETCDCYTCANYTRAYLHHLFKAKEMLAATLCTIHNERFTIRLVDRIRESIAGGYFEEFRREFMGRWQGRIKAPGL

SEQ ID NO: 58199 - protein, 414 aa, Nocardia tenerifensis
  misc_feature (1)..(414): tr|A0A318JYW2|A0A318JYW2_9NOCA Queuine tRNA-ribosyltran sferase OS=Nocardia tenerifensis OX=228006 GN=tgt PE=3 SV=1
MSDSGSFSFTVGARLEGRHGRAGVINTPHGAIATPAFIPVGTKATVKAVLPETMKEIGAQALLANAYHLYLQPGSDIVDEAGGLSKFMNWPGPTFTDSGGFQVMSLGVGFKKVLAMEAVDVRSDDVIAKGKERLATVDDDGVTFRSHLDGSKHRFTPEVSMGIQHRLGADIMFAFDELTTLLNTRGYQEKSLQRTHEWAQRCLDEHERLTAARTHRPYQALFGVIQGAQYEDLRRKACRGLESLRGDQGTGFDGYGIGGALEKHNLGTIVGWCCDELPEDKPRHMLGISEPEDIFTAVENGADTFDCVNPSRVARNAAIYVAEGRFNINTSRFRRDFTPIDETCDCYTCANYTRAYLHHLFKAKEILAATLCTIHNERYTIRLVDRIRASIEGGYFDEHKAETLGRWKGRIQAP

SEQ ID NO: 58200 - protein, 425 aa, Nocardia terpenica
  misc_feature (1)..(425): tr|A0A291RCK5|A0A291RCK5_9NOCA Queuine tRNA-ribosyltran sferase OS=Nocardia terpenica OX=455432 GN=tgt PE=3 SV= 1
MGPWQYWRVPDPASFSFSVGTRLEGRHGRSGVISTPHGEIATPAFIPVGTKATVKAVLPETMAEIGAQALLANAYHLYLQPGSDIVDEAGGLSAFMNWPGPTFTDSGGFQVMSLGVGFKKVLAMESVGVQNDDVIAKGKERLAVVDDDGVTFRSHLDGSKHRFTPEVSMGIQHRLGADIMFAFDELTTLMNTRGYQEKSLQRTHEWAQRCIDEHERLTAERTHRPYQALFAVIQGAQYEDLRRKACRELESMRGRGGTEFDGYGIGGALEKHNLGTIVGWCCDELPEHKPRHLLGISEPEDFFVAIENGADTFDCVNPSRVARNAAIYVAEGRFNINTSRFRRDFTPIDETCDCYTCAHYTRAYLHHLFKAKEMLAATLCTIHNERFTIRLVDEIRASIEGGYFDEFKAETLGRWKGRIKAPGVQ

SEQ ID NO: 58201 - protein, 426 aa, Nocardia terpenica
  misc_feature (1)..(426): tr|A0A164HEA1|A0A164HEA1_9NOCA Queuine tRNA-ribosyltran sferase OS=Nocardia terpenica OX=455432 GN=tgt PE=3 SV= 1
MPGPWQYWRVPDPASFSFSVGTRLEGRHGRSGVISTPHGDIATPAFIPVGTKATVKAVLPETMAEIGAQALLANAYHLYLQPGSDIVDEAGGLSAFMNWPGPTFTDSGGFQVMSLGVGFKKVLAMETVGVQNDDVIAKGKQRLAVVDDDGVTFRSHLDGSKHRFTPEVSMGIQHRLGADIMFAFDELTTLMNTRGYQEKSLRRTHEWAQRCIDEHERLTAERTHRPYQALFAVIQGAQYEDLRRKACRELESMRGRGGTEFDGYGIGGALEKHNLGTIVGWCCDELPEHKPRHLLGISEPEDFFVAIENGADTFDCVNPSRVARNAAIYVAEGRFNINTSRFRRDFTPIDETCDCYTCAHYTRAYLHHLFKAKEMLAATLCTIHNERFTIRLVDDIRASIEGGYFDEFKAETLGRWKGRIKAPGAQ

SEQ ID NO: 58202 - protein, 414 aa, Nocardia vulneris
  misc_feature (1)..(414): tr|A0A0C1CT10|A0A0C1CT10_9NOCA Queuine tRNA-ribosyltran sferase OS=Nocardia vulneris OX=1141657 GN=tgt PE=3 SV= 1
MSDPGNFSFTVGNRLDGRHGRSGVISTPHGEIATPAFIPVGTKATVKAVLPETMREIGAQALLANAYHLYLQPGSDIVDEAGGLSKFMNWPGPTFTDSGGFQVMSLGVGFKKVLAMEAVDVRSDDVIAKGKERLATVDDDGVTFRSHLDGSKHRFTPEVSMGIQHELGADIMFAFDELTTLLNTRGYQEKSLQRTHEWAQRCIDEHERLTAARTHRPYQALFAVIQGAQYEDLRRKACRELEAIRGSGGTGFDGYGIGGALEKHNLGTIVGWCCDELPEDKPRHMLGISEPEDIFTAVENGADTFDCVNPSRVARNAAIYVAEGRFNINTARFRRDFTPIDETCDCYTCANYTRAYLHHLFKAKEILAATLCTIHNERYTIRLVDRIRASIEGGYFDEHKAETLGRWKGRIATP

SEQ ID NO: 58203 - protein, 390 aa, Nocardioides sp.
  misc_feature (1)..(390): tr|H0BTV1|H0BTV1_9BURK Queuine tRNA-ribosyltransferase OS=Nocardioides sp. SLBN-35 OX=512030 GN=tgt PE=3 SV=1
MLQFELLTTDPTSHARRGTLTLNHGEVQTPIFMPVGTYGTVKGVMPQSLNDMGAQIILGNTFHLWMRPGLDIVQSFGGLHAFEQWNKPMLTDSGGFQVWSLGDMRKITEEGVHFASPVNGDKLFMSPEVSMQIQTVLNSDIVMQLDECTPYETKGHLTTEREARQSMEMSRRWAVRSKAEFERLDNPNALFGIVQGGMFENLRQESLEALVEMDFPGYAVGGVSVGEPKDEMLRIMAHTPHRLPAHKPRYLMGVGTPEDLVEGVAQGVDMFDCVMPTRNARNGTLFTRYGDLKIRNARHKADHQPLDTSCTCHACAGKDGVSWDAGGRGGFSRAYLHHLDRCGEMLGPMLATIHNLHYYLNLMREVREALDAGRFGEFRAQFKADRARGV

SEQ ID NO: 58204 - protein, 390 aa, Nocardioides sp.
  misc_feature (1)..(390): tr|A0A542RPZ4|A0A542RPZ4_9BURK Queuine tRNA-ribosyltran sferase OS=Nocardioides sp. SLBN-35 OX=512030 GN=tgt PE =3 SV=1
MLQFDILKTDPTSHARRGTLTLNHGVVQTPIFMPVGTYGTVKGVMPRSLHDMGAQIILGNTFHLWMRPGLDVMQSFGGLHGFEKWDKPILTDSGGFQVWSLGAMRKITEEGVTFASPVNGDKLFMSPEVSMQIQTILNSDIVMQLDECTPYETKGHLTTEAEARKSMEMSLRWAKRSRDEFQRLQNPNALFGIVQGGMYKNLRQESLEQLVEMDFPGYAVGGVSVGEPKDEMLDIMAHTPHRLPAHKPRYLMGVGTPEDLVEGVAQGVDMFDCVMPTRNARNGTLFTRFGDLKIRNARHKADHQPLDTTCTCYACAGSSGVSWDDGGREGFSRAYLHHLDRCGEMLGPMLTTVHNLHYYLNLMREVREALDAGTFSAFRSRFKAERARGV

SEQ ID NO: 58205 - protein, 332 aa, Nodularia sp.
  misc_feature (1)..(332): tr|A0A218Q524|A0A218Q524_9CYAN Queuine tRNA-ribosyltran sferase OS=Nodularia sp. NIES-3585 OX=1973477 GN=tgt PE =3 SV=1
MPVGTLANVKTVTPDQLKSTGAQMVLSNTYHLHLQPGERIVAGGGGLHKFMGWNGPMLTDSGGFQVFSLSEMRKISEDGVTFRSPHDGQIIHLTPERSIEIQNTLGADVIMAFDECPPYPASREDVEAATQRTYRWLERCMTFHQRSDQALFGIVQGGVYLDLRAQAAQALAKLDLPGYAIGGVSVGEPPELMADIVRTTAPLLPREKPRYLMGVGTYREMAIAIASGVDLFDCVIPTRWARHGTAIVQGERWNLKNAKFREDYTPLDETCPCYACQNFSRAYISHLVRSQEILGYTLLSIHNITELIRFTQKIREAILSDRFATEFAHWLN

SEQ ID NO: 58206 - protein, 332 aa, Nodularia spumigena
  misc_feature (1)..(332): tr|A0ZC57|A0ZC57_NODSP Queuine tRNA-ribosyltransferase OS=Nodularia spumigena CCY9414 OX=313624 GN=tgt PE=3 SV =1
MPVGTLANVKTVTPDQLKSTGAQMVLSNTYHLHLQPGERIVAGGGGLHKFMGWDGPMLTDSGGFQVFSLSEMRKISEDGVTFRSPHDGQIIHLTPERSIEIQNTLGADVIMAFDECPPYPASREDVEAATGRTYRWLERCMTFHQRSDQALFGIVQGGVYLDLRAQAAQELAQLDLPGYAIGGVSVGEPPELMADIVRTTAPLLPREKPRYLMGVGTYREMAIAIASGVDLFDCVIPTRWARHGTAIVQGERWNLKNAKFREDYEPLDETCPCYACQNFSRAYISHLVRSQEILGYTLLSIHNITELIRFTQKIREAILSDRFATEFAHWLN

SEQ ID NO: 58207 - protein, 332 aa, Nodularia spumigena
  misc_feature (1)..(332): tr|A0A161XMY1|A0A161XMY1_NODSP Queuine tRNA-ribosyltran sferase OS=Nodularia spumigena CENA596 OX=1819295 GN=tg t PE=3 SV=1
MPVGTLANVKTVTPDQLKSTGAQMVLSNTYHLHLQPGERIVAGGGGLHKFMGWDGPMLTDSGGFQVFSLSEMRKISEDGVTFRSPHDGQIIHLTPERSIEIQNTLGADVIMAFDECPPYPASREDVEAATGRTYRWLERCMTFHQRSDQALFGIVQGGVYLDLRAQAAQALAKLDLPGYAIGGVSVGEPPELMADIVRTTAPLLPREKPRYLMGVGTYREMAIAIASGVDLFDCVIPTRWARHGTAIVQGERWNLKNAKFREDYTPLDETCPCYACQNFSRAYISHLVRSQEILGYTLLSIHNITELIRFTQKIREAILSDRFATEFAHWLN

SEQ ID NO: 58208 - protein, 376 aa, Nonlabens agnitus
  misc_feature (1)..(376): tr|A0A2S9WXQ3|A0A2S9WXQ3_9FLAO Queuine tRNA-ribosyltran sferase OS=Nonlabens agnitus OX=870484 GN=tgt PE=3 SV=1
MKFDLLQTDANSQARAGVVHTDHGAIETPIFMPVGTVGTVKGVHQRELKEEVNPDIILANTYHLYLRPGTEVLEKAGGLHQFMNWDRPILTDSGGYQVYSLSANRKIKEEGVKFKSHIDGSYHTFTPERAMDIQRSIGADIIMAFDECTPYPCEFNYARRSMHMTHRWLKRCIEHFNNTPDKYGFTQTLFPIIQGSTYPELRQQSAEFVANCDMDANAIGGLSVGEPAEEMYAMTDVVTAILPKDKPRYLMGVGTPINLLENVALGIDMFDCVMPTRNGRNGMIFTANGSINIKNKKWEMDFSPLDDGAYAWVDTEYSKAYVRHLFTVNEMLGRQICTIHNLAFYLWLMREARKHILAGDFRAWKDQMVKQMDNRL

SEQ ID NO: 58209 - protein, 376 aa, Nonlabens arenilitoris
  misc_feature (1)..(376): tr|A0A2S7U8K4|A0A2S7U8K4_9FLAO Queuine tRNA-ribosyltran sferase OS=Nonlabens arenilitoris OX=1217969 GN=tgt PE= 3 SV=1
MKFDLLQTDSQSQARAGVVHTDHGAIETPIFMPVGTVGTVKGVHQRELENEVNPDIILANTYHLYLRPGIDVLEKAGGLHKFMNWDRPILTDSGGYQVYSLSANRKIKEEGVKFKSHIDGSYHFFTPERAMDIQRSIGADIIMAFDECTPYPCEYNYARRSMHMTHRWLKRCIEHFNSTPDKYGFSQTLFPIVQGSTYKDLREQSAEFIANCDMPANAIGGLSVGEPAEEMYAMTDVVTAVLPKDKPRYLMGVGTPINLLENVALGVDMFDCVMPTRNGRNGMIFTAHGTMNMKNKKWETDFSPLDPANYAWVDTAYSKAYVRHLFTVNEMLGRQICTIHNLSFYLWLMREARKHILAGDFRTWKDKMVKQMDNRL

SEQ ID NO: 58210 - protein, 376 aa, Nonlabens dokdonensis
  misc_feature (1)..(376): tr|L7W1K7|L7W1K7_NONDD Queuine tRNA-ribosyltransferase OS=Nonlabens dokdonensis (strain DSM 17205 / KCTC 12402 / DSW-6) OX=592029 GN=tgt PE=3 SV=1
MKFDLLQNDPQSQARAGVIHTDHGKIETPIFMPVGTIGTVKGVHQRELEEEVNPDIILGNTYHLYLRPGTDILEKAGGLHKFMNWDRPILTDSGGYQVYSLSSNRKIKEEGVKFKSHIDGSYHTFTPERAMDIQRSIGADIIMAFDECTPYPCDYNYARRSMHMTHRWLKRCITHFDNTPDLYGHKQTLFPIVQGSTYKDLRKQSAEAIAATDQFGNAIGGLSVGEPAEEMYAMTEVVTAVLPKEKPRYLMGVGTPINLLENVALGVDMFDCVMPTRNGRNGMIFTAHGTMNMKNLKWAEDFTPLDPANYAWVDTAYTKAYVRHLFTVNEMLGRQICTIHNLSFYLWLMREARKHILAGDFRTWKDQMVKQMDNRL

SEQ ID NO: 58211 - protein, 376 aa, Nonlabens dokdonensis
  misc_feature (1)..(376): tr|A0A1Z8AXE0|A0A1Z8AXE0_9FLAO Queuine tRNA-ribosyltran sferase OS=Nonlabens dokdonensis OX=328515 GN=tgt PE=3 SV=1
MKFDLLQNDPQSQARAGVIHTDHGKIETPIFMPVGTIGTVKGVHQRELEQEVNPDIILGNTYHLYLRPGTDILEKAGGLHKFMNWDRPILTDSGGYQVYSLSSNRKIKEEGVKFKSHIDGSYHTFTPERAMDIQRSIGADIIMAFDECTPYPCDYNYARRSMHMTHRWLKRCITHFDNSPDLYGHKQTLFPIVQGSTYKDLRKQSAEAIAATDQFGNAIGGLSVGEPAEEMYAMTEVVTAVLPKEKPRYLMGVGTPINLLENVALGVDMFDCVMPTRNGRNGMIFTAHGTMNMKNLKWAEDFTPLDPANYAWVDTAYTKAYVRHLFTVNEMLGRQICTIHNLSFYLWLMREARKHILAGDFRTWKDQMVKQMDNRL

SEQ ID NO: 58212 - protein, 381 aa, Nonlabens marinus
  misc_feature (1)..(381): tr|W8VMY0|W8VMY0_9FLAO Queuine tRNA-ribosyltransferase OS=Nonlabens marinus S1-08 OX=1454201 GN=tgt PE=3 SV=1
MSRMKMKFDLLQTDANSQARAGVVHTDHGAIETPIFMPVGTVGTVKGVHQRELKEDVNPDIILANTYHLYLRPGMEVLEKAGGLHQFMNWDRPILTDSGGYQVYSLSANRKIKEEGVKFKSHIDGSYHTFTPERAMDIQRSIGADIIMAFDECTPYPCEFNYARRSMHMTHRWLKRCIERFDNTPDKYGFTQTLFPIIQGSTYTDLRKQSAEFVANCDMDANAIGGLSVGEPAEEMYAMTEVVTAILPKDKPRYLMGVGTPINLLENVALGIDMFDCVMPTRNGRNGMIFTTHGSINIKNKKWEMDFSPLDEAGYAWVDTEYSKAYVRHLFTVNEMLGRQICTIHNLAFYLWLMREARKHILAGDFRTWKDQMVKQMDNRL

SEQ ID NO: 58213 - protein, 379 aa, Nonlabens sediminis
  misc_feature (1)..(379): tr|A0A090QQA8|A0A090QQA8_9FLAO Queuine tRNA-ribosyltran sferase OS=Nonlabens sediminis OX=319236 GN=tgt PE=3 SV =1
MPRMKFDLLHNDPNSQARAGVVHTDHGAIETPIFMPVGTLATVKGLHQNELKDVVNPDIILANTYHLYLRPGTEILEKAGGVHKFMNWDRPVLTDSGGYQVYSLSANRKIKEAGVKFKSHIDGSYHFFTPESAMDIQRTIGADIIMAFDECTPYPCDYNYARRSMHMTHRWLKRCIDHFHNTPSKYGYNQTLFPIVQGSTYKDLRAQSAEFIANADQPGNAIGGLSVGEPAEEMYAMTEVVTAILPKDKPRYLMGVGTPINLLENVALGVDMFDCVMPTRNARNGMIFTVNGTMNVKNKKWADDFSPLDEHGTAWVDQYYSKAYVRHLFTVNEMLGKQICTLHNLTFYLWLMREARKHILAGDFRTWKDKMVKQMDNRL

SEQ ID NO: 58214 - protein, 378 aa, Nonlabens sp.
  misc_feature (1)..(378): tr|A0A1G5DZJ5|A0A1G5DZJ5_9FLAO Queuine tRNA-ribosyltran sferase OS=Nonlabens sp. Hel1_33_55 OX=1336802 GN=tgt P E=3 SV=1
MKMKFDLLQTDANSQARAGVVHTDHGAIETPIFMPVGTVGTVKGVHQRELKEEVNPDIILANTYHLYLRPGTEVLEKAGGLHQFMNWDRPILTDSGGYQVYSLSANRKIKEEGVKFKSHIDGSYHTFTPERAMDIQRSIGADIIMAFDECTPYPCEFNYARRSMHMTHRWLKRCIEHFNNTPDKYGFTQTLFPIIQGSTYPELREQSAEFVANCDMAANAIGGLSVGEPAEEMYAMTDVVTAILPKDKPRYLMGVGTPINLLENVALGIDMFDCVMPTRNGRNGMIFTANGSINIKNKKWEMDFSPLDEDNHAWVDTEYSKAYVRHLFTVNEMLGRQICTIHNLAFYLWLMREARKQILAGTFRTWKDKMVKQMDNRL

SEQ ID NO: 58215 - protein, 376 aa, Nonlabens sp.
  misc_feature (1)..(376): tr|A0A2K8X8X9|A0A2K8X8X9_9FLAO Queuine tRNA-ribosyltran sferase OS=Nonlabens sp. MB-3u-79 OX=2058134 GN=tgt PE= 3 SV=1
MKFDLLQSDSQSQARAGVIHTDHGKIETPIFMPVGTIGTVKGVHQRELEEEVNPDIILGNTYHLYLRPGTDILEKAGGLHKFMNWDRPILTDSGGYQVYSLSSNRKIKEEGVKFKSHIDGSYHTFTPERAMDIQRSIGGDIIMAFDECTPYPCDYNYARRSMHMTHRWLKRCITHFDNSPDLYAHKQTLFPIVQGSTYVDLRQQSAEAIAATNQFGNAIGGLSVGEPAEEMYAMTEVVTAILPKEKPRYLMGVGTPINLLENVALGIDMFDCVMPTRNGRNGMIFTAHGTMNMKNKKWAEDFTPLDAADYAWVDTAYTKAYVRHLFTVNEMLGRQICTIHNLSFYLWLMREARKHIIAGDFRTWKDKMVKQLDNRL

SEQ ID NO: 58216 - protein, 376 aa, Nonlabens spongiae
  misc_feature (1)..(376): tr|A0A1W6MGE3|A0A1W6MGE3_9FLAO Queuine tRNA-ribosyltran sferase OS=Nonlabens spongiae OX=331648 GN=tgt PE=3 SV= 1
MKFDLLTTDSQSQARAGVVHTDHGEIETPIFMPVGTLGTIKGVHQSELKQEVNPDIILANTYHLYLRPGTEILEKAGGLHKFMNWDRPILTDSGGYQVYSLSANRKIKEEGVKFKSHIDGSYHFFTPERAMDIQRSIGADIIMAFDECTPYPCEYNYARRSMHMTHRWLKRCIEHFDNTPDKYGYKQTLLPIVQGSTYKDLRKQSAEFIANTNQHANAIGGLSVGEPAEEMYAMTEVVTEILPKDKPRYLMGVGTPINLLENVALGVDMFDCVMPTRNGRNGMIFTAHGSMNVKNKKWEADFSPLDEAGYAWVDTYYSKAYVRHLFSVNEMLGRQICTIHNLAFYLWLMREARKHIIAGDFRTWKDKMVKQMDNRL

SEQ ID NO: 58217 - protein, 376 aa, Nonlabens tegetincola
  misc_feature (1)..(376): tr|A0A2S7TC90|A0A2S7TC90_9FLAO Queuine tRNA-ribosyltran sferase OS=Nonlabens tegetincola OX=323273 GN=tgt PE=3 SV=1
MKFDLLHNDPNSQARAGVVHTDHGAIETPIFMPVGTLATVKGLHQNELKDVVNPDIILANTYHLYLRPGTEILEKAGGVHKFMNWDRPVLTDSGGYQVYSLSANRKIKEAGVKFKSHIDGSYHFFTPESAMDIQRTIGADIIMAFDECTPYPCDYNYARRSMHMTHRWLKRCIDHFHNTPSKYGYNQTLFPIVQGSTYKDLRAQSAEFIANADQPGNAIGGLSVGEPAEEMYAMTEVVTAILPKDKPRYLMGVGTPINLLENVALGVDMFDCVMPTRNARNGMIFTVNGTMNVKNKKWADDFSPLDEHGTAWVDQYYSKAYVRHLFTVNEMLGKQICTLHNLTFYLWLMREARKHILAGDFRTWKDKMVKQMDNRL

SEQ ID NO: 58218 - protein, 376 aa, Nonlabens ulvanivorans
  misc_feature (1)..(376): tr|A0A084JZM8|A0A084JZM8_NONUL Queuine tRNA-ribosyltran sferase OS=Nonlabens ulvanivorans OX=906888 GN=tgt PE=3 SV=1
MKFDLLQTDSQSQARAGVVHTDHGAIETPIFMPVGTVGTVKGVHQRELENDVNPDIILANTYHLYLRPGIDVLEKAGGLHKFMNWDRPILTDSGGYQVYSLSANRKIKEEGVKFKSHIDGSYHFFTPERAMDIQRSIGADIIMAFDECTPYPCEYNYARRSMHMTHRWLKRCIEHFNNTPNKYGFNQTLFPIIQGSTYKDLREQSAEFIANCDMPANAIGGLSVGEPAEEMYAMTDVVTAVLPKDKPRYLMGVGTPINLLENVALGVDMFDCVMPTRNGRNGMIFTAHGTMNMKNKKWETDFSPLDPGDYAWVDTAYSKAYVRHLFTVNEMLGRQICTIHNLSFYLWLMREARKHIIAGDFRTWKDKMVKQMDNRL

SEQ ID NO: 58219 - protein, 379 aa, Nonlabens ulvanivorans
  misc_feature (1)..(379): tr|A0A090QGN2|A0A090QGN2_NONUL Queuine tRNA-ribosyltran sferase OS=Nonlabens ulvanivorans OX=906888 GN=tgt PE=3 SV=1
MRRMKFDLLQTDSQSQARAGVVHTDHGAIETPIFMPVGTVGTVKGVHQRELENDVNPDIILANTYHLYLRPGIDVLEKAGGLHKFMNWNRPILTDSGGYQVYSLSANRKIKEEGVKFKSHIDGSYHFFTPERAMDIQRSIGADIIMAFDECTPYPCEYNYARRSMHMTHRWLKRCIEHFNNTPSKYGFNQTLFPIIQGSTYKDLREQSAEFIANCDMPANAIGGLSVGEPAEEMYAMTDIVTAVLPKDKPRYLMGVGTPINLLENVALGVDMFDCVMPTRNGRNGMIFTAHGTMNMKNKKWETDFSPLDPGDYAWVDTAYSKAYVRHLFTVNEMLGRQICTIHNLSFYLWLMREARKHILAGDFRTWKDKMVKQMDNRL

SEQ ID NO: 58220 - protein, 376 aa, Nonlabens xylanidelens
  misc_feature (1)..(376): tr|A0A2S6IF51|A0A2S6IF51_9FLAO Queuine tRNA-ribosyltran sferase OS=Nonlabens xylanidelens OX=191564 GN=tgt PE=3 SV=1
MKFDLLQNDPKSQARAGVIHTDHGKIETPIFMPVGTVGTVKGVHQRELEQEINPDIILGNTYHLYLRPGTDILEKAGGLHKFMNWDRPILTDSGGYQVYSLSSNRKIKEEGVKFKSHIDGSYHTFTPERAMDIQRSIGGDIIMAFDECTPYPCDYNYARRSMHMTHRWLKRCITRFDETPDLYGHKQTLFPIVQGSTYIDLRKQSAEAIAATEQFGNAIGGLSVGEPAEEMYAMTEVVTAILPKEKPRYLMGVGTPINLLENVALGVDMFDCVMPTRNGRNGMIFTAHGTMNMKNKKWEEDFSPLDPANYAWVDTAYTKAYVRHLFTVNEMLGRQICTIHNLSFYLWLMREARKHILAGDFSTWKDKMVKQLDNRL

SEQ ID NO: 58221 - protein, 381 aa, Nosocomiicoccus massiliensis
  misc_feature (1)..(381): tr|A0A2J6NH53|A0A2J6NH53_9STAP Queuine tRNA-ribosyltran sferase OS=Nosocomiicoccus massiliensis OX=1232430 GN=t gt PE=3 SV=1
MAIRYEHVHTCKQSGARAGRLHTPHGIIETPIFMPVGTLATVKGMSPEELLEMGSQIILSNTYHLWLRPGSDLVREAGGLHNFMNWQKPILTDSGGFQVFSLSNIRTIEEEGVHFRSHLDGSKLFLTPEKAMDIQHDLGADIIMSFDECAPIPATREYVKDSLERTTRWAERGLNYHVKSGNDKKQALFGIVQGGEYSDLRKQSAREITSLDFPGYSIGGLSVGEPKPLMYEMLEETVPLLPFDKPRYLMGVGSPDALIEGVIRGIDMFDCVLPTRIARNGTTMTSQGRLVVKNQKYSRDFSPLDPNCDCYTCRNYTRAYIRHLFKANEMFGARLTTYHNLHFLLNLMSDVRQAILNDSLLDFKEYFFETYGLNKENAKNF

SEQ ID NO: 58222 - protein, 394 aa, Nostoc azollae
  misc_feature (1)..(394): tr|D7E0B5|D7E0B5_NOSA0 Queuine tRNA-ribosyltransferase OS=Nostoc azollae (strain 0708) OX=551115 GN=tgt PE=3 S V=1
MTNFSFQLLATCSQTKARAGVFSTPHGPVETPRFMPVGTLANVKTITPAQLKDTGAQMVLSNTYHLHIQPGEAIVAAGGGLHKFMGWNGPMLTDSGGFQVFSLSEMRNITEAGVTFRSPYNGQVIELTPERSIEIQNILGADVIMAFDECPPYPATRQEVEAATDRTYRWLERCIVAHQRTDQALFPIVQGGVYLDLRACAAEALAKLDMPGYAIGGVSVGEPPELMAEIVKTTAPLLPHNKPRYLMGVGTYREMAIGIASGVDLFDCVIPTRWARHATAIVSGERWNLKNAKFREDFTPLDETCPCYACQNFSRAYISHLVRAQEILAYTLLSIHNITELVRFTQKIRESILSDRFITDFGHWLKDEEVTGDYGLGTGEDGKITSPSSPVPNK

SEQ ID NO: 58223 - protein, 385 aa, Nostoc calcicola
  misc_feature (1)..(385): tr|A0A1U7IVV2|A0A1U7IVV2_9NOSO Queuine tRNA-ribosyltran sferase OS=Nostoc calcicola FACHB-389 OX=1357508 GN=tgt PE=3 SV=1
MSANFSFQCLACCSQTKARAGVFFTPHGPVETPRFMPVGTLANVKTITPSQLRDTGAQMILSNTYHLHLQPGEAIVAGGGGLHKFMGWNGPMLTDSGGFQVFSLSEMRKITEEGVTFRSPHDGQIIKLTPERSIEIQNTLGADVIMAFDECPPYPATRQEVETATERTYRWLERCITAHQHSEQALFGIVQGGVYLDLRCRAAEALAKLDLPGYAIGGVSVGEPPELMAEIVKVTAPLLPPEKPRYLMGVGTYREMAIAIASGVDLFDCVIPTRWARHGTAIVQGDRWNLKNAKFREDFAPIDETCPCYTCQNFSRAYVSHLVRSQEILAYTLLSIHNITELIRFTQHIREAILSDRFTTEFGHWLEEVGSGNGEWETRGMTNDK

SEQ ID NO: 58224 - protein, 332 aa, Nostoc carneum
  misc_feature (1)..(332): tr|A0A1Z4HRC9|A0A1Z4HRC9_9NOSO Queuine tRNA-ribosyltran sferase OS=Nostoc carneum NIES-2107 OX=1973483 GN=tgt P E=3 SV=1
MPVGTLANVKTVTPAQLRDTGAQMVLSNTYHLHLQPGEAIVAGGGGLHKFMGWNGPMLTDSGGFQVFSLSEMRKITEEGVTFRSPHDGQIIKLTPERSIEIQNTLGADVIMAFDECPPYPATRQEVEAATERTYRWLERCIVAHKRSDQALFGIVQGGVYLDLRSQAAIALAKLNLPGYAIGGVSVGEPPELMAQIVQTTAPLLPPEKPRYLMGVGTYKEMAIAIASGVDLFDCVIPTRWARHGTAIVQGERWNLKNAKFREDFTPLDETCPCYACQNFSRAYISHLVRSQEILAYTLLSIHNINELIRFTQRIREAILSDRFYSEFGHWLE

SEQ ID NO: 58225 - protein, 382 aa, Nostoc commune
  misc_feature (1)..(382): tr|A0A2R5FI61|A0A2R5FI61_NOSCO Queuine tRNA-ribosyltran sferase OS=Nostoc commune NIES-4072 OX=2005467 GN=tgt P E=3 SV=1
MSANFSFECLACCNQTKARAGVFFTPHGVVETPRFMPVGTLANVKTITPSQLQETGAQMILSNTYHLHLQPGEAIVAGGGGLHKFMGWNGPMLTDSGGFQVFSLSEMRKITEEGVTFRSPHDGQIINLTPELSIQIQNTLGADVIMAFDECPPYPATRQEVETATERTYRWLERCITAHKRSEQALFGIVQGGVYLDLRCRAAEALAKLDLPGYAIGGVSVGEPPEMMAEIVKVTAPLLPPEKPRYLMGVGTYREMAIAIASGVDLFDCVIPTRWARHGTAIVQGGRWNLKNAKFREDFTPLDETCPCYTCQNFSRAYVSHLVRSQEILAYTLLSIHNITELIRFTQHIREAILSDRFVTEFGHWLNSSESVPNEEEITNDK

SEQ ID NO: 58226 - protein, 378 aa, Nostoc cycadae
  misc_feature (1)..(378): tr|A0A2H6LLN5|A0A2H6LLN5_9NOSO Queuine tRNA-ribosyltran sferase OS=Nostoc cycadae WK-1 OX=1861711 GN=tgt PE=3 S V=1
MTKNFSFQSLARCSQTKARAGIFLTPHGVVETPKFMPVGTLANVKTVTPAQLKDTGAQMVLSNTYHLHLQPGEAIVAGGGGLHKFMGWDGPMLTDSGGFQVFSLSEMRKITEEGVTFRSPHDGQIINLTPERSIEIQNTLGADVIMAFDECPPYPATRQEVETATERTYRWLERCIAAHQRQDQALFGIVQGGVYLDLRSQAAVALAKLDLPGYAIGGVSVGEPAELMAQIVQATAPLLPPEKPRYLMGVGTYREMAIAIASGIDLFDCVIPTRWARHGTAMVQGERWNLKNAKFREDFTPLDETCPCYACQNFSRAYISHLVRSQEILAYTLLSIHNITELIRFTQKIRQAILNDSFLAEFGHWLNSPDTGELEENS

SEQ ID NO: 58227 - protein, 347 aa, Nostoc flagelliforme
  misc_feature (1)..(347): tr|A0A2K8SZT5|A0A2K8SZT5_9NOSO Queuine tRNA-ribosyltran sferase OS=Nostoc flagelliforme CCNUN1 OX=2038116 GN=tg t PE=3 SV=1
MPVGTLANVKTITPSQLRETGAQMILSNTYHLHLQPGEAIVAGGGGLHKFMGWNGPMLTDSGGFQVFSLSEMRKITEEGVTFRSPHDGRIINLTPELSIQIQNTLGADVIMAFDECPPYPATRQEVETATERTYRWLERCITAHQRSEQALFGIVQGGVYLDLRCRAAEALAKLDLPGYAIGGVSVGEPPEMMAEIVKVTAPLLPPEKPRYLMGVGTYREMALAIASGVDLFDCVIPTRWARHGTAIVQGGRWNLKNAKFREDFTPLDETCPCYTCQNFSRAYISHLVRSQEILAYTLLSIHNITELIRFTQHIREAILSDRFVTEFGHWLNSSESAPNEEEITNDK

SEQ ID NO: 58228 - protein, 348 aa, Nostoc linckia
  misc_feature (1)..(348): tr|A0A2C6UV00|A0A2C6UV00_NOSLI Queuine tRNA-ribosyltran sferase OS=Nostoc linckia z16 OX=1628751 GN=tgt PE=3 SV =1
MPVGTLANVKTITPSQLRDTGAQMILSNTYHLHLQPGEAIVAGGGGLHKFMGWNGPMLTDSGGFQVFSLSEMRKITEDGVTFRSPHDGQIINLTPERSIEIQNTLGADVIMAFDECPPYPATRQEVETATDRTYRWLERCITAHQRSDQALFGIVQGGVYLDLRCRAAEALAKLDLLGYAIGGVSVGEPPELMAEIVKVTAPLLPPEKPRYLMGVGTYREMAIAIASGVDLFDCVIPTRWARHGTAIVQGERWNLKNAKFREDFAPIDETCPCYTCQNFSRAYVSHLVRSQEILAYTLLSIHNITELIRFTQKIREAILSDRFTTEFGHWLEGVEDGGMGRWGDGEMG

SEQ ID NO: 58229 - protein, 332 aa, Nostoc linckia
  misc_feature (1)..(332): tr|A0A2C6TTV1|A0A2C6TTV1_NOSLI Queuine tRNA-ribosyltran sferase (Fragment) OS=Nostoc linckia z16 OX=1628751 GN= tgt PE=3 SV=1
MKFDLLTKDPQSKARAGVVTTDHGAIETPIFMPVGTVASVKGVHQRELKEEINPDIILGNTYHLYLRPQTDILEKAGGLHKFMNWDRNILTDSGGYQVYSLSANRKIKEEGVKFKSHIDGSYHFFSPESVMEIQRTIGADIIMAFDECTPYPCDYRYAKRSMHMTHRWLDRCIAHLEKLPFKYGYEQTLFPIVQGSTYKDLREQSAEYIANAGAKGNAIGGLSVGEPAEEMYAMTEVVTAILPEDKPRYLMGVGTPINILENIALGVDMFDCVMPTRNARNGMLFTANGTINIKNKKWEADFSPVDEMGITFVDTEYTKAYLRHLFAANEYL

SEQ ID NO: 58230 - protein, 376 aa, Nostoc minutum
  misc_feature (1)..(376): tr|A0A367QDX2|A0A367QDX2_9NOSO Queuine tRNA-ribosyltran sferase OS=Nostoc minutum NIES-26 OX=1844469 GN=tgt PE= 3 SV=1
MSAIFSFQSLACCSQTKARAGVFFTPHGPVETPRFMPVGTLANVKTVTPAQLKDTGAQMVLSNTYHLHLQPGEAIVAGGGGLHKFMGWNGPMLTDSGGFQVFSLSEMRKITEKGVTFRSPHDGQIINLTPERSIEIQNTLGADVIMAFDECPPYPATRQEVEAATNRTYRWLERCITAHQRSDQALFGIVQGGVYLDLRSQAAVALAQLDLPGYAIGGVSVGEPPELMAQIVQATAPLLPPEKPRYLMGVGTYREMAIAIASGVDLFDCVIPTRWARHGTAMVRGDRWNLKNAKFREDFAPLDDTCPCYACQNFSRAYISHLVRSQEILAYTLLSIHNITELIRFTQKIREAILSDRFFTEFGHWLEGDGGTEGQK

SEQ ID NO: 58231 - protein, 373 aa, Nostoc piscinale
  misc_feature (1)..(373): tr|A0A0M3V6U1|A0A0M3V6U1_9NOSO Queuine tRNA-ribosyltran sferase OS=Nostoc piscinale CENA21 OX=224013 GN=tgt PE= 3 SV=1
MTKNFSFQSLARCSQTKARAGIFFTPHGAVETPRFMPVGTLANVKTVTPAQLKDTGAQMVLSNTYHLHLQPGEAIVAGGGGLHKFMGWDGPMLTDSGGFQVFSLSEMRKITEEGVTFRSPHDGQIINLTPERSIEIQNTLGADVIMAFDECPPYPATRQEVETATARTYRWLERCISAHQRQDQALFGIVQGGVYLDLRSQAAVELAKLDLPGYAIGGVSVGEPAELMAQIVQATAPLLPPEKPRYLMGVGTYREMAIAIASGIDLFDCVIPTRWARHGTAMVKGERWNLKNAKFREDFAPMDETCPCYACQNFSRAYISHLVRSQEILAYTLLSIHNITELIRFTQKIRQAILNDSFLEEFGHWLNSSETGE

SEQ ID NO: 58232 - protein, 379 aa, Nostoc punctiforme
  misc_feature (1)..(379): tr|B2J4T8|B2J4T8_NOSP7 Queuine tRNA-ribosyltransferase OS=Nostoc punctiforme (strain ATCC 29133 / PCC 73102) O X=63737 GN=tgt PE=3 SV=1
MSANFSFECLACCSQTKARAGVFFTPHGVVETPRFMPVGTLANVKTITPAQLRDTGAQMILSNTYHLHLQPGEAIVAGGGGLHKFMGWNGPMLTDSGGFQVFSLSEMRKITEEGVTFRSPHDGRIINLTPERSIEIQNTLGADVIMAFDECPPYPATRQEVETATERTYRWLERCITAHQRSEQALFGIVQGGVYLDLRCRAAETLAKLDLPGYAIGGVSVGEPPELMAEIVKVTAPLLPPEKPRYLMGVGTYREMAIAIASGIDLFDCVIPTRWARHGTAIVQGGRWNLKNAKFREDFTPLDETCPCYTCQNFSRAYVSHLVRSQEILAYTLLSIHNITELIRFTQKIREAILSDRFTTEFGHWLNEESGDEEWRIEE

SEQ ID NO: 58233 - protein, 382 aa, Nostoc punctiforme
  misc_feature (1)..(382): tr|A0A367R4L0|A0A367R4L0_NOSPU Queuine tRNA-ribosyltran sferase OS=Nostoc punctiforme NIES-2108 OX=1356359 GN=t gt PE=3 SV=1
MSANFSFQCLACCSQTKARAGVFFTPHGLVETPRFMPVGTLANVKTITPAQLRETGAQMILSNTYHLHLQPGEAIVAGGGGLHKFMGWNGPMLTDSGGFQVFSLSEMRKITEEGVTFRSPHDGRIINLTPERSIEIQNTLGADVIMAFDECPPYPATRQEVETATERTYRWLERCITAHQRSDQALFGIVQGGVYLDLRCHAAEALAKLDLPGYAIGGVSVGEPPELMAEIVKVTAPLLPPEKPRYLMGVGTYREMAIAIASGIDLFDCVIPTRWARHGTAIVQGGRWNLKNAKFREDFTPLDETCPCYTCQNFSRAYISHLVRSQEILAYTLLSIHNITELIRFTQKIREAILSDRFVAEFGHWLNSSESASDEGEITNDY

SEQ ID NO: 58234 - protein, 374 aa, Nostoc sp.
  misc_feature (1)..(374): sp|Q8YVT9|TGT_NOSS1 Queuine tRNA-ribosyltransferase OS= Nostoc sp. (strain PCC 7120 / SAG 25.82 / UTEX 2576) OX =103690 GN=tgt PE=3 SV=2
MSAIFSFQSLARCSQTKARSGIFLTPHGIVETPRFMPVGTLANVKTVTPAQLKETGAQMVLSNTYHLHLQPGEAIVAGGGGLHKFMGWNGPMLTDSGGFQVFSLSEMRKITEEGVTFRSPRDGQIIKLTPERSIEIQNILGADVIMAFDECPPYPANRQEVEAATERTYRWLERCITAHQRQDQALFGIVQGGVYLDLRAKAANTLTELDLPGYAIGGVSVGEPPEMMAQIVQATAPLLPAHKPRYLMGVGTYREMVIAIASGIDLFDCVIPTRWARHGTAMVKGERWNLKNAKFREDFAPIDETCPCYACQNFSRAYISHLVRSQEILAYTLLSIHNITELIRFTQKIREAILSDRFLEEFGHWLNSAETDNR

SEQ ID NO: 58235 - protein, 376 aa, Nostoc sp.
  misc_feature (1)..(376): tr|A0A1C0UTZ8|A0A1C0UTZ8_9NOSO Queuine tRNA-ribosyltran sferase OS=Nostoc sp. MBR 210 OX=1881015 GN=tgt PE=3 SV =1
MSDNFSFQSLARCSQTKARAGIFLTPHGVVETPRFMPVGTLANVKTVTPAQLKDTGAQMVLSNTYHLHLQPGEAIVAGGGGLHKFMGWDGPMLTDSGGFQVFSLSEMRKITEEGVTFRSPHDGQIINLTPERSIEIQNTLGADVIMAFDECPPYPATRQEVETATQRTYRWLERCIVAHKRQDQALFGIVQGGVYLDLRSQAAVELAKLDLPGYAIGGVSVGEPAELMAQIVQATAPLLPPEKPRYLMGVGTYREMAIAIASGIDLFDCVIPTRWARHGTAMVQGERWNLKNAKFREDFAPLDETCPCYACQNFSRAYISHLVRSQEILAYTLLSIHNITELIRFTQKIRQAILNDSFLEEFGHWLNSPETGDDLS

SEQ ID NO: 58236 - protein, 384 aa, Nostocales cyanobacterium
  misc_feature (1)..(384): tr|A0A1Y0RWS7|A0A1Y0RWS7_9CYAN Queuine tRNA-ribosyltran sferase OS=Nostocales cyanobacterium HT-58-2 OX=1940762 GN=tgt PE=3 SV=1
MTAKFSFQRLGSCSQTKARAGIFFTPHGPVETPRFMPVGTLANVKTLTPAQLQDTGAQMVLCNTYHLHLQPGEAIVAGGGGLHKFMGWNGPILTDSGGFQVFSLSEMRKISEEGVTFRSPHDGQIINLTPERSIEIQNILGADVIMAFDECPPYPASREEVEAATQRTYRWLERCIAAHQRSEQALFGIVQGGVHLDLRSHAAIALTKLDLPGYAIGGVSVGEPPELIAKIVQATAPLLPPDKPRYLMGVGTYREIAIAIASGVDLFDCVIPTRWARHGTAMVKGERWNLKNAKFREDFTPLDETCPCYTCQNFTRAYLSHLVRSQEILAYTLLSIHNITELIHFTQRIRKAILEDRFVIEFAQWLTPESPEDSIETHSAPIED

SEQ ID NO: 58237 - protein, 385 aa, Notoacmeibacter marinus
  misc_feature (1)..(385): tr|A0A231UXX3|A0A231UXX3_9RHIZ Queuine tRNA-ribosyltran sferase OS=Notoacmeibacter marinus OX=1876515 GN=tgt PE =3 SV=1
MSDEREQHPSETFTFTQLAQDGAARRGRIDMPRGSIRTPAFMPVGTAGTVKAMYLDQVRDLGADIILGNTYHLMLRPGAERVAKLGGLHEFARWPHPILTDSGGFQVMSLSGLRKITEEGVTFQSHVDGAKHFMSPERSIEIQGLLGSDIQMQLDECIALPAGEKEIARAMELSLRWAERCKAAFGDQPGKAMFGIVQGGDHKELRVQSAKALAAMDLKGYAIGGLAVGEPQDVMFDMIETVMPFLPQTKPRYLMGVGTPDDILGSVQRGVDMFDCVMPTRAGRHGLAFTRHGRINLKNARHAEDHRPLDATSDCPATRDYSRAYLHHLVRAGEPLAGMLLTWNNLAYYQQLMAGIRDAITGGRLAAFAAETRAEWVKGDLPPIG

SEQ ID NO: 58238 - protein, 385 aa, Notoacmeibacter sp.
  misc_feature (1)..(385): tr|A0A3L7JBY3|A0A3L7JBY3_9RHIZ Queuine tRNA-ribosyltran sferase OS=Notoacmeibacter sp. M2BS9Y-3-1 OX=2448481 GN =tgt PE=3 SV=1
MNLDREQTPSGQFFFTKLAEDGAARRGRIDMPRGSIRTPAFMPVGTAGTVKAMYLDQVRDLGADIILGNTYHLMLRPGAERVARLGGLHDFARWPYPILTDSGGFQVMSLSGLRKITEEGVTFQSHVDGTKHFMSPERSIEIQGLLDSDIQMQLDECIALPAEEKEIGRAMELSLRWAERCKAAFGDQPGKAMFGIIQGGDNARLRIESAEALAALDLKGYAIGGLAVGEPQNVMFDMIETVIPSMPKDRPRYLMGVGTPDDILGSVQRGVDMFDCVMPTRAGRHGLAFTRHGKINLKNARHAEDDRPLDEESDCAAARDYSRAYLHHLVRAGEPLAGMLLTWNNLAYYQQLMAGIRAAISEARLQEHAEKVRAAWAKGDLPPRS

SEQ ID NO: 58239 - protein, 377 aa, Novibacillus thermophilus
  misc_feature (1)..(377): tr|A0A1U9K5B5|A0A1U9K5B5_9BACL Queuine tRNA-ribosyltran sferase OS=Novibacillus thermophilus OX=1471761 GN=tgt PE=3 SV=1
MAIRYELLKTCHQTGARLGRLHTPHGIVETPAFMPVGTLATVKAMSPEELEEMDAQIILSNTYHLFLRPGHEVVAAAGGLHRFMHWNRPILTDSGGFQVFSLSKLRHITEDGVTFRSHISGEPLFIGPEKAMEIQNALGSDIIMAFDECAPYPAEREYVETSLERTTRWAERCLKAHKRPDEQALFGIVQGGVYRDLRERSARSLTALDFPGYAIGGLSVGEPKEIMYDVLEYTVPLLPDTKPRYLMGVGSPDALVEGAVRGIDMFDCVLPTRIARNGTTMTSRGRLVVRNAKYARDFSPLDPACDCYTCRNYTRAYIRHLIKSDEILGLRLTTYHNLYFLLRLMENVRQAIREDRLRNFRDEFFAQYYGQNSHKPF

SEQ ID NO: 58240 - protein, 375 aa, Noviherbaspirillum autotrophicum
  misc_feature (1)..(375): tr|A0A0C2BT52|A0A0C2BT52_9BURK Queuine tRNA-ribosyltran sferase OS=Noviherbaspirillum autotrophicum OX=709839 G N=tgt PE=3 SV=1
MLNFKLIKTDGHARRGRLTLNHGVVETPIFMPVGTYGSVKAMSPLELHDIDAQIILGNTFHLWLRPGLDVISKFDGLHRFIGWNKPVLTDSGGFQVFSLGAMRKITEEGVKFASPINGDKLFLSPEISMQIQRVLNSDIVMQFDECTPYEIEGRPATEAEAAKSMRMSLRWAKRSRDEFDRGENPNALFGIVQGGMFEHLRDESLAGLQEIGFGGIAIGGLSVGEPKEDMMRVLAHVGPRLPADKPHYLMGVGTPEDLVAGVANGVDMFDCVMPTRNARNGWLFTRFGDLKIKNARYKDDEKPLDETCECYACRNFSRAYLYHLHRAGEILGARLNTIHNLHYYLQLMREMRAAIDNDRFQAFVVQFHADRARGV

SEQ ID NO: 58241 - protein, 375 aa, Noviherbaspirillum denitrificans
  misc_feature (1)..(375): tr|A0A254TC63|A0A254TC63_9BURK Queuine tRNA-ribosyltran sferase OS=Noviherbaspirillum denitrificans OX=1968433 GN=tgt PE=3 SV=1
MLNFKLLKTDGKARRGRLTLNHGVVETPIFMPVGTYGSVKAMSPEELHEVGAQIILGNTFHLWLRPGLDVVGKFDGLHRFIGWSKPILTDSGGFQVFSLGAMRKITEEGVKFASPINGDKLFLSPEISMQIQRVLNSDIVMQFDECTPYEIDGRPATEAEAGKSMRMSLRWAKRSRDEFDKGENPNALFGIVQGGMFEHLRDESLAGLQEVGFEGYAIGGLSVGEPKEDMMRVLEHVGPRLPADKPHYLMGVGTPEDLVAGVANGVDMFDCVMPTRNARNGWLFTRFGDLKIKNARYKDDDKPLDETCECYTCRNFSRAYLYHLHRAGEILGARLNTIHNLHYYLQLMREMRAAIDADRFQAFVVQFQADRARGI

SEQ ID NO: 58242 - protein, 375 aa, Noviherbaspirillum humi
  misc_feature (1)..(375): tr|A0A239K7J6|A0A239K7J6_9BURK Queuine tRNA-ribosyltran sferase OS=Noviherbaspirillum humi OX=1688639 GN=tgt PE =3 SV=1
MLQYQLLKTDGKARRGRLTLNHGTIETPIFMPVGTYGSVKAMSPQDLNDIDAQIILGNTFHLWLRPGLEVVAKFGGLHRFIGWDKPILTDSGGFQVFSLGEMRKISEEGVKFASPINGDKLFLSPEISMQIQRVLNSDIVMQFDECTPYEIGGRPATRDEAGQSMRMSLRWARRSKNEFERELNPNALFGIVQGGMFEDLRDESLAGLEEVGFHGLAIGGLSVGEPKEDMMRILEHVGPKLHADKPHYLMGVGTPEDLVAGVANGVDMFDCVMPTRNARNGWIFTRFGDIKIKNARYKDDDKPLDETCSCYACRNFSRAYLFHLHRAGEILGARLNTIHNLHYYLQLMQEMRDAIDAGTFQAFVVRFKADRARGV

SEQ ID NO: 58243 - protein, 375 aa, Noviherbaspirillum sp.
  misc_feature (1)..(375): tr|A0A3A3G160|A0A3A3G160_9BURK Queuine tRNA-ribosyltran sferase OS=Noviherbaspirillum sp. K1S02-23 OX=2320865 G N=tgt PE=3 SV=1
MLKYQLLKTDGKARRGRLTLNHGTVETPIFMPVGTYGSVKAMSPQELHEIGAEIILGNTFHLWLRPGTEVLDKFGGLHDFMGWDRSILTDSGGFQVFSLGEMRKITEEGVKFASPINGDKLFLSPEVSMQIQKSLNSDIVMQFDECTPYEIDGRAATAKEAADSMRMSLRWGQRSRDEFDRGENPNALFGIVQGGMFEHLRDESLAGLEEIGFHGLAIGGLSVGEPKEDMLRILAHIGPRLPADKPHYLMGVGTPEDLVAGVANGIDMFDCVMPTRNARNGWLFTRFGDIKIKNARYKDDMAPLDETCGCHACRNFSRAYLHHLHRAGEILGARLNTIHNLYYYLQLMRDMRAAIEAGEFALFVARFAAERARGV

SEQ ID NO: 58244 - protein, 375 aa, Noviherbaspirillum sp.
  misc_feature (1)..(375): tr|A0A5B8ND10|A0A5B8ND10_9BURK Queuine tRNA-ribosyltran sferase OS=Noviherbaspirillum sp. UKPF54 OX=2601898 GN= tgt PE=3 SV=1
MLNFKLIKTDGNARRGRLTLNHGVVETPIFMPVGTYGSVKAMSPLELHDIDAQIILGNTFHLWLRPGLDVIGKFDGLHRFIGWNKPVLTDSGGFQVFSLGAMRKITEEGVKFASPINGDKLFLSPEISMQIQRVLNSDIVMQFDECTPYEIDGRPATEAEAAKSMRMSLRWAKRSRDEFDRGENPNALFGIVQGGMFEHLRDESLAGLQEIGFEGIAIGGLSVGEPKEDMMRVLEHVGPRLPADKPHYLMGVGTPEDLVAGVASGVDMFDCVMPTRNARNGWIFTRFGDIKIKNARYKDDEKPLDETCECYACRNFSRAYLYHLHRAGEILGARLNTIHNLHYYLQLMREMRAAIDNDRFQAFVAQFHADRARGV

SEQ ID NO: 58245 - protein, 367 aa, Novimethylophilus kurashikiensis
  misc_feature (1)..(367): tr|A0A2R5F9E8|A0A2R5F9E8_9PROT Queuine tRNA-ribosyltran sferase OS=Novimethylophilus kurashikiensis OX=1825523 GN=tgt PE=3 SV=1
MQFNVIHTHQAARRGTLTLAHGTVQTPAFMPVGTYGTVKAMSPAEIREIGAHIVLGNTFHLWLRPGLEVIAAHGGLHRFMGWDGPILTDSGGFQVWSLGDLRKITEEGVKFRSPINGDACFLTPEESMRIQKVLNSDIVMIFDECTPYPASHDQAKASMELSLRWAARSKSAHEGNPNALFGIIQGGMYEDLRDVSLRGLTDIGFDGYAIGGLSVGEPKEDMLRILDHLPKQMPADKPRYLMGVGTPEDLVAAVSRGVDMFDCVMPTRNARNGWLFTRHGDVKIKNAKYKDDTAPLDPDCACYTCRNFTRAYLHHLHRVGEILGARLNTIHNLHYYQELMQGMRSAIESGTFAAFVAEFERQRNSLC

SEQ ID NO: 58246 - protein, 374 aa, Novosphingobium aromaticivorans
  misc_feature (1)..(374): sp|Q2G639|TGT_NOVAD Queuine tRNA-ribosyltransferase OS= Novosphingobium aromaticivorans (strain ATCC 700278 / D SM 12444 / CIP 105152 / NBRC 16084 / F199) OX=279238 GN =tgt PE=3 SV=1
MTRFSFKIHATDGKARTGAIQMMRGEIRTPAFMPVGTAATVKAMKVEDVRASGADIILGNTYHLMLRPGAERVARLGGLHKFMGWDRPILTDSGGYQVMSLSDLRKITEEGVTFASHLDGSRHLLSPERSMEIQRLLGSDIVMCFDECPRADQPREVIARSMEMSMRWARRSRDAFDAGGEHAERSALFGIQQGALDEGLRKTSADALTDIGFDGYAIGGLAVGEGQEAMFATLDFAPQQLPADRPRYLMGVGKPDDLVGAVERGVDMFDCVLPTRSGRNGQAFTWNGPLNMRNARHAEDTGPLDERCPCPTCTKYSRAYLHHLHKSGEMLGAMLLTEHNLWFYQQLMAGMRAAIAEGRFAAFAADFRRDYFAR

SEQ ID NO: 58247 - protein, 378 aa, Novosphingobium barchaimii
  misc_feature (1)..(378): tr|A0A561H7H7|A0A561H7H7_9SPHN Queuine tRNA-ribosyltran sferase OS=Novosphingobium barchaimii OX=1420591 GN=tgt PE=3 SV=1
MNPRFEFSIHATDGKARTGTIKMRRGEIRTPAFMPVGTAATVKAMKPQDVRATGADILLGNTYHLMLRPGAERVARLGGLHKFMNWDRPILTDSGGYQVMSLSDLRKITENGVTFASHLDGSRHLLTPERSMEIQRLLGSDIVMCFDECPKIDQPRDVIARSMEMSMRWARRSRDAFDAGGEHAANSALFGIQQGALDESLRKASADALIDIGFDGYAIGGLAVGEGQEAMFSTLEFAPGQLPADRPRYLMGVGKPDDLVGAVERGVDMFDCVLPSRSGRNGQAFTWNGPLNLRNARHAEDNNPLDERCKCPTCGTYSRAYLHHLVRSGEILGAMLMTEHNISFYQQLMQGMRDAIAAGTFVQFAADFRRDYFGGRDG

SEQ ID NO: 58248 - protein, 376 aa, Novosphingobium barchaimii
  misc_feature (1)..(376): tr|A0A0J8AZE3|A0A0J8AZE3_9SPHN Queuine tRNA-ribosyltran sferase OS=Novosphingobium barchaimii LL02 OX=1114963 G N=tgt PE=3 SV=1
MKPRFQFTIHATEGKARTGVIQMRRGEIRTPAFMPVGTAATVKAMKPQDVRATGADIILGNTYHLMLRPGAERMARLGGLHKFMNWDRPILTDSGGYQVMSLSELRKITEEGVTFASHIDGSRHMLSPERSMEIQRLLGSDIVMCFDECPKIDQPRDVIARSMEMSMRWAKRSREAFDAGGDHAECSALFGIQQGALDESLRKTSADALAEIGFDGYAIGGLAVGEGQEAMFSTLDFAPGQLPADRPRYLMGVGKPDDLVGAVERGVDMFDCVLPTRSGRNGQAFTWSGPLNMRNARHAEDTGPVDPRCSCPTCATYTRAYLHHLIKAGEMLGAMLLTEHNISFYQQLMQGMRDAIAEQRFTAFAADFRRDYFRKE

SEQ ID NO: 58249 - protein, 375 aa, Novosphingobium fuchskuhlense
  misc_feature (1)..(375): tr|A0A117UVZ6|A0A117UVZ6_9SPHN Queuine tRNA-ribosyltran sferase OS=Novosphingobium fuchskuhlense OX=1117702 GN= tgt PE=3 SV=1
MTRFSFTVNATDGRARTGAITMQRGTIRTPAFMPVGTAGTVKAMKVEDVAATGADIILGNTYHLMLRPGAERMARLGGLHTFMRWDKPILTDSGGYQVMSLSDLRKITEDGVTFASHIDGSRHNLTPERSMEIQRLLGSDIVMAFDECPKIDQPREVIARSMQMSMRWARRSRDGFDAGGEHAERAALFGIQQGGLDEALRGESAGLLQDIGFDGYAIGGLAVGEGQEAMFATLDFAPGQLPADRPRYLMGVGKPDDLVGAVERGVDMFDCVLPTRSGRNGQGFTWDGPINMRNARHAEDMGPLDADCTCSVCAKYSRAYLHHLHKAGEMLGAMLLTEHNLAFYQQLMAAMRAAIAEGRFARFAAGFRARYLARR

SEQ ID NO: 58250 - protein, 376 aa, Novosphingobium ginsenosidimutans
  misc_feature (1)..(376): tr|A0A5B8S6K5|A0A5B8S6K5_9SPHN Queuine tRNA-ribosyltran sferase OS=Novosphingobium ginsenosidimutans OX=1176536 GN=tgt PE=3 SV=1
MTAPRFQFEIHATDGKARTGTIRMRRGEIRTPAFMPVGTAATVKAMKPESVRATGADILLGNTYHLMLRPGAERVARLGGLHKFMNWDRPILTDSGGYQVMSLSDLRKITEEGVTFKSHLDGSRHLLTPERSMEIQRLLGSDIVMAFDECPRADAPYDTIAQSMRMSMRWAARSRAGFDSGAEHAERSALFGIQQGALNEDLRRESAQALQEIGFDGYAIGGLAVGEGQEAMFATLDFAPGMLPADRPRYLMGVGKPDDLVGAVERGVDMFDCVLPSRSGRNGQGFTWNGPVNLRNAKHAEDPAPLDERCPGDCCTRYSRAYLHHLHKSGEILGAMLLTEHNLTFYQQLMQAMRGAIAAGTFAAFAADFRRSYLGT

SEQ ID NO: 58251 - protein, 376 aa, Novosphingobium guangzhouense
  misc_feature (1)..(376): tr|A0A2K2G586|A0A2K2G586_9SPHN Queuine tRNA-ribosyltran sferase OS=Novosphingobium guangzhouense OX=1850347 GN= tgt PE=3 SV=1
MNPRFQFSIHATDGKARTGTIQMRRGEIRTPAFMPVGTAATVKAMKPQDVRATGADILLGNTYHLMLRPGAERVARLGGLHKFMNWDRPILTDSGGYQVMSLSELRKITEEGVTFASHIDGSRHMLSPERSMEIQRLLGSDIVMCFDECPKIDQPRDVIARSMEMSMRWAKRSRAAFDAGGEHAANSALFGIQQGALDESLRKTSADALTEIGFDGYAIGGLAVGEGQEAMFATLEFAPGQLPADRPRYLMGVGKPDDLVGAVERGVDMFDCVLPTRSGRNGQAFTWNGPLNMRNARHAEDTGPIDERCKCPTCGTYTRAYLHHLIKAGEMLGAMLLTEHNLSFYQQLMQGMRDAIAEQRFSTFAADFRRDYFRKE

SEQ ID NO: 58252 - protein, 376 aa, Novosphingobium kunmingense
  misc_feature (1)..(376): tr|A0A2N0I222|A0A2N0I222_9SPHN Queuine tRNA-ribosyltran sferase OS=Novosphingobium kunmingense OX=1211806 GN=tg t PE=3 SV=1
MTAPRFAFDVHSTCGKARTGTIRMRRGNIRTPAFMPVGTAATVKAMKPETVRATGADILLGNTYHLMLRPGAERVARLGGLHRFMNWDRPILTDSGGYQVMSLSDLRKITEEGVTFKSHLDGSKHLLTPERSMEIQRLLGSDIVMAFDECPRADAPRDVIEKSMQMSMRWAARSRAGFNSGDEHAGRSALFGIQQGALDEGLRRESAEALQAIGFDGYAIGGLAVGEGQEAMFATLDFAPDMLPADRPRYLMGVGKPDDLVGAVERGVDMFDCVLPSRSGRNGQGFTWNGPVNLRNARHAEDAAPLDETCPGDCCTKYSRAYLHHLHKSGEILGAMLLTEHNLTFYQQLMGAMRTAIAAGTFADFATAFRRDYVRN

SEQ ID NO: 58253 - protein, 378 aa, Novosphingobium lindaniclasticum
  misc_feature (1)..(378): tr|T0IBK0|T0IBK0_9SPHN Queuine tRNA-ribosyltransferase OS=Novosphingobium lindaniclasticum LE124 OX=1096930 GN =tgt PE=3 SV=1
MNPRFEFSIHATDGKARTGVIKMRRGEIRTPAFMPVGTAATVKAMKPQDVRATGADIILGNTYHLMLRPGAERVARLGGLHKFMNWDRPILTDSGGYQVMSLSDLRKITENGVTFASHLDGSRHLLTPERSMEIQRLLGSDIVMCFDECPKIDQPRDVIARSMEMSMRWAKRSRDGFDAGGEHAANSALFGIQQGALDEGLRKASADALIDIGFDGYAIGGLAVGEGQEAMFSTLEFAPGQLPADRPRYLMGVGKPDDLVGAVERGVDMFDCVLPSRSGRNGQAFTWNGPLNLRNARHAEDQNPLDERCKCPTCGTYSRAYLHHLVRSGEILGSMLMTEHNISFYQQLMQAMRDAIAAGTFAQFAADFRRDYFQGRSG

SEQ ID NO: 58254 - protein, 374 aa, Novosphingobium malaysiense
  misc_feature (1)..(374): tr|A0A0B1ZPW6|A0A0B1ZPW6_9SPHN Queuine tRNA-ribosyltran sferase OS=Novosphingobium malaysiense OX=1348853 GN=tg t PE=3 SV=1
MNPRFDFQIHATDGKARTGTIGMRRGEIRTPAFMPVGTAGTVKAMKPQDVRATGADIILGNTYHLMLRPGAERVARLGGLHKFMNWSRPILTDSGGYQVMSLSDLRKISEEGVTFASHIDGSRHHLTPERSMEIQRLLGSDIVMCFDECPKIDQPREVIARSMEMSMRWAKRSRDGFDSGGKHAENSALFGIQQGALDEGLRKHSADALVDIGFDGYAIGGLAVGEGQEAMFATLDFAPSQLPADHPRYLMGVGKPDDLVGAVERGVDMFDCVLPTRSGRNGQAFTWNGPLNMRNARHAEDTGPIDERCSCTTCGTYSRAYIHHLIRSGEILGAMLLTEHNISFYQQLMQGMRDAIAEGRFATFAADFRRDYLR

SEQ ID NO: 58255 - protein, 375 aa, Novosphingobium mathurense
  misc_feature (1)..(375): tr|A0A1U6GWC7|A0A1U6GWC7_9SPHN Queuine tRNA-ribosyltran sferase OS=Novosphingobium mathurense OX=428990 GN=tgt PE=3 SV=1
MNPRFEFSIHATDGKARTGVIKMRRGEIRTPAFMPVGTAATVKAMKPESVRATGADIILGNTYHLMLRPGAERVARLGGLHKFMNWDRPILTDSGGYQVMSLSDLRKITEEGVTFASHLDGSRHMLSPERSMEIQRLLGSDIVMCFDECPKIDQPRDVIARSMEMSMRWAKRSRDGFDSGGEHAANSALFGIQQGALDEGLRKASADALVDIGFDGYAIGGLAVGEGQEAMFATLEFAPGQLPVDRPRYLMGVGKPDDLVGAVERGVDMFDCVLPTRSGRNGQAFTWNGPLNMRNARHAEDNGPIDERCKCPTCGTYSRAYLHHLIRSGEILGAMLLTEHNVSFYQQLMQAMRDAIAESRFAAFAADFRRDYLKK

SEQ ID NO: 58256 - protein, 374 aa, Novosphingobium nitrogenifigens
  misc_feature (1)..(374): tr|F1Z8X5|F1Z8X5_9SPHN Queuine tRNA-ribosyltransferase OS=Novosphingobium nitrogenifigens DSM 19370 OX=983920 GN=tgt PE=3 SV=1
MTRFSFSIHATEGKARTGVIRMKRGEIRTPAFMPVGTAATVKAMKVEDVRAAGADIILGNTYHLMLRPGAERMARLGGLHKFMGWDRPILTDSGGYQVMSLASLRKITEEGVTFASHLDGSRHMLSPERSMEIQRLLGSSIVMAFDECPRIDQPRDVIARSMEMSMRWARRSRAGFDAGGEHAVNSALFGIQQGGLDEQLRGHSADALRDIGFDGYAIGGLAVGEGQEAMFATLDFAPSQLPADRPRYLMGVGKPDDLVGAVERGVDMFDCVLPTRSGRNGQGFTWNGPVNLRNARHAEDTEPLDPRCGCPVCAKYSRAYLHHLHRSGEILGAMLLTEHNIWFYQQLMAGMRAAIAEGRFAAFVADFRRDYLQR

SEQ ID NO: 58257 - protein, 378 aa, Novosphingobium pentaromativorans
  misc_feature (1)..(378): tr|A0A2W5QBZ1|A0A2W5QBZ1_9SPHN Queuine tRNA-ribosyltran sferase OS=Novosphingobium pentaromativorans OX=205844 GN=tgt PE=3 SV=1
MNPRFEFSIHATDGKARTGVIRMRRGEIRTPAFMPVGTAATVKAMKPQDVRATGADIILGNTYHLMLRPGAERVARLGGLHKFMNWDRPILTDSGGYQVMSLSDLRKITENGVTFASHLDGSRHLLTPERSMEIQRLLGSDIVMCFDECPKIDQPRDVIARSMEMSMRWAKRSRNGFDSGGEHAESSALFGIQQGALDEGLRKASADALTDIGFDGYAIGGLAVGEGQEAMFSTLEFAPGQLPADRPRYLMGVGKPDDLVGAVERGVDMFDCVLPSRSGRNGQAFTWNGPLNLRNARHAEDNDPLDERCKCPTCATYSRAYLHHLVRSGEILGSMLMTEHNISFYQQLMQGMRDAISAGTFAQFAADFRRSYFGGRDG

SEQ ID NO: 58258 - protein, 375 aa, Novosphingobium pentaromativorans
  misc_feature (1)..(375): tr|G6E6S7|G6E6S7_9SPHN Queuine tRNA-ribosyltransferase OS=Novosphingobium pentaromativorans US6-1 OX=1088721 G N=tgt PE=3 SV=1
MNPRFEFSIHATDGKARTGVIKMRRGEIRTPAFMPVGTAATVKAMKPESVRATGADIILGNTYHLMLRPGAERVARLGGLHKFMNWDRPILTDSGGYQVMSLSDLRKITEEGVTFASHLDGSRHMLSPERSMEIQRLLGSDIVMCFDECPKIDQPRDVIARSMEMSMRWARRSRDGFDSGGEHAANSALFGIQQGALDEGLRKASADALVDIGFDGYAIGGLAVGEGQEAMFATLEFAPGQLPVDRPRYLMGVGKPDDLVGAVERGVDMFDCVLPTRSGRNGQAFTWNGPLNMRNARHAEDNGPIDERCKCPTCGTYSRAYLHHLIRSGEILGAMLLTEHNVSFYQQLMQAMRDAIAASRFAAFAADFRRDYLRK

SEQ ID NO: 58259 - protein, 376 aa, Novosphingobium resinovorum
  misc_feature (1)..(376): tr|A0A031K7E7|A0A031K7E7_9SPHN Queuine tRNA-ribosyltran sferase OS=Novosphingobium resinovorum OX=158500 GN=tgt PE=3 SV=1
MKPRFQFSIHATDGKARTGTIQMRRGEIRTPAFMPVGTAATVKAMKPQDVRATGADILLGNTYHLMLRPGAERVARLGGLHKFMNWDRPILTDSGGYQVMSLSDLRKITEEGVTFASHIDGSRHMLSPERSMEIQRLLGSDIVMCFDECPKIDQPRDVIARSMEMSMRWAKRSRDAFDTGGAHAESSALFGIQQGALDEGLRKTSADALTEIGFDGYAIGGLAVGEGQEAMFATLEFAPGQLPADRPRYLMGVGKPDDLVGAVERGVDMFDCVLPTRSGRNGQAFTWNGPLNMRNARHAEDTGPIDERCKCPTCGTYTRAYIHHLIKSGEMLGAMLLTEHNLSFYQQLMQGMRDAIAEQRFAAFAADFRRDYFRKE

SEQ ID NO: 58260 - protein, 383 aa, Novosphingobium sediminis
  misc_feature (1)..(383): tr|A0A512AGH7|A0A512AGH7_9SPHN Queuine tRNA-ribosyltran sferase OS=Novosphingobium sediminis OX=707214 GN=tgt P E=3 SV=1
MLSPENLPMTRFSFKVHATDGRARTGAITMKRGTIRTPAFMPVGTAGTVKAIKVEDVAATGADIILGNTYHLMLRPGAERMARLGGLHNFMRWDKPILTDSGGYQVMSLSDLRKITEEGVTFASHIDGSRHNLTPERSMEIQRLLGSDIVMAFDECPKIDQPRDVIARSMEMSMRWAKRSRDGFDAGGQHAEDAALFGIQQGGLDEALRGESAGKLRDIGFDGYAIGGLAVGEGQEAMFATLDFAPGQLPENAPRYLMGVGKPDDLVGAVERGVDMFDCVLPTRSGRNGQGFTWDGPVNLRNARHAEDMGPLDAECTCPTCAKYSRAYLHHLHKAGEMLGAMLLTEHNLAFYQQLMAAMRAAIAEGRFAAFAAGFRARYLAKR

SEQ ID NO: 58261 - protein, 374 aa, Novosphingobium sp.
  misc_feature (1)..(374): tr|A0A1W2D279|A0A1W2D279_9SPHN Queuine tRNA-ribosyltran sferase OS=Novosphingobium sp. B1 OX=1938756 GN=tgt PE= 3 SV=1
MTRFAFDIHATDGKARTGTIRMMHGDIRTPAFMPVGTAATVKAMKMEDVRASGADIILGNTYHLMLRPGAERVARLGGLHKFGGWDRPILTDSGGYQVMSLSDLRKITEEGVTFASHLDGSRHLLSPERSMEIQRLLGSDIVMCFDECPRADQARDVIAKSMEMSMRWARRSRDAFDAGGEHAERSALFGIQQGALDEALRKASADALTDIGFDGYAIGGLAVGEGQEAMFATLDFAPQQLPAERPRYLMGVGKPDDLVGAVERGVDMFDCVLPTRSGRNGQAFTWNGPVNMRNARHAEDTGPLDERCPCPTCVKYSRAYLHHLHKSGEMLGAMLLTEHNLWFYQQLMAGMRAAISEGRFTRFAADFRRDYFAR

SEQ ID NO: 58262 - protein, 374 aa, Novosphingobium sp.
  misc_feature (1)..(374): tr|A0A3B7DYR6|A0A3B7DYR6_9SPHN Queuine tRNA-ribosyltran sferase OS=Novosphingobium sp. THN1 OX=1016987 GN=tgt P E=3 SV=1
MTRFAFDIHATDGKARTGTIRMMRGDIRTPAFMPVGTAATVKAMKMEDVRASGADIILGNTYHLMLRPGAERVARLGGLHKFGGWDRPILTDSGGYQVMSLSDLRKITEEGVTFASHLDGSRHLLSPERSMEIQRLLGSDIVMCFDECPRADQPRDVIAKSMEMSMRWARRSRDAFNAGGEHAERSALFGIQQGALDERLRKDSADALTDIGFDGYAIGGLAVGEGQEAMFATLEFAPQQLPADRPRYLMGVGKPDDLVGAVERGVDMFDCVLPTRSGRNGQGFTWNGPVNMRNARHAEDTGPLDERCPCPTCTKYSRAYLHHLHKSGEMLGAILLTEHNLWFYQQLMAGMRAAIAEGRFTAFAADFRRDYLAR

SEQ ID NO: 58263 - protein, 374 aa, Novosphingobium subterraneum
  misc_feature (1)..(374): tr|A0A0B9AIL5|A0A0B9AIL5_9SPHN Queuine tRNA-ribosyltran sferase OS=Novosphingobium subterraneum OX=48936 GN=tgt PE=3 SV=1
MTRFAFDIHATDGKARTGTIRMMRGDIRTPAFMPVGTAATVKAMKMEDVRASGADIILGNTYHLMLRPGAERVARLGGLHKFGGWDRPILTDSGGYQVMSLSDLRKITEEGVTFASHLDGSRHLLSPERSMEIQRLLGSDIVMCFDECPRADQPRDVIAKSMEMSMRWARRSRDAFNAGAEHAERAALFGIQQGALDEGLRKASADALTDIGFDGYAIGGLAVGEGQEAMFATLDFAPQQLPADRPRYLMGVGKPDDLVGAVERGVDMFDCVLPTRSGRNGQGFTWNGPVNMRNARHAEDTGPLDERCPCPTCTKYSRAYLHHLHKSGEMLGAMLLTEHNLWFYQQLMAGMRAAIAEGRFAAFAADFRRDYFAR

SEQ ID NO: 58264 - protein, 374 aa, Novosphingobium taihuense
  misc_feature (1)..(374): tr|A0A562JY21|A0A562JY21_9SPHN Queuine tRNA-ribosyltran sferase OS=Novosphingobium taihuense OX=260085 GN=tgt P E=3 SV=1
MTRFAFDIHATDGKARTGTIRMMRGDIRTPAFMPVGTAATVKAMKMEDVRASGADIILGNTYHLMLRPGAERVARLGGLHKFGGWDRPILTDSGGYQVMSLSDLRKITEEGVTFASHLDGSRHLLSPERSMEIQRLLGSDIVMCFDECPRADQSRDVIAKSMEMSMRWAKRSRDAFDAGGEHAERSALFGIQQGALDEGLRKYSADALTEIGFDGYAIGGLAVGEGQEAMFATLDFAPQQLPADRPRYLMGVGKPDDLVGAVERGVDMFDCVLPTRSGRNGQAFTWNGPLNMRNARHAEDTGPLDERCPCPTCTKYSRAYLHHLHKAGEMLGAMLLTEHNLWFYQRLMAGMRAAISEGRFAAFAADFRRDYFAR

SEQ ID NO: 58265 - protein, 374 aa, Novosphingobium tardaugens
  misc_feature (1)..(374): tr|U2YMC0|U2YMC0_9SPHN Queuine tRNA-ribosyltransferase OS=Novosphingobium tardaugens NBRC 16725 OX=1219035 GN= tgt PE=3 SV=1
MTRFAFTINARDGKARTGRIAMQRGEIRTPAFMPVGTAATVKAMKPEDVRQTGADIILGNTYHLMLRPGAERVARLGGLHRFMNWDRPILTDSGGYQVMSLSDLRKITEEGVRFSSHLDGSKHLLTPERSMEIQRLLGSDIVMAFDECPRADEPRDVIARSMEMSMRWAKRSRDGFDSGGDHAARAALFGIQQGALDEELRGQSAQALREIGFDGYAIGGLAVGEGQEAMFATLDFAPGQLPDDRPRYLMGVGKPDDLVGAVERGVDMFDCVLPSRSGRNGQAFTWNGPLNIRNAKHAEDTGPLDERCTCPTCGKYSRAYLHHLVKSGEILGAMLMTEHNLSFYQQLMQAMRDAIVEGRFAAYARDFRRNYLKS

SEQ ID NO: 58266 - protein, 375 aa, Obesumbacterium proteus
  misc_feature (1)..(375): tr|A0A4Q9CYX9|A0A4Q9CYX9_9GAMM Queuine tRNA-ribosyltran sferase OS=Obesumbacterium proteus OX=82983 GN=tgt PE=3 SV=1
MKYELDTTDGRARRGRLIFERGVVETPAFMPVGTYGTVKGMTPEEVKETGAQILLGNTFHLWLRPGQEIMKLHGDLHDFMQWKGPILTDSGGFQVFSLGKMRKIKEEGVHFRHPINGSPIFLSPEKSMEIQYDLGSDIVMIFDECTPYPADWDYAKSSMEMSLRWAKRSRQRFDELGNKNSLFGIIQGGVYEDLRDVSLKGLVDIGFDGYAVGGLAVGEPKEDMHRILEHVCPQIPEDKPRYLMGVGKPEDLVEGVRRGIDMFDCVMPTRNARNGHLFVTNGIVKIRNAQYKDDVTTLDAECDCYTCRNYSRAYLHHLDRCNEILGARLNTIHNLRYYQRLMAGLRQAIEDGKLDEFVADFYGRQGKPVPPVGAK

SEQ ID NO: 58267 - protein, 375 aa, Obesumbacterium proteus; identical to SEQ ID NO: 58266
  misc_feature (1)..(375): tr|A0A1B7KDS3|A0A1B7KDS3_9GAMM Queuine tRNA-ribosyltran sferase OS=Obesumbacterium proteus ATCC 12841 OX=135426 8 GN=tgt PE=3 SV=1

SEQ ID NO: 58268 - protein, 374 aa, Oblitimonas alkaliphila
  misc_feature (1)..(374): tr|A0A0K1XCD6|A0A0K1XCD6_9GAMM Queuine tRNA-ribosyltran sferase OS=Oblitimonas alkaliphila OX=1697053 GN=tgt PE =3 SV=1
MSFMQFELLATEGKARRGRLTFPRGVVETPAFMPVGTYGTVKGMLPRDIEAIGAHMILGNTFHLWLRPGTEVIQQQGDLHNFMQWQGPILTDSGGFQVFSLGAMRKIKEEGVYFSSPVDGRKVFMGPEESMQVQRALGSDVVMIFDECTPYPAEHDVAKRSMELSLRWAKRSKIAHGDNPSALFGIVQGGMYQDLRMRSLEGLCEIGFDGLAIGGLSVGEPKEEMIKVLDYLPEQMPADKPRYLMGVGKPEDLVEGVRRGVDMFDCVMPTRNARNGHLFVETGVIKIRNAVHRHDESPLDPSCDCYTCQHFSRAYLHHLDRCKEMLGSMLNTIHNLRHYQRLMAGLREAIEQGTLSAFVDEFYARRGLPTPPLN

SEQ ID NO: 58269 - protein, 377 aa, Oceanibacterium hippocampi
  misc_feature (1)..(377): tr|A0A1Y5T7T4|A0A1Y5T7T4_9PROT Queuine tRNA-ribosyltran sferase OS=Oceanibacterium hippocampi OX=745714 GN=tgt PE=3 SV=1
MTEKSFSFAISGRDGRARTGLIRTAHGEIRTPAFMPVGTAATVKAMTPEMVRATGADILLGNTYHLMLRPGAERVAGQGGLHRFMNWERPILTDSGGFQVMSLNELRKITEDGVTFKSHLDGSRHELTPERSVEIQDLLDSTITMVLDECTPFPATEEVARLSMERSMRWAARCRAAFRERPGYGLFGIVQGGIYPELRERSAAALAEIGFEGYAVGGLAVGEGQELMFRMLDVTVPALPDAAPHYLMGVGKPDDIVGAVERGIDMFDCVLPTRSGRTGQAFTRRGPVNLRNARHADDPRPLDEASDCPASRDYSRAYLHHLVRSNEILGAILITWHNLHYYQSLMAGLRQAIADGRLGDFAAAFREEQAQGDIDPL

SEQ ID NO: 58270 - protein, 382 aa, Oceanibaculum indicum
  misc_feature (1)..(382): tr|K2JLW4|K2JLW4_9PROT Queuine tRNA-ribosyltransferase OS=Oceanibaculum indicum P24 OX=1207063 GN=tgt PE=3 SV= 1
MSAASQPVEFGFQLLGTDGAARRGRVTTAHGTIETPAFMPVGTAATVKAMRPESVAETGAEILLGNTYHLMLRPGAERVAALGGLHKFMNWPKPILTDSGGFQVMSLAGLRKIEEKGVTFRSHIDGSVHFLSPERSVEIQHLLDSNITMVLDECTPHPATHEQALSSMELSMRWAQRSKDGFKKRPGYGLFGIVQGSVYPDLRKRSAEALASIGFDGYAVGGLAVGEGQEIMFRVLEETVPHLPADRPHYLMGVGKPADIVGAVQRGIDMFDCVLPTRSGRTAQAFTARGTVNLRNARHQDDPRPLEEGCPCPACTSCSRAYLHHLVRSEEILGLMLLTWHNLAYYQRLMAGLRAAIEAGSLEDFVAGFHETQAGGDIPALG

SEQ ID NO: 58271 - protein, 382 aa, Oceanibaculum indicum
  misc_feature (1)..(382): tr|A0A420WQL0|A0A420WQL0_9PROT Queuine tRNA-ribosyltran sferase OS=Oceanibaculum indicum OX=526216 GN=tgt PE=3 SV=1
MSAASQPVEFGFQLLGTDGAARRGRVTTAHGTIETPAFMPVGTAATVKAMRPESVAETGAEILLGNTYHLMLRPGAERIAALGGLHKFMNWPKPILTDSGGFQVMSLAGLRKIEEKGVTFRSHIDGSAHFLSPERSVEIQHLLDSNITMVLDECTPHPATHEQALSSMELSMRWAQRSKDGFKKRPGYGLFGIVQGSVYPDLRQRSAEALASIGFDGYAVGGLAVGEGQEIMFRVLEETVPHLPADRPHYLMGVGKPADIVGAVQRGIDMFDCVLPTRSGRTAQAFTARGTVNLRNARHQDDPRPLEEGCPCPACTSYSRAYLHHLVRSEEILGLMLLTWHNLAYYQRLMAGLRAAIEAGSLDDFAADFHERQAGGDIPALG

SEQ ID NO: 58272 - protein, 376 aa, Oceanicaulis sp.
  misc_feature (1)..(376): tr|A0A0P7VLR8|A0A0P7VLR8_9RHOB Queuine tRNA-ribosyltran sferase OS=Oceanicaulis sp. HLUCCA04 OX=1666904 GN=tgt PE=3 SV=1
MASFPFEIAAVDGQARTGTLKTARGDIRTPAFMPVGTAATVKALYPDQVRQAGADILLGNTYHLMLRPGAERVKRLGGLHHFMRWDGPILTDSGGFQVWSLSGLRKMSEEGVAFKSHIDGSKHMLTPERSIEIQADLLGADISMQLDECTPFPCERDAAAKSMELSIRWGKRSKEAFGERETQNLFGIVQGSVYPDLRRQSAEGLIETGFDGYAVGGLAVGEGFETMCAVLEATTPHLPHERPRYLMGVGRPVDLVEAVARGVDMFDCVMPTRSGRHGQAWSDYGPYNLKNAQYAEDESPLDEAVNCPASRDYSKAYIHHLVRAGEYLGSMLLSWHNVAYYEDLMARMRAAIAEGRFEVFRAEFLARWEQGTGKPV

SEQ ID NO: 58273 - protein, 375 aa, Oceanicaulis sp.
  misc_feature (1)..(375): tr|A0A2D9MMS6|A0A2D9MMS6_9RHOB Queuine tRNA-ribosyltran sferase OS=Oceanicaulis sp. OX=1924941 GN=tgt PE=3 SV=1
MPSFDFDLHATDGAARTGVLKTPRGDIRTPAFMPVGTAATVKALYPEQVKAAGADIILGNTYHLMLRPGAERVKRLGGLHHFMRWDGPILTDSGGFQVWSLSDLRDMTEEGVAFKSHLDGSKHMLTPERSIEIQADLLGADISMQLDECTPYPCERDAAASSMQLSRRWGKRSKEAFGERSGQALFGIVQGSTYEDLRRESAEGLIEIGFDGYAIGGLAVGEGFEMMCQVLDVTTPHLPHERPRYLMGVGKPIDLVEAVARGVDMFDCVLPTRSGRHGQAWTDWGPVNVKNARFAEDTRPMDETLDCPASRDYSRAYLHHLIRAGEYLGSMLLSWHNIAYFETLTARMRAAIAAGEFEAFRAQFHARMDEGPDAI

SEQ ID NO: 58274 - protein, 375 aa, Oceanicella actignis
  misc_feature (1)..(375): tr|A0A1M7TGF1|A0A1M7TGF1_9RHOB Queuine tRNA-ribosyltran sferase OS=Oceanicella actignis OX=1189325 GN=tgt PE=3 SV=1
MTRFSFTVHATDGAARTGVVSTPRGQIRTPAFMPVGTAATVKAMLPENVRATGADIILGNTYHLMLRPGAERIARLGGLHRFMNWERPILTDSGGFQVMSLAGLRKLDERGVTFKSHVDGSRHELTPERSMEIQRLLGSDIVMCFDECTPFPADEATAAESMRLSMRWAARSREAFGDRPGHALFGIQQGSVFRELREESSQALRAIGFDGYAIGGLAVGEGQEAMFAVLDYAPGLLPEDKPRYLMGVGKPDDIVGAVQRGVDMFDCVLPTRSGRTGQALTRRGAVNLRNARHQDDPRPLDPDCACPCCRNYSRAYLHHVHKAQEIIAAMLLTWHNLHYYQELMQGLRDAIAAGRLDAFVADFHARRAEGDLPPL

SEQ ID NO: 58275 - protein, 375 aa, Oceanicella actignis
  misc_feature (1)..(375): tr|A0A5D3WCG0|A0A5D3WCG0_9RHOB Queuine tRNA-ribosyltran sferase OS=Oceanicella actignis OX=1189325 GN=tgt PE=3 SV=1
MTRFSFTVHATDGAARAGVVSTPRGQIRTPAFMPVGTAATVKAMLPENVRATGADIILGNTYHLMLRPGAERIARLGGLHRFMNWERPILTDSGGFQVMSLAGLRKLDERGVTFKSHVDGSRHELTPERSMEIQRLLGSDIVMCFDECTPFPADEATAAESMRLSMRWAARSREAFGDRPGHALFGIQQGSVFRELREESSQALRAIGFDGYAIGGLAVGEGQEAMFAVLDYAPGLLPEDKPRYLMGVGKPDDIVGAVQRGVDMFDCVLPTRSGRTGQALTRRGAVNLRNARHQDDPRPLDPDCACPCCRNYSRAYLHHVHKAQEIIAAMLLTWHNLHYYQELMQGLRDAIAAGRLDAFVADFHARRAEGDLPPL

SEQ ID NO: 58276 - protein, 385 aa, Oceanicoccus sagamiensis
  misc_feature (1)..(385): tr|A0A1X9NET6|A0A1X9NET6_9GAMM Queuine tRNA-ribosyltran sferase OS=Oceanicoccus sagamiensis OX=716816 GN=tgt PE =3 SV=1
MTRECAMKFEREGNDGKARRGRITFPRGTIETPAFMPVGTYGTVKGMLPRDIEEIGAEIILGNTFHLWLRPGTDVVKQHGEDNNGTLHDFMHWDKPILTDSGGFQVFSLGALRKITEEGVSFKSPIDGSKVFLDPETSMQVQRELGSDIVMIFDECTPFPATHQEAKDSMELSLRWAQRSKDAHGDNPSALFGIVQGGMYEDLRKQSMAGLAAIDFDGFAIGGLSVGEPKDDMMNVLDIVAPEMPEDKPRYLMGVGTPQDLLEAVMRGVDMFDCVMPTRHARNAHLFTSQGVVKLRNAKHKKSNEPLDPNCDCYTCKNFSRSYLHHLDKCKEMLGGTLNTIHNLRYYQQHMQNIREAIEQNRLSDYAAEFYAAQGIAEEDQNPVA

SEQ ID NO: 58277 - protein, 311 aa, Oceanicola granulosus
  misc_feature (1)..(311): tr|Q2CG47|Q2CG47_OCEGH Queuine tRNA-ribosyltransferase OS=Oceanicola granulosus (strain ATCC BAA-861 / DSM 159 82 / KCTC 12143 / HTCC2516) OX=314256 GN=OG2516_03820 P E=3 SV=1
MLRPGAERIARLGGLHRFMNWDRPILTDSGGFQVMSLADLRKLTETGVTFRSHVDGSRHELTPERSMEIQRLLGSDIVMAFDECPALPADRARIEESMRLSMRWAERSRAAFGDRPGHALFGIQQGGLERDLRDESAAALTGIGFEGYAIGGLAVGEGQEAMFSVLDYAPGQLPADRPRYLMGVGKPDDIVGAVKRGVDMMDCVLPSRSGRTGQAWTRRGQVNLRNARHADDPRPLDEDCTCPACTGYSRAYLHHVVRAREMIAGMLLTWHNLHYYQALMGEMRAAIAAGRFAAWEQGFHAARDQGDVERL

SEQ ID NO: 58278 - protein, 376 aa, Oceanicola litoreus
  misc_feature (1)..(376): tr|A0A1N6ERZ6|A0A1N6ERZ6_9RHOB Queuine tRNA-ribosyltran sferase OS=Oceanicola litoreus OX=1217970 GN=tgt PE=3 S V=1
MTTRVTYEVKARDGKARLGVLSTPRGEIRTPAFMPVGTAATVKAMLPESVAATGADILLGNTYHLMLRPGAERVARLGGLHGFMNWEKPILTDSGGFQVMSLADLRKLTEKGVTFRSHVDGSKHFLSPETSMEIQRLLGSDIVMCFDECPALPAEEAAVAESMRLSMRWAERSKAAFGDRPGHALFGIQQGGVTEALRGESAEALRAIGFDGYAIGGLAVGEGQEAMFGVLDYAPGMLPEDKPRYLMGVGKPDDIVGAVKRGVDMMDCVLPSRSGRTGQAWTRRGQVNLKNARHADDPRPLDEHCTCPACRGYSRAYLHHVFRAGEMISGMLLTWHNLHYYQELMAGMRAAIAEGRFAQFEAEFHAMRAEGDIPPL

SEQ ID NO: 58279 - protein, 376 aa, Oceanicola sp.
  misc_feature (1)..(376): tr|A0A5B8BRG9|A0A5B8BRG9_9RHOB Queuine tRNA-ribosyltran sferase OS=Oceanicola sp. D3 OX=2587163 GN=tgt PE=3 SV= 1
MTTRVTYEVKATDGKARLGVLTTPRGEIRTPAFMPVGTAATVKAMLPESVAATGADILLGNTYHLMLRPGAERVARLGGLHGFMNWDKPILTDSGGFQVMSLAELRKLTEDGVTFRSHVDGSKHFLSPETSMEIQRLLGSDIVMCFDECPALPATEAAVAESMRLSMRWAERSKAAFGDRPGHALFGIQQGGVTEELRGESAEALRAIGFDGYAIGGLAVGEGQEAMFGVLDYAPGMLPEEKPRYLMGVGKPDDIVGAVKRGVDMMDCVLPSRSGRTGQAWTRRGQVNLKNARHADDPRPLDEACSCPACRGYSRAYLHHVYRAGEMIAGMLLTWHNLHYYQELMGEMREAIAEGRFAAFEAAFHALRAEGDIERL

SEQ ID NO: 58280 - protein, 376 aa, Oceanicola sp.
  misc_feature (1)..(376): tr|A0A254RBK5|A0A254RBK5_9RHOB Queuine tRNA-ribosyltran sferase OS=Oceanicola sp. 22II-s10i OX=1317116 GN=tgt P E=3 SV=1
MTDRFSFTLGATDGAARTGVIHTRRGEIRTPAFMPVGTAGTVKAMMPESVAATGADILLGNTYHLMLRPGAERVERLGGLHGFMNWDKPILTDSGGFQVMSLAELRKLTEDGVTFRSHVDGSKHFLSPETSMEIQRQLGSDIVMCFDECPALPADEARVAESMRMSMRWAQRSRDAFGDRPGHALFGIQQGGVTEELRGESAEALKAIGFDGFAIGGLAVGEGQEAMFGVLDYAPAMLPEDRPRYLMGVGKPDDILGAVARGVDMMDCVLPSRSGRTGQVFTRRGVVNIKNARHRDDPRPLDAHCTCPACRNYSRAYLHHVFRAQEIISSMLMTWHNLHYYQELMAGMREAIAAGRFEAFQSATREGWAEGDIPPV

SEQ ID NO: 58281 - protein, 376 aa, Oceanihabitans sediminis
  misc_feature (1)..(376): tr|A0A368P612|A0A368P612_9FLAO Queuine tRNA-ribosyltran sferase OS=Oceanihabitans sediminis OX=1812012 GN=tgt P E=3 SV=1
MKFELKGKDPQSSARAGVMTTDHGVIETPIFMPVGTVASVKGVHQRELKNDINPDIILGNTYHLFLRPKTSILEKAGGLHKFMNWDRNILTDSGGYQVYSLSANRKIKEEGVKFKSHIDGSMHMFTPENVMEIQRSIGADIIMAFDECTPYPCDYNYAKRSMHMTHRWLDRCIKHLEKTPFKYDYSQTFFPIVQGSTYKDLRRQSAEYIANAGAEGNAIGGLSVGEPAEEMYAMTEVVTAILPEDKPRYLMGVGTPINILENIALGIDMFDCVMPTRNARNGMLFTAHGTINIKNKKWEDDFSPIDEMAITFVDTEYSKAYLRHLFTVNELLGKQIATIHNLGFYMWLVREARKHILAGDFREWKNKMVKQMDKRL

SEQ ID NO: 58282 - protein, 383 aa, Oceanimonas baumannii
  misc_feature (1)..(383): tr|A0A235CQV8|A0A235CQV8_9GAMM Queuine tRNA-ribosyltran sferase OS=Oceanimonas baumannii OX=129578 GN=tgt PE=3 SV=1
MKFELDTTDGRARRGRLIFDRGVVETPAFMPVGTYGTVKGMTPEEVAATGAHILLGNTFHLWIRPGQEVMKMHGDLHDFMNWQGPILTDSGGFQVFSLGDIRKITEEGVHFRNPVNGDKIFLSPEVSMEIQYDLGSDIVMIMDECTPYPATWEEAKKSMEMSLRWAKRSRDHFDKQGNKNALFGIIQGSVYEDLRDQSLEGLLDIGFDGYAVGGLAVGEPKHEMHKVLEHTCPKIPADKPRYLMGVGKPEDLVEGVRRGVDMFDCVMPTRNARNGHLFTTDGVVKIRNAKHKTDTGPLDADCDCYTCKNYSRAYLYHLDKCNEILGARLNTIHNLRFYQRVMEGLRGAIEQGKLDDFVAEFYRRQGKPVPSLDNSDTEHGEEQ

SEQ ID NO: 58283 - protein, 380 aa, Oceanimonas doudoroffii
  misc_feature (1)..(380): tr|A0A233REF3|A0A233REF3_9GAMM Queuine tRNA-ribosyltran sferase OS=Oceanimonas doudoroffii OX=84158 GN=tgt PE=3 SV=1
MKFELDTTDGRARRGRLIFDRGVVETPAFMPVGTYGTVKGMTPEEVAATGAHILLGNTFHLWIRPGQEVMKMHGDLHDFMNWQGPILTDSGGFQVFSLGDIRKITEEGVHFRNPVNGDKIFLSPEVSMEIQYDLGSDIVMIMDECTPYPATWEEAKKSMEMSLRWAKRSRDHFDKQGNKNALFGIIQGSVYEDLRDQSLEGLLDIGFDGYAVGGLAVGEPKHEMHKVLEHTCPKIPEDKPRYLMGVGKPEDLVEGVRRGIDMFDCVMPTRNARNGHLFTTDGVVKIRNAKHKTDTGPLDADCDCYTCKNYSRAYLYHLDKCNEILGARLNTIHNLRYYQRVMEGLRGAIEQGKLDDFVAEFYRRQGKPVPPLGQPASTSE

SEQ ID NO: 58284 - protein, 380 aa, Oceanimonas sp.
  misc_feature (1)..(380): tr|H2FZA5|H2FZA5_OCESG Queuine tRNA-ribosyltransferase OS=Oceanimonas sp. (strain GK1) OX=511062 GN=tgt PE=3 S V=1
MKFELDTTDGRARRGRLVFDRGVVETPAFMPVGTYGTVKGMTPEEVAATGAHILLGNTFHLWIRPGQEVMKLHGDLHDFMNWQGPILTDSGGFQVFSLGDIRKITEEGVHFRNPVNGDKIFLSPEVSMEIQYDLGSDIVMIMDECTPYPATWEEAKKSMEMSLRWAKRSRDHFDKQGNKNALFGIIQGSVYEDLRDQSLEGLLEIGFDGYAVGGLAVGEPKHEMHKVLEHTCPKIPEDKPRYLMGVGKPEDLVEGVRRGIDMFDCVMPTRNARNGHLFTTDGVVKIRNAKHKTDTGPLDADCDCYTCKNYSRAYLYHLDKCNEILGARLNTIHNLRYYQRVMEGLRSAIEQGKLDDFVAEFYRRQGKPVPPLGQPEPTSE

SEQ ID NO: 58285 - protein, 375 aa, Oceaniovalibus guishaninsula
  misc_feature (1)..(375): tr|K2GLC0|K2GLC0_9RHOB Queuine tRNA-ribosyltransferase OS=Oceaniovalibus guishaninsula JLT2003 OX=1231392 GN=t gt PE=3 SV=1
MAGFGFSIVATDVKARAGTIRTPRGEIRTPAFMPVGTAATVKAMLPESVRATGADILLGNTYHLMLRPGAERIDRLGGLHRFMNWDRPILTDSGGFQVMSLSGLRKLTERGVTFRSHIDGSRHELTPERSMEIQRLLGSDIAMCFDECPALPADRDRIAASMALSMRWAARSRDAFGDRPGHALFGIQQGGLDRDLRAQSAEALTAIGFDGYAVGGLAVGEGQQAMFDVLDFAPSMLPADRPRYLMGVGKPDDIVGAVARGIDMMDCVLPSRSGRTGQAFTPRGVVNIKNARHADDPRPLDETCDCPACQSYSRAYLHHVFRAQEMISGMLLTWHNLRYYQRLMEGMRTAIAAGTFAGWQDDFHATRALGDIEPL

SEQ ID NO: 58286 - protein, 376 aa, Oceaniovalibus sp.
  misc_feature (1)..(376): tr|A0A5D0S2M7|A0A5D0S2M7_9RHOB Queuine tRNA-ribosyltran sferase OS=Oceaniovalibus sp. ACAM 378 OX=2599923 GN=tg t PE=3 SV=1
MTQRIKFSLAATDGAARTGTISTPRGDIRTPAFMPVGTAATVKAMMPDSVRETGADILLGNTYHLMLRPTAERIARLGGLHRFMNWDRPILTDSGGFQVMSLSGLRKMSEKGVTFKSHIDGSKHELTPERSMEIQALLLSDIVMCFDECPALPADRARLAESMRMSMRWAQRSRDAFGDRPGHALFGIQQGGLERDLREESAKALAEIGFDGYAVGGLAVGEGQAAMFECLDYAPAQLPVDKPRYLMGVGKPDDIVGAVKRGIDMMDCVLPSRSGRTGQAFTRAGVVNIKNARHMDDPRPLDENCRCPACRNYSRAYLHHVFRAQEMISGMLLTWHNLTYFQDIMQGMRDAIAAGEFATWETAFHANRSAGDIEQL

SEQ ID NO: 58287 - protein, 381 aa, Oceanisphaera arctica
  misc_feature (1)..(381): tr|A0A2P5TQ26|A0A2P5TQ26_9GAMM Queuine tRNA-ribosyltran sferase OS=Oceanisphaera arctica OX=641510 GN=tgt PE=3 SV=1
MKFELQTTDGRARRGRLIFDRGVVETPAFMPVGTYGTVKGMTPEEVADTGAQILLGNTFHLWVRPGQEVMKLHGDLHDFMNWQGPILTDSGGFQVFSLGDIRKITEEGVYFRNPVNGDKIFLSPEVSMEIQYDLGSDVVMIMDECTPYPATWIDAKKSMEMSLRWAKRSRDHFDKQGNKNALFGIIQGGVYEDLRDESLTGLLEIGFDGYAVGGLAVGEPKHEMHKVLEHTCPKIPADKPRYLMGVGKPEDLVEGVRRGIDMFDCVMPTRNARNGHLFTTEGVVKIRNAKHKIDTGPLDADCDCYTCKNYSRSYLHHLDKCNEILGARLNTIHNLRYYQRVMEGLRGAIEQGKLDDFVAEFYARQDKPVPPLGQTAGEDGE

SEQ ID NO: 58288 - protein, 379 aa, Oceanisphaera avium
  misc_feature (1)..(379): tr|A0A1Y0CTQ9|A0A1Y0CTQ9_9GAMM Queuine tRNA-ribosyltran sferase OS=Oceanisphaera avium OX=1903694 GN=tgt PE=3 S V=1
MKFELHTTDGLARRGRLVFDRGVVDTPAFMPVGTYGTVKGMTPEEVDATGAQILLGNTFHLWVRPGQEVMKLHGDLHDFMNWQGPILTDSGGFQVFSLGDIRKITEEGVYFRNPVNGDRIFLSPEVSMEIQYDLGSDIVMIMDECTPYPATWEEAKKSMEMSLRWAKRSREHFDKQENPNALFGIIQGGVYEDLRDESLQGLLDIGFDGYAMGGLAVGEPKAEMHKVLEHTCPKIPADKPRYLMGVGKPEDLVEGVRRGIDMFDCVMPTRNARNGHLFTTEGIVKIRNAKHKVDTGPLDAECDCYTCKNYSRSYLHHLDKCNEILGSRLNTIHNLRYYQRVMEGLRHAIEQGKLDDFVADFYARRGQEVPPLGQSQAAQ

SEQ ID NO: 58289 - protein, 381 aa, Oceanisphaera profunda
  misc_feature (1)..(381): tr|A0A1Y0D2W2|A0A1Y0D2W2_9GAMM Queuine tRNA-ribosyltran sferase OS=Oceanisphaera profunda OX=1416627 GN=tgt PE= 3 SV=1
MKFELHTTDGLARRGRLTFDRGVVDTPAFMPVGTYGTVKGMTPEEVHATGAQILLGNTFHLWVRPGQEVMKLHGDLHDFMNWQGPILTDSGGFQVFSLGDIRTITEEGVFFRNPVNGDKIFLSPEVSMEIQYDLGSDVVMIMDECTPFPATWEEAKKSMEMSLRWAKRSRDHFDKQGNKNALFGIVQGGMYEDLRDESLTGLLDIGFDGYAIGGLAVGEPKAEMHKILEHTCPLIPADKPRYLMGVGKPEDLVEGVRRGIDMFDCVMPTRNARNGHLFTTDGVVKIRNAKHKVDTGPLDAECDCYTCKNYSRSYLHHLDKCNEILGSRLNTIHNLRYYQRVMEGLRGAIEQGKLDDFVADFYARKGLAVPPLGQVATESDQ

SEQ ID NO: 58290 - protein, 379 aa, Oceanisphaera psychrotolerans
  misc_feature (1)..(379): tr|A0A1J4QJZ0|A0A1J4QJZ0_9GAMM Queuine tRNA-ribosyltran sferase OS=Oceanisphaera psychrotolerans OX=1414654 GN= tgt PE=3 SV=1
MKFELQTTDGRARRGRLIFDRGVVETPAFMPVGTYGTVKGMTPEEVADTGAHILLGNTFHLWIRPGQEVMKMHGDLHDFMNWQGPILTDSGGFQVFSLGDIRKITEEGVHFRNPVNGDKIFLSPEVSMEIQYDLGSDVVMIMDECTPYPATWEEAKKSMEMSLRWAKRSRDHFDKQGNKNALFGIIQGSVYEDLRDQSLEGLLEIGFDGYAVGGLAVGEPKHEMHKVLEHTCPKIPADKPRYLMGVGKPEDLVEGVRRGVDMFDCVMPTRNARNGHLFTTEGVVKIRNAKHKTDTGPLDADCDCYTCKNYSRSYLHHLDKCNEILGARLNTIHNLRFYQRVMEGLRGAIEQGKLDDFVAEFYARQGKPVPPLGQTEQVE

SEQ ID NO: 58291 - protein, 371 aa, Oceanispirochaeta sp.
  misc_feature (1)..(371): tr|A0A370ASH5|A0A370ASH5_9SPIO Queuine tRNA-ribosyltran sferase OS=Oceanispirochaeta sp. M1 OX=2283433 GN=tgt P E=3 SV=1
MIDIQYRDPSCRGRGGILHLPHGDVEVPAFMPVGTNGTVKAIKHDSVEDMGYTLILGNTYHLYLRPGMEVIEAAGGLHNFSSWKHNILTDSGGFQVFSLAPFRKIREEGVRFRSHIDGAYHVFTPEKVVEIQETLGSDVQMALDVCTAPGISHKEAVESLEITTRWAARAKARWENCKDGYHGKLFGIIQGNFYEDLRKRSAEEILELDTPGIAIGGLSVGESPEMFRDYLHYTAQFLPEDKPRYVMGIGTPDYMLEAVEAGIDMFDCVYPTRIARNGTCFTLDGNLALKNEKCRLDQQPIEPTCTCPVCQQYSRSYLRHLFKAKEILGPMLVTEHNLHFLYTFMEEVRQSLREGRFLEYKKSFLDRFQKR

SEQ ID NO: 58292 - protein, 373 aa, Oceanispirochaeta sp.
  misc_feature (1)..(373): tr|A0A5C1QHN3|A0A5C1QHN3_9SPIO Queuine tRNA-ribosyltran sferase OS=Oceanispirochaeta sp. K2 OX=2518645 GN=tgt P E=3 SV=1
MIDIKYRDPSCRGRGGILHLPHGDVEIPAFMPVGTNGTVKAVKHDSVADMGYTLILGNTYHLYLRPGMEVIKAAGGLHEFSGWKHNILTDSGGFQVFSLAPFRKIREEGVRFRSHIDGAYHEFTPEKVVEIQETLGSDIQMALDICTEPGISHKDALKALEITTRWASRAKKRWENCRDDYEGKLFGIIQGNFYEDLRKRSAEEILELDTPGIAIGGLSVGESPQMFRDYLHYTSQFLPEDKPRYVMGIGTPDYMLEAVEAGIDMFDCVYPTRIARNGTCFTLDGNLALKNEQFRLDQQPIEPSCTCPVCQQYSRSYLRHLFKAKEILGPMLVTEHNLHFLYQFMAEVRLSLKEGRFLQYKKSFLDRFSKRTF

SEQ ID NO: 58293 - protein, 384 aa, Oceanithermus desulfurans
  misc_feature (1)..(384): tr|A0A511RMA2|A0A511RMA2_9DEIN Queuine tRNA-ribosyltran sferase OS=Oceanithermus desulfurans NBRC 100063 OX=122 7550 GN=tgt PE=3 SV=1
MAFEFRVLHQQGKARTGRLATPHGEVPTPLFMPVGTQATVKGLSNRELVEIGSRIVLANTYHLLLRPGPERVARLGGLHGFTGYDGPWLTDSGGFQVMSLGHRRVISEEGVAFSSHLNGDRILLTPERSIAVQEQLGADIVMAFDECPPFPSERAYLKRSLERTLRWLERSLAAKTRSDQALFGITQGGVEPDLRRTSTLETIRFDLPGYAIGGLAVGEPKEAMVPVVDLSTDLLPADRPRYLMGVGHPEDLVAGVALGVDLFDCVYPTRTGRFGYALVDEGRLNLGSARHKDDPAPIDAACDCYTCRNHSRAYLTHLVRTEELLGLRLLSLHNLRYLHRLMERARAAIEAGTYGDFARGFAERRWPEGAPGWFADALVRAGVW

SEQ ID NO: 58294 - protein, 384 aa, Oceanithermus profundus
  misc_feature (1)..(384): tr|E4U4K1|E4U4K1_OCEP5 Queuine tRNA-ribosyltransferase OS=Oceanithermus profundus (strain DSM 14977 / NBRC 100 410 / VKM B-2274 / 506) OX=670487 GN=tgt PE=3 SV=1
MAFEFRVLHQQGKARTGRLTTPHGEVATPLFMPVGTQATVKGLSNRELVEIGSQIVLANTYHLLLRPGPERVARLGGLHGFTGYTGPWLTDSGGFQVMSLGHRRVISEEGVAFSSHLNGDRILLTPERSIAVQEQLGADIVMAFDECPPYPSEPDYLKRSLERTLRWLERSLAAKTRPDQALFGITQGGVEPDLRRTSTLETIRFDLPGYAIGGLAVGEPKEKMVPVVDLSTDLLPEDRPRYLMGVGHPEDLVAGVALGVDLFDCVYPTRTGRFGYALVDGGRLNLGSARHKDDPAPIDEACDCYACQNHSRAYLTHLVRTEELLGLRLLSLHNLRYLHRLMERARAAVEAGSYGAFARAFAERRWPEGAPGWFEDAMARAGVW

SEQ ID NO: 58295 - protein, 380 aa, Oceanobacillus arenosus
  misc_feature (1)..(380): tr|A0A3D8PWM2|A0A3D8PWM2_9BACI Queuine tRNA-ribosyltran sferase OS=Oceanobacillus arenosus OX=1229153 GN=tgt PE =3 SV=1
MTIPITYELIKTDKQTGARLGRVHTPHGSFDTPTFMPVGTLATVKTMSPEDLHSMDARIILSNTYHLWLRPGEDIIREAGGLHKFMNWDGAILTDSGGFQVFSLSDMREITEEGVHFRNHLNGDKLFLSPEKAMQIQNALGSDIMMAFDECPPFPATHDYMKASVERTSRWAERCLAAHDRKDVQGLFGIVQGGEFEDLRTQSARDLVSLDFPGYAIGGLSVGEPKDIMNRMLEHTTPLLPTNKPRYLMGVGSPDSLIDGAIRGIDMFDCVLPTRIARNGTCMTSNGRLVVRNAKYARDFSPIDENCDCHVCKNYTRAYIRHLIRCNETFGFRLTTYHNLHFLVKLMEQVRAAIKEDRLGDFKEEFFEQYGLNKPDAKNF

SEQ ID NO: 58296 - protein, 379 aa, Oceanobacillus bengalensis
  misc_feature (1)..(379): tr|A0A494Z5U7|A0A494Z5U7_9BACI Queuine tRNA-ribosyltran sferase OS=Oceanobacillus bengalensis OX=1435466 GN=tgt PE=3 SV=1
MTAITYELIKTDKQTGARLGRVHTPHGSFDTPTFMPVGTLATVKTMSPEELENMGAKIILSNTYHLWLRPGEEIIREAGGLHKFMNWDGAILTDSGGFQVFSLSDMREIKEEGVHFRNHLNGDKLFLSPEKAMQIQNALGSDIMMAFDECPPYPATHEYMKNSVERTSRWAERCLTAHERKNDQGLFGIVQGGEFEDLRKQSARDLVSLDFPGYAVGGLSVGEPKDVMNRVLDFTTPWLPANKPRYLMGVGSPDSLIDGAIRGIDMFDCVLPTRIARNGTCMTSNGRLVVRNAKYARDFSPIDENCDCHVCRNYTRAYIRHLIKCNETFGFRLTTYHNLHFLLKLMEQVRTAISEDRLGDFREEFFEQYGLNKPNAKNF

SEQ ID NO: 58297 - protein, 381 aa, Oceanobacillus caeni
  misc_feature (1)..(381): tr|A0A0N0M8Y6|A0A0N0M8Y6_9BACI Queuine tRNA-ribosyltran sferase OS=Oceanobacillus caeni OX=405946 GN=tgt PE=3 S V=1
MKLTPITYELIKIDKQTGARLGRVHTPHGSFDTPTFMPVGTLATVKTMSPEELESMNANIILSNTYHLWLRPGEDIIREAGGLHKFMNWDGAILTDSGGFQVFSLSDMREIKEEGVHFRNHLNGEKLFLSPEKAMEIQNALGSDIMMAFDECPPYPATHEYMKSSVERTSRWAERCLEAHERKDVQGLFGIVQGGEFEDLRKQSANDLISLDFPGYAIGGLSVGEPKDVMNRVLEFTTPLLPANKPRYLMGVGSPDSLIDGAIRGVDMFDCVLPTRIARNGTCMTSTGRLVVRNAKYARDFRPIDENCDCHVCKNYSRAYIRHLVKCNETFGFRLTTYHNLYFLLKLMEQVRFAISEDRLGDFREEFFEQYGFNKPDAKNF

SEQ ID NO: 58298 - protein, 380 aa, Oceanobacillus chungangensis
  misc_feature (1)..(380): tr|A0A3D8Q0C8|A0A3D8Q0C8_9BACI Queuine tRNA-ribosyltran sferase OS=Oceanobacillus chungangensis OX=1229152 GN=t gt PE=3 SV=1
MTTPITYELIKTDKQTGARLGRVHTPHGSFDTPTFMPVGTLATVKTMSPEDLHSMDARIILSNTYHLWLRPGEEIIREAGGLHKFMNWDGAILTDSGGFQVFSLSDMREITEKGVHFRNHLNGDKLFLSPEKAMQIQNALGSDIMMAFDECPPFPATYDYMKASVERTSRWAERCLAAHERSDVQGLFGIVQGGEFEELRSQSARDLVSLDFPGYAIGGLSVGEPKDIMNRMLEHTTPLLPANKPRYLMGVGSPDALIDGAIRGIDMFDCVLPTRIARNGTCMTSNGRLVVRNAKYARDFGPIDENCDCHVCKNYSRAYIRHLIRCNETFGFRLTTYHNLHFLVKLMEQVRAAIKEDRLGDFKEEFFEQYGLNKPDAKNF

SEQ ID NO: 58299 - protein, 379 aa, Oceanobacillus halophilus
  misc_feature (1)..(379): tr|A0A495AES0|A0A495AES0_9BACI Queuine tRNA-ribosyltran sferase OS=Oceanobacillus halophilus OX=930130 GN=tgt P E=3 SV=1
MTPITYELIKTDKQTGARLGRVHTPHGSFDTPTFMPVGTLATVKTMSPEELKEMNANIILSNTYHLWLRPGEDIIREAGGLHKFMNWDGAILTDSGGFQVFSLSDMREIKEEGVHFRNHLNGDKLFLSPEKAMGIQNALGSDIMMAFDECPPYPATYDYMKSSVERTSRWAERCLEAHNRKDEQGLFGIVQGGEYEDLRKQSAEDLISLDFPGYAVGGLSVGEPKDVMNRVLDFTTPLLPTNKPRYLMGVGSPDSLIDGAIRGIDMFDCVLPTRIARNGTCMTSTGRLVVRNAKYARDFRPIDENCDCHVCKNYSRAYIRHLVKCNETFGFRLTTYHNLHFLLKLMEQVRIAISEDRLGDFKREFFEQYGLNKPNAKNF

SEQ ID NO: 58300 - protein, 379 aa, Oceanobacillus iheyensis
  misc_feature (1)..(379): sp|Q8CXC4|TGT_OCEIH Queuine tRNA-ribosyltransferase OS= Oceanobacillus iheyensis (strain DSM 14371 / CIP 107618 / JCM 11309 / KCTC 3954 / HTE831) OX=221109 GN=tgt PE= 3 SV=1
MNPITYELIKTDKQTGARLGRVHTPHGSFDTPTFMPVGTLATVKTMSPEDLQSMQANIILSNTYHLWLRPGEDIIREAGGLHKFMNWDGAILTDSGGFQVFSLSDMREIKEEGVHFRNHLNGEKLFLSPEKAMDIQNALGSDIMMAFDECPPYPAEYDYMKASVERTSRWAERCLQAHNRPHDQGLFGIVQGGEYEALRKQSAEDLVSLDFPGYAIGGLSVGEPKHVMNKVLEFTTPFLPSNKPRYLMGVGSPDALIDGAIRGVDMFDCVLPTRIARNGTCMTSNGRLVVRNAKYARDFNPIDEHCSCHVCKNYSRAYIRHLIKCNETFGFRLTTYHNLHFLLKLMEQVRTAIKEDRLGDFKESFFEQYGLNKANPKNF

SEQ ID NO: 58301 - protein, 379 aa, Oceanobacillus iheyensis
  misc_feature (1)..(379): tr|A0A2P1WKZ7|A0A2P1WKZ7_9BACI Queuine tRNA-ribosyltran sferase OS=Oceanobacillus iheyensis OX=182710 GN=tgt PE =3 SV=1
MTPITYELIKTCKQTGARLGRVHTPHGSFDTPTFMPVGTLATVKTMSPEELQEMNANIILSNTYHLWLRPGEDIVREAGGLHKFMNWDGAILTDSGGFQVFSLSDMREIKEEGVHFRNHLSGDKLFLSPERAMEIQNALGSDIMMAFDECPPYPASYEYMKSSVERTSRWAERCLEAHQRQHDQGLFGIIQGGEYEDLRKLSAQDLVSLDLPGYAIGGLSVGEPKDVMNRVLDFTAPLMPSNKPRYLMGVGSPDSLIDGAIRGIDMFDCVLPTRIARNGTCMTSNGRLVVRNAKFARDFGPIDENCDCHVCKNYSRAYIRHLIKCNETFGFRLTTYHNLYFLLKLMEQVRTAIAEDRLGDFKEEFFEQYGLNKPDAKNF

SEQ ID NO: 58302 - protein, 380 aa, Oceanobacillus limi
  misc_feature (1)..(380): tr|A0A1I0HHT4|A0A1I0HHT4_9BACI Queuine tRNA-ribosyltran sferase OS=Oceanobacillus limi OX=930131 GN=tgt PE=3 SV =1
MTTPIRYEFIKTCKQTGARLGRVHTPHGSFDTPTFMPVGTLATVKTMSPEELQEMNANIILSNTYHLWLRPGEDIIREAGGLHKFMNWDGAILTDSGGFQVFSLSDMREIKEEGVHFRNHLNGEKLFLSPEKAMQIQNALGSDIMMAFDECPPYPATKEYMKASVERTSRWAERCLAAHERKDVQGLFGIIQGGEYEDLRKQSAQDLVSLDFPGYAVGGLSVGEPKDVMNRVLDFTTPLMPTDKPRYLMGVGSPDSLIDGAIRGIDMFDCVLPTRIARNGTCMTSNGRLVVRNAKYARDFSPIDENCDCHVCKNYTRAYIRHLIKCNETFGFRLTTYHNLYFLLKLMEQVRNAIREDRLGDFREAFFEQYGLNQPNAKNF

SEQ ID NO: 58303 - protein, 380 aa, Oceanobacillus oncorhynchi
  misc_feature (1)..(380): tr|A0A0A1MLD8|A0A0A1MLD8_9BACI Queuine tRNA-ribosyltran sferase OS=Oceanobacillus oncorhynchi OX=545501 GN=tgt PE=3 SV=1
MMTPITYELIKTDKQTGARLGRVHTPHGSFDTPTFMPVGTLATVKTMSPEELHSMQANIILSNTYHLWLRPGEDIIEEAGGLHKFMNWDKAILTDSGGFQVFSLSDMRQIEEKGVHFRNHLNGEKLFLSPEKAMHIQNALGSDIMMAFDECPPYPATYDYMKSSVERTSRWAERCLEAHKRPDTQGLFGIVQGGEYEELRKLSAQDLVSLDFPGYAIGGLSVGEPKDVMNHVLEFTTPLLPSNKPRYLMGVGSPDALIDGAIRGVDMFDCVLPTRIARNGTCMTSNGRLVVRNAKYARDFSPIDEHCDCHVCKNYTRAYIRHLIKCNETFGFRLTTYHNLHFLLKLMEQVRTAIKDDRLGDFKEEFFEQYGLNQENPKNF

SEQ ID NO: 58304 - protein, 379 aa, Oceanobacillus picturae; identical to SEQ ID NO: 58301
  misc_feature (1)..(379): tr|W9A7K1|W9A7K1_9BACI Queuine tRNA-ribosyltransferase OS=Oceanobacillus picturae OX=171693 GN=tgt PE=3 SV=1

SEQ ID NO: 58305 - protein, 379 aa, Oceanobacillus profundus
  misc_feature (1)..(379): tr|A0A417YJE2|A0A417YJE2_9BACI Queuine tRNA-ribosyltran sferase OS=Oceanobacillus profundus OX=372463 GN=tgt PE =3 SV=1
MTPITYELIKTDKQTGARLGRVHTPHGSFDTPTFMPVGTLATVKTMSPEELQQMNANIILSNTYHLWLRPGEDIIREAGGLHKFMNWDGAILTDSGGFQVFSLSDMREITEEGVHFRSHLNGDKLFLSPEKAMQIQNALGSDIMMAFDECPPYPASHEYMKASVERTSRWAERCLEAHERKDVQGLFGIIQGGEYEDLRKQSAQDLVSLDFPGYAIGGLSVGEPKDIMNRVLESTTPLMPANKPRYLMGVGSPDSLIDGAIRGIDMFDCVLPTRIARNGTCMTSNGRLVVRNAKYARDFGPIDENCDCHVCKNYTRAYIRHLIKCNETFGFRLTTYHNLHFLLKLMEQVRAAIKEDRLGDFKESFFEQYGLNKPNAKNF

SEQ ID NO: 58306 - protein, 379 aa, Oceanobacillus sojae
  misc_feature (1)..(379): tr|A0A511ZDJ2|A0A511ZDJ2_9BACI Queuine tRNA-ribosyltran sferase OS=Oceanobacillus sojae OX=582851 GN=tgt PE=3 S V=1
MIPITYELIKTDKQTGARLGRVHTPHGSFDTPTFMPVGTLATVKTMSPEELSSMQANIILSNTYHLWLRPGEDIIEEAGGLHKFMNWDKAILTDSGGFQVFSLSDMRQIEEKGVHFRNHLNGEKLFLSPEKAMHIQNALGSDIMMAFDECPPYPATYDYMKSSVERTSRWAERCLEAHKRPDIQGLFGIVQGGEYEELRRQSASELVSLDFPGYAIGGLSVGEPKDVMNQVLEFTTPLLPANKPRYLMGVGSPDALIDGAIRGVDMFDCVLPTRIARNGTCMTSHGRLVVRNAKYARDFSPIDENCDCHVCKNYTRAYIRHLIKCNETFGFRLTTYHNLHFLLKLMEQVRTAIKEDRLGDFKESFFEQYGLNQENPKNF

SEQ ID NO: 58307 - protein, 380 aa, Oceanobacillus sp.
  misc_feature (1)..(380): tr|A0A345PHU5|A0A345PHU5_9BACI Queuine tRNA-ribosyltran sferase OS=Oceanobacillus sp. 160 OX=2052660 GN=tgt PE= 3 SV=1
MTTPITYELIKTDKQTGARLGRVHTPHGSFDTPTFMPVGTLATVKTMSPEDLHSMDARIILSNTYHLWLRPGEDIIREAGGLHKFMNWDGAILTDSGGFQVFSLSDMREITEKGVHFRNHLNGDKLFLSPEKAMQIQNALGSDIMMAFDECPPFPATYDYMKASVERTSRWAERCLAAHERSDVQGLFGIVQGGEFEELRSQSARDLVSLDFPGYAIGGLSVGEPKDIMNRMLEHTTPLLPVNKPRYLMGVGSPDSLIDGAIRGIDMFDCVLPTRIARNGTCMTSNGRLVVRNAKYARDFGPIDENCDCHVCKNYSRAYIRHLIRCNETFGFRLTTYHNLHFLVKLMEQVRAAIKEDRLGDFKEEFFEQYGLNKPNAKNF

SEQ ID NO: 58308 - protein, 379 aa, Oceanobacillus sp.
  misc_feature (1)..(379): tr|A0A498DAH1|A0A498DAH1_9BACI Queuine tRNA-ribosyltran sferase OS=Oceanobacillus sp. YLB-02 OX=2448030 GN=tgt PE=3 SV=1
MQPIRYELIKTDKQTGARLGRVHTPHGSFDTPTFMPVGTLATVKTMSPEELKQMDARIILSNTYHLWLRPGEDIIREAGGLHKFMNWDGAILTDSGGFQVFSLSDMREIKEEGVHFRNHLNGDKLFLSPEKAMHIQNALGSDIMMAFDECPPYPATHEYMKQSVERTSRWAERCLAAHERPDTQGLFGIVQGGEFEDLRKQSARDLVSLDFPGYAIGGLSVGEPKDIMNRVLEFTTPLLPSDKPRYLMGVGSPDSLIDGAIRGIDMFDCVLPTRIARNGTCMTSNGRLVVRNAKYARDFGPIDENCDCHVCKNYSRAYIRHLIKCNETFGFRLTTYHNLHFLVKLMEQVRFAIKEDRLGDFKEEFFEQYGLNKPDAKNF

SEQ ID NO: 58309 - protein, 389 aa, Oceanobacter sp.
  misc_feature (1)..(389): tr|A0A2G2JR90|A0A2G2JR90_9GAMM Queuine tRNA-ribosyltran sferase OS=Oceanobacter sp. OX=2030817 GN=tgt PE=3 SV=1
MSRECFMQFDLHTEDNEGSFARRGTITFPRGKVETPAFMPVGTYGSVKGLNVDQIKALGADIILGNTFHLMLRPGTEIVKAHGDLHDFIGWEKPILTDSGGFQVFSLGKMRKITEEGVTFASPVNGDKVLMTPESSMQVQKDLGSDVVMIFDECTPYPATHEEAATSMRLSMRWAQRSKDAHGDNPAALFGIIQGGMHESLRDESLAGLVDIGFDGYAVGGLSVGEPKDDMMRVLRHTAPKMPKDKPRYLMGVGKPEDLVEGVRRGIDMFDCVMPTRNARNGHLFTHNGVVKLRNAANKVDTGPIDAECDCYTCKNHSRAYLHHLDKCGEILGPSLNTIHNLHYYQTLMAGLRRALEEGTFAAFVDDFYARRGRTTPPLDESPDESGLT

SEQ ID NO: 58310 - protein, 365 aa, Oceanococcus atlanticus
  misc_feature (1)..(365): tr|A0A1Y1SFA7|A0A1Y1SFA7_9GAMM Queuine tRNA-ribosyltran sferase OS=Oceanococcus atlanticus OX=1317117 GN=tgt PE =3 SV=1
MSFELLAQDAGARRGRLSFERGVVETPIFMPVGTYGTVKGMTPEELRGIGASIILGNTFHLWLRPGTEVISAHGDLHDFMHWHGPILTDSGGFQVWSLAELRKLTEQGVEFRSPVNGDKVFLSPEISIEIQQALGSDIIMQFDECTAYPATHDEARQSMELSLRWAARCKQAHAGRGGALFGIVQGGMHEDLRAQSIVGLADIGFDGYAIGGLSVGEPEADRIRVLDALEDKMPAQSPRYLMGVGTPLDMVEAVARGVDMFDCVMPTRNARNGHLFTSEGIIRIRNARHRNDTGPLDPQCDCYTCQNYSRAYLYHLQRCGEILSARLNTIHNLHYYLNLMAEMREAIEQGRFSAFYTEFRRRFMA

SEQ ID NO: 58311 - protein, 365 aa, Oceanococcus sp.
  misc_feature (1)..(365): tr|A0A520STE8|A0A520STE8_9GAMM Queuine tRNA-ribosyltran sferase OS=Oceanococcus sp. OX=1958892 GN=tgt PE=3 SV=1
MSFELLAQDAGARRGRLSFERGAVETPIFMPVGTYGTVKGMTPEELRGIGASIILGNTFHLWLRPGTEVISAHGDLHDFMHWHGPILTDSGGFQVWSLAELRKLTEQGVEFRSPVNGDKVFLSPEISIEIQQALGSDIIMQFDECTAYPATHDEARQSMELSLRWAARCKQAHAGRGGALFGIVQGGMHEDLRAQSIAGLADIGFDGYAIGGLSVGEPEADRIRVLDALEDKMPAQSPRYLMGVGTPLDMVEAVARGVDMFDCVMPTRNARNGHLFTSEGIIRIRNARHRNDTGPLDPQCDCYTCQNYSRAYLYHLQRCGEILSARLNTIHNLHYYLNLMAEMREAIEQGRFSAFYTEFRRRFMA

SEQ ID NO: 58312 - protein, 391 aa, Oceanospirillaceae bacterium
  misc_feature (1)..(391): tr|A0A2D5PGY2|A0A2D5PGY2_9GAMM Queuine tRNA-ribosyltran sferase OS=Oceanospirillaceae bacterium OX=1899355 GN=t gt PE=3 SV=1
MTRECFMKFELLSETEDSGSKARRGQLTFPRGTIQTPAFMPVGTYGTVKGLTPQQIKDIGAEIILGNTFHLMLRPGTEIVKLHGDLHDFIGWDKPILTDSGGFQVFSLGDMRKITEEGVSFRSPVNGEKVLMTPESSMQVQRDLGSDIVMIFDECTPYPATEKEAADSMRMSLRWAKRSKDAHGDNPSAQFGIIQGGMYEDLRDESLAGLLDIGFDGYAIGGLSVGEPKDEMMRVLKHIAPKMPEDKPRYLMGVGKPEDLVEGVRRGVDMFDCVMPTRNARNAHLFTSTGTLKIRNSANKTNNGPVDPECSCYTCRNFSRAYLHHLDKCKEILGATLNSIHNLHYYQTLMAGLRRSLEEGTFAGFVDEFYAKRGMKTPPLDDSTATEEPAS

SEQ ID NO: 58313 - protein, 40 aa, Oceanospirillaceae bacterium
  misc_feature (1)..(40): tr|A0A350JAN0|A0A350JAN0_9GAMM tRNA guanosine(34) trans glycosylase Tgt (Fragment) OS=Oceanospirillaceae bacter ium OX=1899355 GN=tgt PE=4 SV=1
MSRRCFMKFERLTQSGEARRGRLTFPRGSVETPCFMPVGT

SEQ ID NO: 58314 - protein, 149 aa, Oceanospirillales bacterium
  misc_feature (1)..(149): tr|A0A357LXW7|A0A357LXW7_9GAMM tRNA guanosine(34) trans glycosylase Tgt (Fragment) OS=Oceanospirillales bacteri um OX=1914300 GN=tgt PE=4 SV=1
KPRYLMGVGTPADLVESVSRGVDMFDCVMPTRNARNGHLFTHTGVVKIRNATNKTDTGPVDPQCDCYTCRNYSRAYLYHLDKCGEMLGATLNSIHNLHYYQTLMAGLRRSLEEGTFAAFVEDFYQQRNLPVPPLDGDEPDSAQQDSGAE

SEQ ID NO: 58315 - protein, 373 aa, Oceanospirillales bacterium
  misc_feature (1)..(373): tr|A0A2A4XK52|A0A2A4XK52_9GAMM Queuine tRNA-ribosyltran sferase OS=Oceanospirillales bacterium OX=1914300 GN=tg t PE=3 SV=1
MSFEKLGEDGLARRGRLTFPRGTVETPAFMPVGTYGTVKGMLPRDIHEIGAEIILGNTFHLMLRPGTEVVKAHGDLHDFTQWKGPILTDSGGFQVFSLGEMRKITEEKVTFRSPVDGSPVELSPEIAIRVQRELGSDIVMIFDECTPYPATEKQAKESMELSLRWAKRSKDAHEGNPAALFGIVQGGMYESLRDRSLEGLTDIGFDGYAIGGLSVGEPKEDMIRILDHLPPKMPSDKPRYLMGVGRPEDLVEAVRRGVDMFDCVMPTRNARNGYLFTSTGIVKIRNARHRHDTLPLDDRCDCYTCKNFSRSYLHHLDKCGEMLGSQLNTIHNLRYYQNLMAGLRGAIEAGTLSDFINHFYALRGETVPAMGNG

SEQ ID NO: 58316 - protein, 378 aa, Oceanospirillum linum
  misc_feature (1)..(378): tr|A0A1T1HFU3|A0A1T1HFU3_OCELI Queuine tRNA-ribosyltran sferase OS=Oceanospirillum linum OX=966 GN=tgt PE=3 SV= 1
MSRECFMKYELKATDGKARRGELTFPRGKVQTPAFMPVGTYGTVKGMLPRDIEEIGAEIILGNTFHLMLRPGTEVVKKHGDLHDFIQWKGPILTDSGGFQVFSLGAMRKITEKGVEFRSPVNGEKVFIDPERSMQVQRDLGSDVVMIFDECTPYPATHKEAKESMEMSLRWAKRSKDAHGDNPSALFGIIQGGMFKDLRDVSLKGLTDIGFDGYAIGGLSVGEPKDEMIQVLDYLPAMMPEDRPRYLMGVGKPEDLVEGVRRGVDMFDCVMPTRNARNGHLFTADGVIKIRNAVHRHDDGPLEKECDCYTCQNFSRSYLHHLDKCKEMLGAQLNTIHNLRYYQRLMAGLRDAIEQGKLDDFVSDFYARLGREVPELAE

SEQ ID NO: 58317 - protein, 381 aa, Oceanospirillum multiglobuliferum
  misc_feature (1)..(381): tr|A0A1T4M1Z7|A0A1T4M1Z7_9GAMM Queuine tRNA-ribosyltran sferase OS=Oceanospirillum multiglobuliferum OX=64969 G N=tgt PE=3 SV=1
MSRECFMQFELKATDGKARRGELNFPRGKVQTPAFMPVGTYGTVKGMLPRDIEAIGAEIILGNTFHLMLRPGTEVIKAHGDLHDFTQWKGPILTDSGGFQVFSLGAMRKITEKGVEFRSPVNGEKVFIDPERSMQVQRDLGSDVVMIFDECTPYPASHKEAKDSMEMSLRWAKRSKDAHGDNPSALFGIIQGGMYKDLREVSLKGLSEIGFDGYAIGGLSVGEPKEEMIKVLDYLPAMMPADRPRYLMGVGKPEDLVEGVRRGIDMFDCVMPTRNARNGHLFTADGVVKIRNAMHRNDPQSLEAECDCYTCQNFSRGYLHHLDKCKEMLGAMLNTIHNLRYYQRLMAGLRDAIEQGKLDDFVSDFYARRGLEVPELAEQID

SEQ ID NO: 58318 - protein, 378 aa, Oceanospirillum sp.
  misc_feature (1)..(378): tr|A0A2D5GDA3|A0A2D5GDA3_9GAMM Queuine tRNA-ribosyltran sferase OS=Oceanospirillum sp. OX=2021254 GN=tgt PE=3 S V=1
MSRECFMNFELKTTDGKARRGQLNFPRGSVQTPAFMPVGTYGTVKGMLPRDIEEIGAEIILGNTFHLMLRPGTEVVKAHGDLHDFVQWKGPILTDSGGFQVFSLGAMRKITEKGVEFRSPVNGEKVFIDPERSMQVQRDLGSDVVMIFDECTPYPATHQEAKDSMEMSLRWAKRSKDAHGDNPSALFGIIQGGMYKDLREVSLEGLTNIGFDGYAIGGLSVGEPKDEMIKVLDYLPAMMPTDRPRYLMGVGKPEDLVEGVRRGVDMFDCVMPTRNARNGHLFTADGVIKIRNAKHRHDTGPLEEGCDCYTCQNFSRSYLHHLDKCKEMLGAQLNTIHNLRYYQRLMASLRDAIEQGKLDDFVSDFYARRDMEVPELAE

SEQ ID NO: 58319 - protein, 373 aa, Oceanotoga teriensis
  misc_feature (1)..(373): tr|A0A316CPJ6|A0A316CPJ6_9THEM Queuine tRNA-ribosyltran sferase OS=Oceanotoga teriensis OX=515440 GN=tgt PE=3 S V=1
MSKIKYELLHVDKYSKARRGRIHTPHGIIETPVFMPVGTNSTVKGLTNDQIKNIDSEIILSNAFHLFLRPGMEIMKDFEGIHNFMNWNKPLLTDSGGFQVFSLKDRKISEEGVLFRSPLDGSKIMMTPEKSMEIQQTIGSDIAMAFDECVNAKWGYEYMKDSVDRTYRWAKRSFEAHKKENQSLFGIVQGGLFSDLRQRSLEQITSIPFDGFALGGLAVGEKYQESEKVLKEFGDKLPKDKPRYIMGIGSPTMMFLSVENGMDMFDCVLPTRMGRHGTALTWNGKLNLKSAKNKFDHSPIENDCNCYACKNHTRGYINHLLKRDEMLGKTLISIHNLYFNIHLIHKMREAIENDSFLDFKKEFFSNSSYPLQN

SEQ ID NO: 58320 - protein, 383 aa, Ochrobactrum anthropi
  misc_feature (1)..(383): tr|A0A011UIC9|A0A011UIC9_OCHAN Queuine tRNA-ribosyltran sferase OS=Ochrobactrum anthropi OX=529 GN=tgt PE=3 SV= 1
MTLENLKTSENFEFKVLATDGAARQGEISMPRGVVRTPAFMPVGTAGTVKAMYMDQVKELGADIILGNTYHLMLRPGAERVARLGGLHEFGGWKGPILTDSGGFQVMSLAQLRKLDEKGVTFRSHIDGKPYEMTPERSIEIQGLLDSDIQMQLDECVALPSPEKNTERAMELSLRWAERSKVAFGNQPGKAMFGIVQGGDVARLREKSAEALKALDLKGYSVGGLAVGEPQQVMLDMLEVVCPILPSEKPRYLMGVGTPDDILKSVARGIDMFDCVMPTRAGRHGLAFTRFGKVNLRNARHADDHRPLDPESDCPASRDYSRAYLHHLVKSGEALGAMLLTWNNLAYYQYLMKGIRASIADGRFGDFSAETSEGWARGDIPAL

SEQ ID NO: 58321 - protein, 383 aa, Ochrobactrum anthropi
  misc_feature (1)..(383): tr|A0A137XSD3|A0A137XSD3_OCHAN Queuine tRNA-ribosyltran sferase OS=Ochrobactrum anthropi OX=529 GN=tgt PE=3 SV= 1
MTLENLKTSENFEFKVLATDGAARQGEISMPRGVVRTPAFMPVGTAGTVKAMYMDQVKELGADIILGNTYHLMLRPGAERVARLGGLHEFGGWKGPILTDSGGFQVMSLAQLRKLDENGVTFRSHIDGKPYEMTPERSIEIQGLLDSDIQMQLDECVALPSPEKNTERAMELSLRWAERCKVAFGNQPGKAMFGIVQGGDVARLREKSAEALKAMDLKGYSVGGLAVGEPQQVMLDMLEVVCPILPSEKPRYLMGVGTPDDILKSVARGIDMFDCVMPTRAGRHGLAFTRFGKVNLRNARHADDHRPLDPESDCPASRDYSRAYLHHLVKSGEALGAMLLTWNNLAYYQYLMKGIRASIADGRFGEFSAETSEGWARGDIAPL

SEQ ID NO: 58322 - protein, 383 aa, Ochrobactrum cytisi
  misc_feature (1)..(383): tr|A0A1J6HH93|A0A1J6HH93_9RHIZ Queuine tRNA-ribosyltran sferase OS=Ochrobactrum cytisi OX=407152 GN=tgt PE=3 SV =1
MTLENLKTSENFEFKVLATDGAARQGEISMPRGVVRTPAFMPVGTAGTVKAMYMDQVKELGADIILGNTYHLMLRPGAERVARLGGLHEFGGWKGPILTDSGGFQVMSLAQLRKLDEKGVTFRSHIDGKPYEMTPERSIEIQGLLDSDIQMQLDECVALPSPEKNTERAMELSLRWAERCKVAFGNQPGKAMFGIVQGGDVARLREKSAEALRAMDLKGYSVGGLAVGEPQQVMLDMLEVVCPILPSEKPRYLMGVGTPDDILKSVARGIDMFDCVMPTRAGRHGLAFTRFGKVNLRNARHADDHRPLDPESDCPASRDYSRAYLHHLVKSGEALGAMLLTWNNLAYYQYLMKGIRISIADGRFGDFSAETSEGWARGDIPAL

SEQ ID NO: 58323 - protein, 377 aa, Ochrobactrum gallinifaecis
  misc_feature (1)..(377): tr|A0A502BS84|A0A502BS84_9RHIZ Queuine tRNA-ribosyltran sferase OS=Ochrobactrum gallinifaecis OX=215590 GN=tgt PE=3 SV=1
MTSENFEFKVLARDGAARQGEISMPRGVVRTPAFMPVGTAGTVKAMYMDQVKDLGADIILGNTYHLMLRPGAERVARLGGLHEFGGWKGPILTDSGGFQVMSLAQLRKLDENGVTFRSHIDGKPYEMTPERSIEIQGLLDSDIQMQLDECVALPSPEKNTERAMELSLRWAERCKAAFGTQAGKAMFGIVQGGDNARLRERSAEALKAMDLKGYSVGGLAVGEPQNVMLDMLEVVCPILPSEKPRYLMGVGTPDDILKSVARGIDMFDCVMPTRAGRHGLAFTRFGKVNLRNARHADDHRPLDPESSCPAARDYSRAYLHHLVKSGEALGGMLLTWNNLAYYQYLMQGIRKAISEGCFVDFSAETTNGWERGDIPAL

SEQ ID NO: 58324 - protein, 377 aa, Ochrobactrum grignonense
  misc_feature (1)..(377): tr|A0A256FMX7|A0A256FMX7_9RHIZ Queuine tRNA-ribosyltran sferase OS=Ochrobactrum grignonense OX=94627 GN=tgt PE= 3 SV=1
MTSENFEFKVLARDGAARQGEISMPRGVVRTPAFMPVGTAGTVKAMYMDQVKDLGADIILGNTYHLMLRPGAERVARLGGLHEFGGWKGPILTDSGGFQVMSLAQLRKLNENGVTFRSHIDGKPYEMTPERSIEIQGLLDSDIQMQLDECVALPSPEKNTERAMELSLRWAERCKVAFGTQAGKAMFGIVQGGDNARLRERSAEALKAMDLKGYSVGGLAVGEPQNVMLDMLEVVCPILPSEKPRYLMGVGTPDDILKSVARGIDMFDCVMPTRAGRHGLAFTRFGKVNLRNARHADDHRPLDPESNCPATRDYSRAYLHHLVKSGEALGGMLLTWNNLAYYQYLMQGIRAAIAEGRFEDFAAETTAGWERGDIPAP

SEQ ID NO: 58325 - protein, 377 aa, Ochrobactrum haematophilum
  misc_feature (1)..(377): tr|A0A397L6L9|A0A397L6L9_9RHIZ Queuine tRNA-ribosyltran sferase OS=Ochrobactrum haematophilum OX=419474 GN=tgt PE=3 SV=1
MTSENFEFKVLATDGAARQGEISMPRGVVRTPAFMPVGTAGTVKAMYMDQVKELGADIILGNTYHLMLRPGAERVARLGGLHEFGGWQGPILTDSGGFQVMSLAQLRKLDEKGVTFRSHIDGKAYEMTPERSIEIQGLLDSDIQMQLDECVALPSPEKNTERAMELSLRWAERCKAAFGDQPGKAMFGIVQGGDNARLRARSAEALKAMDLKGYSVGGLAVGEPQEVMLDMLEVVCPILPAEKPRYLMGVGTPDDILKSVARGIDMFDCVMPTRAGRHGLAFTRFGKVNLRNARHADDHRPLDPESGCPASRDYSRAYLHHLVKSGEALGAMLLTWNNLAYYQYLMQGIRAAIAAGRFADFATETTAGWERGDIPAL

SEQ ID NO: 58326 - protein, 377 aa, Ochrobactrum haematophilum; identical to SEQ ID NO: 52901
  misc_feature (1)..(377): tr|A0A2P9HMI0|A0A2P9HMI0_9RHIZ Queuine tRNA-ribosyltran sferase OS=Ochrobactrum haematophilum OX=419474 GN=tgt PE=3 SV=1

SEQ ID NO: 58327 - protein, 385 aa, Ochrobactrum intermedium
  misc_feature (1)..(385): tr|U4VCC9|U4VCC9_9RHIZ Queuine tRNA-ribosyltransferase OS=Ochrobactrum intermedium 229E OX=1337887 GN=tgt PE=3 SV=1
MTLENLKTSENFEFKVLAIDGAARQGEISMPRGVVRTPAFMPVGTAGTVKAMYMDQVKELGADIILGNTYHLMLRPGAERVARLGGLHEFGGWKGPILTDSGGFQVMSLAQLRKLDENGVTFRSHIDGKPYEMTPERSIEIQGLLDSDIQMQLDECVALPSPEKNTERAMELSLRWAERCKVAFGNQPGKAMFGIVQGGDVARLREKSAEALKAMDLKGYSVGGLAVGEPQQVMLDMLEVVCPILPSEKPRYLMGVGTPDDILKSVARGIDMFDCVMPTRAGRHGLAFTRFGKVNLRNARHADDHRPLDPESDCPASRDYSRAYLHHLVKSGEALGAMLLTWNNLAYYQYLMKGIRASIAGGGRFADFSAETSEGWARGGDIAPL

SEQ ID NO: 58328 - protein, 383 aa, Ochrobactrum intermedium
  misc_feature (1)..(383): tr|C4WHS7|C4WHS7_9RHIZ Queuine tRNA-ribosyltransferase OS=Ochrobactrum intermedium LMG 3301 OX=641118 GN=tgt P E=3 SV=1
MTLENLKTSENFEFKVLAIDGAARQGEISMPRGVVRTPAFMPVGTAGTVKAMYMDQVKELGADIILGNTYHLMLRPGAERVARLGGLHEFGGWKGPILTDSGGFQVMSLAQLRKLDENGVTFRSHIDGKPYEMTPERSIEIQGLLDSDIQMQLDECVALPSPEKNTERAMELSLRWAERCKVAFGNQPGKAMFGIVQGGDVARLREKSAEALKAMDLKGYSVGGLAVGEPQQVMLDMLEVVCPILPSEKPRYLMGVGTPDDILKSVARGIDMFDCVMPTRAGRHGLAFTRFGKVNLRNARHADDHRPLDPESDCPASRDYSRAYLHHLVKSGEALGAMLLTWNNLAYYQYLMKGIRASIAGGRFADFSAETSEGWARGDIAPL

SEQ ID NO: 58329 - protein, 383 aa, Ochrobactrum lupini
  misc_feature (1)..(383): tr|A0A256GXP7|A0A256GXP7_9RHIZ Queuine tRNA-ribosyltran sferase OS=Ochrobactrum lupini OX=255457 GN=tgt PE=3 SV =1
MTLENLKTSENFEFKVLATDGAARQGEISMPRGVVRTPAFMPVGTAGTVKAMYMDQVKELGADIILGNTYHLMLRPGAERVARLGGLHEFGGWKGPILTDSGGFQVMSLAQLRKLDENGVTFRSHIDGKPYEMTPERSIEIQGLLDSDIQMQLDECVALPSPEKNTERAMELSLRWAERCKVAFGIQPGKAMFGIVQGGDVARLREKSAEALKAMDLKGYSVGGLAVGEPQQVMLDMLEVVCPILPSEKPRYLMGVGTPDDILKSVARGIDMFDCVMPTRAGRHGLAFTRFGKVNLRNARHADDHRPLDPESDCPASRDYSRAYLHHLVKSGEALGAMLLTWNNLAYYQYLMKGIRASIADGRFGDFSAETSEGWARGDIPAL

SEQ ID NO: 58330 - protein, 377 aa, Ochrobactrum oryzae
  misc_feature (1)..(377): tr|A0A2S7IXQ0|A0A2S7IXQ0_9RHIZ Queuine tRNA-ribosyltran sferase OS=Ochrobactrum oryzae OX=335286 GN=tgt PE=3 SV =1
MTTENFEFKVLATDGAARQGEISMPRGVVRTPAFMPVGTAGTVKAMYMDQVKELGADIILGNTYHLMLRPGAERVARLGGLHEFGGWQGPILTDSGGFQVMSLAQLRKLNEHGVTFRSHIDGKPYEMTPERSIEIQGLLDSDIQMQLDECVALPSPEKNTERAMELSLRWAERCKVAFGNQPGKAMFGIVQGGDVARLREKSAEALKAMDLKGYSVGGLAVGEPQQVMLDMLEVVCPILPSEKPRYLMGVGTPDDILKSVARGIDMFDCVMPTRAGRHGLAFTRFGKVNLRNARHADDHRPLDPESDCPASRDYSRAYLHHLVKSGEALGAMLLTWNNLAYYQYLMKGIRASIADGRFNDFAAETSEGWARGDIAPL

SEQ ID NO: 58331 - protein, 383 aa, Ochrobactrum pecoris
  misc_feature (1)..(383): tr|A0A5C5CT31|A0A5C5CT31_9RHIZ Queuine tRNA-ribosyltran sferase OS=Ochrobactrum pecoris OX=867683 GN=tgt PE=3 S V=1
MTLENLKTSENFEFKVLARDGAARQGEISMPRGVVRTPAFMPVGTAGTVKAMYMDQVKELGADIILGNTYHLMLRPGAERVAKLGGLHEFGGWKGPILTDSGGFQVMSLAQLRKLDENGVTFRSHIDGKAYEMTPERSIEIQGLLDSDIQMQLDECVALPSPEKNTERAMELSLRWAERCKVAFGDQPGKAMFGIVQGGDVARLREKSAEALKAMDLKGYSVGGLAVGEPQQVMLDMLEVVCPILPSEKPRYLMGVGTPDDILKSVARGIDMFDCVMPTRAGRHGLAFTRFGKVNLRNARHADDHRPLDPESDCPASRDYSRAYLHHLVKSGEALGAMLLTWNNLAYYQYLMEGIRASIADGRFGEFAAETSEGWARGDMAPL

SEQ ID NO: 58332 - protein, 377 aa, Ochrobactrum pseudogrignonense
  misc_feature (1)..(377): tr|A0A1A9FKT2|A0A1A9FKT2_9RHIZ Queuine tRNA-ribosyltran sferase OS=Ochrobactrum pseudogrignonense OX=419475 GN= tgt PE=3 SV=1
MTSENFEFKVLARDGAARQGEISMPRGVVRTPAFMPVGTAGTVKAMYMDQVKDLGADIILGNTYHLMLRPGAERVARLGGLHEFGGWKGPILTDSGGFQVMSLAQLRKLNENGVTFRSHIDGKPYEMTPERSIEIQGLLDSDIQMQLDECVALPSPEKNTERAMELSLRWAERCKVAFGTQAGKAMFGIVQGGDNARLRERSAEALKAMDLKGYSVGGLAVGEPQNVMLEMLEVVCPILPTEKPRYLMGVGTPDDILKSVARGIDMFDCVMPTRAGRHGLAFTRFGKVNLRNARHADDHRPLDPESNCPATRDYSRAYLHHLVKSGEALGGMLLTWNNLAYYQYLMQGIRAAIAEGRFEDFAAETTAGWERGDIPAL

SEQ ID NO: 58333 - protein, 377 aa, Ochrobactrum pseudogrignonense
  misc_feature (1)..(377): tr|A0A256GTZ6|A0A256GTZ6_9RHIZ Queuine tRNA-ribosyltran sferase OS=Ochrobactrum pseudogrignonense OX=419475 GN= tgt PE=3 SV=1
MTSENFEFKVLARDGAARQGEISMPRGVVRTPAFMPVGTAGTVKAMYMDQVKDLGADIILGNTYHLMLRPGAERVARLGGLHEFGGWKGPILTDSGGFQVMSLAQLRKLNENGVTFRSHIDGKPYEMTPERSIEIQGLLDSDIQMQLDECVALPSPEKNTERAMELSLRWAERCKVAFGTQAGKAMFGIVQGGDNARLRERSAEALKAMDLKGYSVGGLAVGEPQNVMLEMLEVVCPILPTEKPRYLMGVGTPDDILKSVARGIDMFDCVMPTRAGRHGLAFTRFGKVNLRNARHADDHRPLDPESNCPATRDYSRAYLHHLVKSGEALGGMLLTWNNLAYYQYLMQGIRAAIAEGRFEDFAAETTAGWQRGDIPAL

SEQ ID NO: 58334 - protein, 377 aa, Ochrobactrum quorumnocens
  misc_feature (1)..(377): tr|A0A248UJC0|A0A248UJC0_9RHIZ Queuine tRNA-ribosyltran sferase OS=Ochrobactrum quorumnocens OX=271865 GN=tgt P E=3 SV=1
MTSENFEFKVLARDGAARQGEISMPRGVVRTPAFMPVGTAGTVKAMYMDQVKDLGADIILGNTYHLMLRPGAERVARLGGLHEFGGWKGPILTDSGGFQVMSLAQLRKLNENGVTFRSHIDGKPYEMTPERSIEIQGLLDSDIQMQLDECVALPSPENNTERAMELSLRWAERCKVAFGTQAGKAMFGIVQGGDNARLRERSAEALKAMDLKGYSVGGLAVGEPQCVMLDMLEVVCPILPTEKPRYLMGVGTPDDILKSVARGIDMFDCVMPTRAGRHGLAFTRFGKVNLRNARHADDHRPLDPESNCPATRDYSRAYLHHLVKAGEALGGMLLTWNNLAYYQYLMQGIRAAIAEGRFEDFAAETTAGWERGDISPL

SEQ ID NO: 58335 - protein, 377 aa, Ochrobactrum rhizosphaerae
  misc_feature (1)..(377): tr|A0A256FI97|A0A256FI97_9RHIZ Queuine tRNA-ribosyltran sferase OS=Ochrobactrum rhizosphaerae OX=571254 GN=tgt PE=3 SV=1
MTSENFEFKVLARDGAARRGEISMPRGVVRTPAFMPVGTAGTVKAMYMDQVKELGADIILGNTYHLMLRPGAERVARLGGLHEFGGWKGPILTDSGGFQVMSLAQLRKLNENGVTFRSHIDGKPYEMTPERSIEIQGLLDSDIQMQLDECVALPSPEQNTERAMELSLRWAERCKVAFGTQAGKAMFGIVQGGDNARLRERSAEALKAMDLKGYSVGGLAVGEPQNVMLDMLEVVCPILPSEKPRYLMGVGTPDDILKSVARGIDMFDCVMPTRAGRHGLAFTRFGKVNLRNARHADDHRPLDPESNCPATRDYSRAYLHHLVKAGEALGGMLLTWNNLAYYQYLMQGIRAAIAEGRFEDFAAETTAGWERGDIPAL

SEQ ID NO: 58336 - protein, 377 aa, Ochrobactrum sp.
  misc_feature (1)..(377): tr|A0A4R7WT07|A0A4R7WT07_9RHIZ Queuine tRNA-ribosyltran sferase OS=Ochrobactrum sp. LP_5_YM OX=2485134 GN=tgt P E=3 SV=1
MTSENFEFKVLARDGAARQGEISMPRGVVRTPAFMPVGTAGTVKAMYMDQVKELGADIILGNTYHLMLRPGAERVARLGGLHEFGGWRGPILTDSGGFQVMSLAQLRKLNENGVTFRSHIDGKPYEMTPERSIEIQGLLDSDIQMQLDECVALPSPENNTERAMELSLRWAERCKVAFGTQAGKAMFGIVQGGDNARLRERSAEALKAMDLKGYSVGGLAVGEPQSVMLDMLEVVCPILPTDKPRYLMGVGTPDDILKSVARGIDMFDCVMPTRAGRHGLAFTRFGKVNLRNARHADDHRPLDPESNCPATRDYSRAYLHHLVKAGEALGGMLLTWNNLAYYQYLMQGIRAAIAEGRFEDFAAETTAGWERGDIPAL

SEQ ID NO: 58337 - protein, 376 aa, Ochrobactrum sp.
  misc_feature (1)..(376): tr|A0A3D2CYH1|A0A3D2CYH1_9RHIZ Queuine tRNA-ribosyltran sferase OS=Ochrobactrum sp. OX=42190 GN=tgt PE=3 SV=1
  misc_feature (200)..(200): Xaa can be any naturally occurring amino acid
MTLENLKTSENFEFKVLATDGAARQGEISMPRGVVRTPAFMPVGTAGTVKAMYMDQVKELGADIILGNTYHLMLRPGAERVARLGGLHEFGGWKGPILTDSGGFQVMSLAQLRKLDKNGVTFRSHIDGKPYEMTPERSIEIQGLLDSDIQMQLDECVALPSPEKNTERAMELSLRWAERCKVAFGNQPGKAMFGIVQGGXAEALKAMDLKGYSVGGLAVGEPQQVMLDMLEVVCPILPSEKPRYLMGVGTPDDILKSVARGIDMFDCVMPTRAGRHGLAFTRFGKVNLGNARHADDHRPLDPESDCPASRDYSRAYLHHLVKSGEALGAMLLTWNNLAYYQYLMKGIRASIAGGRFADFSTETSEGWARGDIPALL

SEQ ID NO: 58338 - protein, 377 aa, Ochrobactrum thiophenivorans
  misc_feature (1)..(377): tr|A0A256FXN3|A0A256FXN3_9RHIZ Queuine tRNA-ribosyltran sferase OS=Ochrobactrum thiophenivorans OX=571255 GN=tg t PE=3 SV=1
MTSENFEFKVLARDGAARQGEISMPRGVVRTPAFMPVGTAGTVKAMYMDQVKDLGADIILGNTYHLMLRPGAERVARLGGLHEFGGWKGPILTDSGGFQVMSLAQLRKIDETGVTFRSHIDGKAYEMTPERSIEIQGLLDSDIQMQLDECVALPSPEKNTERAMEMSLRWAERCKVAFGTQAGKAMFGIVQGGDNARLRERSAEALKAMDLKGYSVGGLAVGEPQNVMLEMLEVVCPILPTEKPRYLMGVGTPDDMLKSVARGIDMFDCVMPTRAGRHGLAFTRFGKVNLRNARHADDHRPLDPESNCPATRDYSRAYLHHLVKSGEALGGMLLTWNNLAYYQYLMQGIRAAIAEGRFEDFAAETTAGWERGDIAAL

SEQ ID NO: 58339 - protein, 293 aa, Unknown
  misc_feature (1)..(293): tr|A0A2A4Z1D4|A0A2A4Z1D4_9PROT Queuine tRNA-ribosyltran sferase (Fragment) OS=OCS116 cluster bacterium OX=20309 21 GN=COB13_08805 PE=3 SV=1
MGKNIKFELKNSNGKARLGVLRTPRGDINTPAFMPVGTAGTVKAMYTDQVKELGAEVVLGNTYHLMLRPGAERIERLGGLHEFMQWDKPILTDSGGFQVMSLSKLRKMTEEGVTFQSHIDGSKHHLTPERSIEIQCLLGSDIQMQLDECTPHPATEKQAADSLRMSLRWADRSKVQFGDRPNQALFGIMQGSTYQDLREESAKGLVDMDFDGYSIGGLAVGEGQEIMLEVLDYAPDLLPQDKPRYLMGVGTPSDLIESVRRGVDMFDCVMPTRAGRHGLCYTHRGKVNLKNAR

SEQ ID NO: 58340 - protein, 376 aa, Octadecabacter antarcticus
  misc_feature (1)..(376): tr|M9RAL4|M9RAL4_9RHOB Queuine tRNA-ribosyltransferase OS=Octadecabacter antarcticus 307 OX=391626 GN=tgt PE=3 SV=1
MTVPFSFDLAATDGAARTGVMHTPRGDIRTPAFMPVGTAATVKAMMPESVRKTGADILLGNTYHLMLRPTAERIARLGGLHKFMNWDRPILTDSGGFQVMSLAGMRKLTEEGVVFQSHYDGSKHNLTPERSMEIQALLGSDIVMCFDECPALPADRARLEDSMQMSMRWAKRSRVAFGGRPGHALFGIQQGGLDEGLRKQSADALQEIGFEGYAVGGLAVGEGQEAMFGCLDFAPDQLPTQKPRYLMGVGKPDDIVGAVKRGIDMMDCVLPSRSGRTGQVFTRNGVLNIKNARHADDPRPLDEGCGCPACSNYSRAYLHHVFRSQEMISGMLLTWHNLTYFQDIMAGMRNAIATQTFAAWEADFHRTRAQGDIDPL

SEQ ID NO: 58341 - protein, 376 aa, Octadecabacter arcticus
  misc_feature (1)..(376): tr|M9RM71|M9RM71_9RHOB Queuine tRNA-ribosyltransferase OS=Octadecabacter arcticus 238 OX=391616 GN=tgt PE=3 SV =1
MTVPFSFDLQATDGSARTGVMRTQRGDIRTPAFMPVGTAATVKAMMPESVRATGADILLGNTYHLMLRPTAERIARLGGLHKFMNWDRPILTDSGGFQVMSLAGMRKLTEEGVVFQSHYDGSKHNLTPERSMEIQALLGSDIVMCFDECPALPADRTRLEDSMQMSMRWAKRSRAAFGDRPGHALFGIQQGGLDEDLRKQSADALQDIGFEGYAVGGLAVGEGQEAMFGCLDFAPDQLPTQKPRYLMGVGKPDDIVGAVKRGIDMMDCVLPSRSGRTGQIFTRTGVLNIKNARHADDPRPLDEGCRCPACSNYSRAYLHHVFRSQEMISGMLLTWHNLTYFQDIMAGMRDAIATQSFAAWEADFHAGRAQGDIDPL

SEQ ID NO: 58342 - protein, 376 aa, Octadecabacter ascidiaceicola
  misc_feature (1)..(376): tr|A0A238JNC1|A0A238JNC1_9RHOB Queuine tRNA-ribosyltran sferase OS=Octadecabacter ascidiaceicola OX=1655543 GN= tgt PE=3 SV=1
MTDTFSFDLQKTDGAARTGVMRTPRGDIRTPAFMPVGTAATVKAMMPESVRQTGADILLGNTYHLMLRPTAERIAKLGGLHKFMNWERPILTDSGGFQVMSLSGMRKLTEEGVVFQSHYDGSKHNLTPERSMEIQRLLGSDIVMCFDECPALPADRKRLEDSMEMSMRWAKRSRDAFGDRPGHALFGIQQGGLEEDLRKRSADALQEIGFDGYAVGGLAVGEGQEAMFDTLDFAPDQLPVDKPRYLMGVGKPDDIVGAVKRGIDMMDCVLPSRSGRTGQVFTRNGVVNIKNARHADDPRPLDENCRCPACSNYSRAYLHHVFRSQEMISGMLLTWHNLTYFQDIMQGMRDAIAAGMFAAWEADFHAGRAQGDIEPL

SEQ ID NO: 58343 - protein, 376 aa, Octadecabacter temperatus
  misc_feature (1)..(376): tr|A0A0K0Y5U1|A0A0K0Y5U1_9RHOB Queuine tRNA-ribosyltran sferase OS=Octadecabacter temperatus OX=1458307 GN=tgt PE=3 SV=1
MTKTFSFELQKTDGAARTGVMHTPRGDIRTPAFMPVGTAATVKAMMPESVRETGADILLGNTYHLMLRPTAERIAKLGGLHKFMNWERPILTDSGGFQVMSLAGMRKLTEEGVVFQSHYDGSKHNLTPERSMEIQRLLGSDIVMCFDECPALPADRKRLEDSMEMSMRWAKRSRDAFGDRPGHALFGIQQGGLEEDLRKRSADALQEIGFEGYAVGGLAVGEGQEAMFDCLDFAPDQLPVDKPRYLMGVGKPDDIVGAVKRGIDMMDCVLPSRSGRTGQVFTRHGVVNIKNARHADDPRPLDENCRCPACSNYSRAYLHHVFRSHEMISGMLLTWHNLTYFQDIMQGMRDAISGGTFAAWESDFHSKRAQGDIDPL

SEQ ID NO: 58344 - protein, 376 aa, Odoribacter laneus
  misc_feature (1)..(376): tr|R5USN1|R5USN1_9BACT Queuine tRNA-ribosyltransferase OS=Odoribacter laneus CAG:561 OX=1263089 GN=tgt PE=3 SV =1
MQYTLLAKDKNSEARCGVLTTAHGDIHTPIFMPVGTVGTVKAVHARELKEDIRAEIILGNTYHLYLRPGTEVLQAAGGLHRFNAWDRPILTDSGGFQVFSLTENRKITEEGVIFRSHIDGSKHIFTPEKVMDIQRKIGSDIIMAFDECPPGTSEYGYAKKSLELTQRWLERCVARIDATEPLYGYEQNLFPIVQGCVYKDLREKSAEHAVALNRAGYAIGGLAVGEPAEDMYAMIEVVNRILPQDKPRYLMGVGTPENILEAIALGVDMFDCVMPTRNGRNGMLFTTEGIINIKNQKWERDFSPLDPAEICYVDADYSKAYLRHLIKANEILGLQICSIHNLAFYLWLVREARKHIMEGDFLDWKNRMIRKVTTRL

SEQ ID NO: 58345 - protein, 376 aa, Odoribacter laneus
  misc_feature (1)..(376): tr|H1DDK3|H1DDK3_9BACT Queuine tRNA-ribosyltransferase OS=Odoribacter laneus YIT 12061 OX=742817 GN=tgt PE=3 S V=1
MQYTLLAKDKNSEARCGVLTTAHGDIHTPIFMPVGTVGTVKAVHARELKEDIRAEIILGNTYHLYLRPGTEVLQAAGGLHRFNAWDRPILTDSGGFQVFSLTENRKITEEGVIFRSHIDGSKHIFTPEKVMDIQRKIGSDIIMAFDECPPGTSEYGYAKKSLELTQRWLERCIARIDATEPLYGYEQNLFPIVQGCVYKDLREKSAEHAVALNRAGYAIGGLAVGEPAEDMYAMIEVVNRILPQDKPRYLMGVGTPENILEAIALGVDMFDCVMPTRNGRNGMLFTTEGIINIKNQKWERDFSPLDPAEICYVDADYSKAYLRHLIKANEILGLQICSIHNLAFYLWLVREARKHIMEGDFLEWKNRMIRKVTTRL

SEQ ID NO: 58346 - protein, 376 aa, Odoribacter sp.
  misc_feature (1)..(376): tr|R5PPK7|R5PPK7_9BACT Queuine tRNA-ribosyltransferase OS=Odoribacter sp. CAG:788 OX=1262909 GN=tgt PE=3 SV=1
MQYTLLAKDKNSEARCGVLTTAHGEIHTPIFMPVGTVGTVKAVHARELKNDIRAEIILGNTYHLYLRPGTDILQAAGGLHKFNGWDRPILTDSGGFQVFSLTDRRKITEEGVIFHSHIDGSKHIFTPESVMDIQRKIGADIIMAFDECPPGTSEYGYAKKSLELTQRWLERCVKHLDATEPLYGYEQNLFPIVQGCVYKDLRERSAEHAVALDRAGYAIGGLAVGEPAEDMYAMIEVVNRILPQNKPRYLMGVGTPENILEAIALGVDMFDCVMPTRNGRNGMLFTTEGVINIKNRKWDRDFSPLDPAGLCFVDTDYTKAYLRHLIKADEILGLQICSIHNLAFYLWLVREARKHILEGDFAVWKSRMVKKVTTRL

SEQ ID NO: 58347 - protein, 376 aa, Odoribacter sp.
  misc_feature (1)..(376): tr|A0A417WR49|A0A417WR49_9BACT Queuine tRNA-ribosyltran sferase OS=Odoribacter sp. OF09-27XD OX=2293112 GN=tgt PE=3 SV=1
MQYTLLAKDKNSEARCGVLTTAHGEIHTPIFMPVGTVGTVKAVHARELKTDIRAEIILGNTYHLYLRPGTDILQAAGGLHKFNGWDRPILTDSGGFQVFSLTDRRKITEEGVIFHSHIDGSKHIFTPESVMDIQRKIGADIIMAFDECPPGTSEYGYAKKSLELTQRWLERCVKHLDATEPLYGYEQNLFPIVQGCVYKDLRERSAEHAVALDRAGYAIGGLAVGEPAEDMYAMIEVVNRILPQNKPRYLMGVGTPENILEAIALGVDMFDCVMPTRNGRNGMLFTTEGVINIKNRKWDRDFSPLDPAGLCFVDTDYTKAYLRHLIKADEILGLQICSIHNLAFYLWLVREARKHILEGDFAVWKSQMVKKVTTRL

SEQ ID NO: 58348 - protein, 377 aa, Odoribacter splanchnicus
  misc_feature (1)..(377): tr|A0A412TVG6|A0A412TVG6_9BACT Queuine tRNA-ribosyltran sferase OS=Odoribacter splanchnicus OX=28118 GN=tgt PE= 3 SV=1
MQYTLLAKDKNSEARCGVLTTAHGEIHTPVFMPVGTVGSVKAVHMRELKEDIRAEIILGNTYHLYLRPGTEILQAAGGLHRFNGWDRPILTDSGGFQVFSLTGTGRKITEEGVTFRSHIDGSKHLFTPENVMDIQRKIGADIVMAFDECPPGTSDYNYARHSLGLTQRWLERCVARFDETAPLYGYEQNLFPIVQGCTYRDLREKAAEHAVSLNRAGYAIGGLAVGEPAEEMYAMIEVVNRILPQDKPRYLMGVGTPENILEGIQRGVDMFDCVMPTRNGRNGMIFTTEGTINIKNQKWERDFSSIDPAALSYVDTDYSKAYLRHLIKSDEILGLQICSIHNLSFYLWLVREARKHIQEGDFVEWKTKLLPKITRRL

SEQ ID NO: 58349 - protein, 377 aa, Odoribacter splanchnicus
  misc_feature (1)..(377): tr|R6F2N0|R6F2N0_9BACT Queuine tRNA-ribosyltransferase OS=Odoribacter splanchnicus CAG:14 OX=1263090 GN=tgt PE =3 SV=1
MQYTLLAKDKNSEARCGVLTTAHGEIHTPVFMPVGTVGSVKAVHMRELKEDIRAEIILGNTYHLYLRPGTEILQAAGGLHRFNGWDRPILTDSGGFQVFSLTGTGRKITEEGVTFRSHIDGSKHLFTPENVMDIQRQIGADIVMAFDECPPGTSDYNYARHSLGLTQRWLERCVARFDETAPLYGYEQNLFPIVQGCTYRDLREKAAEHAVSLNRAGYAIGGLAVGEPAEEMYAMIEVVNRILPQDKPRYLMGVGTPENILEGIQRGVDMFDCVMPTRNGRNGMIFTTEGTINIKNQKWERDFSSIDPAALSYVDTDYSKAYLRHLIKSDEILGLQICSIHNLSFYLWLVREARKHIQEGDFVEWKTKLLPKITRRL

SEQ ID NO: 58350 - protein, 383 aa, Oenococcus alcoholitolerans
  misc_feature (1)..(383): tr|A0A0A0M5V7|A0A0A0M5V7_9LACT Queuine tRNA-ribosyltran sferase OS=Oenococcus alcoholitolerans OX=931074 GN=tgt PE=3 SV=1
MTKATQAVTYELLHVDKHTGARRGIIHTPHGDWQTPMFMPVGTQATVKSVQPRELKEIGAQFILGNTYHLWLRPGDELIAAAGGLHKFMDWNGPILTDSGGFQVFSLADSRSISEKGVTFKNNIDGSTMFLSPEVAIKIQNNLGSDVIMQLDEAAPYFESFDYLKESSERSVRWAERALKAHKNKDKQALFGIVQGAGFYDLRKNSAKNLVSLDLPGYAIGGLSVGESKKEMNRVLDFTTQWLPTNKARYLMGVGAPDSLIDCVNAGIDMFDCVLPTRIARKGSLMTRFGRIVITNHKYKNDFSQLDPDLDDYASTHFTKAYLHHLFNTHELLGYNLASIHNLRFLLKLMEDMRQAIENDQMVDFRKKVLDEYGYNRPNARLF

SEQ ID NO: 58351 - protein, 381 aa, Oenococcus kitaharae
  misc_feature (1)..(381): tr|G9WJP7|G9WJP7_9LACT Queuine tRNA-ribosyltransferase OS=Oenococcus kitaharae DSM 17330 OX=1045004 GN=tgt PE= 3 SV=1
MTKSPVSYELLHVDKHSGARRGIIHTPHGDWQTPMFMPVGTQATVKSMQPRELKEVGSQIILANTYHLWIRPGDELIKKAGGLHKFMDWDQAILTDSGGFQVFSLADTRSITEKGVTFKNNVDGSTMFLSPEVAMKIQNNLGPDIMMQLDEAVPYFETYDYIKESTERSARWALRALKAHKRPDEQALFGIVQGAGFKELRQNSAKDLASLDLPGYAIGGLSVGESKKEMNRVLDFTTPWLPEDKPRYLMGVAAPDSLFDSVARGIDMFDCVLPTRIARKGSLMTRFGRIVITNHKYKDDFSQLDPDLDDYASTHFTKAYLHHLFNTNELLGYNLASMHNLRYLLKLMADMRTAIENDQFLDFRAQVLEEYGYNKPNARLF

SEQ ID NO: 58352 - protein, 381 aa, Oenococcus oeni
  misc_feature (1)..(381): tr|A0A5E9PBZ2|A0A5E9PBZ2_OENOE Queuine tRNA-ribosyltran sferase OS=Oenococcus oeni OX=1247 GN=tgt PE=3 SV=1
MTKDPVTYELLHVDKHTGARRGVIHTPHGDWQTPMFMPVGTQATVKSLQPRELKEIGSQFILGNTYHLWIRPGDDLIAQAGGLHKFMDWDQAILTDSGGFQVFSLADSRSITEKGVTFKNNIDGSTMFLSPEVAMKIQNNLGADIIMQLDEAVPYFETYDYVKKSTERSARWAQRALEAHKCSKQQALFGIVQGAGFRKLRENSAKDLASLNLPGYAIGGLSVGESKTEMNRVLDFTTQWLPENKPRYLMGVGAPDSLFDSVIRGIDMFDCVLPTRIARKGSLMTRFGRVVITNHKYKDDFSQLDENLDDYASTHFTKAYLHHLFNTNELLAYNLASMHNLRYLLKLMEDMRAAIENDQLLDLKEKVLEEYGYNKANARLF

SEQ ID NO: 58353 - protein, 347 aa, Oenococcus oeni
  misc_feature (1)..(347): tr|Q04EG0|Q04EG0_OENOB Queuine tRNA-ribosyltransferase OS=Oenococcus oeni (strain ATCC BAA-331 / PSU-1) OX=203 123 GN=tgt PE=3 SV=1
MFMPVGTQATVKSLQPRELKEIGSQFILGNTYHLWIRPGDDLIAKAGGLHKFMDWDQAILTDSGGFQVFSLADSRSITEKGVTFKNNIDGSTMFLSPEVAMKIQNNLGADIIMQLDEAVPYFETYDYVKKSTERSARWAQRALEAHKCSKQQALFGIVQGAGFRKLRENSAKDLASLNLPGYAIGGLSVGESKTEMNRVLDFTTQWLPENKPRYLMGVGAPDSLFDSVIRGIDMFDCVLPTRIARKGSLMTRFGRVVITNHKYKDDFSQLDENLDDYASTHFTKAYLHHLFNTNELLAYNLASIHNLRYLLKLMEDMRAAIENDQLLDLKEKVLEEYGYNKANARLF

SEQ ID NO: 58354 - protein, 381 aa, Oenococcus sicerae
  misc_feature (1)..(381): tr|A0A410N7H5|A0A410N7H5_9LACT Queuine tRNA-ribosyltran sferase OS=Oenococcus sicerae OX=2203724 GN=tgt PE=3 SV =1
MTKLPVTYELLHVDKHTGARRGVIHTPHGDWQTPMFMPVGTQATVKSVQPRELKEIGSQFILGNTYHLWIRPGDDLIAKAGGLHKFMDWDQAILTDSGGFQVFSLADSRSITEKGVTFKNNIDGSTMFLSPEVAMKIQNNLGADIMMQLDEAVPYFESYDYIKQSTERSARWAQRALKAHKKTDSQALFGIVQGAGFKKIRENSAKDLVSLGLPGYAIGGLSVGESKAEMNRVLDFTTQWLPENKPRYLMGVGAPDSLFDSVIRGIDMFDCVLPTRIARKGSLMTRFGRIVITNHKYKEDFSQLDEDLDDYASTHFTKAYLHHLFNTNELLAYNLASIHNLRYLLKLMEDMRTAIENDQLLDLREKVLEEYGYNRPNARLF

SEQ ID NO: 58355 - protein, 381 aa, Oenococcus sp.
  misc_feature (1)..(381): tr|A0A3T0TSA0|A0A3T0TSA0_9LACT Queuine tRNA-ribosyltran sferase OS=Oenococcus sp. UCMA 16435 OX=2259623 GN=tgt PE=3 SV=1
MIKDPVTYELLHVDKHTGARRGVIHTPHGDWQTPMFMPVGTQATVKSLQPRELKEIGSQFILGNTYHLWIRPGDDLIAKAGGLHKFMDWDQAILTDSGGFQVFSLADSRSITEKGVTFKNNIDGSTMFLSPEVAMQIQNNLGADIIMQLDEAVPYFETYEYVKKSTERSARWAQRALTAHKCSDQQALFGIVQGAGFRKLRENSAKDLASLDLPGYAIGGLSVGESKIEMNRVLDFTTQWLPENKPRYLMGVGAPDSLFDSVIRGIDMFDCVLPTRIARKGSLMTRFGRIVITNHKYKDDFSQLDENLDDYASTHFTKAYLHHLFNTNELLAYNLASMHNLRYLLKLMEDMRTAIENDQLLDLKEKILEEYGYNKPNARLF

SEQ ID NO: 58356 - protein, 381 aa, Oenococcus sp.
  misc_feature (1)..(381): tr|A0A484HE69|A0A484HE69_9LACT Queuine tRNA-ribosyltran sferase OS=Oenococcus sp. WK4 OX=1806810 GN=tgt PE=3 SV =1
MTKLPVTYELLHVDKHTGARRGVIHTPHGDWQTPMFMPVGTQATVKSVQPRELKEIGSQFILGNTYHLWIRPGDDLIAKAGGLHKFMDWDQAILTDSGGFQVFSLADSRSITEKGVTFKNNIDGSTMFLSPEVAMKIQNNLGADIMMQLDEAVPYFESYDYIKQSTERSARWAQRALKAHKKADSQALFGIVQGAGFKKIRENSAKDLVSLGLPGYAIGGLSVGESKAEMNRVLDFTTQWLPENKPRYLMGVGAPDSLFDSVIRGIDMFDCVLPTRIARKGSLMTRFGRIVITNHKYKEDFSQLDEDLDDYASTHFTKAYLHHLFNTNELLAYNLASIHNLRYLLKLMEDMRTAIENDQLLDLREKVLEEYGYNRPNARLF

SEQ ID NO: 58357 - protein, 390 aa, Oharaeibacter diazotrophicus
  misc_feature (1)..(390): tr|A0A4R6RJB1|A0A4R6RJB1_9RHIZ Queuine tRNA-ribosyltran sferase OS=Oharaeibacter diazotrophicus OX=1920512 GN=t gt PE=3 SV=1
MTEDTTGADGGESAARPFSFRLLATDGTARRGEITTPHGVVRTPAFMPVGTQGTVKAMFMDDVRATGADVVLGNTYHLMLRPGAERVAALGGLHRFANWPHTILTDSGGFQVMSLAQLRKLDETGVTFQSHIDGRRYELTPERSIEIQGLLGSDIQMQLDECVRLPAPPAEVERGMRLSLRWADRSRRAFEAMGGPGKGQGLYGIVQGGDVPALRAESARALAAMPFEGYSVGGLAVGEPQAVMLAMIEVVEPLLPVDKPRYLMGVGTPDDILESVARGIDQFDCVMPTRAGRHGLAYTRFGKLNFRNARHADDPRPIDPESSCPAARDYSRAYLHHLVRTGEALGAMLLTWVNVDYYQRLMQGARDAIEAGRYADYVAETKDGWRRGEG

SEQ ID NO: 58358 - protein, 376 aa, Ohtaekwangia koreensis
  misc_feature (1)..(376): tr|A0A1T5IMZ1|A0A1T5IMZ1_9BACT Queuine tRNA-ribosyltran sferase OS=Ohtaekwangia koreensis OX=688867 GN=tgt PE=3 SV=1
MKFQLTATDPKSSARAGVLQTDHGEIQTPIFMPVGTAGSVKAVHQRELELDIQAQIILGNTYHLYLRPGLGILEKAGGLHKFNGWSRPILTDSGGYQVYSLAANRKIVDEGVTFKSHIDGSKHHFTPENVMDIQRTIGADIIMAFDECTPYPCEYAYAKSSMQLTHQWLKRCVDRIQSTEPKYGYEQALFPIVQGSVYKDLREQSAGFIASQNQQGNAIGGLSVGEPHEDMYAMTSLVCSILPKEKPRYLMGVGTPENILECIALGIDMFDCVMPTRNARNGMLFTTEGIINIRNEKWKDDLSPIDAALGGYVSTFHSKAYLRHLIINKEILGAQIASIHNLTFYLWLVKEARKQIEAGTFAAWKNKMVKTVSQRL

SEQ ID NO: 58359 - protein, 366 aa, Okeania hirsuta
  misc_feature (1)..(366): tr|A0A3N6R8A5|A0A3N6R8A5_9CYAN Queuine tRNA-ribosyltran sferase OS=Okeania hirsuta OX=1458930 GN=tgt PE=3 SV=1
MSQNFSFHFQACCSNTKARAGVFLTPHGSVDTPRFMPVGTLATVKTLTPTQLEKAGAQMILANTYHLHLQPGESIIAGAGGLHKFMAWSGPILTDSGGFQVFSLGEIRTISETGVKFRSPRDGSIIDITPERSIQIQNELGADVIMAFDECPPYPASREEVELATNRTYRWLKRCIEAHQRQDQALFGIVQGGVYPDLRSVAARQLVDLDLPGYAIGGVSVGEPGELIDDIVKVTAPLLPEDKPRYLMGVGTYREMVRAIASGIDLFDCVIPTRLGRHGVALVRGERWNLKNAKFREDYTPLDESCPCYCCQNFSRAYLAHLVRAKESLGYTLLSLHNVTELIRFTQRIRDAILGDRFTTEFAGWL

SEQ ID NO: 58360 - protein, 373 aa, Olavius algarvensis
  misc_feature (1)..(373): tr|A0A3P5VDD9|A0A3P5VDD9_9SPIR Queuine tRNA-ribosyltran sferase OS=Olavius algarvensis spirochete endosymbiont OX=260710 GN=tgt PE=3 SV=1
MLEIVANDKDCSARTGTLHLPRGDVEIPTFLPVGTNGTVKAIQHSTLRHIGYSLILSNTYHLYLRPGVQVIEKYGGLHNFSSWNGSILTDSGGFQVFSLASFRKIARDGVAFTSHIDGSRHFLTPESVVDIQVALGSDIQMQLDVCTAPGIEADEAREAVELTALWAKRAKQRYLEHSASSRGYLFGIVQGNFFKELRVLSSSLLSELDLPGYAIGGLSVGEKPEVFKEFLGYTAPLLPRDKPRYIMGIGTPEYMLESIEEGIDFFDCAYPTRVARNGTCFTRFGMINVKNSQFKDDVRPIDTECICPACAHYSRGYLRHLFVAKEILGPMLLTHHNLQFLFTMMEEARGAIRNGTFLGFKTAFLERFGTVDK

SEQ ID NO: 58361 - protein, 374 aa, Oleiagrimonas soli
  misc_feature (1)..(374): tr|A0A099CYE2|A0A099CYE2_9GAMM Queuine tRNA-ribosyltran sferase OS=Oleiagrimonas soli OX=1543381 GN=tgt PE=3 SV =1
MSSLKFDLQATDGAARRGRMTFPRGSVETPAFMPVGTYGTVKAMTPRDLTEIGAQMILGNTFHLFLRPGLDVIGDFGGLHRMIGWDGPILTDSGGFQVFSLAHKRKITEEGVTFASPVDGSKVFLSPEESMRIQRVLDSDVAMIFDECTPYPATEKQAADSMELSLRWAARSRRAFDDLGNPNNLFGIVQGGVYESLRTRSAKGLIDIGFDGYAVGGLAVGEPEDERNRTLDHTVPLLPTDKPRYLMGVGRPEDIVEAVRRGIDMFDCVMPTRNARNGFLFTRGGTLRIRNAKFARDTRVIEEGCDCYTCRSGFSRAYLRHLDRCNEMLGSQLATMHNLRHYQRLMQGLRDAIAAGALDDFVAGFYAERRAGAA

SEQ ID NO: 58362 - protein, 374 aa, Oleiagrimonas sp.
  misc_feature (1)..(374): tr|A0A328SV73|A0A328SV73_9GAMM Queuine tRNA-ribosyltran sferase OS=Oleiagrimonas sp. MCCC 1A03011 OX=1926883 GN =tgt PE=3 SV=1
MPSLKFDLQATDGAARRGRMTFPRGTVETPAFMPVGTYGTVKAMTPRDLTEIGAQMILGNTFHLFLRPGLDVIGDFGGLHRMIGWDGPILTDSGGFQVFSLAHKRKITEEGVTFASPVDGSKVFLSPEESMRIQHVLDSDVAMIFDECTPYPATEKQAADSMELSLRWAERSRRAFDELGNPNNLFGIVQGGVYEALRTRSARGLVDIGFDGYAVGGLAVGEPEDERNRTLEHTVPLLPADKPRYLMGVGRPQDIVEAVRRGIDMFDCVMPTRNARNGFLFTRTGTLRIRNAKFARDTRVIEEGCDCYTCRSGFSRAYLRHLDRCNEMLGSHLATMHNLRHYQRLMQGLRDAIAAGGLEDFVADFYAALRSGAD

SEQ ID NO: 58363 - protein, 388 aa, Oleibacter marinus
  misc_feature (1)..(388): tr|A0A1N7KNH3|A0A1N7KNH3_9GAMM Queuine tRNA-ribosyltran sferase OS=Oleibacter marinus OX=484498 GN=tgt PE=3 SV= 1
MTRECFMQFELHGTDTPKDEGGSFARRGTITFPRGKVETPAFMPVGTYGSVKGLNPEQVEALGAHIILGNTFHLMLRPGTEIIKAHGDLHDFIGWDKPILTDSGGFQVFSLGDMRKITEEGVTFASPVNGDKVLMTPESSMEVQRDLGSDVVMIFDECTPYPATTQEAADSMRMSLRWAQRSKDAHGDNPSALFGIIQGGMYEDLRDESLQGLMDIGFDGYAIGGLSVGEPKDDMMRILRHTAPKMPEDKPRYLMGVGKPEDLVEGVRRGVDMFDCVMPTRNARNGHLFTHNGVVKLRNAANKTDTGPIDAECDCYTCKNYSRAYLHHLDKCGEILGATLNTIHNLHYYQTLMAGLRSALEEGTFAAFVSDFYARRGREVPPLDTPAS

SEQ ID NO: 58364 - protein, 80 aa, Oleibacter sp.
  misc_feature (1)..(80): tr|A0A2D8A7J0|A0A2D8A7J0_9GAMM tRNA guanosine(34) trans glycosylase Tgt (Fragment) OS=Oleibacter sp. OX=2024845 GN=tgt PE=4 SV=1
FSPCRNFSRAYLHHLDKCKEILGATLNSIHNLHYYQTLMAGLRRSLEEGTFAGFVDEFYAKRGMKTPPLDDSPATEESAS

SEQ ID NO: 58365 - protein, 95 aa, Oleibacter sp.
  misc_feature (1)..(95): tr|A0A2D8AEL1|A0A2D8AEL1_9GAMM tRNA guanosine(34) trans glycosylase Tgt (Fragment) OS=Oleibacter sp. OX=2024845 GN=tgt PE=4 SV=1
MTRECFMKFELISETEDSGSKARRGQLTFPRGTIQTPAFMPVGTYGTVKGLTPEQIKELGAEIILGNTFHLMLRPGTEIVKLHGDLHDFIGWDKP

SEQ ID NO: 58366 - protein, 371 aa, Oleiphilus messinensis
  misc_feature (1)..(371): tr|A0A1Y0IAT6|A0A1Y0IAT6_9GAMM Queuine tRNA-ribosyltran sferase OS=Oleiphilus messinensis OX=141451 GN=tgt PE=3 SV=1
MQFQVSGTDGQARRGQLTFERGTIETPAFMPVGTYGTVKGMLPRDILEIGAEIILGNTFHLMLRPGTEIIRAHGDLHDFMQWDKPILTDSGGFQVFSLGELRKISEQGVKFKSPIDGSPVELTPEKSMEVQAALGSDIVMIFDECTPYPATREEAKSSMELSLRWAKRSKEAHGESKSALFGIIQGGMFEDLRDISLEGLAEIGFDGYAIGGLSVGEPKGEMLKVLDSVTGKMPADHPRYLMGVGKPEDIVEAVRRGVDMFDCVMPTRNARNGHLFTSTGVIKIRNSVHKSDPAPLDAECDCYTCQQFSRSYLHHLDKCGEILGSQLNTIHNLRFYQNLMSGLRQAIEQGKLSDFVDDFYAKQGKQSPPLT

SEQ ID NO: 58367 - protein, 378 aa, Oleiphilus messinensis; identical to SEQ ID NO: 58316
  misc_feature (1)..(378): tr|A0A1H5WT75|A0A1H5WT75_9GAMM Queuine tRNA-ribosyltran sferase OS=Oleiphilus messinensis OX=141451 GN=tgt PE=3 SV=1

SEQ ID NO: 58368 - protein, 378 aa, Oleispira antarctica
  misc_feature (1)..(378): tr|R4YPT8|R4YPT8_OLEAN Queuine tRNA-ribosyltransferase OS=Oleispira antarctica RB-8 OX=698738 GN=tgt PE=3 SV=1
MTRKCFMDFELKGTSGEARRATLTFPRGKVETPAFMPVGTYGTVKGMTPQQIHDIGADIILGNTFHLMLRPGTEIIKMHGDLHDFTQWDKPILTDSGGFQVFSLGKMRKITEEGVAFRSPVNGEKVFMSPESSMQVQRDLGSDVVMIFDECTPHPATPKEAADSMRLSLRWAQRSKDSHGDSPSALFGIIQGGMYEELRDESLAKLTDINFDGYAIGGLSVGEPKEDMMRILSHLTHQMPADKPRYLMGVGKPEDLVEGVRRGVDMFDCVMPTRNARNAHIFTHTGVLKLRNATHKTDIRPLDDQCDCYTCKNFSRAYLHHLDKCKEILGSTLNTIHNLRYYQILMAGMRKSLDEGTFDQFVIDFYAARDLEVPPLEP

SEQ ID NO: 58369 - protein, 375 aa, Oleomonas sp.
  misc_feature (1)..(375): tr|A0A418WBE2|A0A418WBE2_9PROT Queuine tRNA-ribosyltran sferase OS=Oleomonas sp. K1W22B-8 OX=2320859 GN=tgt PE= 3 SV=1
MTATDFRFHVEARDGAARVGNIRTGRGVIRTPAFMPVGTAATVKAVPPEAVRKAGADILLGNTYHLMLRPGAERVAGLGGLHKFMNWPHPILTDSGGFQVMSLASLRKITEEGVAFRSHHDGSAHAMSPERSIEIQRLLDSDIAMQLDECVALPASREETARAMQLSLRWARRSKAAFEASAPPPGRALFGIVQGGTEQDLRQESAQGLIEIGFPGYALGGLAVGEPQAVMFEVIAATTPHLPQERPRYLMGVGKPADIVGAVARGIDMFDCVIPTRSGRNGQAFTRQGAVNIRNAKYADEPRPLDDKCRCPACRDYSAAYIHHLVRSSEILGATLMTAHNLTYYQDLMAGLRTAIRRGQLAAFVADFETGAADY

SEQ ID NO: 58370 - protein, 379 aa, Oligella ureolytica
  misc_feature (1)..(379): tr|A0A378XI46|A0A378XI46_9BURK Queuine tRNA-ribosyltran sferase OS=Oligella ureolytica OX=90244 GN=tgt PE=3 SV= 1
MSALEFKLLNTQGKARRASIKLNHGTVQTPMFMPVGTYGSVKAMLPHELEEVGSQVILGNTFHLWLRPGTEIIKKFGGLHDFMQWQKPILTDSGGFQVFSLSNLRSKLTEEGVRFSSPLNGEKLFLDPEESMRIQTVLNSDIAMVLDECTPYEIDGRPATHEEAARSMRLSLRWAKRSKTAFTELENPNALFGIVQGGMFEDLRQESLEGLVDIGFHGYAIGGLSVGEPKEDMVRILEHIAHKLPDNAPRYLMGVGTPEDLVYAVSQGVDMFDCVMPTRNARNGWLFTRFGDIKIRNARYKDDTKPLDPSCTCHSCQHFSRAYLHHLHRANEITGARLNTLHNLHYYLTLMEEMRNALEHNQFDQWQEQFHKDRAKGIE

SEQ ID NO: 58371 - protein, 379 aa, Oligella urethralis
  misc_feature (1)..(379): tr|A0A095ZAU5|A0A095ZAU5_9BURK Queuine tRNA-ribosyltran sferase OS=Oligella urethralis DNF00040 OX=1401065 GN=t gt PE=3 SV=1
MSALEFTLLNTHGKARRAAIKLNHGTVQTPMFMPVGTYGSVKAMLPHELESIGSQVILGNTFHLWLRPGTEVIQKFGGLHDFMQWKKPILTDSGGFQVFSLSNLRSKLHEEGVKFSSPLNGEKLFLSPEESMRIQTALNSDIAMVLDECTPYLIDGRPATHEEAARSMRLSLRWAKRSKNAFNELANSNALFGIVQGGMFEDLRKESLDGLVDIGFHGYAIGGLSVGEPKEDMQRVLQHVAHQLPDNAPRYLMGVGTPEDLVYAVSQGVDMFDCVMPTRNARNGWLFTRFGDLKIRNARYKDDMRPLDPSCSCHTCSHFSRAYLHHLHRANEITGARLNTLHNLHYYLNLMQEIREALEQNRFDQWQAQFHKDRAKGIE

SEQ ID NO: 58372 - protein, 379 aa, Oligella urethralis
  misc_feature (1)..(379): tr|A0A2N6QFD6|A0A2N6QFD6_9BURK Queuine tRNA-ribosyltran sferase OS=Oligella urethralis OX=90245 GN=tgt PE=3 SV= 1
MSALEFTLLNTHGKARRAAIKLNHGTVQTPMFMPVGTYGSVKAMLPHELESIGSQVILGNTFHLWLRPGTEVIQKFGGLHDFMQWKKPILTDSGGFQVFSLSNLRSKLHEEGVKFSSPLNGEKLFLSPEESMRIQTALNSDIAMVLDECTPYLIDGRPATHEEAARSMRLSLRWAKRSKNAFNELANSNALFGIVQGGMFEDLRKESLDGLVDIGFHGYAIGGLSVGEPKEDMQRVLQHIAHQLPDNAPRYLMGVGTPEDLVYAVSQGVDMFDCVMPTRNARNGWLFTRFGDLKIRNARYKDDTRPLDPSCSCHTCSHFSRAYLHHLHRANEITGARLNTLHNLHYYLNLMQEIREALEQNRFDQWQAQFHKDRAKGIE

SEQ ID NO: 58373 - protein, 377 aa, Oligotropha carboxidovorans
  misc_feature (1)..(377): tr|B6JFC1|B6JFC1_OLICO Queuine tRNA-ribosyltransferase OS=Oligotropha carboxidovorans (strain ATCC 49405 / DSM 1227 / KCTC 32145 / OM5) OX=504832 GN=tgt PE=3 SV=1
MSLPNSFRLLAADGTARTGVLETPHGVVRTPAFMPVGTAGAMKGIHWREIRESGADIVLGNTYHLMLRPTAERIAALGGLQKFTGWNGPMLTDSGGFQVMSLAKLRKVTEQGVRFKSHIDGAVLDLSPERAIEVQRLFGSDIAMQLDECVRLPASRDEVDRAMQLSLRWAERCKRAFEGAPQGHMLFGIVQGGDVAKLRRQSAAGLGEIGFHGYAIGGLAVGEPQDVMLAMIEEAAPLLPQDRPRYLMGVGTPDDMIEAVKRGIDMFDCVLPTRNGRHGHAFTRRGVINLRNARHADDPRPLDEESSWPPARSYSRAYLHHLVKAGEALGAMLLSEINIAYFQSLMAGVREAIAAGQFADFRAATKAGWAAGDLPPR

SEQ ID NO: 58374 - protein, 376 aa, Olivibacter sp.
  misc_feature (1)..(376): tr|A0A5C0ZHS8|A0A5C0ZHS8_9SPHI Queuine tRNA-ribosyltran sferase OS=Olivibacter sp. LS-1 OX=2592345 GN=tgt PE=3 SV=1
MKFTLQSTDKNSKARAGELVTAHGTIQTPIFMPVGTAGSVKGVHQHELKQDIQAQIILGNTYHLYLRPGLDVIQAAGGLHKFNGWDKPILTDSGGYQVYSLTEVRKIKEEGVTFRSHIDGSKHLFTPENVMDTQRIIGADIIMAFDECTPYPCDYRYAKRSLDMTHRWLKRCCDRFDNTDPLYGYEQTLFPIVQGSVYRDLREKSAETIASFGRDGNAIGGLSVGEPAEEMYAMTEVVNAILPFDKPRYLMGVGTPINILENIALGIDMFDCVMPTRNARNGMLFTRNGIINIKNKKWEADFSPIDPDSDLHTDLFYSKAYLRHLIHSKELLGAQIATLHNLHFYLWLVQEARTKILEGTFYEWKNKMVKQLGERL

SEQ ID NO: 58375 - protein, 376 aa, Olleya aquimaris
  misc_feature (1)..(376): tr|A0A327R9Z1|A0A327R9Z1_9FLAO Queuine tRNA-ribosyltran sferase OS=Olleya aquimaris OX=639310 GN=tgt PE=3 SV=1
MTFDLKAKDTQSNARAGVITTDHGVIETPIFMPVGTVASVKGVHQRELKEDINPDIILGNTYHLYLKPQTEILEKAGGLHKFMNWDRNILTDSGGYQVYSLSANRKIKEEGVKFKSHIDGSYHTFTPENVMEIQRSIGADIIMAFDECTPYPCDYNYARRSMHMTHRWLDRCINHLEKVPFKYDYSQAFFPIVQGSTYKDLRKQSAEYIANAGAVGNAIGGLSVGEPAEEMYAMTEVVTDILPEDKPRYLMGVGTPINILENIALGVDMFDCVMPTRNARNGMLFTAHGTINIKNLKWRDDFSPIDEMGITFVDTEYSKAYLRHLFTVNELLGKQIATIHNLGFYLWLTREARKHILAGDFRTWKDQMVKQMDKRL

SEQ ID NO: 58376 - protein, 392 aa, Olleya namhaensis
  misc_feature (1)..(392): tr|A0A1I3NTS2|A0A1I3NTS2_9FLAO Queuine tRNA-ribosyltran sferase OS=Olleya namhaensis OX=1144750 GN=tgt PE=3 SV= 1
MCFSYIYLLAEDLRDIMTFDLKAKDTQSNARAGVMTTDHGVIETPIFMPVGTVGSVKGVHQRELKNDINPDIILGNTYHLYLKPQIDVLEKAGGLHKFMNWDRNILTDSGGYQVYSLSGNNKIKEEGVKFKSHIDGSYHMFTPENVMEIQRSIGADIIMAFDECTPYPCDYNYARRSMHMTHRWLERCITHLEKTPFKYDYSQSFFPIVQGSTYKDLRKQSAEYIAGVGAEGNAIGGLSVGEPAEEMYAMTEVVTDILPWDKPRYLMGVGTPINILENIALGVDMFDCVMPTRNARNGMLFTAYGSINIKNLKWREDFSPIDEMGITFVDTEYSKAYLRHLFNVNELLGKQIATIHNLGFYLWLTREARKHIIAGDFKAWKDKMVKQMNNRL

SEQ ID NO: 58377 - protein, 376 aa, Olleya sp.
  misc_feature (1)..(376): tr|A0A2K8X4D7|A0A2K8X4D7_9FLAO Queuine tRNA-ribosyltran sferase OS=Olleya sp. Bg11-27 OX=2058135 GN=tgt PE=3 SV =1
MTFDLKAKDTQSNARAGVITTDHGVIETPIFMPVGTVGSVKGVHQRELKDDINPDIILGNTYHLYLKPQIDVLEKAGGLHKFMNWDRNILTDSGGYQVYSLSGNNKIKEEGVKFKSHIDGSYHMFAPENVMEIQRSIGADIIMAFDECTPYPCDYNYARRSMHMTHRWLERCIAHLEKTPLKYDYSQAFFPIVQGSTYKDLRKQSAEYIAGVGAEGNAIGGLSVGEPADEMYAMTEVVTDILPWDKPRYLMGVGTPINILENIALGVDMFDCVMPTRNARNGMLFTAHGSINIKNLKWREDFSPIDEMGITYVDTEYSKAYLRHLFNVNELLGKQIATIHNLGFYLWLTREARKHIIAGDFRAWKDKMVKQMDNRL

SEQ ID NO: 58378 - protein, 376 aa, Olleya sp.
  misc_feature (1)..(376): tr|A0A559RHS3|A0A559RHS3_9FLAO Queuine tRNA-ribosyltran sferase OS=Olleya sp. Hel_I_94 OX=1250001 GN=tgt PE=3 S V=1
MTFDLKAKDTQSNARAGVITTDHGVIETPIFMPVGTAGTVKGVHQRELKNDINPDIILGNTYHLYLKPQIDVLEKAGGLHKFMNWDRNILTDSGGYQVYSLSGNNKIKEEGVKFKSHIDGSYHTFTPENVMEIQRSIGADIIMAFDECTPYPCEYNYARRSMHMTHRWLERCLTHLDKTPLKYDYSQSFFPIVQGSTYKDLRKQSAEYIAGVGAEGNAIGGLSVGEPAEEMYAMTEVVTDILPWDKPRYLMGVGTPINILENIALGVDMFDCVMPTRNARNGMLFTAFGSINIKNLKWRDDFSPIDEMGITYVDTEYSKAYLRHLFNTNELLGKQIATIHNLGFYLWLTREARKHILAGDFRTWKDKMVKQMNNRL

SEQ ID NO: 58379 - protein, 380 aa, Olsenella profusa
  misc_feature (1)..(380): tr|U2UYL2|U2UYL2_9ACTN Queuine tRNA-ribosyltransferase OS=Olsenella profusa F0195 OX=1125712 GN=tgt PE=3 SV=1
MGEHRWFTFDVVATDSATHARAGVLHTPHGDIPTPIFMPVGTKATVKGILPGQLGELGAKIILANAYHLSQRPGADLVAEMGGLHDFMRWHGPILTDSGGFQVFSHGDFTKLTDDGVTFRTVDYDGSYVHWTPEDNMEIAQRLGADIVMQLDQCPGYPAPRPLVERAVELSGMWAERCFRSHDRTDQALFGIVQGGMHLDLRLRSLRHLEECGNFPGYGIGGYSVGEDHQTMFETLAPLVSEHMPQGKPRYLMGVGNPTTLVHGVACGVDMFDCVLPTRTARMGTAFSSEGRLNLKNARFAHDRGPLDDACTCPVCMGGYTRAYLHHLVRQREMLGPILLSLHNLYYLLDLMRRAREAIISGRYGAFVSTWEGLPAAQDW

SEQ ID NO: 58380 - protein, 379 aa, Olsenella scatoligenes
  misc_feature (1)..(379): tr|A0A100YUF5|A0A100YUF5_9ACTN Queuine tRNA-ribosyltran sferase OS=Olsenella scatoligenes OX=1299998 GN=tgt PE= 3 SV=1
MEPKWFTYDIVAEDPATHARAGVLHTPHGDVPTPIFMPVGTKGTVKGVLVPQLKELGAKIVLANTYHLAMRPGADLVAEMGDLHGFTRWDGPILTDSGGFQVFSHEEFCKLSADGVRFRAVDYDGRWFTWTPEENMDIAQKLGADIVMQLDQCVGYPAPRSKVERAVELSAMWAERCWKAHTRTDQALFGIVQGGMDLTLRRRSLQHLLDVGDFPGFGIGGYSVGEDHETMFESLAPLASQFMPREKPRYLMGVGNPTTLVRGVAYGIDMFDCVLPTRTARMGTAFSSEGKLNLRHARFTHDAGPLDPACSCPVCQGGYSRAYLHHLVRQKEMAGSILLSMHNLYFLLDLMRRARESIIAGTYGEFVSRWMDSPAAADW

SEQ ID NO: 58381 - protein, 379 aa, Olsenella sp.
  misc_feature (1)..(379): tr|A0A1Y4DUW8|A0A1Y4DUW8_9ACTN Queuine tRNA-ribosyltran sferase OS=Olsenella sp. An270 OX=1965615 GN=tgt PE=3 S V=1
MDQTLFTYDIVAEDVGTHARAGLLHTPHGDVPTPIFMPVGTKATVKGIMPSTLREIGTKILLANTYHLSMRPGADLVAEMGGLHGFMRWDGPILTDSGGFQVFSHEEFCRLSDDGVRFRAVDYDGKWVSWTPEENMSIAQKLGADIVMQLDQCVGYPASRAKVARSVELSSRWAERCYAAHTRPDQALFGIVQGGMHLDLRLRSLRHLEEVGDFPGYGIGGYSVGEDHETMFETLAPLVSEHMPRNKPRYLMGVGNPTTLVRAVACGVDMFDCVLPTRTARTGSAFTSEGRLNFRHARFAHDARPIDETCTCPACSQGFSRAYLHHLVRQHEMLASVLISQHNIHFLLDLMRRAREAVVAGTYAAFLDDWMSSPAARDW

SEQ ID NO: 58382 - protein, 379 aa, Olsenella sp.
  misc_feature (1)..(379): tr|A0A1I0AF49|A0A1I0AF49_9ACTN Queuine tRNA-ribosyltran sferase OS=Olsenella sp. KH3B4 OX=1855394 GN=tgt PE=3 S V=1
MEPQWFSYDIVAEDPATHARAGVLHTPHGDVPTPIFMPVGTKGTVKGVLVPQLRELGAKIVLANTYHLAMRPGADLVAEMGGLHGFTRWDGPILTDSGGFQVFSHEEFCKLSADGVRFRAVDYDGRWFTWTPEENMDIAQKLGADIVMQLDQCVGYPAPRSKVERAVELSAMWAERCWKAHTRPDQALFGIVQGGMDLTLRRRSLQHLLDVGDFPGFGIGGYSVGEDHETMFESLAPLASQYMPREKPRYLMGVGNPTTLVRGVACGIDMFDCVLPTRTARMGTAFSSEGRLNLRHARFAHDAGPLDPACTCPVCQGGYTRAYLHHLVRQKEMAGSILLSMHNLYFLLDLMRRARESIIAGTYGEFVSRWMDSPAAADW

SEQ ID NO: 58383 - protein, 407 aa, Olsenella uli
  misc_feature (1)..(407): tr|X8HRG1|X8HRG1_9ACTN Queuine tRNA-ribosyltransferase OS=Olsenella uli MSTE5 OX=1190621 GN=tgt PE=3 SV=1
MRGVAVSGRVASNTTRLEGSTVNDTHTNPRESWFTYDIVAEDPLTHARAGVLHTPHGDVPTPIFMPVGTKATVKGLLPGQLEEIGTKILLANTYHLAMRPGADLVVEMGGLHEFMQWKGPILTDSGGFQVFSHGDFTKLTDDGVTFRTVDYDGSYVTWTPERNMEIAQKLGADIAMQLDQCPGYPATRAFVERAVELSSMWAERCWKAHGRDDQALFGIVQGGMHLDLRLRSLAHLEECGDFPGYGIGGYSVGEDHETMFETLEPLVSDYMPRDKPRYLMGVGNPTTLVRGVSCGIDMFDCVLPTRTARMGCAFTGQGRVNLRHAAHTHSHDPLDPDCACPVCTGGYTRAYLHHLVRQREMVGSILLSLHNLHYLLDLMRRVRQAIMEGRYGEFVSAWGDLPAANDW

SEQ ID NO: 58384 - protein, 386 aa, Olsenella uli
  misc_feature (1)..(386): tr|E1QZN2|E1QZN2_OLSUV Queuine tRNA-ribosyltransferase OS=Olsenella uli (strain ATCC 49627 / DSM 7084 / CIP 10 9912 / JCM 12494 / NCIMB 702895 / VPI D76D-27C) OX=6331 47 GN=tgt PE=3 SV=1
MNDTHTNPRESWFTYDIVAEDPLTHARAGVLHTPHGDVPTPIFMPVGTKATVKGLLPGQLEEIGTKILLANTYHLAMRPGADLVEEMGGLHEFMQWKGPILTDSGGFQVFSHGDFTKLTDDGVTFRTVDYDGSYVTWTPERNMEIAQKLGADIAMQLDQCPGYPATRAFVERAVELSSMWAERCWKAHGRDDQALFGIVQGGMHLDLRLRSLAHLEECGDFPGYGIGGYSVGEDHETMFETLEPLVSDYMPRDKPRYLMGVGNPTTLVRGVSCGIDMFDCVLPTRTARMGCAFTGQGRVNLRHAAHTHSHDPLDPDCACPVCTGGYTRAYLHHLVRQREMVGSILLSLHNLHYLLDLMRRARQAIMEGRYGEFVSAWGDLPAANDW

SEQ ID NO: 58385 - protein, 385 aa, Olsenella umbonata
  misc_feature (1)..(385): tr|A0A1H1LRC9|A0A1H1LRC9_9ACTN Queuine tRNA-ribosyltran sferase OS=Olsenella umbonata OX=604330 GN=tgt PE=3 SV= 1
MSESQAPESRWFTYDIVAEDPTTHARAGVLHTPHGDIPTPIFMPVGTKATVKGILPSQLERLGAKIILANTYHLANRPGEDLVAEMGGLHEFMRWRGPILTDSGGFQVFSHGEFTRLTNDGVEFRTVDYDGQHVFWTPEKNMEIAQKLGADIVMQLDQCPGYPSPRPFVERAVELSSMWAERCFRAHTRTDQALFGIVQGGMDLDLRLRSLRHLEECGDFPGYGIGGYSVGEDHETMFESLAPLASEYMPKGKPRYLMGVGNPTTLVHGVECGVDMFDCVLPTRTARMGSAFSSEGRLNFRNARFTHDHGPIDPDCTCPVCAGGYTRAYIHHLVKQKEMVGSILLSLHNVYYLLELMRRARQAIVEHRYGQFVSEWDQLPAAKDW

SEQ ID NO: 58386 - protein, 385 aa, Olsenella umbonata
  misc_feature (1)..(385): tr|A0A1G6LV37|A0A1G6LV37_9ACTN Queuine tRNA-ribosyltran sferase OS=Olsenella umbonata OX=604330 GN=tgt PE=3 SV= 1
MSESQTPESRWFTYDIVAEDPTTHARAGVLHTPHGDIPTPIFMPVGTKATVKGILPSQLERLGAKIILANTYHLANRPGEDLVAEMGGLHEFMRWRGPILTDSGGFQVFSHGEFTRLTNDGVEFRTVDYDGQHVFWTPEKNMEIAQKLGADIVMQLDQCPGYPSPRPFVERAVELSSMWAERCFRAHTRTDQALFGIVQGGMDLDLRLRSLRHLEECGDFPGYGIGGYSVGEDHETMFESLAPLASEYMPKGKPRYLMGVGNPTTLVHGVECGIDMFDCVLPTRTARMGSAFSSEGRLNFRNARFTHDHGPIDPDCTCPVCTGGYTRAYIHHLVKQKEMVGSILLSLHNVYYLLELMRRARQAIVEHRYGQFVSEWDQLPAAKDW

SEQ ID NO: 58387 - protein, 379 aa, Unknown
  misc_feature (1)..(379): tr|A0A0R2XQY6|A0A0R2XQY6_9GAMM Queuine tRNA-ribosyltran sferase OS=OM182 bacterium BACL3 MAG-120531-bin86 OX=16 55628 GN=tgt PE=3 SV=1
MSFDIAATDGKARTGKMCFPRGEVATPAFMPVGTYGTVKGLTPEQVRGTGADILLGNTFHLMLRPGTETINVHGDLHDFIGWDRPILTDSGGFQVFSLGEMRKINEEGVTFSSPVDGAKIFLGPESAIEVQHALGSDIIMVFDECTPYPATREQARESMELSMRWAGRCKEAHGEHESALFGIVQGGMYGDLREESLAGLVELGFDGYALGGLSVGEPKNEMREVIQHCGALLPAEKPRYLMGVGTPQDIVYAVTQGIDMFDCVMPTRNARNAHIFTSKGLLRLRNKRYRQDTKPLDENCGCYTCQNFSRAYLHHLDKCREMLGAQLNTIHNLHYYQDLMVGLRDAIAKGKLSEFVATFEENQQALQAESLALEAQAES

SEQ ID NO: 58388 - protein, 379 aa, Unknown; identical to SEQ ID NO: 58387
  misc_feature (1)..(379): tr|A0A0R2T2Y7|A0A0R2T2Y7_9GAMM Queuine tRNA-ribosyltran sferase OS=OM182 bacterium BACL3 MAG-120920-bin41 OX=16 55580 GN=tgt PE=3 SV=1

SEQ ID NO: 58389 - protein, 365 aa, Omnitrophica bacterium
  misc_feature (1)..(365): tr|A0A1G1K772|A0A1G1K772_9BACT Queuine tRNA-ribosyltran sferase OS=Omnitrophica bacterium RIFCSPLOWO2_01_FULL_5 0_24 OX=1801829 GN=tgt PE=3 SV=1
MHKDPSCGARAGVVHTAHGTFETPVFMPVGTQGTVKSLAPDDLEEAGAQIILANAYHLYIRPGIDTIKLANGLHAFMGWQRPILTDSGGYQVFSLARLRGISEEGVRFHSHFDGREIFLTPETVIEAEEHLGSDIAMMFDECPPHDAARAHVEEAVHRTVRWAERAKRVHRRKEQLLFGIVQGGRFKDLRVQSLEETVKIGFDGYAIGGVSVGEPKPLMEEIVRAVAPLLPEEKPRYLMGVGTPLDLLWAVEAGIDMFDCVNPTRYGRNGCAFTHSGKVVVRNAEYARDQAPLDETCSCYTCRTFSRSYLRHLFNCEELLAYRLVTLHNVSFFISLVQSARRAIVNGEFVPFKNHFLSEYDESSR

SEQ ID NO: 58390 - protein, 372 aa, Omnitrophica bacterium
  misc_feature (1)..(372): tr|A0A1G1KSD5|A0A1G1KSD5_9BACT Queuine tRNA-ribosyltran sferase OS=Omnitrophica bacterium RIFCSPLOWO2_12_FULL_4 4_17 OX=1801832 GN=tgt PE=3 SV=1
MSKTFELIKKDSETNARLGRVHTAHGTIETPVFMPVGTQGSVKTLTPKELEEVGAEIILGNAYHLYIRPGIDIIREIGGLHEFVSWRKPILTDSGGYQVFSLSRLRKITDEGVTFHSHFDGREIFLTPEEVIKAEERLGSDIAMIFDVCPPHGAGRPEVELAVRRTYDWAKRGKAAHHKNDQLLFGIIQGGRFPDLRRESLSQMCEIDFPGYAVGGVSVGESREEMGEVVYPLARLMPEDKPRYLMGVGTPIDFFWAIEAGMDMFDCVTPTRYARNGCAFTRAGKIVVRNSEYAKDKSPLDPKCLCYTCRNFSRAYLRHLFNCEEILGPRLVTYHNVFFFVSLVKEIREAIRNEKFLKFKNEFLSNYDENLR

SEQ ID NO: 58391 - protein, 396 aa, Unknown
  misc_feature (1)..(396): tr|A0A1G1N1J0|A0A1G1N1J0_9BACT Queuine tRNA-ribosyltran sferase OS=Omnitrophica WOR_2 bacterium RIFCSPHIGHO2_02 _FULL_45_21 OX=1801854 GN=tgt PE=3 SV=1
MSFTLLHQDSKTKARLGRLKTAHGLIQTPAFMPVGTQGTVKALSPGELLEAESQIILGNAYHLYLRPGLKIIKNSGGLHKFISWDKPILTDSGGYQVFSLAGFRKLSDEGVEFQSHLDGSRHFLTPEKVIEIENILGSDIMMPLDECVHYPCAYEDAKIAVHRTIDWAGRSKTVTGHRSQVTEINLNLRRKTSNMRPLLFGIIQGATYDDLRKQSAEQTVKIGFDGYAIGGLSVGEDKDLRYNIISFTLQFLPGDFARYLMGIGLPEDIVEAVKLGVDLFDCVIPTRYGRNGTAFTSEGKVVIRNALYADDLSPLDKDCDCYTCKNFSRSYIRHLFNTGEILGLRLVSFHNIYFYNHLLKAIRQAIKENRMEEFDLSQTYILEKKPETCNQKTDKT

SEQ ID NO: 58392 - protein, 349 aa, Unknown
  misc_feature (1)..(349): tr|A0A0S8IIE6|A0A0S8IIE6_9BACT Queuine tRNA-ribosyltran sferase (Fragment) OS=Omnitrophica WOR_2 bacterium SM23 _72 OX=1703777 GN=AMJ95_10030 PE=3 SV=1
MFFKLTRQDKFTRARLGKLITSRGEIATPCFMPVGTQGTVKALSVEELEEAKAQILLSNSYHLFLRPGVEVIRKAGSLHDFMSWKKPILTDSGGYQIFSLALLRKVSDPGVEFQSHIDGLKHFLTPEDVIKIQRDLGSDIIMPLDECVHYPCAKDHAEIAMRRTMDWARRSLAVERPRETQSLFGIIQGATYEDLRKICVEQMLDLDFDGYAIGGVSVGEPMNLRYNIVNVVVDLLPRHSPRYLMGVGLPQDIIEAVGAGVDMFDCVVPTRYGRNGTAFTSEGKITIRNAPYTEDFSPLDKNCACATCRNYSRAYLRHLFSSEEILGLRLVSLHNVYFYLELMQKIREA

SEQ ID NO: 58393 - protein, 714 aa, Opitutaceae bacterium
  misc_feature (1)..(714): tr|I6AXA0|I6AXA0_9BACT Queuine tRNA-ribosyltransferase OS=Opitutaceae bacterium TAV1 OX=278956 GN=tgt PE=3 SV= 1
MSRLRFTLENTAPGSQARAATFHTLHGPVKTPVFMPVGTQATVKSQTVETLKTAGASVLLANTYHLLLRPGPEVFEKFGGIHRFMNWDRPVLTDSGGFQIFSLPHSRAMNEEGARFQSYVDGACHLLSPESSIRMQKTIGSDIMMVLDQCIPSTAPHAQARAAMELTHRWAVRSLAARGDSPQALFGIVQGACHRDLREQSAAFLRELPFDGLAIGGLAVGETHDERYAFTGLVTACLPQNLPCYLMGVGTPLDILEAVHRGVDMFDCIIPSQVAGRGLAFTSHGRLQLRRTVYKFSEEPLDAACDCAACRSYSRAYLHHLVKADEHLGWHLLGLHNMTFYHRLIAEMRTRILDGTFAGYYESKRIDLTRTDEDHPGHAPAKPRNKNRQRHRRLGDYEVQISPQGFSSIRQTSSGEVMHSVTAPDDEAQRLYIDQSCLTARLGVPKQPEESGAGIPPIMWHGHPAHEVARASSPCSAGFPPSLVIWDVGLGAAHNAMAAIRCFEQLQDPRPLRLVSFERDLDPLRLAFKNAGRHFPHLRHPAPYHLLEYGRWEPPSGLLHWELQKGDFLETLDAAPPPDVIFYDPFSAKTDSPLWTAAAFGRVFARCTANPNPAGAELYTYSNATAVRVALLTAGFFVAAGAGTGPKADTTIAFTTTDGAAAHPLSPRLLGPEWLARWRRSHSQFPPALADAEKPAFARRIETHPQFADASVSG

SEQ ID NO: 58394 - protein, 377 aa, Opitutaceae bacterium
  misc_feature (1)..(377): tr|A0A2T6DZC1|A0A2T6DZC1_9BACT Queuine tRNA-ribosyltran sferase OS=Opitutaceae bacterium EW11 OX=2161865 GN=tgt PE=3 SV=1
MPAHFQLLKTDTATAARRGRLRTRHGVIETPIFMPVGTQGTVKAVTPAHLKEIGAQIILGNTYHLNLRPGSDLIRELGGLHGFMGWNGPILTDSGGFQVFSLAKLRDIRDDGVAFQSHIDGASLFLGPREVMKIQENLGSDIAMVLDECPPWPCERAACVEAVARSYRWAQQCKRIAEDSGFLGSGHHVFAIVQGSTFDDLRREAAESLAALDFPGYAVGGVSVGEPEPEMLKQVGATTPFMPADKPRYTMGLGTPPQLLKMIALGVDMFDCVLPTRVARNGLVFTPDGPINLRNERFRTDPKPIAESIQNYTTNFSRAYLRHLTLANEMLSGTLLTIHNLHFFLDLMAQARAHIEAGDYGPWHRAWIERYEADQEG

SEQ ID NO: 58395 - protein, 382 aa, Opitutae bacterium
  misc_feature (1)..(382): tr|A0A2A2QJC4|A0A2A2QJC4_9BACT Queuine tRNA-ribosyltran sferase OS=Opitutae bacterium Tous-C5TDCM OX=1982322 GN =tgt PE=3 SV=1
MPEHFQLLKTDTITAARRGRLRTRHGMIETPIFMPVGTQGTVKSLTPQHLKDIGSQIILGNTYHLNLRPTSEVIRDLGGLHKFMGWDGPILTDSGGFQVFSLAKLRDIREDGVAFQSHLDGKKLFLGPKEVMSIQQNLGSDIAMVIDECPPWPCERDACAAAVGRSYRWAQQCKQIATDNGFLGAGHHVFAIVQGSTFDDLRREAAESLAALDFPGYAVGGVSVGEPEPEMLKQVGASTPFMPADKPRYTMGLGTPPQLLKMVALGVDMFDCVLPSRVARNGLVFTPDGPINLKNEKHRADPNPIVEGLDNYTCRNFSRAYLRHLLMAGEMLAATLCTLHNLHFYLDLMAQARAHIEAGDYGVWHRAWVERYETGARARVGG

SEQ ID NO: 58396 - protein, 677 aa, Opitutae bacterium
  misc_feature (1)..(677): tr|A0A2A2Q7I4|A0A2A2Q7I4_9BACT Queuine tRNA-ribosyltran sferase OS=Opitutae bacterium Tous-C1TDCM OX=1982319 GN =tgt PE=3 SV=1
MSRLSFTLEREAAGSRARAGRLHTLHGPVETPVFMPVGTQATVKGQTVHTLKAAGARVLLANTFHLLLRPGPEVFRKFGGIHRFMNWDGPVLTDSGGFQIFSLPGSRRMTEAGATFQSYVDGATHLLSPETSIGMQRAIGSDIMMVLDQCIPSTASFAEAEAAMELTHRWAVRSLAARGDSPQALFGIVQGACHPDLRRRSAEFLRALPFEGLAIGGLAVGETPAQRYEFTGLATAHLPKHLPRYLMGVGTPLDLLEAVHRGVDMFDCIIPSQLAQRGTVFTSLGRLHLRRSVHKFSTEPLDPNCPCAACREYSRAYLHHLVKADELLGWHLLSIHNLTFYHRLMAAMRAHILADTFGSFYERMRTDLARGDEENPEVHPKPAKVFRYPSCGDYEIVPGTGGYNSVRQISSGETMHSVNRPDDEAERLYIGQSQLTARLAADAPAAEDLVIWDVGLGAATNAMAVLRCFEAVLAARGAETIRPVRLVSFECDLDPLRLAVRWGGYFPHIRHGAPSALLATGAWTHPTGRLRWELQHGDFLEKYAATPRPDVIFYDPFSYKTDSALWTAGTFARLAEFCAPKPTELYTYSAATAARVALLAAGFFVGAGVGTGPKAETTIACNRPEPLRVHPSGARLLGPEWLARWRRSTAQVPASVPAEERAGFVARIEAHPQFGSG

SEQ ID NO: 58397 - protein, 387 aa, Opitutales bacterium
  misc_feature (1)..(387): tr|A0A2E7PYA5|A0A2E7PYA5_9BACT Queuine tRNA-ribosyltran sferase OS=Opitutales bacterium OX=2026772 GN=tgt PE=3 SV=1
MTGSTINLRPTEGFAEFEISPEGGPRVGSLRLPGGSVPTPVFMPVGTQATVKGILPRDLLEEVRCPIILGNTYHLNLRPGVGVIAQAGGLAKFMNWTGPVLTDSGGFQVFSLSKLRKISDEGVLFHSHLDGSEVFLGPNEAIGIQDGLKSDIAMCLDECPAADASEKEIVHAVDRTTLWAQRCQREWQSRKADQSGRKLFGIVQGGRFRDLRMRSAEQLIQMEFPGYAVGGVSVGETEDEMLEQVEWTTQVLPTDKPRYIMGVGTPVQLLKMIGLGVDMFDCVLPSRAARHGTAYTRLGKLNIRNERFRNDLSPLDEEADCYVSREFSKSYLRHLFMTKESLGGVLLTMHNLRFFVRLMEEARGHILAGTFANWSRNWIETFSKGPD

SEQ ID NO: 58398 - protein, 387 aa, Opitutales bacterium
  misc_feature (1)..(387): tr|A0A2E7PTH9|A0A2E7PTH9_9BACT Queuine tRNA-ribosyltran sferase OS=Opitutales bacterium OX=2026772 GN=tgt PE=3 SV=1
MTGSTINLRPTEGFAEFEISPEGGPRVGSLRLPGGSVPTPVFMPVGTQATVKGILPRDLLEEVRCPIILGNTYHLNLRPGVEVIAQAGGLAKFMNWTGPVLTDSGGFQVFSLSKLRKISDEGVRFHSHLDGSEVFLGPNEAIGIQDGLKSDIAMCLDECPAADASEKEIVQAVDRTTLWAQRCQREWQSRKADQSGRKLFGIVQGGRFRDLRMRSAEQLIQMEFPGYAVGGVSVGETEDEMLEQVEWTTQVLPPDKPRYVMGVGTPVQLLKMIGLGVDMFDCVLPSRAARHGTAYTRLGKLNIRNERFRNDLSPLDEEADCYVSREFSKSYLRHLFMTKESLGGVLLTMHNLRFFVRLMEEARGHVLAGTFANWSRNWIETFSKGPD

SEQ ID NO: 58399 - protein, 380 aa, Opitutus sp.
  misc_feature (1)..(380): tr|A0A1H1LQN5|A0A1H1LQN5_9BACT Queuine tRNA-ribosyltran sferase OS=Opitutus sp. GAS368 OX=1882749 GN=tgt PE=3 S V=1
MSGPFQLLQTDSATAARRGRLQTLHGVIETPIFMPVGTQGTVKALTPAQIKETGAQIILGNTYHLNLRPGSELIRELGGLHKFMGWDGPILTDSGGFQAFSLAKLRDIREDGIAFASHLDGAKVFLGPREVMTIQANLGSDIAMVIDECPPWPCTKEECRRAVDRSLRWAQQCQQIATDNGFLGAGHHVFAIAQGSTFDDLRREAAESLAALDFPGYAVGGVSVGEPEPEMIKQVAATTPFLPANKPRYTMGLGTPPQILKMIALGVDMFDCVHPTRVARNGAAFTPDGLINLRNERYRTDPKPLVEGLDNYTCRNFSRAYLRHLTMAGEILSSTLISLHNVHFYLDLVAQARAHIAAGDYGPWHRAWIGRYEAGEPTMA

SEQ ID NO: 58400 - protein, 382 aa, Opitutus sp.
  misc_feature (1)..(382): tr|A0A2T6CQK2|A0A2T6CQK2_9BACT Queuine tRNA-ribosyltran sferase OS=Opitutus sp. ER46 OX=2161864 GN=tgt PE=3 SV= 1
MAAHFQLLKTDTNTAARRGRLQTRHGTIETPIFMPVGTQGTVKAITPNHLREIGAQIILGNTYHLSLRPGSDLIRELGGLHAFMGWNGPILTDSGGFQVFSLAKLRDISDAGVAFQSHLDGARHFLGPREVMKIQQDLGSDIAMVLDECPPWPCERDACAKAVARSLRWAAQCRDIATGSGFLAAGHHVFAIVQGSTFDDLRREAAEALAAFDFPGYAVGGVSVGEPEPEMLKQVGATTPFMPADKPRYTMGLGTPPQLLRMIALGVDMFDCVMPTRVARNGLVFTPDGPINLRNEQFRADPRPIVEGMDNYTCRNFSRAYLRHLTVAGEMLSGTLLTIHNLHFFLDLMAQARAHIEAGDYASWHLAWIARYEAGAHARRAS

SEQ ID NO: 58401 - protein, 381 aa, Opitutus terrae
  misc_feature (1)..(381): tr|B1ZN97|B1ZN97_OPITP Queuine tRNA-ribosyltransferase OS=Opitutus terrae (strain DSM 11246 / JCM 15787 / PB90 -1) OX=452637 GN=tgt PE=3 SV=1
MGTPFQLLKTDTATQARRGRLQTRHGVVETPIFMPVGTQGTVKSITPAHLHEIGAQIILGNTYHLNLRPGSELIRDLGGLHRFMGWDGPILTDSGGFQVFSLAKLRDIRDDGVAFQSHLDGAKLFLGPREVMRIQQNLGSDIAMVLDECPPWPCERDACARAVARSQRWALQCKQIATESGFLAAGHHVFAIAQGSTFDDLRREAAEALSALDFPGYAVGGVSVGEPEPEMLKQVAATTPFLPANKPRYTMGLGTPPQMLKMIALGVDMFDCVLPTRVARNGLAFTPDGPMNLRNEKYRTDPRPIVEGLANYTSGFSRAYLRHVTLAGEIISCTLLTLHNLHFYLDLMAQARAHLESGDYGSWHRSWIERYEAGAAARVAG

SEQ ID NO: 58402 - protein, 379 aa, Orbus hercynius
  misc_feature (1)..(379): tr|A0A495RB98|A0A495RB98_9GAMM Queuine tRNA-ribosyltran sferase OS=Orbus hercynius OX=593135 GN=tgt PE=3 SV=1
MKFELDTTDGLARRGRMKFDRRGVECTVETPAFMPVGTYGTVKGMTPEEVAATGAQILLGNTFHLWLRPGQEIMRQHGDLHDFMQWHGPILTDSGGFQVFSLGDIRKIKEEGVHFRNPINGDSIFLSPEISMEIQYDLGSDIVMIFDECAPYPAEWDYVKRSMEMSARWAKRSRDRFDELGNKNALFGIVQGGVYQELRDISVKALTQIGFDGYAIGGLAVGEPKADMHRILEGTCPQLPTDKPRYLMGVGKPEDLVEGVRRGIDMFDCVMPTRNARNGHLFVTDGVIKIRNAKYKDDTSPLDAECDCYTCKNYTKAYLHHLDKCGEILGARLNTIHNLRYYQRLMAEIRKAIAEQRYEQFVIEFYQRIGKTPAPLNAR

SEQ ID NO: 58403 - protein, 372 aa, Orenia marismortui
  misc_feature (1)..(372): tr|A0A4R8H6S2|A0A4R8H6S2_9FIRM Queuine tRNA-ribosyltran sferase OS=Orenia marismortui OX=46469 GN=tgt PE=3 SV=1
MSFEYTLKKKSKDTKARLGELSTPHGNIETPIFMPVGTKATVKTMTPDELEDINAQIILSNTYHLYLRPGHDLIEEAGGLHKFMNWDKPILTDSGGFQVFSLSDMNNITEEGVEFKSHIDGSKHFISPEKSIEIQTALGSDIMMAFDECPPYPADRDYVKKSLEMTTRWLERCIDAKTRDDQALFGIMQGGMYKDLREESAKQIVEFDLPGYAIGGLSVGEPKELMMEVLDYAPDLLPENKPRYLMGVGTPFDLFEGVMRGVDMFDCVFPTRVARNGLVFTSEGRVTVRNATYSRDFTPLDHNCDCYVCQNYTRGYIRHLLKQNEILGVRLTTYHNLHFLLEMMENIRNAIAEDRFLEYREEFYKSYGLEVD

SEQ ID NO: 58404 - protein, 371 aa, Orenia metallireducens
  misc_feature (1)..(371): tr|A0A285G6G2|A0A285G6G2_9FIRM Queuine tRNA-ribosyltran sferase OS=Orenia metallireducens OX=1413210 GN=tgt PE= 3 SV=1
MSFEYTLKKKCKDTKARLGELSTPHGKIETPIFMPVGTKATVKTMTPEELKEINSQIILSNTYHLYLRPGHDLIAEAGGLHKFMNWDRPILTDSGGFQVFSLSDMNKISEEGVEFKSHIDGSKHFISPEKSIEIQTALGADIMMAFDECPPYPADRDYVKKSLEMTTRWLERCIEAKTRDDQALFGIMQGGMYKDLREESAKQIVEFDLPGYAIGGLSVGEPKELMIEVLDYAPDFLPENKPRYLMGVGTPFDLFEGVMRGIDMFDCVFPTRVARNGMVFTSQGRVTVRNATYERDFSPLDQDCDCYVCQNYTRAYIRHLIKQNEILGVRLTTYHNLHFLLDMMENIRKAIAEDRFLEYRADFYEKYGLEV

SEQ ID NO: 58405 - protein, 371 aa, Orenia metallireducens
  misc_feature (1)..(371): tr|A0A1C0A4U8|A0A1C0A4U8_9FIRM Queuine tRNA-ribosyltran sferase OS=Orenia metallireducens OX=1413210 GN=tgt PE= 3 SV=1
MSFEYTLKKKCKDTKARLGELSTPHGKIETPIFMPVGTKATVKTMTPEELREINSQIILSNTYHLYLRPGHDLIEEAGGLHKFMNWDRPILTDSGGFQVFSLSDMNKITEEGVEFKSHIDGSKHFISPEKSIEIQTALGADIMMAFDECPPYPADREYVKKSLEMTTRWLERCIKAKTRDDQALFGIMQGGMYKDLREESAKQIVEFDLPGYAIGGLSVGEPKELMIEVLDYAPDFLPENKPRYLMGVGTPFDLFEGVMRGIDMFDCVFPTRVARNGLVFTSQGRVTVRNATYERDFTPLDHDCDCYVCKNYTRAYIRHLIKQNEILGVRLTTYHNLHFLLDMMENIRKAIAEDRFLEYRAEFYERYGLEV

SEQ ID NO: 58406 - protein, 395 aa, Oribacterium asaccharolyticum
  misc_feature (1)..(395): tr|G9WRH3|G9WRH3_9FIRM Queuine tRNA-ribosyltransferase OS=Oribacterium asaccharolyticum ACB7 OX=796944 GN=tgt PE=3 SV=1
MAAVKMKYEIVGQCGRAKSAHMETVHGVIETPVFMNVGTVAAIKGGVSTDDLRLIGTQVELSNTYHLHVRTGDKVIKELGGLHRLMNWDKPILTDSGGFQVYSLAKTGRKIREEGVEFRSHIDGRKIFMGPEESMEIQSNLASTIAMAFDECPPALADRQYIEPSVERTTRWLLRCKNRIEELNDEESTINKNQLLFGINQGGILSDVRINHAKQIAELDLPGYAVGGLAVGESHEDMYRILEDVVPFLPKEKPTYLMGVGTPENMVMAVDRGIDFFDCVFPSRNGRHGHVYHASGKLNLWNLAYEKDFRPIEEGCDCPACKGIRLEDGSYTGGYSRAYIRHLLKAKEMLGMRLCVLHNLSYYNRLMREMRFAIREGRWEAWKTDALYKLKIQNS

SEQ ID NO: 58407 - protein, 395 aa, Oribacterium parvum
  misc_feature (1)..(395): tr|G9WNS6|G9WNS6_9FIRM Queuine tRNA-ribosyltransferase OS=Oribacterium parvum ACB1 OX=796943 GN=tgt PE=3 SV=1
MATVKMKYEIVGQCGRAKSAHMETVHGVIETPVFMNVGTVAAIKGGVSTDDLRLIGTQVELSNTYHLHVRTGDKVIKELGGLHRMMKWDKPILTDSGGFQVYSLAKTGRKIREEGVEFRSHIDGRRIYMGPEESMEIQSNLASTIAMAFDECPPALADRQYIEPSVERTTRWLLRCKKRMEELSQEESTINKNQLLFGINQGGVLSDVRINHAKQISELELPGYAVGGLAVGESHEDMYRILDDVVPFLPKDKPTYLMGVGTPENMVQAVDRGIDFFDCVFPSRNGRHGHVYHASGKLNLWNLAYEKDFRPIEEGCDCPACKGIRLEDGSYTGGYSRAYIRHLLKAKEMLGMRLCVLHNLSYYNRLMREMRFAIREGRWEAWKTEALYKLKIQNS

SEQ ID NO: 58408 - protein, 395 aa, Oribacterium sinus
  misc_feature (1)..(395): tr|C2KU81|C2KU81_9FIRM Queuine tRNA-ribosyltransferase OS=Oribacterium sinus F0268 OX=585501 GN=tgt PE=3 SV=1
MAAAKMKYEIKGQCGRAKSAHVETVHGVIETPVFMNVGTVAAIKGGVSTDDLRLVHTQVELSNTYHLHVRTGDKVIRELGGLHRMMNWDKPILTDSGGFQVYSLAKTGRKIREEGVEFRSHIDGRRIFMGPEESMQIQSNLGSTIAMAFDECPPALAERDYILPSVERTTRWLLRCQAEMDRLNSLEDTLNPKQILFGINQGGVLEDIRIDHAKRITELDLEGYAVGGLAVGESHEDMYRILDAVVPHLPRHKPTYLMGVGTPENMIQAVDRGIDFFDCVFPSRNGRHGHVYHAAGKLNLWNLAYEKDMRPIEEGCDCPACKGIRKEDGTYTGGYSRAYIRHLLKAKEMLGMRLCVLHNLSYYNRLMVEMRNAIRENCWESWKTEALYKLKIQNS

SEQ ID NO: 58409 - protein, 395 aa, Oribacterium sp.
  misc_feature (1)..(395): tr|F5T9M3|F5T9M3_9FIRM Queuine tRNA-ribosyltransferase OS=Oribacterium sp. oral taxon 108 str. F0425 OX=904296 GN=tgt PE=3 SV=1
MAAVKMKYEIVGQCGRAKSAHMETVHGVIETPVFMNVGTVAAIKGGVSTDDLRLIGTQVELSNTYHLHVRTGDKVIKELGGLHRLMNWDKPILTDSGGFQVYSLAKTGRKIREEGVEFRSHIDGRKIFMGPEESMEIQSNLASTIAMAFDECPPALADRQYIEPSVERTTRWLLRCKKKMEELNEEESTINKNQLLFGINQGGILSDVRINHAKQISELDLPGYAVGGLAVGESHEDMYRILEDVVPFLPKEKPTYLMGVGTPENMVMAVDRGIDFFDCVFPSRNGRHGHVYHAYGKLNLWNLAYEKDFRPIEEGCDCPACKGIRLEDGSYTGGYSRAYIRHLLKAKEMLGMRLCVLHNLSYYNRLMREMRFAIREGRWEAWKTDALYKLKIQNS

SEQ ID NO: 58410 - protein, 393 aa, Oribacterium sp.
  misc_feature (1)..(393): tr|A0A1S9BYF3|A0A1S9BYF3_9FIRM Queuine tRNA-ribosyltran sferase OS=Oribacterium sp. C9 OX=1943579 GN=tgt PE=3 S V=1
MKYEIVKTSGRAKSAHMETVHGTIETPVFMNVGTVAAIKGGVSTDDLRNIGTQVELSNTYHLHVRTGDPLIKKFGGLHKFMNWDRPILTDSGGFQVFSLAGTGRKIKEEGVYFHSHIDGRKIFMGPEESMQIQSNLGSTIAMAFDECPPALADRQYIVPSVERTTRWLERCKKEMARLNSLPDTVNKEQLLFGINQGGVFDDIRIQHAETISRMDLDGYAVGGLAVGETHEQMYHVLDEVVPHLPKNKPTYLMGVGTPANIIEAVDRGIDFFDCVYPSRNGRHGHVYTHKGKINLFNQKYELDERPIEEGCMCPVCAGQKRADGTYTGGYSRAYIRHLLKAKEMLGMRMCVLHNLYFYNHLTEEIRGAIRGGSWDEWKTKALSDLGTYDRGEE

SEQ ID NO: 58411 - protein, 378 aa, Oricola cellulosilytica
  misc_feature (1)..(378): tr|A0A4V2MNK0|A0A4V2MNK0_9RHIZ Queuine tRNA-ribosyltran sferase OS=Oricola cellulosilytica OX=1429082 GN=tgt PE =3 SV=1
MSREFSFELLGENGAARRGVVHTARGDIRTPAFMPVGTLGTVKAMYLDQVRDAGADIILGNTYHLMLRPGAERVARLGGLHEFIRWPHPILTDSGGFQVMSLSGLRTMSEKGVTFQSHIDGSRHEMTPERSIEIQGLLGSDIQMQLDECVALPADPDAIRRAMELSVRWAERCKTAFGNQPSRAMFGIVQGGDDARLRETSAKALTALDLKGYAIGGLAVGEPQDVMLAVLDATCPLLPGDKPRYLMGVGTPQDILRSVARGIDMFDCVMPTRSGRHGLAFTRRGRVNLKNARHAEDLRPLDEESDCPAARDYSRAYLHHLVRSGEALGGMLLSWNNVAYYQQLMQGIREAIEAENFPEFSARTESEWERGDLPPLPL

SEQ ID NO: 58412 - protein, 375 aa, Oricola sp.
  misc_feature (1)..(375): tr|A0A3M8GY85|A0A3M8GY85_9RHIZ Queuine tRNA-ribosyltran sferase OS=Oricola sp. OX=1979950 GN=tgt PE=3 SV=1
MAEFGFTLHATDGGARRGTVTTGRGDIATPAFMPVGTAGTVKGLYLDQVKGAGADIILGNTYHLMLRPGAERIDRLGGLHGFIGWDGPILTDSGGFQVMSLSALRQMSEKGVTFKSHIDGAIHEMSPERSIEIQGLLGSDIQMQLDECVALPADTDTMKAAMELSLRWAERCRVAFGDQPGKAMFGIVQGGDDEKLRVQSTEALKAMDLKGYSIGGLAVGEPQEVMLAMLDVVCPILPAHKPRYLMGVGTPQDLLRSVARGVDMFDCVMPTRSGRHGLAFTRRGRVNLKNARHAEDHRPLDDEMNCPASRTYSRAYLHHLIRSGEMLGMMLLSWHNTYYYQWLMSEMRRAIEQGRFADFSAETEAMWEAGDIAAL

SEQ ID NO: 58413 - protein, 368 aa, Ornatilinea apprima
  misc_feature (1)..(368): tr|A0A0N8GL46|A0A0N8GL46_9CHLR Queuine tRNA-ribosyltran sferase OS=Ornatilinea apprima OX=1134406 GN=ADN00_1754 5 PE=3 SV=1
MSRFPSELNLAHGRLDFPVFLPDATFGVVRAVDASDLEDCRVQALVMNTFHLMQKPGSSTISALGGLHRMSGWPRPIITDSGGFQAYSLIRQNAQFGQLTDKGLFFQPEGSSRKYQLTPEKTVQLQMSYGADVVICLDDCTHAENDPAEQRKSVDRTVAWAKRCKSEYARLVEQKKLNEQDRPRIFAVVQGGGSRDLRRECAERLLEIGFDGYGYGGWPLDGQGNLLEDMLAWTRELIPAEYPMHALGIGHPENVLACYKMGYGMFDCAMPTRDARHGRLYVFNFPADGDQSGLNEKWFKYLYIHDEKHLKGDQPLSPYCDCLTCRRYSAGYLRHLFKMNDSLYMRLATVHNLRFMTQLTERIRAGEK

SEQ ID NO: 58414 - protein, 373 aa, Ornatilinea apprima
  misc_feature (1)..(373): tr|A0A0P6XJQ8|A0A0P6XJQ8_9CHLR Queuine tRNA-ribosyltran sferase OS=Ornatilinea apprima OX=1134406 GN=tgt PE=3 S V=1
MLSQVSPAFQFELIAQDGNARAGVFHTPHGDILTPVFAPVGTQATVKAVSSRQLTELGASLILANTYHLYLRPGSDLIAEFGGLHQFMNWHGPILTDSGGYQVFSLSSIRKVDEDGVTFRSHIDGSTHRLTPEKAISIQEQLGSDIIMAFDECPDPYDPKYNQKAMERTHRWAERCLAAQTRRDQALFGIVQGGVFPDLRARSAEFISSLGFPGHAIGGLSVGETKEEMHAMLEVVTPILPADRPRYLMGVGSPEDLVNGVLRGVDIFDCVLPTRLARHKAALTMTGRINLLNSVNTRSQSPIEEGCQCYTCQHYSRAYLRHMLVAKEILGATLISIHNLHVLLELMRQARQAIIEHRYSAFASNFLENYRLP

SEQ ID NO: 58415 - protein, 380 aa, Ornithinibacillus halophilus
  misc_feature (1)..(380): tr|A0A1M5DGK7|A0A1M5DGK7_9BACI Queuine tRNA-ribosyltran sferase OS=Ornithinibacillus halophilus OX=930117 GN=tg t PE=3 SV=1
MTTPIRYEFIKTCKQTGARLGRVHTPHGSFDTPTFMPVGTLATVKTMSPEDLQSMNANIILSNTYHLWLRPGEDIIREAGGLHKFMNWDGAILTDSGGFQVFSLSDMREIKEEGVHFRNHLSGEKLFLSPEKAMQIQNALGSDIMMAFDECPPYPATYDYMKSSVERTSRWAERCLEAHERQDVQGLFGIIQGGEYEDLRRQSAQDLISLDFPGYAVGGLSVGEPKDVMNRVLDFTTPLMPTDKPRYLMGVGSPDSLIDGAIRGIDMFDCVLPTRIARNGTCMTSNGRLVVRNAKYARDFSPIDENCDCHVCKNYTRAYIRHLIKCNETFGFRLTTYHNLYFLLKLMEQVRNAIRNDELGDFKEAFFEQYGLNQPNAKNF

SEQ ID NO: 58416 - protein, 380 aa, Ornithinibacillus sp.
  misc_feature (1)..(380): tr|A0A3C1I5C2|A0A3C1I5C2_9BACI Queuine tRNA-ribosyltran sferase OS=Ornithinibacillus sp. OX=1898027 GN=tgt PE=3 SV=1
MTSPITYELIKTDKQTGARLGRVHTPHGTFETPMFMPVGTLATVKTMSPEDLHSMDAKIILSNTYHLWLRPGEDIIREAGGLHKFMNWDGAILTDSGGFQVFSLSDMREITEEGVHFRNHLNGDKLFLSPEKAIQIQNALGSDIMMAFDECPPYPATHEYMKASVERTSRWAERCLNAHQRPDVQGLFGIIQGGEFEDLRRLSASDLVSLDLPGYAVGGLSVGEPKDVMNRVLEFTTPLMPSNKPRYLMGVGSPDSLIDGAIRGIDMFDCVLPTRIARNGTCMTSTGRLVVRNAKYARDFGPIDENCDCHVCKNYTRAYIRHLIRCNETFGFRLTTYHNLHFLLKLMEQVRQAIREDRLGDFKEEFFEQYGLNKPDAKNF

SEQ ID NO: 58417 - protein, 382 aa, Ornithobacterium rhinotracheale
  misc_feature (1)..(382): tr|I3ZZW1|I3ZZW1_ORNRL Queuine tRNA-ribosyltransferase OS=Ornithobacterium rhinotracheale (strain ATCC 51463 / DSM 15997 / CCUG 23171 / CIP 104009 / LMG 9086) OX=867 902 GN=tgt PE=3 SV=1
MYLCPDMKFTIEKSDIESSARAGEITTDHGKIQTPIFMPVGTVASVKAVHQRELKEDIKAQIILGNTYHLYLRPGTEILNQAGGLHKFINWDRPILTDSGGYQVFSLAGRRKITEEGVRFKSHIDGSYHFFSPERSMEIQRNIGADIIMAFDECTPYPCDYTPAKESMEMTHRWLKRCEKWLSENPELYGYKQTLFPIVQGSTYRDLRTQSAEFIASIGADGNAIGGLSVGEPEEAMYETTELVNSILPKDKPRYLMGVGTPWNIIEGISLGVDMFDCVMPTRNARNGMLFTWDGVINIKNAKWKDDFSPLDPKGSAYVDWDYSKAYVRHLFVAKEYLAKQIASVHNLAFYLDLVRVAREHILAGDFASWKKSIIPQLKTRL

SEQ ID NO: 58418 - protein, 376 aa, Ornithobacterium rhinotracheale
  misc_feature (1)..(376): tr|A0A410JPE4|A0A410JPE4_9FLAO Queuine tRNA-ribosyltran sferase OS=Ornithobacterium rhinotracheale OX=28251 GN= tgt PE=3 SV=1
MKFTIEKLDIASSARAGEITTDHGKIQTPIFMPVGTVASVKAVHQRELKEDIKAQIILGNTYHLYLRPGTEILNQAGGLHKFINWDSPILTDSGGYQVFSLAGRRKITEEGVRFKSHIDGSYHFFSPERSMEIQRNIGADIIMAFDECTPYPCDYTPAKESMEMTHRWLKRCEKWLSENPELYGYKQTLFPIVQGSTYRDLRTQSAEFIASIGADGNAIGGLSVGEPEEAMYETTELVNSILPKDKPRYLMGVGTPWNIIEGISLGVDMFDCVMPTRNARNGMLFTWDGVINIKNAKWKDDFSPLDPKGSAYVDWDYSKAYVRHLFVAKEYLAKQIASVHNLAFYLDLVRVAREHILAGDFATWKKSIIPQLKTRL

SEQ ID NO: 58419 - protein, 378 aa, Orrella dioscoreae
  misc_feature (1)..(378): tr|A0A1C3K4A4|A0A1C3K4A4_9BURK Queuine tRNA-ribosyltran sferase OS=Orrella dioscoreae OX=1851544 GN=tgt PE=3 SV =1
MTGLSFDLLATDGQARRGQVTLNHGVVQTPIFMPVGTYGAVKAMLPHEVEEVGAQIVLGNTFHLWLRPGPEIVRKHGGLHGFMQWNKPILTDSGGFQVFSLEGLRKITEDGVTFASPIDGARLFLTPEESMRIQHALNSDIVMVFDECTPYEIKGRPATAEEAARSMRMSLRWARRSRQEFDGLENPNALFGIVQGGMYEHLRDESLAGLTEIGFHGYAIGGLSVGEPKEDMLRILKHVAPRLPANAPRYLMGVGTPEDLVEGVANGIDMFDCVMPTRNARNGWLFTRYGDLKIRNARYRDDIRALDPTCACHTCGKFSRAYLHHMQRSNEITGARLNTQHNLHFYLQIMAEMREAIEAGRFDAWREQFARDRARGVE

SEQ ID NO: 58420 - protein, 390 aa, Oryzisolibacter propanilivorax
  misc_feature (1)..(390): tr|A0A1G9V740|A0A1G9V740_9BURK Queuine tRNA-ribosyltran sferase OS=Oryzisolibacter propanilivorax OX=1527607 GN =tgt PE=3 SV=1
MLQFDLLATDPASHARRGRLTLNHGVVQTPIFMPVGTYGTVKGVMPQSLRDMGAQIILGNTFHLWMRPGLDVVQSFGGLHAFEQWDKPILTDSGGFQVWSLGAMRKITEEGVYFQSPVNGDKLFMSPEVSMQIQTTLNSDIVMQLDECTPYETQGRLTTEAEARKSMEMSRRWALRSKAEFERLGNPNALFGIVQGGMFEHLRQESLQALVEMDFPGYAIGGVSVGEPKDEMLRIMAHTPHRLPATKPRYLMGVGTPEDLVDGVACGVDMFDCVMPTRNARNGTLFTRYGDLKIRNARHRADHQPLDATCTCHACAGPQGIAWNDGGRGGFSRAYLHHLERCGEMLGPMLTSIHNLHYYLNLMQGIRDALDAGTFSQFHAQFKADRARGV

SEQ ID NO: 58421 - protein, 373 aa, Oryzomicrobium terrae
  misc_feature (1)..(373): tr|A0A5C1E9E1|A0A5C1E9E1_9RHOO Queuine tRNA-ribosyltran sferase OS=Oryzomicrobium terrae OX=1735038 GN=tgt PE=3 SV=1
MSDKKFELLATDGRARRGRLTLPHGVVETPVFMPVGTYGTVKAMTPQALRDIEAQICLGNTFHLWLRPGLDVIRAHGGLHGFMGWEKPILTDSGGFQVFSLGALRKITEEGVKFASPIDGAKLFLTPEESMRIQTVLNSDVVMIFDECTPYPASHDEAAKSMRLSLRWAKRSREEFDRQENPNTLFAIVQGGMYEDLRDESLAALEEIGFFGFAIGGLSVGEPKEDMERILAHTAPKLPADKPHYLMGVGTPEDIVNAVAQGIDMFDCVMPTRNARNGHLFTRYGDVKIKNARYREDTRPLDESCDCYACRNFSRAYLHHLFRTGEILGSMLNTIHNLRYYQVLTGEIRAAIAAGEYEDFRRRFAAERGRGPA

SEQ ID NO: 58422 - protein, 370 aa, Oscillatoria acuminata
  misc_feature (1)..(370): tr|K9TRE4|K9TRE4_9CYAN Queuine tRNA-ribosyltransferase OS=Oscillatoria acuminata PCC 6304 OX=56110 GN=tgt PE=3 SV=1
MGRDFTFQCQGKCSHTHARAGVWMTPHGPVETPIFMPVGTLATVKTVTPAQLEATGAQMILANTYHLHLQPGEDIVAAAGGLHRFMVWDGPILTDSGGFQVFSLSELRTITEKGVTFRSPRDGRKIEITPERSIQIQNKLGADVIMAFDECPPYPASREAVELATARTYRWLERCMEAHSRSDQALFGIVQGGVYIDLRLQAVEALTQLDLPGYAIGGVSVGEPGETISEIVRATAPKLPVEKPRYLMGVGTYREMAQAIASGVDLFDCVIPTRWARHGAVMVQGERWNIKNAQFREDFTPLDETCSCYTCQNFSRAYLNHLWKSGEILVYTLLSIHNLTELIRFTKQIRESILSDRFTTDFAHWLEPMP

SEQ ID NO: 58423 - protein, 376 aa, Oscillatoria nigroviridis
  misc_feature (1)..(376): tr|K9VJ05|K9VJ05_9CYAN Queuine tRNA-ribosyltransferase OS=Oscillatoria nigro-viridis PCC 7112 OX=179408 GN=tgt PE=3 SV=1
MTEDKAKFSFKCQANCSHTQARAGVFATPHGVVETPKFMPVGTLANVKTLTPAHLEAAGSQMVLANTYHLHLQPGEAIVAGAGGLHKFMAWPGPMLTDSGGFQVFSLSQMRKITDDGVTFRSPRDGRMINLTPERSIEIQNDLGADVIMAFDECPPYPATREEVEAATNRTYRWLQRCIQAHSRPDQALFGIVQGGVFPDLRSRAANQLVDLDLPGYAIGGVSVGESGDLIAEIVKVTAPLLPANKPRYLMGIGTYREMALAVASGVDMFDCVIPTRLARHGTAFVGGERWSLKNARFREDFAPLDESCPCYTCQKFSRAYLAHLARANEVLGYTLLALHNVTELIRFTGRMREAILADRFTEEFACWLAPRVDRS

SEQ ID NO: 58424 - protein, 378 aa, [Oscillatoria] sp.
  misc_feature (1)..(378): tr|D8FU25|D8FU25_9CYAN Queuine tRNA-ribosyltransferase OS=[Oscillatoria] sp. PCC 6506 OX=272129 GN=tgt PE=3 SV =1
MPDNFSFQSQAKCSQTQARAGIFTTPHGSVETPRFMPVGTLANVKTLTPAHLEAAGAQMVLANTYHLHLQPGEGIVAGAGGLHKFMAWKGPILTDSGGFQVFSLSEIRTIGEDGVKFRSPRDGMMIHMTPELSIQIQNDLGADVIMAFDECPPYPASREDVAAATDRTYRWLKRCIASHQRSDQALFGIVQGGVYPDLRSRAANQLVDLDLPGYAIGGVSVGEPGEMIEDIVKVTAPLLPPEKPRYLMGIGTYREMAVAIAAGVDLFDCVIPTRLARHGAVLVGGERWNLKNAQFREDYGPVDKNCPCYTCQTFSRAYLSHLVRAHEALGHTLLSIHNVTELIRFTVRIREAILSDRFTEEFAHWLAPSTRSSANASC

SEQ ID NO: 58425 - protein, 372 aa, Oscillatoriales cyanobacterium
  misc_feature (1)..(372): tr|A0A1C0V3X5|A0A1C0V3X5_9CYAN Queuine tRNA-ribosyltran sferase OS=Oscillatoriales cyanobacterium USR001 OX=188 0991 GN=tgt PE=3 SV=1
MPENFCFQCLANCSHTQARVGVFMTPHGPVETPRFMPVGTLANVKTLTPAHLEAAGAQMVLANTYHLHLQPGEGIVAGAGGLHKFMAWKGPILTDSGGFQVFSLSDIRTIGEDGVKFRSPRDGMMIDMTPERSIQIQNDLGADVIMAFDECPPYPASREDVAMATDRTYRWLKRCIVAHQRSDQALFGIVQGGVFPDLRSRAVHQLVDLDLPGYAIGGVSVGEPGEMIEQIVKVTAPLLPPEKPRYLMGIGTYREMACAIAAGVDLFDCVIPTRVARHGAVLVRGERWNLKNAQFREDFGPVDDSCPCYTCQNFSRAYLSHLVRAHEALGHTLLSIHNVTELIRFTVRIRDAILGDRFVEEFAHWLAPVDPL

SEQ ID NO: 58426 - protein, 383 aa, Oscillatoriales cyanobacterium
  misc_feature (1)..(383): tr|A0A1J5GRZ8|A0A1J5GRZ8_9CYAN Queuine tRNA-ribosyltran sferase OS=Oscillatoriales cyanobacterium CG2_30_40_61 OX=1805291 GN=tgt PE=3 SV=1
MSHPFSFEVQACCSQTKARVGLFHTPHGWVETPRFMPVGTLANVKTLTPAHLKDAGAQMVLSNTYHLHLQPGEKIVAGAGGLHRFMGWDGPMLTDSGGFQVFSLSKINTITEEGVTFRSPHDGRLINFTPELSIQIQNELGADVIMAFDECPPYPATREAVVKATERTKRWLERCIKAHKRPDQALFGIVQGGVHADLRQQAARDLVEFDLPGYAIGGVSVGEPSALIEKIVQVTTPILPFNKPRYLMGIGTYREMAQAIAAGVDLFDCVIPTRLGRHGAALVQGERWNLKNAQFREDFRPLDATCPCYTCQNFSRAYLSHLVRAKEVLSYTLIAIHNVTELIRFTQRIRESILNNRFADEFQFWLTSTDAVATLEDYEIDPP

SEQ ID NO: 58427 - protein, 378 aa, Oscillibacter sp.
  misc_feature (1)..(378): tr|A0A3D2YH53|A0A3D2YH53_9FIRM Queuine tRNA-ribosyltran sferase OS=Oscillibacter sp. OX=1945593 GN=tgt PE=3 SV= 1
MFKVIKKEGKARRGVFTCAHGGEVQTPVFMNVGTQAAIKGGVSAVDLKERLGTQIELSNTYHLHLRPGDDVVRAMGGLHRFMRWDGPILTDSGGFQVFSLAGLRKISEEGVTFASHLDGHRIFMGPEESMRIQSNLGSDIAMAFDECVENPAPYDYAKASCERTLRWLERCKKEHDRLNSLPDTVNPGQMLFGINQGATYADLRIWHMQQIARIDCDGYAIGGLAVGEPTEVMYEIIDAVEPYMPADKPRYLMGVGTPSNIIEGVARGVDFFDCVMPARNARHGKLFTWKGTLNIKNAKYKLDEQPIDPECDCPVCRQFSRAYIRHLFTAEEMLGMRLAVMHNLYFYNKLTERIRDSLDNGCFEAFREEYSKKLAEKL

SEQ ID NO: 58428 - protein, 377 aa, Oscillibacter sp.
  misc_feature (1)..(377): tr|R6GM56|R6GM56_9FIRM Queuine tRNA-ribosyltransferase OS=Oscillibacter sp. CAG:241 OX=1262911 GN=tgt PE=3 SV= 1
MFKVIKKEGHARRGEFQCAHGGVVQTPVFMNVGTQAAIKGGVDAFDLRDLGCQIELSNTYHLHLRPGDDVVRQMGGLHRFMRWDGPILTDSGGFQVFSLASLRKITEEGVTFASHLDGHRIFMGPEESMRIQSNLGSDIAMAFDECVENPAEYDYAKASCERTLRWLERCKAEHDRLNALPDTVNPRQMLFGINQGATYEDLRVWHMQQIAKIDCDGFAIGGLAVGEPTEVMYQIIEAVEPYMPAHKPRYLMGVGTPSNIIEGVARGVDFFDCVMPARNARHGKLFTWQGAMNIKNAKYKLDDRPIDPECDCPVCRRFSRAYIRHLFAAEEMLAMRLAVMHNLYFYNKLAQRIRDSLDAGCFADFRREYSEKLSGRI

SEQ ID NO: 58429 - protein, 377 aa, Oscillibacter valericigenes
  misc_feature (1)..(377): tr|G4KPA6|G4KPA6_OSCVS Queuine tRNA-ribosyltransferase OS=Oscillibacter valericigenes (strain DSM 18026 / NBRC 101213 / Sjm18-20) OX=693746 GN=tgt PE=3 SV=1
MFKVIKYQGRARRGQFSCAHGGMVQTPVFMNVGTQGAIKGGVSAHDLREIGCQIELSNTYHLHLRPGDTVVRKMGGLHRFMDWDGPILTDSGGFQVFSLASLRKIKEEGVTFASHIDGHRIFMGPEESMQIQSNLGSDIAMAFDECVENPATYEYAKASCERTARWLERCAAEHERLNSLADTVNPRQMLFGINQGATFPDLRVWHMDEIAKLNCDGYAIGGLAVGEPADVMYGIIDAVEPHMPQDKPRYLMGVGTPSNIIEAVSRGVDFFDCVMPSRNGRHGKLFTWEGTVNILNRKYETDPSPVSESCGCPCCRSFSRAYLRHLFKADEVLALRLSVLHNLWFYNELMQKLRNALDTGTFDEFREKYSGKLERRA

SEQ ID NO: 58430 - protein, 403 aa, Oscillochloris trichoides
  misc_feature (1)..(403): tr|E1IDU5|E1IDU5_9CHLR Queuine tRNA-ribosyltransferase OS=Oscillochloris trichoides DG-6 OX=765420 GN=tgt PE=3 SV=1
MSIFTITAKDPHSRARAGVVRTPHGDVPTPVFMPVGTRGTVKSLSPRELREHGATIILGNTYHLYLQPGHELIARHGGLHGFASWDGPMLTDSGGFQVFSLIYGGISNEIKGRRPQRANPMQGMVKVTEDAVIFKSYLDGSRHIFTPERSIQIQHGLGADIIVCFDELPPFHATYKYTRQSMDRTHRWAARCLTAHREREAEQLPNPGQSLFGIVHGGVFPDLRQASAEHLATLGFDGFCIGGSLGGDKPQMYDVVDMTVPHMPDGMARHLLGVGDIDDLLEGVARGIDMFDCVSPTRLGRHATALVRRDGEQGSRRWKLNVLNASMRDDRNPLQPGCTCETCRTYSRAYIHHLFKANEILGIRLVSLHNIAFLLNLMREVRAAIIAGRFGEMYADWLGKPLR

SEQ ID NO: 58431 - protein, 372 aa, Osedax symbiont
  misc_feature (1)..(372): tr|S6GQ35|S6GQ35_9GAMM Queuine tRNA-ribosyltransferase OS=Osedax symbiont Rs2 OX=1330035 GN=tgt PE=3 SV=1
MKFEKLQQDGKARRGRITFPRGVVETPAFMPVGTYGTVKGMLPRDVEEIGAHMILGNTFHLMLRPGTEIIKQHGDLHDFMQWQGPILTDSGGFQVFSLGNMRKITEKGVTFHSPVNGDKVFIDPEKSMQVQRDLGSDVVMIFDECTPYPATEQEAADSMRLSLRWADRSKKAHGDSSSALFAIVQGGMYENLRDESLQGLTDIGFDGYAIGGLSVGEPKDEMIKILDHTAHQLPEDKPRYLMGVGKPEDLVEGVRRGVDMFDCVMPTRNARNGHLFVDTGVVKLRNASNKTDTGPLDETCDCYTCRNFSRAYLHHLDKCKEILGSQLNTIHNLRFYQRLMMDIRSALDEGNFDQFVTEFYRKRGIEVPSLRE

SEQ ID NO: 58432 - protein, 378 aa, Osedax symbiont
  misc_feature (1)..(378): tr|S6GPF5|S6GPF5_9GAMM Queuine tRNA-ribosyltransferase OS=Osedax symbiont Rs1 OX=1330036 GN=tgt PE=3 SV=1
MSRKCFMKFEKLQQEGKARRGRITFPRGVVDTPAFMPVGTYGTVKGMLPRDIEETGAQMILGNTFHLMLRPGTEVIKKHGDLHDFMQWKGPILTDSGGFQVFSLGKTRKITEKGVHFQSPVNGSKVFMGPEESMQVQRDLGSDVVMIFDECTPYPATEQQAADSMRLSLRWAERSKNAHADNPAALFAIVQGGMYDSLRDESLKGLIEIEFDGYAIGGLSVGEPKDEMVKVLDHIAHQLPEDKPRYLMGVGKPEDLVEGVRRGIDMFDCVMPTRNARNGHLFVDTGVVKLRNASNKTDTRPLDETCDCYTCRNFSRAYLHHLDKCKEILGSQLNTIHNLRFYQRLMQGLRDALDQGKLSDFVVEFYRKRGLDVPECRE

SEQ ID NO: 58433 - protein, 372 aa, Osedax symbiont
  misc_feature (1)..(372): tr|A0A1Y5HX88|A0A1Y5HX88_9BACT Queuine tRNA-ribosyltran sferase OS='Osedax' symbiont bacterium Rs2_46_30_T18 OX =1856298 GN=tgt PE=3 SV=1
MKFEKLQQDGKARRGRITFPRGVVETPAFMPVGTYGTVKGMLPRDVEEIGAHMILGNTFHLMLRPGTEIIKQHGDLHDFMQWQGPILTDSGGFQVFSLGNMRKITEKGVTFHSPVNGDKVFIDPEKSMQVQRDLGSDVVMIFDECTPYPATEQEAADSMRLSLRWADRSKKAHGDSPSALFAIVQGGMYENLRDESLQGLTDIGFDGYAIGGLSVGEPKDEMIKILDHTAHQLPEDKPRYLMGVGKPEDLVEGVRRGVDMFDCVMPTRNARNGHLFVDTGVVKLRNASNKTDTSPLDETCDCYTCRNFSRAYLHHLDKCKEILGSQLNTIHNLRFYQRLMMDIRKALDEGNFDEFVAEFYRKRGIEVPSLRE

SEQ ID NO: 58434 - protein, 379 aa, Otariodibacter oris
  misc_feature (1)..(379): tr|A0A420XIZ6|A0A420XIZ6_9PAST Queuine tRNA-ribosyltran sferase OS=Otariodibacter oris OX=1032623 GN=tgt PE=3 S V=1
MKYELKKTSGQARRGRLTFSRPKGEYHVETPAFMPVGTYGTVKGMTPEEVAATGAQILLGNTFHLWLRPGQEVMRQHGDLHDFMQWHGPILTDSGGFQVFSLGKLRKIKEEGVHFQNPINGEKIFLSPEKSMEIQYDLGSDIVMIFDECPPYPSTFDYAKQSMEMSLRWAKRSRDRFDELGNKNALFGIIQGGVYEELRKISTEELVKIGFDGYAVGGLAVGEPKEDMHRILEYVCPQIPQDKPRYLMGVGKPEDLVEGVRRGIDMFDCVMPTRNARNGHLFVTDGIVKIRNAKYRNDTTPLDPECDCYTCKNYTKAYLYHLDKCGEILGARLNTIHNLRYYQRLMAQIRQAIEDDRFDDFVVEFYEKMGKKVPPLQLS

SEQ ID NO: 58435 - protein, 390 aa, Ottowia oryzae
  misc_feature (1)..(390): tr|A0A2S0MD45|A0A2S0MD45_9BURK Queuine tRNA-ribosyltran sferase OS=Ottowia oryzae OX=2109914 GN=tgt PE=3 SV=1
MLNFELLGTDPASHARRGRLTLNHGVVQTPIFMPVGTYGTVKGVMPRSLHEMGAQIILGNTFHLWMRPGLDVMAQFGGLHGFENWQKPILTDSGGFQVWSLGEMRKISEEGVKFASPVNGDKLFLTPEISMQIQTVLNSDIVMQFDECTPYETKGHITTEREARSSMELSLRWAKRCQAEFARLENRNALFGIVQGGMFENLRQESLEQLVAMDFPGYAIGGVSVGEPKEDMARITAHTPHRLPAHKPRYMMGVGTPEDLVYGVQHGVDMFDCVMPTRNARNGHTFTRYGDLKIRNARHKADPRPIDETCTCYACAGTSGVPWADGGREGFSRAYLHHLDRCGEMLGPMLATVHNLHYYLNLMQEMRDALDAGSFSAFRQRFATDRARGV

SEQ ID NO: 58436 - protein, 390 aa, Ottowia sp.
  misc_feature (1)..(390): tr|A0A5C7USY2|A0A5C7USY2_9BURK Queuine tRNA-ribosyltran sferase OS=Ottowia sp. OX=1898956 GN=tgt PE=3 SV=1
MLRFELLGQDPSSHARRGRLTLNHGVVETPIFMPVGTYGTVKGVLPRSLREMGAQIILGNTFHLWMRPGLDVLRQFGGLHGFENWHQPILTDSGGFQVWSLGEMRKISEEGVKFASPVNGDRLFLTPEISMQIQTVLNSDIVMQFDECTPYETRGHVTTEAEAHASMALSLRWARRSQAEFERLGNPNALFGIVQGGMFEQLREESLAQLVELDLPGYAIGGVSVGEPKEDMLRITAHTPHRLPAHKPRYLMGVGTPEDLVYGVQHGVDMFDCVMPTRNARNGHLFTRFGDLKIRNARHKSDPRPIDESCTCHTCAGASGVAWQDGGREGFSRAYLHHLERCGEMLAPMLASIHNLHYYLNLMRDIRAALDAGAFGAFRQRFAAERARGV

SEQ ID NO: 58437 - protein, 397 aa, Ottowia sp.
  misc_feature (1)..(397): tr|A0A5C8J419|A0A5C8J419_9BURK Queuine tRNA-ribosyltran sferase OS=Ottowia sp. GY511 OX=2603274 GN=tgt PE=3 SV= 1
MLNFEILGTDAGSHARRGRLTLNHGVVQTPIFMPVGTYGTVKGVMPRSLHEMGAQIILGNTFHLWMRPGLDIMKSFGGLHGFEKWDKPILTDSGGFQVWSLGAMRKITEEGVHFQSPVNGDKLFMSPEISMQIQTILNSDIVMQLDECTPYETNGKKTTEAEARKSMEMSRRWAQRSKDEFERLGNPNALFGIVQGGMFTNLREESLQALVEMDFPGYAVGGVSVGEPKDEMLEIMAHTPHLLPANKPRYLMGVGTPEDLVQGVADGVDMFDCVMPTRNARNGTLFTRYGDLKIRNARHKTDHQPIDTTCTCYACAGSPGGPSGSGGVSWDDGGRNGFSRAYLHHLDRCGEMLGPMLTTIHNLHYYLNLMQEVRDALDAGQFSHFRARFAADRARGV

SEQ ID NO: 58438 - protein, 376 aa, Owenweeksia hongkongensis
  misc_feature (1)..(376): tr|G8R0N2|G8R0N2_OWEHD Queuine tRNA-ribosyltransferase OS=Owenweeksia hongkongensis (strain DSM 17368 / CIP 10 8786 / JCM 12287 / NRRL B-23963 / UST20020801) OX=92656 2 GN=tgt PE=3 SV=1
MNFELKAQDSKSKARAGVLTTAHGEIQTPIFMPVGTVASVKAVHQRELKEDIKAQIILGNTYHLYLRPGTDIINGAGGLHKFMNWDRPILTDSGGYQVYSLSNNNKITEEGVKFKSHIDGSRHFFSPEKSMEIQRNIGADIIMAFDECPPYPSTYEYAKNSMDMTHRWLQRCIDWLKENPELYGFEQSLFPIVQGSTYNDLRKESAETIASHPCDGYAIGGLSVGEPHDEMYAMSDLVCSYLPEDKPRYLMGVGTPANILENIALGVDMFDCVMPTRNGRNGMIFTSEGIINIKNKKWERDFSPLDPNGTSFVDSDYSKAYLRHLFAANEYLGRQIASLHNLRFYLWLVNEAREKIIDGTFASWKNVMVEKLQTRL

SEQ ID NO: 58439 - protein, 376 aa, Owenweeksia sp.
  misc_feature (1)..(376): tr|A0A1Z8LEK9|A0A1Z8LEK9_9FLAO Queuine tRNA-ribosyltran sferase OS=Owenweeksia sp. TMED14 OX=1986609 GN=tgt PE= 3 SV=1
MNFELKSLDKKSSARAGIFYTDHGEIKTPIFMPVGTSGAVKSMYTDHLISDSSAQIILGNTYHLYLRPGTEIIKKAGGLHKFITWERPMLTDSGGFQVHSLQDIRKISEEGVTFQSHIDGSKHMFTPESVMEIQRKIGADIVMAFDECTNYPCQKKYAKEAMNRTHRWLDRCMKYWNTGKNYFGYEQTLFPIVQGSTYSDLRKESAEYIAKKEALGNAIGGLSVGEPAEEMYAMTNDVCSILPKDKPRYLMGVGTPTNLLENIALGVDMFDCVMPTRNARNGQLFTSEGIINIKNAKWADDFSSIDPSGDSIVDNHFSKAYLRHLFVSNESLGKQIASLHNLRFYLWLVEEARNRIILGDFTSWKARIIPRLEKRL

SEQ ID NO: 58440 - protein, 376 aa, Owenweeksia sp.
  misc_feature (1)..(376): tr|A0A2D8SNF3|A0A2D8SNF3_9FLAO Queuine tRNA-ribosyltran sferase OS=Owenweeksia sp. OX=2024847 GN=tgt PE=3 SV=1
MRYTLQAQDPGSKARAGIFKTDHGEIETPIFMPVGTVGSVKAVHQRELKNDVQAQIILGNTYHLYLRPGTSLMQQAGGLHHFIGWDRPILTDSGGYQVYSLANNRKITEEGVAFKSHIDGSKHFFSPEKSMEIQRIIGADIIMAFDECPPYPSTYEYARTSMEMTHRWLKRCVDWLDKNPELYGHGQSIFPIVQGSTFNDLRTRSAETIASFDCEGYAIGGLSVGEPHEEMYAMSELVCDVLPEDRPRYLMGVGTPANILENIALGVDMFDCVMPTRNGRNGMLFTSEGIINIKNQKWADDFSPVDPNGTSFVDGDYTKAYLRHLFAANEYLGRQIASLHNLSFYLWLVKEAREKIKEGIFSQWKNEMVIKLQTRL

SEQ ID NO: 58441 - protein, 375 aa, Oxalobacter formigenes
  misc_feature (1)..(375): tr|C3X619|C3X619_OXAFO Queuine tRNA-ribosyltransferase OS=Oxalobacter formigenes HOxBLS OX=556268 GN=tgt PE=3 SV=1
MLEFELVNTDGNARRGRLKLAHGTVETPIFMPVGTYGSVKAMSPSNLNDINAQIVLGNTFHLWLRPGLDIVRQFGGLHQFMGWNRPILTDSGGFQVFSLGAMRKISEEGVKFASPIDGSRLFLSPEISMQIQHVLNSDIVMQFDECTPYLINDRPASKDEAAQSMRLSLRWAQRSKQEFENNANPNALFGIVQGGMYTDLRDESLAGLTDMGFHGIAIGGLSVGEPKDEMFRILKHIGPRLPDNLPHYLMGVGTPEDLVAGVASGIDMFDCVMPTRNARNGWLFTRFGDIRLRNARYKDDRRPLDETCQCYTCRHFSRAYLHHLNRVGEILGAQLSTIHNLHYYLQLMSEMRKAIETNRFAEFTAQFHAERQRGF

SEQ ID NO: 58442 - protein, 375 aa, Oxalobacter formigenes
  misc_feature (1)..(375): tr|C3XC98|C3XC98_OXAFO Queuine tRNA-ribosyltransferase OS=Oxalobacter formigenes OXCC13 OX=556269 GN=tgt PE=3 SV=1
MLDFELINTSSNARRGRLKLAHGTVETPIFMPVGTYGSVKAMSPENLDDIEAQIILGNTFHLWLRPGLDVIGQFGGLHDFIGWDKPILTDSGGFQVFSLGAMRKISEEGVKFASPINGSKLFLSPEISMQIQHVLNSDIVMQFDECTPYLINDRPATKDEAAQSMRLSLRWGQRSKDEFDRNENKNALFGIVQGGMFTDLRDESLAGLSQMGFNGIAIGGLSVGEPKEEMNRILSHIGPRLPAHMPHYLMGVGTPEDLVAGVANGIDMFDCVMPTRNARNGWLFTRFGDIRIRNARYKDDGKPLDETCQCYACRHFSRAYIHHLNRVGEILGAQLSTIHNLHYYLQLMNDMRKAIENDRFNEFTAQFHAERQRGI

SEQ ID NO: 58443 - protein, 375 aa, Oxalobacter sp.
  misc_feature (1)..(375): tr|A0A3A6PAA5|A0A3A6PAA5_9BURK Queuine tRNA-ribosyltran sferase OS=Oxalobacter sp. OX=2093374 GN=tgt PE=3 SV=1
MLKFELLKIDGHARRGRLKLNHGTVETPVFMPVGTYGSVKAMSPLDLHDIDAQIILGNTFHLWLRPGLQVIEKFGGLHRFMGWERPILTDSGGFQVFSLGAMRKISEEGVRFASPINGDKLFLSPEISMQIQRVLNADVVMQFDECTPYKIGERVATKDEAAKSMQLSLRWGKRSIDEFQREENPNALFGIVQGGMFEDLREESLGALNALGFHGMAIGGLSVGEPKEDMRRILSHIGPKLPAHQPHYLMGVGTPEDLVEGVANGIDMFDCVMPTRNARNGWLFTRFGDIRIRNARYRDDETPLDDSCTCYCCRHFSRAYLHHLDRIGEMLGGRLNTIHNLHYYLQLMQDMRGAIENGRFAQFVTQFQAGRTRGI

SEQ ID NO: 58444 - protein, 265 aa, Oxalobacteraceae bacterium
  misc_feature (1)..(265): tr|A0A4V1TD23|A0A4V1TD23_9BURK Queuine tRNA-ribosyltran sferase (Fragment) OS=Oxalobacteraceae bacterium OX=187 1070 GN=EOO79_07915 PE=3 SV=1
MSRTCRMSFELLATDGKARRGRLTFPRGVVETPAFMPVGTYGTVKGMLPRDIEAIGAQMILGNTFHLWLRPGTAVIKAHGDLHDFMQWKGPILTDSGGFQVFSLGAMRKIKEEGVYFASPVDGSKVFMGPEESMQVQRDLGSDVVMIFDECTPYPADEHTARTSMELSLRWAQRSKDAHGESTAALFGIVQGGMHENLRMRSLEGLDKIGFDGLAIGGLSVGEPKHEMIKVLDYLPGQMPADKPRYLMGVGKPEDLVEGVRRGVD

SEQ ID NO: 58445 - protein, 374 aa, Oxalobacteraceae bacterium
  misc_feature (1)..(374): tr|A0A4Y9RRC4|A0A4Y9RRC4_9BURK Queuine tRNA-ribosyltran sferase OS=Oxalobacteraceae bacterium OM1 OX=2561929 GN =tgt PE=3 SV=1
MKYELIKTDGKARRGRLTLNHGVVETPIFMPVGTYGSVKAMSPLELEEIGAQIILGNTFHLWLRPGLDVVEKFKGLHDFIGWKKPMLTDSGGFQVFSLGAMRKITEEGVKFASPVNGDKLFLSPEISMQIQRVLNSDIVMQFDECTPYEIDGRPATELEAANSMRMSLRWAKRSRDEFDKGENPNALFGIVQGGMFTHLRDESLAGLQDIDFDGIAIGGLSVGEPKEEMLRVLEHVGPRLPADKPHYLMGVGTPEDLVAGVANGVDMFDCVMPTRNARNGWIFTRFGDIKIKNSRYKDDQKPLDESCECYACRNFSRAYLYHLHRVGEILGARLNTIHNLHYYLQLMKEIRQAIDEDRFQAFVVKFQADRARGV

SEQ ID NO: 58446 - protein, 376 aa, Oxobacter pfennigii
  misc_feature (1)..(376): tr|A0A0P8YYW5|A0A0P8YYW5_9CLOT Queuine tRNA-ribosyltran sferase OS=Oxobacter pfennigii OX=36849 GN=tgt PE=3 SV= 1
MDAISYELIKKSNGCDARLGKLHTPHGVIDTPVFMPVGTQATVKAMSPDELKDLGAHIILSNTYHLYMRPGEKLVKKSGGLHKFMNWDRAILTDSGGFQVFSLSNLRDIKEEGVTFKSHIDGSKHFISPEKAIEIQNDLGADIIMCFDECLPYPVEHDYASSSLNRTIRWAVRCKETHKDTERQSLFGIIQGGMFKDLRERSAKEMVALDFPGYSIGGLSIGEPKPIMYDVLDWTVHLLPDNKPRYLMGVGSPDCLIEGAIRGVDMFDCVLPTRIARNGTVFTSQGKLVVRNAEYAEDLRPMDTECDCYACRNYSRAYIRHLFKAKEILGARLTTIHNLHFLIKLMEKIRQAIKDDNLLKLRDEFYAKYGYNRDEI

SEQ ID NO: 58447 - protein, 376 aa, Pacificibacter marinus
  misc_feature (1)..(376): tr|A0A1Y5RSY0|A0A1Y5RSY0_9RHOB Queuine tRNA-ribosyltran sferase OS=Pacificibacter marinus OX=658057 GN=tgt PE=3 SV=1
MTQRISFSLDATDGKARTGVISTPRGDIRTPAFMPVGTAGTVKAMMPESVRATGADILLGNTYHLMLRPTAERIDRLGGLHKFMNWERPILTDSGGFQVMSLAGLRKLTEEGVTFASHVDGSKHVITPERSMEIQKLLGSDIVMCFDECPALPATEEDVAKSMRMSMRWAQRSRDAFGDRPGHALFGIMQGGVTQELREESSQALTDIGFDGYAVGGLAVGEGQEAMFGVLDYAPDYLPQDKPRYLMGVGKPDDIVGAVKRGIDMMDCVLPSRSGRNGQVFTRHGAINIKNARHADDPRPLDENCTCPACSQYSRAYLHHVFRSHEMISGMLLTWHNLHYFQEIMQGMRDAIAAGTFAAWEADFHAVRAAGDIEPL

SEQ ID NO: 58448 - protein, 376 aa, Pacificibacter maritimus
  misc_feature (1)..(376): tr|A0A3N4UW42|A0A3N4UW42_9RHOB Queuine tRNA-ribosyltran sferase OS=Pacificibacter maritimus OX=762213 GN=tgt PE =3 SV=1
MTQRISFSLDATDGKARTGVISTPRGDIRTPAFMPVGTAGTVKAMMPESVRATGADILLGNTYHLMLRPTAERIDRLGGLHKFMNWERPILTDSGGFQVMSLAGLRKLTEEGVTFASHVDGSKHVITPERSMEIQKLLGSDIVMCFDECPALPASDEDVAKSMRMSMRWAQRSKDAFGDRPGHALFGIMQGGVTPDLREESAKALIDIGFDGYALGGLAVGEGQEAMFGVLDYAPDFLPQDKPRYLMGVGKPDDIVGAVKRGVDMMDCVLPSRSGRNGQVFTRRGTLNMKNARHADDPRPMDENCSCPACSQYSRAYLHHVYRSHEMISGMLLTWHNLHYFQDIMQGMRDAIAAGTFDAWEAEFHATRALGDIEPL

SEQ ID NO: 58449 - protein, 380 aa, Pacificimonas flava
  misc_feature (1)..(380): tr|A0A219B1X9|A0A219B1X9_9SPHN Queuine tRNA-ribosyltran sferase OS=Pacificimonas flava OX=1234595 GN=tgt PE=3 S V=1
MAPRFAFELSATDGRARRGTIRMRRGEIRTPAFMPVGTAATVKAMKPQAVRDTGADILLGNTYHLMLRPGDERIARLGGLHEFMKWERPILTDSGGFQVMSLSELTQQSEEGVAFKSHLDGSRHLLSPERSMEIQRNLDSDIVMAFDECTSWPVERDAAAASMHRSMRWAARSRAGFDSGEAHAAGATLFGIQQGSMFEDLRWESSHALQDIGFDGYAVGGLAVGEGQEQMFAVLDYAPELLPRDRPRYLMGVGKPDDLVGAVARGIDMFDCVLPTRSGRTGQAFTHDGPINIKNARFAEDRGPIDGDCRCAVCETFERAYLHHLVRSGEILGAMLMTEHNLSFYQQLMAGMRAAIEEARFGTFAAEFTTRYGRTKNGTG

SEQ ID NO: 58450 - protein, 376 aa, Pacificimonas flava
  misc_feature (1)..(376): tr|M2U3U8|M2U3U8_9SPHN Queuine tRNA-ribosyltransferase OS=Pacificimonas flava OX=1234595 GN=tgt PE=3 SV=1
MTPRFEFDIAASDGAARTGTIRMQRGDIRTPAFMPVGTAATVKAMKPETVRAIGADIILGNTYHLMLRPGDERIARLGGLHAFSRWTRPILTDSGGFQVMSLGDLTEQSEEGVAFKSHLDGSRHMLSPERSMEIQRNLGSDIVMAFDECTAYPVERDVAAASMRRSMRWARRSREGFDSGADHAGRAALFGIQQGSMHEDLRRESSEALMEIGFDGYAVGGLAVGEGQAQMLEVLDFAPGMLPADRPRYLMGVGKPDDIVHAVMRGIDMFDCVLPTRSGRTGQAFTHDGPLNIRNARFKEDVEPLDADCRCSVCGEFSRAYLHHLIRAGEILGAMLMTEHNLAFYQQVMAGLRGAIAGGRAEAHARAFLSRYSGAN

SEQ ID NO: 58451 - protein, 378 aa, Paenalcaligenes hominis
  misc_feature (1)..(378): tr|A0A1U9K1M8|A0A1U9K1M8_9BURK Queuine tRNA-ribosyltran sferase OS=Paenalcaligenes hominis OX=643674 GN=tgt PE= 3 SV=1
MSGLNFQLVKTDGKARRGTITLNHGEVQTPIFMPVGTYGSVKSMLPHELKDIGAQIVLGNTFHLWLRPGTHTMENHGGLHSFMGWDKPILTDSGGFQVFSLKGMRKITEEGVTFASPINGDKLFLTPEESMRIQRSLNSDIAMVFDECTPYLIDGRPATHDEAAQSMRMSLRWAKRSRQAFKDTENPNALFGIVQGGMYEDLRDESLAGLTDIGFEGYAIGGLSVGEPKEDMLRILEHTTPALPEQAPRYLMGVGTPEDLVDGVANGIDMFDCVMPTRNARNGWLFTRFGDVKIRNARYKDDTKPLDPSCSCHTCQHFSRSYLHHLQRANEITGARLNTLHNLHFYLQIMQEMRDAIEAGRFEAWRKQFASDRARGIE

SEQ ID NO: 58452 - protein, 436 aa, Paenarthrobacter aurescens
  misc_feature (1)..(436): tr|A1R2S5|A1R2S5_PAEAT Queuine tRNA-ribosyltransferase OS=Paenarthrobacter aurescens (strain TC1) OX=290340 GN =tgt PE=3 SV=1
MPASSSAPASSPALPGLSQRQSEFSFSVGKRLTETCSPSDSQVDANGGAFLGRTGTITTPHGTIQTPAFIAVGTKATVKAVLPESIAELGAQAVLANAYHLYLQPGPEILDAAGGLGAFMNWSGPTFTDSGGFQVMSLGSGFKKVIDMKNVDSSGPDDAVAPGKERLAHIDDDGVWFKSHLNGDRHRFSPEISMQVQHQIGADIMFAFDELTTLQNSRAYQEESLERTRLWALRCLEEHARLTSSRVGKPYQALFGVIQGAQYEDLRRKACQDLGAMPFDGYGIGGALEKENLGTIVRWCNEELPEDKPRHLLGISEPDDIFTAIENGADTFDCVSPTRVARNSAFYTPFGRFNLSGAKYKTDFGPLQDGCDCYTCVNYSRAYIHHLFKAKEMLSATLISIHNERFVVKMVDDARLAIESGDFFEFKAETLGRYYS

SEQ ID NO: 58453 - protein, 409 aa, Paenarthrobacter aurescens
  misc_feature (1)..(409): tr|A0A4Y3NAM0|A0A4Y3NAM0_PAEAU Queuine tRNA-ribosyltran sferase OS=Paenarthrobacter aurescens OX=43663 GN=tgt P E=3 SV=1
MGTRLTETCSPSDAQVDANGGAFLGRTGTITTPHGTIQTPAFIAVGTKATVKAVLPESIAQLGAQAVLANAYHLYLQPGPEILDAAGGLGAFMNWSGPTFTDSGGFQVMSLGSGFKKVIDMKNVDNSGPDDAVAPGKERLAHIDDDGVWFKSHLNGDRHRFSPEISMQVQHQIGADIMFAFDELTTLQNSRAYQEESLERTRLWALRCLEEHASLTSSRAAKPYQALFGVIQGAQYEDLRRKACQDLGAMPFDGYGIGGALEKENLGTIVRWCNEELPENKPRHLLGISEPDDIFTAIENGADTFDCVSPTRVARNSAFYTPFGRFNLSGARYKTDFGPLQDGCDCYTCVNYSRAYIHHLFKAKEMLSATLISIHNERFVVKMVDDARLAIESGDFFEFKAETLGRYYS

SEQ ID NO: 58454 - protein, 409 aa, Paenarthrobacter nicotinovorans
  misc_feature (1)..(409): tr|A0A318WEN2|A0A318WEN2_PAENI Queuine tRNA-ribosyltran sferase OS=Paenarthrobacter nicotinovorans OX=29320 GN= tgt PE=3 SV=1
MGTRLTETCSPSDAQVDANGGAFLGRTGTITTPHGTIQTPAFIAVGTKATVKAVLPESIAELGAQAVLANAYHLYLQPGPEILDAAGGLGAFMNWSGPTFTDSGGFQVMSLGSGFKKVIDMKNVDSSGPDDAVAPGKERLAHIDDDGVWFKSHLNGDRHRFSPEISMQVQHQIGADIMFAFDELTTLQNSRAYQEESLERTRLWALRCLEEHASLTASRVGKPYQALFGVIQGAQYEDLRRKACQDLGAMPFDGYGIGGALEKENLGTIVRWCNEELPEDKPRHLLGISEPDDIFTAIENGADTFDCVSPTRVARNSAFYTPFGRFNLSGARYKTDFGPLQDGCDCYTCVNYSRAYIHHLFKAKEMISATLISIHNERFVVKMVDDARLAIESGDFFEFKAETLGRYYS

SEQ ID NO: 58455 - protein, 436 aa, Paenarthrobacter nicotinovorans
  misc_feature (1)..(436): tr|A0A175J6C2|A0A175J6C2_PAENI Queuine tRNA-ribosyltran sferase OS=Paenarthrobacter nicotinovorans OX=29320 GN= tgt PE=3 SV=1
MPASVPAPASSPALPGLSDRQSEFSFSVGTRLTETCSPSDAQVDANGGAFLGRTGTITTPHGTIQTPAFIAVGTKATVKAVLPESIAELGAQAVLANAYHLYLQPGPEILDAAGGLGAFMNWSGPTFTDSGGFQVMSLGSGFKKVIDMKNVDSSGPDDAVAPGKERLAHIDDDGVWFKSHLNGDRHRFSPEISMQVQHQIGADIMFAFDELTTLQNSRAYQEESLERTRLWALRCLEEHASLTASRVGKPYQALFGVIQGAQYEDLRRKACQDLGAMPFDGYGIGGALEKENLGTIVRWCNEELPEDKPRHLLGISEPDDIFTAIENGADTFDCVSPTRVARNSAFYTPFGRFNLSGARYKTDFGPLQDGCDCYTCVNYSRAYIHHLFKAKEMISATLISIHNERFVVKMVDDARLAIESGDFFEFKAETLGRYYS

SEQ ID NO: 58456 - protein, 436 aa, Paenarthrobacter nitroguajacolicus
  misc_feature (1)..(436): tr|A0A558H140|A0A558H140_PAENT Queuine tRNA-ribosyltran sferase OS=Paenarthrobacter nitroguajacolicus OX=211146 GN=tgt PE=3 SV=1
MPASSSAPASSPALPGLSHRQSEFSFSVGTRLTETCSPSDAQVDANGGAFLGRTGTITTPHGTIQTPAFIAVGTKATVKAVLPESIAELGAQAVLANAYHLYLQPGPEILDAAGGLGAFMNWSGPTFTDSGGFQVMSLGSGFKKVIDMKNVDSSGPDDAVAPGKERLAHIDDDGVWFKSHLNGDRHRFSPEISMQVQHQIGADIMFAFDELTTLQNSRAYQEESLERTRLWALRCLTEHASLTASRVGKPYQALFGVIQGAQYEDLRRKACQDLGAMPFDGYGIGGALEKENLGTIVRWCNEELPEDKPRHLLGISEPDDIFTAIENGADTFDCVSPTRVARNSAFYTPFGRFNLSGARYKTDFGPLQDGCDCYTCVNYSRAYIHHLFKAKEMISATLISIHNERFVVKMVDDARLAIESGDFFEFKAETLGRYYS

SEQ ID NO: 58457 - protein, 441 aa, Paenarthrobacter ureafaciens
  misc_feature (1)..(441): tr|A0A444GXE7|A0A444GXE7_9MICC Queuine tRNA-ribosyltran sferase OS=Paenarthrobacter ureafaciens OX=37931 GN=tgt PE=3 SV=1
MPASVSQSSPLPTAAPRSNGALPAEQTEFGFTVGRRLTETSSPSSSLVEANGGEFLGRTGTITTPHGTIQTPAFIAVGTKATVKAVLPESIAELGAQAVLANAYHLYLQPGPEILDAAGGLGAFMNWQGPTFTDSGGFQVMSLGSGFKKVIDMKNVDTSGPDDAVAPGKERLAHIDDDGVWFKSHLNGDKHRFSPEISMQVQHQIGADIMFAFDELTTLQNSRGYQEESLERTRLWALRCLEEHFALTASRVGKPYQALFGVIQGAQYEDLRRKACRDLGAMPFDGYGIGGALEKENLGTIVRWCNEELPEDKPRHLLGISEPDDIFTAIENGADTFDCVSPTRVARNSAFYTPFGRFNLSGAKYKKDFGPLQDGCDCYTCTNYSRAYIHHLFKAKEMVSATLISIHNERFVVKMVDDARLAIESGDFFEFKAETLGRYYS

SEQ ID NO: 58458 - protein, 376 aa, Paenibacillaceae bacterium
  misc_feature (1)..(376): tr|A0A2A6DZX4|A0A2A6DZX4_9BACL Queuine tRNA-ribosyltran sferase OS=Paenibacillaceae bacterium JTherm OX=1906605 GN=tgt PE=3 SV=1
MSAIRFELIKTCRQTGARLGRVHTPHGSFETPAFMPVGTQATVKTLSPEELKEMGAEIILSNTYHLFVRPGHELIREAGGLHRFMNWDRPILTDSGGFQVFSLSDRRKIDEEGVEFRSHLNGDRLFLSPEKATEVQNALGADIIMAFDECPPYPADYAYVRASAERTVRWAERCLRAHARPTDQAMFAIVQGGVYPDLRRACAEQLTSLDFPGYAIGGLSVGEPKPIMYEMLEATVPLLPADRPRYLMGVGSPDALIEGAMRGIDMFDCVLPTRIARNGTVMTSKGRLVVRNAEYARDLSPLDPDCDCYACRHYTRAYVRHLLKADEVFGIRLTSYHNLYFLLRLMRRIRQAILEDRLRDFRDEFFAAYAARGEGF

SEQ ID NO: 58459 - protein, 377 aa, Paenibacillaceae bacterium
  misc_feature (1)..(377): tr|A0A1Y3QKK2|A0A1Y3QKK2_9BACL Queuine tRNA-ribosyltran sferase OS=Paenibacillaceae bacterium ZCTH02-B3 OX=1861 638 GN=tgt PE=3 SV=1
MAVRYELIKTCRQTGARLGRLHTPHGVIDTPAFMPVGTQATVKAVSPEELKALGAQIILSNTYHLFIRPGHELIREAGGLHRFMNWDRAILTDSGGFQVFSLADRRKIREEGVEFRSHLDGSLLFLSPEKATEVQNALGADIIMCFDECAPYPADYEYVRESTARTSRWAERCLKAHRRPDDQALFGIVQGGMYPDLRRQSAKDLTSLDFPGYAIGGLSVGEPKPVMYELLETTVPLLPDRKPRYLMGVGSPDALIEGSIRGIDMFDCVLPTRIARNGTVMTSRGRLVIRNAAYERDFGPLDPACDCYTCTHYSRAYIRHLIKADEIFGLRLTTIHNLHFLGSLMARIRQAIREDRLADFRDEFFESYGMARHKSGF

SEQ ID NO: 58460 - protein, 377 aa, Paenibacillus agaridevorans
  misc_feature (1)..(377): tr|A0A2R5EQ76|A0A2R5EQ76_9BACL Queuine tRNA-ribosyltran sferase OS=Paenibacillus agaridevorans OX=171404 GN=tgt PE=3 SV=1
MAVKYEFIKECKQSGARLGRVHTPHGIIDTPTFMPVGTQATVKTMSPEELKDMDAHIILSNTYHLFLRPGHGIVKQAGGLHKFMNWDRPILTDSGGFQVFSLSEMRKITEEGVHFRSHLNGDKLFISPEVAMEIQNALGSDIMMAFDECPPYPAEYEYVKQSTERTSRWAERCLAAHARPQDQALFAIVQGGMHKDLRIQSAKDLTSMDFPGYAIGGLSVGEPKHLMYEVLDYTVPELPADKPRYLMGVGSPDALLEGSIRGIDMFDCVLPTRIARNGTTMTSSGRLVIKNAKFTEDFGPLDPNCSCYTCRNYSRAYIRHLLKADETFGIRLTTYHNLHFLLQLMRDVRQAIMEDRLLDFRDSFFEAYGLNDNDKGF

SEQ ID NO: 58461 - protein, 377 aa, Paenibacillus algorifonticola
  misc_feature (1)..(377): tr|A0A1I2AZ41|A0A1I2AZ41_9BACL Queuine tRNA-ribosyltran sferase OS=Paenibacillus algorifonticola OX=684063 GN=t gt PE=3 SV=1
MAVTYELLKVCKQSGARLGRVHTPHGVIETPAFMPVGTQATVKTMSPEELKTMDAHIILSNTYHLFLRPGHDLIGRAGGLHKFMNWDRPILTDSGGFQVFSLSEMRKITEEGVQFRSHLNGDKMFLSPEKAMEIQNALGSDIMMAFDECPPYPAEHAYVKQSLERTTRWAERCLESHARPHDQGLFAIVQGGMYEDLRIQSAKDLTSMDFPGYAIGGLSVGEPKHLMYQALEYTVPLLPTGKPRYLMGVGSPDALLEGSIRGIDMFDCVLPTRIARNGTTMTSEGRLVIRNAKYAEDFGPLDPKCSCYTCTNYSRAYIRHLMKADETFGMRLTTYHNLHFLLQLMRDVRQAITEDRLLDFRDEFFDSYGLRDNDKGF

SEQ ID NO: 58462 - protein, 378 aa, Paenibacillus alvei
  misc_feature (1)..(378): tr|S9UCG5|S9UCG5_PAEAL Queuine tRNA-ribosyltransferase OS=Paenibacillus alvei TS-15 OX=1117108 GN=tgt PE=3 SV= 1
MAAVTYELIKTCKQTGARLGKVHTPHGSFDTPIFMPVGTLATVKTMSPEELKEMEAKIILSNTYHLFLRPGHEIIREAGGLHKFMNWDRAILTDSGGFQVFSLSDMRKIEEEGVHFRSHLNGDKLFLSPEKAMEIQNALGSDIMMAFDECPPYPAEPQYIKPSLERTTRWAERCLESHARPHDQALFAIIQGGMYEDLRRQSAKDLTSMDFPGYAIGGLSVGEPKHLMYEVLDYTTPLLPANKPRYLMGVGSPDALIEGAMRGVDMFDCVLPTRIARNGTTMTSQGRLVVRNAKYARDFGPLDPKCDCYTCRNYSRAYLRHLIKADETFGLRLTTYHNLYFLVNLMSQVREAIREDRLRDFRDEFFEAYGMDRNESGF

SEQ ID NO: 58463 - protein, 378 aa, Paenibacillus alvei
  misc_feature (1)..(378): tr|K4ZEH7|K4ZEH7_PAEA2 Queuine tRNA-ribosyltransferase OS=Paenibacillus alvei (strain ATCC 6344 / DSM 29 / NBR C 3343 / NCIMB 9371 / NCTC 6352) OX=1206781 GN=tgt PE=3 SV=1
MAAVTYELIKTCKQTGARLGKVHTPHGSFETPIFMPVGTLATVKTMSPEELKEMEAKIILSNTYHLFLRPGHDIIREAGGLHKFMNWDRAILTDSGGFQVFSLSDMRKIEEEGVHFRSHLNGDKLFLSPEKAMEIQNALGSDIMMAFDECPPYPAEREYVKPSLERTTRWAERCLESHTRPHDQALFAIIQGGMYEDLRRQSAKDLTSMDFPGYAIGGLSVGEPKHLMYEVLDYTTPLLPDNKPRYLMGVGSPDALIELAMRGVDMFDCVLPTRIARNGTTMTSQGRLVVRNAKYARDFGPLDPKCDCYTCRNYSRAYLRHLIKADETFGLRLTTYHNLYFLVNLMSQVREAIREDRLRDFRDEFFEAYGMDRNESGF

SEQ ID NO: 58464 - protein, 378 aa, Paenibacillus amylolyticus
  misc_feature (1)..(378): tr|A0A100VPR6|A0A100VPR6_PAEAM Queuine tRNA-ribosyltran sferase OS=Paenibacillus amylolyticus OX=1451 GN=tgt PE =3 SV=1
MAAITYEHIKTCKQSGARLGRVHTPHGIIETPTFMPVGTQATVKTMSPEELKEMDAQIILSNTYHLFLRPGHEIIREAGGLHKFMNWDRPILTDSGGFQVFSLSEMRKITEEGVNFRSHLNGDKKFLSPEVAMEIQNALGSDIMMAFDECPPYPAEYEYVKKSLERTSRWAERCLESHARPHDQGLFAIVQGGMHEDLRRQSAADLTSMDFPGYAIGGLSVGEPKHLMYGVLDYTLPLLPSNKPRYLMGVGSPDALIEGSIRGVDMFDCVLPTRIARNGTTMTSQGRLVVRNAKFATDFGPLDPECDCYTCRNYSRAYLRHLIKADETFGLRLTTIHNLHFLQNLMRNVRKAIMEDRLLDFRDEFFDQYGLHDNDKGF

SEQ ID NO: 58465 - protein, 379 aa, Paenibacillus anaericanus
  misc_feature (1)..(379): tr|A0A433Y4J5|A0A433Y4J5_9BACL Queuine tRNA-ribosyltran sferase OS=Paenibacillus anaericanus OX=170367 GN=tgt P E=3 SV=1
MTAPIRYEHIKTCKQSGARLGRVHTPHGIIETPVFMPVGTQATVKTMSPEELKEMDARIILSNTYHLFLRPGHETIKEAGGLHKFMNWDRAILTDSGGFQVFSLSDMRKISEEGVHFRSHLNGDKMFLSPEVAMEIQNALGPDIMMAFDECAPFPAEYDYVKHSMERTTRWAERCLKSHARPNDQGLFAIVQGGMFEDLRKQSARDLTSLDFPGYAIGGLSVGEPKHLMYEVLDYTVPFLPTDKPRYLMGVGSPDALIEGSIRGIDMFDCVLPTRIARNGTTMTSQGRLVVRNAQYAKDFGPLDPECGCYTCRNYSRAYLRHLIKSDETFGLRLTTYHNLYFLISLMGKIRQAIMDDRLLDFRDEFFEQYGLIGNTKGF

SEQ ID NO: 58466 - protein, 379 aa, Paenibacillus antarcticus
  misc_feature (1)..(379): tr|A0A168JJI0|A0A168JJI0_9BACL Queuine tRNA-ribosyltran sferase OS=Paenibacillus antarcticus OX=253703 GN=tgt P E=3 SV=1
MVAAITYEHIKTCKQSGARLGRVHTPHGIIETPTFMPVGTLATVKTMSPEELKQMDAQIILSNTYHLFLRPGHDIIREAGGLHKFMNWDRPILTDSGGFQVFSLSEMRKITEEGVHFRSHLNGDKLFLSPEVAMEIQNALGSDIMMAFDECPPYPAEYDYLKKSLERTSRWAERCLESHARPNDQGLFAIVQGGMYEDLRKQSARDLTSMDFPGYAIGGLSVGESKKLMYDVLDYTIPLLPSNKPRYLMGVGSPDALIEGSIRGVDMFDCVLPTRIARNGTTMTSEGRVVIRNAKYARDYGPLDPACDCYTCKNYSRAYLRHLIKADETFGLRLTTYHNLHFLLELMRKVRQSIMDDRLLDFRDEFFEQYGLYENLKGF

SEQ ID NO: 58467 - protein, 378 aa, Paenibacillus aquistagni
  misc_feature (1)..(378): tr|A0A1X7I3H9|A0A1X7I3H9_9BACL Queuine tRNA-ribosyltran sferase OS=Paenibacillus aquistagni OX=1852522 GN=tgt P E=3 SV=1
MAAVTYEHIKTCKQTGARLGIVHTPHGSFETPIFMPVGTLATVKTMSPEDLKEMDARIILSNTYHLFLRPGHELVREAGGLHKFMNWDRAILTDSGGFQVFSLSDMRKIEEEGVHFKSHLNGDKLFLSPEKVMEIENALGPDIMMAFDECAPFPADYDYVKHSMERTTRWAERCLEAHARPHDQALFAIVQGGMYADLRKQSAMDLTSMDFPGYAIGGLSVGEPKHLMYEVLDSTMPLLPFNKPRYLMGVGSPDALIEGAIRGVDMFDCVLPTRIARNGTTMTSEGRLVVRNAKFERDFGPLDPNCDCYTCRNYSRAYLRHLIKCDETFGLRLTTYHNLYFLLNLMKQVRQAIRDDRLGDFRDEFFEKYGMDQNKSGF

SEQ ID NO: 58468 - protein, 377 aa, Paenibacillus baekrokdamisoli
  misc_feature (1)..(377): tr|A0A3G9J065|A0A3G9J065_9BACL Queuine tRNA-ribosyltran sferase OS=Paenibacillus baekrokdamisoli OX=1712516 GN= tgt PE=3 SV=1
MAINYELIKTCKQSGARLGRVHTPHGVVETPAFMPVGTQATVKTMSPEELKTMDAQIILSNTYHLFIRPGHEIVKQAGGLHKFMNWDRPILTDSGGFQVFSLSNMRKIKEEGVEFRNHLNGDKLFLSPEKAMEIQNALGSDIMMAFDECAPFPAEYDYVKKSLERTTRWAERCLASHTRPHDQALFAIVQGGMYEDLRRQSALELTSMDFPGYAIGGLSVGEPKDMMYKVLECTVPLLPTTKPRYLMGVGSPDALIDGSIRGIDMFDCVLPTRIARNGTTMTSSGRLNIKNAKFAEDFGPLDSECSCYTCTNYSRAYIRHLIKADETFGLRLTTIHNLHFLLQLMRDVRQAIMDDRLLDFREAFFTKYGLFENNKGF

SEQ ID NO: 58469 - protein, 378 aa, Paenibacillus barcinonensis
  misc_feature (1)..(378): tr|A0A2V4V9P3|A0A2V4V9P3_PAEBA Queuine tRNA-ribosyltran sferase OS=Paenibacillus barcinonensis OX=198119 GN=tgt PE=3 SV=1
MAAITYEHIKTCKQSGARLGRVHTPHGIIETPTFMPVGTQATVKTMSPEELKEMDAQIILSNTYHLFLRPGHEIIRQAGGLHKFMNWDRPILTDSGGFQVFSLSEMRKITEEGVHFRSHLNGDKKFLSPEVAMEIQNALGSDIMMAFDECPPYPAEYEYVKKSLERTTRWAERCLESHARPHDQGLFAIVQGGMHEDLRRQSAADLTSMDFPGYAIGGLSVGEPKHLMYGVLDYTVPLLPSNKPRYLMGVGSPDALIEGSIRGVDMFDCVLPTRIARNGTTMTSQGRLVVRNAKFATDFGPLDPECDCYTCRNYSRAYLRHLIKADETFGLRLTTIHNLHFLQNLMRNVRKAIMEDRLLDFRDEFFDQYGLHDNDKGF

SEQ ID NO: 58470 - protein, 379 aa, Paenibacillus barengoltzii
  misc_feature (1)..(379): tr|R9LR93|R9LR93_9BACL Queuine tRNA-ribosyltransferase OS=Paenibacillus barengoltzii G22 OX=1235795 GN=tgt PE= 3 SV=1
MAAAITYEHIKTCKQSGARLGRVHTPHGSFETPIFMPVGTQATVKTMSPEELKEMDAKIILSNTYHLFLRPGHEIIREAGGLHKFMNWDRAILTDSGGFQVFSLSEMRKITEEGVHFRSHLNGDKLFLSPEVAMEIQNALGSDIMMAFDECPPYPADYEYVKNSLERTTRWAERCLKSHARPQDQGLFAIVQGGMYEDLRKQSARDLTSLDFPGYAIGGLSVGEPKPLMYEVLEYTVPLLPADKPRYLMGVGSPDALIEGAIRGIDMFDCVLPTRIARNGTTMTSQGRLVVRNAQYANDFGPLDPECDCYTCRNYSRAYLRHLIKADETFGLRLTTYHNLHFLINLMGKVRQAIMEDRLLSFRDEFFEQYGLFGNDKGF

SEQ ID NO: 58471 - protein, 377 aa, Paenibacillus beijingensis
  misc_feature (1)..(377): tr|A0A0D5NM61|A0A0D5NM61_9BACL Queuine tRNA-ribosyltran sferase OS=Paenibacillus beijingensis OX=1126833 GN=tgt PE=3 SV=1
MAVKYELIKVCKQSGARLGRLHTPHGIIETPTFMPVGTQATVKTMSPEELKAMDAQIILSNTYHLFLRPGHDLIRRAGGLHRFMNWDRPILTDSGGFQVFSLSEMRKITEEGVQFRSHLNGDKLFLSPEKAMEVQNALGPDIMMAFDECPPYPADYEYVKNSLERTTRWAERCLKAHARPHDQALFAIVQGGMYEDLRRQSALDLTSMDFPGYAIGGLSVGEPKHLMFEMLESTVPLLPSGKPRYLMGVGSPDALIEGSIRGIDMFDCVLPTRIARNGTTMTSGGRLVVRNAQFAEDLGPLDPECSCYTCRNYSRAYIRHLIKADETFGLRLTTYHNLHFLLQLMRDVRQAIMEDRLLDFRDTFFAKYGLHDNDKGF

SEQ ID NO: 58472 - protein, 378 aa, Paenibacillus borealis
  misc_feature (1)..(378): tr|A0A1R0YMU5|A0A1R0YMU5_9BACL Queuine tRNA-ribosyltran sferase OS=Paenibacillus borealis OX=160799 GN=tgt PE=3 SV=1
MAAITYEHIKTCKQSGARLGRVHTPHGVIETPAFMPVGTQATVKTMSPEELKEMDAHIILSNTYHLFLRPGHDIIREAGGLHKFMNWDRPILTDSGGFQVFSLSDMRKITEEGVHFRSHLNGDKKFLSPEVAMEVQNALGSDIMMAFDECPPFPAEYDYVKKSLERTSRWAERCLKSHARPEDQGLFAIVQGGMHEDLRRQSAADLTSMDFPGYAIGGLSVGESKQLMYEVLDYTVPLLPQGKPRYLMGVGSPDALLEGSIRGVDMFDCVLPTRIARNGTTMTSQGRLVVRNAQYARDFGPLDPECSCYTCRNYSRAYLRHLIKADETFGLRLTTYHNLHFLLDLMRKVREAIREDRLLDFRDEFFAQYGLYDNLKGF

SEQ ID NO: 58473 - protein, 378 aa, Paenibacillus borealis
  misc_feature (1)..(378): tr|A0A089LMN8|A0A089LMN8_9BACL Queuine tRNA-ribosyltran sferase OS=Paenibacillus borealis OX=160799 GN=tgt PE=3 SV=1
MAAITYEHIKTCKQSGARLGRVHTPHGIIETPTFMPVGTQATVKTMSPEELKQMNAQIILSNTYHLFLRPGHEIIGEAGGLHKFMNWDRPILTDSGGFQVFSLSDMRKITEEGVHFRSHLNGDKKFLSPEVAMEVQNALGSDIMMAFDECPPYPAEYEYVKKSLERTTRWAERCLKSHARPNDQGLFAIVQGGMHEDLRRQSAADLTSMDFPGYAIGGLSVGESKQLMYEVLDYTVPLLPQGKPRYLMGVGSPDALLEGSIRGIDMFDCVLPTRIARNGTTMTSQGRLVVRNAQYARDFGPLDPECDCYTCRNYSRAYLRHLIKADETFGLRLTTYHNLHFLLELMRKVREAIMEDRLLDFRDEFFAQYGLYDNLKGF

SEQ ID NO: 58474 - protein, 379 aa, Paenibacillus bovis
  misc_feature (1)..(379): tr|A0A172ZLM8|A0A172ZLM8_9BACL Queuine tRNA-ribosyltran sferase OS=Paenibacillus bovis OX=1616788 GN=tgt PE=3 S V=1
MSGPITYEHIKTCKQSGARLGRVHTPHGIIETPAFMPVGTLATVKTMSPEELKEMDAHIILSNTYHLFLRPGHDLIKEAGGLHKFMNWDRPILTDSGGFQVFSLSEMRKITEEGVHFRSHLNGDKLFLSPEVAMEIQNALGSDIMMAFDECPPYPAEYDYVKKSLERTTRWAERCLNSHARPQDQGLFAIVQGGMHEDLRRQSALDLTSMDFPGYAIGGLSVGEPKHLMYEALEYTMPFLPSNKPRYLMGVGSPDALLEGSIRGVDMFDCVLPTRIARNGTTMTSEGRVVVRNAKYARDFGPLDPNCDCYTCRNYSRAYLRHLIKADETFGLRLTTYHNLHFLLNLMKNVRQAIMDDRLLDFRDEFFDQYGLHDNDKGF

SEQ ID NO: 58475 - protein, 377 aa, Paenibacillus catalpae
  misc_feature (1)..(377): tr|A0A1I1YZJ0|A0A1I1YZJ0_9BACL Queuine tRNA-ribosyltran sferase OS=Paenibacillus catalpae OX=1045775 GN=tgt PE= 3 SV=1
MAVKYELIKVCKQSGARLGRVHTPHGVIETPAFMPVGTQATVKTMSPEELKTMDAQIILSNTYHLFLRPGHDIVGRAGGLHKFMNWDRPILTDSGGFQVFSLSDMRKITEEGVQFRSHLNGDKLFLSPEKAMEIQNALGSDIMMAFDECPPYPAEYDYVKQSLERTTRWAERCLNSHARKHDQGLFAIVQGGMYKDLRIQSAKDLTSMDFPGYAIGGLSVGEPKHLMYEVLDYTVPELPTGKPRYLMGVGSPDALIEGSIRGVDMFDCVLPTRIARNGTTMTSQGRLVVRNAKFAEDFGPLDPECSCYTCKNYSRAYIRHLLKADETFGIRLTTYHNLHFLLQLMRDVRQAIMEDRLLDFRDDFFTKYGLFDNDKGF

SEQ ID NO: 58476 - protein, 378 aa, Paenibacillus cellulosilyticus
  misc_feature (1)..(378): tr|A0A2V2YGH3|A0A2V2YGH3_9BACL Queuine tRNA-ribosyltran sferase OS=Paenibacillus cellulosilyticus OX=375489 GN= tgt PE=3 SV=1
MAAVKYELIKVCKQSGARLGRVHTPHGVIETPTFMPVGTQATVKTMSPEELKSMDAQIILSNTYHLFIRPGHEIVRQAGGLHKFMNWDRPILTDSGGFQVFSLANMRKITEEGVTFRSHLNGDKLFISPEVAMEIQNALGPDIMMAFDECPPYPADYEYVKNSLERTTRWAERCLKAHARPDDQALFAIIQGGMYADLRKQSAEQLTAMDFPGYAIGGLSVGESKPLMYEMLDVTVPLMPANKPRYLMGVGSPDALIEGSIRGIDMFDCVLPTRIARNGTTMTSEGRLVIRNAKFADDFGPLDPNCDCYTCRNYSRAYIRHLIKADETFGIRLTTYHNLHFLIQLMKDVRQAIMDDRLLDFRDEFFAKYGLNDNERGF

SEQ ID NO: 58477 - protein, 378 aa, Paenibacillus chitinolyticus
  misc_feature (1)..(378): tr|A0A410X1Y7|A0A410X1Y7_9BACL Queuine tRNA-ribosyltran sferase OS=Paenibacillus chitinolyticus OX=79263 GN=tgt PE=3 SV=1
MAAVTYEHIKTCKQTGARLGRVHTPHGVIETPAFMPVGTQATVKTMSPEELKAMDAHIILSNTYHLFLRPGHELVKKAGGLHKFMNWDRPILTDSGGFQVFSLSDIRKITEEGVQFRSHLNGDKLFISPEKAMEIQNALGSDIMMAFDECPPYPATYEYVKDSLERTTRWAERCLKSHARPGDQGLFAIVQGGMYADLRKQSAEQLTSMDFPGYAIGGLSVGEPKHLMYEMLECTTPLLPTGKPRYLMGVGSPDALIEGAIRGVDMFDCVLPTRIARNGTVMTSAGRLVIRNAKHADDLGPLDPECSCYTCTNYSRAYIRHLIKADETFGIRLTTYHNLHFLLELMRGVRQAIREDRLGDFRDEFFTKYGLHDNDKGF

SEQ ID NO: 58478 - protein, 378 aa, Paenibacillus contaminans
  misc_feature (1)..(378): tr|A0A329MRJ8|A0A329MRJ8_9BACL Queuine tRNA-ribosyltran sferase OS=Paenibacillus contaminans OX=450362 GN=tgt P E=3 SV=1
MAAVTYELLKVCKQSGARLGRVHTPHGVIETPAFMPVGTQATVKTMSPEELKQMDAHIILSNTYHLFLRPGHDLVKRAGGLHKFMNWDRPILTDSGGFQVFSLSDIRKIREEGVEFRSHLNGDKLFISPEKAMEIQNALGSDIMMAFDECAPYPAEYDYVKQSLERTSRWAERCLQSHARPHDQGLFAIVQGGMYADLRKQSAADLTSLDFPGYAIGGLSVGEPKHLMYEVLETTVPLLPGGKPRYLMGVGSPDALVEGSIRGIDMFDCVLPTRIARNGTCMTSEGRLVIRNAKHMEDFGPLDPNCSCYTCTNYSRAYIRHLIKADETFGIRLTTYHNLHFLLELMRGVRQAIREDRLLDFRDEFFDKYGMEANGKGF

SEQ ID NO: 58479 - protein, 379 aa, Paenibacillus crassostreae
  misc_feature (1)..(379): tr|A0A167CH64|A0A167CH64_9BACL Queuine tRNA-ribosyltran sferase OS=Paenibacillus crassostreae OX=1763538 GN=tgt PE=3 SV=1
MTAAITYEHIKTCKQSGARLGRVHTPHGIIETPTFMPVGTLATVKTMSPEELKQMDAQIILSNTYHLFLRPGHDIIREAGGLHKFMNWDRPILTDSGGFQVFSLSEMRKITEEGVHFRSHLNGDKLFLSPEVVMEIQNALGSDIMMAFDECPPYPAEYEYVKKSLERTTRWAERCLESHARSHDQGLFGIVQGGMYEDLRRQSAQDLTSMDFPGYAIGGLSVGESKQLMYDVLDYTVPLLPSNKPRYLMGVGSPDALIEGSIRGIDMFDCVLPTRIARNGTTMTSEGRVVIRNAKYARDFGPLDPACDCYTCKNYSRAYLRHLIKADETFGLRLTTYHNLHFLLDLMRKVRQSIMEDRLLDFRDEFFEQYGLYENLKGF

SEQ ID NO: 58480 - protein, 377 aa, Paenibacillus curdlanolyticus
  misc_feature (1)..(377): tr|E0IDX5|E0IDX5_9BACL Queuine tRNA-ribosyltransferase OS=Paenibacillus curdlanolyticus YK9 OX=717606 GN=tgt P E=3 SV=1
MAVKYELIKVCKQSGARLGRVHTPHGIIETPTFMPVGTQATVKTMSPEELKSMEAQIILSNTYHLFIRPGHEIVRQAGGLHKFMNWDRPILTDSGGFQVFSLANMRKITEEGVTFRSHLNGDKLFISPEVAMEIQNALGSDIMMAFDECPPYPAEYDYVKQSLERTTRWAERCLKAHARPHDQALFAIVQGGMYADLRKMSAEQLTSMDFPGFAIGGLSVGESKPLMYDMLDHTVPLLPAGKPRYLMGVGSPDALIEGSIRGIDMFDCVLPTRIARNGTTMTSEGRLVIRNAKFADDFGPLDPACDCYTCRNYSRAYIRHLIKADETFGIRLTTYHNLHFLLQLMKDVRQAIMDDRLLDFRDEFFARYGLNDNERGF

SEQ ID NO: 58481 - protein, 379 aa, Paenibacillus darwinianus
  misc_feature (1)..(379): tr|A0A015KMD8|A0A015KMD8_9BACL Queuine tRNA-ribosyltran sferase OS=Paenibacillus darwinianus OX=1380763 GN=tgt PE=3 SV=1
MIVAITYELIKVCKQSGARLGRVHTPHGVIETPCFMPVGTQATVKTMSPEELKTMDARIILSNTYHLFLRPGHELIARAGGLHKFMNWDRAILTDSGGFQVFSLSEMRKITEEGVQFRSHLNGDKLFLSPEKAMEIQNALGSDIMMAFDECPPFPAEYGYVKRSIERTSRWAERCLQAHARPEDQGLFAIVQGGEYEDLRKQSATDLTSMDFPGYAIGGLSVGEPKPIMYRVLDYTVPLLPSGKPRYLMGVGSPDALIEGAIRGIDMFDCVLPTRIARNGTTMTSKGRVVVRNAANAEDFGPLDPACNCYTCQNYSRAYIRHLLKADETFGIRLTTYHNLHFLLQLMRDVRQAIMEDRLLDFRDEFFAQYGLNDNDKGF

SEQ ID NO: 58482 - protein, 379 aa, Paenibacillus dendritiformis
  misc_feature (1)..(379): tr|A0A4V3B528|A0A4V3B528_9BACL Queuine tRNA-ribosyltran sferase OS=Paenibacillus dendritiformis OX=130049 GN=tg t PE=3 SV=1
MAAAVTYELIKTCKQTGARLGIVHTPHGSFETPTFMPVGTQATVKTMSPEELKEMSAKIILSNTYHLFLRPGHEIVREAGGLHKFMNWDRAILTDSGGFQVFSLSDMRNIEEEGVHFRSHLNGDKLFISPEKAMEIQNALGSDIMMAFDECAPYPAEHSYVKHSLERTTRWAERCLNSHARPHDQALFAIVQGGMYEDLRIQSAKDLTSMDFPGYAIGGLSVGEPKPLMYVALETTVPLLPDSKPRYLMGVGSPDALVEGSMRGIDMFDCVLPTRIARNGTTMTSQGRLVVRNAKFTRDFGPLDPNCDCYTCRNYSRAYLRHLIKADETFGLRLTTYHNLYFLLNLMRQVREAIREDRLRDFRDEFFEAYGMDRNESGF

SEQ ID NO: 58483 - protein, 379 aa, Paenibacillus dendritiformis; identical to SEQ ID NO: 58482
  misc_feature (1)..(379): tr|H3SNV9|H3SNV9_9BACL Queuine tRNA-ribosyltransferase OS=Paenibacillus dendritiformis C454 OX=1131935 GN=tgt PE=3 SV=1

SEQ ID NO: 58484 - protein, 378 aa, Paenibacillus donghaensis
  misc_feature (1)..(378): tr|A0A2Z2KK61|A0A2Z2KK61_9BACL Queuine tRNA-ribosyltran sferase OS=Paenibacillus donghaensis OX=414771 GN=tgt P E=3 SV=1
MAAITYEHIKTCKQSGARLGRVHTPHGVIETPAFMPVGTLATVKTMSPEELKEMDAHIILSNTYHLFLRPGHDIIREAGGLHKFMNWDRPILTDSGGFQVFSLSEMRKITEEGVHFRSHLNGDKKFLSPEVAMEIQNALGSDIMMAFDECPPYPAEYDYIKKSLERTSRWAERCLKSHARPNDQGLFAIVQGGMHEDLRRQSAADLTSMDFPGYAIGGLSVGESKQLMYEVLDYTLPLLPQGKPRYLMGVGSPDALLEGSIRGVDMFDCVLPTRIARNGTTMTSQGRLVVRNAQYARDFGPLDPECDCYTCRNYSRAYLRHLIKADETFGLRLTTYHNLHFLLELMRKVREAIMEDRLLDFRDEFFAKYGLYDNLKGF

SEQ ID NO: 58485 - protein, 378 aa, Paenibacillus durus
  misc_feature (1)..(378): tr|A0A089IYN5|A0A089IYN5_PAEDU Queuine tRNA-ribosyltran sferase OS=Paenibacillus durus OX=44251 GN=tgt PE=3 SV= 1
MAAITYEHIKTCKQSGARLGRVHTPHGVIETPTFMPVGTQATVKTMSPEELKDMDAQIILSNTYHLFLRPGHDIVREAGGLHKFMNWDRPILTDSGGFQVFSLSEMRKITEEGVHFRSHLNGDKKFLSPEVAMEVQNALGSDIMMAFDECPPYPAEYDYVKKSLERTTRWAERCLKAHARPHDQGLFAIVQGGMFEDLRKQSAAELTSMDFPGYAIGGLSVGESKQLMYEVLDYTVPLLPQDKPRYLMGVGSPDALLEGAIRGVDMFDCVLPTRIARNGTTMTSQGRLVVRNAQYARDFGPLDPECGCYTCRNYSRAYLRHLIKSDETFGLRLTTYHNLYFLLELMRKVRKAIMEDRLLDFRDEFFAQYGLNDNSKGF

SEQ ID NO: 58486 - protein, 378 aa, Paenibacillus durus
  misc_feature (1)..(378): tr|A0A0F7FC11|A0A0F7FC11_PAEDU Queuine tRNA-ribosyltran sferase OS=Paenibacillus durus ATCC 35681 OX=1333534 GN =tgt PE=3 SV=1
MAAITYEHIKTCKQSGARLGRVHTPHGVIETPTFMPVGTQATVKTMSPEELKDMDAQIILSNTYHLFLRPGHDIVREAGGLHKFMNWDRPILTDSGGFQVFSLSEMRKITEEGVHFRSHLNGDKKFLSPEVAIEVQNALGSDIMMAFDECPPYPAEYDYVKKSLERTTRWAERCLKAHARPHDQGLFAIVQGGMFEDLRKQSAAELTSMDFPGYAIGGLSVGESKQLMYEVLDYTVPLLPQDKPRYLMGVGSPDALLEGAIRGVDMFDCVLPTRIARNGTTMTSQGRLVVRNAQYARDFGPLDPECGCYTCRNYSRAYLRHLIKSDETFGLRLTTYHNLYFLLELMRKVRKAIMEDRLLDFRDEFFAQYGLNDNSKGF

SEQ ID NO: 58487 - protein, 379 aa, Paenibacillus elgii
  misc_feature (1)..(379): tr|A0A2T6FZT3|A0A2T6FZT3_9BACL Queuine tRNA-ribosyltran sferase OS=Paenibacillus elgii OX=189691 GN=tgt PE=3 SV =1
MGLAVTYEHIKTCKQSGARLGRVHTPHGVIETPAFMPVGTQATVKTMSPEELKQMDAHIILSNTYHLFLRPGHEIVKKAGGLHRFMNWDRPILTDSGGFQVFSLSEMRKISEEGVQFRSHLNGDKLFISPEKSIEIQNALGSDIMMAFDECPPYPAEHSYAKQSLERTTRWAERCLKAHARPNEQALFAIVQGGMYEDLRKQSALELTSMDFPGYAIGGLSVGEPKHLMYEVLDYTVPYLPTHKPRYLMGVGSPDALVEGSIRGIDMFDCVLPTRIARNGTVMTSEGRLVVRNAKFAEDFGPLDPECSCYTCRNYSRAYIRHLIKADETFGIRLTTYHNLHFLLELMRGVRQAIREDRLLDFRDEFFAKYGIDENSKGF

SEQ ID NO: 58488 - protein, 377 aa, Paenibacillus elgii
  misc_feature (1)..(377): tr|A0A161S8N0|A0A161S8N0_9BACL Queuine tRNA-ribosyltran sferase OS=Paenibacillus elgii OX=189691 GN=tgt PE=3 SV =1
MAVTYEHIKTCKQSGARLGRVHTPHGVIETPAFMPVGTQATVKTMSPEELKQMDAHIILSNTYHLFLRPGHEIVKKAGGLHRFMNWDRPILTDSGGFQVFSLSEMRKISEEGVQFRSHLNGDKLFISPEKSIEIQNALGSDIMMAFDECPPYPAEHSYAKQSLERTTRWAERCLKAHARPNDQALFAIVQGGMYEDLRKQSALELTSMDFPGYAIGGLSVGEPKHLMYEVLGYTVPYLPTHKPRYLMGVGSPDALVEGSIRGIDMFDCVLPTRIARNGTVMTSEGRLVVRNAKFAEDFGPLDPECSCYTCRNYSRAYIRHLIKADETFGIRLTTYHNLHFLLELMRGVRQAIREDRLLDFRDEFFAKYGIDENSKGF

SEQ ID NO: 58489 - protein, 378 aa, Paenibacillus etheri
  misc_feature (1)..(378): tr|A0A0W1B3V9|A0A0W1B3V9_9BACL Queuine tRNA-ribosyltran sferase OS=Paenibacillus etheri OX=1306852 GN=tgt PE=3 SV=1
MAAITYEHIKTCKQSGARLGRVHTPHGVIETPAFMPVGTQATVKTMSPEELKEMDAHIILSNTYHLFLRPGHDIVREAGGLHKFMNWDRPILTDSGGFQVFSLSDMRKITEEGVHFRSHLNGDKKFLSPEVAMEVQNALGSDIMMAFDECPPFPAEYDYVKKSLERTTRWAERCLKSHARPNDQGLFAIVQGGMYEDLRRQSAADLTSMDFPGYAIGGLSVGESKQLMYEVLDYTVPLLPQGKPRYLMGVGSPDALLEGSIRGVDMFDCVLPTRIARNGTTMTSQGRLVVRNAKYARDFGPLDPECNCYTCRNYSRAYLRHLIKADETFGLRLTTYHNLHFLLDLMRKVREAIKEDRLLDFRDEFFTKYGLYDNLKGF

SEQ ID NO: 58490 - protein, 379 aa, Paenibacillus faecis
  misc_feature (1)..(379): tr|A0A5D0CTR8|A0A5D0CTR8_9BACL Queuine tRNA-ribosyltran sferase OS=Paenibacillus faecis OX=862114 GN=tgt PE=3 S V=1
MAAAITYEHIKTCKQSGARLGRVHTPHGSFDTPVFMPVGTQATVKTMSPEELKEMDARIILSNTYHLFLRPGHEIIREAGGLHKFMNWDRAILTDSGGFQVFSLSEMRKITEEGVHFRSHLNGDKLFLSPEVAMEIQNALGSDIMMAFDECPPYPADYEYVKKSLERTSRWAERCLKSHARPHDQGLFAIVQGGMHEDLRKQSAKDLTSLDFPGYAIGGLSVGEPKHLMYEVLDYTVPLLPTDKPRYLMGVGSPDALIEGAIRGVDMFDCVLPTRIARNGTTMTSQGRLVVRNAQYAKDFGPLDPECDCYTCRNYSRAYLRHLIKADETFGLRLTTYHNLHFLIKLMDNVRQAIMDDRLLDFRDEFFEKYGLFGNEKGF

SEQ ID NO: 58491 - protein, 379 aa, Paenibacillus ferrarius
  misc_feature (1)..(379): tr|A0A1V4HA78|A0A1V4HA78_9BACL Queuine tRNA-ribosyltran sferase OS=Paenibacillus ferrarius OX=1469647 GN=tgt PE =3 SV=1
MAAAVTYEPIKTCKQSGARLGKVHTPHGVIETPAFMPVGTQATVKTMSPEELKTMDAQIILSNTYHLFIRPGHDIVKAAGGLHKFMNWDRPILTDSGGFQVFSLSNMRKITEEGVTFKSHLNGDKLFLSPEVAMEIQNALGSDIMMAFDECPPFPAEYDYVKKSLERTTRWAERCLKSHSRPEDQGLFAIIQGGMHEDLRRLSAEQLTSMDFPGYAIGGLSVGEPKHLMYEVLDYTTPLMPANKPRYLMGVGSPDALIEGAIRGIDMFDCVLPTRIARNGTCMTSEGRLVIRNAKHATDFGPLDPKCSCYTCKNYSRAYIRHLIKADETFGIRLTTIHNLHFLLQLMRDVRGAIQEDRLLDFRDEFFASYGLNDNERGF

SEQ ID NO: 58492 - protein, 378 aa, Paenibacillus ginsengarvi
  misc_feature (1)..(378): tr|A0A3B0CFE6|A0A3B0CFE6_9BACL Queuine tRNA-ribosyltran sferase OS=Paenibacillus ginsengarvi OX=400777 GN=tgt P E=3 SV=1
MAAVRYELIKTCKQSGARLGRLHTPHGVIDTPTFMPVGTQATVKTMSPEELKQMDAHIILSNTYHLFLRPGHDIVREAGGLHKFMNWDRPILTDSGGFQVFSLSAMRKITEEGVHFRNHLNGDKLFISPEIAMEIQNALGSDIMMAFDECPPYPATYEYVDQSLERTTRWAERCLASHKRTDDQALFGIVQGGMFADLRKKSASQLTSLDFPGYAIGGLSVGESKELMYEMLECTVPLLPAQKARYLMGVGSPDALLEGSIRGVDMFDCVLPTRIARNGTVMTSGGRLVVKGAKNARDFGPLDPACSCYTCTNYSRAYLRHLLKADETFGIRLTTYHNLHFLLELMRNVRQAIAEDRLLDFRDEFFDRYGMKDNDRGF

SEQ ID NO: 58493 - protein, 379 aa, Paenibacillus glacialis
  misc_feature (1)..(379): tr|A0A168DGU6|A0A168DGU6_9BACL Queuine tRNA-ribosyltran sferase OS=Paenibacillus glacialis OX=494026 GN=tgt PE= 3 SV=1
MVAAITYEHIKTCKQSGARLGRVHTPHGIIETPTFMPVGTLATVKTMSPEELKKMDAQIILSNTYHLFLRPGHEIIREAGGLHKFMNWDRPILTDSGGFQVFSLSEMRKITEEGVHFRSHLNGDKLFLSPEVAMEIQNALGSDIMMAFDECPPYPAEYDYLKKSLERTSRWAERCLESHARSKDQGLFAIVQGGMYEDLRKQSARDLTSMDFPGYAIGGLSVGESKKLMYDVLDYTVPLLPSNKPRYLMGVGSPDALIEGSIRGVDMFDCVLPTRIARNGTTMTSEGRVVIRNAKYARDYGPLDPACDCYTCKNYSRAYLRHLIKADETFGLRLTTYHNLHFLLELMRKVRQSIMDDRLLDFRDEFFEQYGLYENLKGF

SEQ ID NO: 58494 - protein, 379 aa, Paenibacillus glucanolyticus
  misc_feature (1)..(379): tr|A0A163KT62|A0A163KT62_9BACL Queuine tRNA-ribosyltran sferase OS=Paenibacillus glucanolyticus OX=59843 GN=tgt PE=3 SV=1
MAAAVTYEHIKTCKQSGARLGRVHTPHGVIDTPTFMPVGTLATVKTMSPEELKAMDAHIILSNTYHLFLRPGHDIVKEAGGLHKFMNWDRPILTDSGGFQVFSLAEMRKITEEGVHFRSHLNGDKLFISPEVAMEIQNALGSDIMMAFDECPPYPAEYEYVKQSTERTSRWAERCLKSHARPEDQALFAIVQGGMHEDLRRQSARDLTSMDFPGYAIGGLSVGESKQLMYEVLDHTVPLLPNNKPRYLMGVGSPDALIEGSIRGVDMFDCVLPTRIARNGTTMTSQGRLVVRNAQYARDYGPLDPECDCYTCRNYSRAYLRHLIKSDETFGMRLTTYHNLHFLLNLMRGVRQSIMEDRLLDFRDEFFDKYGLHDNKKGF

SEQ ID NO: 58495 - protein, 378 aa, Paenibacillus graminis
  misc_feature (1)..(378): tr|A0A089M9X6|A0A089M9X6_9BACL Queuine tRNA-ribosyltran sferase OS=Paenibacillus graminis OX=189425 GN=tgt PE=3 SV=1
MAAITYEHIKTCKQSGARLGRVHTPHGIIETPAFMPVGTLATVKTMSPEELKQMDAHIILSNTYHLFLRPGHDIIREAGGLHKFMNWDRPILTDSGGFQVFSLSDMRKITEEGVHFRSHLNGDKKFLSPEVAMEVQNALGSDIMMAFDECPPYPAEYDYVKKSLERTTRWAERCLKSHARPEDQGLFAIVQGGMHEDLRRQSAADLTSMDFPGYAIGGLSVGESKQLMYEVLDYTVPLLPQGKPRYLMGVGSPDALLEGSIRGVDMFDCVLPTRIARNGTTMTSQGRLVVRNAQYARDFGPLDPECGCYTCRNYSRAYLRHLIKADETFGLRLTTYHNLYFLLELMRKVREAIREDRLLDFRDEFFAQYGLYDNLKGF

SEQ ID NO: 58496 - protein, 378 aa, Paenibacillus hemerocallicola
  misc_feature (1)..(378): tr|A0A5C4TFR5|A0A5C4TFR5_9BACL Queuine tRNA-ribosyltran sferase OS=Paenibacillus hemerocallicola OX=1172614 GN= tgt PE=3 SV=1
MAAVRYELIKTCKQSGARLGRLHTPHGVIDTPAFMPVGTQATVKTMSPEELKQMDAHIILSNTYHLFLRPGHDIVREAGGLHKFMNWDRPILTDSGGFQVFSLSKLRKITEEGVHFRNHLNGDKLFISPEIAMEIQNALGSDIMMAFDECPPYPADYDYVDKSLERTTRWAERCLQSHARPHDQALFGIVQGGMYADLRKKSAAQLTSMDFPGYAIGGLSVGESKDLMYGMLESTVPILPTGKPRYLMGVGSPDALLEGAIRGVDMFDCVLPTRIARNGTVMTSGGRLVAKGAKLARDYGPLDPQCGCYTCTNYSRAYLRHLLKADETFGIRLTTYHNLYFLLDLMRNVRQAIAEDRLLDYRDEFFDRYGMKDNESGF

SEQ ID NO: 58497 - protein, 377 aa, Paenibacillus herberti
  misc_feature (1)..(377): tr|A0A229P051|A0A229P051_9BACL Queuine tRNA-ribosyltran sferase OS=Paenibacillus herberti OX=1619309 GN=tgt PE= 3 SV=1
MAVTYELIKVCKQSGARLGRVHTPHGVIETPAFMPVGTQATVKTMSPEELKGMDAHIILSNTYHLWLRPGHELIQKAGGLHKFMNWDRPILTDSGGFQVFSLSNMRKIKEEGVEFRSHLNGDRLFLSPEKAMEIQNALGSDIMMAFDECPPYPAEYEYIKNSLERTTRWAERCLKAHARPEDQGLFAIVQGGMHADLRRQSAADLTSLDFPGYAIGGLSVGEPKHLMYEVLEETVPLLPDNKPRYLMGVGSPDALLEGSIRGIDMFDCVLPTRIARNGTTMTSEGRVNIRNAKYAEDFGPLDPKCSCYTCVNYSRAYLRHLIKADETFGIRLTSYHNLHFLLEMMRGVRQAIMEDRLLDFRDEFFTMYGLHDNDKGF

SEQ ID NO: 58498 - protein, 379 aa, Paenibacillus ihbetae
  misc_feature (1)..(379): tr|A0A1B2DXE5|A0A1B2DXE5_9BACL Queuine tRNA-ribosyltran sferase OS=Paenibacillus ihbetae OX=1870820 GN=tgt PE=3 SV=1
MAAAVTYEHIKTCKQSGARLGRVHTPHGVIDTPTFMPVGTLATVKTMSPEELKAMDAHIILSNTYHLFLRPGHEIVKEAGGLHKFMNWDRPILTDSGGFQVFSLAEMRKISEEGVHFRSHLNGDKLFISPEVAMEIQNALGSDIMMAFDECPPYPAEYEYVKQSTERTSRWAERCLQSHARPKDQALFGIVQGGMYEDLRRQSALDLTSMDFPGYAIGGLSVGESKQLMYEVLDYTVPLLPDNKPRYLMGVGSPDALIEGSIRGVDMFDCVLPTRIARNGTTMTSQGRLVVRNAQYARDFGPLDPECDCYTCRNYSRAYLRHLIKSDETFGLRLTTYHNLHFLLDLMRKVRQSIMEDRLLDFRDEFFDKYGLHDNEKGF

SEQ ID NO: 58499 - protein, 378 aa, Paenibacillus illinoisensis
  misc_feature (1)..(378): tr|A0A2W0CBC6|A0A2W0CBC6_9BACL Queuine tRNA-ribosyltran sferase OS=Paenibacillus illinoisensis OX=59845 GN=tgt PE=3 SV=1
MAAITYEHIKTCKQSGARLGRVHTPHGIIETPTFMPVGTQATVKTMSPEELKEMDAQIILSNTYHLFLRPGHEIVRQAGGLHKFMNWDRPILTDSGGFQVFSLSEMRKITEEGVHFRSHLNGDKKFLSPEVAMEVQNALGSDIMMAFDECPPYPAEYEYVKKSLERTSRWAERCLESHARPHDQGLFAIVQGGMHEDLRRQSVADLTSMDFPGYAIGGLSVGEPKHLMYGVLDYTVPLLPSNKPRYLMGVGSPDALIEGSIRGVDMFDCVLPTRIARNGTTMTSQGRLVVRNAKFATDFGPLDPECDCYTCRNYSRAYLRHLIKADETFGLRLTTIHNLHFLQNLMRNVRKAIMEDRLLDFRDEFFDQYGLHDNDKGF

SEQ ID NO: 58500 - protein, 378 aa, Paenibacillus jilunlii
  misc_feature (1)..(378): tr|A0A1G9V590|A0A1G9V590_9BACL Queuine tRNA-ribosyltran sferase OS=Paenibacillus jilunlii OX=682956 GN=tgt PE=3 SV=1
MAAITYEHIKTCKQSGARLGRVHTPHGVIETPAFMPVGTLATVKTMSPEELKQMDAHIILSNTYHLFLRPGHDIIREAGGLHKFMNWDRPILTDSGGFQVFSLSDMRKITEEGVHFRSHLNGDKKFLSPEVAMEVQNALGSDIMMAFDECPPYPAEYDYVKKSLERTTRWAERCLKSHARPEDQGLFAIVQGGMYEDLRRQSAADLTSMDFPGYAIGGLSVGESKQLMYEVLDYTVPLLPQGKPRYLMGVGSPDALLEGSIRGVDMFDCVLPTRIARNGTTMTSQGRLVVRNAQYARDFGPLDPECNCYTCRNYSRAYLRHLIKADETFGLRLTTYHNLHFLLDLMRKVREAIREDRLLDFRDEFFAQYGLYDNLKGF

SEQ ID NO: 58501 - protein, 379 aa, Paenibacillus kribbensis
  misc_feature (1)..(379): tr|A0A222WK12|A0A222WK12_9BACL Queuine tRNA-ribosyltran sferase OS=Paenibacillus kribbensis OX=172713 GN=tgt PE =3 SV=1
MAPAIRYEHIKTCKQSGARLGRVHTPHGVIETPTFMPVGTQATVKTMSPEELKEMDAQIILSNTYHLFLRPGHDIIREAGGLHKFMNWDRPILTDSGGFQVFSLSEMRKISEEGVHFRSHLNGDKKFLSPEVAMEIQNSLGSDIMMAFDECPPFPAEYEYVKKSLERTSRWAERCLEAHARPHDQGLFAIVQGGMHEDLRKQSAADLTSMDFPGYAIGGLSVGEPKHLMYEVLDYTVPLLPTNKPRYLMGVGSPDALIEGSIRGVDMFDCVLPTRIARNGTTMTSQGRLVVRNANFASDFGPLDPACDCYTCRNYSRAYLRHLIKADETFGLRLTTYHNLHFLIQLMRNVRQAIMDDRLLDFRDEFFEQYGLHDNDKGF

SEQ ID NO: 58502 - protein, 379 aa, Paenibacillus lactis
  misc_feature (1)..(379): tr|G4HPV7|G4HPV7_9BACL Queuine tRNA-ribosyltransferase OS=Paenibacillus lactis 154 OX=743719 GN=tgt PE=3 SV=1
MAAAVTYEHIKTCKQSGARLGRVHTPHGVIDTPTFMPVGTLATVKTMSPEELKAMDAHIILSNTYHLFLRPGHEIVKEAGGLHKFMNWDRPILTDSGGFQVFSLAEMRKISEEGVHFRSHLNGDKLFISPEVAMEIQNALGSDIMMAFDECPPYPAEYEYVKQSTERTSRWAERCLQSHARPKDQALFGIVQGGMYEDLRRQSAADLTSMDFPGYAIGGLSVGESKQLMYEVLDYTVPLLPDNKPRYLMGVGSPDALIEGSIRGVDMFDCVLPTRIARNGTTMTSQGRLVVRNAQYARDFGPLDPECDCYTCRNYSRAYLRHLIKSDETFGLRLTTYHNLHFLLDLMRKVRQSIMEDRLLDFRDEFFDKYGLHDNEKGF

SEQ ID NO: 58503 - protein, 378 aa, Paenibacillus larvae
  misc_feature (1)..(378): tr|V9WBT2|V9WBT2_9BACL Queuine tRNA-ribosyltransferase OS=Paenibacillus larvae subsp. larvae DSM 25430 OX=6972 84 GN=tgt PE=3 SV=1
MPAVKYEHIKTCKQSGARLGRVHTPHGVIETPIFMPVGTLATVKTMSPEELKEMNAQIILSNTYHLFLRPGHDIVKAAGGLHKFMNWDRPILTDSGGFQVFSLSDIRKITEEGVAFRSHLNGDKLFISPEKAMEIQNALGSDIMMAFDECAPYPADYEYVKQSMERTTRWAERCLQAHKRPEDQALFGIVQGGMYRDLREESAKQLTSIDFPGYAIGGLSVGEPKHLMYEVLDYTTPLLPTNKPRYLMGVGSPDALIEGSIRGVDMFDCVLPTRIARNGTVMTSSGRLVVRNAKYAEDFGPLDPECSCYTCKHYSRAYIRHLIKADETFGIRLTTYHNLHFLLDLMRQVREAIREDRLLDFRDEFFAKYGLFDNEKGF

SEQ ID NO: 58504 - protein, 378 aa, Paenibacillus larvae; identical to SEQ ID NO: 58503
  misc_feature (1)..(378): tr|A0A1U9YJ89|A0A1U9YJ89_9BACL Queuine tRNA-ribosyltran sferase OS=Paenibacillus larvae subsp. pulvifaciens OX= 1477 GN=tgt PE=3 SV=1

SEQ ID NO: 58505 - protein, 379 aa, Paenibacillus lautus
  misc_feature (1)..(379): tr|A0A385TTW8|A0A385TTW8_PAELA Queuine tRNA-ribosyltran sferase OS=Paenibacillus lautus OX=1401 GN=tgt PE=3 SV= 1
MAAAVTYEHIKTCKQSGARLGRVHTPHGVIDTPTFMPVGTLATVKTMSPEELKAMDAHIILSNTYHLFLRPGHDIVKEAGGLHKFMNWDRPILTDSGGFQVFSLAEMRKISEEGVHFRSHLNGDKLFISPEVAMEIQNALGSDIMMAFDECPPYPAEYEYVKQSTERTSRWAERCLKSHARPEDQALFAIVQGGMHEDLRRQSARDLTSMDFPGYAIGGLSVGESKQLMYEVLDYTVPLLPNNKPRYLMGVGSPDALIEGSIRGVDMFDCVLPTRIARNGTTMTSQGRLVVRNAQYARDYGPLDPECDCYTCRNYSRAYLRHLIKSDETFGLRLTTYHNLHFLINLMRDVRQSIMEDRLLDFRDEFFDKYGLHDNEKGF

SEQ ID NO: 58506 - protein, 379 aa, Paenibacillus lautus
  misc_feature (1)..(379): tr|A0A1R1B7E8|A0A1R1B7E8_PAELA Queuine tRNA-ribosyltran sferase OS=Paenibacillus lautus OX=1401 GN=tgt PE=3 SV= 1
MVAAVTYEHIKTCKQSGARLGRVHTPHGVIDTPTFMPVGTLATVKTMSPEELKAMDAHIILSNTYHLFLRPGHDIVKEAGGLHKFMNWDRPILTDSGGFQVFSLAEMRKISEEGVHFHSHLNGDKLFISPEVAMEIQNALGSDIMMAFDECPPYPAEYEYVKQSTERTSRWAERCLKSHARPEDQALFGIVQGGMHEDLRRQSARDLTSMDFPGYAIGGLSVGESKQLMYEVLDYTVPLLPNNKPRYLMGVGSPDALIEGSIRGVDMFDCVLPTRIARNGTTMTSQGRLVVRNAQYARDYGPLDPECDCYTCRNYSRAYLRHLIKSDETFGLRLTTYHNLHFLLNLMRNVRQSIMEDRLLDFRDEFFDKYGLHDNEKGF

SEQ ID NO: 58507 - protein, 379 aa, Paenibacillus lentus
  misc_feature (1)..(379): tr|A0A3Q8SEL6|A0A3Q8SEL6_9BACL Queuine tRNA-ribosyltran sferase OS=Paenibacillus lentus OX=1338368 GN=tgt PE=3 SV=1
MAAAVTYEHIKTCKQSGARLGRVHTPHGVIETPIFMPVGTQATVKTMSPEELKEMNAQIILSNTYHLFLRPGHEIIREAGGLHKFMNWDRPILTDSGGFQVFSLSEMRKITEEGVHFRSHLNGDKLFLSPEVAMEIQNALGPDIMMAFDECAPYPAEYDYVKKSLERTSRWAERCLKSHARPQDQGLFGIVQGGMFEDLRKQSAKDLTSLDFPGYAIGGLSVGEPKHLMYEVLDYTVPLLPANKPRYLMGVGSPDALIEGSIRGVDMFDCVLPTRIARNGTTMTSQGRLVVRNAQYAKDFGPLDPECDCYTCRNYSRAYLRHLIKSDETFGLRLTTYHNLYFLINLMRQVRQAIMDDRLLDFRDEFFERYGLFGNDKGF

SEQ ID NO: 58508 - protein, 379 aa, Paenibacillus macerans
  misc_feature (1)..(379): tr|A0A090ZIN7|A0A090ZIN7_PAEMA Queuine tRNA-ribosyltran sferase OS=Paenibacillus macerans OX=44252 GN=tgt PE=3 SV=1
MAAAITYEHIKTCKQSGARLGRVHTPHGTFDTPAFMPVGTQATVKTMSPEELKEMDARIILSNTYHLFLRPGHEIIREAGGLHKFMNWDRAILTDSGGFQVFSLAEMRKITEEGVHFRSHLNGDKLFLSPEVAMEIQNALGSDIMMAFDECPPYPAEYDYVKSSTERTSRWAERCLKSHSRPHDQGLFAIVQGGMHEDLRKQSARDLTSLDFPGYAIGGLSVGEPKQLMYEVLEYTVPLLPADKPRYLMGVGSPDALIEGAIRGVDMFDCVLPTRIARNGTTMTSQGRLVVRNAQYANDFGPLDPECDCYTCRNYSRAYLRHLIKADETFGLRLTTYHNLHFLITLMKNVRQAIMEDRLLSFRDEFFEKYGLFGNDKGF

SEQ ID NO: 58509 - protein, 379 aa, Paenibacillus macquariensis; identical to SEQ ID NO: 58466
  misc_feature (1)..(379): tr|A0A168JSC9|A0A168JSC9_9BACL Queuine tRNA-ribosyltran sferase OS=Paenibacillus macquariensis subsp. defensor OX=467974 GN=tgt PE=3 SV=1

SEQ ID NO: 58510 - protein, 379 aa, Paenibacillus macquariensis; identical to SEQ ID NO: 58466
  misc_feature (1)..(379): tr|A0A168BFE3|A0A168BFE3_PAEMC Queuine tRNA-ribosyltran sferase OS=Paenibacillus macquariensis OX=1468 GN=tgt P E=3 SV=1

SEQ ID NO: 58511 - protein, 377 aa, Paenibacillus montanisoli
  misc_feature (1)..(377): tr|A0A328U5P9|A0A328U5P9_9BACL Queuine tRNA-ribosyltran sferase OS=Paenibacillus montanisoli OX=2081970 GN=tgt PE=3 SV=1
MAITYELIKTCKQSGARLGRVHTPHGVIETPAFMPVGTQATVKTVSPEELKTLDAHIILSNTYHLFIRPGHEIVKKAGGLHKFMNWDRPILTDSGGFQVFSLSNMRKIKEEGVEFRSHLSGDKLFLSPEKAMEIQNALGSDIMMAFDECAPYPADYEYVKKSLERTTRWAERCLAAHARPEDQGLFAIIQGGMYEDLRRQSAAELTSMDFPGYAIGGLSVGEPKDLMYNVLDCTVPLMPANKPRYLMGVGSPDALLEGAIRGVDMFDCVLPTRIARNGTTMTSSGRLVIRNAKFMEDFGPLDPECSCYTCTNYSRAYIRHLIKADETFGIRLTTIHNLHFLLELMRGVRGAIMEDRLLDFRNEFFDKYGLNDNDKGF

SEQ ID NO: 58512 - protein, 378 aa, Paenibacillus mucilaginosus
  misc_feature (1)..(378): tr|F8FMX4|F8FMX4_PAEMK Queuine tRNA-ribosyltransferase OS=Paenibacillus mucilaginosus (strain KNP414) OX=10366 73 GN=tgt PE=3 SV=1
MPAVTYEHIKTCKQSGARLGRVHTPHGVIETPAFMPVGTQATVKTMAPEELKAMDAHIILSNTYHLFLRPGHETVKAAGGLHKFMNWDRPILTDSGGFQVFSLSDMRKISEEGVEFRSHLNGDKLFLSPEKAMEIQNALGSDIMMAFDECPPYPAEHSYAKQSLERTTRWAERCLKAHSRPEDQALFAIVQGGMYEDLRKQSAAELTSLDFPGYAIGGLSVGEPKHLMYEVLDYTVPLLPEQKPRYLMGVGSPDALVEGSIRGIDMFDCVLPTRIARNGTIMTSAGRLVIRNAKFANDFGPLDPACSCYTCKNYSRAYIRHLIKADETFGIRLTTYHNLHFLLELMRGVRQAIREDRLLDFRDEFFAAYGIDENSKGF

SEQ ID NO: 58513 - protein, 378 aa, Paenibacillus mucilaginosus; identical to SEQ ID NO: 58512
  misc_feature (1)..(378): tr|H6NQF2|H6NQF2_9BACL Queuine tRNA-ribosyltransferase OS=Paenibacillus mucilaginosus 3016 OX=1116391 GN=tgt P E=3 SV=1

SEQ ID NO: 58514 - protein, 382 aa, Paenibacillus nanensis
  misc_feature (1)..(382): tr|A0A3A1UQM8|A0A3A1UQM8_9BACL Queuine tRNA-ribosyltran sferase OS=Paenibacillus nanensis OX=393251 GN=tgt PE=3 SV=1
MERDEVAVKYELIKQCKQSGARLGRVHTPHGVIETPAFMPVGTQATVKTMSPEELKAMDAHIILSNTYHLFLRPGHELVKKAGGLHKFMNWDRPILTDSGGFQVFSLAEMRKITEEGVHFRSHLNGDKLFLSPEVVMEIENALGPDIMMAFDECPPYPAEYEYVKQSTERTSRWAERCLKAHARPHDQALFAIVQGGMYKDLRIQSAKDLTSMDFPGYAIGGLSVGEPKHLMYEVLDYTVPELPADKPRYLMGVGSPDALVEGAIRGVDMFDCVLPTRIARNGTTMTSQGRLVIRNAKYAEDLGPLDPNCSCYTCQNYSRAYIRHLLKADETFGIRLTTYHNLHFLLQLMRDVRQAIMEDRLLDFRDSFFESYGLHDNDKGF

SEQ ID NO: 58515 - protein, 377 aa, Paenibacillus naphthalenovorans
  misc_feature (1)..(377): tr|A0A0U2VUJ8|A0A0U2VUJ8_9BACL Queuine tRNA-ribosyltran sferase OS=Paenibacillus naphthalenovorans OX=162209 GN =tgt PE=3 SV=1
MAITYEHIKTCKQSGARLGRVHTPHGIVETPAFMPVGTQATVKTMSPEELKEMDAHIVLSNTYHLFLRPGHDIVKAAGGLHRFMNWDRPILTDSGGFQVFSLSEMRKISEEGVQFRSHLNGDKLFISPEKSIEIQNALGADIIMAFDECPPYPADHSYAKQSLERTTRWAERCLKAHSQPEEQGLFAIVQGGMYEDLRKQSAAELTSMDFPGYAIGGLSVGEPKHLMFEVLDYTVPLLPFGKPRYLMGVGSPDALIEGAIRGIDMFDCVLPTRIARNGTVMTSSGRLVIRNAKFAEDFGPLDPECSCYTCRNYSRAYVRHLIKADETFGIRLTTYHNLHFLLELMRGVRQAIREDRLLDFRDEFFARYGIDENSKGF

SEQ ID NO: 58516 - protein, 379 aa, Paenibacillus nuruki
  misc_feature (1)..(379): tr|A0A1E3KYU1|A0A1E3KYU1_9BACL Queuine tRNA-ribosyltran sferase OS=Paenibacillus nuruki OX=1886670 GN=tgt PE=3 SV=1
MAGPITYEHIKTCKQSGARLGRVHTPHGVIETPAFMPVGTQATVKTMSPEELKQMDAHIILSNTYHLFLRPGHDLIRDAGGLHKFMNWDRPILTDSGGFQVFSLSDMRKISEEGVHFKSHLNGDKLFLSPEIAMDIQNSLGSDIMMAFDECPPYPAEYEYVKKSLERTSRWAERCLESHGRPQDQGLFAIVQGGMHEDLRKQSALDLTSMDFPGYAIGGLSVGEPKDLMYQALDFTIPFLPHNKPRYLMGVGSPDALIEGSIRGVDMFDCVLPTRIARNGTTMTSEGRVVVRNAKYARDFGPLDPNCDCYTCRNYSRAYLRHLIKADETFGLRLTTYHNLHFLLNLMKNVRQAIMDDRLLDFKEEFFTQYGLHDNDKGF

SEQ ID NO: 58517 - protein, 378 aa, Paenibacillus odorifer
  misc_feature (1)..(378): tr|A0A1R0X4T2|A0A1R0X4T2_9BACL Queuine tRNA-ribosyltran sferase OS=Paenibacillus odorifer OX=189426 GN=tgt PE=3 SV=1
MAAITYEHIKTCKQSGARLGRVHTPHGVIETPAFMPVGTQATVKTMSPEELKEMDAHIILSNTYHLFLRPGHDIVREAGGLHKFMNWDRPILTDSGGFQVFSLSDMRKITEEGVHFRSHLNGDKKFLSPEVAMEVQNSLGSDIMMAFDECPPFPAEYDYVKKSLERTTRWAERCLKSHARPNDQGLFAIVQGGMYEDLRRQSAADLTSMDFPGYAIGGLSVGESKQLMYEVLDYTVPLLPQGKPRYLMGVGSPDALLEGSIRGVDMFDCVLPTRIARNGTTMTSQGRLVVRNAKYARDFGPLDPECNCYTCRNYSRAYLRHLIKADETFGLRLTTYHNLHFLLDLMRKVREAIKEDRLLDFRDEFFAKYGLYDNLKGF

SEQ ID NO: 58518 - protein, 378 aa, Paenibacillus odorifer
  misc_feature (1)..(378): tr|A0A1R0Y8M4|A0A1R0Y8M4_9BACL Queuine tRNA-ribosyltran sferase OS=Paenibacillus odorifer OX=189426 GN=tgt PE=3 SV=1
MAAITYEHIKTCKQSGARLGRVHTPHGVIETPAFMPVGTQATVKTMSPEELKEMDAHIILSNTYHLFLRPGHDIVREAGGLHKFMNWDRPILTDSGGFQVFSLSDMRKITEEGVHFRSHLNGDKKFLSPEVAMEVQNALGSDIMMAFDECPPFPAEYDYVKKSLERTTRWAERCLKSHARPNDQGLFAIVQGGMYEDLRRQSAADLTSMDFPGYAIGGLSVGESKQLMYEVLDYTVPLLPQGKPRYLMGVGSPDALLEGSIRGVDMFDCVLPTRIARNGTTMTSQGRLVVRNAKYARDFGPLDPECNCYTCRNYSRAYLRHLIKADETFGLRLTTYHNLHFLLDLMRKVREAIKEDRLLDFRDEFFAKYGLYDNLKGF

SEQ ID NO: 58519 - protein, 377 aa, Paenibacillus oryzae
  misc_feature (1)..(377): tr|A0A1A5YJR9|A0A1A5YJR9_9BACL Queuine tRNA-ribosyltran sferase OS=Paenibacillus oryzae OX=1844972 GN=tgt PE=3 SV=1
MAVKYELIKQCKQSGARVGRVHTPHGVIETPAFMPVGTQATVKTMSPEELKAMDAHIILSNTYHLFLRPGHDIVKRAGGLHSFMNWDRPILTDSGGFQVFSLSEMRKITEEGVNFRSHLNGDKLFLSPEVAMEIQNALGSDIMMAFDECPPYPAEYQYVKQSTERTSRWAERCLKSHARPHDQALFAIVQGGMHKDLRIQSAKDLTSMDFPGYAIGGLSVGEPKHLMYEVLDYTVPELPATKPRYLMGVGSPDALVEGAIRGVDMFDCVLPTRIARNGTTMTSQGRLVIRNAKYAEDFGPLDPNCTCYTCSNYSRAYIRHLLKADETFGIRLTTYHNLHFLLQLMRDVRQAIMDDRLLDFRDSFFESYGLHNNDKGF

SEQ ID NO: 58520 - protein, 379 aa, Paenibacillus oryzisoli
  misc_feature (1)..(379): tr|A0A198A954|A0A198A954_9BACL Queuine tRNA-ribosyltran sferase OS=Paenibacillus oryzisoli OX=1850517 GN=tgt PE =3 SV=1
MTAAVTYEPIKTCKQSGARLGRVHTPHGVIETPAFMPVGTQATVKTMSPEELKTMDAQIILSNTYHLFIRPGHEIVKEAGGLHKFMNWDRPILTDSGGFQVFSLSNMRKITEEGVTFKSHLNGDKLFLSPEKAMEIQNALGSDIMMAFDECPPFPAEYDYVKKSLERTTRWAERCLQSHARPQDQGLFAIIQGGMHEDLRKLSAEQLTSMDFPGYAIGGLSVGEPKHLMYEVLDYTTPLMPANKPRYLMGVGSPDALIEGAIRGIDMFDCVLPTRIARNGTCMTSSGRLVIRNAKYATDFGPLDAKCSCYTCTNYSRAYIRHLIKADETFGIRLTTIHNLHFLLQLMREVREAIKEDRLLDFRDTFFAAYGLNDNERGF

SEQ ID NO: 58521 - protein, 378 aa, Paenibacillus pabuli
  misc_feature (1)..(378): tr|A0A327QFZ7|A0A327QFZ7_9BACL Queuine tRNA-ribosyltran sferase OS=Paenibacillus pabuli OX=1472 GN=tgt PE=3 SV= 1
MAAITYEHIKTCKQSGARLGRVHTPHGIIETPTFMPVGTQATVKTMSPEELKEMDAQIILSNTYHLFLRPGHEIIRQAGGLHKFMNWDRPILTDSGGFQVFSLSEMRKITEEGVNFRSHLNGDKKFLSPEVAMEIQNALGSDIMMAFDECPPYPAEYEYVKKSLERTSRWAERCLESHARPNDQGLFAIVQGGMHEDLRRQSAADLTSMDFPGYAIGGLSVGEPKHLMYGVLDYTVPLLPSNKPRYLMGVGSPDALIEGSIRGVDMFDCVLPTRIARNGTTMTSQGRLVVRNAKFATDFGPLDPECDCYTCRNYSRAYLRHLIKADETFGLRLTTIHNLHFLQNLMRNVRKAIMEDRLLDFRDEFFDQYGLHDNDKGF

SEQ ID NO: 58522 - protein, 382 aa, Paenibacillus paeoniae
  misc_feature (1)..(382): tr|A0A371PJW0|A0A371PJW0_9BACL Queuine tRNA-ribosyltran sferase OS=Paenibacillus paeoniae OX=2292705 GN=tgt PE= 3 SV=1
MECDNVAVKYELIKQCKQSGARLGRVHTPHGIIETPTFMPVGTQATVKTMSPEELKSMDAQIILSNTYHLFLRPGHDLIKRAGGLHKFMNWDRPILTDSGGFQVFSLSEMRKITEEGVNFRSHLNGDKLFLSPEVAMEIQNALGPDIMMAFDECPPYPAEYEYIKQSTERTSRWAERCLKAHARPHDQALFAIVQGGMHKDLRIQSAKDLTSMDFPGYAIGGLSVGEPKHLMYEMLDYTLPELPANKPRYLMGVGSPDALVEGAIRGVDMFDCVLPTRIARNGTTMTSGGRLVIRNAKFAEDFGPLDPNCSCYTCQNYSRAYIRHLLKADETFGMRLTTYHNLHFLLQLMRDVRQAIMEDRLLDFRDSFFDAYGLHDNDKGF

SEQ ID NO: 58523 - protein, 377 aa, Paenibacillus pasadenensis
  misc_feature (1)..(377): tr|A0A2N5N973|A0A2N5N973_9BACL Queuine tRNA-ribosyltran sferase OS=Paenibacillus pasadenensis OX=217090 GN=tgt PE=3 SV=1
MAVTYELIKTCKQTGARLGRVHTPHGVIETPAFMPVGTQATVKTMSPEELKQMDAHIILSNTYHLWLRPGHELIAKAGGLHRFMNWDRPILTDSGGFQVFSLSNMRKIREEGVDFRSHLNGDKLFLSPEKAMEIQNALGSDIMMAFDECPPYPAEYDYIKQSLERTTRWAERCLKAHARPGDQGLFAIVQGGMHADLRRQSAADLTSLDFPGYAIGGLSVGEPKHLMYEVLEETVPLLPSNKPRYLMGVGSPDALLDGAIRGIDMFDCVLPTRIARNGTTMTSQGRVNIRNAKYTEDFGPLDPECSCYTCRNYSRAYLRHLIKADETFGIRLTTYHNLHFLLEMMRGVRQAIQDDRLLDFRNEFFTMYGLHDNEKGF

SEQ ID NO: 58524 - protein, 379 aa, Paenibacillus pectinilyticus
  misc_feature (1)..(379): tr|A0A1C1A327|A0A1C1A327_9BACL Queuine tRNA-ribosyltran sferase OS=Paenibacillus pectinilyticus OX=512399 GN=tg t PE=3 SV=1
MTAAVTYEPIKTCKQSGARLGRVHTPHGVIETPAFMPVGTQATVKTMSPEELKTMDAQIILSNTYHLFIRPGHEIVKEAGGLHKFMNWDRPILTDSGGFQVFSLSNMRKITEEGVQFKSHLNGDKLFLSPEKAMEIQNALGSDIMMAFDECPPFPAEYEYVKKSLERTTRWAERCLQSHARPQDQGLFAIIQGGMHEDLRRLSAEQLTSMDFPGYAIGGLSVGEPKHLMYEVLDYTTPLMPANKPRYLMGVGSPDALIEGAIRGIDMFDCVLPTRIARNGTCMTSSGRLVIRNAKYMKDFGPLDDKCSCYTCKNYSRAYIRHLIKADETFGIRLTTIHNLHFLLQLMREVREAIKEDRLLDFRDTFFAAYGLNDNERGF

SEQ ID NO: 58525 - protein, 379 aa, Paenibacillus peoriae
  misc_feature (1)..(379): tr|A0A0K2FCW7|A0A0K2FCW7_9BACL Queuine tRNA-ribosyltran sferase OS=Paenibacillus peoriae OX=59893 GN=tgt PE=3 S V=1
MAPAIRYEHIKTCKQSGARLGRVHTPHGVIETPTFMPVGTQATVKTMSPEELKAMDAQIILSNTYHLFLRPGHDIIREAGGLHKFMNWDRPILTDSGGFQVFSLSEMRKISEEGVHFRSHLNGDKKFLSPEVAMEIQNSLGSDIMMAFDECPPFPAEYEYVKKSLERTSRWAERCLEAHARPHDQGLFAIVQGGMHEDLRKQSAADLTSMDFPGYAIGGLSVGEPKHLMYEVLDYTLPLLPTNKPRYLMGVGSPDALIEGAIRGVDMFDCVLPTRIARNGTTMTSQGRLVVRNAQYASDFGPLDPACDCYTCRNYSRAYLRHLIKADETFGLRLTTYHNLHFLIQLMRNVRQAIMDDRLLDFRDEFFEQYGLHDNDKGF

SEQ ID NO: 58526 - protein, 379 aa, Paenibacillus pini
  misc_feature (1)..(379): tr|W7YGN6|W7YGN6_9BACL Queuine tRNA-ribosyltransferase OS=Paenibacillus pini JCM 16418 OX=1236976 GN=tgt PE=3 SV=1
MAAAVWYEHIKTCKQSGARLGRVHTPHGIIETPTFMPVGTLATVKTMSPEELKAMDAQIILSNTYHLFLRPGHDIIREAGGLHKFMNWDRPILTDSGGFQVFSLSDMRKITEEGVHFRSHLNGDKLFISPEVAMEIQNALGSDIMMAFDECPPYPAEYDYVKKSLERTTRWAERCLNSHARSHDQGLFAIVQGGMYEDLRKQSARDLTSMDFPGYAIGGLSVGESKQIMYDVLDYTVPLLPQDKPRYLMGVGSPDALLEGSIRGVDMFDCVLPTRIARNGTTMTSQGRLVVRNAKFARDFGPLDPECDCYTCQNYSRAYLRHLIKADETFGLRLTTYHNLHFLLNLMKQVRQSIMDDRLLDFRDEFFEKYGLYENKSGF

SEQ ID NO: 58527 - protein, 377 aa, Paenibacillus pinisoli
  misc_feature (1)..(377): tr|A0A3A6PU71|A0A3A6PU71_9BACL Queuine tRNA-ribosyltran sferase OS=Paenibacillus pinisoli OX=1276110 GN=tgt PE= 3 SV=1
MAVKYELIKQCKQSGARLGRVHTPHGIIETPTFMPVGTQATVKTMSPEELKSMDAQIILSNTYHLFLRPGHDLIKRAGGLHKFMNWDRPILTDSGGFQVFSLSEMRKITEEGVHFRSHLNGDKLFLSPEVVMEIENALGPDIMMAFDECPPYPAEYEYIKQSTERTTRWAERCLKAHARPHDQALFGIVQGGMHKDLRIQSARDLTSMDFPGYAIGGLSVGEPKHLMYEVLDYTVPELPANKPRYLMGVGSPDALVEGAIRGVDMFDCVLPTRIARNGTTMTSGGRLVIRNAKFAEDFGPLDPNCSCYTCQNYSRAYIRHLLKADETFGIRLTTYHNLHFLLQLMRDVRQAIMEDRLLDFRDSFFDAYGLHDNDKGF

SEQ ID NO: 58528 - protein, 379 aa, Paenibacillus polymyxa
  misc_feature (1)..(379): tr|A0A4U2P7Y8|A0A4U2P7Y8_PAEPO Queuine tRNA-ribosyltran sferase OS=Paenibacillus polymyxa OX=1406 GN=tgt PE=3 S V=1
MAPAIRYEHIKTCKQSGARLGRVHTPHGVIETPTFMPVGTQATVKTMSPEELKAMDAHIILSNTYHLFLRPGHDIIREAGGLHKFMNWDRPILTDSGGFQVFSLSEMRKISEEGVHFRSHLNGDKKFLSPEVAMEVQNSLGSDIMMAFDECPPFPAEYEYVKKSLERTSRWAERCLEAHARPHDQGLFAIVQGGMHEDLRKQSAADLTSMDFPGYAIGGLSVGEPKHLMYEVLDYTVPLLPTNKPRYLMGVGSPDALIEGSIRGVDMFDCVLPTRIARNGTTMTSQGRLVVRNANYASDFGPLDPACDCYTCRNYSRAYLRHLIKADETFGLRLTTYHNLHFLIQLMRNVRQAIMDDRLLDFRDEFFEQYGLHDNDKGF

SEQ ID NO: 58529 - protein, 379 aa, Paenibacillus polymyxa
  misc_feature (1)..(379): tr|A0A5B8JSS8|A0A5B8JSS8_PAEPO Queuine tRNA-ribosyltran sferase OS=Paenibacillus polymyxa OX=1406 GN=tgt PE=3 S V=1
MAPAIRYEHIKTCKQSGARLGRVHTPHGVIETPTFMPVGTQATVKTMSPEELKAMDAQIILSNTYHLFLRPGHDIIREAGGLHKFMNWDRPILTDSGGFQVFSLSEMRKISEEGVHFRSHLNGDKKFLSPEVAMEVQNSLGSDIMMAFDECPPFPAEYEYVKKSLERTSRWAERCLEAHARPHDQGLFAIVQGGMHEDLRKQSAADLTSMDFPGYAIGGLSVGEPKHLMYEVLDYTVPLLPTNKPRYLMGVGSPDALIEGSIRGVDMFDCVLPTRIARNGTTMTSQGRLVVRNANYASDFGPLDPACDCYTCRNYSRAYLRHLIKADETFGLRLTTYHNLHFLIQLMRNVRQAIMDDRLLDFRDEFFEQYGLHDNDKGF

SEQ ID NO: 58530 - protein, 378 aa, Paenibacillus polysaccharolyticus
  misc_feature (1)..(378): tr|A0A1G5BV13|A0A1G5BV13_9BACL Queuine tRNA-ribosyltran sferase OS=Paenibacillus polysaccharolyticus OX=582692 GN=tgt PE=3 SV=1
MAAITYEHIKTCKQSGARLGRVHTPHGVIETPTFMPVGTQATVKTMSPEELKEMDAQIILSNTYHLFLRPGHEIIRQAGGLHKFMNWDRPILTDSGGFQVFSLSEMRKITEEGVHFRSHLNGDKKFLSPEVAMEIQNALGSDIMMAFDECPPYPAEYEYVKKSLERTTRWAERCIESHARPHDQGLFAIVQGGMHEDLRRQSAADLTSMDFPGYAIGGLSVGEPKHLMYGVLDYTVPLLPSNKPRYLMGVGSPDALIEGSIRGVDMFDCVLPTRIARNGTTMTSQGRLVVRNAKFATDFGPLDPECDCYTCRNYSRAYLRHLIKADETFGLRLTTIHNLHFLQNLMRNVRKAIMEDRLLDFRDEFFDQYGLHDNDKGF

SEQ ID NO: 58531 - protein, 379 aa, Paenibacillus popilliae
  misc_feature (1)..(379): tr|M9L7J4|M9L7J4_PAEPP Queuine tRNA-ribosyltransferase OS=Paenibacillus popilliae ATCC 14706 OX=1212764 GN=tgt PE=3 SV=1
MAAAVTYELMKTCKQTGARLGIVHTPHGSFETPTFMPVGTQATVKTMSPEELKEMNAKIILSNTYHLFLRPGHEIVREAGGLHTFMNWDRAILTDSGGFQVFSLSEMRKIEEEGVHFRSHLNGDKLFISPEKAMEIQNALGPDIMMAFDECAPYPAEHSYVKHSLERTTRWAERCLNSHARPHDQALFAIVQGGMYEDLRIQSAKDLTSMDFPGYAIGGLSVGEPKPLMYEVLETTVPLLPDSKPRYLMGVGSPDALVEGAMRGIDMFDCVLPTRIARNGTTMTSQGRLVVRNAKFTRDFGPLDPNCDCYTCRNYSRAYLRHLIKADETFGLRLTTYHNLYFLLNLMRQVREAIRDDRLRDFRDEFFEAYGMERNESGF

SEQ ID NO: 58532 - protein, 377 aa, Paenibacillus prosopidis
  misc_feature (1)..(377): tr|A0A368VM51|A0A368VM51_9BACL Queuine tRNA-ribosyltran sferase OS=Paenibacillus prosopidis OX=630520 GN=tgt PE =3 SV=1
MAVKYELIKQCKQSGARLGRVHTPHGVIETPAFMPVGTQATVKTMSPEELKTMDAHIILSNTYHLFLRPGHDIVKAAGGLHKFMNWDRPILTDSGGFQVFSLSEMRKITEEGVHFRSHLNGDKKFLSPEVAMEIQNALGSDIMMAFDECPPFPAEHEYVKKSLERTTRWAERCLEAHARPHDQGLFAIVQGGMYKDLRIQSANDLTSMDFPGYAIGGLSVGEPKHLMYEVLDYTVPILPAAKPRYLMGVGSPDALIDGAIRGIDMFDCVLPTRIARNGTTMTSQGRLVIRNAKYAEDFGPLDPECSCYTCTNYSRAYIRHLIKADETFGMRLTTYHNLHFLLQLMRDVRQAILEDRLLDFRDSFFTSYGLFDNEKGF

SEQ ID NO: 58533 - protein, 379 aa, Paenibacillus rhizosphaerae
  misc_feature (1)..(379): tr|A0A1R1DXB3|A0A1R1DXB3_9BACL Queuine tRNA-ribosyltran sferase OS=Paenibacillus rhizosphaerae OX=297318 GN=tgt PE=3 SV=1
MAAAITYEHIKTCKQSGARLGRVHTPHGVIETPIFMPVGTLATVKTMSPEELKEMNAQIILSNTYHLFLRPGHDIIREAGGLHRFMNWDRPILTDSGGFQVFSLSEMRKITEEGVHFRSHLNGDKLFLSPEVAMEIQNALGSDIMMAFDECPPYPAEYDYVKKSLERTTRWAERCLNSHARPHDQGLFAIVQGGMYEDLRKQSARDLTSMDFPGYAIGGLSVGESKQLMYEVLDYTVPLLPDNKPRYLMGVGSPDALIEGSIRGVDMFDCVLPTRIARNGTTMTSQGRLVVRNAQYARDFGPLDPACDCYTCRNYSRAYLRHLIKADETFGLRLTTYHNLHFLINLMKQVRQAIMEDRLLDFRDEFFEQYGLYDNDKGF

SEQ ID NO: 58534 - protein, 378 aa, Paenibacillus rigui
  misc_feature (1)..(378): tr|A0A229UT63|A0A229UT63_9BACL Queuine tRNA-ribosyltran sferase OS=Paenibacillus rigui OX=554312 GN=tgt PE=3 SV =1
MPAVTYEHIKTCKQSGARLGRVHTPHGVIETPAFMPVGTQATVKTMSPEELKAMDAHIILSNTYHLFLRPGHEIVKQAGGLHRFMNWDRPILTDSGGFQVFSLSDMRKISEEGVAFKSHLNGDKLFLSPEKAMEIQNALGSDIMMAFDECPPFPAEHAYAKQSLERTTRWAERCLQSHSRPKEQALFAIIQGGMYEDLRKQSAAELTSMDFPGYAIGGLSVGEPKHLMYEVLEYTVPLMPFNKPRYLMGVGSPDALVEGAIRGIDMFDCVLPTRIARNGTCMTSSGRLVIRNAKYAEDFGPLDPECSCYTCKNYSRAYIRHLLKADETFGIRLTTYHNLHFLLELMRQVRQAIQEDRLLDFRNVFFEKYGLDENGKGF

SEQ ID NO: 58535 - protein, 378 aa, Paenibacillus riograndensis
  misc_feature (1)..(378): tr|A0A0E4HEH0|A0A0E4HEH0_9BACL Queuine tRNA-ribosyltran sferase OS=Paenibacillus riograndensis SBR5 OX=1073571 GN=tgt PE=3 SV=1
MAAITYEHIKTCKQSGARLGRVHTPHGVIETPAFMPVGTLATVKTMSPEELKQMDAHIILSNTYHLFLRPGHDIIREAGGLHKFMNWDRPILTDSGGFQVFSLSDMRKITEEGVHFRSHLNGDKKFLSPEVAMEVQNALGSDIMMAFDECPPYPAEYDYVKKSLERTTRWAERCLKSHARPEDQGLFAIVQGGMYEDLRRQSAADLTSMDFPGYAIGGLSVGESKQLMYEVLDYTVPLLPQGKPRYLMGVGSPDALLEGSIRGVDMFDCVLPTRIARNGTTMTSQGRLVVRNAQYARDFGPLDPECGCYTCRNYSRAYLRHLIKADETFGLRLTTYHNLYFLLELMRKMREAIREDRLLDFRDEFFAQYGLYDNLKGF

SEQ ID NO: 58536 - protein, 378 aa, Paenibacillus riograndensis
  misc_feature (1)..(378): tr|A0A132U0F6|A0A132U0F6_9BACL Queuine tRNA-ribosyltran sferase OS=Paenibacillus riograndensis OX=483937 GN=tgt PE=3 SV=1
MAAITYEHIKTCKQSGARLGRVHTPHGVIETPAFMPVGTLATVKTMSPEELKQMDAHIILSNTYHLFLRPGHDIIREAGGLHKFMNWDRPILTDSGGFQVFSLSDMRKITEEGVHFRSHLNGDKKFLSPEVAMEVQNALGSDIMMAFDECPPYPAEYDYVKKSLERTTRWAERCLKSHARPEDQGLFAIVQGGMYEDLRRQSAADLTSMDFPGYAIGGLSVGESKQLMYEVLDYTVPLLPQGKPRYLMGVGSPDALLEGSIRGVDMFDCVLPTRIARNGTTMTSQGRLVVRNAQYARDFGPLDPECGCYTCRNYSRAYLRHLIKADETFGLRLTTYHNLYFLLELMRKVREAIREDRLLDFRDEFFAQYGLYDNLKGF

SEQ ID NO: 58537 - protein, 378 aa, Paenibacillus sabinae
  misc_feature (1)..(378): tr|X4ZMR1|X4ZMR1_9BACL Queuine tRNA-ribosyltransferase OS=Paenibacillus sabinae T27 OX=1268072 GN=tgt PE=3 SV= 1
MAAITYEHIKTCKQSGARLGRVHTPHGVIETPTFMPVGTQATVKTMSPEELKEMDAQIILSNTYHLFLRPGHDIVREAGGLHKFMNWDRPILTDSGGFQVFSLSEMRKITEEGVHFRSHLNGDKKFLSPEVAMEIQNALGSDIMMAFDECPPYPAEYDYVKKSLERTTRWAERCLKSHARPHDQGLFAIVQGGMYEDLRRQSAAELTSMDFPGYAIGGLSVGESKQIMYEVLDYTVPLLPQDKPRYLMGVGSPDALVEGAIRGVDMFDCVLPTRIARNGTTMTSQGRLVVRNAQYARDFGPLDPECGCYTCRNYSRAYLRHLIKSDETFGLRLTTYHNLYFLLELMRKVRKAIMEDRLLDFRDEFFAQYGLHENSKGF

SEQ ID NO: 58538 - protein, 378 aa, Paenibacillus selenitireducens
  misc_feature (1)..(378): tr|A0A1T2XKH3|A0A1T2XKH3_9BACL Queuine tRNA-ribosyltran sferase OS=Paenibacillus selenitireducens OX=1324314 GN =tgt PE=3 SV=1
MAAITYEHIKTCKQSGARLGRVHTPHGVIETPTFMPVGTQASVKTMSPEELKQMDAHIILSNTYHLFLRPGHDIVREAGGLHKFMNWDRPILTDSGGFQVFSLSEMRKITEEGVNFRSHLNGDKLFLSPEVAMEIQNALGSDIMMAFDECAPFPAEHAYVKHSLERTSRWAERCLKSHARPEDQGLFAIVQGGMYEDLRRQSAADLTSLDFPGYAIGGLSVGEPKHLMYEVLDYTVPLLPTNKPRYLMGVGSPDALVEGSIRGVDMFDCVLPTRIARNGTTMTSQGRLVVRNAKYARDFGPLDPNCDCYTCKNYSRAYLRHLIKADETFGLRLTTYHNLHFLIQLMRNVRQAIREDRLLDFRDEFFEQYGMKDNESGF

SEQ ID NO: 58539 - protein, 378 aa, Paenibacillus silvae
  misc_feature (1)..(378): tr|A0A2W6NQL0|A0A2W6NQL0_9BACL Queuine tRNA-ribosyltran sferase OS=Paenibacillus silvae OX=1325358 GN=tgt PE=3 SV=1
MAAITYEHIKTCKQSGARLGRVHTPHGVIETPTFMPVGTQATVKTMSPEELKEMDAQIILSNTYHLFLRPGHEIIRQAGGLHKFMNWDRPILTDSGGFQVFSLSEMRKITEEGVHFRSHLNGDKKFLSPEVAMEIQNALGSDIMMAFDECPPYPAEYEYVKKSLERTSRWAERCLESHARPHDQGLFAIVQGGMHEDLRRQSAADLTSMDFPGYAIGGLSVGEPKHLMYGVLDYTVPLLPANKPRYLMGVGSPDALIEGSIRGVDMFDCVLPTRIARNGTTMTSQGRLVVRNAKFATDFGPLDPECDCYTCRNYSRAYLRHLIKADETFGLRLTTIHNLHFLQNLMRNVRKAIMEDRLLDFRDEFFDQYGLHDNDKGF

SEQ ID NO: 58540 - protein, 379 aa, Paenibacillus solani
  misc_feature (1)..(379): tr|A0A0M1P2E7|A0A0M1P2E7_9BACL Queuine tRNA-ribosyltran sferase OS=Paenibacillus solani OX=1705565 GN=tgt PE=3 SV=1
MAAAVTYEHIKTCKQSGARLGRVHTPHGVIETPTFMPVGTLATVKTMSPEELKSMDAQIILSNTYHLFLRPGHDIVKEAGGLHKFMNWDRPILTDSGGFQVFSLAEMRKISEEGVHFRSHLNGDKLFISPEVAMEIQNALGSDIMMAFDECPPYPAEYEYVKQSTERTSRWAERCLKSHARPEDQALFAIVQGGMHEDLRRQSARDLTSMDFPGYAIGGLSVGESKQLMYEVLDYTVPLLPNNKPRYLMGVGSPDALIEGSIRGVDMFDCVLPTRIARNGTTMTSQGRLVVRNAQYARDYGPLDPECDCYTCRNYSRAYLRHLIKSDETFGLRLTTYHNLHFLLNLMRNVRQSIMEDRLLDFRDEFFDKYGLHDNKKGF

SEQ ID NO: 58541 - protein, 378 aa, Paenibacillus sophorae
  misc_feature (1)..(378): tr|A0A1H8REZ3|A0A1H8REZ3_9BACL Queuine tRNA-ribosyltran sferase OS=Paenibacillus sophorae OX=1333845 GN=tgt PE= 3 SV=1
MAAITYEHIKTCKQSGARLGRVHTPHGVIETPTFMPVGTQATVKTMSPEELKDMDAQIILSNTYHLFLRPGHDIVREAGGLHKFMNWDRPILTDSGGFQVFSLSEMRKITEEGVHFRSHLNGDKKFLSPEVAMEVQNALGSDIMMAFDECPPYPAEYDYVKRSLERTTRWAERCLKAHARPHDQGLFAIVQGGMFEDLRRQSAAELTSMDFPGYAIGGLSVGESKQIMYEVLDYTVPLLPQDKPRYLMGVGSPDALVEGAIRGVDMFDCVLPTRIARNGTTMTSQGRLVVRNAQYARDFGPLDPECGCYTCRNYSRAYLRHLIKSDETFGLRLTTYHNLYFLLELMRKVRKAIMEDRLLDFRDEFFAQYGLHENSKGF

SEQ ID NO: 58542 - protein, 378 aa, Paenibacillus sp.
  misc_feature (1)..(378): tr|A0A089I709|A0A089I709_9BACL Queuine tRNA-ribosyltran sferase OS=Paenibacillus sp. FSL H7-0357 OX=1536774 GN= tgt PE=3 SV=1
MAAITYEHIKTCKQSGARLGRVHTPHGVIETPAFMPVGTQATVKTMSPEELKEMDAHIILSNTYHLFLRPGHDIIREAGGLHKFMNWDRPILTDSGGFQVFSLSDMRKITEEGVHFRSHLNGDKKFLSPEVAMEIQNALGSDIMMAFDECPPFPAEYDYVKKSLERTSRWAERCLKSHARPEDQGLFAIVQGGMHEDLRRQSAADLTSMDFPGYAIGGLSVGESKQLMYEVLDYTVPLLPQGKPRYLMGVGSPDALLEGSIRGVDMFDCVLPTRIARNGTTMTSQGRLVVRNAQYARDFGPLDPECSCYTCRNYSRAYLRHLIKADETFGLRLTTYHNLHFLLDLMRKVREAIREDRLLDFRDEFFAQYGLYDNLKGF

SEQ ID NO: 58543 - protein, 378 aa, Paenibacillus sp.
  misc_feature (1)..(378): tr|A0A1R0ZU39|A0A1R0ZU39_9BACL Queuine tRNA-ribosyltran sferase OS=Paenibacillus sp. FSL A5-0031 OX=1920420 GN= tgt PE=3 SV=1
MVAVKYELIKQCKQSGARLGRVHTPHGVIETPTFMPVGTQATVKTMAPEELKAMDAQIILSNTYHLFLRPGHDIVRNAGGLHKFMNWDRPILTDSGGFQVFSLSEMRKITEEGVHFRSHLNGDKKFLSPEVAMEIQNALGSDIMMAFDECPPFPAEHDYVKKSLERTTRWAERCLKAHARPHDQGLFAIVQGGMYKDLRIQSANDLTSMDFPGYAIGGLSVGEPKHLMYDVLDYTVPILPANKPRYLMGVGSPDALIEGSIRGIDMFDCVLPTRIARNGTTMTSQGRLVIRNAKYAEDYGPLDPECSCYTCTNYSRAYIRHLIKADETFGMRLTTYHNLHFLLQLMRDVRQAIMDDRLLDFRDSFFTSYGLFDNEKGF

SEQ ID NO: 58544 - protein, 378 aa, Paenibacillus spiritus
  misc_feature (1)..(378): tr|A0A5J5GJN6|A0A5J5GJN6_9BACL tRNA guanosine(34) trans glycosylase Tgt OS=Paenibacillus spiritus OX=2496557 GN =tgt PE=4 SV=1
MAAITYEHIKTCKQSGARLGRVHTPHGVIETPCFMPVGTQATVKTMSPEELKAMDAHIILSNTYHLFLRPGHEIVREAGGLHKFMNWDRPILTDSGGFQVFSLAEMRKISEEGVHFRSHLNGDKLFLSPEVAMEIQNALGSDIMMAFDECPPYPAEYEYVKKSTERTSRWAERCLNAHGRKEDQGLFAIVQGGMYEDLRRQSAADLTSMDFPGYAIGGLSVGESKELMYEVLDYTVPLLPENKPRYLMGVGSPDALLEGAIRGVDMFDCVLPTRIARNGTTMTSQGRLVVRNAQYARDFGPLDPECDCYTCRNYSRAYLRHLIKADETFGLRLTTYHNLHFLLNLMRQVRQAIMEDRLLDFRDEFFAQYGLNDNPKGF

SEQ ID NO: 58545 - protein, 378 aa, Paenibacillus stellifer
  misc_feature (1)..(378): tr|A0A089M0T4|A0A089M0T4_9BACL Queuine tRNA-ribosyltran sferase OS=Paenibacillus stellifer OX=169760 GN=tgt PE= 3 SV=1
MAAITYEHIKTCKQSGARLGRVHTPHGIIETPTFMPVGTQATVKTMSPEELKEMDAQIILSNTYHLFLRPGHDIVREAGGLHKFMNWDRPILTDSGGFQVFSLAEMRKITEEGVHFRSHLNGDKKFLSPEVAMEVENALGSDIMMAFDECPPYPAEYDYVKRSMERTTRWAERCLKAHARPNDQGLFAIVQGGMYEDLRRQSAADLTSMDFPGYAIGGLSVGESKQLMYEVLDYTVPLLPQNKPRYLMGVGSPDALLEGAIRGVDMFDCVLPTRIARNGTTMTSQGRLVVRNAQYARDFGPLDPECDCYTCRNYSRAYLRHLIKSDETFGLRLTTYHNLYFLLDLMRKVRKAIMEDRLLDFRDEFFAQYGLHENTKGF

SEQ ID NO: 58546 - protein, 378 aa, Paenibacillus swuensis
  misc_feature (1)..(378): tr|A0A172TJG6|A0A172TJG6_9BACL Queuine tRNA-ribosyltran sferase OS=Paenibacillus swuensis OX=1178515 GN=tgt PE= 3 SV=1
MAAVTYEHIKTCKQSGARLGRVHTPHGIIETPTFMPVGTQATVKTMSPEELKEMDAHIILSNTYHLFLRPGHDLIKEAGGLHKFMNWDRPILTDSGGFQVFSLSDMRKITEEGVSFKSHLNGDKLFISPEVAMEIQNALGSDIMMAFDECPPFPAEKEYVRKSTERTSRWAERCLESHARPDDQALFAIVQGGMHEDLRKQSALDLTSMDFPGYAIGGLSVGEPKHLMYEVLEHTVPLLPANKPRYLMGVGSPDALIDGAIRGIDMFDCVLPTRIARNGTTMTSSGRLVVRNAQYARDFGPLDPKCDCYTCRNYSRAYLRHLIKADETFGLRLTTYHNLHFLLNLMRNVRQAIREDRLLDFREEFFTEYGLHDNDKGF

SEQ ID NO: 58547 - protein, 378 aa, Paenibacillus taichungensis; identical to SEQ ID NO: 58521
  misc_feature (1)..(378): tr|A0A2V3RJB4|A0A2V3RJB4_9BACL Queuine tRNA-ribosyltran sferase OS=Paenibacillus taichungensis OX=484184 GN=tgt PE=3 SV=1

SEQ ID NO: 58548 - protein, 377 aa, Paenibacillus taihuensis
  misc_feature (1)..(377): tr|A0A3D9QVT4|A0A3D9QVT4_9BACL Queuine tRNA-ribosyltran sferase OS=Paenibacillus taihuensis OX=1156355 GN=tgt P E=3 SV=1
MAITYELIKTCKQTGARLGRVHTPHGVIETPTFMPVGTQATVKTVSPEELKTLDAHIILSNTYHLFIRPGHEIVRQAGGLHKFMNWDRPILTDSGGFQVFSLSNMRKINEEGVEFRNHLNGDKLFISPEKAMEIQNALGSDIMMAFDECAPYPAEYDYVKKSLERTTRWAERCLAAHARPETQALFAIVQGGMYEDLRRQSALELTSMDFPGYAIGGLSVGEPKDLMYNVLDCTVPLLPTNKPRYLMGVGSPDALLDGAIRGVDMFDCVLPTRIARNGTTMTSQGRLVIRNAKFADDFGPLDPECSCYTCTNYSRAYIRHLIKADETFGIRLTTIHNLHFLLELMRNVRKAIMEDRLLDFRNEFFETYGLNENSKGF

SEQ ID NO: 58549 - protein, 379 aa, Paenibacillus terrae
  misc_feature (1)..(379): tr|G7VTC5|G7VTC5_PAETH Queuine tRNA-ribosyltransferase OS=Paenibacillus terrae (strain HPL-003) OX=985665 GN=t gt PE=3 SV=1
MAPAIRYEHIKTCKQSGARLGRVHTPHGVIETPTFMPVGTQATVKTMSPEELKEMDAQIILSNTYHLFLRPGHDIIREAGGLHKFMNWDRPILTDSGGFQVFSLSEMRKITEEGVHFRSHLNGDKKFLSPEVAMEIQNSLGSDIMMAFDECPPFPAEYEYVKKSLERTSRWAERCLEAHARPHDQGLFAIVQGGMHEDLRKQSAADLTSMDFPGYAIGGLSVGEPKHLMYEVLDYTLPLLPTNKPRYLMGVGSPDALIEGAIRGVDMFDCVLPTRIARNGTTMTSQGRLVVRNAQYARDFGPLDPACDCYTCRNYSRAYLRHLIKADETFGLRLTTYHNLHFLIQLMRNVRQAIMDDRLLDFRDEFFEQYGLHDNDKGF

SEQ ID NO: 58550 - protein, 379 aa, Paenibacillus terrae
  misc_feature (1)..(379): tr|A0A4U2PUR8|A0A4U2PUR8_9BACL Queuine tRNA-ribosyltran sferase OS=Paenibacillus terrae OX=159743 GN=tgt PE=3 S V=1
MAPAIRYEHIKTCKQSGARLGRVHTPHGVIETPTFMPVGTQATVKTMSPEELKEMDAQIILSNTYHLFLRPGHDIIREAGGLHKFMNWDRPILTDSGGFQVFSLSEMRKITEEGVHFRSHLNGDKKFLSPEVAMEIQNSLGSDIMMAFDECPPFPAEYEYVKKSLERTSRWAERCLEAHARPHDQGLFAIIQGGMHEDLRKQSAADLTSMDFPGYAIGGLSVGEPKHLMYEVLDYTLPLLPTNKPRYLMGVGSPDALIEGAIRGVDMFDCVLPTRIARNGTTMTSQGRLVVRNAQYARDFGPLDPACDCYTCRNYSRAYLRHLIKADETFGLRLTTYHNLHFLIQLMRNVRQAIMDDRLLDFRDEFFEQYGLHDNDKGF

SEQ ID NO: 58551 - protein, 382 aa, Paenibacillus thermophilus
  misc_feature (1)..(382): tr|A0A388NBS2|A0A388NBS2_9BACL Queuine tRNA-ribosyltran sferase OS=Paenibacillus thermophilus OX=1181891 GN=tgt PE=3 SV=1
MIRVAAAITYEHIKTCKQSGARLGRVHTPHGTFDTPTFMPVGTQATVKTMSPEELKEMDARIILSNTYHLFLRPGHEIIREAGGLHKFMNWDRAILTDSGGFQVFSLAEMRKITEEGVHFRSHLNGDKLFLSPEVAMEIQNALGSDIMMAFDECPPYPAEYDYVKSSTERTSRWAERCLKSHSRPHDQGLFAIVQGGMHEDLRKQSARDLTSLDFPGYAIGGLSVGEPKQLMYEVLEYTVPLLPADKPRYLMGVGSPDALIEGAIRGVDMFDCVLPTRIARNGTTMTSQGRLVVRNAQYANDFGPLDPECDCYTCRNYSRAYLRHLIKADETFGLRLTTYHNLHFLITLMKNVRQAIMEDRLLSFRDEFFEKYGLFGNDKGF

SEQ ID NO: 58552 - protein, 379 aa, Paenibacillus thiaminolyticus
  misc_feature (1)..(379): tr|A0A378X8X2|A0A378X8X2_PANTH Queuine tRNA-ribosyltran sferase OS=Paenibacillus thiaminolyticus OX=49283 GN=tg t PE=3 SV=1
MAAAVTYELIKTCKQTGARLGIVHTPHGSFETPTFMPVGTQATVKTMSPEELKEMNAKIILSNTYHLFLRPGHEIVREAGGLHKFMNWDRAILTDSGGFQVFSLSEMRKIEEEGVHFRSHLNGDKLFISPEKAMEIQNALGSDIMMAFDECAPYPAEHSYVKHSLERTTRWAERCLNSHARPHDQALFAIIQGGMYEDLRIQSAKDLTSMDFPGYAIGGLSVGEPKPLMYEVLETTVPLLPDSKPRYLMGVGSPDALVEGSMRGIDMFDCVLPTRIARNGTTMTSQGRLVVRNAKFTRDFGPLDPNCDCYTCRNYSRAYLRHLIKADETFGLRLTTYHNLYFLLNLMRQVREAIREDRLRDFRDEFFEAYGMDRNESGF

SEQ ID NO: 58553 - protein, 379 aa, Paenibacillus thiaminolyticus
  misc_feature (1)..(379): tr|A0A515LYS4|A0A515LYS4_PANTH Queuine tRNA-ribosyltran sferase OS=Paenibacillus thiaminolyticus OX=49283 GN=tg t PE=3 SV=1
MAAAVTYELIKTCKQTGARLGIVHTPHGSFETPTFMPVGTQATVKTMSPEELKEMNAKIILSNTYHLFLRPGHEIVREAGGLHKFMNWDRAILTDSGGFQVFSLSDMRKIEEEGVHFRSHLNGDKLFISPEKAMEIQNALGSDIMMAFDECAPYPAEHSYVKHSLERTTRWAERCLNSHARPHDQALFAIVQGGMYEDLRIQSAKDLTSMDFPGYAIGGLSVGEPKPLMYEVLETTVPLLPDSKPRYLMGVGSPDALVEGSMRGIDMFDCVLPTRIARNGTTMTSQGRLVVRNAKFTRDFGPLDPNCDCYTCRNYSRAYLRHLIKADETFGLRLTTYHNLYFLLNLMRQVREAIREDRLRDFRDEFFEAYGMDRNESGF

SEQ ID NO: 58554 - protein, 380 aa, Paenibacillus tianmuensis
  misc_feature (1)..(380): tr|A0A1G4QMS6|A0A1G4QMS6_9BACL Queuine tRNA-ribosyltran sferase OS=Paenibacillus tianmuensis OX=624147 GN=tgt P E=3 SV=1
MIGLAVTYEHIKTCKQSGARLGRVHTPHGVIETPAFMPVGTQATVKTMSPEELKQMDAHIILSNTYHLFLRPGHEIVKKAGGLHRFMNWDRPILTDSGGFQVFSLSEMRKISEEGVQFRSHLNGDKLFISPEKAIEIQNALGSDIMMAFDECPPYPAEHSYVKQSLERTTRWAERCLKAHARPNEQAIFAIVQGGMFEDLRKQSALELTSMDFPGYAIGGLSVGEPKPLMYEVLDYTVPYLPAHKPRYLMGVGSPDALVEGSIRGIDMFDCVLPTRIARNGTVMTSEGRLVVRNAKFAEDFGPLDPECSCYTCRHYSRAYIRHLIKADESFGIRLTTYHNLHFLLELMRGVRQAIREDRLLDFRDEFFAKYGIDENSKGF

SEQ ID NO: 58555 - protein, 378 aa, Paenibacillus typhae
  misc_feature (1)..(378): tr|A0A1G8IC21|A0A1G8IC21_9BACL Queuine tRNA-ribosyltran sferase OS=Paenibacillus typhae OX=1174501 GN=tgt PE=3 SV=1
MAAITYEHIKTCKQSGARLGRVHTPHGIIETPTFMPVGTQATVKTMAPEELKQMDAQIILSNTYHLFLRPGHDIVREAGGLHKFMNWDRPILTDSGGFQVFSLSDMRKITEEGVHFRSHLNGDKKFLSPEVAMEVQNALGSDIMMAFDECPPYPAEYDYVKKSLERTTRWAERCLKAHARPEDQGLFAIVQGGMYEDLRRQSAADLTSMDFPGYAIGGLSVGESKQIMYDVLDYTVPLLPQNKPRYLMGVGSPDALLEGAIRGVDMFDCVLPTRIARNGTTMTSQGRLVVRNAQYARDFGPLDPECNCYTCRNYSRAYLRHLIKADETFGLRLTTYHNLQFLLDLMRKVREAIREDRLLDFRDEFFAQYGLYDNLKGF

SEQ ID NO: 58556 - protein, 377 aa, Paenibacillus tyrfis
  misc_feature (1)..(377): tr|A0A081NWV4|A0A081NWV4_9BACL Queuine tRNA-ribosyltran sferase OS=Paenibacillus tyrfis OX=1501230 GN=tgt PE=3 SV=1
MAVTYEHIKTCKQSGARLGRVHTPHGVIETPAFMPVGTQATVKTMSPEELKQMDAHIILSNTYHLFLRPGHEIVKKAGGLHRFMNWDRPILTDSGGFQVFSLSEMRKISEEGVQFRSHLNGDKLFISPEKSIEIQNALGSDIMMAFDECPPYPAEHSYAKQSLERTTRWAERCLKAHARPNDQALFAIVQGGMYEDLRKQSALELTSMDFPGYAIGGLSVGEPKPLMYEVLDYTVPYLPTHKPRYLMGVGSPDALVEGSIRGIDMFDCVLPTRIARNGTVMTSEGRLVVRNAKFAEDFGPLDPECSCYTCRNYSRAYIRHLIKADETFGIRLTTYHNLHFLLELMRGVRQAIREDRLLDFRDEFFAKYGIDENSKGF

SEQ ID NO: 58557 - protein, 379 aa, Paenibacillus uliginis
  misc_feature (1)..(379): tr|A0A1X7HNV5|A0A1X7HNV5_9BACL Queuine tRNA-ribosyltran sferase OS=Paenibacillus uliginis N3/975 OX=1313296 GN= tgt PE=3 SV=1
MAAAITYEHIKTCKQSGARLGRVHTPHGVIETPTFMPVGTLATVKTMSPEELKAMDAQIILSNTYHLFLRPGHDIIKEAGGLHKFMNWDRPILTDSGGFQVFSLAEMRKITEEGVNFRSHLNGDKLFISPEVAMEIQNALGSDIMMAFDECPPYPAEYDYVKKSTERTSRWAERCLKSHARPHDQGLFAIVQGGMYEDLRRQSARDLTSMDFPGYAIGGLSVGESKQLMYEVLDYTVPLLPDNKPRYLMGVGSPDALLEGSIRGVDMFDCVLPTRIARNGTTMTSQGRLVVRNAQYARDFGPLDPECDCYTCRHYSRAYLRHLIKSDETFGLRLTTYHNLHFLLNLMRNVRQSIMEDRLLDFRDEFFEKYGLHDNEKGF

SEQ ID NO: 58558 - protein, 379 aa, Paenibacillus vortex; identical to SEQ ID NO: 58494
  misc_feature (1)..(379): tr|A0A2R9SWW6|A0A2R9SWW6_9BACL Queuine tRNA-ribosyltran sferase OS=Paenibacillus vortex V453 OX=715225 GN=tgt P E=3 SV=1

SEQ ID NO: 58559 - protein, 379 aa, Paenibacillus whitsoniae
  misc_feature (1)..(379): tr|A0A430JBB7|A0A430JBB7_9BACL Queuine tRNA-ribosyltran sferase OS=Paenibacillus whitsoniae OX=2496558 GN=tgt P E=3 SV=1
MTAAVTYEPIKTCKQSGARLGRVHTPHGVIETPAFMPVGTQATVKTMSPEELKTMDAQIILSNTYHLFIRPGHDIVKQAGGLHKFMNWDRPILTDSGGFQVFSLSNMRKITEEGVTFKSHLNGDKLFISPEVAMEIQNALGSDIMMAFDECPPYPADYEYVKKSLERTTRWAERCLQSHSRPQDQALFAIIQGGMYADLRKLSAEQLTSMDFPGYAIGGLSVGEPKHMMYEMLEQTTPLMPANKPRYLMGVGSPDALIEGSIRGIDMFDCVLPTRIARNGTCMTSEGRLVIRNAKYMTDFGPLDPKCSCYTCQNYSRAYIRHLIKADETFGIRLTTVHNLHFLLQLMRDVREAIMEDRLLDFRDSFFASYGLNDNERGF

SEQ ID NO: 58560 - protein, 378 aa, Paenibacillus wynnii
  misc_feature (1)..(378): tr|A0A098M6Q8|A0A098M6Q8_9BACL Queuine tRNA-ribosyltran sferase OS=Paenibacillus wynnii OX=268407 GN=tgt PE=3 S V=1
MAAITYEHIKTCNQSGARLGRVHTPHGVIDTPTFMPVGTLATVKTMSPEELKEMDAHIILSNTYHLFLRPGHDIIRDAGGLHKFMNWDRPILTDSGGFQVFSLSDMRKITEEGVHFRSHLNGDKKFLSPEVAMEIQNALGSDIMMAFDECPPFPAEYDYIKKSLERTSRWAERCLKSHARPEDQGLFAIVQGGMHEDLRRQSAADLTSMDFPGYAIGGLSVGESKQLMYEVLDYTVPLLPQNKPRYLMGVGSPDALLEGSIRGVDMFDCVLPTRIARNGTTMTSQGRLVVRNAQYARDFGPLDPECNCYTCRNYSRAYLRHLIKADETFGLRLTTYHNLHFLLELMRKVREAIMEDRLLDFRDEFFAKYGLYDNLKGF

SEQ ID NO: 58561 - protein, 379 aa, Paenibacillus xerothermodurans
  misc_feature (1)..(379): tr|A0A2W1NJ27|A0A2W1NJ27_9BACL Queuine tRNA-ribosyltran sferase OS=Paenibacillus xerothermodurans OX=1977292 GN =tgt PE=3 SV=1
MAAAVTYEHIKTCKQSGARLGRVYTPHGVIETPAFMPVGTQATVKTMSPEELKQMDAHIILSNTYHLFLRPGHDIVRRAGGLHKFMNWDRPILTDSGGFQVFSLSEMRKITEEGVAFHSHLNGDKLFISPEKSIEIQNALGADIIMAFDECPPFPAEHSYAKQSLERTSRWAERCLQSHARPAEQGLFGIIQGGMYEDLRKQSIAELTSLDFPGYAIGGLSVGEPKPLMYEVLDYTVPLMPANKPRYLMGVGSPDALVEGSIRGVDMFDCVLPTRIARNGTVMTSTGRLVVRNAKYAEDFGPLDPECSCYTCQNYSRAYIRHLIKADETFGIRLTTYHNLHFLLELMRLVRQAIQEDRLLDFRDEFFEKYGLSEAGKGF

SEQ ID NO: 58562 - protein, 378 aa, Paenibacillus xylanexedens
  misc_feature (1)..(378): tr|A0A1L5LVE6|A0A1L5LVE6_9BACL Queuine tRNA-ribosyltran sferase OS=Paenibacillus xylanexedens OX=528191 GN=tgt PE=3 SV=1
MAAITYEHIKTCKQSGARLGRVHTPHGVIETPTFMPVGTQATVKTMSPEELKEMDAQIILSNTYHLFLRPGHEIIREAGGLHKFMNWDRPILTDSGGFQVFSLSEMRKITEEGVNFRSHLNGDKKFLSPEVAMEIQNALGSDIMMAFDECPPYPAEYEYVKKSLERTSRWAERCLESHARPHDQGLFAIVQGGMHEDLRRQSAADLTSMDFPGYAIGGLSVGEPKHLMYGVLDYTLPLLPSNKPRYLMGVGSPDALIEGSIRGVDMFDCVLPTRIARNGTTMTSQGRLVVRNAKFATDFGPLDPECDCYTCRNYSRAYLRHLIKADETFGLRLTTIHNLHFLQNLMRNVRKAIMEDRLLDFRDEFFDQYGLHDNDKGF

SEQ ID NO: 58563 - protein, 379 aa, Paenibacillus yonginensis
  misc_feature (1)..(379): tr|A0A1B1N246|A0A1B1N246_9BACL Queuine tRNA-ribosyltran sferase OS=Paenibacillus yonginensis OX=1462996 GN=tgt PE=3 SV=1
MAAAITYEHIKTCKQSGARLGRVHTPHGVIETPIFMPVGTLATVKTMSPEELKEMNAQIILSNTYHLFLRPGHEIVREAGGLHKFMNWDRAILTDSGGFQVFSLSDMRKITEEGVHFRSHLNGDKLFLSPEKAMEIQNALGSDIMMAFDECAPYPAEHKYVKDSLERTTRWAERCLESHARPQDQGLFGIVQGGMFEDLRKQSARDLTSLDFPGYAIGGLSVGEPKHLMYEVLDYTVPLLPSNKPRYLMGVGSPDALIEGAIRGVDMFDCVLPTRIARNGTTMTSQGRLVVRNAQYARDFGPLDPECDCYTCRNYSRAYLRHLIKSDETFGLRLTTYHNLHFLLNLMKQVRQAIMEDRLLDFRDEFFEKYGLFGNEKGF

SEQ ID NO: 58564 - protein, 373 aa, Paeniclostridium sordellii
  misc_feature (1)..(373): tr|A0A0A8WHJ6|A0A0A8WHJ6_PAESO Queuine tRNA-ribosyltran sferase OS=Paeniclostridium sordellii OX=1505 GN=tgt PE =3 SV=1
MSAVRYELIKTCKQSGARLGRLHTPHGVIETPIFMPVGTQATVKSMTPEELKEIGSQIILSNTYHLYMRPGHDLVKEAGGLHKFMNWDKPILTDSGGFQVFSLGPLRKITEEGVHFRSHIDGSKHFISPEKAMEIQNALGSDIMMAFDECAPYPADREYVKNSLERTTRWLKRCKEAHKNTENQALFGIIQGGMYKDLREQSAKEILELDLPGYAVGGLSVGEPKELMYEVLDYTVPLMPENKPRYLMGVGSPDDLIEGVIRGIDMFDCVLPTRIARNGTAMTSEGKVVVRNAKYARDFGPLDPNCDCYCCKNYTRAYIRHLVKANEILAARLITTHNLHFLLNLMKQVREAIMEDRLLDFRKEFFQKYGYEL

SEQ ID NO: 58565 - protein, 373 aa, Paeniclostridium sordellii
  misc_feature (1)..(373): tr|A0A446IEU4|A0A446IEU4_PAESO Queuine tRNA-ribosyltran sferase OS=Paeniclostridium sordellii 8483 OX=1172204 G N=tgt PE=3 SV=1
MSAVRYELIKTCKQSGARLGRLHTPHGVIETPIFMPVGTQATVKSMTPEELKEIGSQIILSNTYHLYMRPGHDLVKEAGGLHKFMNWDKPILTDSGGFQVFSLGPLRKITEEGVHFRSHIDGSKHFISPEKAMEIQNALGSDIMMAFDECAPYPADREYVKNSLERTTRWLKRCKEAHKNTENQALFGIIQGGMYKDLREQSAKEILELDLPGYAVGGLSVGEPKELMYEVLDYTVPLMPENKPRYLMGVGSPDDLIEGAIRGIDMFDCVLPTRIARNGTAMTSEGKVVVRNAKYARDFGPLDPNCDCYCCKNYTRAYIRHLVKANEILAARLITTHNLHFLLNLMKQVREAIMEDRLLDFRKEFFQKYGYEL

SEQ ID NO: 58566 - protein, 433 aa, Paeniglutamicibacter gangotriensis
  misc_feature (1)..(433): tr|M7MQQ9|M7MQQ9_9MICC Queuine tRNA-ribosyltransferase OS=Paeniglutamicibacter gangotriensis Lz1y OX=1276920 G N=tgt PE=3 SV=1
MPNNSFDATASHPRQSDFSFEVGTRLNNPDGSVSNGRTGVISTPHGQIKTPAFIAVGTKATVKAVLPESVAQLGAQAVLANAYHLYLQPGSDILDAAGGLGKFMNWQGPTFTDSGGFQVMSLGSGFKKVIDMKSVDQSGPDDAVAPGKERLANVDDDGVWFKSHIDGSKHRFSPEISMRVQHEIGADIMFAFDELTTLQNSRGYQVESLERTRLWAQRCVAEHFDLTDSRVGKEYQALFGVIQGAQYEDLRRQACKDLGAMAFDGFGIGGALEKENLGTIVGWCSQELPENKPRHLLGISEPDDIFTSIENGADTFDCVSPTRVARNSAFYTPHGRFNLSGQRYKRDFTPLAEGCDCYTCQHYTRAYIHHMFKAKELISHTLISIHNERFVVKMVDDARLAIEDGTFYEMKERVMREYYAGVPDPQGLVTATV

SEQ ID NO: 58567 - protein, 433 aa, Paeniglutamicibacter gangotriensis; identical to SEQ ID NO: 58566
  misc_feature (1)..(433): tr|A0A5B0EHU7|A0A5B0EHU7_9MICC Queuine tRNA-ribosyltran sferase OS=Paeniglutamicibacter gangotriensis OX=254787 GN=tgt PE=3 SV=1

SEQ ID NO: 58568 - protein, 375 aa, Paenimaribius caenipelagi
  misc_feature (1)..(375): tr|A0A547PY46|A0A547PY46_9RHOB Queuine tRNA-ribosyltran sferase OS=Paenimaribius caenipelagi OX=2489174 GN=tgt PE=3 SV=1
MTRFSFDLHATDGTARTGKITTPRGEIRTPAFMPVGTAATVKAMLPESVRATGADILLGNTYHLMLRPGAERIARLGGLHKFMNWERPILTDSGGFQVMSLADLRKLTEEGVTFRSHVDGSKHHLTPERSMEIQRLLGSDIVMAFDECPALPATDDEVARAMRLSMRWAERSREAFGDRPGHALFGIMQGGVTRELRKESAEALKAIGFEGYAIGGLAVGEGQEAMFGVLDYAPGFLPEDKPRYLMGVGKPDDIVGAVKRGVDMMDCVLPSRSGRTGQAWTRRGQVNIKNARHADDPRPLDEHCTCPACTGYSRAYLHHVFRAGEMISGMLLTWHNLHYFQEIMEGMRQAISEGRFAAWEAEFHAQRADGDIERL

SEQ ID NO: 58569 - protein, 376 aa, Paenirhodobacter enshiensis
  misc_feature (1)..(376): tr|A0A086XZQ3|A0A086XZQ3_9RHOB Queuine tRNA-ribosyltran sferase OS=Paenirhodobacter enshiensis OX=1105367 GN=tg t PE=3 SV=1
MTETFSFTLNATDGAARTGVIHTPRGDIRTPAFMPVGTAATVKAMMPESVAATGADILLGNTYHLMLRPTAERIANLGGLHRFMNWNKPILTDSGGFQVMSLSDLRKMSEEGVTFASHVDGSRHFLSPERSMEIQRLLGSDIVMAFDECPALPATDEAVARSMRMSMRWAQRSRDAFGDRPGHALFGIMQGGTNRELREESAEALRQIGFDGYAVGGLAVGEGQELMFSTLDYAPGFLPEDKPRYLMGVGKPDDIVGAVERGIDMMDCVLPSRSGRTGQAWTRRGQVNIKNARHMDDPRPLDEHCSCPACRNYSRAYLHHVFKAQEILSAMLLTWHNLHYYQELMQGLRDAIAAGRLNEFVAQFHALRAEGDIEPL

SEQ ID NO: 58570 - protein, 379 aa, Paenisporosarcina antarctica
  misc_feature (1)..(379): tr|A0A4P6ZWQ2|A0A4P6ZWQ2_9BACL Queuine tRNA-ribosyltran sferase OS=Paenisporosarcina antarctica OX=417367 GN=tg t PE=3 SV=1
MTAIRYELIKTCKQTGARLGIVHTPHGSFETPTFMPVGTQATVKTMAPEDLKAMDSGIILSNTYHLWLRPGNDIIKEAGGLHKFMNWDRAILTDSGGFQVFSLSEFRKIEEEGVHFRNHMNGDKMFLSPEKAMEIQNDLGSDIMMAFDECPPFPATREYMKSSVDRTSRWAERCLNAHARPADQGLFGIIQGGEFEDLRRQSAADLVSLGFPGYAIGGLSVGEPKDVMNRVLEFTTPFMPADKPRYLMGVGSPDSLIDGSIRGVDMFDCVLPTRIARNGTLMTSNGRLVIKGAQNARDFGPIDENCDCYVCKNYSRAYIRHLIKAEETFGIRLTSYHNLYFLMNLMKQVRQAIREDRLGDFREEFFEQYGYNKPNAKNF

SEQ ID NO: 58571 - protein, 379 aa, Paenisporosarcina quisquiliarum
  misc_feature (1)..(379): tr|A0A1H7YWU0|A0A1H7YWU0_9BACL Queuine tRNA-ribosyltran sferase OS=Paenisporosarcina quisquiliarum OX=365346 GN =tgt PE=3 SV=1
MTAITYELIKKDKQTGARLGIVHTPHGSFETPAFMPVGTQATVKTMAPEEIKEMNAGIILSNTYHLWLRPGNEIIREAGGLHKFMNWDRAILTDSGGFQVFSLSDMRKIEEEGVHFRNHLNGDKLFLSPEKSMEIQNDLGSDIMMAFDECPPYPASFEYMKASVERTSRWAERCLNAHTNTDKQGLFGIIQGGEYEELRRQSAQDLVSLDFPGYAIGGLSVGEPKDVMNRVLDFTTPMMPDNKPRYLMGVGSPDSLIDGSIRGVDMFDCVLPTRIARNGTFFTHQGRLVIKGAKYARDFGPIDEKCDCYTCKNYSRAYIRHLFRADETFGLRLASYHNLHFLMKLMENVRQAIREDRLLDFKEEFFEEYGYNKPNAKNF

SEQ ID NO: 58572 - protein, 379 aa, Paenisporosarcina sp.
  misc_feature (1)..(379): tr|A0A2T6KBT0|A0A2T6KBT0_9BACL Queuine tRNA-ribosyltran sferase OS=Paenisporosarcina sp. OV554 OX=2135694 GN=tg t PE=3 SV=1
MTAIRYELIKTCKQTGARLGIVHTPHGSFETPTFMPVGTQATVKTMSPEELKTMEAGIILSNTYHLWLRPGNDIIKEAGGLHKFMNWDRAILTDSGGFQVFSLSEFRKIEEEGVHFRNHMNGDKMFLSPEKAMQIQNDLGSDIMMAFDECPPFPATREYMQSSVDRTSRWAERCLKAHARPNDQGLFGIIQGGEFEDLRRQSAADITSLDFPGYAIGGLSVGEPKDVMNRVLEFTTPFMPADKPRYLMGVGSPDSLIDGAIRGVDMFDCVLPTRIARNGTLMTSNGRLVIKGAQNARDFGPIDENCDCYACKNYSRAYIRHLIKAEETFGLRLTSTHNLHFLMNLMKQVRQAIREDRLGDFRAEFFEQYGYNKPDAKNF

SEQ ID NO: 58573 - protein, 379 aa, Paenisporosarcina sp.
  misc_feature (1)..(379): tr|A0A385YSF0|A0A385YSF0_9BACL Queuine tRNA-ribosyltran sferase OS=Paenisporosarcina sp. K2R23-3 OX=2320858 GN= tgt PE=3 SV=1
MTAIRYELIKTDKQTGARLGIVHTPHGSFETPTFMPVGTQATVKTMAPEDLKVMEAGIILSNTYHLWLRPGHEIIREAGGLHKFMNWDRAILTDSGGFQVFSLSEFRQIEEEGVHFRNHLNGDKLFLSPEKAIEVQNALGSDIMMSFDECPAYPATYDYMKASVERTSRWAERGLKAHARPQDQGLFGIVQGGEFEDLRKMSAQDLVSLDFPGYSIGGLSVGEPKDVMNRVIEFTTPHLPANKPRYLMGVGSPDSLIDGAIRGIDMFDCVLPTRIARNGTLMTSQGRLVVKGAKYERDFGPIDPKCDCYTCKNYSRAYVRHLIRTEETFGLRLTTYHNLYFLMNLMKQVRQAIREDRLLDFKHEFFEEYGYNKPNAKNF

SEQ ID NO: 58574 - protein, 394 aa, Pajaroellobacter abortibovis
  misc_feature (1)..(394): tr|A0A1L6MW90|A0A1L6MW90_9DELT Queuine tRNA-ribosyltran sferase OS=Pajaroellobacter abortibovis OX=1882918 GN=t gt PE=3 SV=1
MVAPFTDGFAFHVLATDGHARRSILITPHGPIHLPTFMPVGTQGSIKTLTPEEVFATGAQIILGNTYHLSLRPGPQLIQQLGGLHHFMQWPSAILTDSGGFQVFSLGEQRSSRLRNTCKSAQPLVKITEEGVTFRSHLDGSLHHLSPEEAVRIQGALGSDIQMPLDLCPSGNAPRPVVEQAVLQTTAWAKRAIATPRSPRQALFGIVQGGCFADLRQQHAEELAALDPGFDGLALGGFSVGETMEQMVETLAQIAPILDAERPRYLMGVGTPLDLLEAIEHGMDMFDCVLPTRNARNGQVFTHSGKLSIKQKRFKQDPSPLDPRCACPACRSGFSRAYLRHLYLSREILVLRLLSLHNLHFYAQLMAEARQAISLKRYLPFKQEWKNRLEHDAQ

SEQ ID NO: 58575 - protein, 375 aa, Palleronia abyssalis
  misc_feature (1)..(375): tr|A0A2R8BRX5|A0A2R8BRX5_9RHOB Queuine tRNA-ribosyltran sferase OS=Palleronia abyssalis OX=1501240 GN=tgt PE=3 SV=1
MDRFSFSLTACDGAARTGVINTPRGQIRTPAFMPVGTAATVKAMLPESVRETGADILLGNTYHLMLRPGAERIARLGGLHRFMNWDRPILTDSGGFQVMSLADLRKLTETGVTFRSHIDGSKHELTPERSMEIQRLLGSDIVMAFDECPALPADRDRIAHSMRLSMRWADRSRVAFGDRPGHALFGIMQGGLERDLREESAEALTAIGFEGYAVGGLAVGEGQEAMFGCLDYAPGFLPADKPRYLMGVGKPDDIVGAVKRGIDMMDCVLPSRSGRTGQAWTRRGQVNLKNARHADDPRPLDEACGCPACRSYSRAYLHHVFRANEMISGMLLTWHNLHYFQQIMSGMRSAIAEGRFDTWEAAFHADRAAGDIEPV

SEQ ID NO: 58576 - protein, 375 aa, Palleronia marisminoris
  misc_feature (1)..(375): tr|A0A1Y5RCV3|A0A1Y5RCV3_9RHOB Queuine tRNA-ribosyltran sferase OS=Palleronia marisminoris OX=315423 GN=tgt PE= 3 SV=1
MTEFHFTLHATDGAARTGRIDTPRGEIRTPAFMPVGTAATVKAMLPESVRETGADILLGNTYHLMLRPGAERVARLGGLHRFMNWDRPILTDSGGFQVMSLAELRKLDEDGVTFRSHIDGSKHRLSPETSMEIQRLLGSDIVMAFDECPALPADRERIASSMRLSMRWAARSRAAFGDRPGHALFGIQQGGLERDLRAESAEALREIGFEGYAIGGLAVGEGQEAMFGCLDYAPGMLPEDKPRYLMGVGKPDDIVGAVKRGVDMMDCVLPSRSGRTGQAWTRRGQVNIKNARHADDPRPLDEHCTCPACRSYSRAYLHHVFRAGEMISGMLLTWHNLHYFQEIMAGMRAAISEGRFAAWEADFHATRAEGDIEPL

SEQ ID NO: 58577 - protein, 376 aa, Paludibacter jiangxiensis
  misc_feature (1)..(376): tr|A0A171AJ50|A0A171AJ50_9BACT Queuine tRNA-ribosyltran sferase OS=Paludibacter jiangxiensis OX=681398 GN=tgt P E=3 SV=1
MQFELQHTDPKSNARAGVITTDHGTIETPIFMPVGTAGSVKAVHQRELKEDIKAQIILGNTYHLYLRPGLNIIEKAGGLHKFNGWDRPILTDSGGYQVFSLSDNRKLKEDGAHFRSHIDGSKHLFTPENVVDIQRIIGADIIMAFDECTPGTADYDYAKQSMELTHRWLVRGLAHFDETEPKYGYSQAYFPIVQGCVYPELRKQSAEFIAAQNREGNAIGGLAVGEPTDKMYEMIEVVNEILPKDRPRYLMGVGTPANILEGIERGVDMFDCVMPTRNGRNGMLFTSQGIMNMKNKKWKDDFSPIDPAGTSYVDSFYSKAYLRHLFHSQEFLAMQIASIHNLAFYLWLAGEARKHIIAGDFSSWKPQMVRQVSQRL

SEQ ID NO: 58578 - protein, 376 aa, Paludibacter propionicigenes
  misc_feature (1)..(376): tr|E4T401|E4T401_PALPW Queuine tRNA-ribosyltransferase OS=Paludibacter propionicigenes (strain DSM 17365 / JCM 13257 / WB4) OX=694427 GN=tgt PE=3 SV=1
MTFEIQHTDPNSNARAGKITTDHGVIETPIFMPVGTVASVKAVHFHELKEDIKAQIILGNTYHLYLRPGIDTLERAGGLHKFNGWDKPILTDSGGYQVFSLSGNRKLKEEGATFRSHIDGSKHLFTPENVVDIQRIIGADIIMAFDECTPGTADFAYAKKSMELTHRWLERGLNRFDQTEPKYGYSQTYFPIVQGCVYPELRRQSAEFIASQHREGYAIGGLAVGEPTEIMYEMIEVVNEILPKDKPRYLMGVGTPQNILEAIERGVDMFDCVMPTRNGRNGMLFTSQGIMNMKNEKWKNDFSPLDEFGTSYVDKAYSKAYLRHLFISKEYLALQIASIHNLAFYLWLVGEARSHIQAGDFSSWKRGMVEQLGRRL

SEQ ID NO: 58579 - protein, 376 aa, Paludibacter sp.
  misc_feature (1)..(376): tr|A0A1M3MCM1|A0A1M3MCM1_9BACT Queuine tRNA-ribosyltran sferase OS=Paludibacter sp. 47-17 OX=1895899 GN=tgt PE= 3 SV=1
MKFELQHTDTGSWARAGLITTDHGTIETPIFMPVGTVASVKAVHFHELKDDIGAQIILGNTYHLYLRPGLEILEQAGGLHKFNGWDRPILTDSGGYQVFSLSANRKLKEEGAHFRSHIDGSKHLFTPENVVDIQRIIGADIMMAFDECTPGDAPYAYAKTSMELTHRWLERGLKRFDSTENKYGYSQTFFPIVQGCVYPDLRRQSAEFVASRNREGNAIGGLAVGEPAAKMYEMIEVVNEILPQDKPRYLMGVGTPENILEGIERGVDMFDCVMPTRNGRNGMLFTSEGILNMRNEKWKNDFSPLDPYGTSYVDRVYTRAYLRHLFISKELLAMQIASIHNLAFYLWLVKEARRHIIAGDFVSWKKEMLVRVTRRL

SEQ ID NO: 58580 - protein, 371 aa, Paludibacterium purpuratum
  misc_feature (1)..(371): tr|A0A4R7B5Y3|A0A4R7B5Y3_9NEIS Queuine tRNA-ribosyltran sferase OS=Paludibacterium purpuratum OX=1144873 GN=tgt PE=3 SV=1
MLKFTVHKTSGGARRGTLELNHGTVETPVFQPVGTYGSVKAMSPLELNEIGAQIILGNTFHLWLRPGLEVIEQFGGLHSFIGWDKPILTDSGGFQVFSLGDLRKLTEDGCTFQSPVNGDRCFLSPEVSMKIQRVLNSDIVMIFDECTPFPADYDTAAASMRMSLRWAERSRRAFDDLKNPNALFGIVQGSMYNDLREESLTELMNIGFDGIAIGGLSVGEPKEEMERMLRVMQPMLPPDKPHYLMGVGTPEDLVYGVAHGVDMFDCVMPTRNARNGWLFTQWGDIKIKNASHKQDTRPLDETCECYTCRNFSRAYLHHLHRVGEILGARLNTIHNLHYYQQLMREIRASIEADRFEDFRAEFAAKRARGTK

SEQ ID NO: 58581 - protein, 379 aa, Paludifilum halophilum
  misc_feature (1)..(379): tr|A0A235BCX5|A0A235BCX5_9BACL Queuine tRNA-ribosyltran sferase OS=Paludifilum halophilum OX=1642702 GN=tgt PE= 3 SV=1
MAVRYELIKTCRQSGARLGRLHTPHGTIETPVFMPVGTLATVKTMSPEELREMGSGILLSNTYHLFLRPGHEIVREAGGLHRFMNWDGAVLTDSGGFQVFSLSNLRQITEEGVSFRSHLSGKPLFISPEKSVEIQNALGADIIMAFDECPPYPADRNYVRQSMDRTYRWLQRCVAAHQRPETQALFGIVQGGMDKDLRQESVRQVTELDLPGYAVGGLSVGEPKDLMYQVLEDAAPLLPTDKPRYLMGVGSPDALVEGVMRGIDMFDCVLPTRIARNGTTMTSRGRLVVRNARYARDFSPLDPDCDCYTCRHYTRAYLRHLIKADETFGLRLTTYHNLYFLFQLMEQVREAIRRDRLSDFRDSFFESYYGPGEERRRGF

SEQ ID NO: 58582 - protein, 387 aa, Paludisphaera borealis
  misc_feature (1)..(387): tr|A0A1U7CRM2|A0A1U7CRM2_9BACT Queuine tRNA-ribosyltran sferase OS=Paludisphaera borealis OX=1387353 GN=tgt PE= 3 SV=1
MPDTETAPERIPHGPTTDRPVRFSTLARDAGSAARAGRLETPHGAVETPAFMPVGTQGTVKGLTPDQLWAGGSRMILANTYHLALRPGEETVAALGGLHRFTGWDGPILTDSGGFQVFSLAQRAKITDHGASFRSHLDGRLLELTPERAVAIQEALGADVAMCLDHCPALPAGKDAIARAVDRTIAWAGRCKAAHARADQALFGIVQGGAHEDLRARCAEALVALDFDGYAVGGVSVGESREEVRRALAVSTHRLPEDRPRYLMGVGRPQDLLDAVATGIDLFDCVMPTRNGRNATCFTDQGLVKLRNAAHTRDASPLEAGCDCLTCAKFSRGYLRHLFMAKEMLGPILASIHNLAYLHRLTSRMREAIRAGRFVQLRMEVLEALGP

SEQ ID NO: 58583 - protein, 386 aa, Panacagrimonas perspica
  misc_feature (1)..(386): tr|A0A4S3K0C4|A0A4S3K0C4_9GAMM Queuine tRNA-ribosyltran sferase OS=Panacagrimonas perspica OX=381431 GN=tgt PE= 3 SV=1
MQFQLLSTDGPARRGRLVFARGAVETPAFMPVGTYGTVKGLSPAEVRATGAQILLGNTFHLMLRPGADAMRALGGLHKFMDWDGPILTDSGGFQVWSLSGLRKITEEGVKFASPINGDRVMLTPERAIEIQHALGSDIVMQFDECTPHPATEKQVRKSMEMSARWGARCRTAHDALSDAAPRSGAPAGDRAALFGIVQGGMLEDLRTESLQRLTEIGFDGYALGGLSVGETEAERLHVLDAIGTKLPADKPHYLMGVGTPRDLVQAVGRGIDMFDCVMPTRNARNGHLFTSQGVVKLRNAQHREDPGPLDPNCDCHTCTRYSRAYLHHLDRCNEMLGPRLNTIHNLHYYQGVMRRIREAVEQNRYAAFAADFLAGPEGSVRKASTA

SEQ ID NO: 58584 - protein, 379 aa, Panacibacter ginsenosidivorans
  misc_feature (1)..(379): tr|A0A5B8V7F0|A0A5B8V7F0_9BACT Queuine tRNA-ribosyltran sferase OS=Panacibacter ginsenosidivorans OX=1813871 GN =tgt PE=3 SV=1
MAALTFQLEHTDNNSKARAGTITTDHGVIETPIFMPVGTIGSVKAVTQQQLKDEIKAQIILGNTYHLYLRPTTAIIEAAGGLHKFNGWPKPILTDSGGYQVFSLAENRKLTEEGALFQSHIDGSRHLFTAENVMDIQRSIGADIIMAFDECPPYPSEYAYAKKSMELTHRWLTRCFTRFNETEDKYGYSQNLFPIVQGSTFEDLRKESCAFVSSKEATGNAIGGLSVGEPEAMMYDLTALCAENLPYNKPRYLMGVGTPWNILECISLGIDMFDCVMPTRNGRNGMLFTTKGVINIRNKKWATDFSVIDDGIDCETSNYYSKAYLRHLFVADEILGLQIASIHNLAFYLWLVGEARKHIIAGDFKSWKTSTREIIKQRL

SEQ ID NO: 58585 - protein, 379 aa, Panacibacter sp.
  misc_feature (1)..(379): tr|A0A4U3KTP0|A0A4U3KTP0_9BACT Queuine tRNA-ribosyltran sferase OS=Panacibacter sp. 17mud1-8 OX=2575867 GN=tgt PE=3 SV=1
MAFLQFQLEATDAFSKARAGTITTDHGVIQTPIFMPVGTVGSVKAVTQQQLKNEVKAQIILGNTYHLYLRPGTEILEAAGGIHQFNGWDKPVLTDSGGYQVFSLAANRKLTEEGALFQSHIDGSRHLFTPEKVMDIQRSIGADIIMAFDECPPYPSEYSYAKKSMELTHRWLDRCFARLKETPDLYGYTQNLFPIVQGGTYKDLRTVSCEYVAAKEATGNAIGGLSVGEPEDMMYEFTALCTENLPYNKPRYLMGVGTPWNILECISLGVDMFDCVMPTRNGRNGMLFTTNGVINITNKKWATDFSCIDENLPCETSRFYSKAYLRHLFVAKEILGLQIASIHNLSFYLWLVGEARHHITAGDFMSWKKEMIPVLKQRL

SEQ ID NO: 58586 - protein, 376 aa, Pandoraea apista
  misc_feature (1)..(376): tr|A0A0B5F3Y2|A0A0B5F3Y2_9BURK Queuine tRNA-ribosyltran sferase OS=Pandoraea apista OX=93218 GN=tgt PE=3 SV=1
MLKFELITTDGQARRGRVTLNHGVVETPIFMPVGTYGSVKAMSPAELVENNAQIILGNTFHLWLRPGLETIAAHGGLHRFMGWDRPILTDSGGFQVFSLGELRKISEDGVKFASPVNGDRLFLSPEISMQIQRVLNSDIVMQFDECTPYEIDGRPATEVEAGQSMRMSLRWAKRSIDEFNRLENPNALFGIVQGGMYEHLRDESLAGLSELDFHGYAIGGLSVGEPKEDMMRVLEHVAPRLPANKPHYLMGVGTPEDLVAGVAAGVDMFDCVMPTRNARNGWLFTRFGDLKIRNASHKSDTRPLDETCGCYTCRNFSRAYLHHLQRAGEILGARLNTIHNLHYYLTLMQEIRDAIEAHRFDAFVTQFRADRARGVQ

SEQ ID NO: 58587 - protein, 376 aa, Pandoraea faecigallinarum
  misc_feature (1)..(376): tr|A0A0H3WU53|A0A0H3WU53_9BURK Queuine tRNA-ribosyltran sferase OS=Pandoraea faecigallinarum OX=656179 GN=tgt P E=3 SV=1
MLKFELITTDGQARRGRVTLNHGVVETPIFMPVGTYGSVKAMSPAELVENNAQIILGNTFHLWLRPGLETIAAHGGLHRFMGWDRPILTDSGGFQVFSLGDLRKISEDGVKFASPVNGDRLFLSPEISMQIQRVLNSDIVMQFDECTPYEIDGRPATEVEAGQSMRMSLRWARRSIDEFNRLENPNALFGIVQGGMYEHLRDESLAGLSELDFHGYAIGGLSVGEPKEDMMRVLEHVAPRLPANKPHYLMGVGTPEDLVAGVAAGVDMFDCVMPTRNARNGWLFTRFGDLKVRNASHKADTRPVDETCGCYTCRNFSRAYLHHLQRAGEILGARLNTIHNLHYYLTLMQEIRDAIEAHRFDAFVAGFKADRARGVH

SEQ ID NO: 58588 - protein, 376 aa, Pandoraea fibrosis
  misc_feature (1)..(376): tr|A0A0B3SYR0|A0A0B3SYR0_9BURK Queuine tRNA-ribosyltran sferase OS=Pandoraea fibrosis OX=1891094 GN=tgt PE=3 SV =1
MLKFELITTDGQARRGRVTLNHGVVETPIFMPVGTYGSVKAMSPAELVENNAQIILGNTFHLWLRPGLETIAAHGGLHRFMGWDRPILTDSGGFQVFSLGELRKISEEGVKFASPVNGDRLFLSPEISMQIQHVLNSDIVMQFDECTPYEIDGRPATEVEAGQSMRMSLRWAKRSIDEFNRLENPNALFGIVQGGMYEHLRDESLAGLSELDFHGYAIGGLSVGEPKEDMMRVLEHVAPRLPANKPHYLMGVGTPEDLVAGVAAGVDMFDCVMPTRNARNGWLFTRFGDLKIRNASHKTDTRPLDETCGCYTCRNFSRAYLHHLQRAGEILGARLNTIHNLHYYLTLMQEIRDAIEAHRFDAFVAQFRADRARGVQ

SEQ ID NO: 58589 - protein, 376 aa, Pandoraea norimbergensis
  misc_feature (1)..(376): tr|A0A0U2WAI8|A0A0U2WAI8_9BURK Queuine tRNA-ribosyltran sferase OS=Pandoraea norimbergensis OX=93219 GN=tgt PE= 3 SV=1
MLKFELITTDGQARRGRVTLNHGVVETPIFMPVGTYGSVKAMSPVELVENNAQIILGNTFHLWLRPGLETIAAHGGLHKFMGWDKPILTDSGGFQVFSLGELRKISEEGVKFASPVNGDRLFLSPEISMQIQRVLNSDIVMQFDECTPYEIDGRPATETEAGQSMRMSMRWAKRSIDEFNKLENPNALFGIVQGGMYENLRDESLAGLSELPFHGYAIGGLSVGEPKEDMMRVLNHVAPRLPADKPHYLMGVGTPEDLVAGVAAGVDMFDCVMPTRNARNGWLFTRFGDLKIRNASHKTDTRPLDETCGCYACRNFSRAYLHHLQRAGEILGARLNTIHNLHYYLTLMQEIRDAIEAHRFDAFVAQFRADRARGVQ

SEQ ID NO: 58590 - protein, 376 aa, Pandoraea oxalativorans
  misc_feature (1)..(376): tr|A0A0E3YC94|A0A0E3YC94_9BURK Queuine tRNA-ribosyltran sferase OS=Pandoraea oxalativorans OX=573737 GN=tgt PE= 3 SV=1
MLKFELITTDGQARRGRVTLNHGVVETPIFMPVGTYGSVKAMSPAELVENNAQIILGNTFHLWLRPGLETIAAHGGLHRFMGWDRPILTDSGGFQVFSLGELRKISEEGVKFASPVNGDRLFLSPEISMQIQRVLNSDIVMQFDECTPYEIDARPATEVEAGQSMRMSLRWAKRSIDEFNRLENPNALFGIVQGGMYEHLRDESLAGLSELDFHGYAIGGLSVGEPKEDMMRVLEHVAPRLPANKPHYLMGVGTPEDLVAGVAAGVDMFDCVMPTRNARNGWLFTRFGDLKIRNASHKTDTRPLDETCGCYTCRNFSRAYLHHLQRAGEILGARLNTIHNLHYYLTLMQEIRDAIEAHRFDAFVAQFRADRARGVQ

SEQ ID NO: 58591 - protein, 376 aa, Pandoraea pnomenusa
  misc_feature (1)..(376): tr|A0A5E4ZGF2|A0A5E4ZGF2_9BURK Queuine tRNA-ribosyltran sferase OS=Pandoraea pnomenusa OX=93220 GN=tgt PE=3 SV= 1
MLKFELITTDGQARRGRVTLNHGVVETPIFMPVGTYGSVKAMSPAELVENNAQIILGNTFHLWLRPGLETIAAHGGLHRFMGWDRPILTDSGGFQVFSLGELRKISEEGVKFASPVNGDRLFLSPEISMQIQRVLNSDIVMQFDECTPYEIDGRPATESEAGQSMRMSLRWAKRSIDEFNRLENPNALFGIVQGGMYEHLRDESLAGLSELDFHGYAIGGLSVGEPKEDMMRVLEHVAPRLPANKPHYLMGVGTPEDLVAGVSAGVDMFDCVMPTRNARNGWLFTRFGDLKIRNASHKSDTRPLDETCGCYTCRNFSRAYLHHLQRAGEILGARLNTIHNLHYYLTLMQEMRDAIEAHRFDAFVTQFRADRARGVQ

SEQ ID NO: 58592 - protein, 376 aa, Pandoraea pnomenusa
  misc_feature (1)..(376): tr|A0A378YU79|A0A378YU79_9BURK Queuine tRNA-ribosyltran sferase OS=Pandoraea pnomenusa OX=93220 GN=tgt PE=3 SV= 1
MLKFELITTDGQARRGRVTLNHGVVETPIFMPVGTYGSVKAMSPAELVENNAQIILGNTFHLWLRPGLETIAAHGGLHRFMGWDRPILTDSGGFQVFSLGELRKISEEGVKFASPVNGDRLFLSPEISMQIQHVLNSDIVMQFDECTPYEIDGRPATESEAGQSMRMSLRWAKRSIDEFNRLENPNALFGIVQGGMYEHLRDESLAGLSELDFHGYAIGGLSVGEPKEDMMRVLEHVAPRLPANKPHYLMGVGTPEDLVAGVSAGVDMFDCVMPTRNARNGWLFTRFGDLKIRNASHKSDTRPLDETCGCYTCRNFSRAYLHHLQRAGEILGARLNTIHNLHYYLTLMQEMRDAIEAHRFDAFVTQFRADRARGVQ

SEQ ID NO: 58593 - protein, 376 aa, Pandoraea pulmonicola
  misc_feature (1)..(376): tr|A0A378Z2K1|A0A378Z2K1_9BURK Queuine tRNA-ribosyltran sferase OS=Pandoraea pulmonicola OX=93221 GN=tgt PE=3 S V=1
MLKFELITTDGQARRGRVTLNHGVVETPIFMPVGTYGSVKAMSPAELVENNAQIILGNTFHLWLRPGLETIAAHGGLHRFMGWDRPILTDSGGFQVFSLGDLRKISEEGVKFASPVNGDRLFLSPEISMQIQRVLNSDIVMQFDECTPYEIDGRPATEVEAGQSMRMSLRWAKRSIDEFNRLENPNALFGIVQGGMYEHLRDESLAGLSELDFHGYAIGGLSVGEPKEDMMRVLEHVAPRLPANKPHYLMGVGTPEDLVAGVAAGVDMFDCVMPTRNARNGWLFTRFGDLKIRNASHKSDTRPLDETCGCYTCRNFSRAYLHHLQRAGEILGARLNTIHNLHYYLTLMQEIRDAIEAHRFDAFVAQFRAERARGVQ

SEQ ID NO: 58594 - protein, 376 aa, Pandoraea sp.
  misc_feature (1)..(376): tr|R7X2J6|R7X2J6_9BURK Queuine tRNA-ribosyltransferase OS=Pandoraea sp. SD6-2 OX=1286093 GN=tgt PE=3 SV=1
MLKFELITTDGQARRGRVTLNHGVVETPIFMPVGTYGSVKAMSPAELVENNAQIILGNTFHLWLRPGLETIAAHGGLHRFMGWDRPILTDSGGFQVFSLGELRKISEEGVKFASPVNGDRLFLSPEISMQIQRVLNSDIVMQFDECTPYEIDGRPATEAEAGQSMRMSLRWAKRSIDEFNRLENPNALFGIVQGGMYEHLRDESLAGLSELDFHGYAIGGLSVGEPKEDMMRVLEHVAPRLPANKPHYLMGVGTPEDLVAGVAAGVDMFDCVMPTRNARNGWLFTRFGDLKIRNASHKSDTRPLDETCGCYTCRNFSRAYLHHLQRAGEILGARLNTIHNLHYYLTLMQEIRDAIEAHAFDAFVARFRADRARGVQ

SEQ ID NO: 58595 - protein, 376 aa, Pandoraea sp.
  misc_feature (1)..(376): tr|A0A522EQ95|A0A522EQ95_9BURK Queuine tRNA-ribosyltran sferase OS=Pandoraea sp. OX=1883445 GN=tgt PE=3 SV=1
MLNFELLCTDGQARRGRLTLNHGVIETPIFMPVGTYGSVKAMSPLELDENGAQIILGNTFHLWLRPGLDTIGAHGGLHRFMGWDKPILTDSGGFQVFSLGELRKISEEGVKFASPINGDRLFLSPEISMQIQHVLNSDIAMQFDECTPYEIDGRPATEAEAGASMRMSLRWARRSRDEFDRLANPNALFGIVQGGMYEHLRDESLAGLTELDFHGYAIGGLSVGEPKEDMMRVLAHVAPRLPANKPHYLMGVGTPEDLVAGVAAGVDMFDCVMPTRNARNGWLFTRLGDLKIRNAAHKSDTRPLDASCACYTCRNFSRAYLHHLQRAGEILGARLNTIHNLHYYLQLMRDMRTAIETRQFDNFVRQFHHERAQGVD

SEQ ID NO: 58596 - protein, 376 aa, Pandoraea sputorum
  misc_feature (1)..(376): tr|A0A239SAF6|A0A239SAF6_9BURK Queuine tRNA-ribosyltran sferase OS=Pandoraea sputorum OX=93222 GN=tgt PE=3 SV=1
MLKFELITTDGQARRGRVTLNHGVVETPIFMPVGTYGSVKAMSPVELVENNAQIILGNTFHLWLRPGLETIAAHGGLHRFMGWDRPILTDSGGFQVFSLGDLRKISEEGVKFASPVNGDRLFLSPEISMQIQHVLNSDIVMQFDECTPYEIDGRPATEVEAGQSMRMSLRWAKRSIDEFNRLENPNALFGIVQGGMYEHLRDESLAGLSELDFHGYAIGGLSVGEPKEDMMRVLEHVAPRLPANKPHYLMGVGTPEDLVAGVAAGVDMFDCVMPTRNARNGWLFTRFGDLKIRNASHKTDTRPLDETCGCYACRNFSRAYLHHLQRAGEILGARLNTIHNLHYYLTLMQEIRDAIEAHQFDAFVAKFKADRARGVQ

SEQ ID NO: 58597 - protein, 376 aa, Pandoraea sputorum
  misc_feature (1)..(376): tr|A0A5E5BAE2|A0A5E5BAE2_9BURK Queuine tRNA-ribosyltran sferase OS=Pandoraea sputorum OX=93222 GN=tgt PE=3 SV=1
MLKFELITTDGQARRGRVTLNHGVVETPIFMPVGTYGSVKAMSPVELVENNTQIILGNTFHLWLRPGLETIAAHGGLHRFMGWDRPILTDSGGFQVFSLGDLRKISEEGVKFASPVNGDRLFLSPEISMQIQHVLNSDIVMQFDECTPYEIDGRPATEVEAGQSMRMSLRWAKRSIDEFNRLENPNALFGIVQGGMYEHLRDESLAGLSELDFHGYAIGGLSVGEPKEDMMRVLEHVAPRLPANKPHYLMGVGTPEDLVAGVAAGVDMFDCVMPTRNARNGWLFTRFGDLKIRNASHKTDTRPLDETCGCYACRNFSRAYLHHLQRAGEILGARLNTIHNLHYYLTLMQEIRDAIEAHQFDAFVAKFKADRARGVQ

SEQ ID NO: 58598 - protein, 376 aa, Pandoraea terrae
  misc_feature (1)..(376): tr|A0A5E4ZCL8|A0A5E4ZCL8_9BURK Queuine tRNA-ribosyltran sferase OS=Pandoraea terrae OX=1537710 GN=tgt PE=3 SV=1
MLKFELITTDGQARRGRVTLNHGVVETPIFMPVGTYGSVKAMSPAELVENNAQIILGNTFHLWLRPGLETIAAHGGLHRFMGWDRPILTDSGGFQVFSLGDLRKISEEGVKFASPVNGDRLFLSPEISMQIQHVLNSDIVMQFDECTPYEIDGRPATEDEAGKSMRMSMRWAQRSIDEFNRLQNPNALFGIVQGGMYEHLRDESLAGLSELDFHGYAIGGLSVGEPKEDMMRVLQHVAPRLPANKPHYLMGVGTPEDLVAGVAAGVDMFDCVMPTRNARNGWLFTRFGDVKIRNASHKTDTRPLDETCGCYTCRNFSRAYLHHLQRAGEILGARLNTIHNLHYYLTLMHEIRTAIEAHGFEAFVARFRADRARGVQ

SEQ ID NO: 58599 - protein, 376 aa, Pandoraea thiooxydans
  misc_feature (1)..(376): tr|A0A0G3EUS1|A0A0G3EUS1_9BURK Queuine tRNA-ribosyltran sferase OS=Pandoraea thiooxydans OX=445709 GN=tgt PE=3 SV=1
MLNFELLCTDGQARRGRLTLNHGVVETPIFMPVGTYGSVKAMSPLELDENGAQIILGNTFHLWLRPGLDTIGAHGGLHRFMGWDKPILTDSGGFQVFSLGELRKISEEGVKFASPINGDRLFLSPEISMQIQHVLNSDIAMQFDECTPYEIDGRPATEAEAGASMRMSLRWARRSREEFNRLANPNALFGIVQGGMYEHLRDESLAGLAELDFHGYAIGGLSVGEPKEDMMRVLAHVAPRLPADKPHYLMGVGTPEDLVAGVAAGVDMFDCVMPTRNARNGWLFTRFGDLKIRNAAHKSDTRPLDQTCGCYTCRHFSRAYLHHLQRAGEILGARLNTIHNLHYYLQLMQQMRSAIETGQFDAFVRQFHHERSQGID

SEQ ID NO: 58600 - protein, 376 aa, Pandoraea vervacti
  misc_feature (1)..(376): tr|A0A0C5JXR0|A0A0C5JXR0_9BURK Queuine tRNA-ribosyltran sferase OS=Pandoraea vervacti OX=656178 GN=tgt PE=3 SV= 1
MLKFELITTDGQARRGRVTLNHGVVETPIFMPVGTYGSVKAMSPAELVENNAQIILGNTFHLWLRPGLETIAAHGGLHRFMGWDRPILTDSGGFQVFSLGDLRKISEEGVKFASPVNGDRLFLSPEISMQIQRVLNSDIVMQFDECTPYEIDGRPATEVEAGQSMRMSLRWAKRSIDEFNRLENPNALFGIVQGGMYEHLRDESLAGLSELDFHGYAIGGLSVGEPKEDMMRVLEHVAPRLPANKPHYLMGVGTPEDLVAGVAAGVDMFDCVMPTRNARNGWLFTRFGDLKIRNASHKSDTRPLDETCGCYTCRNFSRAYLHHLQRAGEILGARLNTIHNLHYYLTLMQEIRDAIEAHQFDAFVARFKADRARGVQ

SEQ ID NO: 58601 - protein, 383 aa, Pannonibacter indicus
  misc_feature (1)..(383): tr|A0A0K6HYB6|A0A0K6HYB6_9RHOB Queuine tRNA-ribosyltran sferase OS=Pannonibacter indicus OX=466044 GN=tgt PE=3 SV=1
MTGDTQRFSFRLLATDGMARRGEITTPHGLVRTPAFMPVGTQATVKAMYTDQVRALGADVVLGNTYHLMLRPGAERVARLGGLHHFMKWPHTILTDSGGFQVMSLAQLRKLDETGVKFQSHIDGQRYHLTPERSVEIQGLLGSDIQMQLDECIGLPAPEKEVQRAMELSLRWAERSRAKFEAMGGVEKGQGLYGIVQGGDVPHLRIRSAESLAAMPFEGYSVGGLAVGEPQEVMLRMLEVTTPVMPVDKPRYLMGVGTPDDILESVARGIDQFDCVMPTRAGRHGLAFTRRGKINLKNARHADDPRPLDEESDCPAARDYSRAYLHHLVKAGEGLAAMLLTWNNLAYYQQLMQGMRDAIEAGRFEEHRLSVKEGWARGDLPPL

SEQ ID NO: 58602 - protein, 383 aa, Pannonibacter phragmitetus
  misc_feature (1)..(383): tr|A0A0U3NBS9|A0A0U3NBS9_9RHOB Queuine tRNA-ribosyltran sferase OS=Pannonibacter phragmitetus OX=121719 GN=tgt PE=3 SV=1
MTGDTQRFSFRLLATDGMARRGEITTPHGLVRTPAFMPVGTQATVKAMYTDQVRALGADVVLGNTYHLMLRPGAERVARLGGLHHFMKWPHTILTDSGGFQVMSLAQLRKLDETGVKFQSHIDGQRYHLTPERSVEIQGLLGSDIQMQLDECIGLPAPEKEVQRAMELSLRWAERSRAKFEAMGGVEKGQGLYGIVQGGDVPHLRIRSAESLAAMPFEGYSVGGLAVGEPQEVMLRMLEVTTPVMPVDKPRYLMGVGTPDDILESVARGIDQFDCVMPTRAGRHGLAFTRRGKINLKNARHADDPRPLDEESDCPAARDYSRAYLHHLVKAGEGLAAMLLTWNNLAYYQQLMQGMRDAIEAGRFEDHRLIVKEGWARSDLPPL

SEQ ID NO: 58603 - protein, 383 aa, Pannonibacter phragmitetus
  misc_feature (1)..(383): tr|A0A378ZVZ3|A0A378ZVZ3_9RHOB Queuine tRNA-ribosyltran sferase OS=Pannonibacter phragmitetus OX=121719 GN=tgt PE=3 SV=1
MTGDTQRFSFRLLANDGMARRGEITTPHGLVRTPAFMPVGTQATVKAMYTDQVRELGADVVLGNTYHLMLRPGAERVARLGGLHHFMKWPHTILTDSGGFQVMSLAQLRKLDETGVKFQSHIDGQRYHLTPERSVEIQGLLGSDIQMQLDECIGLPAPEKEVQRAMELSLRWAERSRAKFEAMGGVEKGQGLYGIVQGGDVPHLRIRSAESLAAMPFEGYSVGGLAVGEPQEVMLRMLEVTTPVMPVDKPRYLMGVGTPDDILESVARGIDQFDCVMPTRAGRHGLAFTRRGKINLKNARHADDPRPLDEESDCPAAREYSRAYLHHLVKAGEGLAAMLLTWNNLAYYQQLMQGMRDAIEAGRFEDHRLSVKEGWARGDLPPL

SEQ ID NO: 58604 - protein, 374 aa, Pantoea alhagi
  misc_feature (1)..(374): tr|A0A1W6B1D8|A0A1W6B1D8_9GAMM Queuine tRNA-ribosyltran sferase OS=Pantoea alhagi OX=1891675 GN=tgt PE=3 SV=1
MKFELDKKDGRARRGRLVFDRGVVETPAFMPVGTYGTVKGMTPEEVKETGAQILLGNTFHLWLRPGQEIMKLHGDLHDFMQWQGPILTDSGGFQVFSLGDIRKITEAGVHFRNPINGDAIFLDPEKSMEIQYDLGSDIVMIFDECTPYPADWDYAKRSMEMSLRWAQRSRDHFDKLGNKNALFGIIQGSVYEDLRDVSVKGLVEIGFDGYAVGGLAVGEPKEDMHRILEHVCPQIPEDKPRYLMGVGKPEDLVEGVRRGVDMFDCVMPTRNARNGHLFVTDGVVKIRNAKHKDDTSPLDAECDCYTCRNYSRAYLHHLDRCNEILGARLNTIHNLRYYQRLMAGLRQAIEEGKLECFVSEFYTRTGKAVPPLNA

SEQ ID NO: 58605 - protein, 382 aa, Pantoea allii
  misc_feature (1)..(382): tr|A0A2V2BGR3|A0A2V2BGR3_9GAMM Queuine tRNA-ribosyltran sferase OS=Pantoea allii OX=574096 GN=tgt PE=3 SV=1
MKFELDTTDGRARRGRLIFDRGVVETPAFMPVGTYGTVKGMTPEEVQETGAQIILGNTFHLWLRPGQEIMKLHGDLHDFMQWKGPILTDSGGFQVFSLGDIRKITEAGVHFRNPINGDAIFLDPEKSMEIQYDLGSDIVMIFDECTPYPADWDYAKRSMEMSLRWAQRSRDRFDSLGNKNALFGIIQGSVYEDLRDVSVKGLVEIGFDGYAVGGLAVGEPKEDMHRILEHVCPQIPEDKPRYLMGVGKPEDLVEGVRRGVDMFDCVMPTRNARNGHLFVTDGVVKIRNAKHKDDVSPLDAECDCYTCRNYSRAYLHHLDRCNEILGARLNTIHNLRYYQRLMAGLRQAIEEGKLERFVSEFYQRTGKAVPPLTSDNSSMREI

SEQ ID NO: 58606 - protein, 382 aa, Pantoea allii
  misc_feature (1)..(382): tr|A0A4S3BIZ1|A0A4S3BIZ1_9GAMM Queuine tRNA-ribosyltran sferase OS=Pantoea allii OX=574096 GN=tgt PE=3 SV=1
MKFELDTTDGRARRGRLIFDRGVVETPAFMPVGTYGTVKGMTPEEVQETGAQIILGNTFHLWLRPGQEIMKLHGDLHDFMQWKGPILTDSGGFQVFSLGDIRKITEAGVHFRNPINGDPIFLDPEKSMEIQYDLGSDIVMIFDECTPYPADWDYAKRSMEMSLRWAQRSRDRFDSLGNKNALFGIIQGSVYEDLRDVSVKGLVEIGFDGYAVGGLAVGEPKQDMHRILEHVCPQLPQDKPRYLMGVGKPEDLVEGVRRGVDMFDCVMPTRNARNGHLFVTEGVVKIRNARYKDDTAPLDAECDCYTCRNYSRAYLYHLDRCNEILGARLNTIHNLRYYQRLMAGLRQAIEEGKLERFVTEFYQRTGKEVPPLTSDNSSMREI

SEQ ID NO: 58607 - protein, 382 aa, Pantoea ananas
  misc_feature (1)..(382): tr|A0A2S8A0C2|A0A2S8A0C2_PANAN Queuine tRNA-ribosyltran sferase OS=Pantoea ananas OX=553 GN=tgt PE=3 SV=1
MKFELDTTDGRARRGRLIFDRGVVETPAFMPVGTYGTVKGMTPEEVQETGAQIILGNTFHLWLRPGQEIMKLHGDLHDFMQWKGPILTDSGGFQVFSLGDIRKITEAGVHFRNPINGDPIFLDPEKSMEIQYDLGSDIVMIFDECTPYPADWDYAKRSMEMSLRWARRSRDRFDSLGNKNALFGIIQGSVYEDLRDVSVKGLVEIGFDGYAVGGLAVGEPKQDMHRILEHVCPQLPQDKPRYLMGVGKPEDLVEGVRRGVDMFDCVMPTRNARNGHLFVTEGVVKIRNARYKDDTAPLDAECDCYTCRNYSRAYLYHLDRCNEILGARLNTIHNLRYYQRLMAGLRQAIEEGKLEHFVTEFYQRTGKEVPPLTSDNSSMREI

SEQ ID NO: 58608 - protein, 382 aa, Pantoea ananas
  misc_feature (1)..(382): tr|A0A2V2XV32|A0A2V2XV32_PANAN Queuine tRNA-ribosyltran sferase OS=Pantoea ananas OX=553 GN=tgt PE=3 SV=1
MKFELDTTDGRARRGRLIFDRGVVETPAFMPVGTYGTVKGMTPEEVQETGAQIILGNTFHLWLRPGQEIMKLHGDLHDFMQWKGPILTDSGGFQVFSLGDIRKITEAGVHFRNPINGDSIFLDPEKSMEIQYDLGSDIVMIFDECTPYPADWDYAKRSMEMSLRWAQRSRDRFDSLGNKNALFGIIQGSVYEDLRDVSVKGLVEIGFDGYAVGGLAVGEPKEDMHRILEHVCPQIPADKPRYLMGVGKPEDLVEGVRRGVDMFDCVMPTRNARNGHLFVTDGVVKIRNAKHKDDVSPLDAECDCYTCRNYSRAYLHHLDRCNEILGARLNTIHNLRYYQRLMAGLRQAIEEGKLERFVSEFYQRTGKAVPPLTSDNSSMREI

SEQ ID NO: 58609 - protein, 353 aa, Pantoea ananatis
  misc_feature (1)..(353): tr|A0A0H3KTI9|A0A0H3KTI9_PANAA Queuine tRNA-ribosyltran sferase OS=Pantoea ananatis (strain AJ13355) OX=932677 GN=tgt PE=3 SV=1
MPVGTYGTVKGMTPEEVQETGAQIILGNTFHLWLRPGQEIMKLHGDLHDFMQWKGPILTDSGGFQVFSLGDIRKITEAGVHFRNPINGDSIFLDPEKSMEIQYDLGSDIVMIFDECTPYPADWDYARRSMEMSLRWAQRSRDRFDSLGNKNALFGIIQGSVYEDLRDVSVKGLVEIGFDGYAVGGLAVGEPKEDMHRILEHVCPQIPADKPRYLMGVGKPEDLVEGVRRGVDMFDCVMPTRNARNGHLFVTDGVVKIRNAKHKDDVSPLDAECDCYTCRNYSRAYLHHLDRCNEILGARLNTIHNLRYYQRLMAGLRQAIEEGKLERFVSEFYQRTGKAVPPLTSDNSSMREI

SEQ ID NO: 58610 - protein, 382 aa, Pantoea ananatis; identical to SEQ ID NO: 58608
  misc_feature (1)..(382): tr|D4GL84|D4GL84_PANAM Queuine tRNA-ribosyltransferase OS=Pantoea ananatis (strain LMG 20103) OX=706191 GN=tgt PE=3 SV=1

SEQ ID NO: 58611 - protein, 382 aa, Pantoea anthophila
  misc_feature (1)..(382): tr|A0A506PB39|A0A506PB39_9GAMM Queuine tRNA-ribosyltran sferase OS=Pantoea anthophila OX=470931 GN=tgt PE=3 SV= 1
MKFELDTTDGRARRGRLIFDRGVVETPAFMPVGTYGTVKGMTPEEVEDTGAQIILGNTFHLWLRPGQEIMKLHGDLHDFMQWKGPILTDSGGFQVFSLGDIRKITEAGVHFRNPINGDPIFLDPEKSMEIQYDLGSDIVMIFDECTPYPADWDYAKRSMEMSLRWARRSRDRFDSLGNKNALFGIIQGSVYEDLRDVSVKGLVEIGFDGYAVGGLAVGEPKQDMHRILEHVCPQLPQDKPRYLMGVGKPEDLVEGVRRGVDMFDCVMPTRNARNGHLFVTEGVVKIRNARYKDDTAPLDAECDCYTCRNYSRAYLYHLDRCNEILGARLNTIHNLRYYQRLMAGLRQAIEEGRLERFVTEFYQRTGKEVPPLTSDNSSMREI

SEQ ID NO: 58612 - protein, 376 aa, Pantoea coffeiphila
  misc_feature (1)..(376): tr|A0A2S9IHA8|A0A2S9IHA8_9GAMM Queuine tRNA-ribosyltran sferase OS=Pantoea coffeiphila OX=1465635 GN=tgt PE=3 S V=1
MKFELDTTDGRARRGRLVFDRGVVETPAFMPVGTYGTVKGMTPEEVEATGAQIILGNTFHLWLRPGQEIMKLHGDLHDFMQWKGPILTDSGGFQVFSLGDIRKITEKGVHFRNPINGDAIFLDPEKSMEIQYDLGSDIVMIFDECTPYPADWDYAKRSMEMSLRWAQRSRDRFDSLGNKNALFGIIQGSVYEDLRDVSVKGLVEIGFDGYAVGGLAVGEPKEDMHRILEHVCPQLPEDKPRYLMGVGKPQDLVEGVRRGIDMFDCVMPTRNARNGHLFVTDGVVKIRNAKYKDDTSPLDAECDCYTCRNYSRAYLYHLDRCNEILGARLNTIHNLRYYQRLMAGLRKAIEEGKLEHFVTEFYQRTGTAVPPLTSDN

SEQ ID NO: 58613 - protein, 382 aa, Pantoea conspicua
  misc_feature (1)..(382): tr|A0A1X1BY87|A0A1X1BY87_9GAMM Queuine tRNA-ribosyltran sferase OS=Pantoea conspicua OX=472705 GN=tgt PE=3 SV=1
MKFELDTTDGRARRGRLIFDRGVVETPAFMPVGTYGTVKGMTPEEVQETGAQIILGNTFHLWLRPGQEIMKLHGDLHDFMQWKGPILTDSGGFQVFSLGDIRKITEAGVHFRNPINGDAIFLDPEKSMEIQYDLGSDIVMIFDECTPYPADWDYAKRSMEMSLRWAKRSRDRFDSLGNKNALFGIIQGSVYEDLRDVSVKGLVEIGFDGYAVGGLAVGEPKQDMHRILEHVCPQLPQDKPRYLMGVGKPEDLVEGVRRGVDMFDCVMPTRNARNGHLFVTDGVVKIRNAKYKDDTAPLDAECDCYTCRNYSRAYLYHLDRCNEILGARLNTIHNLRYYQRLMAGLRQAIEEGKLERFVNEFYQRTGKEVPPLTSDNSSMREI

SEQ ID NO: 58614 - protein, 374 aa, Pantoea cypripedii
  misc_feature (1)..(374): tr|A0A1X1ES22|A0A1X1ES22_PANCY Queuine tRNA-ribosyltran sferase OS=Pantoea cypripedii OX=55209 GN=tgt PE=3 SV=1
MKFELDTTDGRARRGRLVFDRGVVETPAFMPVGTYGTVKGMTPEEVQDTGAQIILGNTFHLWLRPGQEIMKLHGDLHDFMQWKGPILTDSGGFQVFSLGDIRKITEAGVHFRNPINGDPIFLDPEKSMEIQFDLGSDIVMIFDECTPYPADWDYAKRSMEMSLRWAKRSRDRFDSLGNKNALFGIIQGSVYEDLRDVSVKGLVEIGFDGYAVGGLAVGEPKEDMHRILEHVCPQIPHDKPRYLMGVGKPEDLVEGVRRGIDMFDCVMPTRNARNGHLFVTDGVVKIRNAKHKDDTSPLDAECDCYTCRNYSRAYLHHLDRCNEILGARLNTIHNLRYYQRLMAGLRKAIEEGKLEHFVSEFYQRTGKAVPPLNV

SEQ ID NO: 58615 - protein, 382 aa, Pantoea deleyi
  misc_feature (1)..(382): tr|A0A506Q384|A0A506Q384_9GAMM Queuine tRNA-ribosyltran sferase OS=Pantoea deleyi OX=470932 GN=tgt PE=3 SV=1
MKFELDTTDGRARRGRLIFDRGVVETPAFMPVGTYGTVKGMTPEEVQETGAQIILGNTFHLWLRPGQEIMKLHGDLHDFMQWKGPILTDSGGFQVFSLGDIRKITEAGVHFRNPINGDPIFLDPEKSMEIQYDLGSDIVMIFDECTPYPADWDYAKRSMEMSLRWAKRSRDRFDSLGNKNALFGIIQGSVYEDLRDVSVKGLVEIGFDGYAVGGLAVGEPKQDMHRILEHVCPQLPQDKPRYLMGVGKPEDLVEGVRRGVDMFDCVMPTRNARNGHLFVTEGVVKIRNARYKDDTAPLDAECDCYTCRNYSRAYLYHLDRCNEILGARLNTIHNLRYYQRLMAGLRQAIEEGKLERFVTEFYQRTGKEVPPLTSDNSSMREI

SEQ ID NO: 58616 - protein, 374 aa, Pantoea dispersa
  misc_feature (1)..(374): tr|A0A437T8I7|A0A437T8I7_9GAMM Queuine tRNA-ribosyltran sferase OS=Pantoea dispersa OX=59814 GN=tgt PE=3 SV=1
MKFELDTTDGRARRGRLVFDRGVVETPAFMPVGTYGTVKGMTPEEVKETGAQILLGNTFHLWLRPGQEIMKLHGDLHDFMHWQGPILTDSGGFQVFSLGDIRKITEAGVHFRNPINGDPIFLDPEKSMEIQYDLGSDIVMIFDECTPYPADWDYAKRSMEMSLRWAQRSRDRFDALGNKNALFGIIQGGVYEDLRDVSVKGLVEIGFDGYAVGGLAVGEPKEDMHRILEHVCPQIPQDKPRYLMGVGKPEDLVEGVRRGIDMFDCVMPTRNARNGHLFVTDGVVKIRNAKYKDDTAPLDAECDCYTCRNYTRAYLHHLDRCNEILGARLNTIHNLRYYQRLMAGLRQAIEEGKLEHFVSEFYQRTGKAVPPLNV

SEQ ID NO: 58617 - protein, 374 aa, Pantoea dispersa
  misc_feature (1)..(374): tr|A0A518XAF9|A0A518XAF9_9GAMM Queuine tRNA-ribosyltran sferase OS=Pantoea dispersa OX=59814 GN=tgt PE=3 SV=1
MKFELDTTDGRARRGRLVFERGVVETPAFMPVGTYGTVKGMTPEEVKETGAQILLGNTFHLWLRPGQEIMKLHGDLHDFMHWPGPILTDSGGFQVFSLGDIRKITEAGVHFRNPINGDAIFLDPEKSMEIQHDLGSDIVMIFDECTPYPADWDYAKRSMEMSLRWAQRSRDRFDALGNKNALFGIIQGGVYEDLRDVSVKGLVEIGFDGYAVGGLAVGEPKEDMHRILEHVCPQIPQDKPRYLMGVGKPEDLVEGVRRGIDMFDCVMPTRNARNGHLFVTDGVVKIRNAKYKDDTAPLDAECDCYTCRNYTRAYLHHLDRCNEILGARLNTIHNLRYYQRLMAGLRQAIEEGKLEHFVSEFYQRTGKAVPPLNV

SEQ ID NO: 58618 - protein, 382 aa, Pantoea eucalypti; identical to SEQ ID NO: 58607
  misc_feature (1)..(382): tr|A0A506PS24|A0A506PS24_9GAMM Queuine tRNA-ribosyltran sferase OS=Pantoea eucalypti OX=470933 GN=tgt PE=3 SV=1

SEQ ID NO: 58619 - protein, 374 aa, Pantoea latae
  misc_feature (1)..(374): tr|A0A1V9DI93|A0A1V9DI93_9GAMM Queuine tRNA-ribosyltran sferase OS=Pantoea latae OX=1964541 GN=tgt PE=3 SV=1
MKFELDTTDGRARRGRLIFDRGVVETPAFMPVGTYGTVKGMTPEEVQETGAQIILGNTFHLWLRPGQEIMKLHGDLHDFMQWKGPILTDSGGFQVFSLGDIRKITEAGVHFRNPINGDPIFLDPEKSMEIQFDLGSDIVMIFDECTPYPADWDYAKRSMEMSLRWAQRSRDRFDSLGNKNALFGIIQGSVYEDLRDVSVKGLVEIGFDGYAVGGLAVGEPKEDMHRILEHVCPQIPQDKPRYLMGVGKPEDLVEGVRRGVDMFDCVMPTRNARNGHLFVTDGVVKIRNAKHKDDTSPLDAECDCYTCRNYSRAYLHHLDRCNEILGARLNTIHNLRYYQRLMAGLRQAIEEGKLERFVSEFYQRTGKAVPPLNV

SEQ ID NO: 58620 - protein, 374 aa, Pantoea rodasii
  misc_feature (1)..(374): tr|A0A2M9WAK6|A0A2M9WAK6_9GAMM Queuine tRNA-ribosyltran sferase OS=Pantoea rodasii OX=1076549 GN=tgt PE=3 SV=1
MKFELDTTDGRARRGRLVFDRGVVETPAFMPVGTYGTVKGMTPEEVKETGAQILLGNTFHLWLRPGQEIMKLHGDLHDFMNWQGPILTDSGGFQVFSLGDIRKITEAGVHFRNPINGDPIFLDPEKSMEIQYDLGSDVVMIFDECTPYPADWDYAKRSMEMSLRWAQRSRDRFDSLGNKNALFGIIQGGVYEDLRDVSVKGLVDIGFDGYAVGGLAVGEPKEDMHRILEHVCPQIPHDKPRYLMGVGKPEDLVEGVRRGIDMFDCVMPTRNARNGHLFVTDGVVKIRNAKYKDDTTTLDAECDCYTCRNYSRAYLYHLDRCNEILGARLNTIHNLRYYQRLMAGLRNAIEEGKLEHFVSEFYQRTGKAVPPLNV

SEQ ID NO: 58621 - protein, 374 aa, Pantoea rodasii
  misc_feature (1)..(374): tr|A0A0B1RBL6|A0A0B1RBL6_9GAMM Queuine tRNA-ribosyltran sferase OS=Pantoea rodasii OX=1076549 GN=tgt PE=3 SV=1
MKFELDTTDGRARRGRLVFDRGVVETPAFMPVGTYGTVKGMTPEEVKDTGAQILLGNTFHLWLRPGQEIMKLHGDLHDFMNWQGPILTDSGGFQVFSLGDIRKITEAGVHFRNPINGDPIFLDPEKSMEIQYDLGSDVVMIFDECTPYPADWDYAKRSMEMSLRWAQRSRDRFDSLGNKNALFGIIQGGVYEDLRDVSVKGLVDIGFDGYAVGGLAVGEPKEDMHRILEHVCPQIPQDKPRYLMGVGKPEDLVEGVRRGIDMFDCVMPTRNARNGHLFVTDGVVKIRNAKYKDDTTTLDAECDCYTCRNYSRAYLYHLDRCNEILGARLNTIHNLRYYQRLMAGLRKAIEEGKLEHFVSEFYQRTGKAVPPLNV

SEQ ID NO: 58622 - protein, 374 aa, Pantoea rwandensis
  misc_feature (1)..(374): tr|A0A1X1CUD9|A0A1X1CUD9_9GAMM Queuine tRNA-ribosyltran sferase OS=Pantoea rwandensis OX=1076550 GN=tgt PE=3 SV =1
MKFELDTTDGRARRGRLVFDRGVVETPAFMPVGTYGTVKGMTPEEVKETGAQILLGNTFHLWLRPGQEIMKLHGDLHDFMNWQGPILTDSGGFQVFSLGDIRKITEAGVHFRNPINGDPIFLDPEKSMEIQYDLGSDVVMIFDECTPYPADWDYAKRSMEMSLRWAQRSRDRFDSLGNKNALFGIIQGGVYEDLRDVSVKGLVDIGFDGYAVGGLAVGEPKEDMHRILEHVCPQIPQDKPRYLMGVGKPEDLVEGVRRGIDMFDCVMPTRNARNGHLFVTDGVVKIRNAKYKDDTTTLDAECDCYTCRNYSRAYLYHLDRCNEILGARLNTIHNLRYYQRLMAGLRKAIEEGKLEHFVSEFYQRTGKAVPPLNV

SEQ ID NO: 58623 - protein, 375 aa, Pantoea sesami; identical to SEQ ID NO: 54949
  misc_feature (1)..(375): tr|A0A1M5LSY3|A0A1M5LSY3_9GAMM Queuine tRNA-ribosyltran sferase OS=Pantoea sesami OX=1881110 GN=tgt PE=3 SV=1

SEQ ID NO: 58624 - protein, 391 aa, Pantoea sp.; identical to SEQ ID NO: 54946
  misc_feature (1)..(391): tr|E0LTP8|E0LTP8_9GAMM Queuine tRNA-ribosyltransferase OS=Pantoea sp. aB OX=517433 GN=tgt PE=3 SV=1

SEQ ID NO: 58625 - protein, 374 aa, Pantoea sp.
  misc_feature (1)..(374): tr|A0A443I9D2|A0A443I9D2_9GAMM Queuine tRNA-ribosyltran sferase OS=Pantoea sp. LMG 27579 OX=1490476 GN=tgt PE=3 SV=1
MKFELDTTDGRARRGRLVFERGVVETPAFMPVGTYGTVKGMTPEEVQDTGAQIILGNTFHLWLRPGQEIMKLHGDLHDFMQWKGPILTDSGGFQVFSLGDIRKITEAGVHFRNPINGDPIFLDPEKSMEIQYDLGSDIVMIFDECTPYPADWDYAKRSMEMSLRWAQRSRDRFDSLGNKNALFGIIQGSVYEDLRDVSVKGLVEIGFDGYAVGGLAVGEPKEDMHRILEHVCPQIPEDKPRYLMGVGKPEDLVEGVRRGIDMFDCVMPTRNARNGHLFVTDGVVKIRNAKHKDDTSPLDAECDCYTCRNYSRAYLHHLDRCNEILGARLNTIHNLRYYQRLMAGLRQAIEEGKLERFVTEFYQRTGKAVPPLAV

SEQ ID NO: 58626 - protein, 382 aa, Pantoea stewartii
  misc_feature (1)..(382): tr|H3R9E4|H3R9E4_PANSE Queuine tRNA-ribosyltransferase OS=Pantoea stewartii subsp. stewartii DC283 OX=660596 G N=tgt PE=3 SV=1
MKFELDTTDGRARRGRLIFDRGVVETPAFMPVGTYGTVKGMTPEEVQDTGAQIILGNTFHLWLRPGQEIMKLHGDLHDFMQWKGPILTDSGGFQVFSLGDIRKITEAGVHFRNPINGDQIFLDPEKSMEIQYDLGSDIVMIFDECTPYPADWDYAKRSMEMSLRWAQRSRDRFDSLGNKNALFGIIQGSVYEDLRDVSVKGLVEIGFDGYAVGGLAVGEPKEDMHRILEHVCPQIPEDKPRYLMGVGKPEDLVEGVRRGVDMFDCVMPTRNARNGHLFVTDGVVKIRNAKHKDDVSPLDAECDCYTCRNYSRAYLHHLDRCNEILGARLNTIHNLRYYQRLMAGLRQAIEEGKLERFVTEFYQRTGKAVPPLTSDNSSMREI

SEQ ID NO: 58627 - protein, 382 aa, Pantoea vagans; identical to SEQ ID NO: 58606
  misc_feature (1)..(382): tr|E1SF65|E1SF65_PANVC Queuine tRNA-ribosyltransferase OS=Pantoea vagans (strain C9-1) OX=712898 GN=tgt PE=3 S V=1

SEQ ID NO: 58628 - protein, 382 aa, Pantoea vagans; identical to SEQ ID NO: 58606
  misc_feature (1)..(382): tr|A0A2R4J5H6|A0A2R4J5H6_9GAMM Queuine tRNA-ribosyltran sferase OS=Pantoea vagans OX=470934 GN=tgt PE=3 SV=1

SEQ ID NO: 58629 - protein, 374 aa, Pantoea wallisii
  misc_feature (1)..(374): tr|A0A1X1DCS5|A0A1X1DCS5_9GAMM Queuine tRNA-ribosyltran sferase OS=Pantoea wallisii OX=1076551 GN=tgt PE=3 SV=1
MKFELDTTDGRARRGRLVFDRGVVETPAFMPVGTYGTVKGMTPEEVKETGAQILLGNTFHLWLRPGQAIMKLHGDLHDFMNWQGPILTDSGGFQVFSLGDIRKITEAGVHFRNPINGDPIFLDPEKSMEIQYDLGSDIVMIFDECTPYPADWDYAKRSMEMSLRWAQRSRDRFDSLGNKNALFGIIQGGVYEDLRDVSVKGLVEIGFDGYAVGGLAVGEPKEDMHRILEHVCPQIPQDKPRYLMGVGKPEDLVEGVRRGIDMFDCVMPTRNARNGHLFVTDGIVKIRNAKYKDDTAPLDAECDCYTCRNYTRAYLHHLDRCNEILGARLNTIHNLRYYQRLMAGLRQAIEEGKLEHFVSEFYQRTGKAVPPLNV

SEQ ID NO: 58630 - protein, 379 aa, Papillibacter cinnamivorans
  misc_feature (1)..(379): tr|A0A1W2CHM3|A0A1W2CHM3_9FIRM Queuine tRNA-ribosyltran sferase OS=Papillibacter cinnamivorans DSM 12816 OX=112 2930 GN=tgt PE=3 SV=1
MFTLKGKEGRARRGSLQTPHGKVETPVFMNVATQAAIKGGLDAHDLKKVGCRVALSNTYHLHLRPGDEVIRELGGLHRFMGWDGPSLTDSGGFQVFSLAGLRKISEEGVLFASHVDGRRIFMSPEDSMRIQANLGADIAMAFDECVENPSTYEYVQASCERTYRWLLRCRDEHLRQREIPGAVNPGQLLFGINQGGIHEDLRIDNMRKIAELGLDGYAIGGLAVGEPTETMYRVIDAVEPFMPEDRPRYLMGVGTPENILECVHLGIDFFDCVMPARNARHGKLYTWQGTINIKNEAYKTDSSPVDPECSCPLCRNYSRAYLRHLFKAEEILGLRLAVLHNLYFYNSFLERIRMALEAKAFEKFRAEHAGRWTRGDSRA

SEQ ID NO: 58631 - protein, 376 aa, Parabacteroides acidifaciens
  misc_feature (1)..(376): tr|A0A3D8HBB1|A0A3D8HBB1_9BACT Queuine tRNA-ribosyltran sferase OS=Parabacteroides acidifaciens OX=2290935 GN=t gt PE=3 SV=1
MKFELQHNDTKSNARAGLITTDHGVIETPIFMPVGTQGTVKGVHMTELEEDINAQIILGNTYHLYLRPGLEILEQAGGLHKFNTWSRPILTDSGGFQVFSLSENRKLHEEGAMFRSHIDGSKHMFTPEKVMDIQRIIGADIIMAFDECCPGDADYDYAKKSLGLTERWLDRCFDRFNSTEPKYGYRQSLFPIVQGCVYPDLRREAAENVARKEADGNAIGGLAVGEPTEKMYEMIEVVNEILPKDKPRYLMGVGTPINILESIERGIDMFDCIMPTRNGRNGQLFTRFGTINMRNKKWENDFSPIDPDAHSAIDTRYSKAYLHHLIKVNEMLGLQLASIHNLAFYLWLVKEARKHIIAGDFTTWKSEMVRQLSNRL

SEQ ID NO: 58632 - protein, 376 aa, Parabacteroides chartae
  misc_feature (1)..(376): tr|A0A1T5BXF7|A0A1T5BXF7_9BACT Queuine tRNA-ribosyltran sferase OS=Parabacteroides chartae OX=1037355 GN=tgt PE =3 SV=1
MKFELQYKDTKTNARAGLITTDHGVIETPIFMPVGTQGSVKAVHMTELKEDIKAQIILGNTYHLYLRPGIEILKQAGGLHKFNSWNGPILTDSGGFQVFSLAENRKLHEEGAEFRSHIDGSKHLFTPEKVMDIERTIGADIIMAFDECCPGDADYNYAKESLGLTERWLDRCFNRFNSTDPMYGYNQSLFPIVQGCVYPDLRIRAAENVASKGADGNAIGGLAVGEPTEKMYEMIEVVNDILPKDKPRYLMGVGTPVNLLEAIERGVDMFDCIMPTRNGRNGQLFTKYGTMNMRNQKWENDFSPLDTEGTSYVDSLYSKAYVRHLFKTNELLGLQIASIHNLAFYLWLVGEARKHIIAGDFSIWKSGMVTQLSNRL

SEQ ID NO: 58633 - protein, 376 aa, Parabacteroides chinchillae
  misc_feature (1)..(376): tr|A0A1H5SWD3|A0A1H5SWD3_9BACT Queuine tRNA-ribosyltran sferase OS=Parabacteroides chinchillae OX=871327 GN=tgt PE=3 SV=1
MNFELQYNDTKSNARAGLITTDHGVIETPIFMPVGTQGTVKGVHMTELKEDVNAQIILGNTYHLYLRPGIHILEQAGGLHKFNSWDRPILTDSGGFQVFSLSDNRKLHEEGAEFRSHIDGSRHMFSPEKVMDIQRSIGADIIMAFDECCPGDANYEYARKSLELTERWLNRCFERFNSTDPKYGYSQCLFPIVQGCVYTDLRRRAAENIAQKGADGNAIGGLAVGEPTEKMYEMIEVVNEILPKDKPRYLMGVGTPVNILEAIERGVDMFDCIMPTRNGRNGQIFTRFGTLNMRNKKWENDFSPIDPDANSYVDTLYSRAYLHHLIKVNELLGLQIASIHNLAFYIWLVKEARKHIISGDFTTWKSGMVRQLSNRL

SEQ ID NO: 58634 - protein, 376 aa, Parabacteroides distasonis
  misc_feature (1)..(376): tr|A0A069SBW4|A0A069SBW4_9BACT Queuine tRNA-ribosyltran sferase OS=Parabacteroides distasonis str. 3776 Po2 i O X=1339341 GN=tgt PE=3 SV=1
MTFELQYNDTKSNARAGLITTDHGVIETPIFMPVGTQGTVKGVHMTELKEDTKAQIILGNTYHLYLRPGIQILEQAGGLHKFNTWDRPILTDSGGFQVFSLSDNRKLHEEGAEFRSHLDGSKHMFTPEKVMDIERSIGADIIMAFDECCPGDADYNYAKQSLGLTERWLDRCFARFNSTEPKYGYRQSLFPIVQGCVYTDLRQRAAENVARKGADGNAIGGLAVGEPTDKMYEMIEVVNEILPKDKPRYLMGVGTPINLLEGIERGIDMFDCIMPTRNGRNGQLFTRFGTINMRNKKWENDFSPVDPDGHSYVDTLYSKAYLHHLIKAKEMLGLQIASIHNLAFYLWLVKEARAHIIAGDFTTWKSGMVRQLANRL

SEQ ID NO: 58635 - protein, 376 aa, Parabacteroides distasonis
  misc_feature (1)..(376): tr|A0A3L7ZRU6|A0A3L7ZRU6_9BACT Queuine tRNA-ribosyltran sferase OS=Parabacteroides distasonis OX=823 GN=tgt PE= 3 SV=1
MTFELQYNDTKSNARAGLITTDHGVIETPIFMPVGTQGTVKGVHMTELKEDTKAQIILGNTYHLYLRPGIHILEQAGGLHKFNTWDQPILTDSGGFQVFSLSDNRKLHEEGAEFRSHLDGSKHMFTPEKVMDIERSIGADIIMAFDECCPGDADYNYAKQSLGLTERWLDRCFARFNSTEPKYGYRQSLFPIVQGCVYTDLRQRAAENVARKGADGNAIGGLAVGEPTDKMYEMIEVVNDILPKDKPRYLMGVGTPINLLEGIERGIDMFDCIMPTRNGRNGQLFTRFGTINMRNKKWENDFSPVDPDGHSYVDTLYSKAYLHHLIKAKEMLGLQIASIHNLAFYLWLVKEARAHIIAGDFTTWKSGMVRQLANRL

SEQ ID NO: 58636 - protein, 376 aa, Parabacteroides goldsteinii
  misc_feature (1)..(376): tr|A0A0J6CNN1|A0A0J6CNN1_9BACT Queuine tRNA-ribosyltran sferase OS=Parabacteroides goldsteinii OX=328812 GN=tgt PE=3 SV=1
MKFELQHNDTKTNARAGLITTDHGVIETPIFMPVGTQGTVKGVHMTELKEDIDAQIILGNTYHLYLRPGLEILEKAGGLHKFNTWDRPILTDSGGFQVFSLSDNRKLHEEGAEFRSHIDGSKHLFTPEKVMDIQRIIGADIIMAFDECCPGDADYDYAKKSLGLTERWLDRCFDRFNATEPKYGYQQCLFPIVQGCVYPDLRRHAAENVARKGADGNAIGGLAVGEPTEKMYEMIEVVNEILPKDKPRYLMGVGTPINLLEAIERGVDMFDCIMPTRNGRNGQLFTRFGTINIRNKKWEDDFSPIDSDGNSYVDTLYSKAYLHHLVKVNELLGLQIASIHNLAFYLWLVKEARRHIIAGDFATWKSGMVQQLDNRL

SEQ ID NO: 58637 - protein, 376 aa, Parabacteroides goldsteinii; identical to SEQ ID NO: 58636
  misc_feature (1)..(376): tr|A0A0F5IXX6|A0A0F5IXX6_9BACT Queuine tRNA-ribosyltran sferase OS=Parabacteroides goldsteinii DSM 19448 = WAL 12034 OX=927665 GN=tgt PE=3 SV=1

SEQ ID NO: 58638 - protein, 376 aa, Parabacteroides gordonii
  misc_feature (1)..(376): tr|A0A0F5IVD1|A0A0F5IVD1_9BACT Queuine tRNA-ribosyltran sferase OS=Parabacteroides gordonii MS-1 = DSM 23371 OX =1203610 GN=tgt PE=3 SV=1
MKFELQHNDTKTNARAGLITTDHGVIETPIFMPVGTQGTVKGVHMTELKEDIKAQIILGNTYHLYLRPGLEILKKAGGLHKFNTWDRPILTDSGGFQVFSLSDNRKLHEEGAEFRSHIDGSKHLFTPEKVMDIQRIIGADIIMAFDECCPGDADYDYAKKSLGLTERWLDRCFARFNSTDPKYGYQQCLFPIVQGCVYPDLRRRAAENIAEKGADGNAIGGLAVGEPTEKMYEMIEVVNDILPKDKPRYLMGVGTPINLLEAIERGVDMFDCIMPTRNGRNGQIFTQYGTINLRNKKWEDDFSPIDPAANSYVDTLYSKAYLHHLIKANEMLGLQIASVHNLAFYLWLVKEARKHIIAGDFATWKGMMVGQLGNRL

SEQ ID NO: 58639 - protein, 376 aa, Parabacteroides johnsonii
  misc_feature (1)..(376): tr|A0A1Y3ZFV7|A0A1Y3ZFV7_9BACT Queuine tRNA-ribosyltran sferase OS=Parabacteroides johnsonii OX=387661 GN=tgt P E=3 SV=1
MKFELQHNDTKSNARAGLITTDHGVIETPIFMPVGTQGTVKGVHMTELEEDINAQIILGNTYHLYLRPGLEILEQAGGLHKFNTWNRPILTDSGGFQVFSLSENRKLHEEGAMFRSHIDGSKHLFTPEKVMDIQRIIGADIIMAFDECCPGDADYEYAKKSLGLTERWLDRCFERFNSTEPKYGYQQSLFPIVQGCVYPELRRKAAENVAKKGADGNAIGGLAVGEPTEKMYEMIEVVNEILPKDKPRYLMGVGTPINILEGIERGIDMFDCIMPTRNGRNGQIFTRFGTINMRNKKWENDFSPIDPDAHSAIDTRYSKAYLHHLIKVNEMLGLQLASIHNLAFYLWLVKEARKHIIAGDFTTWKSEMVRQLSNRL

SEQ ID NO: 58640 - protein, 345 aa, Parabacteroides johnsonii
  misc_feature (1)..(345): tr|K5ZT55|K5ZT55_9BACT Queuine tRNA-ribosyltransferase OS=Parabacteroides johnsonii CL02T12C29 OX=999419 GN=tg t PE=3 SV=1
MPVGTQGTVKGVHMTELEEDINAQIILGNTYHLYLRPGLEILEQAGGLHKFNTWNRPILTDSGGFQVFSLSENRKLHEEGAMFRSHIDGSKHLFTPEKVMDIQRIIGADIIMAFDECCPGDADYEYAKKSLGLTERWLDRCFERFNSTEPKYGYQQSLFPIVQGCVYPELRRKAAENVAKKGADGNAIGGLAVGEPTEKMYEMIEVVNEILPKDKPRYLMGVGTPINILEGIERGIDMFDCIMPTRNGRNGQIFTRFGTINMRNKKWENDFSPIDPDAHSAIDTRYSKAYLHHLIKVNEMLGLQLASIHNLAFYLWLVKEARKHIIAGDFTTWKSEMVRQLSNRL

SEQ ID NO: 58641 - protein, 345 aa, Parabacteroides merdae
  misc_feature (1)..(345): tr|R6Y1G0|R6Y1G0_9BACT Queuine tRNA-ribosyltransferase OS=Parabacteroides merdae CAG:48 OX=1263094 GN=tgt PE=3 SV=1
MPVGTQGTVKGVHMTELEEDINAQIILGNTYHLYLRPGLEILEQAGGLHKFNTWNRPILTDSGGFQVFSLSENRKLHEEGAMFRSHIDGSKHLFTPEKVMDIQRIIGADIIMAFDECCPGDADYEYAKKSLGLTERWLDRCFERFNSTEPKYGYQQSLFPIVQGCVYPELRRKAAENVAEKGADGNAIGGLAVGEPTEKMYEMIEVVNEILPKDKPRYLMGVGTPINILEGIERGIDMFDCIMPTRNGRNGQIFTRFGTINMRNKKWENDFSPIDPDAHSAIDTRYSKAYLHHLIKVNEMLGLQLASIHNLAFYLWLVKEARKHIIAGDFTTWKSEMVRQLSNRL

SEQ ID NO: 58642 - protein, 376 aa, Parabacteroides merdae
  misc_feature (1)..(376): tr|A0A351DXN6|A0A351DXN6_9BACT Queuine tRNA-ribosyltran sferase OS=Parabacteroides merdae OX=46503 GN=tgt PE=3 SV=1
MKFELQHNDTKSNARAGLITTDHGVIETPIFMPVGTQGTVKGVHMTELEEDINAQIILGNTYHLYLRPGLEILEQAGGLHKFNTWNRPILTDSGGFQVFSLSENRKLHEEGAMFRSHIDGSKHLFTPEKVMDIQRIIGADIIMAFDECCPGDADYEYAKKSLGLTERWLDRCFERFNSTEPKYGYQQSLFPIVQGCVYPELRRKAAENVAEKGADGNAIGGLAVGEPTEKMYEMIEVVNEILPKDKPRYLMGVGTPINILEGIERGIDMFDCIMPTRNGRNGQIFTRFGTINMRNKKWENDFSPIDPDAHSAIDTRYSKAYLHHLIKVNEMLGLQLASIHNLAFYLWLVKEARKHIIAGDFTTWKSEMVRQLSNRL

SEQ ID NO: 58643 - protein, 376 aa, Parabacteroides sp.
  misc_feature (1)..(376): tr|A0A3E4P906|A0A3E4P906_9BACT Queuine tRNA-ribosyltran sferase OS=Parabacteroides sp. 20_3 OX=469591 GN=tgt PE =3 SV=1
MTFELQYNDTKSNARAGLITTDHGVIETPIFMPVGTQGTVKGVHMTELKEDTKAQIILGNTYHLYLRPGIQILEQAGGLHKFNTWDRPILTDSGGFQVFSLSDNRKLHEEGAEFRSHLDGSKHMFTPEKVMDIERSIGADIIMAFDECCPGDADYNYAKQSLGLTERWLDRCFARFNSTEPKYGYRQSLFPIVQGCVYTDLRQKAAENVARKGADGNAIGGLAVGEPTDKMYEMIEVVNEILPKDKPRYLMGVGTPINLLEGIERGIDMFDCIMPTRNGRNGQLFTRFGTINMRNKKWENDFSPVDPDGHSYVDTLYSKAYLHHLIKAKEMLGLQIASIHNLAFYLWLVKEARAHIIAGDFTTWKSGMVRQLANRL

SEQ ID NO: 58644 - protein, 376 aa, Parabacteroides sp.
  misc_feature (1)..(376): tr|C7X769|C7X769_9BACT Queuine tRNA-ribosyltransferase OS=Parabacteroides sp. D13 OX=563193 GN=tgt PE=3 SV=1
MTFELQYNDTKSNARAGLITTDHGVIETPIFMPVGTQGTVKGVHMTELKEDTKAQIILGNTYHLYLRPGIQILEQAGGLHKFNTWDRPILTDSGGFQVFSLSDNRKLHEEGAEFRSHLDGSKHMFTPEKVMDIERSIGADIIMAFDECCPGDADYNYAKQSLGLTERWLDRCFARFNSTEPKYGYRQSLFPIVQGCVYTDLRQRAAENVARKGADGNAIGGLAVGEPTDKMYEMIEVVNDILPKDKPRYLMGVGTPINLLEGIERGIDMFDCIMPTRNGRNGQLFTRFGTINMRNKKWENDFSPVDPDGHSYVDTLYSKAYLHHLIKAKEMLGLQIASIHNLAFYLWLVKEARAHIIAGDFTTWKSGMVRQLANRL

SEQ ID NO: 58645 - protein, 404 aa, Paraburkholderia aromaticivorans
  misc_feature (1)..(404): tr|A0A248VE54|A0A248VE54_9BURK Queuine tRNA-ribosyltran sferase OS=Paraburkholderia aromaticivorans OX=2026199 GN=tgt PE=3 SV=1
MTDGHPVSTRADHGAYLGEHVRPENGLTFELLGVDGLARRGRVALNHGVVETPIFMPVGTYGTVKAVQPRELGEMHAQIILGNTFHLWLRPGLETIEAHGGLHGFMGWKKPILTDSGGFQVFSLGDLRKITEDGVTFASPINGDKLFLSPEVSMQIQKVLNSDIAMQFDECTPYATNNVPTSHKEAADSMRMSMRWAQRSIDEFNRLGNPNALFGIVQGGMFEDLRDESLAGLAEKDFHGLAIGGLSVGEPKEDMMRVLNHIGPKLPANKPHYLMGVGTPEDLVAGVAAGVDMFDCVMPTRNARNGWLFTRFGDIKIRNATHRNSLRPLDEQCGCYTCRNFTRGYLHHLHRVGEILGAQLNTIHNLHYYLELMQEIRDAIDAKMFEPFRKRFHENRARGTAEAP

SEQ ID NO: 58646 - protein, 401 aa, Paraburkholderia aspalathi
  misc_feature (1)..(401): tr|A0A1I7EMH0|A0A1I7EMH0_9BURK Queuine tRNA-ribosyltran sferase OS=Paraburkholderia aspalathi OX=1324617 GN=tgt PE=3 SV=1
MTDGHTHDTSGTCSTCASHGERPDNGLKFELLGTDGQARRGRVTLNHGVVETPIFMPVGTYGTVKAVQPRELEEMHAQIILGNTFHLWLRPGLETIEAHGGLHGFMGWKKPILTDSGGFQVFSLGDLRKITEDGVTFASPINGDKLFLSPEVSMQIQKVLNSDIVMQFDECTPYATNNVPTSHQEAADSMRMSMRWAQRSINEFNRLGNPNALFGIVQGGMFEDLRDESLAGLAEMDFHGLAIGGLSVGEPKEDMMRVLNHIGPKLPADKPHYLMGVGTPEDLVAGVAAGVDMFDCVMPTRNARNGWLFTRFGDIKIRNAAHKNSLRPLDEQCGCYTCRNFTRGYLHHLHRVGEILGAQLNTIHNLHYYLELMQEMRDAIDAKLFEPFRKRFHEDRARGID

SEQ ID NO: 58647 - protein, 397 aa, Paraburkholderia azotifigens
  misc_feature (1)..(397): tr|A0A5C6VT53|A0A5C6VT53_9BURK Queuine tRNA-ribosyltran sferase OS=Paraburkholderia azotifigens OX=2057004 GN=t gt PE=3 SV=1
MTDGHHQGAYLGDHVRPENGLKFELLKTDGLARRGRLTLNHGVVETPIFQPVGTYGTVKAIQPRELEEIRAQIILGNTFHLWLRPGLETIAAHGGLHGFMGWKRPILTDSGGFQVFSLGDLRKITEDGVTFASPINGDKLFLSPEVSMQIQKVLNSDIVMQFDECTPYATNGVPTSHKEAADSMRMSMRWAKRSIDEFNRLGNPNALFGIVQGGMFEDLRDESLAGLSEIGFHGLAIGGLSVGEPKEDMMRVLNHIGPKLPADKPHYLMGVGTPEDLVAGVAAGVDMFDCVMPTRNARNGWLFTRFGDIKIRNATHKNSLRPLDEQCGCYTCRNFTRGYLHHLHRVGEILGAQLNTIHNLHYYLELMQEMRDAIDAQMFDAFRKQFHENRARGTDQG

SEQ ID NO: 58648 - protein, 396 aa, Paraburkholderia bryophila
  misc_feature (1)..(396): tr|A0A329BV69|A0A329BV69_9BURK Queuine tRNA-ribosyltran sferase OS=Paraburkholderia bryophila OX=420952 GN=tgt PE=3 SV=1
MTDGHQSHGATFERPENGLKFELLGTDGQARRGRVTLNHGVVETPIFMPVGTYGTVKAVQPRELEEMHAQIILGNTFHLWLRPGLETIEAHGGLHSFMGWKKPILTDSGGFQVFSLGDLRKITEDGVTFASPINGDKLFLSPEVSMQIQKVLNSDIVMQFDECTPYATHNVPTSHQEAADSMRMSMRWAQRSIDEFKRLGNPNALFGIVQGGMFEDLRDESLAGLAEKDFHGLAIGGLSVGEPKEDMMRVLNHIGPKLPADKPHYLMGVGTPEDLVAGVAAGVDMFDCVMPTRNARNGWLFTRFGDVKIRNAAHKNSLRPLDEQCGCYTCRNFTRGYLHHLHRVGEILGAQLNTIHNLHYYLELMQEIRDSIDAKMFEPFRKRFHENRARGVEQAP

SEQ ID NO: 58649 - protein, 399 aa, Paraburkholderia caballeronis
  misc_feature (1)..(399): tr|A0A1H7I9B5|A0A1H7I9B5_9BURK Queuine tRNA-ribosyltran sferase OS=Paraburkholderia caballeronis OX=416943 GN=t gt PE=3 SV=1
MTDGHDATARAGDGACLGERPQNGLQFDLLATDGLARRGRLTLNHGVVETPIFMPVGTYGTVKAIQPRELEEIHAQIILGNTFHLWLRPGLDTIAAHGGLHRFMGWNRPILTDSGGFQVFSLGDLRKISEDGVRFASPVNGDKLFLSPEVSMQIQKVLNSDIVMQFDECTPYATNGVPTSHHDAAESMRMSMRWAKRSIDEFNALGNPNALFGIVQGGMFEDLRDESLAGLAQMPFHGYAIGGLSVGEPKEDMMRVLDYIAPKLPADKPHYLMGVGTPEDLVAGVAAGVDMFDCVMPTRNARNGWLFTRFGDIKIRNATHRDSLRPLDEQCGCYTCRHFTRGYLHHLHRVGEILGAQLNTIHNLHYYLELMGEMRAAIETKTFDAFRRRFHENRARGVD

SEQ ID NO: 58650 - protein, 396 aa, Paraburkholderia caledonica
  misc_feature (1)..(396): tr|A0A2Z5M871|A0A2Z5M871_9BURK Queuine tRNA-ribosyltran sferase OS=Paraburkholderia caledonica OX=134536 GN=tgt PE=3 SV=1
MTSGHDLQQTTTERPANGLHFELLGTDGQARRGRVTLNHGVVETPIFMPVGTYGTVKAVQPRELEEMHAQIILGNTFHLWLRPGLETIGAHGGLHGFMGWKKPILTDSGGFQVFSLGDLRKITEDGVTFASPINGDKLFLSPEVSMQIQKVLNSDIVMQFDECTPYATNNVPTSHKEAADSMRMSMRWAQRSIDEFQRLGNPNALFGIVQGGMFEDLRDESLAGLAEKDFHGLAIGGLSVGEPKEDMMRVLNHIGPKLPADKPHYLMGVGTPEDLVAGVAAGVDMFDCVMPTRNARNGWLFTRFGDIKIRNATHKNSLRPLDQQCGCYTCRNFTRGYLHHLHRVGEILGAQLNTIHNLHYYLELMQEMRDAIDAKMFEPFRKRFHENRARGIDEAP

SEQ ID NO: 58651 - protein, 403 aa, Paraburkholderia caribensis
  misc_feature (1)..(403): tr|A0A0N7JTN9|A0A0N7JTN9_9BURK Queuine tRNA-ribosyltran sferase OS=Paraburkholderia caribensis MBA4 OX=1323664 GN=tgt PE=3 SV=1
MTDGHNNAARANHGAYLGDHVRPDNGLKFELLKTDGQARRGRLTLNHGVVETPIFMPVGTYGTVKAIQPRELEEIRAQIILGNTFHLWLRPGLETIAAHGGLHGFMGWKRPILTDSGGFQVFSLGDLRKITEDGVTFASPINGDKLFLSPEVSMQIQKVLNSDIVMQFDECTPYATNGVPTSHQDAADSMRMSMRWAKRSIDEFNRLGNPNALFGIVQGGMFEDLRDESLAGLAEIGFHGLAIGGLSVGEPKEDMMRVLNHIGPKLPADKPHYLMGVGTPEDLVAGVSAGVDMFDCVMPTRNARNGWLFTRFGDIKIRNATHKNSLRPLDEQCGCYTCRNFTRGYLHHLHRVGEILGAQLNTIHNLHYYLELMQEMRDAIDAQMFDTFRKLFHENRARGTDQV

SEQ ID NO: 58652 - protein, 403 aa, Paraburkholderia caribensis
  misc_feature (1)..(403): tr|A0A142YWW5|A0A142YWW5_9BURK Queuine tRNA-ribosyltran sferase OS=Paraburkholderia caribensis OX=75105 GN=tgt PE=3 SV=1
MTDGHNNAARADHGAYLGDHVRPDNGLKFELLKTDGQARRGRLTLNHGVIETPIFMPVGTYGTVKAIQPRELEEIRAQIILGNTFHLWLRPGLETIAAHGGLHGFMGWKRPILTDSGGFQVFSLGDLRKITEDGVTFASPINGDKLFLSPEVSMQIQKVLNSDVVMQFDECTPYATNGVPTSHQDAADSMRMSMRWAKRSIDEFNRLGNPNALFGIVQGGMFEDLRDESLAGLAEIGFHGLAIGGLSVGEPKEDMMRVLNHIGPKLPADKPHYLMGVGTPEDLVAGVSAGVDMFDCVMPTRNARNGWLFTRFGDIKIRNATHKNSLRPLDEQCGCYTCRNFTRGYLHHLHRVGEILGAQLNTIHNLHYYLELMQEMRDAIDAQMFDAFRKVFHENRARGTDQG

SEQ ID NO: 58653 - protein, 403 aa, Paraburkholderia diazotrophica
  misc_feature (1)..(403): tr|A0A1H7D2M4|A0A1H7D2M4_9BURK Queuine tRNA-ribosyltran sferase OS=Paraburkholderia diazotrophica OX=667676 GN= tgt PE=3 SV=1
MTDGHNNAARADHGAYLGDHVRPDNGLKFELLKTDGQARRGRLTLNHGVIETPIFMPVGTYGTVKAIQPRELEEIRAQIILGNTFHLWLRPGLETIAAHGGLHGFMGWKRPILTDSGGFQVFSLGDLRKITEDGVTFASPINGDKLFLSPEVSMQIQKVLNSDIVMQFDECTPYATNGVPTSHQDAADSMRMSMRWAKRSIDEFNRLGNPNALFGIVQGGMFEDLRDESLAGLSEIGFHGFAIGGLSVGEPKEDMMRVLNHIGPKLPADKPHYLMGVGTPEDLVAGVAAGVDMFDCVMPTRNARNGWLFTRYGDIKIRNATHKNSLRPLDEQCGCYTCRNFTRGYLHHLHRVGEILGAQLNTIHNLHYYLELMQEMRDAIDGQMFDAFKKLFHENRARGTDQS

SEQ ID NO: 58654 - protein, 388 aa, Paraburkholderia dipogonis
  misc_feature (1)..(388): tr|A0A4Y8NC61|A0A4Y8NC61_9BURK Queuine tRNA-ribosyltran sferase OS=Paraburkholderia dipogonis OX=1211383 GN=tgt PE=3 SV=1
MGDHVRPDNGLKFELLGTDGQARRGRVTLNHGVVETPIFMPVGTYGTVKAVQPRELEEMHAQIILGNTFHLWLRPGLETIEAHGGLHGFMGWKKPILTDSGGFQVFSLGDLRKITEDGVTFASPINGDKLFLSPEVSMQIQKVLNSDIVMQFDECTPYATNNVPTSHKEAADSMRMSMRWAQRSIDEFRRLGNPNALFGIVQGGMFEDLRDESLAGLAEKDFHGLAIGGLSVGEPKEDMMRVLNHIGPKLPANKPHYLMGVGTPEDLVAGVAAGVDMFDCVMPTRNARNGWLFTRFGDVKIRNAAHKNSLRPLDEQCGCYTCRNFTRGYLHHLHRVGEILGAQLNTIHNLHYYLELMQEIRDAIDARMFEAFRKRFHENRARGTAEAP

SEQ ID NO: 58655 - protein, 399 aa, Paraburkholderia eburnea
  misc_feature (1)..(399): tr|A0A2S4MMR2|A0A2S4MMR2_9BURK Queuine tRNA-ribosyltran sferase OS=Paraburkholderia eburnea OX=1189126 GN=tgt P E=3 SV=1
MTDGQPNNACAEHGTYLGERPQNGLKFELLGTDGLARRGRVTLNHGVVETPIFMPVGTYGTVKATQPRELEEMKAQIILGNTFHLWLRPGLETIEAHGGLHRFMGWNRPILTDSGGFQVFSLGDLRKISEDGVRFASPVNGDKLFLSPEVSMQIQKVLNSDIVMQFDECTPYATNGVPTTHQEAADSMRMSMRWAQRSIDEFNRLGNPNALFGIVQGGMFEDLRDESLAGLSQMPFHGYAIGGLSVGEPKEDMMRVLQHIAPKLPADKPHYLMGVGTPEDLVAGVAAGVDMFDCVMPTRNARNGWIFTRFGDIKIRNATHKNSLRPLDEQCGCYTCRHFTRGYLHHLHRVGEILGAQLNTIHNLHYYLELMSDIRESIETKTFTAFRQRFAENRARGVD

SEQ ID NO: 58656 - protein, 376 aa, Paraburkholderia endofungorum
  misc_feature (1)..(376): tr|A0A2P5K9P1|A0A2P5K9P1_9BURK Queuine tRNA-ribosyltran sferase OS=Paraburkholderia endofungorum OX=417203 GN=t gt PE=3 SV=1
MLKFDLLRTDGLARRGRLTLNHGTIDTPIFMPVGTYGTVKAMAPRELEDIRAQIILGNTFHLWLRPGLDTITAHGGLHRFMGWQRPILTDSGGFQVFSLGELRKITEDGVTFASPINGDRLFLSPEVSMQVQKVLNSDIVMQFDECTPYATDGVPTSHDAAARSMQMSLRWAKRSLDEFRRLANPNALFGIVQGGMYEALRDESLAGLSDIGFDGYAIGGLSVGEPKEDMLRVLQHIGPRLPVDKPHYLMGVGTPEDLVAGVAAGVDMFDCVMPTRNARNGWLFTRFGDLKIRNAMHRNDTRPLDESCACHTCRHFSRAYLHHLHRVGEILGAQLNTIHNLHYYLNLMQEIRDAIEAGTFNAFVTRFHADRARGVE

SEQ ID NO: 58657 - protein, 404 aa, Paraburkholderia fungorum
  misc_feature (1)..(404): tr|A0A1H0ZNC9|A0A1H0ZNC9_9BURK Queuine tRNA-ribosyltran sferase OS=Paraburkholderia fungorum OX=134537 GN=tgt P E=3 SV=1
MTDGHISSTRADHGAYLGDHVRPENGLKFELLGTDGQARRGRVTLNHGVVETPIFMPVGTYGTVKAVQPRELHEMHAQIILGNTFHLWLRPGLETIEAHGGLHRFMGWNKPILTDSGGFQVFSLGDLRKITEDGVTFASPINGDKLFLSPEVSMQIQKVLNSDIVMQFDECTPYATNNVPTSHQEAADSMRMSMRWAQRSIDEFKRLGNPNALFGIVQGGMFEDLRDESLAGLAEKDFHGLAIGGLSVGEPKEDMMRVLNHIGPKLPADKPHYLMGVGTPEDLVAGVAAGVDMFDCVMPTRNARNGWLFTRFGDIKIRNAVHKNSLRPLDEQCGCYTCRNFTRGYLHHLHRVGEILGAQLNTIHNLHYYLELMQEMRDSIDAKMFEPFRKRFHENRARGVEQAP

SEQ ID NO: 58658 - protein, 401 aa, Paraburkholderia fungorum
  misc_feature (1)..(401): tr|A0A0D5VG08|A0A0D5VG08_9BURK Queuine tRNA-ribosyltran sferase OS=Paraburkholderia fungorum OX=134537 GN=tgt P E=3 SV=1
MTDGHTHDTSGTCNTCASHGERPENGLKFELLGTDGQARRGRVTLNHGVVETPIFMPVGTYGTVKAVQPRELEEMHAQIILGNTFHLWLRPGLETIEAHGGLHGFMGWKKPILTDSGGFQVFSLGDLRKITEDGVTFASPINGDKLFLSPEVSMQIQKVLNSDIVMQFDECTPYATNNVPTSHQEAADSMRMSMRWAKRSINEFNRLGNPNALFGIVQGGMFEDLRDESLAGLAEMDFHGLAIGGLSVGEPKEDMMRVLNHIGPKLPADKPHYLMGVGTPEDLVAGVAAGVDMFDCVMPTRNARNGWLFTRFGDIKIRNAAHKNSLRPLDEQCGCYTCRNFTRGYLHHLHRVGEILGAQLNTIHNLHYYLELMQEMRDAIDAKLFGPFRQRFHENRARGID

SEQ ID NO: 58659 - protein, 404 aa, Paraburkholderia ginsengiterrae
  misc_feature (1)..(404): tr|A0A1A9N852|A0A1A9N852_9BURK Queuine tRNA-ribosyltran sferase OS=Paraburkholderia ginsengiterrae OX=1462993 G N=tgt PE=3 SV=1
MTDGQTVSTRADHGAYLGDHVRPDNGLKFELLGTDGQARRGRVTLNHGVVETPIFMPVGTYGTVKAVQPRELEEMHAQIILGNTFHLWLRPGLETVEAHGGLHGFMGWKKPILTDSGGFQVFSLGDLRKITEDGVTFASPINGDKLFLSPEVSMQIQKVLNSDIVMQFDECTPYATNNVPTSHKEAAESMRMSMRWARRAIDEFRRLSNPNALFGIVQGGMFEDLRDESLAGLAEMDFHGLAIGGLSVGEPKEDMMRVLNHIGPKLPADKPHYLMGVGTPEDLVAGVAAGVDMFDCVMPTRNARNGWLFTRFGDVKIRNATHKNSLRPLDEQCGCYTCRNFTRGYLHHLHRVGEILGAQLNTIHNLHYYLELMQEMRDAIDAKMFEAFRKRFHEDRARGASEAP

SEQ ID NO: 58660 - protein, 391 aa, Paraburkholderia graminis
  misc_feature (1)..(391): tr|B1FWH3|B1FWH3_PARG4 Queuine tRNA-ribosyltransferase OS=Paraburkholderia graminis (strain ATCC 700544 / DSM 17151 / LMG 18924 / NCIMB 13744 / C4D1M) OX=396598 GN=t gt PE=3 SV=1
MTIGHQTQQPADGLKFELLGTDGQARRGRVTLNHGVVETPIFMPVGTYGTVKAVQPRELEEMHAQIILGNTFHLWLRPGLETIGAHGGLHGFMGWKKPILTDSGGFQVFSLGDLRKITEDGVTFASPINGDKLFLSPEVSMQIQKVLNSDIVMQFDECTPYATNNVPTSHKEAADSMRMSMRWAQRSIDEFRRLGNPNALFGIVQGGMFEDLRDESLAGLAEKDFHGLAIGGLSVGEPKEDMMRVLNHIGPKLPANKPHYLMGVGTPEDLVAGVAAGVDMFDCVMPTRNARNGWLFTRFGDIKIRNAAHKNSLRPLDEQCGCYTCRNFTRGYLHHLHRVGEILGAQLNTIHNLHYYLELMQEMRDAIDAKMFEPFRKRFHENRARGIDDAP

SEQ ID NO: 58661 - protein, 403 aa, Paraburkholderia hospita
  misc_feature (1)..(403): tr|A0A1H6P567|A0A1H6P567_9BURK Queuine tRNA-ribosyltran sferase OS=Paraburkholderia hospita OX=169430 GN=tgt PE =3 SV=1
MTDGHNTTARADHGAYLGDHVRPDNGLKFELLKTDGQARRGRLTLNHGVVETPIFMPVGTYGTVKAIQPRELEEIHAQIILGNTFHLWLRPGLETIAAHGGLHGFMGWKRPILTDSGGFQVFSLGDLRKITEDGVTFASPINGDKLFLSPEVSMQIQKVLNSDIVMQFDECTPYATNGVPTSHQDAADSMRMSMRWATRSIDEFNRLGNPNALFGIVQGGMFEDLRDESLAGLSEIGFHGLAIGGLSVGEPKEDMMRVLNHIGPKLPADKPHYLMGVGTPEDLVAGVSAGVDMFDCVMPTRNARNGWLFTRFGDIKIRNATHKNSVRPLDEQCGCYTCRNFTRGYLHHLHRVGEILGAQLNTIHNLHYYLELMQEMRDAIDAQMFDAFRKLFHENRARGTEQS

SEQ ID NO: 58662 - protein, 403 aa, Paraburkholderia hospita
  misc_feature (1)..(403): tr|A0A244DVB8|A0A244DVB8_9BURK Queuine tRNA-ribosyltran sferase OS=Paraburkholderia hospita OX=169430 GN=tgt PE =3 SV=1
MTDGHNTTARADHGAYLGDHVRPDNGLKFELLKTDGQARRGRLTLNHGVVETPIFMPVGTYGTVKAIQPRELEEIHAQIILGNTFHLWLRPGLETITAHGGLHGFMGWKRPILTDSGGFQVFSLGDLRKITEDGVTFASPINGDKLFLSPEVSMQIQKVLNSDIVMQFDECTPYATNGVPTSHQDAADSMRMSMRWAKRSIDEFNRLGNPNALFGIVQGGMFEDLRDESLAGLSEIGFHGLAIGGLSVGEPKEDMMRVLNHIGPKLPADKPHYLMGVGTPEDLVAGVSAGVDMFDCVMPTRNARNGWLFTRFGDIKIRNATHKNSVRPLDEQCGCYTCRNFTRGYLHHLHRVGEILGAQLNTIHNLHYYLELMQEMRDAIDAQMFDAFRKLFHENRARGTEQS

SEQ ID NO: 58663 - protein, 401 aa, Paraburkholderia insulsa; identical to SEQ ID NO: 58658
  misc_feature (1)..(401): tr|A0A2T1APU3|A0A2T1APU3_9BURK Queuine tRNA-ribosyltran sferase OS=Paraburkholderia insulsa OX=1441714 GN=tgt P E=3 SV=1

SEQ ID NO: 58664 - protein, 411 aa, Paraburkholderia megapolitana
  misc_feature (1)..(411): tr|A0A1I3G9H0|A0A1I3G9H0_9BURK Queuine tRNA-ribosyltran sferase OS=Paraburkholderia megapolitana OX=420953 GN=t gt PE=3 SV=1
MTDARPTPTAGDTHTPPQGGLAFELLTTDGAARRGRLTLNHGVVETPIFMPVGTYGTVKAIQPRELEEIRAQIILGNTFHLWLRPGLETIAAHGGLHGFMGWKRPILTDSGGFQVFSLGDLRKITEDGVTFASPINGDKLFLSPEVSMQVQKVLNSDVVMQFDECTPYATNGVPTSHQDAADSMRMSMRWAQRSIDEFRRLDNPNALFGIVQGGMFEDLRDESLAGLAEMDFHGLAIGGLSVGEPKEDMMRVLNHIGPKLPAHKPHYLMGVGTPEDLVAGVAAGVDMFDCVMPTRNARNGWLFTRFGDIKIRNATHRNSLRPLDEQCGCYTCRNFSRGYLHHLHRVGEILGAQLNTIHNLHYYLELMGEIRSAIETHTFDAFRIAFHENRARGVEEASAAAASSSARKTLQ

SEQ ID NO: 58665 - protein, 399 aa, Paraburkholderia monticola
  misc_feature (1)..(399): tr|A0A149Q0L5|A0A149Q0L5_9BURK Queuine tRNA-ribosyltran sferase OS=Paraburkholderia monticola OX=1399968 GN=tgt PE=3 SV=1
MTLGHPSQQTAHERPQDDIGGLKFELLGTDGLARRGRVTLNHGVVETPIFMPVGTYGTVKAVQPRELEEMHAQIILGNTFHLWLRPGLETIEAHGGLHGFMGWNKPILTDSGGFQVFSLGDLRKITEDGVTFASPINGDRLFLSPEVSMQIQKVLNSDIVMQFDECTPYATNNIPTSHKDAAESMRMSMRWAQRSIDEFQRLGNPNALFGIVQGGMFEDLRDESLAGLAEKNFHGLAIGGLSVGEPKEDMMRILNHIGPKLPADKPHYLMGVGTPEDLVAGVAAGVDMFDCVMPTRNARNGWLFTRFGDVKIRNATHKNSLRPLDEQCGCYTCRNFTRGYLHHLHRVGEILGAQLNTIHNLHYYLELMQEMRDAIEAKLFDAFRKRFHEDRARGVEASS

SEQ ID NO: 58666 - protein, 411 aa, Paraburkholderia phenazinium
  misc_feature (1)..(411): tr|A0A1N6LI01|A0A1N6LI01_9BURK Queuine tRNA-ribosyltran sferase OS=Paraburkholderia phenazinium OX=60549 GN=tgt PE=3 SV=1
MTDGHTHDTGAARAACPTCADHGGNPAERPANGLKFELLTTDGQARRGRLTLNHGVVETPIFMPVGTYGTVKAVQPRELEEMHAQIILGNTFHLWLRPGLETIGAHGGLHRFMGWNRPILTDSGGFQVFSLGDLRKITEDGVTFASPINGDKLFLSPEVSMQIQKVLNSDIVMQFDECTPYATNNVPTSHQDAADSMRMSMRWAQRSIDEFNGLGNPNALFGIVQGGMFEDLRDESLAGLAAMDFHGLAIGGLSVGEPKEDMMRVLNHIGPRLPADKPHYLMGVGTPEDLVAGVAAGVDMFDCVMPTRNARNGWLFTRFGDLKIRNATHKNSLRPLDETCGCYTCRHFTRGYLHHLHRVGEILGAQLNTIHNLHYYLELMGEIRVSIEAHEFEAFRKRFHENRARGVEQAA

SEQ ID NO: 58667 - protein, 411 aa, Paraburkholderia phenazinium
  misc_feature (1)..(411): tr|A0A1N6DZH9|A0A1N6DZH9_9BURK Queuine tRNA-ribosyltran sferase OS=Paraburkholderia phenazinium OX=60549 GN=tgt PE=3 SV=1
MTEGHNHDTGASSANCPSCANHDGNSAERPDNGLKFELLNTDGQARRGRLTLNHGVVETPIFMPVGTYGTVKAVQPRELEEMHAQIILGNTFHLWLRPGLETIGAHGGLHRFMGWNRPILTDSGGFQVFSLGDLRKITEDGVTFASPINGDKLFLSPEVSMQIQKVLNSDIVMQFDECTPYATNNIPTSHKDAADSMRMSMRWAQRSINEFNGLGNPNALFGIVQGGMFEDLRDESLAGLGEMDFHGYAIGGLSVGEPKEDMMRVLNHIGPKLPAHKPHYLMGVGTPEDLVAGVAAGVDMFDCVMPTRNARNGWLFTRFGDVKIRNATHKNSLRPLDETCGCYTCRNFTRGYLHHLHRVGEILGAQLNTIHNLHYYLELMSEIRESIETQTFEAFRTRFHENRARGVEQAA

SEQ ID NO: 58668 - protein, 391 aa, Paraburkholderia phenoliruptrix
  misc_feature (1)..(391): tr|K0DID8|K0DID8_9BURK Queuine tRNA-ribosyltransferase OS=Paraburkholderia phenoliruptrix BR3459a OX=1229205 G N=tgt PE=3 SV=1
MTTGHPFQPPADGLHFELLGTDGAARRGRVTLNHGVVETPIFMPVGTYGTVKAVQPRELEEMHAQIILGNTFHLWLRPGLETIAAHGGLHGFMGWKKPILTDSGGFQVFSLGDLRKITEDGVTFASPINGDKLFLSPEVSMQIQKVLNSDIVMQFDECTPYATNNVPTSHKEAADSMRMSMRWAQRSIDEFRRLGNPNALFGIVQGGMFEDLRDESLAGLAEKDFHGLAIGGLSVGEPKEDMMRVLNHIGPKLPASKPHYLMGVGTPEDLVAGVAAGVDMFDCVMPTRNARNGWLFTRFGDIKIRNATHKNSLRPLDEQCGCYTCRNFTRGYLHHLHRVGEILGAQLNTIHNLHYYLELMQEMRDAIDAKMFEPFRKRFHENRARGVDEAP

SEQ ID NO: 58669 - protein, 400 aa, Paraburkholderia phymatum
  misc_feature (1)..(400): tr|B2JGG9|B2JGG9_PARP8 Queuine tRNA-ribosyltransferase OS=Paraburkholderia phymatum (strain DSM 17167 / CIP 10 8236 / LMG 21445 / STM815) OX=391038 GN=tgt PE=3 SV=1
MTDGHRNAARADGAYLGDHVRPDNGLKFELLKTDGLARRGRLTLNHGVVETPIFQPVGTYGTVKAIQPRELEEIRAQIILGNTFHLWLRPGLETIAAHGGLHGFMGWKRPILTDSGGFQVFSLGDLRKITEDGVTFASPINGDKLFLSPEVSMQIQKVLNSDIVMQFDECTPYATNGVPTSHKDAADSMRMSMRWAKRSIDEFNRLGNPNALFGIVQGGMFEDLRDESLAGLSEIGFHGLAIGGLSVGEPKEDMMRVLNHIGPKLPADKPHYLMGVGTPEDLVAGVAAGVDMFDCVMPTRNARNGWLFTRFGDIKIRNATHKNSMRPLDEQCGCYTCRNFTRGYLHHLHRVGEILGAQLNTIHNLHYYLELMQEMRDAIDAQTFDVFRKLFHDNRARGTD

SEQ ID NO: 58670 - protein, 404 aa, Paraburkholderia phytofirmans
  misc_feature (1)..(404): tr|B2SX84|B2SX84_PARPJ Queuine tRNA-ribosyltransferase OS=Paraburkholderia phytofirmans (strain DSM 17436 / LM G 22146 / PsJN) OX=398527 GN=tgt PE=3 SV=1
MTDGQSVSPRADHGAYLGDHVRPDNGLNFELLGVDGLARRGRVTLNHGVVETPIFMPVGTYGTVKAVQPRELEEMHAQIILGNTFHLWLRPGLETIEAHGGLHGFMGWKKPILTDSGGFQVFSLGDLRKITEDGVTFASPINGDKLFLSPEVSMQIQKVLNSDIVMQFDECTPYATNNVPTSHQEAADSMRMSMRWAQRSIDEFRRLGNPNALFGIVQGGMFEDLRDESLAGLAEKDFHGLAIGGLSVGEPKEDMMRVLNHIGPKLPANKPHYLMGVGTPEDLVAGVAAGVDMFDCVMPTRNARNGWLFTRFGDVKIRNAAHKNSLRPLDEQCGCYTCRNFTRGYLHHLHRVGEILGAQLNTIHNLHYYLELMQEIRDAIDAKMFEAFRKRFHENRARGTAEAP

SEQ ID NO: 58671 - protein, 401 aa, Paraburkholderia piptadeniae
  misc_feature (1)..(401): tr|A0A1N7RMR8|A0A1N7RMR8_9BURK Queuine tRNA-ribosyltran sferase OS=Paraburkholderia piptadeniae OX=1701573 GN=t gt PE=3 SV=1
MTDGHNNAARADHVAYLGDHVRPDNGLKFELLKTDGQARRGRLTLNHGVIETPIFMPVGTYGTVKAIQPRELEEIRAQIILGNTFHLWLRPGLETIAAHGGLHGFMGWKRPILTDSGGFQVFSLGDLRKITEDGVTFASPINGDKLFLSPEVSMQIQKVLNSDIVMQFDECTPYATNDVPTSHEDAADSMRMSMRWAKRSIDEFNRLGNPNALFGIVQGGMFEDLRDESLAGLSEIGFHGFAIGGLSVGEPKEDMMRVLNHIGPKLPADKPHYLMGVGTPEDLVAGVAAGVDMFDCVMPTRNARNGWLFTRYGDIKIRNATHKNSLRPLDEQCGCYTCRNFTRGYLHHLHRVGEILGAQLNTIHNLHYYLELMQEMRDAIGAQMFDTFKKLFHENRARGTD

SEQ ID NO: 58672 - protein, 398 aa, Paraburkholderia rhizosphaerae
  misc_feature (1)..(398): tr|A0A4R8LRY1|A0A4R8LRY1_9BURK Queuine tRNA-ribosyltran sferase OS=Paraburkholderia rhizosphaerae OX=480658 GN= tgt PE=3 SV=1
MTDGHQHNHHADHLHDHTPPASGLKFELLKTDGQARRGRLTLNHGVVETPIFMPVGTYGTVKAIQPRELDEIRAQIILGNTFHLWLRPGLETIAAHGGLHAFMGWKRPILTDSGGFQVFSLGDLRKITEDGVTFASPINGDKLFLSPEVSMQIQKVLNSDIVMQFDECTPYATNGVPTTRDEAAASMRMSMRWAKRSVDEFQRLTNPNALFGIVQGGMFEDLRDESLAGLADMDFHGLAIGGLSVGEPKEDMMRVLEHVAPRLPAHKPHYLMGVGTPEDLVAGVAAGVDMFDCVMPTRNARNGWLFTRFGDIKIRNATHKNSLRPLDEQCGCYTCQHFTRGYLHHLHRVGEILGAQLNTIHNLHYYLELMQEIRDAIDAGLFDAFRKQFHENRARGVD

SEQ ID NO: 58673 - protein, 376 aa, Paraburkholderia rhizoxinica
  misc_feature (1)..(376): tr|E5AM66|E5AM66_PARRH Queuine tRNA-ribosyltransferase OS=Paraburkholderia rhizoxinica (strain DSM 19002 / CIP 109453 / HKI 454) OX=882378 GN=tgt PE=3 SV=1
MLKFDLLRTDGLARRGRLTLNHGTIDTPIFMPVGTYGTVKAMAPRELEDIRAQIILGNTFHLWLRPGLDTITAHGGLHRFMGWQRPILTDSGGFQVFSLGELRTITEDGVTFASPINGDRLFLSPEVSMQVQKVLNSDIVMQFDECTPYATDGVPTSHDATARSMQMSLRWAKRSLDEFRRLANPNALFGIVQGGMYEALRDESLAGLSDLGFDGYAIGGLSVGEPKEDMLRVLQHIGPRLPLDKPHYLMGVGTPEDLVAGVAAGIDMFDCVMPTRNARNGWLFTRFGDLKIRNAMHRNDTRPLDESCVCHTCRHFSRAYLHHLHRVGEILGAQLNTIHNLHYYLNLMQEIRDAIEAGTFNAFVTRFHADRARGVE

SEQ ID NO: 58674 - protein, 396 aa, Paraburkholderia rhynchosiae
  misc_feature (1)..(396): tr|A0A2N7WYE0|A0A2N7WYE0_9BURK Queuine tRNA-ribosyltran sferase OS=Paraburkholderia rhynchosiae OX=487049 GN=tg t PE=3 SV=1
MTPGHQSPQATFERPANGLNFELLGTDGQARRSRVTLNHGVVETPIFMPVGTYGTVKAVQPRELEEMHAQIILGNTFHLWLRPGLETIEAHGGLHSFMGWDKPILTDSGGFQVFSLGDLRKITEDGVTFASPINGDKLFLSPEVSMQIQKVLNSDIVMQFDECTPYATNNVPTSHKEAADSMRMSMRWAQRSIDEFQRLGNPNALFGIVQGGMFEDLRDESLAGLAEKDFHGLAIGGLSVGEPKEDMMRVLNHIGPKLPANKPHYLMGVGTPEDLVAGVAAGIDMFDCVMPTRNARNGWLFTRFGDIKIRNAAHKNSLRPLDEQCGCYTCRNFTRGYLHHLHRVGEILGAQLNTIHNLHYYLELMQEMRDAIDVKMFEPFRKRFHENRARGIADAP

SEQ ID NO: 58675 - protein, 396 aa, Paraburkholderia ribeironis
  misc_feature (1)..(396): tr|A0A1N7S5J4|A0A1N7S5J4_9BURK Queuine tRNA-ribosyltran sferase OS=Paraburkholderia ribeironis OX=1247936 GN=tg t PE=3 SV=1
MTDGHPSQQTATERPANGLKFELLGTDGQARRGRVTLNHGVVETPIFMPVGTYGTVKAVQPRELDEMHAQIILGNTFHLWLRPGLDTIEAHGGLHGFMGWKKPILTDSGGFQVFSLGDLRKITEDGVTFASPINGDKLFLSPEVSMQIQKVLNSDIVMQFDECTPYATNNVPTSHKDAAESMRMSMRWAQRSIDEFNRLGNPNALFGIVQGGMFEDLRDESLAGLAQMDFHGLAIGGLSVGEPKEDMMRVLNHIGPKLPADKPHYLMGVGTPEDLVAGVAAGVDMFDCVMPTRNARNGWLFTRFGDIKIRNATHKNSLRPLDEQCGCYTCRNFTRGYLHHLHRVGEILGAQLNTIHNLHYYLELMQEMRDAIDAKMFEPFRKRFHENRARGVEPAS

SEQ ID NO: 58676 - protein, 399 aa, Paraburkholderia sacchari
  misc_feature (1)..(399): tr|A0A0A6QDG8|A0A0A6QDG8_9BURK Queuine tRNA-ribosyltran sferase OS=Paraburkholderia sacchari OX=159450 GN=tgt P E=3 SV=1
MTDGHQNSARAEHGAYLGERPQNGLKFELLGTDGLARRGRVTLNHGVVETPIFMPVGTYGTVKATQPRELEEMQARIILGNTFHLWLRPGLETIEAHGGLHRFMGWNRPILTDSGGFQVFSLGDLRKISEDGVRFASPVNGDKLFLSPEVSMQIQKVLNSDIVMQFDECTPYATNGVPTTHKEAADSMRMSMRWAKRSIDEFNRLGNPNALFGIVQGGMFEDLRDESLAGLSQMPFHGYAIGGLSVGEPKEDMMRVLEHIAPKLPADKPHYLMGVGTPEDLVAGVASGVDMFDCVMPTRNARNGWIFTRFGDIKIRNAVHRNSLRPLDEQCGCYTCRNFTRGYLHHLHRVGEILGAQLNTIHNLHYYLELMSEMRAAIETKTFEAFRKRFAENRARGVD

SEQ ID NO: 58677 - protein, 395 aa, Paraburkholderia sartisoli
  misc_feature (1)..(395): tr|A0A1H4DBF8|A0A1H4DBF8_9BURK Queuine tRNA-ribosyltran sferase OS=Paraburkholderia sartisoli OX=83784 GN=tgt P E=3 SV=1
MTDGHQHATQTARPDNGLKFELLTTDGEARRGRVTLNHGVVETPIFMPVGTYGTVKAVQPRELEEMHAQIILGNTFHLWLRPGLETVAAHGGLHAFMGWKKPILTDSGGFQVFSLGDLRKITEDGVTFASPINGDKLFLSPEVSMQVQKVLNSDIVMQFDECTPYATNDVPTSHQEAADSMRMSMRWAKRSIDEFNRLGNPNALFGIVQGGMFEDLRDESLAGLSDIDFHGFAIGGLSVGEPKEDMMRVLNHIAPKLPANKPHYLMGVGTPEDLVAGVAAGVDMFDCVMPTRNARNGWLFTRFGDIKIRNATHRNSLRPLDERCGCYTCRNFTRGYLHHLHRVGEILGAQLNTIHNLHYYLELMQEMRDAIEAHMFDAFRKLFHENRARGVEGPA

SEQ ID NO: 58678 - protein, 401 aa, Paraburkholderia sediminicola
  misc_feature (1)..(401): tr|A0A3R7D447|A0A3R7D447_9BURK Queuine tRNA-ribosyltran sferase OS=Paraburkholderia sediminicola OX=458836 GN=t gt PE=3 SV=1
MTDGHTHDTSGTCSTCESTHSRPENGLKFELLGTDGQARRGRVTLNHGVVETPIFMPVGTYGTVKAVQPRELKEMHAQIILGNTFHLWLRPGLETIEAHGGLHDFMGWKKPILTDSGGFQVFSLGDLRKITEDGVTFASPINGDKLFLSPEVSMQIQKVLNSDIVMQFDECTPYATNNVPTSHQDAADSMRMSMRWAQRSIDEFNRLGNPNALFGIVQGGMFEDLRDESLAGLAEMDFHGLAIGGLSVGEPKEDMMRVLNHIGPKLPADKPHYLMGVGTPEDLVAGVAAGVDMFDCVMPTRNARNGWLFTRFGDIKIRNAAHKNSLRPLDEQCGCYTCRNFTRGYLHHLHRVGEILGAQLNTIHNLHYYLELMQEMRDAIDAKLFEPFRKRFHENRARGID

SEQ ID NO: 58679 - protein, 401 aa, Paraburkholderia sediminicola
  misc_feature (1)..(401): tr|A0A495GDF1|A0A495GDF1_9BURK Queuine tRNA-ribosyltran sferase OS=Paraburkholderia sediminicola OX=458836 GN=t gt PE=3 SV=1
MTDGHTHDTSGTCSTCESTHSRPENGLKFELLGTDGQARRGRVTLNHGVVETPIFMPVGTYGTVKAVQPRELEEMHAQIILGNTFHLWLRPGLETIEAHGGLHDFMGWKKPILTDSGGFQVFSLGDLRKITEDGVTFASPINGDKLFLSPEVSMQIQKVLNSDIVMQFDECTPYATNNVPTSHQEAADSMRMSMRWAQRSIDEFNRLGNPNALFGIVQGGMFEDLRDESLAGLAEMDFHGLAIGGLSVGEPKEDMMRVLNHIGPKLPADKPHYLMGVGTPEDLVAGVAAGVDMFDCVMPTRNARNGWLFTRFGDIKIRNAAHKNSLRPLDEQCGCYTCRNFTRGYLHHLHRVGEILGAQLNTIHNLHYYLELMQEMRDAIDAKLFEPFRKRFHENRARGID

SEQ ID NO: 58680 - protein, 399 aa, Paraburkholderia silvatlantica
  misc_feature (1)..(399): tr|A0A2V4T807|A0A2V4T807_9BURK Queuine tRNA-ribosyltran sferase OS=Paraburkholderia silvatlantica OX=321895 GN= tgt PE=3 SV=1
MTDGQQSNARAEHGAYLGERPQNGLKFELLGTDGLARRGRVTLNHGVVETPIFMPVGTYGTVKATQPRELEEMKAQIILGNTFHLWLRPGLETIEAHGGLHRFMGWNRPILTDSGGFQVFSLGDLRKISEDGVRFASPVNGDKLFLSPEVSMQIQKVLNSDIVMQFDECTPYATNGVPTTHKEAADSMRMSMRWAQRSIDEFNRLGNPNALFGIVQGGMFEDLRDESLAGLSQMPFHGYAIGGLSVGEPKEDMMRVLEHVAPKLPADKPHYLMGVGTPEDLVAGVASGVDMFDCVMPTRNARNGWIFTRFGDIKIRNAVHRNSLRPLDEQCGCYTCRNFTRGYLHHLHRVGEILGAQLNTIHNLHYYLELMSEMRAAIETKTFAAFRQRFAAQRARGVD

SEQ ID NO: 58681 - protein, 386 aa, Paraburkholderia sp.
  misc_feature (1)..(386): tr|A0A4R1J1J3|A0A4R1J1J3_9BURK Queuine tRNA-ribosyltran sferase OS=Paraburkholderia sp. BL8N3 OX=1938808 GN=tgt PE=3 SV=1
MTDGHTPPANGLKFDLLATDGQARRGRLTLNHGVVETPIFMPVGTYGTVKAIQPRELEEIRAQIILGNTFHLWLRPGLETIGSHGGLHAFMNWKRPILTDSGGFQVFSLGELRKITEDGVTFASPINGDKLFLSPEISMQIQKVLNSDIVMQFDECTPYATSGVPTSHQDAADSMRMSMRWAKRSVDEFGRLGNPNALFGIVQGGMFEDLREESLAGLADIGFHGLAIGGLSVGEPKEDMMRVLNHIGPKLPADKPHYLMGVGTPEDLVAGVAAGVDMFDCVMPTRNARNGWLFTRFGDVKIRNASHKNSLKPLDESCGCYTCANFTRGYLHHLHRVGEILGAQLNTIHNLHYYLQLMSEIRESIENHTFDTFRKHFYENRARGID

SEQ ID NO: 58682 - protein, 373 aa, Paraburkholderia sp.
  misc_feature (1)..(373): tr|A0A372K3R0|A0A372K3R0_9BURK Queuine tRNA-ribosyltran sferase OS=Paraburkholderia sp. DHOC27 OX=2303330 GN=tg t PE=3 SV=1
MTTDGQARRGRLTLNHGVVETPIFMPVGTYGTVKAVQPRELEEMHAQIILGNTFHLWLRPGLETVAAHGGLHSFMGWKKPILTDSGGFQVFSLGDLRKITEDGVTFASPINGDKLFLSPEVSMQIQKVLNSDIVMQFDECTPYATNNIPTSHQEAADSMRMSMRWAKRSINEFNALGNPNALFGIVQGGMFEDLRDESLAGLAEMDFHGLAIGGLSVGEPKEDMMRVLNHIGPKLPANKPHYLMGVGTPEDLVAGVAAGVDMFDCVMPTRNARNGWLFTRFGDVKIRNATHKNSLRPLDESCGCYTCRNFTRGYLHHLHRVGEILGAQLNTIHNLHYYLELMSEIRASIDAHAFEAFRQRFHENRARGVEQTS

SEQ ID NO: 58683 - protein, 397 aa, Paraburkholderia sprentiae
  misc_feature (1)..(397): tr|A0A1I9YHJ4|A0A1I9YHJ4_9BURK Queuine tRNA-ribosyltran sferase OS=Paraburkholderia sprentiae WSM5005 OX=754502 GN=tgt PE=3 SV=1
MTLGHPSSQRPAHERPENGLKFELLGTDGLARRGRVTLNHGVVETPIFMPVGTYGTVKAVQPRELDEMHAQIILGNTFHLWLRPGLETIDAHGGLHGFMGWKKPILTDSGGFQVFSLGDLRKITEDGVTFASPINGDRLFLSPEVSMQIQKVLNSDIVMQFDECTPYATNNIPTSHKEAAESMRMSMRWAQRSIDEFQRLGNPNALFGIVQGGMFEDLRDESLAGLAEKNFHGLAIGGLSVGEPKEDMMRVLNHIGPKLPADKPHYLMGVGTPEDLVAGVAAGVDMFDCVMPTRNARNGWLFTRFGDVKIRNATHKNSLRPLDEQCGCYTCRNFTRGYLHHLHRVGEILGAQLNTIHNLHYYLELMQEMRDAIEAKLFDAFRKRFHENRARGVEPSS

SEQ ID NO: 58684 - protein, 396 aa, Paraburkholderia susongensis
  misc_feature (1)..(396): tr|A0A1X7KMX9|A0A1X7KMX9_9BURK Queuine tRNA-ribosyltran sferase OS=Paraburkholderia susongensis OX=1515439 GN=t gt PE=3 SV=1
MTLGHPSQQPAHERPENGLKFELLGTDGLARRGRVTLNHGVVETPIFMPVGTYGTVKAVQPRELDEMHAQIILGNTFHLWLRPGLETIEAHGGLHGFMGWKKPILTDSGGFQVFSLGDLRKITEDGVTFASPINGDRLFLSPEVSMQIQKVLNSDIVMQFDECTPYATDNIPTSHKEAAESMRMSMRWAQRSIDEFQRLGNPNALFGIVQGGMFEDLRDESLAGLAEKNFHGLAIGGLSVGEPKEDMMRVLNHIGPKLPANKPHYLMGVGTPEDLVAGVAAGVDMFDCVMPTRNARNGWLFTRFGDIKIRNATHRNSLRPLDEQCGCYTCRNFTRGYLHHLHRVGEILGAQLNTIHNLHYYLELMQEMRDAIDAKLFDAFRKGFHEDRARGVEPSS

SEQ ID NO: 58685 - protein, 403 aa, Paraburkholderia terrae; identical to SEQ ID NO: 58661
  misc_feature (1)..(403): tr|I5D1V3|I5D1V3_9BURK Queuine tRNA-ribosyltransferase OS=Paraburkholderia terrae BS001 OX=1171375 GN=tgt PE=3 SV=1

SEQ ID NO: 58686 - protein, 403 aa, Paraburkholderia terrae
  misc_feature (1)..(403): tr|A0A2I8ELT8|A0A2I8ELT8_9BURK Queuine tRNA-ribosyltran sferase OS=Paraburkholderia terrae OX=311230 GN=tgt PE= 3 SV=1
MTDGHNNAARADHGAYLGDHVRPDNGLKFELLKTDGQARRGRLTLNHGVVETPIFMPVGTYGTVKAIQPRELEEIRAQIILGNTFHLWLRPGLETIAAHGGLHGFMGWKRPILTDSGGFQVFSLGDLRKITEDGVTFASPINGDKLFLSPEVSMQIQKVLNSDIVMQFDECTPYATNGVPTSHQDAADSMRMSMRWAKRSIDEFNRLANPNALFGIVQGGMFEDLRDESLAGLSEIGFHGLAIGGLSVGEPKEDMMRVLNHIGPKLPADKPHYLMGVGTPEDLVAGVSAGVDMFDCVMPTRNARNGWLFTRFGDIKIRNATHKNSVRPLDEQCGCYTCRNFTRGYLHHLHRVGEILGAQLNTIHNLHYYLELMQEMRDAIDAQMFDAFRKLFHENRARGTEQS

SEQ ID NO: 58687 - protein, 401 aa, Paraburkholderia terricola
  misc_feature (1)..(401): tr|A0A1M6MG48|A0A1M6MG48_9BURK Queuine tRNA-ribosyltran sferase OS=Paraburkholderia terricola OX=169427 GN=tgt PE=3 SV=1
MTEGHTHDTRGSGNTGGNTAPRPDNGLAFELLGTDGQARRGRVTLNHGVVETPIFMPVGTYGTVKAVQPRELEEMHAQIILGNTFHLWLRPGLETIEAHGGLHGFMGWKKPILTDSGGFQVFSLGDLRKITEDGVTFASPINGDKLFLSPEVSMQIQKVLNSDIVMQFDECTPYATNNVPTSHQEAADSMRMSMRWAKRSIDEFNRLGNPNALFGIVQGGMFEDLRDESLAGLAEMDFHGLAIGGLSVGEPKEDMMRVLNHIGPKLPADKPHYLMGVGTPEDLVAGVAAGVDMFDCVMPTRNARNGWLFTRFGDIKIRNAAHKNSLRPLDEQCGCYTCRNFTRGYLHHLHRVGEILGAQLNTIHNLHYYLELMQEMRDAIDAKMFEPFRRRFQENRARGID

SEQ ID NO: 58688 - protein, 399 aa, Paraburkholderia tropica
  misc_feature (1)..(399): tr|A0A1A5X1B1|A0A1A5X1B1_9BURK Queuine tRNA-ribosyltran sferase OS=Paraburkholderia tropica OX=92647 GN=tgt PE= 3 SV=1
MTDGQQSNARAEHGAYLGERPQNGLKFELLGTDGLARRGRVTLNHGVVETPIFMPVGTYGTVKATQPRELEEMKAQIILGNTFHLWLRPGLETIEAHGGLHRFMGWNRPILTDSGGFQVFSLGDLRKISEDGVRFASPVNGDKLFLSPEVSMQIQKVLNSDIVMQFDECTPYATNGVPTTHKEAADSMRMSMRWAQRSIDEFNRLGNPNALFGIVQGGMFEDLRDESLAGLSQMPFHGYAIGGLSVGEPKEDMMRVLQHIAPKLPADKPHYLMGVGTPEDLVAGVAAGVDMFDCVMPTRNARNGWIFTRFGDIKIRNATHKNSLRPLDEQCGCYTCRHFTRGYLHHLHRVGEILGAQLNTIHNLHYYLELMSEMRAAIETKTFEAFRQRFAENRARGVD

SEQ ID NO: 58689 - protein, 396 aa, Paraburkholderia tuberum
  misc_feature (1)..(396): tr|A0A1H1EMH3|A0A1H1EMH3_9BURK Queuine tRNA-ribosyltran sferase OS=Paraburkholderia tuberum OX=157910 GN=tgt PE =3 SV=1
MTLGHPLQQPAHERPQNGLRFELLGTDGLARRGRVTLNHGVVETPIFMPVGTYGTVKAVQPRELDEMHAQIILGNTFHLWLRPGLETIEAHGGLHRFMGWKKPILTDSGGFQVFSLGDLRKITEDGVTFASPINGDRLFLSPEVSMQIQKVLNSDIVMQFDECTPYATDNIPTSHKEAAESMRMSMRWAQRSIDEFERLGNPNALFGIVQGGMFEDLRDESLAGLAQKNFHGLAIGGLSVGEPKEDMMRILNHIGPKLPADKPHYLMGVGTPEDLVAGVAAGVDMFDCVMPTRNARNGWLFTRFGDIKIRNATHRNSLRPLDEQCGCYTCRNFTRGYLHHLHRVGEILGAQLNTIHNLHYYLELMQEMRDAIEAKLFETFRKRFHEDRARGVEPSS

SEQ ID NO: 58690 - protein, 399 aa, Paraburkholderia unamae
  misc_feature (1)..(399): tr|A0A328XSM8|A0A328XSM8_9BURK Queuine tRNA-ribosyltran sferase OS=Paraburkholderia unamae OX=219649 GN=tgt PE= 3 SV=1
MTDGHQNNARAEHGTYLGERPQNGLKFELLGTDGLARRGRVTLNHGVVETPIFMPVGTYGTVKATQPRELEEMKAQIVLGNTFHLWLRPGLETIEAHGGLHRFMGWNRPILTDSGGFQVFSLGDLRKISEDGVRFASPVNGDKLFLSPEVSMQIQKVLNSDIVMQFDECTPYATNGVPTTHKEAADSMRMSMRWAQRSIDEFNRLGNPNALFGIVQGGMFEDLRDESLAGLSQMPFHGYAIGGLSVGEPKEDMMRVLEHIAPKLPADKPHYLMGVGTPEDLVAGVASGVDMFDCVMPTRNARNGWIFTRFGDVKIRNATHKNSLRPLDEQCGCYTCRNFTRGYLHHLHRVGEILGAQLNTIHNLHYYLELMSEMRSAIETKTFAAFRQRFAEQRARGVD

SEQ ID NO: 58691 - protein, 396 aa, Paraburkholderia xenovorans
  misc_feature (1)..(396): tr|Q145I0|Q145I0_PARXL Queuine tRNA-ribosyltransferase OS=Paraburkholderia xenovorans (strain LB400) OX=266265 GN=tgt PE=3 SV=1
MTDGHLSQDATHERPENGLKFELLGVDGQARRGRVALNHGVVETPIFMPVGTYGTVKAVQPRELEEMHAQIILGNTFHLWLRPGLETIEAYGGLHGFMGWKKPILTDSGGFQVFSLGDLRKITEDGVTFASPINGDKLFLSPEVSMQIQKVLNSDIVMQFDECTPYATHNVPTSHQEAADSMRMSMRWAQRSIDEFNRLGNPNALFGIVQGGMFEDLRDESLAGLAEKDFHGLAIGGLSVGEPKEDMMRVLNHIGPKLPANKPHYLMGVGTPEDLVAGVAAGVDMFDCVMPTRNARNGWLFTRFGDIKIRNAAHRNSLRPLDEQCGCYTCRNFTRGYLHHLHRVGEILGAQLNTIHNLHYYLELMQEIRDAIDAKMFEPFRKRFHENRARGTAEAP

SEQ ID NO: 58692 - protein, 378 aa, Paracandidimonas soli
  misc_feature (1)..(378): tr|A0A4R3V537|A0A4R3V537_9BURK Queuine tRNA-ribosyltran sferase OS=Paracandidimonas soli OX=1917182 GN=tgt PE=3 SV=1
MTGLDFSLLATDGAARRGRITLNHGVVETPIFMPVGTYGSVKAMLPHELDDIGAQIVLGNTFHLWLRPGTEIMEKHGGLHGFMQWNKPILTDSGGFQVFSLDGLRKITEEGVKFASPIDGSRLFLTPEESMRIQRALNSDIAMVFDECTPYLIDDRPATPEEAARSMRMSLRWARRSRDAFLQSENPNALFGIVQGGMFESLRDESLAGLTDIGFEGYAIGGLSVGEPKEDMMRILSHVAPRLPENAPRYLMGVGTPEDLVEGVARGIDMFDCVMPTRNARNGWLFTRYGDIKIRNARYRDDTRPLDPSCGCHTCGHFSRAYLHHLQKANEITGARLNTLHNLHFYLTLMTEMRQAIKEQRFQAWRARFLEDRARGIA

SEQ ID NO: 58693 - protein, 369 aa, Parachlamydia acanthamoebae
  misc_feature (1)..(369): tr|F8L2I3|F8L2I3_PARAV Queuine tRNA-ribosyltransferase OS=Parachlamydia acanthamoebae (strain UV7) OX=765952 G N=tgt PE=3 SV=1
MSSLKFTVHKSAANCQARTGLLKTAHGDIETPVFMPVGTRAAVKTLTNQQLIDIGAQIILGNTYHLMLRPNMDIMAKAGGLHRFMNWQRPILTDSGGFQVFSLASLNQVANEGVYFQSHIDGSQLFLGPTESMQIQKVLGADIVMTFDQCSPYPCERSKMEQALDRTHLWAKVCRDFELQSYQNLFGIVQGGVYPDLRHQSAEILSSLNCEGYAIGGLAVGEPSDIMNEIIEHTVPCLPNDKPRYLMGVGTPRNIIEAVMRGIDMFDCVMPTRNARNGTAFTWSGKVTIKAGRYADDFSPLDPELDCYTSQFSKAYIRHLLNVDEITGLTLVSMQNLAFYLDFMAKLRQAIQNDTLNEYYQKICAIYPN

SEQ ID NO: 58694 - protein, 388 aa, Parachlamydia acanthamoebae
  misc_feature (1)..(388): tr|A0A0C1C6R1|A0A0C1C6R1_9BACT Queuine tRNA-ribosyltran sferase OS=Parachlamydia acanthamoebae OX=83552 GN=tgt PE=3 SV=1
MRYISFYEGSLSRELGKTIMSSLKFTVHKSAANCQARTGLLKTAHGDIETPVFMPVGTRAAVKTLTNQQLIDIGAQIILGNTYHLMLRPNMDIMAKAGGLHRFMNWQRPILTDSGGFQVFSLASLNQVANEGVYFQSHIDGSQLFLGPTESMQIQKVLGADIVMTFDQCSPYPCERSKMEQALDRTHLWAKVCRDFELQSYQNLFGIVQGGVYPDLRHQSAEILSSLNCEGYAIGGLAVGEPSDIMNEIIEHTVPCLPNDKPRYLMGVGTPRNIIEAVMRGIDMFDCVMPTRNARNGTAFTWSGKVTIKAGRYADDFSPLDPELDCYTSQFSKAYIRHLLNVDEITGLTLVSMQNLAFYLDFMAKLRQAIQNDTLNEYYQKICAIYPN

SEQ ID NO: 58695 - protein, 369 aa, Parachlamydia sp.
  misc_feature (1)..(369): tr|A0A2H9SSS3|A0A2H9SSS3_9BACT Queuine tRNA-ribosyltran sferase OS=Parachlamydia sp. OX=2052048 GN=tgt PE=3 SV= 1
MSSLNFTVHKTEASTQARLGTLKTTHGIIETPVFMPVGTRAAVKTLTNQQLLDIGAQIILGNTYHLMLRPNMDIMRKAGGLHKFMNWDHPILTDSGGFQVFSLASLNQVTNEGVYFQSHIDGTQLFLGPNESMDIQKVLGADIVMAFDQCSPYPCERAQMELALQRTHDWAKTCRNFELQAHQSLFGIVQGGVYPDLRVRSAQVLSDMNFDGYAIGGLAVGEPSETMNEMIEQTIPHLSALKPRYLMGVGTPRNIIEAVMRGIDMFDCVMPTRNARNGTAFTWGGKITIKAGRYAEDFSPLDPELDCYASKFSKAYIRHLLNVDEITGLTLVSMQNLAFYLDFMAQLRQAIKNDKLNDYYQKICAVYPI

SEQ ID NO: 58696 - protein, 381 aa, Parachlamydiales bacterium
  misc_feature (1)..(381): tr|A0A3D2Q8K5|A0A3D2Q8K5_9BACT Queuine tRNA-ribosyltran sferase OS=Parachlamydiales bacterium OX=2052178 GN=tgt PE=3 SV=1
MSPCDSFPFCFEILHRSSRSRARVGKIRTPHGTIDTPNFVAVGTNGTIKALDHATLQDLKLQLLFCNTYHLMVQPGTETIGKAGGLHRFIQRSLPLITDSGGFQVFSLAYGGVANELKSRGTKKREGSVLKVTEEGVLFRSYRDGSKLLLTPESSIQAQKEMGADIIIPLDELPPYHISKENLILSLERTHRWEERSLKSHLQNPKNQAIYGVIHGGIDQGLRQKSCSFLSSLPFDGFAIGGSIGKNREEMTELLSFLTPRLPQEKPVHLLGIGDLASLTRLLPLGIDTFDSSYPTRAARHGYLFTMNGTLDITKGIYRSDFSPVDPECSCRTCAHSHRAYLHHLFKAKEITALTLCTLHNLHFMIEWMAKVRRAICADLL

SEQ ID NO: 58697 - protein, 381 aa, Parachlamydiales bacterium
  misc_feature (1)..(381): tr|A0A351IQD8|A0A351IQD8_9BACT Queuine tRNA-ribosyltran sferase OS=Parachlamydiales bacterium OX=2052178 GN=tgt PE=3 SV=1
MSPCDSFPFCFEILHRSSRSRARVGKIRTPHGTIDTPNFVAVGTNGTIKALDHATLQDLKLQLLFCNTYHLMVQPGTETISKAGGLHRFIQRSLPLITDSGGFQVFSLAYGGVANELKSRGTKKREGSVLKVTEEGVLFRSYRDGSKLLLTPESSIQAQKEMGADIIIPLDELPPYHISKENLILSLERTHRWEERSLKSHLQNPKNQAIYGVIHGGIDQGLRQKSCSFLSSLPFDGFAIGGSIGKNREEMTELLSFLTPRLPQEKPVHLLGIGDLASLTRLLPLGIDTFDSSYPTRAARHGYLFTMNGTLDITKGIYRSDFSPVDPECSCRTCAHSHRAYLHHLFKAKEITALTLCTLHNLHFMIEWMAKVRRAICADLL

SEQ ID NO: 58698 - protein, 373 aa, Paraclostridium benzoelyticum
  misc_feature (1)..(373): tr|A0A0M3DHQ1|A0A0M3DHQ1_9FIRM Queuine tRNA-ribosyltran sferase OS=Paraclostridium benzoelyticum OX=1629550 GN= tgt PE=3 SV=1
MSAVRYELIKTCKQSGARLGRLHTPHGVIETPIFMPVGTQATVKSMTPEELKEIGSQIILSNTYHLYMRPGHDLVKEAGGLHKFMNWDKPILTDSGGFQVFSLGPLRKITEEGVHFRSHIDGSKHFISPEKAMEIQNALGSDIMMAFDECAPYPADRDYVKNSLERTTRWLERCKEAHKNTENQALFGIIQGGMYKDLREQSAREVLALDLPGYAVGGLSVGEPKDLMYEVLDYTVPLMPEDKPRYLMGVGSPDDLIEGVIRGIDMFDCVLPTRIARNGTAMTSEGKVVVRNAKYARDFGPLDPNCDCYCCRNYTRAYIRHLVKANEILAARLITTHNLHFLLDLMKQVRQAIMEDRLLDFRKEFFQKYGYEL

SEQ ID NO: 58699 - protein, 373 aa, Paraclostridium bifermentans
  misc_feature (1)..(373): tr|A0A1X2JGB8|A0A1X2JGB8_PARBF Queuine tRNA-ribosyltran sferase OS=Paraclostridium bifermentans OX=1490 GN=tgt PE=3 SV=1
MSAVRYELIKTCKQSGARLGRLHTPHGVIETPIFMPVGTQATVKSMTPEELKEIGSQIILSNTYHLYMRPGHDLVKEAGGLHKFMNWDKPILTDSGGFQVFSLGPLRKITEEGVNFRSHIDGSKHFISPEKAMEIQNALGSDIMMAFDECAPYPADREYVKNSLERTTRWLERCKEAHKNTENQALFGIIQGGMYKDLREQSAREVLALDLPGYAVGGLSVGEPKDLMYEVLDYTVPLMPEDKPRYLMGVGSPDDLIEGVIRGIDMFDCVLPTRIARNGTAMTSEGKVVVRNAKYARDFGPLDPNCDCYCCRNYTRAYIRHLVKANEILAARLITTHNLHFLLDLMKQVRQAIMEDRLLDFRKEFFQKYGYEL

SEQ ID NO: 58700 - protein, 373 aa, Paraclostridium bifermentans; identical to SEQ ID NO: 58699
  misc_feature (1)..(373): tr|T4VWP5|T4VWP5_PARBF Queuine tRNA-ribosyltransferase OS=Paraclostridium bifermentans ATCC 19299 OX=1233170 G N=tgt PE=3 SV=1

SEQ ID NO: 58701 - protein, 376 aa, Paracoccus aestuarii
  misc_feature (1)..(376): tr|A0A418ZVE8|A0A418ZVE8_9RHOB Queuine tRNA-ribosyltran sferase OS=Paracoccus aestuarii OX=453842 GN=tgt PE=3 S V=1
MTTRFNFTLQATDGAARTGVIDTPRGAIRTPAFMPVGTAATVKAMLPESVAATGADILLGNTYHLMLRPTAERIARLGGLHRFMNWSKPILTDSGGFQVMSLAGLRKLTEEGVTFSSHVDGSKHHLTPERSMEIQRLLGSDIVMCFDECPALPATEAEVAASMRMSMRWAERSRDAFGDRPGHALFGIMQGGVTRDLREESAQALQAIGFDGYAVGGLAVGEGQEAMFGVLDYAPGFLPVDKPRYLMGVGKPDDIVGAVQRGIDMMDCVLPSRSGRTGQAWTPRGQVNIKNARHQDDPRPLDEDCTCPCCTGYSRAYLHHVFRAREMISGMLLTWHNLHYYQQLMAGLREAIAAGRLDDFVADFHARRAEGDIEPI

SEQ ID NO: 58702 - protein, 376 aa, Paracoccus alcaliphilus
  misc_feature (1)..(376): tr|A0A1H8E7V8|A0A1H8E7V8_9RHOB Queuine tRNA-ribosyltran sferase OS=Paracoccus alcaliphilus OX=34002 GN=tgt PE=3 SV=1
MTDRFSFTLDATDGKARTGRIDTPRGTIRTPAFMPVGTAATVKAMLPESVRATGADILLGNTYHLMLRPGAERIARLGGLHRFMNWDRPILTDSGGFQVMSLAGLRKLTEEGVTFASHIDGSKHMLSPETSMEIQRLLGSDIVMCFDECPALPADKQTVAASMRMSMRWAQRSRDAFGDRPGHALFGIMQGGVTRELREESAEALKAIGFDGYAIGGLAVGEGQEAMFGVLDYAPGCLPADKPRYLMGVGKPDDIVGAVQRGVDMMDCVLPSRSGRTGQAWTRRGQLNIKNARHADDPRPLDADCSCPACTGYSRAYLHHVFRAQEMISGMLLTWHNLHYFQELMAGLRAAIAAGMLDDFVADFHAQRAGGDIPPL

SEQ ID NO: 58703 - protein, 375 aa, Paracoccus alkenifer
  misc_feature (1)..(375): tr|A0A1H6JRP6|A0A1H6JRP6_9RHOB Queuine tRNA-ribosyltran sferase OS=Paracoccus alkenifer OX=65735 GN=tgt PE=3 SV =1
MSGFSFTLNASDGRARTGVIRTPRGEIRTPAFMPVGTAGTVKAMLPESVRATGADILLGNTYHLMLRPGAERIARLGGLHRFMNWSRPILTDSGGFQVMSLSELRKLTEDGVTFASHVDGSRHFLSPETSMEIQRLLGSDIVMAFDECPALPATHARQAEAMRLSMRWAQRSRDAFGDRPGHALFGIMQGGVERDLREESAEALRGIGFDGYAIGGLAVGEGQAAMLGVLDYATELLPAGQPRYLMGVGKPDDIVGAVQRGIDMMDCVLPSRSGRTGQAWTRRGQINIKNARHADDPRPLDEDCTCPACSGYSRAYLHHVFRAGEMISGMLLTWHNLHYYQQIMQQMREAIAAGTLDAWVAGFHAMRAQGDIAPL

SEQ ID NO: 58704 - protein, 381 aa, Paracoccus aminophilus
  misc_feature (1)..(381): tr|S5XLB0|S5XLB0_PARAH Queuine tRNA-ribosyltransferase OS=Paracoccus aminophilus JCM 7686 OX=1367847 GN=tgt PE =3 SV=1
MSTKFSFSVSAVDGQARTGVISTPRGEIRTPAFMPVGTAATVKAMMPESVRATGADILLGNTYHLMLRPGADRIERLGGLHKFMNWPRPILTDSGGFQVMSLSGLRKLTEEGVTFSSHVDGSKHFLSPETSMEIQRKLGSDIVMCFDECPALPATEAEVATSMRMSMRWAQRSRDAFGDRPGHALFGIQQGGVTRELREESAEALRAIGFDGYAIGGLAVGEGQEAMFGVLDYAPGFLPEDKPRYLMGVGKPDDIVGAVVRGVDMMDCVLPSRSGRTGQAWTRRGQVNIKNARHADDPRPLDEHCSCPACSQYSRAYLHHVFRSGEMISGMLLTWHNLHYFQELMAGLRGAIAAGRLGAFVAEFESQRAEGDIEPLTVERG

SEQ ID NO: 58705 - protein, 380 aa, Paracoccus aminovorans
  misc_feature (1)..(380): tr|A0A1I2YWM1|A0A1I2YWM1_9RHOB Queuine tRNA-ribosyltran sferase OS=Paracoccus aminovorans OX=34004 GN=tgt PE=3 SV=1
MSDRFSFSVHATDGRARTGAIRTPRGEIRTPAFMPVGTAATVKAMLPESVRATGADILLGNTYHLMLRPGAERIARLGGLHKFMNWERPILTDSGGFQVMSLAGLRKLTEEGVTFSSHIDGSKHHLSPETSMEIQRLLGSDIVMAFDECPALPASEEEVAQSMRMSMRWAQRSRDAFGDRPGHALFGIMQGGVTRALREESAEALKAIGFEGYAIGGLAVGEGQEAMFGVLDYAPGFLPADKPRYLMGVGKPDDIVGAVLRGVDMMDCVLPSRSGRTGQAWTRRGQVNIKNARHADDPRPLDESCTCPACTGYSRAYLHHVFRAGEMISGMLLTWHNLHYFQELMAGLRDAISRGELAGFVAQFEAMRAQGDIEPLSNAG

SEQ ID NO: 58706 - protein, 376 aa, Paracoccus bengalensis
  misc_feature (1)..(376): tr|A0A3D9XSY0|A0A3D9XSY0_9RHOB Queuine tRNA-ribosyltran sferase OS=Paracoccus bengalensis OX=302403 GN=tgt PE=3 SV=1
MSDRFQFTVHATDGRARSGVIQTPRGEIRTPAFMPVGTAATVKAMLPESVRATGADILLGNTYHLMLRPGAERIARLGGLHKFMNWPRPILTDSGGFQVMSLAGLRKLTEEGVTFSSHVDGSKHHLSPETSMEIQRLLGSDIVMAFDECPALPATEEEVAKSMRMSMRWAERSRDAFGDRPGHALFGIMQGGVTRELREESAEALKAIGFDGYAIGGLAVGEGQEAMFGVLDYAPGFLPQDKPRYLMGVGKPDDIVGAVVRGVDMMDCVLPSRSGRTGQAWTRRGQVNIKNARHADDPRPLDADCSCPACTGYSRAYLHHVFRAGEMISGMLLTWHNLHYFQELMAGLRDAIAGGTLAEFVARFEAMRAQGDIEPR

SEQ ID NO: 58707 - protein, 375 aa, Paracoccus chinensis
  misc_feature (1)..(375): tr|A0A1G9ILI1|A0A1G9ILI1_9RHOB Queuine tRNA-ribosyltran sferase OS=Paracoccus chinensis OX=525640 GN=tgt PE=3 S V=1
MTGFSFTLNATDGRARTGAIQTPRGEIRTPAFMPVGTAATVKAMLPESVRATGADILLGNTYHLMLRPGAERIARLGGLHRFMNWDRPILTDSGGFQVMSLAELRKLTEEGVTFASHVDGSRYFLSPETSMEIQRLLGSDIVMAFDECPALPATHERQAEAMRLSMRWAQRSRDAFGDRPGHALFGIMQGGVERDLREESAEALRRIGFDGYAIGGLAVGEGQEAMFGVLDYATDLLPADQPRYLMGVGKPDDIVGAVQRGVDMMDCVLPSRSGRTGQAWTRRGQVNIKNARHADDPRPLDEHCTCPACTGYSRAYLHHVFRAGEMISGMLLTWHNLHYYQEIMQGMRDAIAAGTLDAWVADFHATRAQGDIEPL

SEQ ID NO: 58708 - protein, 375 aa, Paracoccus contaminans
  misc_feature (1)..(375): tr|A0A1W6CTU0|A0A1W6CTU0_9RHOB Queuine tRNA-ribosyltran sferase OS=Paracoccus contaminans OX=1945662 GN=tgt PE= 3 SV=1
MSGFSFTLAATDGRARTGVIRTPRGEIRTPAFMPVGTAATVKAMLPESVRATGADILLGNTYHLMLRPGAERIARLGGLHRFMNWDRPILTDSGGFQVMSLADLRKLTEAGVTFASHVDGSRHVLSPETSMEIQRLLGSDIVMAFDECPALPATHERQAEAMRLSMRWAQRSRDAFGDRPGHALFGIMQGGVERDLREESAAALRAIGFDGYAIGGLAVGEGQAAMFGVLDYATDLLPAGQPRYLMGVGKPDDIVGAVQRGVDMMDCVLPSRSGRTGQAWTRRGQVNIKNARHADDPRPLDEACSCPACTGYSRAYLHHVFRAGEMISGMLLTWHNLHYYQQIMQGMRDAIAAGGLDAWVADFHALRAEGDIPPV

SEQ ID NO: 58709 - protein, 375 aa, Paracoccus denitrificans
  misc_feature (1)..(375): tr|A0A2W4ZTA6|A0A2W4ZTA6_PARDE Queuine tRNA-ribosyltran sferase OS=Paracoccus denitrificans OX=266 GN=tgt PE=3 SV=1
MSGISFILNATDGAARTGIIQTPRGDIRTPAFMPVGTAATVKAMMPESVRATGADILLGNTYHLMLRPGAERVARLGGLHKFMNWSRPILTDSGGFQVMSLSDLRKLTEEGVTFRSHVDGSKHFLSPETSMEIQRLLGSDIVMAFDECPALPASEKRQAEAMRLSMRWAQRSRDAFGDRPGHALFGIMQGGVLRHLREESAAALRAIEFDGYAIGGLAVGEGQEVMFDVLNYATDLLPTDRPRYLMGVGKPDDIVGAVQRGVDMMDCVLPSRSGRTGQAWTRRGQVNIKNARHADDPRPLDEACSCPTCTGYSRGYLHHVMRSGEIIASMLLTWHNLHYFQEIMAGMRHAIAAESLDDWVADFHAVRAGGDIAPI

SEQ ID NO: 58710 - protein, 380 aa, Paracoccus denitrificans
  misc_feature (1)..(380): tr|A1B392|A1B392_PARDP Queuine tRNA-ribosyltransferase OS=Paracoccus denitrificans (strain Pd 1222) OX=318586 GN=tgt PE=3 SV=1
MCRRMSDKFSFSVSATDGRARSGVIHTPRGEIRTPAFMPVGTAATVKAMLPESVRATGADILLGNTYHLMLRPGAERIARLGGLHEFMNWPRPILTDSGGFQVMSLSSLRKLTEEGVTFSSHIDGSKHHLSPETSMEIQRLLGSDIVMAFDECPALPASEEEVAKSMRMSMRWAQRSRDAFGDRPGHALFGIMQGGVTRELREESAEALKAIGFEGYAIGGLAVGEGQEAMFGVLDYAPGFLPEDKPRYLMGVGKPDDIVGAVLRGVDMMDCVLPSRSGRTGQAWTRRGQVNIKNARHADDPRPLDADCTCPACTGYSRAYLHHVFRAGEMISGMLLTWHNLHYFQELMAGLRDAIGRGALAGFVAEFEAMRAQGDIDPL

SEQ ID NO: 58711 - protein, 376 aa, Paracoccus gahaiensis
  misc_feature (1)..(376): tr|A0A4U0R9K9|A0A4U0R9K9_9RHOB Queuine tRNA-ribosyltran sferase OS=Paracoccus gahaiensis OX=1706839 GN=tgt PE=3 SV=1
MTTPFSFSLTATDGGARSGVIDTPRGQIRTPAFMPVGTAATVKAMLPESVAATGADILLGNTYHLMLRPGAERVARMGGLHRFMNWDRPILTDSGGFQVMSLAGLRKLTEKGVTFSSHVDGSKHFLSPETSMQIQALLGSDIVMAFDECPALPATDEAVAASMRLSMRWAQRSRDAFGDRPGHALFGIMQGGVTPDLRAESAEALTGIGFDGYAVGGLAVGEGQEAMFGVLDYAPGLLPVDKPRYLMGVGKPDDIVGAVQRGIDMMDCVLPSRSGRTGQAWTPRGQVNIKNARHQDDPRPLDEDCTCPCCTGYSRAYLHHVFRAKEMISGMLLTWHNLHYYQQLMAGLRDAIAAGRLDAFVAEFHATRAQGDIDPL

SEQ ID NO: 58712 - protein, 376 aa, Paracoccus haeundaensis
  misc_feature (1)..(376): tr|A0A5C4R5F9|A0A5C4R5F9_9RHOB Queuine tRNA-ribosyltran sferase OS=Paracoccus haeundaensis OX=225362 GN=tgt PE= 3 SV=1
MTTRFDFTLQATDGAARTGIIDTPRGQIRTPAFMPVGTAATVKAMLPDSVAATGADILLGNTYHLMLRPGAERVARMGGLHRFMNWQKPILTDSGGFQVMSLAGLRKLTEEGVTFSSHVDGSKHFLSPETSMQIQKLLGSDIVMCFDECPALPATEEAVAASMRLSMRWAQRSRDAFGDRPGHALFGIMQGGVTRELREESAEALQAIGFDGYAVGGLAVGEGQEAMFGVLDYAPGFLPVDRPRYLMGVGKPDDIVGAVQRGIDMMDCVLPSRSGRTGQAWTPRGQVNIKNARHQDDPRPLDEDCTCPCCRGYSRAYLHHVFRAKEMISGMLLTWHNLHYYQQLMAGLRDAIAAGRLDAFVAEFHARRAEGDIEPV

SEQ ID NO: 58713 - protein, 376 aa, Paracoccus halophilus
  misc_feature (1)..(376): tr|A0A099ETP6|A0A099ETP6_9RHOB Queuine tRNA-ribosyltran sferase OS=Paracoccus halophilus OX=376733 GN=tgt PE=3 SV=1
MSDRFEFSVSATDGRARSGTIRTPRGDIRTPAFMPVGTAATVKAMLPESVRATGADILLGNTYHLMLRPGAERVARLGGLHRFMNWDRPILTDSGGFQVMSLSSLRKLTEEGVTFASHIDGSKHFLSPETSMEIQRQLGSDIVMAFDECPALPASEAEVAASMRMSMRWAQRSRDAFGDRPGHALFGIMQGGVTRELREESAEALRAIGFDGYAIGGLAVGEGQEAMFGVLDYAPGFLPEDKPRYLMGVGKPDDIVGAVLRGVDMMDCVLPSRSGRTGQAWTRRGQLNIKNARHADDPRPLDEACTCPACTGYSRAYLHHVFRAGEMISGMLLTWHNLHYFQELMQGMRDAIAAGRFQDFVAEFEAQRAGGDIAPL

SEQ ID NO: 58714 - protein, 376 aa, Paracoccus hibiscisoli
  misc_feature (1)..(376): tr|A0A4U0RD95|A0A4U0RD95_9RHOB Queuine tRNA-ribosyltran sferase OS=Paracoccus hibiscisoli OX=2023261 GN=tgt PE= 3 SV=1
MTTRFSYTLSATDGAARTGVIDTPRGQIRTPAFMPVGTAATVKAMLPESVAATGADILLGNTYHLMLRPGAERVARMGGLHRFMNWDRPILTDSGGFQVMSLAGLRKLTEDGVTFSSHVDGSKHFLSPETSMQIQKLLGSDIVMCFDECPALPATDEAVAASMRLSMRWAQRSRDAFGDRPGHALFGIMQGGVTRELREESAQALQSIGFDGYAVGGLAVGEGQEAMFGVLDYAPGFLPVDKPRYLMGVGKPDDIVGAVQRGIDMMDCVLPSRSGRTGQAWTPRGQVNIKNARHQDDPRPLDEDCTCPCCRGYSRAYLHHVFRAREMISGMLLTWHNLHYYQQLMAGLRDAIAAGRLDAFVADFHARRAEGDIEPV

SEQ ID NO: 58715 - protein, 377 aa, Paracoccus homiensis
  misc_feature (1)..(377): tr|A0A1I0CLB3|A0A1I0CLB3_9RHOB Queuine tRNA-ribosyltran sferase OS=Paracoccus homiensis OX=364199 GN=tgt PE=3 S V=1
MTDRFQFTLNATDGAARTGVIDTPRGQIRTPAFMPVGTAATVKAMMPESVRETGADILLGNTYHLMLRPGAERVDRLGGLHRFMNWDRPILTDSGGFQVMSLASLRKLTEEGVTFASHIDGSKHVLTPERSMEIQRLLGSDIVMAFDECPALPASEEEVANSMRLSMRWAQRSRDAFGDRPGHALFGIMQGGVTRDLREESAKALTGIGFDGYAVGGLAVGEGQEAMFGVLDYAPGFLPQDKPRYLMGVGKPDDIVGAVQRGIDMMDCVLPSRSGRTGQAWTRRGQVNIKNARHQDDPRPLDENCTCPACRSYSRGYLHHVFRAGEMISGMLLTWHNLHYYQELMAGLRAAIAEGRLDGFVADFHAARAEGDIEPLA

SEQ ID NO: 58716 - protein, 375 aa, Paracoccus isoporae
  misc_feature (1)..(375): tr|A0A1G7BB93|A0A1G7BB93_9RHOB Queuine tRNA-ribosyltran sferase OS=Paracoccus isoporae OX=591205 GN=tgt PE=3 SV =1
MSRFSFTLNATDGRARAGVIDTPRGQIRTPAFMPVGTAATVKAMLPDSVRATGADILLGNTYHLMLRPGADRIERLGGLHKFMNWDRPILTDSGGFQVMSLADLRKLDEDGVTFASHIDGSRHVLSPETSMEIQRQLGSDIVMAFDECPALPATEERQAEAMRLSMRWAQRSRDAFGDRPGHALFGIMQGGVIRHLREESAEALTSIGFDGYAIGGLAVGEGQEAMFGVLDYATDLLPQAQPRYLMGVGKPDDIVGAVQRGVDMMDCVLPSRSGRTGQAWTRRGQVNIKNARHADDPRPLDEECRCPACTGYSRAYLHHVFRAGEMISGMLLTWHNLHYYQDLMQGLRDAIAAGGLDGFAADFHATRAGGDIPPV

SEQ ID NO: 58717 - protein, 376 aa, Paracoccus laeviglucosivorans
  misc_feature (1)..(376): tr|A0A521CSW3|A0A521CSW3_9RHOB Queuine tRNA-ribosyltran sferase OS=Paracoccus laeviglucosivorans OX=1197861 GN= tgt PE=3 SV=1
MTQRFAFSVSATDGRARTGAIQTPRGEIRTPAFMPVGTAATVKAMLPESVRATGADILLGNTYHLMLRPGAERVARLGGLHKFMNWERPILTDSGGFQVMSLAGLRKLTEEGVTFASHVDGSKHFLSPETSMEIQRLLGSDIVMAFDECPALPATDAEVAASMRMSMRWAQRSRDAFGDRPGHALFGIMQGGVTPELREESATALKAIGFEGYAIGGLAVGEGQDAMFGVLDYAPGFLPEDKPRYLMGVGKPDDIVGAVVRGVDMMDCVLPSRSGRTGQAWTRRGQVNIKNARHADDPRPLDADCTCPACTGYSRAYLHHVFRSGEMISGMLLTWHNLHYFQELMAGLRDAIANGRLAAFVTEFEAMRAQGDIDPL

SEQ ID NO: 58718 - protein, 376 aa, Paracoccus lutimaris
  misc_feature (1)..(376): tr|A0A368ZAC1|A0A368ZAC1_9RHOB Queuine tRNA-ribosyltran sferase OS=Paracoccus lutimaris OX=1490030 GN=tgt PE=3 SV=1
MSDRFSFSVAATDGRARTGTIQTPRGDIRTPAFMPVGTAATVKAMLPESVAATGADILLGNTYHLMLRPGAERVSRLGGLHRFMNWQRPILTDSGGFQVMSLAGLRKLTEEGVTFASHVDGSKHFLSPETSMEIQRQLGSDIVMAFDECPALPATEEEVAKSMRMSMRWAQRSRDAFGDRPGHALFGIMQGGVTRELREESAEALKAIGFEGYAIGGLAVGEGQEAMFGVLDYAPGFLPQDKPRYLMGVGKPDDIVGAVQRGVDMMDCVLPSRSGRTGQAWTRRGQVNIKNARHADDPRPLDAECTCPACTGYSRAYLHHVFRSGEMISGMLLTWHNLHYFQELMQGMRDAIAGGRLDAFVADFHAQRAGGDIAPL

SEQ ID NO: 58719 - protein, 376 aa, Paracoccus mutanolyticus
  misc_feature (1)..(376): tr|A0A2Z4PFF7|A0A2Z4PFF7_9RHOB Queuine tRNA-ribosyltran sferase OS=Paracoccus mutanolyticus OX=1499308 GN=tgt P E=3 SV=1
MSERFQFHVQATDGRARTGVIQTPRGEIRTPAFMPVGTAATVKAMLPESVRATGADILLGNTYHLMLRPGAERIARLGGLHRFMNWDRPILTDSGGFQVMSLSSLRKLTEEGVTFSSHVDGARHHLSPETSMEIQRLLGSDIVMAFDECPALPATDEAVAKSMRMSMRWAQRSRDAFGDRPGHALFGIMQGGVTRELRQESAEALKSIGFDGYAIGGLAVGEGQEAMFGVLDYAPGFLPEDKPRYLMGVGKPDDIVGAVLRGVDMMDCVLPSRSGRTGQAWTRRGQVNIKNARHADDPRPLDEHCTCPACTGYSRAYLHHVFRSGEMISGMLLTWHNLHYFQELMAGLRGAIAAGELAGFVAGFEAMRAQGDIEPL

SEQ ID NO: 58720 - protein, 376 aa, Paracoccus pantotrophus
  misc_feature (1)..(376): tr|A0A495P0D8|A0A495P0D8_PARPN Queuine tRNA-ribosyltran sferase OS=Paracoccus pantotrophus OX=82367 GN=tgt PE=3 SV=1
MSDRFHFTVQATDGRARSGVIQTPRGEIRTPAFMPVGTAATVKAMLPESVRATGADILLGNTYHLMLRPGAERIARLGGLHRFMNWPRPILTDSGGFQVMSLSSLRKLTEEGVTFSSHVDGSKHHLSPETSMEIQRLLGSDIVMAFDECPALPASEEVVAKSMRMSMRWAQRSRDAFGDRPGHALFGIMQGGVTRELREESAEALKAIGFDGYAIGGLAVGEGQEAMFGVLDYAPGFLPQDRPRYLMGVGKPDDIVGAVLRGVDMMDCVLPSRSGRTGQAWTRRGQVNIKNARHADDPRPLDEHCTCPACAGYSRAYLHHVFRAGEMISGMLLTWHNLHYFQELMAGLRDAIASGTLAGFVARFEAMRAQGDIEPL

SEQ ID NO: 58721 - protein, 376 aa, Paracoccus pantotrophus
  misc_feature (1)..(376): tr|A0A1I5CCK9|A0A1I5CCK9_PARPN Queuine tRNA-ribosyltran sferase OS=Paracoccus pantotrophus OX=82367 GN=tgt PE=3 SV=1
MSDRFHFTVQATDGRARSGVIQTPRGEIRTPAFMPVGTAATVKAMLPESVRATGADILLGNTYHLMLRPGAERIARLGGLHRFMNWPRPILTDSGGFQVMSLSSLRKLTEEGVTFSSHVDGSKHHLSPETSMEIQRLLGSDIVMAFDECPALPASEEVVAKSMRMSMRWAQRSRDAFGDRPGHALFGIMQGGVTRELREESAEALKAIGFDGYAIGGLAVGEGQEAMFGVLDYAPGFLPEDRPRYLMGVGKPDDIVGAVLRGVDMMDCVLPSRSGRTGQAWTRRGQVNIKNARHADDPRPLDEHCTCPACAGYSRAYLHHVFRAGEMISGMLLTWHNLHYFQELMAGLRDAIASGTLAGFVARFEAMRAQGDIEPL

SEQ ID NO: 58722 - protein, 375 aa, Paracoccus salipaludis
  misc_feature (1)..(375): tr|A0A2A2GLF5|A0A2A2GLF5_9RHOB Queuine tRNA-ribosyltran sferase OS=Paracoccus salipaludis OX=2032623 GN=tgt PE= 3 SV=1
MTGFSFTLNATDGRARTGVIQTPRGEIRTPAFMPVGTAATVKAMLPESVRATGADILLGNTYHLMLRPGAERIARLGGLHRFMNWDRPILTDSGGFQVMSLAELRKLTEEGVTFASHVDGSRHFLSPETSMEIQRLLGSDIVMAFDECPALPATHERQAEAMRLSMRWAQRSRDAFGDRPGHALFGIMQGGVERDLREESAEALRRIGFDGYAIGGLAVGEGQEAMFGVLDYATDLLPEDQPRYLMGVGKPDDIVGAVQRGVDMMDCVLPSRSGRTGQAWTRRGQVNIKNARHADDPRPLDEHCTCPACTGYSRAYLHHVFRAGEMISGMLLTWHNLHYYQEIMQGMRDAIAGGTLDAWVATFHAQRAEGDIPPL

SEQ ID NO: 58723 - protein, 376 aa, Paracoccus saliphilus
  misc_feature (1)..(376): tr|A0A1N7MDL0|A0A1N7MDL0_9RHOB Queuine tRNA-ribosyltran sferase OS=Paracoccus saliphilus OX=405559 GN=tgt PE=3 SV=1
MPNRFSFSLNARDGEARQGVIRTPRGEIRTPAFMPVGTAATVKAMLPESVREAGADILLGNTYHLMLRPGAERVARLGGLHDFMNWQRPILTDSGGFQVMSLGPLRKLTEDGVTFSSHIDGSRHELTPERSMEIQKLLGSDIVMAFDECPALPATDEDVARSMRLSMRWAQRSRDAFGDRPGHALFGIMQGGVTRELREESARALTGIGFDGYAIGGLAVGEGQEAMFGVLDYAPDFLPEDKPRYLMGVGKPDDIVGAVQRGVDMMDCVLPSRSGRTGQAWTRRGQINIKNARHQDDPRPLDEDCSCPACRSYSRAYLHHVFRAGEMISGMLLTWHNLHYYQELMAGLRDAIAEGRLNDFVAEFHAMRAGGDIPPL

SEQ ID NO: 58724 - protein, 375 aa, Paracoccus sanguinis
  misc_feature (1)..(375): tr|A0A1H2REK6|A0A1H2REK6_9RHOB Queuine tRNA-ribosyltran sferase OS=Paracoccus sanguinis OX=1545044 GN=tgt PE=3 SV=1
MSGFSFTLRATDGAARRGIITTPRGEIRTPAFMPVGTAGTVKAMLPESVRATGADILLGNTYHLMLRPGAERVARLGGLHRFMNWEGPILTDSGGFQVMSLADLRKLTEDGVTFASHIDGSRHMLSPETSMEIQRLLGSDIVMAFDECPALPASHERQAEAMRLSMRWAQRSRDAFGDRPGHALFGIMQGGVERDLREESAAALRGIGFDGYAIGGLAVGEGQEAMFGVLDYATALLPADQPRYLMGVGKPDDIVGAVQRGVDMMDCVLPSRSGRTGQAWTRHGVVNIKNARHADDPRPLDDACTCPACRSYSRAYLHHVFRAGEMISGMLLTWHNLHYYQQIMGEMRAAIDTGSLDAWVARFHAERAEGDIPPL

SEQ ID NO: 58725 - protein, 375 aa, Paracoccus sanguinis
  misc_feature (1)..(375): tr|A0A099GIE2|A0A099GIE2_9RHOB Queuine tRNA-ribosyltran sferase OS=Paracoccus sanguinis OX=1545044 GN=tgt PE=3 SV=1
MSGFSFTLRATDGAARRGIITTPRGEIRTPAFMPVGTAGTVKAMLPESVRATGADILLGNTYHLMLRPGAERVARLGGLHRFMNWEGPILTDSGGFQVMSLAELRKLTEDGVTFASHIDGSRHMLSPETSMEIQRLLGSDIVMAFDECPALPASHERQAEAMRLSMRWAQRSRDAFGDRPGHALFGIMQGGVERDLREESAAALRGIGFDGYAIGGLAVGEGQEAMFGVLDYATALLPADQPRYLMGVGKPDDIVGAVQRGVDMMDCVLPSRSGRTGQAWTRHGVVNIKNARHADDPRPLDEACTCPACRSYSRAYLHHVFRAGEMISGMLLTWHNLHYYQQIMGEMRAAIDTGSLDAWVARFHAERAEGDIPPL

SEQ ID NO: 58726 - protein, 376 aa, Paracoccus sediminis
  misc_feature (1)..(376): tr|A0A238UWK5|A0A238UWK5_9RHOB Queuine tRNA-ribosyltran sferase OS=Paracoccus sediminis OX=1214787 GN=tgt PE=3 SV=1
MSTRFRFTLGATDGRARTGTIHTPRGTIRTPAFMPVGTAATVKAMLPESVRATGADILLGNTYHLMLRPGAERIARLGGLHRFMNWDRPILTDSGGFQVMSLAALRKLTEDGVTFSSHIDGSKHMLSPETSMEIQRLLGSDIVMCFDECPALPATPDDVAKSMRLSMRWAQRSRDAFGDRPGHALFGIMQGGVTPELRQESASALTAIGFDGYAIGGLAVGEGQEAMFGVLDYAPGFLPADKPRYLMGVGKPDDIVGAVQRGIDMMDCVLPSRSGRTGQAWTRRGQVNVKNARHADDPRPLDEDCTCPACTGYSRAYLHHVFRAGEMISGMLLTWHNLHYFQELMAGLRGAITEGRLDDFVADFHASRAGGDIPPL

SEQ ID NO: 58727 - protein, 376 aa, Paracoccus seriniphilus
  misc_feature (1)..(376): tr|A0A239PMJ6|A0A239PMJ6_9RHOB Queuine tRNA-ribosyltran sferase OS=Paracoccus seriniphilus OX=184748 GN=tgt PE= 3 SV=1
MTDRFQFTLHATDGPARTGTIRTPRGEIRTPAFMPVGTAATVKAMMPESVRETGADILLGNTYHLMLRPGAERVARLGGLHKFMNWERPILTDSGGFQVMSLAGLRKLTEEGVTFASHIDGSKHVLTPERSMEIQRLLGSDIVMAFDECPALPATPEEVANSMRLSMRWAQRSRDAFGDRPGHALFGIMQGGVTRELREESAKALTGIGFDGYAIGGLAVGEGQEAMFGVLDYAPGFLPQDKPRYLMGVGKPDDIVGAVQRGVDMMDCVLPSRSGRTGQAWTRRGQVNIKNARHQDDPRPLDENCSCPACRNYSRAYLHHVFKSGEMISGMLLTWHNLQYYQDLMQGLRDAISSATLDDFVAGFHAARAQGDIAPL

SEQ ID NO: 58728 - protein, 376 aa, Paracoccus siganidrum
  misc_feature (1)..(376): tr|A0A419A3W7|A0A419A3W7_9RHOB Queuine tRNA-ribosyltran sferase OS=Paracoccus siganidrum OX=1276757 GN=tgt PE=3 SV=1
MTDRFAFTLSATDGAARTGTIHTPRGEIRTPAFMPVGTAATVKAMLPESVRQTGADILLGNTYHLMLRPGAERIARLGGLHRFMNWDRPILTDSGGFQVMSLAGLRKLTEEGVTFASHIDGSRHLLSPETSMEIQRLLGSDIVMCFDECPALPADEATVAQSMRLSMRWAQRSRDAFGDRPGHALFGIMQGGVTRELREESAQALTSIGFDGYAIGGLAVGEGQEAMFGVLDYAPGFLPADKPRYLMGVGKPDDIVGAVVRGVDMMDCVLPSRSGRTGQAWTRRGQLNIKNARHADDPRPLDEHCTCPACRGYSRAYLHHVFRAQEMISGMLLTWHNLHYYQELMAGLRGAIAQGRLDDFVADFHAQRAGGDIPPL

SEQ ID NO: 58729 - protein, 375 aa, Paracoccus solventivorans
  misc_feature (1)..(375): tr|A0A1M7HCQ8|A0A1M7HCQ8_9RHOB Queuine tRNA-ribosyltran sferase OS=Paracoccus solventivorans OX=53463 GN=tgt PE =3 SV=1
MSGFSFTLSATDGRARSGVIRTPRGEIRTPAFMPVGTAGTVKAMLPESVRATGADILLGNTYHLMLRPGAERIARLGGLHRFMNWSRPILTDSGGFQVMSLSELRKLTEEGVTFSSHVDGSRHFLSPETSMEIQRLLGSDIVMAFDECPALPATHERQAEAMRLSMRWAQRSRDAFGDRPGHALFGIMQGGVERDLREESAAALRRIGFDGYAIGGLAVGEGQEAMLSVLDYATHLLPAEQPRYLMGVGKPDDIVGAVQRGVDMMDCVLPSRSGRTGQAWTRRGQINIKNARHADDPRPLDETCTCPACTGYSRAYLHHVFRAGEMISGMLLTWHNLHYYQQIMQQMREAIAAGTLEDWVAGFHAERAGGDIEPL

SEQ ID NO: 58730 - protein, 376 aa, Paracoccus sp.
  misc_feature (1)..(376): tr|A0A553ANR5|A0A553ANR5_9RHOB Queuine tRNA-ribosyltran sferase OS=Paracoccus sp. M683 OX=2594268 GN=tgt PE=3 S V=1
MIMSFAFSFNATDGLARSGVIQTPRGQIRTPAFMPVGTAATVKAMLPESVRQTGADILLGNTYHLMLRPGAERIDRLGGLHRFMNWDRPILTDSGGFQVMSLAGLRKLTEEGVTFASHIDGSRHVLTPERSMEIQRLLGSDIVMAFDECPALPAGEAEVAASMRLSMRWAQRSRDAFGDRPGHALFGIMQGGVTPELREESAEALKAIGFDGYAVGGLAVGEGQEAMFGVLDYAPGFLPKDKPRYLMGVGKPDDIVGAVQRGIDMMDCVLPSRSGRTGQAWTRRGQVNIKNARHADDPRPLDESCACPACRGYSRAYLHHVFRAGEMISGMLLTWHNLYYYQDLMAGLRDAIAAGRLDDFVADFHAERAEGDLPPL

SEQ ID NO: 58731 - protein, 376 aa, Paracoccus sp.
  misc_feature (1)..(376): tr|A0A2K9EH64|A0A2K9EH64_9RHOB Queuine tRNA-ribosyltran sferase OS=Paracoccus sp. BM15 OX=1529068 GN=tgt PE=3 S V=1
MTGRFSFTLNATDGQARTGVIQTPRGDVRTPAFMPVGTAATVKAMLPGSVRETGADILLGNTYHLMLRPGAERIDRLGGLHKFMNWDRPILTDSGGFQVMSLASLRKLTEDGVTFSSHIDGSKHFLSPETSMEIQRLLGSDIVMAFDECPALPASEEDVAKSMQLSMRWAQRSRDAFGDRPGHALFGIMQGGVTPELREESAKALTAIGFEGYAVGGLAVGEGQEAMFGVLDYAPGFLPQDKPRYLMGVGKPDDIVGAVQRGIDMMDCVLPSRSGRTGQAWTRRGQVNIKNARHADDPRPVDEACTCPACRGYSRAYLHHVFRSGEMISGMLLTWHNLHYYQELMEGMRQAIAMGRLDSFVAEFHAERAQGDIEPV

SEQ ID NO: 58732 - protein, 375 aa, Paracoccus sphaerophysae
  misc_feature (1)..(375): tr|A0A099FE03|A0A099FE03_9RHOB Queuine tRNA-ribosyltran sferase OS=Paracoccus sphaerophysae OX=690417 GN=tgt PE =3 SV=1
MTGFSFTLEATDGRARSGQIRTPRGDVRTPAFMPVGTAGTVKAMLPESVRATGADILLGNTYHLMLRPGAERIDRLGGLHRFMNWDGPILTDSGGFQVMSLAELRKLTEAGVTFSSHIDGSRHVLSPETSMEIQRLLGSDIVMAFDECPALPATHARQAEAMRLSMRWAQRSRDAFGDRPGHALFGIMQGGVERDLRAESAAALRAIGFDGYAIGGLAVGEGQEVMFGVLDYATDLLPADQPRYLMGVGKPDDIVGAVQRGVDMMDCVLPSRSGRTGQAWTRRGQVNIKNARHADDPRPLDEDCSCAACTGYSRAYLHHVFRAGEMISGMLLTWHNLHYYQQIMQGMRDAITGGTLDAWVAEFHAMRAQGDIPPV

SEQ ID NO: 58733 - protein, 376 aa, Paracoccus sulfuroxidans
  misc_feature (1)..(376): tr|A0A562NBB5|A0A562NBB5_9RHOB Queuine tRNA-ribosyltran sferase OS=Paracoccus sulfuroxidans OX=384678 GN=tgt PE =3 SV=1
MTDRFSFQVSATDGRARTGVISTPRGDIRTPAFMPVGTAATVKAMMPESVRATGADILLGNTYHLMLRPGAERVERLGGLHRFMNWERPILTDSGGFQVMSLSSLRKLTEEGVTFSSHVDGSKHFLSPETSMQIQRQLGSDIVMCFDECPALPATEAEVAQSMRMSMRWAQRSRDAFGDRPGHALFGIMQGGVTPELREESAEALKAIGFEGYAIGGLAVGEGQEAMFGVLDYAPGYLPEDKPRYLMGVGKPDDIVGAVVRGVDMMDCVLPSRSGRTGQAWTRRGQVNIKNARHADDPRPLDEHCTCPACTGYSRAYLHHVFRAGEMISGMLLTWHNLHYFQELMAGLRAAIAEGHLDAFVAEFEAMRAQGDIEPL

SEQ ID NO: 58734 - protein, 376 aa, Paracoccus thiocyanatus
  misc_feature (1)..(376): tr|A0A1N6N949|A0A1N6N949_9RHOB Queuine tRNA-ribosyltran sferase OS=Paracoccus thiocyanatus OX=34006 GN=tgt PE=3 SV=1
MSDRFHFTVHARDGRARSGVIHTPRGEIRTPAFMPVGTAATVKAMLPESVRATGADILLGNTYHLMLRPGAERIARLGGLHKFMNWPRPILTDSGGFQVMSLSSLRKLTEEGVIFSSHVDGSKHHLSPESSMEIQRLLGSDIVMAFDECPALPASDEAVAKSMRMSMRWAQRSRDAFGDRPGHALFGIMQGGVSRELREESAQALRAIGFDGYAIGGLAVGEGQEAMFGVLDYAPGFLPEDKPRYLMGVGKPDDIVGAVLRGVDMMDCVLPSRSGRTGQAWTRRGQVNIKNARHADDPRPLDADCTCPACTGYSRAYLHHVFRAGEMISGMLLTWHNLHYFQELMAGLRDAVARGTLAGFVAQFEAMRAQGDIDPP

SEQ ID NO: 58735 - protein, 376 aa, Paracoccus thiocyanatus
  misc_feature (1)..(376): tr|A0A3D8PGZ3|A0A3D8PGZ3_9RHOB Queuine tRNA-ribosyltran sferase OS=Paracoccus thiocyanatus OX=34006 GN=tgt PE=3 SV=1
MSDRFHFTVHARDGRARSGVIHTPRGEIRTPAFMPVGTAATVKAMLPESVRATGADILLGNTYHLMLRPGAERIARLGGLHKFMNWPRPILTDSGGFQVMSLSSLRKLTEEGVTFSSHIDGSKHHLSPESSMEIQRLLGSDIVMAFDECPALPASDEAVAKSMRMSMRWAERSRDAFGDRPGHALFGIMQGGVSRDLREESAQALRAIGFDGYAIGGLAVGEGQEAMFGVLDYAPGFLPEDKPRYLMGVGKPDDIVGAVLRGVDMMDCVLPSRSGRTGQAWTRRGQVNIKNARHADDPRPLDADCTCPACTGYSRAYLHHVFRAGEMISGMLLTWHNLHYFQELMAGLRDAVARGTLAGFVAQFEAMRAQGDIDPP

SEQ ID NO: 58736 - protein, 376 aa, Paracoccus tibetensis
  misc_feature (1)..(376): tr|A0A1G5J6A5|A0A1G5J6A5_9RHOB Queuine tRNA-ribosyltran sferase OS=Paracoccus tibetensis OX=336292 GN=tgt PE=3 SV=1
MTTRFSFTLAATDGRARTGTISTPRGEIRTPAFMPVGTAATVKAMLPESVRATGADILLGNTYHLMLRPGAERVDRMGGLHRFMNWDRPILTDSGGFQVMSLAGLRKLSEEGVTFSSHIDGSKHQLTPERSMEIQRLLGSDIVMCFDECPALPATEGEVAASMRLSMRWAQRSRDAFGDRPGHALFGIMQGGVTRELREESAAALQQIGFDGYAVGGLAVGEGQEAMFGVLDYATGFLPQDKPRYLMGVGKPDDIVGAVQRGIDMMDCVLPSRSGRTGQAWTRRGQVNIKNARHQDDPRPLDEHCTCPACTGYSRAYLHHVFRAGEMISGMLLTWHNLHYYQELMQGMRDAIAAGRLDAFVADFHAARAEGDIKPI

SEQ ID NO: 58737 - protein, 376 aa, Paracoccus versutus; identical to SEQ ID NO: 58706
  misc_feature (1)..(376): tr|A0A369U151|A0A369U151_PARVE Queuine tRNA-ribosyltran sferase OS=Paracoccus versutus OX=34007 GN=tgt PE=3 SV= 1

SEQ ID NO: 58738 - protein, 376 aa, Paracoccus versutus
  misc_feature (1)..(376): tr|A0A3E0CEB7|A0A3E0CEB7_PARVE Queuine tRNA-ribosyltran sferase OS=Paracoccus versutus OX=34007 GN=tgt PE=3 SV= 1
MSDRFQFTVHATDGRARSGVIQTPRGEIRTPAFMPVGTAATVKAMLPESVRATGADILLGNTYHLMLRPGAERIARLGGLHKFMNWPRPILTDSGGFQVMSLAGLRKLTEEGVTFSSHVDGSKHHLSPETSMEIQRLLGSDIVMAFDECPALPATEEEVAKSMRMSMRWAERSRDAFGDRPGHALFGIMQGGVTRELREESAEALKAIGFDGYAIGGLAVGEGQEAMFGVLDYAPGFLPQDKPRYLMGVGKPDDIVGAVVRGVDMMDCVLPSRSGRTGQAWTRRGQVNIKNARHADDPRPLDADCSCPACTGYSRAYLHHVFRAGEMISGMLLTWHNLHYFQELMAGLRDAIAGGTLAKFVARFEAMRAQGDIEPR

SEQ ID NO: 58739 - protein, 380 aa, Paracoccus yeei
  misc_feature (1)..(380): tr|A0A386UQ93|A0A386UQ93_9RHOB Queuine tRNA-ribosyltran sferase OS=Paracoccus yeei OX=147645 GN=tgt PE=3 SV=1
MCGGMSERFQFHVQATDGRARTGVIQTPRGEIRTPAFMPVGTAATVKAMLPESVRATGADILLGNTYHLMLRPGAERIARLGGLHCFMNWDRPILTDSGGFQVMSLSSLRKLTEEGVTFSSHVDGSRHHLSPETSMEIQRLLGSDIVMAFDECPALPATDEAVAKSMRMSMRWAQRSRDAFGDRPGHALFGIMQGGVTRELRQESAEALKSIGFDGYAIGGLAVGEGQEAMFGVLDYAPGFLPEDKPRYLMGVGKPDDIVGAVLRGVDMMDCVLPSRSGRTGQAWTRRGQVNIKNARHADDPRPLDADCTCPACTGYSRAYLHHVFRSGEMISGMLLTWHNLHYFQELMAGLRGAIAAGELAGFVAGFEAMRAQGDIEPL

SEQ ID NO: 58740 - protein, 376 aa, Paracoccus yeei
  misc_feature (1)..(376): tr|A0A2P1BUK7|A0A2P1BUK7_9RHOB Queuine tRNA-ribosyltran sferase OS=Paracoccus yeei OX=147645 GN=tgt PE=3 SV=1
MSERFQFHVQATDGRARTGVIQTPRGEIRTPAFMPVGTAATVKAMLPESVRATGADILLGNTYHLMLRPGAERIARLGGLHRFMNWDRPILTDSGGFQVMSLSSLRKLTEEGVTFSSHVDGSRHHLSPETSMEIQRLLGSDIVMAFDECPALPATDEAVAKSMRMSMRWAQRSRDAFGDRPGHALFGIMQGGVTRALRQESAEALKSIGFDGYAIGGLAVGEGQEAMLGVLDYAPGFLPEDKPRYLMGVGKPDDIVGAVLRGVDMMDCVLPSRSGRTGQAWTRRGQVNIKNARHADDPRPLDEHCSCPACTGYSRAYLHHVFRSGEMISGMLLTWHNLHYFQELMAGLRGAIAAGELAGFVAGFEAMRAQGDIEPL

SEQ ID NO: 58741 - protein, 376 aa, Paracoccus zhejiangensis
  misc_feature (1)..(376): tr|A0A2H5F3S9|A0A2H5F3S9_9RHOB Queuine tRNA-ribosyltran sferase OS=Paracoccus zhejiangensis OX=1077935 GN=tgt P E=3 SV=1
MTDRFSFALNATDGRARTGAIQTPRGEVRTPAFMPVGTAATVKAMLPESVRQTGADILLGNTYHLMLRPGAERIARLGGLHQFMNWQRPILTDSGGFQVMSLAGLRKLTEEGVTFSSHVDGSKHFLSPETSMEIQRLLGSDIVMAFDECPALPAAEEDVAKSMRLSMRWAQRSRDAFGDRPGHALFGIMQGGVTRELREESAEALKAIGFEGYAIGGLAVGEGQEAMLGVLDYAPGLLPEDRPRYLMGVGKPDDIVGAVQRGIDMMDCVLPSRSGRTGQAWTRRGQVNIKNARHADDPRPLDEACSCPACTGYSRAYLHHVFRSGEMISGMLLTWHNLHYYQELMAGLREAIAAQRLDDFVAEFHAMREGGDIPPL

SEQ ID NO: 58742 - protein, 389 aa, Paracraurococcus sp.
  misc_feature (1)..(389): tr|A0A4V2WLM4|A0A4V2WLM4_9PROT Queuine tRNA-ribosyltran sferase OS=Paracraurococcus sp. NE82 OX=2527868 GN=tgt PE=3 SV=1
MTLHWTKLAQDGAARRGVLHTAHGEVETPVFMPVGTAGTVKAMTADAVRSTGARMVLGNTYHLMLRPGAERVGRLGGLHRLMDWHGPILTDSGGYQVMSLSELREMDEEGVTFRSHLDGSRHRLTPERSVEIQRLLDADVTMCLDECTPYPATEEQAAASMRLSMRWARRCREAFVPRQGYGLFGIVQGSTYPALRAESVQALTETGFEGYAVGGLAVGEGQAMMFSVLDCTLPLMPQDAPRYLMGVGTPSDIVGAVRRGIDMFDCVIPTRSGRTGRAYTSRGVLNLRNAKHAEDPRPIDPACGCPACARHSRAYLHHLIKAEEMLGPMLLTWHNIQYYQDLTRGLREAISAGRLDAHAAALDAAWAAGDTPAEDAAAAELAEDRESLR

SEQ ID NO: 58743 - protein, 381 aa, Paraeggerthella hongkongensis
  misc_feature (1)..(381): tr|A0A3N0B295|A0A3N0B295_9ACTN Queuine tRNA-ribosyltran sferase OS=Paraeggerthella hongkongensis OX=230658 GN=t gt PE=3 SV=1
MSLFDCTCEATSGHARALTYETAHGSFQTPMFMPVGTSATVKGVTVGQLNDLKSQVVLANTYHLSLRPGADVVEEAGGVHGFSHYDGPMLTDSGGFQVFSLADTVKLDDDGLTFRSIYDGSKVRWTPETNMAIQEQLGADIAMQLDQCAPYPAEKAFVAKAVDLSAKWARRCLTAHQRADQTLFGIVQGGMHLDLRLDSIRLLREIEDESLAVGGRRFGGFGIGGYSVGEDHEVMFETLGDVARACPEDRPRYLMGVGNPTTLVRAVREGVDMFDCVLPTRTARMGTAFSSAGRMNMRNAKFTRDFGPLDPTCTCPTCQNHSRSYIRHLVKQNEMLGGILLSIHNLHYLLDLMRRAREAVLADSYEEFYGEWMASPAAKDY

SEQ ID NO: 58744 - protein, 381 aa, Paraeggerthella hongkongensis
  misc_feature (1)..(381): tr|A0A369LFD6|A0A369LFD6_9ACTN Queuine tRNA-ribosyltran sferase OS=Paraeggerthella hongkongensis OX=230658 GN=t gt PE=3 SV=1
MSLFDCTCEATSGHARALTYETAHGSFQTPMFMPVGTSATVKGVTVGQLNDLKSQVVLANTYHLSLRPGADVVEEAGGVHGFSHYDGPMLTDSGGFQVFSLADTVKLDDDGLTFRSIYDGSKVRWTPETNMAIQEQLGADIAMQLDQCAPYPAEKAFVAKAVDLSAKWARRCLVAHQRADQTLFGIVQGGMHLDLRLDSIRLLREIEDESLAAGGRRFGGFGIGGYSVGEDHEVMFETLGDVARACPEDRPRYLMGVGNPTTLVRAVREGVDMFDCVLPTRTARMGTAFSSTGRMNMRNAKFTRDFGPLDPTCTCPTCQNHSRSYIRHLVKQNEMLGGILLSIHNLHYLLDLMRRAREAVLADSYEEFYGEWMASPAAKDY

SEQ ID NO: 58745 - protein, 378 aa, Parafilimonas terrae
  misc_feature (1)..(378): tr|A0A1I5WKW1|A0A1I5WKW1_9BACT Queuine tRNA-ribosyltran sferase OS=Parafilimonas terrae OX=1465490 GN=tgt PE=3 SV=1
MALSFSLEHTDADSKARAGKITTAHGEISTPIFMPVGTAGSVKAVTQQQLYQEVKAQIILGNTYHLYLRPGIEILNKAGGLHGFMHWDKPILTDSGGYQVFSLAQSRKIKEEGVLFQSHIDGSRHLFSPEKVMDIQRNIGADIIMAFDECPPGQSEYNYAKNSLMLTQRWLDRCINHLNSTEPLYGYEQNLFPIVQGNQFHDLRKMSCEYVASKQAPGNAIGGLSVGEPEAVMYEITALCCEHLPADKPRYLMGVGTPWNILECISLGVDMFDCVMPTRNGRNGMLFTTNGVINIKNKKWADDFTPIDEGLPNEISHYYTKAYLRHLFVAGELLGLTIASLQNLCFYLWLVSEARKEIIKGTFTSWKNAMTEQLKQRL

SEQ ID NO: 58746 - protein, 380 aa, Parageobacillus caldoxylosilyticus
  misc_feature (1)..(380): tr|A0A023DAR0|A0A023DAR0_9BACI Queuine tRNA-ribosyltran sferase OS=Parageobacillus caldoxylosilyticus NBRC 1077 62 OX=1220594 GN=tgt PE=3 SV=1
MTSPIRFELIKTCRQTGARLGILHTPHGSFETPMFMPVGTLATVKTLSPEELKEMGAGVILSNTYHLWLRPGPDIVQEAGGLHSFMNWDRGILTDSGGFQVFSLSEFRRIEEEGVYFRNHLNGDKLFLSPEKAIEIQNALGSDIMMAFDECPPYPSTHEYMKKSVERTSRWAERCLKAHRRPAEQGLFAIVQGGEFEDLRRQSAQDLVSLDFPGYAIGGLSVGEPKEVMNRVLEFTTPLLPANKPRYLMGVGSPDSLIDGAIRGIDMFDCVLPTRIGRNGTVMTSEGRVVIKNAQYARDFSPLDPNCDCYTCRNYTRAYIRHLIKCEETFGIRLTSYHNVYFLIKLMEQVRQAIREDRLGDFREEFFERYGFNKPNAKNF

SEQ ID NO: 58747 - protein, 380 aa, Parageobacillus caldoxylosilyticus
  misc_feature (1)..(380): tr|A0A150LSL8|A0A150LSL8_9BACI Queuine tRNA-ribosyltran sferase OS=Parageobacillus caldoxylosilyticus OX=81408 GN=tgt PE=3 SV=1
MTSPIRFELIKTCRQTGARLGILHTPHGSFETPMFMPVGTLATVKTLSPEELKEMGAGVILSNTYHLWLRPGPDIVQEAGGLHSFMNWDRGILTDSGGFQVFSLSEFRRIEEEGVYFRNHLNGDKLFLSPEKAIEIQNALGSDIMMAFDECPPYPSTHEYMKKSVERTSRWAERCLKAHRRPAEQGLFAIVQGGEFEDLRRQSAQDLVSLDFPGYAIGGLSVGEPKEVMNRVLEFTTPLLPANKPRYLMGVGSPDSLIDGSIRGIDMFDCVLPTRIGRNGTVMTSEGRVVIKNAQYARDFSPLDPNCDCYTCRNYTRAYIRHLIKCEETFGIRLTSYHNVYFLIKLMEQVRQAIREDRLGDFREEFFERYGFNKPNAKNF

SEQ ID NO: 58748 - protein, 380 aa, Parageobacillus genomosp.
  misc_feature (1)..(380): tr|A0A023CLF7|A0A023CLF7_9BACI Queuine tRNA-ribosyltran sferase OS=Parageobacillus genomosp. 1 OX=1295642 GN=tg t PE=3 SV=1
MTSPIRFELIKTCRQTGARLGILHTPHGSFETPMFMPVGTLATVKTLSPEELKEMGAGVILSNTYHLWLRPGPDIVKEAGGLHSFMNWDRGILTDSGGFQVFSLSEFRRIEEEGVYFRNHLNGDKLFLSPEKAMEIQNALGSDIMMAFDECPPYPATHEYMKKSVARTSRWAERCLKAHQRPNEQGLFGIVQGGEFEDLRRQSAQDLVSLDFPGYAVGGLSVGEPKEVMNRVLEFTTPLLPANKPRYLMGVGSPDSLIDGAIRGIDMFDCVLPTRIGRNGTVMTSEGRVVIKNAQYARDFSPLDPNCDCYTCRNYTRAYIRHLIKCEETFGIRLTSYHNVYFLIKLMEQVRQAIREDRLGDFREEFFERYGFNKPNAKNF

SEQ ID NO: 58749 - protein, 380 aa, Parageobacillus thermantarcticus
  misc_feature (1)..(380): tr|A0A1I0SGU6|A0A1I0SGU6_9BACI Queuine tRNA-ribosyltran sferase OS=Parageobacillus thermantarcticus OX=186116 G N=tgt PE=3 SV=1
MTSPIRFELIKTCKQTGARLGVLHTPHGSFETPMFMPVGTLATVKTLSPEELKEMGAGVILSNTYHLWLRPGHEIIKEAGGLHSFMNWDRGILTDSGGFQVFSLSDFRKIEEEGVYFRNHLNGDKLFLSPEKAIEIQNALGSDIIMAFDECPPYPATYEYMKQSVERTSRWAERCLKAHKRPDEQGLFGIVQGGEFEGLRRQSAQDLVSLDFPGYAIGGLSVGEPKEVMNRVLEFTTPLLPVNKPRYLMGVGSPDSLIDGAIRGIDMFDCVLPTRIGRNGTVMTSQGRVVIKNAQYARDFSPLDPNCDCYTCRNYTRAYIRHLIKCDETFGIRLTSYHNVYFLIKLMEQVRQAIREDRLRDFRDEFFERYGFNKPNAKNF

SEQ ID NO: 58750 - protein, 380 aa, Parageobacillus thermoglucosidasius
  misc_feature (1)..(380): tr|A0A178TYR7|A0A178TYR7_PARTM Queuine tRNA-ribosyltran sferase OS=Parageobacillus thermoglucosidasius OX=1426 GN=tgt PE=3 SV=1
MTSPIRFELIKTCKQTGARLGVLHTPHGSFETPMFMPVGTLATVKTLSPEELKEMGAGIILSNTYHLWLRPGHEIVKEAGGLHSFMNWDRGILTDSGGFQVFSLSDFRKIEEEGVYFRNHLNGDKLFLSPEKAIEIQNALGSDIIMAFDECPPYPATYEYMKQSVERTSRWAERCLKAHKRPDVQGLFGIVQGGEFEDLRRQSAQDLVSLDFPGYAVGGLSVGEPKEVMNRVLEFTTPLLPADKPRYLMGVGSPDSLIDGAIRGIDMFDCVLPTRIGRNGTVMTSQGRVVIKNAQYARDFSPLDPNCDCYTCRNYTRAYIRHLIKCDETFGIRLTSYHNVYFLIKLMEQVRQAIREDRLRDFRDEFFERYGFNKPNAKNF

SEQ ID NO: 58751 - protein, 380 aa, Parageobacillus thermoglucosidasius
  misc_feature (1)..(380): tr|A0A1B7KWD3|A0A1B7KWD3_PARTM Queuine tRNA-ribosyltran sferase OS=Parageobacillus thermoglucosidasius OX=1426 GN=tgt PE=3 SV=1
MTSPIRFELIKTCKQTGARLGVIHTPHGSFETPMFMPVGTLATVKTLSPEELKEMGAGIILSNTYHLWLRPGHEIVKEAGGLHSFMNWDRGILTDSGGFQVFSLSDFRKIEEEGVYFRNHLNGDKLFLSPEKAIEIQNALGSDIIMAFDECPPYPATYEYMKQSVERTSRWAERCLKAHKRPDAQGLFGIVQGGEFEDLRRQSAQDLVSLDFPGYAVGGLSVGEPKEVMNRVLEFTTPLLPANKPRYLMGVGSPDSLIDGAIRGIDMFDCVLPTRIGRNGTVMTSQGRVVIKNAQYARDFSPLDPNCDCYTCRNYTRAYIRHLIKCDETFGIRLTSYHNVYFLIKLMEQIRQAIREDRLRDFRDEFFERYGFNKPNAKNF

SEQ ID NO: 58752 - protein, 380 aa, Parageobacillus toebii; identical to SEQ ID NO: 55600
  misc_feature (1)..(380): tr|A0A3M0F590|A0A3M0F590_9BACI Queuine tRNA-ribosyltran sferase OS=Parageobacillus toebii NBRC 107807 OX=122350 3 GN=tgt PE=3 SV=1

SEQ ID NO: 58753 - protein, 380 aa, Parageobacillus toebii
  misc_feature (1)..(380): tr|A0A3D8LYY8|A0A3D8LYY8_9BACI Queuine tRNA-ribosyltran sferase OS=Parageobacillus toebii OX=153151 GN=tgt PE=3 SV=1
MASPIRFELIKTCKQTGARLGILHTPHGSFETPMFMPVGTLATVKTLSPEELKEMGAGIILSNTYHLWLRPGHEIVKEAGGLHSFMNWDRGILTDSGGFQVFSLSEFRRIEEEGVYFRNHLNGDKLFLSPEKAIEIQNALGSDIMMAFDECPPYPATYEYMKQSVERTSRWAERCLKAHKRPNEQGLFGIVQGGEFEDLRRQSAQDLVSLDFPGYAVGGLSVGEPKEVMNRVLEFTTPLLPANKPRYLMGVGSPDSLIDGAIRGIDMFDCVLPTRIGRNGTVMTSQGRVVIKNAQYARDFSPLDPNCDCYTCRNYTRAYIRHLIKCDETFGIRLTSYHNVYFLIKLMEQVRQAIREDRLGDFRDEFFERYGFNKPNAKNF

SEQ ID NO: 58754 - protein, 370 aa, Paraglaciecola agarilytica
  misc_feature (1)..(370): tr|K6XC07|K6XC07_9ALTE Queuine tRNA-ribosyltransferase OS=Paraglaciecola agarilytica NO2 OX=1125747 GN=tgt PE= 3 SV=1
MQFELDNTDGKARRGRLKFDRGVVETPAFMPVGTYGTVKGMTPEELDDTGAHICLGNTFHLMLRPGTEIIKQHGDLHDFMHWQKPILTDSGGFQVFSLGDLRKITEEGVTFRSPINGEKILLTPEKSMQVQRDLGSDIVMIFDECTPHPATESEARQSMELSLRWAKRSKAEHGDNPSALFGIIQGGMYEGLRDVSLQGLEEIGFDGYAIGGLSVGEPKEDMIRILDHTTDKIPAHKPRYLMGVGKPEDLVEGVRRGVDMFDCVMPTRNARNGHLFVTSGIVKIRNAAHKTDTGPLDDKCDCYTCKNYSRSYLHHLDKCNEILGARLNTIHNLRYYQRVMQGLRDAIAEQKLDEFVADFYAQKDMPVPAL

SEQ ID NO: 58755 - protein, 372 aa, Paraglaciecola arctica
  misc_feature (1)..(372): tr|K6XMS6|K6XMS6_9ALTE Queuine tRNA-ribosyltransferase OS=Paraglaciecola arctica BSs20135 OX=493475 GN=tgt PE= 3 SV=1
MKFELDNTDGKARRGRLIFDRGVVETPAFMPVGTYGTVKGMTPEELDETGAHICLGNTFHLMLRPGTEIIKQHGDLHDFMHWDKPILTDSGGFQVFSLGDLRKITEQGVTFRSPINGEKILLTPEKSMQVQRDLGSDIVMIFDECTPYPATESEARVSMELSLRWAKRSKTEHGDNPSALFGIIQGGMYEELRDVSLAGLEDIGFDGYAIGGLSVGEPKDEMIKVLDHTTNQIPADKPRYLMGVGKPEDIVEAVRRGIDMFDCVMPTRNARNGHMFITSGVVKIRNAVHKTDTGPLDDKCDCYTCKNYSRSYLHHLDKCNEILGARLNTIHNLRYYQRIMQGLRDAIAANELDAFVTEFYALKDMPVPELKG

SEQ ID NO: 58756 - protein, 370 aa, Paraglaciecola hydrolytica
  misc_feature (1)..(370): tr|A0A136A004|A0A136A004_9ALTE Queuine tRNA-ribosyltran sferase OS=Paraglaciecola hydrolytica OX=1799789 GN=tgt PE=3 SV=1
MKFELDNTDGKARRGRLVFERGIVETPAFMPVGTYGTVKGMTPEELDATGAHICLGNTFHLMLRPGTEIIKQHGDLHDFMHWDKPILTDSGGFQVFSLGELRKITEEGVTFRSPINGEKILLTPEKSMQVQRDLGSDIVMIFDECTPYPATESEARVSMELSLRWAKRSKDEHGDSPSALFGIIQGGMYEGLRDISLRGLEDIGFDGYAIGGLSVGEPKEDMIRVLDHVADKIPAHKPRYLMGVGKPEDLVEAVRRGIDMFDCVMPTRNARNGHLFVTDGVVKIRNAVHKTDTGPLDEKCDCYTCKNYSRSYLHHLDKCNEILGARLNTIHNLHYYQRVMKGLRDAIANKSLDAFVSEFYTQKQMAIPSL

SEQ ID NO: 58757 - protein, 370 aa, Paraglaciecola mesophila
  misc_feature (1)..(370): tr|K6Z4J8|K6Z4J8_9ALTE Queuine tRNA-ribosyltransferase OS=Paraglaciecola mesophila KMM 241 OX=1128912 GN=tgt P E=3 SV=1
MQFELDNTDGKARRGRLKFDRGVVETPAFMPVGTYGTVKGMTPEELDETGAHICLGNTFHLMLRPGTEIIKQHGDLHDFMHWQKPILTDSGGFQVFSLGDLRKITEEGVTFRSPINGEKILLTPEKSMQVQRDLGSDIVMIFDECTPHPATESEARQSMELSLRWAKRSKAEHGDNPSALFGIIQGGMYEGLRDVSLKGLEDIGFDGYAIGGLSVGEPKEDMIRILDHTTDKIPAHKPRYLMGVGKPEDLVEGVRRGVDMFDCVMPTRNARNGHLFVTSGIVKIRNAAHKTDTSPLDDKCDCYTCKNYSRSYLHHLDKCNEILGARLNTIHNLRYYQRVMQGLRDAIAEQKLDEFVADFYAQKDMPVPAL

SEQ ID NO: 58758 - protein, 380 aa, Paraglaciecola polaris
  misc_feature (1)..(380): tr|K6ZZW5|K6ZZW5_9ALTE Queuine tRNA-ribosyltransferase OS=Paraglaciecola polaris LMG 21857 OX=1129793 GN=tgt P E=3 SV=1
MGNAYQQEVFMQFELDNTDGKARRGRLKFARGVVETPAFMPVGTYGTVKGMTPEELDETGAHICLGNTFHLMLRPGTEIIKLHGDLHDFMHWHKPILTDSGGFQVFSLGDLRKITEEGVTFRSPINGEKILLTPEKSMQVQRDLGSDIVMIFDECTPHPATESEARLSMELSLRWAKRSKKEHGDNPSALFGIIQGGMYEGLRDVSLQGLEDIGFDGYAIGGLSVGEPKEDMIRILDHTTDKIPAHKPRYLMGVGKPEDLVEGVRRGIDMFDCVMPTRNARNGHLFVTSGIVKIRNAVHKTDTGPLDDKCDCYTCKNYSRSYLHHLDKCNEILGARLNTIHNLRYYQRVMQGLRDAIAEQKLDGFVADFYAQKDMPVPAL

SEQ ID NO: 58759 - protein, 372 aa, Paraglaciecola psychrophila
  misc_feature (1)..(372): tr|K7AVN8|K7AVN8_9ALTE Queuine tRNA-ribosyltransferase OS=Paraglaciecola psychrophila 170 OX=1129794 GN=tgt PE =3 SV=1
MKFELDNTDGKARRGRLIFERGVVETPAFMPVGTYGTVKGMTPEELDETGAHICLGNTFHLMLRPGTDIIKQHGDLHDFMHWDKPILTDSGGFQVFSLGDLRKITEKGVTFRSPINGEKILLTPEKSMQVQRDLGSDIVMIFDECTPYPATESEAKVSMELSLRWAKRSKEEHGDNPSALFGIIQGGMYEDLRDVSLQGLEDIGFDGYAIGGLSVGEPKDEMIKVLDHTTNQIPADKPRYLMGVGKPEDIVEAVRRGIDMFDCVMPTRNARNGHMFITSGVVKIRNAVHKTDIGPLDEKCDCYTCKNYSRSYLHHLDKCNEILGARLNTIHNLRYYQRIMQGLRDAIAANELDAFVAEFYALKDMPVPQLKS

SEQ ID NO: 58760 - protein, 372 aa, Paraglaciecola sp.
  misc_feature (1)..(372): tr|A0A2N1D3E2|A0A2N1D3E2_9ALTE Queuine tRNA-ribosyltran sferase OS=Paraglaciecola sp. MB-3u-78 OX=2058332 GN=tg t PE=3 SV=1
MKFELDNTDGKARRGRLIFDRGVVETPAFMPVGTYGTVKGMTPEELDETGAHICLGNTFHLMLRPGTEIIKQHGDLHDFMHWDKPILTDSGGFQVFSLGDLRKITENGVTFRSPINGEKILLTPEKSMQVQRDLGSDIVMIFDECTPYPATESEARVSMELSLRWAKRSKDEHGDNPSALFGIIQGGMYEGLRDLSLAGLEDIGFDGYAIGGLSVGEPKDEMIKVLDHTTNQIPADKPRYLMGVGKPEDIVEAVRRGIDMFDCVMPTRNARNGHMFITSGVVKIRNAVHKTDIGPLDEKCDCYTCKNYSRSYLHHLDKCNEILGARLNTIHNLRYYQRIMQGLRDAIAANELDAFVTEFYAQKELTVPQLQD

SEQ ID NO: 58761 - protein, 373 aa, Parahaliea aestuarii
  misc_feature (1)..(373): tr|A0A5C9A8X4|A0A5C9A8X4_9GAMM Queuine tRNA-ribosyltran sferase OS=Parahaliea aestuarii OX=1852021 GN=tgt PE=3 SV=1
MSRECHMQFEQFGSDGAARRGRLHFPRGVVETPAFMPVGTYGTVKGMLPRDIREIGAQIILGNTFHLWLRPGTDIIEQHGDLHDFMAWDGPILTDSGGFQVFSLGDMRKITEEGVKFQSPVDGSPVFLDPEKSMAIQRSLGSDIVMIFDECTPYPATEKEARDSMELSLRWAARSKAAHGESPAALFGIVQGGMYKQLREESLAGLSEIGFDGYAIGGLSVGEPKDEMMAVLEIMQSIMPADKPRYLMGVGTPADLLEGVRRGVDMFDCVMPTRNARNGNLFTSKGQLKLRNARHKTSTLPVDENCSCYTCQNFSRAYLHHLDKCNEILGSQLNTIHNLHFYQQHMAGIRAAIETESLDEFSRQFYAEQAEGV

SEQ ID NO: 58762 - protein, 367 aa, Parahaliea aestuarii
  misc_feature (1)..(367): tr|A0A5C8ZTK6|A0A5C8ZTK6_9GAMM Queuine tRNA-ribosyltran sferase OS=Parahaliea aestuarii OX=1852021 GN=tgt PE=3 SV=1
MQFERLGDDGAARRGRLAFPRGAVETPAFMPVGTYGTVKGMLPRDIHEIGAQIILGNTFHLWLRPGTDIIEQHGDLHDFMGWSGPILTDSGGFQVFSLGDMRKITEDGVKFQSPVDGSPVFLDPEKSMAIQRSLGSDIVMIFDECTPYPATEKEARDSMELSLRWAARSKAAHGESPAALFGIVQGGMYAQLRGESLAGLTDIGFDGYAIGGLSVGEPKEEMMAVLDVMQPLLPADKPRYLMGVGTPADLLEGVRRGVDMFDCVMPTRNARNGNLFTSKGQLKLRNARHKTSTLPLDENCSCHTCQNFSRAYLHHLDKCNEILGSQLNTIHNLHFYQQHMAGIRAAIEAQQLDDYAAEFYAGQAEGV

SEQ ID NO: 58763 - protein, 378 aa, Paralcaligenes ureilyticus
  misc_feature (1)..(378): tr|A0A4R3MEQ7|A0A4R3MEQ7_9BURK Queuine tRNA-ribosyltran sferase OS=Paralcaligenes ureilyticus OX=627131 GN=tgt PE=3 SV=1
MTGLQFELLATDGAARRGRMTLNHGIVETPIFMPVGTYGSVKAMLPHELTEVGAQIVLGNTFHLWLRPGTEVVDKHQGLHGFMQWNKPILTDSGGFQVFSLKGMRKITEEGVKFASPIDGARLFLTPEESMRIQAALDSDIVMVFDECTPYLIEERPATHDEAARSMRMSLRWARRSRQAFDQLQNPNALFGIVQGGMFEDLRDESLAGLVDTGFHGYAIGGLSVGEPKDEMMRVLAHIAPRLPAQAPRYLMGVGTPEDLVAGVALGVDMFDCVMPTRNARNGWLFTRYGDIKIRNARYRDDTRPLDPGCSCHTCGHFSRAYLHHLQRANEITGARLNTLHNLHFYLALMQEMRSAIAAGTFEAWSREFAKNRARGIE

SEQ ID NO: 58764 - protein, 379 aa, Paraliobacillus ryukyuensis
  misc_feature (1)..(379): tr|A0A366EFV8|A0A366EFV8_9BACI Queuine tRNA-ribosyltran sferase OS=Paraliobacillus ryukyuensis OX=200904 GN=tgt PE=3 SV=1
MAAITYELIKTCKQTGARLGRVHTPHGSFDTPTFMPVGTLATVKTMSPEELTEMGAKIILSNTYHLWLRPGEDIVREAGGLHKFMNWDGAILTDSGGFQVFSLSDLREIEEKGVHFRNHISGEKLFLSPEKAMQIQNDLGADIMMAFDECTPYPAEHKYMKSSVERTSRWAERCLQAHQRPHDQGLFGIVQGGEYEDLRRQSAHDLTSLDFPGYAIGGLSVGEPKDVMNRVLEYTTPLLPDSKPRYLMGVGSPDSLIDGAIRGIDMFDCVLPTRIARNGTCMTSNGRLVVRNAKYARDFGPIDPNCDCHTCRNYSRAYIRHLVKSNETFGLRLTTYHNLYFLLNLMQQVREAITEDRLGDFREEFFEQYGFNKPNAKNF

SEQ ID NO: 58765 - protein, 379 aa, Paraliobacillus sp.
  misc_feature (1)..(379): tr|A0A0U1KLS6|A0A0U1KLS6_9BACI Queuine tRNA-ribosyltran sferase OS=Paraliobacillus sp. PM-2 OX=1462524 GN=tgt P E=3 SV=1
MEAIRYELIKTCKQTGARLGKVHTPHGSFETPMFMPVGTLATVKTMSPEELEEMGAKIILSNTYHLWLRPGEDIVKEAGGLHQFMNWDGAILTDSGGFQVFSLSDLREIEEKGVHFRNHISGEKLFLSPEKAMHIQNALGSDIMMAFDECPPYPAEHKYMKASVERTSRWAERCLQAHNRPSDQGLFGIVQGGEYEDLRRLSASDLTSMDFPGYAIGGLSVGEPKDVMNRVLEFTTPLLPNNKPRYLMGVGSPDSLIDGAVRGVDMFDCVLPTRIARNGTCMTSNGRLVVRNAKYARDFSPIDPNCNCHTCRNYSRAYIRHLVKANETFGLRLTTYHNLYFLLELMGQVRKAIKEDRLGDFRESFFEQYGFNKPDAKNF

SEQ ID NO: 58766 - protein, 372 aa, Paramaledivibacter caminithermalis
  misc_feature (1)..(372): tr|A0A1M6QV25|A0A1M6QV25_9CLOT Queuine tRNA-ribosyltran sferase OS=Paramaledivibacter caminithermalis DSM 15212 OX=1121301 GN=tgt PE=3 SV=1
MAIKYELIKECKQTGARLGKIHTPHGTIETPIFMPVGTQATVKSMTPEELKEIESQIILSNTYHLYLRPGHDLVEKAGGLHKFMNWDRPILTDSGGFQVFSLGDLRKISEEGVEFRSHIDGSKHFISPEKAIEIQNSLGSDIIMAFDECAPYPADREYVKNSLERTTRWAKRCKKAHKNTDTQGLFGIIQGGIYKDMREQSAKEITELDFPGYAVGGLSVGEPKPLMYEVLEYTTPLMPKNKPRYLMGVGSPDCLIEGVIRGIDMFDCVLPTRIARNGTAMTSQGRVTIKQARFYDDFTPLDPECDCYTCRNYTKAYLRHLFKANEILSARLFSYHNLYFLLKLMKNIREAIKNDNLLDYRKEFFEKYGYEL

SEQ ID NO: 58767 - protein, 377 aa, Paramesorhizobium deserti
  misc_feature (1)..(377): tr|A0A135HWM6|A0A135HWM6_9RHIZ Queuine tRNA-ribosyltran sferase OS=Paramesorhizobium deserti OX=1494590 GN=tgt PE=3 SV=1
MTSTNFQFKVLATDGAARRGEITMPRGTVRTPAFMPVGTGGTVKAMYMDQVRDLGSDIILGNTYHLMLRPGAERVAKLGGLHEFARWPGPILTDSGGFQVMSLAQLRKLNENGVTFQSHIDGRAYEMTPERSIEIQGLLDSDIQMQLDECVALPSEERDIERAMELSLRWAERCKAAFGDQPGKAMYGIVQGGDNARLRARSAEALKAMGLKGYSIGGLAVGEPQEIMLDMLEVVCPILPTEKPRYLMGVGTPDDILKSVARGVDMFDCVMPTRAGRHGLAFTRHGKINLRNARHAEDHRPLDEESNCPAARDYSRAYLHHLVKSGEFLGAMLLTWNNLAYYQSLMQGCRDAIEAGKFQDFAGVTQENWARGDLPVL

SEQ ID NO: 58768 - protein, 376 aa, Paramuribaculum intestinale
  misc_feature (1)..(376): tr|A0A2V1IXH2|A0A2V1IXH2_9BACT Queuine tRNA-ribosyltran sferase OS=Paramuribaculum intestinale OX=2094151 GN=tg t PE=3 SV=1
MNFNLQHTCADSAARAGMISTAHGDILTPIFMPVGTVASVKAVHQRDLADDVKAQIILGNTYHLYLRPGTEILHQAGGLHRFMGWERPILTDSGGFQVFSLAANRKLKEEGAWFRSHIDGSKHLFTPEKVVDIQRIIGSDIMMALDECPPGTADYDYAYHSLQLTQRWLKRGWDRFKATEGLYGFSQTFFPIVQGCTYPELRRESAKFVADLGAEGNAIGGLAVGEPTEVMYDMIEVVNEILPADKPRYLMGVGTPANMLEAIDRGVDMMDCVMPTRNGRNGMLFTMNGILNMRNLKWANDFSPLDPDGTSFVDHAYSRAYVRHLFVSQELLALQIGAIHNLCFYLHLMDEARRHIIEGDFSQWKRAIIPQLTHRL

SEQ ID NO: 58769 - protein, 376 aa, Parapedobacter composti
  misc_feature (1)..(376): tr|A0A1I1I2F6|A0A1I1I2F6_9SPHI Queuine tRNA-ribosyltran sferase OS=Parapedobacter composti OX=623281 GN=tgt PE= 3 SV=1
MKFTLQATDKHTQARAGIMETAHGTIETPIFMPVGTAGTVKAVHQHELADDIKAQIILGNTYHLYLRPGLDVLQRAGGLHRFNGWQKPILTDSGGYQVYSLTEVRKIREEGVTFRSHIDGSKHLFTPENVMDTQRVIGADIVMAFDECTPYPCDYQYARRSLDMTHRWLKRCCERFDATEPLYGYEQTLFPIVQGSVYRDLREKSAETIAAFGREGNAIGGLSVGEPAEEMYAMTEVVCRILPAEKPRYLMGVGTPVNILENIALGIDMFDCVMPTRNARNGMLFTRQGIINIKNKKWETDFSPLDAESDLLADRVYSKAYLRHLIRSQEILGAQIASLHNLHFYLWLVGEARAHIVAGDFHEWKSKMVKQLDERL

SEQ ID NO: 58770 - protein, 376 aa, Parapedobacter indicus
  misc_feature (1)..(376): tr|A0A1I3CW04|A0A1I3CW04_9SPHI Queuine tRNA-ribosyltran sferase OS=Parapedobacter indicus OX=1477437 GN=tgt PE= 3 SV=1
MKFTLQAKDRQSKARAGAIETAHGTIETPIFMPVGTAGTVKAVHQHELVRDIGAQIILGNTYHLYLRPGLDILNRAGGLHRFNGWDKPILTDSGGYQVYSLTEVRKIKEEGVTFRSHIDGSKHLFTPENVVDTQRIIGADIVMAFDECTPYPCDYQYAKRSLDMTHRWLKRCCDRFDHTQPLYGYEQTLFPIVQGSVYRDLRERSAETIAAFGRDGNAIGGLSVGEPAEEMYAMTEVVCNILPAEKPRYLMGVGTPVNILENIALGIDLFDCVMPTRNARNGMLFTRQGIINIKNKKWEADFSPIDAESDLLADRVYSKAYLRHLIRSQEILGAQIATLHNLHFYLWLVGEARKHILAGDFREWKNKMVAQLDERL

SEQ ID NO: 58771 - protein, 376 aa, Parapedobacter koreensis
  misc_feature (1)..(376): tr|A0A1H7JDV9|A0A1H7JDV9_9SPHI Queuine tRNA-ribosyltran sferase OS=Parapedobacter koreensis OX=332977 GN=tgt PE =3 SV=1
MKFTLQAKDTQSKARAGILETAHGPIETPIFMPVGTAGTVKAVHQHELVADIKAQIILGNTYHLYLRPGLDILQGAGGLHRFNGWEKPILTDSGGYQVYSLTEVRKIKEEGVTFRSHIDGSKHLFTPENVMDTQRIIGADIVMAFDECTPYPCDYQYAKRSLDMTHRWLGRCCDRFDTTEPLYGYEQALFPIVQGSVYRDLREQSAETIAAFEREGNAIGGLSVGEPAEEMYAMTEVVCDILPVEKPRYLMGVGTPVNILENIALGIDMFDCVMPTRNARNGMLFTRRGIINIKNKKWERDFSPIDAESDLLADRVYSKAYLRHLIRSQEILGAQIASLHNLHFYLWLVGEARAHIVAGDFRVWKNSMVKQLDERL

SEQ ID NO: 58772 - protein, 432 aa, Parapedobacter luteus
  misc_feature (1)..(432): tr|A0A1T5CF10|A0A1T5CF10_9SPHI Queuine tRNA-ribosyltran sferase OS=Parapedobacter luteus OX=623280 GN=tgt PE=3 SV=1
MRSISISIRAVIGCSTCDASQQLAVRMPQPTSTGVKLKILCHYQRLCFVFPIFASTMKFTLQAADAQSKARAGILETAHGTIETPIFMPVGTAGTVKAVHQHELVNDIEAQIILGNTYHLYLRPGLDILHAAGGLHRFNGWEKPILTDSGGYQVYSLTEVRKIKEEGVTFRSHIDGSKHLFTPENVMDTQRIIGADIVMAFDECTPYPCDYQYARRSLDMTHRWLKRCCERFDATEPLYGYDQTLFPIVQGSVYRDLREKSAETVASFGRDGNAIGGLSVGEPAEEMYAMTEVVCNILPAEKPRYLMGVGTPVNILENIALGIDMFDCVMPTRNARNGMLFTRRGIINIKNKKWEQDFSPIDAESDLLADRVYTKAYLRHLIRSQEILGAQIASLHNLHFYLWLVGEARAHIMAGDFHAWKNSIVKQLDERL

SEQ ID NO: 58773 - protein, 304 aa, Parapedobacter sp.
  misc_feature (1)..(304): tr|A0A3N7HXN2|A0A3N7HXN2_9SPHI Queuine tRNA-ribosyltran sferase (Fragment) OS=Parapedobacter sp. OX=1958893 GN= EAS52_21580 PE=3 SV=1
MKFTLQATDKQCRARAGLMETAHGTIETPIFMPVGTSGTVKAVHQHELVDDIGAQIILGNTYHLYLRPGLDVLNRAGGLHRFNGWDKPILTDSGGYQVYSLTEVRKIKEEGVTFRSHIDGSKHLFTPENVMDTQRIIGADIVMAFDECTPYPCDYSYAKRSLDMTHRWLKRCCERFDQTQPLYGYEQTLFPIVQGSVYPDLRARSAETIASFERDGNAIGGLSVGEPAEEMYAMTELVCNILPTEKPRYLMGVGTPVNILENIALGIDLFDCVMPTRNARNGMLFTKEGIINIKNKKWEADFSP

SEQ ID NO: 58774 - protein, 376 aa, Paraperlucidibaca baekdonensis
  misc_feature (1)..(376): tr|A0A3E0H5I0|A0A3E0H5I0_9GAMM Queuine tRNA-ribosyltran sferase OS=Paraperlucidibaca baekdonensis OX=748120 GN= tgt PE=3 SV=1
MKFTLHATDGKARRGTLTFDRGTVETPAFMPVGTYGTVKGMLPRDIHAIGAEIILGNTFHLWLRPGTEIIKAHGDLHDFTQWQGPILTDSGGFQVFSLGKLRKITEEGVRFQSPVDGSKVFLSPEESMRIQRDLGSDVVMIFDECTPYPATHIEADKSLELSLRWAKRSKDAHGDNPNALFGIVQGGMYEDLRLKSLAGLEQIDFDGYAIGGLSVGEPKEDMIRILDFLPEHLPAHKPRYVMGVGKPEDLVEGVRRGIDMFDCVMPTRNARNGHYFVSNGIVRIRNSQYKTDTGPLDAECDCQACTGFSRAYLHHLDKCGEMLGAQLGTIHNLRYYQRLMAGLREAIEQGRLQAFVDDFYARRDLPTPPLTVDISE

SEQ ID NO: 58775 - protein, 375 aa, Paraphotobacterium marinum
  misc_feature (1)..(375): tr|A0A220VEK2|A0A220VEK2_9GAMM Queuine tRNA-ribosyltran sferase OS=Paraphotobacterium marinum OX=1755811 GN=tgt PE=3 SV=1
MKFELKNESGGARRGQLEFKRGTVETPAFMPVGTYGTVKGMTTEEVESIGAEIILGNTFHLWLRPGQEVIKNHGDLHDFMNWKGPILTDSGGFQVFSLGDIRKITEDGVHFRNPVNGEKIFMDAEKSMEIQKDLGSDIVMIFDECTPYPATHEEAQKSMELSLRWAKRSKAHFKKLENKNALFGIVQGSVYPELRKLSAEQLIDIGFDGYAIGGLAVGEPKDEMRKVLEFTCPLLPKDKPRYLMGVGKPEDLVEGVRRGIDMFDCVMPTRNARNGHLFVRDGVIKIRNAKYKNDTLPLDEECDCYTCKNYSRAYLHHLDKCNEILGARLNTIHNLKYYQDLMQGIRSSIDENRFEEFVEEFYSRRNLNVPPLITK

SEQ ID NO: 58776 - protein, 376 aa, Paraprevotella clara
  misc_feature (1)..(376): tr|G5SWB9|G5SWB9_9BACT Queuine tRNA-ribosyltransferase OS=Paraprevotella clara YIT 11840 OX=762968 GN=tgt PE=3 SV=1
MKFELQHTDTLTSARAGVLTTDHGPIETPVFMPVGTVGSVKAVHPWELKEDIKAQIILGNTYHLYLRPGIEILGKAGGLHKFNSFNGPILTDSGGFQVFSLTGIRKLREEGCEFRSHIDGSKHIFTPEKVMDIERAIGADIMMAFDECPPGTSDYAYAKKSLGLTHRWLDRCIRRFNETEPRYGYQQSLFPIVQGCTYKDLRIQSAEFVASKEADGNAIGGLAVGEPAEVMYEMIEIVNGILPKDKPRYLMGVGTPVNILEGIERGVDMFDCVMPTRNGRNAMLFTQNGIMNLRNKKWEDDFSPLDPDGTSYVDKAYSKAYLHHLFKAQELLALQIASIHNLAFYLWLTREARRHIITGDFASWKASMVKRVAARL

SEQ ID NO: 58777 - protein, 376 aa, Paraprevotella clara
  misc_feature (1)..(376): tr|A0A412U5X6|A0A412U5X6_9BACT Queuine tRNA-ribosyltran sferase OS=Paraprevotella clara OX=454154 GN=tgt PE=3 S V=1
MKFELQHTDTLTSARAGVLTTDHGPIETPVFMPVGTVGSVKAVHPWELKEDIKAQIILGNTYHLYLRPGIEILGKAGGLHKFNSFNGPILTDSGGFQVFSLTGIRKLREEGCEFRSHIDGSKHIFTPEKVMDIERAIGADIMMAFDECPPGTSDYAYAKKSLGLTHRWLDRCIRRFNETEPRYGYRQSLFPIVQGCTYKDLRIQSAEFVASKEADGNAIGGLAVGEPAEVMYEMIEVVNGILPKDKPRYLMGVGTPVNILEGIERGVDMFDCVMPTRNGRNAMLFTQNGIMNLRNKKWEDDFSPLDPDGTSYVDKAYSKAYLHHLFKAQELLALQIASIHNLAFYLWLTREARRHIITGDFASWKASMVKRVAARL

SEQ ID NO: 58778 - protein, 376 aa, Paraprevotella xylaniphila
  misc_feature (1)..(376): tr|F3QX90|F3QX90_9BACT Queuine tRNA-ribosyltransferase OS=Paraprevotella xylaniphila YIT 11841 OX=762982 GN=tg t PE=3 SV=1
MKFELQHTDSLTSARAGVLTTDHGLIETPVFMPVGTVGSVKAVHPWELKEDIKAQIILGNTYHLYLRPGINVLEKAGGLHKFNGFDRPILTDSGGFQVFSLTGIRKLREEGCEFRSHIDGSKHIFTPEKVMDIERAIGADIMMAFDECPPGTSDYAYAKKSLGLTHRWLDRCIRRFNETEPRYGYQQSLFPIVQGCTYKDLRIQSAEFVASKEADGNAIGGLAVGEPAEVMYEMIEVVNGILPKDKPRYLMGVGTPVNILEGIERGVDMFDCVMPTRNGRNAMLFTQNGIMNLRNKKWEDDFSPLDPDGTSYVDKAYSKAYLHHLFKAQELLALQIASIHNLAFYLWLTREARRHIIVGDFSSWKALMVKRVAARL

SEQ ID NO: 58779 - protein, 377 aa, Pararheinheimera mesophila
  misc_feature (1)..(377): tr|A0A3P3QL49|A0A3P3QL49_9GAMM Queuine tRNA-ribosyltran sferase OS=Pararheinheimera mesophila OX=1547515 GN=tgt PE=3 SV=1
MKFELLKTDGKARRGRLVFERGIVETPAFMPVGTYGTVKGMTPEELEATGAQICLGNTFHLMLRPGTEIIKKHGDLHDFMHWHKPILTDSGGFQVFSLGELRKIKEEGVTFRSPLNGEKIMLTPERSMQVQRDLGSDIVMIFDECTPYPATEQQAKKSMEMSLRWAKRSKEAHGDNPAALFGIIQGGMYPNLRDVSLQGLEEIGFDGYAIGGLSVGEPKEDMINILNHTTGQMPQHKPRYLMGVGKPEDIVEAVRRGIDMFDCVMPTRNARNGHLFVSTGVIKIRNAKHKDDTSTLDPECDCYTCKNYSRSYLHHLDRCNEILGARLNTIHNLHHYQKLMQGLRAAIAEQKLEDFVAEFYRKRGMDVPPLEVSLTEQ

SEQ ID NO: 58780 - protein, 377 aa, Pararheinheimera tangshanensis
  misc_feature (1)..(377): tr|A0A5C8LWR9|A0A5C8LWR9_9GAMM Queuine tRNA-ribosyltran sferase OS=Pararheinheimera tangshanensis OX=400153 GN= tgt PE=3 SV=1
MKFELLKTDGKARRGRLVFERGIVETPAFMPVGTYGTVKGMTPEELEATGAQICLGNTFHLMLRPGTEIIKKHGDLHDFMHWHKPILTDSGGFQVFSLGELRKIKEEGVTFRSPLNGEKIMLTPERSMQVQRDLGSDIVMIFDECTPYPATEQQAKKSMEMSLRWAKRSKDEHGDNPAALFGIIQGGMYPNLRDISLQGLEEIGFDGYAIGGLSVGEPKEDMINILNHTTGQMPQHKPRYLMGVGKPEDIVEAVRRGIDMFDCVMPTRNARNGHLFVSTGVIKIRNAKHKDDTSTLDAECDCYTCKNYSRSYLHHLDRCNEILGARLNTIHNLHHYQKLMQGLRAAIAEQKLEDFVAEFYQKRGMDIPPLEDSLTEQ

SEQ ID NO: 58781 - protein, 376 aa, Pararhizobium polonicum
  misc_feature (1)..(376): tr|A0A1C7NYT8|A0A1C7NYT8_9RHIZ Queuine tRNA-ribosyltran sferase OS=Pararhizobium polonicum OX=1612624 GN=tgt PE =3 SV=1
MTETFQFNIQATDGKARRGTVSMPRGEIRTPAFMPVGTVGTVKAMYLDQVRDLGADIILGNTYHLMLRPGPERVARLGGLHELIRWPYPILTDSGGFQVMSLAGLRKLDEKGVTFKSHVDGALHHMSPERSIEIQGMLDSDIQMQLDECVRLPAEATDIERAMEMSLRWADRCKTAFGDQPGKAMFGIVQGGDVPALRVRSAQALSSLDLKGYAIGGLAVGEPQAVMLDMLDITCPELPVEKPRYLMGVGTPDDILKSVARGIDMFDCVMPTRAGRHGLAFTRRGRVNLRNARHAEDTRPLDDQSSCPAARDYSRAYLHHLVRADESLGGMLLTWNNLAYYQDLMAGIRKAIEEGRYAAFMEETQEMWRQGDLAPL

SEQ ID NO: 58782 - protein, 379 aa, Pararhizobium sp.
  misc_feature (1)..(379): tr|A0A506UED2|A0A506UED2_9RHIZ Queuine tRNA-ribosyltran sferase OS=Pararhizobium sp. BGMRC6574 OX=2590452 GN=tg t PE=3 SV=1
MSEAFGFRLLARDGVARRGEVTMPRGTIRTPAFMPVGTAGTVKAMYLDQVRALGADVILGNTYHLMLRPGAERVARLGGLHTFAGWPHPILTDSGGFQVMSLAALRKLDETGVTFRSHVDGTPHVLTPERSIEIQGLLDSDIQMQLDECVRLPGERGDIERAMELSVRWAERCKHAFGDQPGKAMFAIVQGGDHADLRERSARALVDLDLKGYAVGGLAVGEPQAVMLDMLDATCAHLPADKPRYLMGVGTPEDILLSVGRGIDMFDCVMPTRAGRHGVAYTRRGRINLRNARHAEDTRPLDAESDCPAARDYSRAYLHHLVRSKEALGGMVLTWNNLAYYQNLMAGIRAAIEAGRYADHVEAVRAEWARGDLPPVDGR

SEQ ID NO: 58783 - protein, 376 aa, Pararhodobacter aggregans
  misc_feature (1)..(376): tr|A0A2T7UMW7|A0A2T7UMW7_9RHOB Queuine tRNA-ribosyltran sferase OS=Pararhodobacter aggregans OX=404875 GN=tgt P E=3 SV=1
MVERFSFELSAVDGAARTGVIHTPRGEIRTPAFMPVGTAGTVKAMMPESVRATGADILLGNTYHLMLRPTAERIAALGGLHRFMNWERPILTDSGGFQVMSLASLRKLTEEGVRFASHIDGSKHMLTPERSMEIQRLLGSDIVMAFDECPALPAEDKVVAESMRMSMRWARRSREAFGDRPGHALFGIMQGGVTRDLREESAAALREIGFEGYAIGGLAVGEGQAAMFGVLDYAPGFLPEDKPRYLMGVGKPDDIVGAVERGVDMMDCVLPSRSGRTGQAWTRRGSVNLRNARHRDDPRPLDEACTCPACRSYSRAYLHHVVKADEIIGSMLLTWHNLQYYQDLMAGLRAAIAGGRLAAFVAEFHATRAEGDIEPL

SEQ ID NO: 58784 - protein, 376 aa, Pararhodobacter sp.
  misc_feature (1)..(376): tr|A0A2T8HYQ5|A0A2T8HYQ5_9RHOB Queuine tRNA-ribosyltran sferase OS=Pararhodobacter sp. AM505 OX=2172121 GN=tgt PE=3 SV=1
MSQRFSFELHSTDGAARSGVIQTPRGEVRTPAFMPVGTAATVKAMMPESVRATGADILLGNTYHLMLRPTAERIHALGGLHKFMNWERPILTDSGGFQVMSLASLRKLTEEGVKFSSHIDGSKHMVTPERSMEIQRLLGSDIVMCFDECPALPADDATVAKSMQLSMRWARRSREAFGDRPGHALFGIMQGGVTRDLREESAKALIDIGFEGYAVGGLAVGEGQEAMFGVLDYAPGFLPADKPRYLMGVGKPDDIVGAVKRGIDMMDCVLPSRSGRTGQGWTRHGSVNLRNARHKDDPRPLDAACGCPACRNYSRAYLHHVVRSDEIIGSMLLTWHNLHYYQDLMQGMREAIGAGRFAEFEAEFHAKRAEGDIAPL

SEQ ID NO: 58785 - protein, 376 aa, Pararhodobacter sp.
  misc_feature (1)..(376): tr|A0A2U2C585|A0A2U2C585_9RHOB Queuine tRNA-ribosyltran sferase OS=Pararhodobacter sp. CIC4N-9 OX=2184063 GN=tg t PE=3 SV=1
MSERFSFTLNATDGAARTGVIHTPRGEIRTPAFMPVGTAGTVKAMMPDSVRATGADILLGNTYHLMLRPTAERIAALGGLHRFMNWERPILTDSGGFQVMSLANLRKLTEEGVRFSSHIDGSKHMLSPERSMEIQRLLGSDIVMCFDECPALPAEDKVVAESMRLSMRWARRSREAFGDRPGHALFGIMQGGVTQDLREESAKALVEIGFEGYAIGGLAVGEGQEAMFGVLDYAPGFLPEDKPRYLMGVGKPDDIVGAVERGVDMMDCVLPSRSGRTGQGWTRRGAVNLRNARHRDDPRPLDEACGCPACRNYSRAYLHHVVRADEIIGSMLLTWHNLQYYQDLMQGLRDAIAAGSLAGFVAAFHENRARGDIEPL

SEQ ID NO: 58786 - protein, 378 aa, Pararhodospirillum oryzae
  misc_feature (1)..(378): tr|A0A512H3R4|A0A512H3R4_9PROT Queuine tRNA-ribosyltran sferase OS=Pararhodospirillum oryzae OX=478448 GN=tgt P E=3 SV=1
MSGSCFSFTVTATDGAARLGHLETAHGPVETPVFMPVGTAGTVKAMMPESVAATGARIILGNTYHLMLRPGAERVAALGGLHRFMDWPGPILTDSGGFQVMSLAGLRTLTEDGVTFQSHIDGSRHLLTPERSMEIQDQLDATITMAFDECPPFPAEKQAVADSMRRSMRWARRSREAFRQRPGYALFGINQGGIHPDLRAESAEALTALGFEGYAVGGLAVGEPFEAMLETLEATVPLLPFDRPRYLMGVGRPEDIVAAVARGIDMFDCVMPTRSGRTAKAFTRTGDLNLRNARHRDDPGPLDPACSCPACRRFSRAYLHHLVRAEEILGPMLLTWHNLQYYQDLMADLRQAIGQGSLETFLATFHATRAQGNGPAPA

SEQ ID NO: 58787 - protein, 375 aa, Pararhodospirillum photometricum
  misc_feature (1)..(375): tr|H6SN68|H6SN68_PARPM Queuine tRNA-ribosyltransferase OS=Pararhodospirillum photometricum DSM 122 OX=1150469 GN=tgt PE=3 SV=1
MRMFSFTVAATDGAARLGRLETAHGPVETPVFMPVGTAGTVKAMTPEAVASTGARIVLGNTYHLMLRPTAERVARLGGLHRFMGWDGPILTDSGGYQVMSLAKLRTLTEEGVTFQSHIDGSRHLLTPERSMEIQDLLDATITMAFDECPPFPAEKADVAQSMRRSMRWAERSRRAFRERPGYALFGINQGGIHPDLREESAAALKEIGFEGYAVGGLAVGEPFEAMLAALDGTVPHLPADRPRYLMGVGRPEDIVAAVARGIDMFDCVMPTRSGRTGKAFTRRGDLNMRNARHRDDPRPLDEACGCPACRRFSRAYLHHLIHAEEILGAMLLTWHNIQVYQDLMADLRTAIGAGRLSACLDDFHATRALGDLEPV

SEQ ID NO: 58788 - protein, 382 aa, Parasaccharibacter apium
  misc_feature (1)..(382): tr|A0A2C6J2Z6|A0A2C6J2Z6_9PROT Queuine tRNA-ribosyltran sferase OS=Parasaccharibacter apium OX=1510841 GN=tgt P E=3 SV=1
MHWQKEAQSGQARAGWLHTRHGSVPTPTFMPVGTVGTVKGITMDNVRATGAGIVLGNTYHLMLRPTAERVQRLGGLHRMMDWPGPILTDSGGFQVMSLGPLRKMDEDGVTFRSHIDGSAHRLTPESSTDIQYKLDATITMAFDECPALPATKEVLAASMQRSMRWAARSREAFIARPGYGQFGIVQGGTEPDLRADSARALRDIGFEGYAIGGLAVGEGQELMFSTLDYTTPLLPEDQPRYLMGVGTPDDLLGAVMRGCDMFDCVMPSRAGRTARAYTERGTLNLRNARFAEDTRPISPDDDSPMAGRYSRAYLHHLFRANEMLGPMLLTLHNLAYYQRLMRQIRAAIIAGTLEQTAAELRQNWAKGDWSEEEYPMPRYHQD

SEQ ID NO: 58789 - protein, 382 aa, Parasaccharibacter apium
  misc_feature (1)..(382): tr|A0A2S4PGE8|A0A2S4PGE8_9PROT Queuine tRNA-ribosyltran sferase OS=Parasaccharibacter apium OX=1510841 GN=tgt P E=3 SV=1
MHWQKDAQCGRARAGWLHTRHGSVPTPTFMPVGTVGTVKGITMDNVRATGAGIVLGNTYHLMLRPTAERVQRLGGLHRMMDWPGPILTDSGGFQVMSLGPLRKMDEDGVTFRSHIDGSSHRLTPESSTDIQYKLDATITMAFDECPALPATKDVLEASMERSMRWAARSREAFIARPGYGQFGIVQGGTEQDLRERSALALREIGFEGYAIGGLAVGEGQELMFSTLDYTTPMLPEDQPRYLMGVGTPDDLLGAVMRGCDMFDCVMPSRAGRTARAYTERGTLNLRNARFAEDTRPISPEDDSPMAGRYSRAYLHHLFRANEMLGPMLLTLHNLAYYQRLMRQIRAAIVAGTLEQTATQLRQNWARGDWSEDEWPMPRYQQG

SEQ ID NO: 58790 - protein, 440 aa, Parascardovia denticolens
  misc_feature (1)..(440): tr|A0A380ZR96|A0A380ZR96_PARDN Queuine tRNA-ribosyltran sferase OS=Parascardovia denticolens OX=78258 GN=tgt PE =3 SV=1
MNDSASSGTEQKTIIPQAQPKLPAPLGAAPGTPGDRSAFGFELKARIPGKHGRTGIIHTPHGTIATPAFVPVATQATMKAVLPEQMDSLGAQCLLANAFHLFERPGEDIIDAAGGLNEFMHWNKPTFTDSGGFQVLSLGAGFKKTLAMDVEGKKSDDVIASGKNRLAFVDDKGVTFKSPLNGASKRFSAEISMQIQHKIGADIMFAFDELTTLMNTRHYQERSVERTFRWAQRCLTEHQRLTAQRLGKPYQALYGVVQGANYEDLRRLAASQVASLDFDGFGIGGAIEKRIIGQICSWICDELPENKPRHVLGIAAVDDIFACVENGGDTFDCVAPARTARNGAVYTHDGRWNVKRSSMRTDFRPIEENCDCYTCRNYSRAYICHLLHAREMTGATLTTIHNERFFVRLLDEIRDSIDGGYFADFKEETLARFYKDGSKG

SEQ ID NO: 58791 - protein, 427 aa, Parascardovia denticolens
  misc_feature (1)..(427): tr|I8J8V4|I8J8V4_PARDN Queuine tRNA-ribosyltransferase OS=Parascardovia denticolens IPLA 20019 OX=1193128 GN=t gt PE=3 SV=1
MSNTATGHTLHPKGAVKGKPGDRSAFGFETGTRLEGKHGRTGVIHTPHGDIHTPAFVPVATQAAMKGVLPESMTDLGAQCTLANAFHLFERPGEDVLDAAGGLGEFMNWDKPTFTDSGGFQVMSLGAGFKKTLAMDLETAKSDKAVASGKERLAFVDEDGVTFKSPLNGEKKRFSAEISMGIQHKLGADIMFAFDELTTLMNTKRYQERSVERTFRWAKRCLAEHQRLTAERLGKPYQALFGVVQGANYEDLRHKAAAGIGSLDFDGFGIGGAMEKRIIGEICSWACDELPENKPRHILGIAAVDDIFACVENGGDTFDCVSPARTARNGAVFTHDGRWNVKRSAMKTDFRPIEEGCDCYTCQHYSRAYICHLLRSGEMVGATLATIHNERFFVRLLDEIRESMDGGYFHDFRDQTLARFYANGSRG

SEQ ID NO: 58792 - protein, 374 aa, Parashewanella curva
  misc_feature (1)..(374): tr|A0A3L8PWQ4|A0A3L8PWQ4_9GAMM Queuine tRNA-ribosyltran sferase OS=Parashewanella curva OX=2338552 GN=tgt PE=3 SV=1
MKFELDKTVGRARRGRLKFERGTVETPAFMPVGTYGTVKGMTPEEVRATGADILLGNTFHLWLRPGEEIMRKHGDLHDFMNWQRPILTDSGGFQVFSLGDIRKITEEGVHFRSPIDGSKIFMDAEKSMQIQYSLGSDVVMIFDECTPYPATHDEARKSMQMSLRWAQRSRDEFDRLENPNNLFGIIQGSVYEDLRDESLKGLVDIGFDGYAIGGLAVGEPKPDMHRILEHVCPQIPEDKPRYLMGVGKPEDLVEGVRRGVDMFDCVMPTRNARNGHLFTSTGVIKIRNAKHREDTSPLDEKCDCYTCKNYSRAYLYHLDKCGEILGARLNTIHNLRYYQMLMEGLRDAIDAGTLDDFVHEFYTAQGKEVPELKD

SEQ ID NO: 58793 - protein, 374 aa, Parashewanella spongiae
  misc_feature (1)..(374): tr|A0A3A6UAV1|A0A3A6UAV1_9GAMM Queuine tRNA-ribosyltran sferase OS=Parashewanella spongiae OX=342950 GN=tgt PE= 3 SV=1
MKFELDKTQGRARRGRLVFDRGTVETPAFMPVGTYGTVKGMTPEEVRATGADILLGNTFHLWLRPGEEIMRKHGDLHDFMNWQRPILTDSGGFQVFSLGAMRKITEEGVMFRSPINGEKIFMDAEKSMQIQDSLGSDVVMIFDECTPYPATHDEARKSMQMSLRWAQRSRDEFDRLENPNSLFGIIQGGVYEDLRDESLEGLTNIGFDGYAIGGLAVGEPKPDMHRILEHVCPKIPEEKPRYLMGVGKPEDLVEGVRRGVDMFDCVMPTRNARNGHLFTSTGVIKIRNAKHRDDTATLDEKCDCYTCKNYSRSYLYHLDKCGEILGARLNTIHNLRYYQMLMEGLRGAIDAGTLDDFIHEFYSSQGREVPELND

SEQ ID NO: 58794 - protein, 379 aa, Parasphingopyxis lamellibrachiae
  misc_feature (1)..(379): tr|A0A3D9FE98|A0A3D9FE98_9SPHN Queuine tRNA-ribosyltran sferase OS=Parasphingopyxis lamellibrachiae OX=680125 G N=tgt PE=3 SV=1
MSDRFSFSIAATDGAARTGTIAMQRGEIRTPAFMPVGTAATVKAMKPADVRATGADIILGNTYHLMLRPGAERVAKLGGLHDFMGWDRPILTDSGGFQVMSLSELAKMSEEGVSFKSHLDGSKHMLTPERSMEIQRLLGSDIVMAFDECTPFPATRDQAAASMDRSMRWAKRSREGFDAGGEHASRAALFGIQQGSMDETLRQRSSDALREIGFDGYAVGGLAVGEGQEEMFRVLDFAVPMLPDEAPHYLMGVGKPDDLVGAVARGIDMFDCVLPTRSGRTGQAFTADGPINIKNARFGEDTGPLDPECGCPVCGQWSRAYLHHLIRSGEILGAMLMTEHNLFFYQSLMAGMRDAIATGTFAAFAADFSTRYRKPRTEG

SEQ ID NO: 58795 - protein, 377 aa, Parasporobacterium paucivorans
  misc_feature (1)..(377): tr|A0A1M6C477|A0A1M6C477_9FIRM Queuine tRNA-ribosyltran sferase OS=Parasporobacterium paucivorans DSM 15970 OX= 1122934 GN=tgt PE=3 SV=1
MYKLIHKDGQAKRGELHTVHGVIQTPVFMNVATVAAIKGAVSTEDLLGLNTQVALSNTYHLHVRPGDEVIRKLGGLHKFMVWDRPILTDSGGFQVFSLAKLRKIREEGVEFQSHIDGHKIFMGPEESMRIQSNLGSTIAMAFDECPSSTAERAYVQDSVDRTTRWLERCRTEMKRLNGLEDTLNPKQMLFGITQGAIYEDIRMEHAKRIAEMDLDGYAIGGLAVGETHDEMYRIIEATVPYLPQDKPTYLMGVGTPANILEAVERGVDFFDCVYPSRNGRHGHVYTNKGKMNMFNAKYELDSDPIEEGCGCPTCRRYSRAYIRHLLKAKEMLGMRLCVLHNLYFYNTMMEEVRKAIEEDRFQEYKKMRLEGFEQSSR

SEQ ID NO: 58796 - protein, 377 aa, Parasutterella excrementihominis
  misc_feature (1)..(377): tr|F3QH24|F3QH24_9BURK Queuine tRNA-ribosyltransferase OS=Parasutterella excrementihominis YIT 11859 OX=762966 GN=tgt PE=3 SV=1
MSLTFKLHKTEGFARRAEIHLNHGVVQTPVFMPVGTYGTVKAMSPLELNEIGTQILLGNTFHLWLRPGLEVIAEHGGLHGFMGWEKPILTDSGGFQVFSLGKLRKITEEGVRFASPINGERLFLTPEVSMEIQKVLNSDIAMIFDECTPYEIDGRPATEKEAADSMRLSLRWARRSRDEFDRLQNPNALFGIVQGGMFEHLRDESLEGLKAIGFDGYAIGGLSVGEPKEEMMKILDHLKTRMPEDKPRYLMGVGTPEDLVEGVKRGIDMFDCVMPTRNARNGWLFTRYGDIKLRNAKHKHDLRPLDESCDCYCCRNFSRAYLHHLQKVNEILGARLNTIHNLHYYLNLMKEIREALDQGNFEAWCKKFAEDRARGTD

SEQ ID NO: 58797 - protein, 382 aa, Parcubacteria bacterium
  misc_feature (1)..(382): tr|A0A0S7WXH3|A0A0S7WXH3_9BACT Queuine tRNA-ribosyltran sferase OS=Parcubacteria bacterium DG_72 OX=1703764 GN= tgt PE=3 SV=1
MIMEFKVEKKSKKSRARLGFLKTSHGVLQTPCLVPVATQAVVKTLSSEETEQTKSQILICNTFHLHLKPKESIIKSSGGLHKFMNWKRPLMTDSGGFQIFSLGFGKDSGVGKILKYFPEQEFKKVKARQQPKQIKITQKGVYFKSPLDGSKLFLGPKESIKIQEKLGADIIFAFDECTSPLASKKYIEASLKRTHKWAEICLVSHQTKQALFGIVQGSRFKQLREKSSKFINSLDFDGFAIGGDLGKSKKTMKNILNWVIPNLQDSRPRHLLGIGYLEDIENIIKAGIDTFDCTVATHYARRGIAFTAKAKLNLNQSKFLKGKKSLDSKCSCFVCQNYKRNYISHLIRAKEITGMKLLTFHNLYFFNTFVENIRKKIKNNKI

SEQ ID NO: 58798 - protein, 402 aa, Parcubacteria bacterium
  misc_feature (1)..(402): tr|A0A0L0LCB3|A0A0L0LCB3_9BACT Queuine tRNA-ribosyltran sferase OS=Parcubacteria bacterium C7867-006 OX=1659200 GN=tgt PE=3 SV=1
MSPLKFEIHKELENGLGRVGTIHTSHGDIQTPAFVAVGTKGTVKSLTPEQVRDSGVQTIIANTYHLYLEPGDENIKKMGGLHKAMNWQGPLMTDSGGFQVFSLGAAYGKNGVSKISHGKTEELILPEFNDAEVPKIAKIDPNGVMFRDHSKGDAHYFTPEKSIDIQHNLGADIIFAFDECTSPHESLHYQKEALERTHRWAKRSLEYHKSKPNAETQALFGIVQGGRDETLRKESAEFIGALDFDGFGIGGSFDKEDMDKAVQWCNEILPKEKPRHLLGIGEPEDLFMAVENGCDLFDCVAPTRIARNGGVYTKEGKINILNQKFREDQSPLDSECGCYACKNFSRSYIAHLFHAKEMLGSTLLSIHNIYFIAHMVDGMREAILNNNFDKYKKDFLSRYYNF

SEQ ID NO: 58799 - protein, 398 aa, Parcubacteria group
  misc_feature (1)..(398): tr|A0A0F9YF85|A0A0F9YF85_9BACT Queuine tRNA-ribosyltran sferase OS=Parcubacteria group bacterium GW2011_GWA2_31 _28 OX=1618806 GN=tgt PE=3 SV=1
MNSINFKIIKKLKNTLGRASILSTSHGDILTPAFVIVGTKGTIKSLSPEQVANLGAQVILANTYHLYLQPGYKIVKKAGGLHKFMNWKGPIMTDSGGFQVFSLGEAMGASVSKIACGEFSGTKFPKIQKQKKMAEIDENGVKFTSLIDGSSHYFTPEKSIEIQHNIGADIIFAFDECTSSQASYEYQVKAMERTHRWAKQCIDYHKKFKNSKTQSLFGIVQGGKFSDLRKKSAKIIASMSFEGFGIGGSFIKEDIDASVGLVNKILPEDKPRHLLGIGEPVDLFGGVEKGVDLFDCIAPTRIARNGTLYTKTGKINIFNAKFKQDFKPIEKDCKCYTCQNYTKAYIAHLFRAKEMFAATLASIHNLYFIIKLVSKIRESILNDDFYKFKKDFLKIYNK

SEQ ID NO: 58800 - protein, 405 aa, Parcubacteria group
  misc_feature (1)..(405): tr|A0A0G1VMX8|A0A0G1VMX8_9BACT Queuine tRNA-ribosyltran sferase OS=Parcubacteria group bacterium GW2011_GWA2_49 _16 OX=1618851 GN=tgt PE=3 SV=1
MKSTNFSVTKELSGKLGRMGVLETPHGMINTPAFVTVGTKATVKSLTPEQVASLGAQVVLANTYHLYLEPGEKILHDAGGLHKFMQWHGPTMTDSGGFQIFSLGAAFGKKTGKLADTEQLITGDEIEEGDTAGNLAKIDEDGVTFKSYKNGSKHRFTPERSIEIQHHIGADIIFAFDECTSPAAPYEYQKEAMDRTHRWARRSLEAHKRFSGKQNLHAQALFGIIQGGRHRDLREESAQVLAEMDFDGYGIGGSFDKKDMHTAVGWVNAILPKDKPRHLLGIGEPLDLFSAVENGCDLFDCVAPTRMGRNGSLYTTDGRINIFNTRFMNDFAPIDAGCDCYTCKSFTRAYIAHLFRSQEMLAATLASIHNLRFIISLVEKMRAAILDDSFESLKTSFTARYYKRI

SEQ ID NO: 58801 - protein, 378 aa, Parendozoicomonas haliclonae
  misc_feature (1)..(378): tr|A0A1X7AEC1|A0A1X7AEC1_9GAMM Queuine tRNA-ribosyltran sferase OS=Parendozoicomonas haliclonae OX=1960125 GN=t gt PE=3 SV=1
MRPECFMSFEKLGEDGLARRGRVTFPRGTIETPCFMPVGTYGTVKGMLPRDIHEIGAEIILGNTFHLMLRPGTEVIKEHGTLHDFNGWNKPILTDSGGFQVFSLGAMRKITEEGVAFRSPVDGSKVFMTPESSMQVQRDLGSDIVMIFDECTPGDADHERARTSMEMSLRWADRSRKAHGDSQSSLFGIIQGGMFEDLRARSLDGLLEIGFDGYAIGGLSVGESKEDMYRILDHTPRRIPAEYPRYLMGVGTPEDIVEAVRRGVDMFDCVMPTRNARNGHLFTAQGVVKIRNAKHRHAEEPLEAGCDCYTCRNFTRAYLHHLDKCNEMLGSMLNTIHNLRYYQRLMAGLRQAIEQGKLDAFVTEFYAERGMVAKPLAG

SEQ ID NO: 58802 - protein, 396 aa, Parolsenella catena
  misc_feature (1)..(396): tr|A0A3G9JZ10|A0A3G9JZ10_9ACTN Queuine tRNA-ribosyltran sferase OS=Parolsenella catena OX=2003188 GN=tgt PE=3 S V=1
MTLSDDSLRAAWPQPGELPDNLFHFDITAQDPKTHARCGVFHTAHGDVPTPIFMPVGTKATVKGLMPSQVADLGAKIILNNTYHLAMRPGADLVAEMGGVHKFMRWNGPILTDSGGFQVFSHNEFMKLTNEGVSFRAIEYDGARIRWTPEDNMAIAEKLGSDICMQLDQCPGYPATKAYVARAVELSSMWGERCWNAHTRPDQALFGIVQGGMHMDLRLRSLAHLEECGDFPGYGIGGYSVGEDHETMYETLEPLVAEHMPKNKPRYLMGVGNPTTLVRAVASGVDMFDCVLPTRTARMGTAFSSEGRLNLKNARFKHDQRVLDEHCDCPACAGGFTRAYIHHLVRQGEMLGGILLSQHNIRYLLALMERVRAAIAQGRYEQFYRDWMDSPAANDF

SEQ ID NO: 58803 - protein, 381 aa, Parvibacter caecicola
  misc_feature (1)..(381): tr|A0A3N0AAB9|A0A3N0AAB9_9ACTN Queuine tRNA-ribosyltran sferase OS=Parvibacter caecicola OX=747645 GN=tgt PE=3 SV=1
MALFDCTVNATSGNARALTYETAHGPFQTPMFMPVGTSATVKGITVRQLEELGAQVVLANTYHLSQRPGPEIVAEAGGVHGFSGYQGPMLTDSGGFQIFSLEDTRKLDDDGVTFRSVYDGTYVRWTPEENMRIQQLLGADIAMQLDQCPPYPATREFVQRAVDLSSAWAKRCLAAHTRPDQTLFGIVQGGMHLDLRLESVRRLLAIEQESLAGGGRRFGGFGIGGYSVGEDHETMFETLGDVARALPEERPRYLMGVGNPTTLVRAVGEGVDMFDCVLPTRTARMGTAFSSTGRMNMRNAKYARDLGPLDAACNCPTCQNHSRAYLRHLVKQGEMLGAILLSVHNLHFLIDLMARAREAVLAGEYPQFQRAWMKSPAAKDY

SEQ ID NO: 58804 - protein, 379 aa, Parvibaculum lavamentivorans
  misc_feature (1)..(379): tr|A7HXM8|A7HXM8_PARL1 Queuine tRNA-ribosyltransferase OS=Parvibaculum lavamentivorans (strain DS-1 / DSM 1302 3 / NCIMB 13966) OX=402881 GN=tgt PE=3 SV=1
MSQFKFTLAATDGRARTGAIDTPRGTIRTPAFMPVGTAATVKALYPEQVRATGADIVLGNTYHLMLRPGAEEIAALGGLHSFMNWPHPILTDSGGFQVMSLSKLRKMTEEGVTFQSHLDGSRHLLSPERSIEIQCLLGSDIQMQLDECTPFPATEAEAKKSMELSLRWAARSKSAFEAQPHRTEGMALFGIVQGSTYEPLRKASAAGLQEIGFDGYSVGGLAVGEGQAEMLRVLDFTTPALPENKPRYLMGVGTPDDLVESVARGIDMFDCVMPTRNGRHGLAFTSRGKVNLKNARHAADKRPLDETSTCPAARDYSRAYLHHLIKSGEMLGSMLVSWINVHYYQSLMAGMRAAIAEQRFAAFVADFKAAQAGGDIEPL

SEQ ID NO: 58805 - protein, 373 aa, Parvibaculum sp.
  misc_feature (1)..(373): tr|A0A2D4VJK6|A0A2D4VJK6_9RHIZ Queuine tRNA-ribosyltran sferase OS=Parvibaculum sp. OX=2024848 GN=tgt PE=3 SV=1
MSAFSFDLQGTDGKARTGVIHTPRGNIRTPAFMPVGTAGTVKAMYPEQVRETGADIILGNTYHLMLRPGAEEVAALGGLHTFANWPHPILTDSGGFQVMSLARLRKMTEEGVTFQSHIDGSRHMLSPERSIEIQCLLGSDIQMVLDECTPFPATEAEAEKSMELSLRWAARSKEAFAAQPLRKEGMALFGIVQGSTYEPLRRRSAEGLVDIGFDGYAVGGLAVGEGQEAMLRVLDYAPDMLPQDKPRYLMGVGTPDDLVEAVRRGIDMFDCVMPTRNGRHGLAFTRFGKINLKNARHATDTSPLDPESSCPAARDYSRAYLHHLVKSGEMLGSMLVSWNNIHYYQSLMAGMRAAISEGRFEAFVADFKAAQGA

SEQ ID NO: 58806 - protein, 379 aa, Parvibaculum sp.
  misc_feature (1)..(379): tr|A0A2E1EF75|A0A2E1EF75_9RHIZ Queuine tRNA-ribosyltran sferase OS=Parvibaculum sp. OX=2024848 GN=tgt PE=3 SV=1
MSAFSFSLHATDGRARTGVISTPRGEIRTPAFMPVGTAATVKAMYPEQVREAGADIVLGNTYHLMLRPGAEQVAALGGLHTFMNWPHPILTDSGGFQVMSLSKLRKMTEEGVTFQSHIDGSRHMLSPERSIEIQCLLDSDIQMQLDECTPFPATEEEARVSMEMSLRWAQRSKDAFVGQPHRKEGMALFGIVQGSTYEPLRKLSAAGLRDIGFDGYAVGGLAVGEGQAEMLRVLDFTTPALPEDRPRYLMGVGTPDDLVESVALGIDMFDCVMPTRNGRHGLAFTRRGKVNLKNARHAADPRPLDEESSCPAARDYSRAYLHHLVKSEEMLGSMLVSWINIHYYQQLMAGMRAAIAEGRFEAFRRDFKAAQAAGDIDPL

SEQ ID NO: 58807 - protein, 378 aa, Parvibium lacunae
  misc_feature (1)..(378): tr|A0A368L1N7|A0A368L1N7_9BURK Queuine tRNA-ribosyltran sferase OS=Parvibium lacunae OX=1888893 GN=tgt PE=3 SV= 1
MTNPTFQLLATDGAARRGRLTLQHGTVETPIFMPVGTYGSVKGMRPADLDDIQTQIILGNTFHLWLRPGLQTIEAFGGLHRFIGWDKPILTDSGGFQVFSLGALRKITEEGVRFQSPINGDRLFLTAEESMRIQTVLNADVVMIFDECTPYKVGDQIATYQQAADSMRLSLRWAKRSRQAFAALENPNALFGIVQGGMYEPLREESLAGLLDIGFHGYAIGGLSVGEPKEDMVRILEHTTPRLPAQQARYLMGVGTPEDLVFAVSRGIDMFDCVMPTRNARNGWLFTRFGDIKIRNAKYKSDTRPLDDTCTCYTCQHFSRGYLHHLQKCNELLGAQLNTIHNLHYYLTLMATMRSAIETGTFRAFLAQFQAERQRGTD

SEQ ID NO: 58808 - protein, 372 aa, Parvimonas micra
  misc_feature (1)..(372): tr|A8SLR7|A8SLR7_9FIRM Queuine tRNA-ribosyltransferase OS=Parvimonas micra ATCC 33270 OX=411465 GN=tgt PE=3 SV =1
MELKYELIKKSSDCNARLGKIYTNRGVIETPIFMPVGTRATVKAMNVDELKEIGSQIILGNTYHLYLKPGQEIIRMAGGLHKFMNWDKPILTDSGGFQVFSLGDIRKITEEGVEFRSHIDGSKHFISPEKSMEIQNDLGSDIMMAFDECAPYPASYDYVKNSMERTLRWLKRCKDYHKNTDNQALFGIIQGGMFKDLRRESALATIDMDLPGYAIGGLSVGEPKEIMVEYLNYTTQFMPENKPRYLMGVGTPDYLFEAVEAGIDMADCVLPTRIARNGTAMTSKGKLVIKNAKYAKDFAPLDDECDCYACRNHTRAYIRHLINVDEILGARLLSIHNLRFLLKTMENIRQAIREDRFLEYKKEFYKKYGYED

SEQ ID NO: 58809 - protein, 372 aa, Parvimonas micra
  misc_feature (1)..(372): tr|A0A3B7DI18|A0A3B7DI18_9FIRM Queuine tRNA-ribosyltran sferase OS=Parvimonas micra OX=33033 GN=tgt PE=3 SV=1
MELKYELIKKSSDCNARLGKIYTNRGVIETPIFMPVGTRATVKAMNVDELKEIGSQIILGNTYHLYLKPGQEIIRMAGGLHKFMNWDKPILTDSGGFQVFSLGDIRKITEEGVEFRSHIDGSKHFISPEKSMEIQNDLGSDIMMAFDECAPYPASYDYVKNSMERTLRWLKRCKDYHKNTDNQALFGIIQGGMFKDLRRESALATIDMDLPGYAIGGLSVGEPKEIMVEYLNYTTQFMPENKPRYLMGVGTPDYLFEAVEAGIDMADCVLPTRIARNGTAMTSKGKLVIKNAKYAKDFAPLDDECDCYACRNHTRAYIRHLVNVDEILGARLLSIHNLRFLLKTMENIRQAIREDRFLEYKKEFYKKYGYED

SEQ ID NO: 58810 - protein, 372 aa, Parvimonas sp.
  misc_feature (1)..(372): tr|F5TC22|F5TC22_9FIRM Queuine tRNA-ribosyltransferase OS=Parvimonas sp. oral taxon 110 str. F0139 OX=767100 G N=tgt PE=3 SV=1
MELKYELIKKSSDCNARLGKIYTNRGVIETPIFMPVGTRATVKAMNVDELKEIGSQIILGNTYHLYLKPGQEIIRMAGGLHKFMNWDKPILTDSGGFQVFSLGDIRKITEEGVEFRSHIDGSKHFISPEKSMEIQNDLGSDIMMAFDECAPYPASYDYVKNSMERTLRWLKRCKDYHKNTDNQALFGIIQGGMFKDLRRESALATIDMDLPGYAIGGLSVGEPKEIMVEYLNYTTQFMPENKPRYLMGVGTPDYLFEAVEAGIDMADCVLPTRIARNGTAMTSKGKLVIKNAKYAKDFAPLDDECDCYACRNYTRAYIRHLINVDEILGARLLSIHNLRFLLKTMENIRQAIREDRFLEYKKEFYKKYGYED

SEQ ID NO: 58811 - protein, 372 aa, Parvimonas sp.
  misc_feature (1)..(372): tr|F9PQP5|F9PQP5_9FIRM Queuine tRNA-ribosyltransferase OS=Parvimonas sp. oral taxon 393 str. F0440 OX=944565 G N=tgt PE=3 SV=1
MELKYELIKKSSDCNARLGKIYTSRGVIETPIFMPVGTRATVKAMNVDELKEIGSQIILGNTYHLYLKPGQEIIRMAGGLHKFMNWDKPILTDSGGFQVFSLGDIRKITEEGVEFRSHIDGSKHFISPEKSMEIQNDLGSDIMMAFDECAPYPASYDYVKNSMERTLRWLKRCKDYHKNTDNQALFGIIQGGMFKDLRRESALATIDMDLPGYAIGGLSVGEPKEIMVEYLNYTTQFMPENKPRYLMGVGTPDYLFEAVEAGIDMADCVLPTRIARNGTAMTSKGKLVIKNAKYAKDFAPLDDECDCYACRNHTRAYIRHLINVDEILGARLLSIHNLRFLLKTMENIRQAIREDRFLEYKKEFYKKYGYED

SEQ ID NO: 58812 - protein, 373 aa, Parvularcula bermudensis
  misc_feature (1)..(373): tr|E0THV2|E0THV2_PARBH Queuine tRNA-ribosyltransferase OS=Parvularcula bermudensis (strain ATCC BAA-594 / HTCC 2503 / KCTC 12087) OX=314260 GN=tgt PE=3 SV=1
MTTFGYTLHATSGAARRGTVTTPRGLIQTPAFMPVGTAATVKAMQVRDVAATGAEIILGNTYHLMLRPSAERIARLGGLHRFMGWEGPILTDSGGFQVMSLAKLRRLTEKAVTFQSHIDGSRHELSPERSIEIQNLLGSDIQMQLDECPPFPIAEDASLESLELSLRWAKRSKAAFDHLADDGRALFGIVQGSVYPDQRKRSAEGLMEIGFPGYSVGGLAVGEGQGAMFETLEVTTPLLPRDKPRYLMGVGKPDDLVGAVARGIDMFDCVLPTRSGRHGQAFTWDGPINIKNATYQDDPTPLDPESDCPASRDYAKAYLNHLFRAGEYLAATLLSWHNLAFYQALMQRMRTAIEDDRFEAFAADFLNRYRSSS

SEQ ID NO: 58813 - protein, 375 aa, Parvularcula sp.
  misc_feature (1)..(375): tr|A0A2E1XK72|A0A2E1XK72_9PROT Queuine tRNA-ribosyltran sferase OS=Parvularcula sp. OX=1979207 GN=tgt PE=3 SV=1
MTAEFSFSLKATDGPARTGLISTPRGEIRTPAFMPVGTAGTVKAMLADHVRQTGADIVLGNTYHLMLRPSAERVSALGGLHKFMNWPHPILTDSGGFQVMSLSKLRKLTEEGVSFQSHIDGSKHMLTPERSIEIQCLLGSDIQMQLDECPAIPIEHDKARESMLLSVRWAKRSKRAFEEKSKPGQALFGIVQGANYEDLRRESLDKLMEIGFPGYSIGGLAVGEGREEMFRVLEFTTPHMDKAKPRYLMGVGKPADIVGAVARGVDMFDCVAPTRSGRHGQAWTKAGAINIKNAAFADDPAPLDPESACPASRDYSKAYLHHLFRAGEYLGPMLLTWHNLHYYQELMGGMRSAIAEGRFAEFVARFRAESGETVV

SEQ ID NO: 58814 - protein, 358 aa, Parvularcula sp.
  misc_feature (1)..(358): tr|A0A355C2F4|A0A355C2F4_9PROT Queuine tRNA-ribosyltran sferase OS=Parvularcula sp. OX=1979207 GN=tgt PE=3 SV=1
MGVIHTPRGEIATPAFMPVGTAGAVKAMFPEDVAATGAHIILGNTYHLMLRPGAERVAALGGLHKFMNWPRPILTDSGGFQVMSLSSLRKLTEEGVSFQSHIDGSKHMLSPERSIEIQCLLGADIQMQLDECPAIPIAQDKAAESMRLSLRWAERSKRAFAEKSKPGQALFGIVQGANYEDLRRESLSRLMEIDFPGYSIGGLAVGEGREEMFRVLDFTTPVMDADKPRYLMGVGKPADIVGAVARGVDMFDCVLPTRAGRHGQAWTPDGPITLTNARFAGDETPLDPDSSCPASRDYSKAYLHHLFKAGEYLGPMLLSWHNLHYYQQLMDGLRAAIAERRLSDFVGEFRARTGETVL

SEQ ID NO: 58815 - protein, 383 aa, Pasteurella aerogenes
  misc_feature (1)..(383): tr|A0A448K1U3|A0A448K1U3_PASAE Queuine tRNA-ribosyltran sferase OS=Pasteurella aerogenes OX=749 GN=tgt PE=3 SV= 1
MKFKLHKTNGVARRGTMTFSRPQGEFTVETPAFMPVGTYGTVKGMTPEEVRATGAEILLGNTFHLWLRPGQEVMRKHGDLHDFMQWHRPILTDSGGFQVFSLGKLRKITEEGVKFQNPINGERIFLSPEKSMEIQYDLGSDIVMIFDECAPYPSTFDYTKKSMEMSLRWAQRSRQRFDELGNTNALFGIVQGGVFEELRQISLEGLVKIGFDGYAVGGLAVGEPKEDMHRILEYVCPQLPTDKPRYLMGVGKPEDLVEGVRRGIDMFDCVMPTRNARNGHLFVSDGIVKIRNAKYRDDTSPLDPECDCYTCKHYTKSYLYHLDKCGEILGARLNTIHNLRYYQRLMAQIRQAIEDDRFEQFVVDFYAKIGKPVPPLQSETTKS

SEQ ID NO: 58816 - protein, 379 aa, Pasteurella bettyae
  misc_feature (1)..(379): tr|I3DCE3|I3DCE3_9PAST Queuine tRNA-ribosyltransferase OS=Pasteurella bettyae CCUG 2042 OX=1095749 GN=tgt PE=3 SV=1
MKFKLKTTSGSARRGQLTFNRPKGEFTVQTPAFMPVGTYGTVKGMTPEEVRATGAEILLGNTFHLWLRPGQEVMRKHGDLHDFMQWHRPILTDSGGFQVFSLGKLRKITEEGVKFQNPINGERIFLSPEKSMEIQYDLGSDIVMIFDECTPYPATFDYAKKSMEMSLRWAKRSRVRFDQLENKNALFGIIQGGTFEELRKISIEGLVNIGFDGYAVGGLAVGEPKEEMHRILEFITPLIPTNKPRYLMGVGKPEDLVEGVRRGIDMFDCVMPTRNARNGHLFVTDGIVKIRNAKYKDDTSPLDPECDCYTCKNYTKSYLYHLDKCGEILGARLNTIHNLRYYQRLMEQIRKAIEEDRFDEFVVEFYARQGREVPPLQKS

SEQ ID NO: 58817 - protein, 387 aa, Pasteurella caecimuris
  misc_feature (1)..(387): tr|A0A4S2DZB3|A0A4S2DZB3_9PAST Queuine tRNA-ribosyltran sferase OS=Pasteurella caecimuris OX=1796644 GN=tgt PE= 3 SV=1
MKYELDKTSGNARRGRLVFERPQGTFKVETPAFMPVGTYGTVKGMTPEEVRATGAEILLGNTFHLWLRPGQEVMRKHGDLHDFMQWHRPILTDSGGFQVFSLGKLRKITEEGVKFQNPINGERIFLSPEKSMEIQYDLGSDIVMIFDECTPYPATFDYAKKSMEMSLRWAKRSRDRFDELGNKNALFGIIQGGVFEELRKISLEGLVNIGFDGYAVGGLAVGEPKEDMHRILEYICPQIPADKPRYLMGVGKPEDLVEGVRRGIDMFDCVMPTRNARNGHLFVTDGIVKIRNAKYRDDTTPLDPHCDCYTCKNYTKAYLYHLDKCGEILGARLNTIHNLRYYQRLMAEIRQAIEEDRFDDFVTEFYTRMGKPIPPLQLDTTPSPQSE

SEQ ID NO: 58818 - protein, 383 aa, Pasteurella canis
  misc_feature (1)..(383): tr|A0A379ESQ7|A0A379ESQ7_9PAST Queuine tRNA-ribosyltran sferase OS=Pasteurella canis OX=753 GN=tgt PE=3 SV=1
MKYELDKTSGNARRGRLVFERPQGTFTVETPAFMPVGTYGTVKGMTPEEVRATGAEILLGNTFHLWLRPGQDVMRKHGDLHDFMQWYRPILTDSGGFQVFSLGKLRKITEEGVKFQNPINGERIFLSPEKSMEIQYDLGSDIVMIFDECTPYPATFDYAKKSMEMSLRWAKRSRDRFDELGNKNALFGIIQGGVYEELRKVSVEGLIDIGFDGYAVGGLAVGEPKEDMHRILEYVCPQIPTNKPRYLMGVGKPEDLVEGVRRGIDMFDCVMPTRNARNGHLFVSNGIVKIRNAKYRDDTTPLDSECDCYTCKNYTKAYLYHLDKCNEILGARLNTIHNLRYYQRLMAQIREAIEQDRFDDFVHEFYAKIGKPVPPMQLDTENA

SEQ ID NO: 58819 - protein, 383 aa, Pasteurella dagmatis
  misc_feature (1)..(383): tr|C9PPT8|C9PPT8_9PAST Queuine tRNA-ribosyltransferase OS=Pasteurella dagmatis ATCC 43325 OX=667128 GN=tgt PE= 3 SV=1
MKYELDKTDGNARRGRLVFERPQGTFTVETPAFMPVGTYGTVKGMTPEEVRATGAEILLGNTFHLWLRPGQEVMRKHGDLHDFMQWHRPILTDSGGFQVFSLGKLRKITEEGVKFQNPINGERIFLSPEKSMEIQYDLGSDIVMIFDECTPYPATFDYAKKSMEMSLRWAKRSRDRFDELGNKNALFGIIQGGVYEELRKISVEALVNIGFDGYAVGGLAVGEPKEDMHRILEYVCPQIPADKPRYLMGVGKPEDLVEGVRRGIDMFDCVMPTRNARNGHLFVTHGIVKIRNAKYRDDTTPLDAECDCYTCKNYTKAYLYHLDKCNEILGARLNTIHNLRYYQRLMAEIRQAIEQDRFDDFVNEFYAKIGKLVPPLQLGTKND

SEQ ID NO: 58820 - protein, 386 aa, Pasteurella langaaensis
  misc_feature (1)..(386): tr|A0A2U0SNS2|A0A2U0SNS2_9PAST Queuine tRNA-ribosyltran sferase OS=Pasteurella langaaensis DSM 22999 OX=1122935 GN=tgt PE=3 SV=1
MKFKLKTTSGTARRGEMIFERPNKEGEITEFKVQTPAFMPVGTYGTVKGMTPEEVRATGAEILLGNTFHLWLRPGQEVMRKHGDLHDFMQWHRPILTDSGGFQVFSLGKLRKIKEEGVTFQNPINGERIFLSPEKSMEIQYDLGSDIVMIFDECTPYPATFDYAKNSMEMSLRWAKRSRDRFDELENPRALFGIVQGGTYEELRKISAEGLVNIGFDGYAVGGLAVGEPKEEMHRILEFTTPLLPADKPRYLMGVGKPEDLVEGVRRGIDMFDCVMPTRNARNGHLFVSNGIVKIRNAKYREDTTALDPECDCYTCKNYTKAYLYHLDKCGEILGARLNTIHNLRYYQRLMDQIRTAIEEDRFDDFVQEFYAKIGKDVPPLQQNLK

SEQ ID NO: 58821 - protein, 387 aa, [Pasteurella] mairii
  misc_feature (1)..(387): tr|A0A379B5W7|A0A379B5W7_9PAST Queuine tRNA-ribosyltran sferase OS=[Pasteurella] mairii OX=757 GN=tgt PE=3 SV=1
MKFKLHKTNGVARRGTMTFSRPQGEFTVETPAFMPVGTYGTVKGMTPEEVRATGAEILLGNTFHLWLRPGQEVMRKHGDLHDFMQWHRPILTDSGGFQVFSLGKLRKITEEGVKFQNPINGEHIFLSPEKSMEIQYDLGSDIVMIFDECAPYPSTFDYTKKSMEMSLRWAQRSRQRFDELGNKNALFGIVQGGVFEELRQVSLEGLVNIGFDGYAVGGLAVGEPKEDMHRILEYVCPQLPTDKPRYLMGVGKPEDLVEGVRRGIDMFDCVMPTRNARNGHLFVSDGIVKIRNAKYRDDTSPLDPECDCYTCKHYTKSYLYHLDKCGEILGARLNTIHNLRYYQRLMAQIRQAIEEDRFEQFVVDFYAKIGKPVPPLQSETTKAEFQE

SEQ ID NO: 58822 - protein, 385 aa, Pasteurella multocida
  misc_feature (1)..(385): sp|P57831|TGT_PASMU Queuine tRNA-ribosyltransferase OS= Pasteurella multocida (strain Pm70) OX=272843 GN=tgt PE =3 SV=1
MKYELDKTDGNARRGRLVFERPQGTFTVETPAFMPVGTYGTVKGMTPEEVRATGAEILLGNTFHLWLRPGQEVMRKHGDLHDFMQWHRPILTDSGGFQVFSLGKLRKITEEGVKFQNPINGERIFLSPEKSMEIQYDLGSDIVMIFDECTPYPATFDYAKKSMEMSLRWAKRSRDRFDELGNKNALFGIIQGGVYEELRKVSVEGLVNIGFDGYAVGGLAVGEPKEDMHRILEYVCPQIPADKPRYLMGVGKPEDLVEGVRRGIDMFDCVMPTRNARNGHLFVSDGIVKIRNAKYREDTSPLDPECDCYTCKHYTKAYLYHLDKCGEILGARLNTIHNLRYYQRLMAQIRQAIEEDRFEAFVQEFYAKMGKPVPPMQSEIKSDEG

SEQ ID NO: 58823 - protein, 385 aa, Pasteurella multocida
  misc_feature (1)..(385): tr|J4SPG0|J4SPG0_PASMD Queuine tRNA-ribosyltransferase OS=Pasteurella multocida subsp. multocida str. Anand1_b uffalo OX=1032868 GN=tgt PE=3 SV=1
MKYELDKTDGNARRGRLVFERPQGTFTVETPAFMPVGTYGTVKGMTPEEVRATGADILLGNTFHLWLRPGQEVMRKHGDLHDFMQWHRPILTDSGGFQVFSLGKLRKITEEGVKFQNPINGERIFLSPEKSMEIQYDLGSDIVMIFDECTPYPATFDYAKKSMEMSLRWAKRSRDRFDELGNKNALFGIIQGGVYEELRKVSVEGLVNIGFDGYAVGGLAVGEPKEDMHRILEYVCPQIPADKPRYLMGVGKPEDLVEGVRRGIDMFDCVMPTRNARNGHLFVSDGIVKIRNAKYREDTSPLDPECDCYTCKHYTKAYLYHLDKCGEILGARLNTIHNLRYYQRLMAQIRQAIEEDRFEAFVQEFYAKMGKPVPPMQSEIKSDEG

SEQ ID NO: 58824 - protein, 382 aa, Pasteurella skyensis
  misc_feature (1)..(382): tr|A0A1H7Y5B4|A0A1H7Y5B4_9PAST Queuine tRNA-ribosyltran sferase OS=Pasteurella skyensis OX=97481 GN=tgt PE=3 SV =1
MKYQLKKTSGNARRGCMTFSRPKGEFHVETPAFMPVGTYGTVKGMTPEEVKATGAQILLGNTFHLWLRPGQDVMRKHGDLHDFMQWHAPILTDSGGFQVFSLAKMRKITEEGVSFRHPINGSKIFLSPEKSMEIQYDLGSDIVMIFDECAPYPSTFNYTKQSMEMSVRWAQRSRQRFDELGNKNALFGIVQGGVFEELRKVSIDELVKIGFDGYAVGGLAVGEPKEDMHRILEYVCPQLPKDKPRYLMGVGKPEDLVEGVRRGIDMFDCVMPTRNARNGHLFVTDGVVKIRNAKYREDTSTLDPHCDCYTCKNYTKAYLYHLDKCGEILGSRLNTIHNLRYYQRLMAEIRQSIDEDRFDDFVVEFYQRMGREVPPLQSECKA

SEQ ID NO: 58825 - protein, 379 aa, Pasteurella sp.
  misc_feature (1)..(379): tr|A0A4Y9H269|A0A4Y9H269_9PAST Queuine tRNA-ribosyltran sferase OS=Pasteurella sp. WM03 OX=2558280 GN=tgt PE=3 SV=1
MKYELDKTSGNARRGRLVFERPQGTFKVETPAFMPVGTYGTVKGMTPEEVRATGAEILLGNTFHLWLRPGQEVMRKHGDLHDFMQWHRPILTDSGGFQVFSLGKLRKITEEGVKFQNPINGERIFLSPEKSMEIQYDLGSDIVMIFDECTPYPATFDYAKKSMEMSLRWAKRSRDRFDELGNKNALFGIIQGGVFEELRKISLEGLVNIGFDGYAVGGLAVGEPKEDMHRILEYICPQIPTDKPRYLMGVGKPEDLVEGVRRGIDMFDCVMPTRNARNGHLFVTDGIVKIRNAKYRDDTTPLDPHCDCYTCKNYTKAYLYHLDKCGEILGARLNTIHNLRYYQRLMAEIRQAIEEDRFDDFVAEFYARIGKPVPPLQKG

SEQ ID NO: 58826 - protein, 386 aa, Pasteurella testudinis
  misc_feature (1)..(386): tr|A0A1W1VA39|A0A1W1VA39_9PAST Queuine tRNA-ribosyltran sferase OS=Pasteurella testudinis DSM 23072 OX=1122938 GN=tgt PE=3 SV=1
MKYELHKTDGRARRGKLTFQRPHGEFSVETPAFMPVGTYGTVKGMTPEEVKATGAQILLGNTFHLWLRPGQEVMKMHGDLHDFMQWYGPILTDSGGFQVFSLGDIRKIKEEGVHFRNPINGEKIFLSPEKSMEIQYDLGSDIVMIFDECTPYPADFDYAKKSMEMSLRWAKRSRDRFDELGNKNALFGIIQGSVFEELRKVSVEGLVDIGFDGYAVGGLAVGEPKEDMHRILEYVCPQIPQDKPRYLMGVGKPEDLVEGVRRGIDMFDCVMPTRNARNGHLFTADGVVKIRNAKYRDDTSPLEAECDCYTCKNYTKAYLYHLDKCGEILGARLNTIHNLRYYQRLMAQLREAIEKGELEQFVEQFYARIGKPVPPLNEYHAFDEGK

SEQ ID NO: 58827 - protein, 386 aa, Pasteurellaceae bacterium
  misc_feature (1)..(386): tr|A0A5C4PXA5|A0A5C4PXA5_9PAST Queuine tRNA-ribosyltran sferase OS=Pasteurellaceae bacterium Phil31 OX=2585022 GN=tgt PE=3 SV=1
MKYELHQTDGRARRGRLTFQRPQGEFSVETPAFMPVGTYGTVKGMTPEEVKATGAQILLGNTFHLWLRPGQEVMKLHGDLHDFMQWHGPILTDSGGFQVFSLGDIRKIKEEGVHFRNPINGERIFLSPEKSMEIQYDLGSDIVMIFDECTPYPADFDYAKNSMEMSLRWAKRSRDRFDELGNKNALFGIIQGGVYEELRKVSVEGLVDIGFDGYAVGGLAVGEPKEDMHRILEYVCPQIPQDKPRYLMGVGKPEDLVEGVRRGIDMFDCVMPTRNARNGHLFTADGVIKIRNAKYRDDTSPLEAECDCYTCKHYSKAYLYHLDKCGEILGARLNTIHNLRYYQRLMAQLREAIEKGELEQFVEQFYARIGKPVPPLNQYHAFSEVK

SEQ ID NO: 58828 - protein, 384 aa, Pasteurellaceae bacterium
  misc_feature (1)..(384): tr|A0A3S7N3K4|A0A3S7N3K4_9PAST Queuine tRNA-ribosyltran sferase OS=Pasteurellaceae bacterium 12565 OX=2093222 G N=tgt PE=3 SV=1
MKYELKTTSGNARRGRLTFNRPKGEFHVETPAFMPVGTYGTVKGMTPEEVKATGAQILLGNTFHLWLRPGQEVMKMHGDLHDFMQWHGPILTDSGGFQVFSLGKLRKIKEEGVTFQNPISGEKIFLSPEKSMEIQYDLGSDIVMIFDECTPYPATFDYAKKSMEMSLRWAKRSRDRFDELENPNALFGIIQGGIYEELRKVSVEKLVEIGFDGYAVGGLAVGEPKEDMHRILEYVCPQIPADKPRYLMGVGKPEDLVEGVRRGIDMFDCVMPTRNARNGHLFVTNGIVKIRNAKYRADTTPLDPECDCYTCKNYTKAYLYHLDKCGEILGARLNTIHNLRYYQRLMAEIRQAIEEDRFDDFVVEFYARIGKEVPPLQSEVKEQK

SEQ ID NO: 58829 - protein, 388 aa, Patescibacteria group
  misc_feature (1)..(388): tr|A0A3B9U528|A0A3B9U528_9BACT Queuine tRNA-ribosyltran sferase OS=Patescibacteria group bacterium OX=2052139 G N=tgt PE=3 SV=1
MLTPYFEITKKVENSRARTGVIHTAHGDVLTPQFLPIGTKGTIKTVTSEEIKFWGATMVLANTYHLWQRPGDALVYKAGGLHKFMNWKGPIFTDSGGFQVYSLAKMRKVMEAGVLFSFDMDGKQEILSPEKSIQIQANLGSDICLILDDFPGFPFEYERSKESIELTTRWAERAVKEHKRIVEDGDPVNPGQKLWGIVQGASFEDLRKLSAESMVNLGFEGYAIGGVAVGEPHEEMMKAVSYAVPHLPETAPKHLLGVGTPYDIVQAVSLGCDTFDCVIPTREARHGRLYINARDEDGGECYETIDVRLEKYKEDFTPIDNTCNCYACLNHTRAYVRHLLASNEMLGTRLATMHNLRFYLNLMEKIRIAIDNDYFEDMLKTFRDLTQK

SEQ ID NO: 58830 - protein, 345 aa, Patescibacteria group
  misc_feature (1)..(345): tr|A0A3C1EWE3|A0A3C1EWE3_9BACT Queuine tRNA-ribosyltran sferase OS=Patescibacteria group bacterium OX=2052139 G N=tgt PE=3 SV=1
MDIQDFGKKYVFMPDATRGAVRFLTTEQLKDTKTEAIVTNTLHLLMNPGAERMKELGGIKKLMNWDGIVLTDSGGFQVFSLIHSGKWKGKVHEDGATFYSPWTGERYDLTPESSIDIQISINSDILVTLDDCRGTDLTREEAEISVDRTIKWAKRCKDHFENVYGGTKETGKLLSCVVQGANFIDLRKKCAEELTKIGFDGYNFGGFVVDKDGELVIDEMKAVIDNTPKDKFKYAMGVGKPEDIRRAAKIGYTVFDTVLVTRNARHGTLYSSDIEDEVLRITNQDYVIDERPIDSKCDCYTCKNHSRAYVHQMLKVGEATGMTLATIHNLRYYQRLVDDLNAGNE

SEQ ID NO: 58831 - protein, 430 aa, Patulibacter medicamentivorans
  misc_feature (1)..(430): tr|H0E681|H0E681_9ACTN Queuine tRNA-ribosyltransferase OS=Patulibacter medicamentivorans OX=1097667 GN=tgt PE= 3 SV=1
MDPSSAAPSLDAPPRPAAERPREVFRIEARDGGSLARAGVIATAHGEVRTPGFVPLATKATVRGLLPSEVRELGFDIVLGNTFHLMLSPGHELIRGHGGLHRFMGWDGPIITDSGGFQVFSMGHGAVADEIKGRTGSGGKGGTATAGGGIRSHGRIDEIGEQGVAFRSHLDGSKQFLSPERSMEVQAALGTDLAVVFDECTPFHVDRDYTARSTERTHRWLERCLTWHEQHAPGWQLVYGIVQGGVHEDLRIEAAETVASSRADAIAIGGSLGSHKDQMYEVVGWTTARLGGVHERKPRHLLGIGEIDDLVRGVEQGIDTFDCAMPTRLGRHGMALVPDPDRRWRVDLTQARWKDSDEPLCEGCPCPACAQGFSRGYLRYLAHQRELLGMRLLTQHNLAFVARVLARLRQAIVDGRLAEEAAAIRGGRLP

SEQ ID NO: 58832 - protein, 378 aa, Paucibacter aquatile
  misc_feature (1)..(378): tr|A0A2N8L074|A0A2N8L074_9BURK Queuine tRNA-ribosyltran sferase OS=Paucibacter aquatile OX=2070761 GN=tgt PE=3 SV=1
MLKFELLKTEGHARRGQMTLNHGVVQTPIFMPVGTYGTVKGVMPRSLEEMGAQIILGNTFHLWMRPGLDIMKQFGGLHQFESWNKPILTDSGGFQVWSLGEMRKISEEGVKFASPVNGDKLFLTPEISMQIQTVLNSDIVMQFDECTPYETKGHITTELEARKSMEMSLRWAKRCQDEFARLENPNALFGIVQGGMFENLRDHSLAGLAELDLPGYAIGGLSVGEPKADMQRVLAHIGHQLPAQKPRYLMGVGTPEDLIEGVSRGIDMFDCVMPTRNARNGHLFTRFGDLRLRNARYKTDERPVDETCTCYTCKTFSRAYLHHLDRCGEMLGPMLTSIHNLHYYLNLMQEARDALDLPGEGGFAAFQAKFAADRARGV

SEQ ID NO: 58833 - protein, 378 aa, Paucibacter sp.
  misc_feature (1)..(378): tr|A0A3N7C4M8|A0A3N7C4M8_9BURK Queuine tRNA-ribosyltran sferase OS=Paucibacter sp. KBW04 OX=2153361 GN=tgt PE=3 SV=1
MLKFDLLKTEGHARRGQMTLNHGVVQTPIFMPVGTYGTVKGVMPRSLDEAGAQIILGNTFHLWLRPGLDILRQFGGLHKFESWNKPILTDSGGFQVWSLGEMRKISEEGVRFASPVNGDKLFLTPEISMQIQTVLNSDIVMQFDECTPYETKGQLTTEKEARASMEMSLRWAKRCKDEFARLENPNALFGIVQGGMFEGLRDHSLAGLAELDLPGYAIGGLSVGEPKEDMQRVLAHIGHQLPDNKPRYLMGVGTPEDLIEGVSRGIDMFDCVMPTRNARNGHLFTRFGDLRLRNARYKTDERPVDETCSCYCCGNFSRAYLHHLDRCGEMLGPMLASIHNIHYYLNLMQEARDALDQPGTGGFEAFKLKFAADRARGV

SEQ ID NO: 58834 - protein, 378 aa, Paucibacter sp.
  misc_feature (1)..(378): tr|A0A0U2W0Q6|A0A0U2W0Q6_9BURK Queuine tRNA-ribosyltran sferase OS=Paucibacter sp. KCTC 42545 OX=1768242 GN=tgt PE=3 SV=1
MLKFDLLKTEGRARRGQMTLNHGVVQTPIFMPVGTYGTVKGVMPRSLEEADAQIILGNTFHLWLRPGLDILKQFGGLHRFESWNKPILTDSGGFQVWSLGEMRKITEEGVRFASPVNGDKLFLTPEISMQIQTVLNSDIVMQFDECTPYESKGVLTTEKEARVSMEMSLRWAKRCQDEFARLENPNALFGIVQGGMFESLRDHSLAGLAELDLPGYAIGGLSVGEPKEDMQRVLSHIGHQLPPHKPRYLMGVGTPEDLVEGVSQGIDMFDCVMPTRNARNGHLFTRFGDLRLRNARYKTDERPVDETCSCYCCKNFSRAYLHHLDRCGEMLGPMLASIHNIHYYLNLMKEVRDSLEQPGTDGFASFKLKFAADRARGV

SEQ ID NO: 58835 - protein, 376 aa, Paucibacter toxinivorans
  misc_feature (1)..(376): tr|A0A4R6QQH8|A0A4R6QQH8_9BURK Queuine tRNA-ribosyltran sferase OS=Paucibacter toxinivorans OX=270368 GN=tgt PE =3 SV=1
MLKFDLLKTEGRARRGTLTLNHGVVQTPIFMPVGTYGTVKGVMPRSLEEMGAQIILGNTFHLWLRPGLDILQQFGGLHKFEAWNKPILTDSGGFQVWSLGEMRKISEEGVKFASPVNGDKLFLTPEISMQIQTVLNSDIVMQFDECTPYDTKGHITTEKEARLSMELSLRWAKRCQDEFEKLENPNALFGIVQGGMFENLRDESLAGLAALDLPGYAIGGLSVGEPKADMMRVLAHIGHQLPANKPRYLMGVGTPEDLVEGVSQGIDMFDCVMPTRNARNGHLFTRFGDLRLRNARYKTDDKPIDMTCSCHACESFSRAYLHHLDRCGEMLGPMLTSIHNLHYFLNLMREMREALDAGRFEAWRVQFHADRARGIE

SEQ ID NO: 58836 - protein, 374 aa, Paucimonas lemoignei
  misc_feature (1)..(374): tr|A0A4R3I125|A0A4R3I125_PAULE Queuine tRNA-ribosyltran sferase OS=Paucimonas lemoignei OX=29443 GN=tgt PE=3 SV =1
MKYTLLKTDGKARRGRLTLNHGTVETPIFMPVGTYGSVKAMSPLELHEIGAEIILGNTFHLWLRPGTEVLDKFGGLHGFMGWDKPILTDSGGFQVFSLGEMRKITEEGVKFASPVNGDKLFLSPEVSMQIQRSLNSDIVMQFDECTPYEIDGRPATEKEAADSMRMSLRWAKRSRNEFDRGENPNALFGIVQGGMFEHLRDESLAGLEEIGFHGLAIGGLSVGEPKEDMLRILAHVGPRLPADKPHYLMGVGTPEDLVDGVANGIDMFDCVMPTRNARNGWLFTRFGDIKIKNARYKDDPAPLDETCGCYACRNFSRAYLHHLHRAGEILGARLNTIHNLYYYLQLMREMREAIEAGEFSAFVARFNAERVRGV

SEQ ID NO: 58837 - protein, 377 aa, Paucimonas lemoignei
  misc_feature (1)..(377): tr|A0A2X4AQ31|A0A2X4AQ31_PAULE Queuine tRNA-ribosyltran sferase OS=Paucimonas lemoignei OX=29443 GN=tgt PE=3 SV =1
MSRTSRMSFELLATDGKARRGRLTFPRGVVETPAFMPVGTYGTVKGMLPRDIEATGAQIILGNTFHLWLRPGTEVIKAHGDLHDFMKWNGPILTDSGGFQVFSLGAMRKIKEEGVTFASPVDGAKVFMGPEESMQVQRDLGSDIVMIFDECTPYPADEDVARVSMELSLRWAKRSKIAHGESTAALFGIVQGGMHESLRMRSLEGLDQIGFDGLAIGGLSVGEPKHEMIKVLDYLPGQMPPEKPRYLMGVGKPEDLVEGVRRGIDMFDCVMPTRNARNGHLFIDTGVLKIRNAFHRHDDSPLDPTCDCYTCQNFSRAYLHHLDKCGEMLGSMLNTIHNLRHYQVLMAGLREAIQQGTLAAFVDAFYVKRGIPTPPLA

SEQ ID NO: 58838 - protein, 371 aa, Pectinatus cerevisiiphilus
  misc_feature (1)..(371): tr|A0A4V2US82|A0A4V2US82_9FIRM Queuine tRNA-ribosyltran sferase OS=Pectinatus cerevisiiphilus OX=86956 GN=tgt P E=3 SV=1
MSAITYELIKRCPETGARAGIIHTPHGSFETPIFMPVGTQATVKLLAPEELKEMGAGIILSNTYHLFLRPGSELIREAGGLHKFMNWDRAILTDSGGFQVFSLGALRKITEEGVAFRSHIDGSKKFLSPEIATKIQMNLGADIIMAFDECIPYPADHDYAEKSTARTLRWAKRCQETLTADNQSMFGIVQGGMYKDLRKSCVDELVDMDFPGYAIGGLSVGEPHQLMYEVLDYTAAALPANKPRYLMGVGTPDCLVESVKRGIDMFDCVFPTRVARNGTAMTWNGRFIIKNAEFEHDFHPIDENCGCYACRNYSRAYIRHLVRVNEVFGLRLLTIHNLYFLIDFMRKMRQSIIDGKFVDFYNEFAPKYVLK

SEQ ID NO: 58839 - protein, 381 aa, Pectobacterium actinidiae
  misc_feature (1)..(381): tr|A0A1V2R798|A0A1V2R798_9GAMM Queuine tRNA-ribosyltran sferase OS=Pectobacterium actinidiae OX=1507808 GN=tgt PE=3 SV=1
MKYELQTTDGRARRGRLIFERGVVETPAFMPVGTYGTVKGMTPEEVKDTGAQILLGNTFHLWLRPGQEIMKLHGDLHDFMQWHGPILTDSGGFQVFSLGDIRKITEQGVHFRNPINGDSIFLSPEKSMEIQHDLGSDIVMIFDECTPYPADWDYAKRSMEMSLRWAKRSRQRFDELENKNALFGIIQGSVYEDLRDVSVKGLVDIGFDGYAVGGLAVGEPKEDMHRILEHVCPQIPEDKPRYLMGVGKPEDLVEGVRRGVDMFDCVMPTRNARNGHLFVTDGVVKIRNAKHKDDVSSLDEHCDCYTCRNYSRAYLHHLDRCNEILGARLNTIHNLRYYQRLMAGLRQAIEEGKLEHFVVDFYQRIGKPVPPLAEKNVAASS

SEQ ID NO: 58840 - protein, 381 aa, Pectobacterium aquaticum
  misc_feature (1)..(381): tr|A0A3R8NIC2|A0A3R8NIC2_9GAMM Queuine tRNA-ribosyltran sferase OS=Pectobacterium aquaticum OX=2204145 GN=tgt P E=3 SV=1
MKYELQTTDGRARRGRLIFERGVVETPAFMPVGTYGTVKGMTPEEVKETGAQILLGNTFHLWLRPGQEIMKLHGDLHDFMNWHGPILTDSGGFQVFSLGDIRKITEQGVHFRNPINGDSIFLSPEKSMEIQHDLGSDIVMIFDECTPYPADWDYAKRSMEMSLRWAKRSRQRFDELENKNALFGIIQGSVYEDLRDVSVKGLVDIGFDGYAVGGLAVGEPKEDMHRILEHVCPQIPEDKPRYLMGVGKPEDLVEGVRRGVDMFDCVMPTRNARNGHLFVTDGVVKIRNAKHKDDVSSLDEHCDCYTCRNYSRAYLHHLDRCNEILGARLNTIHNLRYYQRLMAGLRQAIEEGKLEHFVVDFYQRIGKPIPPLAEKDVATSN

SEQ ID NO: 58841 - protein, 381 aa, Pectobacterium atrosepticum
  misc_feature (1)..(381): sp|Q6D855|TGT_PECAS Queuine tRNA-ribosyltransferase OS= Pectobacterium atrosepticum (strain SCRI 1043 / ATCC BA A-672) OX=218491 GN=tgt PE=3 SV=1
MKYELQTTDGRARRGRLIFERGVVETPAFMPVGTYGTVKGMTPEEVKETGAQILLGNTFHLWLRPGQEIMKLHGDLHDFMNWHGPILTDSGGFQVFSLGDIRKITEQGVHFRNPINGDSIFLSPEKSMEIQNDLGSDIVMIFDECTPYPADWDYAKRSMEMSLRWAKRSRQRFDELENKNALFGIIQGSVYEDLRDVSVKGLVDIGFDGYAVGGLAVGEPKEDMHRILEHVCPQIPEDKPRYLMGVGKPEDLVEGVRRGVDMFDCVMPTRNARNGHLFVTDGVVKIRNAKHKDDVSSLDEHCDCYTCRNYSRAYLHHLDRCNEILGARLNTIHNLRYYQRLMAGLRQAIEEGKLELFVVDFYQRIGKPIPPLAEKDVAASN

SEQ ID NO: 58842 - protein, 381 aa, Pectobacterium betavasculorum
  misc_feature (1)..(381): tr|A0A093S177|A0A093S177_9GAMM Queuine tRNA-ribosyltran sferase OS=Pectobacterium betavasculorum OX=55207 GN=tg t PE=3 SV=1
MKYELQTTDGRARRGRLIFERGVVETPAFMPVGTYGTVKGMTPEEVKETGAQILLGNTFHLWLRPGQEIMKLHGDLHDFMNWHGPILTDSGGFQVFSLGDIRKITEQGVHFRNPINGDSIFLSPEKSMEIQHDLGSDIVMIFDECTPYPADWDYAKRSMEMSLRWAKRSRQRFDELENKNALFGIIQGSVYEDLRDVSVKGLVDIGFDGYAVGGLAVGEPKEDMHRILEHVCPQIPEDKPRYLMGVGKPEDLVEGVRRGVDMFDCVMPTRNARNGHLFVTDGVVKIRNAKHKDDVSPLDEHCDCYTCRNYSRAYLHHLDRCNEILGARLNTIHNLRYYQRLMAGLRQAIEEGKLEHFVVDFYQRIGKPIPPLAEKDVAASN

SEQ ID NO: 58843 - protein, 381 aa, Pectobacterium brasiliense
  misc_feature (1)..(381): tr|A0A0M2F6G0|A0A0M2F6G0_9GAMM Queuine tRNA-ribosyltran sferase OS=Pectobacterium brasiliense OX=180957 GN=tgt PE=3 SV=1
MKYELQTTDGRARRGRLIFERGVVETPAFMPVGTYGTVKGMTPEEVKETGAQILLGNTFHLWLRPGQEIMKLHGDLHDFMNWHGPILTDSGGFQVFSLGDIRKITEQGVHFRNPINGDSIFLSPEKSMEIQHDLGSDIVMIFDECTPYPADWDYAKRSMEMSLRWAKRSRQRFDELENKNALFGIIQGSVYEDLRDVSVKGLVDIGFDGYAVGGLAVGEPKEDMHRILEHVCPQIPEDKPRYLMGVGKPEDLVEGVRRGVDMFDCVMPTRNARNGHLFVTDGVVKIRNAKHKDDVSSLDEHCDCYTCRNYSRAYLHHLDRCNEILGARLNTIHNLRYYQRLMAGLRQAIEEGKLEHFVVDFYQRIGKPVPPLAEKDVAASS

SEQ ID NO: 58844 - protein, 381 aa, Pectobacterium brasiliense
  misc_feature (1)..(381): tr|A0A086F081|A0A086F081_9GAMM Queuine tRNA-ribosyltran sferase OS=Pectobacterium brasiliense OX=180957 GN=tgt PE=3 SV=1
MKYELQTTDGRARRGRLIFERGVVETPAFMPVGTYGTVKGMTPEEVKETGAQILLGNTFHLWLRPGQEIMKLHGDLHDFMNWHGPILTDSGGFQVFSLGDIRKITEQGVHFRNPINGDSIFLSPEKSMEIQHDLGSDIVMIFDECTPYPADWDYAKRSMEMSLRWAKRSRQRFDELENKNALFGIIQGSVYEDLRDVSVKGLVDIGFDGYAVGGLAVGEPKEDMHRILEHVCPQIPEDKPRYLMGVGKPEDLVEGVRRGVDMFDCVMPTRNARNGHLFVTDGVVKIRNAKHKDDVSSLDEHCDCYTCRNYSRAYLHHLDRCNEILGARLNTIHNLRYYQRLMAGLRQAIEEGKLEHFVVDFYQRIGKPVPPLAEKDVAASN

SEQ ID NO: 58845 - protein, 381 aa, Pectobacterium carotovorum
  misc_feature (1)..(381): sp|C6DB26|TGT_PECCP Queuine tRNA-ribosyltransferase OS= Pectobacterium carotovorum subsp. carotovorum (strain P C1) OX=561230 GN=tgt PE=3 SV=1
MKYELQTTDGRARRGRLIFERGVVETPAFMPVGTYGTVKGMTPEEVKDTGAQILLGNTFHLWLRPGQEIMKLHGDLHDFMQWHGPILTDSGGFQVFSLGDIRKITEQGVHFRNPINGDSIFLSPEKSMEIQHDLGSDIVMIFDECTPYPADWDYAKRSMEMSLRWAKRSRQRFDELENKNALFGIIQGSVYEDLRDVSVKGLVDIGFDGYAVGGLAVGEPKEDMHRILEHVCPQIPEDKPRYLMGVGKPEDLVEGVRRGVDMFDCVMPTRNARNGHLFVTDGVVKIRNAKYKDDVSPLDEHCDCYTCRNYSRAYLHHLDRCNEILGARLNTIHNLRYYQRLMAGLRQAIEEGKLEHFVVDFYQRIGKPIPPLAEKDVAAGN

SEQ ID NO: 58846 - protein, 381 aa, Pectobacterium carotovorum
  misc_feature (1)..(381): tr|A0A518VMX2|A0A518VMX2_PECCC Queuine tRNA-ribosyltran sferase OS=Pectobacterium carotovorum subsp. carotovoru m OX=555 GN=tgt PE=3 SV=1
MKYELQTTDGRARRGRLIFERGVVETPAFMPVGTYGTVKGMTPEEVKETGAQILLGNTFHLWLRPGQEIMKLHGDLHDFMQWHGPILTDSGGFQVFSLGDIRKITEQGVHFRNPINGDSIFLSPEKSMEIQHDLGSDIVMIFDECTPYPADWDYAKRSMEMSLRWAKRSRQRFDELENKNALFGIIQGSVYEDLRDVSVKGLVDIGFDGYAVGGLAVGEPKEDMHRILEHVCPQIPEDKPRYLMGVGKPEDLVEGVRRGVDMFDCVMPTRNARNGHLFVTDGVVKIRNAKHKDDVSSLDEHCDCYTCRNYSRAYLHHLDRCNEILGARLNTIHNLRYYQRLMAGLRQAIEEGKLEHFVVDFYQRIGKPIPPLAEKDVAASS

SEQ ID NO: 58847 - protein, 381 aa, Pectobacterium odoriferum
  misc_feature (1)..(381): tr|A0A094U2J7|A0A094U2J7_9GAMM Queuine tRNA-ribosyltran sferase OS=Pectobacterium odoriferum OX=78398 GN=tgt PE =3 SV=1
MKYELQTTDGRARRGRLIFERGVVETPAFMPVGTYGTVKGMTPEEVKETGAQILLGNTFHLWLRPGQEIMKLHGDLHDFMNWHGPILTDSGGFQVFSLGDIRKITEQGVHFRNPINGDSIFLSPEKSMEIQHDLGSDIVMIFDECTPYPADWDYAKRSMEMSLRWAKRSRQRFDELENKNALFGIIQGSVYEDLRDVSVKGLVDIGFDGYAVGGLAVGEPKEDMHRILEHVCPQIPEDKPRYLMGVGKPEDLVEGVRRGVDMFDCVMPTRNARNGHLFVTDGVVKIRNAKHKDDVSSLDEHCDCYTCRNYSRAYLHHLDRCNEILGARLNTIHNLRYYQRLMAGLRQAIEEGKLEHFVVDFYQRIGKPIPPLAEKGVAASS

SEQ ID NO: 58848 - protein, 381 aa, Pectobacterium parmentieri
  misc_feature (1)..(381): tr|A0A0H3I770|A0A0H3I770_PECPM Queuine tRNA-ribosyltran sferase OS=Pectobacterium parmentieri OX=1905730 GN=tgt PE=3 SV=1
MKYELQTTDGRARRGRLIFERGVVETPAFMPVGTYGTVKGMTPEEVKETGAQILLGNTFHLWLRPGQEIMKLHGDLHDFMQWHGPILTDSGGFQVFSLGDIRKITEQGVHFRNPINGDSIFLSPEKSMEIQHDLGSDIVMIFDECTPYPADWDYAKRSMEMSLRWAKRSRQRFDELENKNALFGIIQGSVYEDLRDVSVKGLVDIGFDGYAVGGLAVGEPKEDMHRILEHVCPQIPEDKPRYLMGVGKPEDLVEGVRRGVDMFDCVMPTRNARNGHLFVTDGVVKIRNAKHKDDVSSLDEHCDCYTCRNYSRAYLHHLDRCNEILGARLNTIHNLRYYQRLMAGLRQAIEEGKLEHFVVDFYQRIGKSIPPLAENDVAASN

SEQ ID NO: 58849 - protein, 381 aa, Pectobacterium peruviense
  misc_feature (1)..(381): tr|A0A0J5XYC8|A0A0J5XYC8_9GAMM Queuine tRNA-ribosyltran sferase OS=Pectobacterium peruviense OX=2066479 GN=tgt PE=3 SV=1
MKYELQTTDGRARRGRLIFDRGVVETPAFMPVGTYGTVKGMTPEEVKETGAQILLGNTFHLWLRPGQEIMKLHGDLHDFMNWHGPILTDSGGFQVFSLGDIRKITEQGVHFRNPINGDSIFLSPEKSMEIQHDLGSDIVMIFDECTPYPADWDYAKRSMEMSLRWAKRSRERFDELENKNALFGIIQGSVYEDLRDVSVKGLVDIGFDGYAVGGLAVGEPKEDMHRILEHVCPQIPEDKPRYLMGVGKPEDLVEGVRRGVDMFDCVMPTRNARNGHLFVTDGVVKIRNAKHKDDVSSLDEHCDCYTCRNYSRAYLHHLDRCNEILGARLNTIHNLRYYQRLMAGLRQAIEEGKLEHFVVDFYQRIGKAIPPLAEKDVAASN

SEQ ID NO: 58850 - protein, 381 aa, Pectobacterium polaris; identical to SEQ ID NO: 58840
  misc_feature (1)..(381): tr|A0A093SBG8|A0A093SBG8_9GAMM Queuine tRNA-ribosyltran sferase OS=Pectobacterium polaris OX=2042057 GN=tgt PE= 3 SV=1

SEQ ID NO: 58851 - protein, 381 aa, Pectobacterium polonicum
  misc_feature (1)..(381): tr|A0A4U7KK22|A0A4U7KK22_9GAMM Queuine tRNA-ribosyltran sferase OS=Pectobacterium polonicum OX=2485124 GN=tgt P E=3 SV=1
MKYELQTTDGRARRGRLIFERGVVETPAFMPVGTYGTVKGMTPEEVKETGAQILLGNTFHLWLRPGQEIMKLHGDLHDFMNWHGPILTDSGGFQVFSLGDIRKITEQGVHFRNPINGDSIFLSPEKSMEIQHDLGSDIVMIFDECTPYPADWDYAKRSMEMSLRWAKRSRQRFDELENKNALFGIIQGSVYEDLRDVSVKGLVDIGFDGYAVGGLAVGEPKEDMHRILEHVCPQIPEDKPRYLMGVGKPEDLVEGVRRGVDMFDCVMPTRNARNGHLFVTDGVVKIRNAKHKDDVSSLDEHCDCYTCRNYSRAYLHHLDRCNEILGARLNTIHNLRYYQRLMAGLRQAIEEGKLEHFVVDFYQRIGKPIPPLAEKDVAASN

SEQ ID NO: 58852 - protein, 381 aa, Pectobacterium punjabense
  misc_feature (1)..(381): tr|A0A2T3VYW9|A0A2T3VYW9_9GAMM Queuine tRNA-ribosyltran sferase OS=Pectobacterium punjabense OX=2108399 GN=tgt PE=3 SV=1
MKYELQTTDGRARRGRLIFERGVVETPAFMPVGTYGTVKGMTPEEVKETGAQILLGNTFHLWLRPGQEIMKLHGDLHDFMQWHGPILTDSGGFQVFSLGDIRKITEQGVHFRNPINGDSIFLSPEKSMEIQHDLGSDIVMIFDECTPYPADWDYAKRSMEMSLRWAKRSRQRFDELENKNALFGIIQGSVYEDLRDVSVKGLVDIGFDGYAVGGLAVGEPKEDMHRILEHVCPQIPEDKPRYLMGVGKPEDLVEGVRRGVDMFDCVMPTRNARNGHLFVTDGVVKIRNAKHKDDVSSLDEHCDCYTCRNYSRAYLHHLDRCNEILGARLNTIHNLRYYQRLMAGLRQAIEEGKLEHFVVDFYQRIGKPIPPLAEKDVAASN

SEQ ID NO: 58853 - protein, 381 aa, Pectobacterium wasabiae
  misc_feature (1)..(381): tr|A0A1D7Z3F9|A0A1D7Z3F9_9GAMM Queuine tRNA-ribosyltran sferase OS=Pectobacterium wasabiae CFBP 3304 OX=1175631 GN=tgt PE=3 SV=1
MKYELQTTDGRARRGRLIFERGVVETPAFMPVGTYGTVKGMTPEEVKDTGAQILLGNTFHLWLRPGQEIMKLHGDLHDFMQWHGPILTDSGGFQVFSLGDIRKITEQGVHFRNPINGDSIFLSPEKSMEIQHDLGSDIVMIFDECTPYPADWDYAKRSMEMSLRWAKRSRQRFDELENKNALFGIIQGSVYEDLRDVSVKGLVDIGFDGYAVGGLAVGEPKEDMHRILEHVCPQIPEDKPRYLMGVGKPEDLVEGVRRGVDMFDCVMPTRNARNGHLFVTDGVVKIRNAKHKDDVSSLDEHCDCYTCRNYSRAYLHHLDRCNEILGARLNTIHNLRYYQRLMAGLRQAIEEGKLEHFVVDFYQRIGKPIPPLAENDVAASN

SEQ ID NO: 58854 - protein, 380 aa, Pediococcus acidilactici
  misc_feature (1)..(380): tr|D2EK45|D2EK45_PEDAC Queuine tRNA-ribosyltransferase OS=Pediococcus acidilactici 7_4 OX=563194 GN=tgt PE=3 S V=1
MEPAIKYRLIKKDKHTGARLGEIITPHGTFPTPIFMPVGTQATVKAMSPEELEDLGADIILSNTYHLWVRPGEDIVKEAGGLHQFMNWHKGILTDSGGFQVFSLAKLRDITEEGVHFRNEINGAKMFLSPEKAIQIENDLGPDIMMSLDECPPFFESYDYVKHSVARTSRWAERGLKAHRNPGTQGLFGIIQGAGFEDLRRQSAHDLVSMDFPGYSIGGLSVGESKAEMNRVLEFTTPLIPENKPRYLMGVGSPDALIDGVIRGVDMFDCVLPTRIARNGTCMTSHGRLVVKNAKYARDFTPIDDQCHCYTCRNFTRAYVRHLLKTDETFGLRLTSIHNVYFLVHLMKDVRQAIMDDNLLEFRQNFFDEYGYGKENSKNF

SEQ ID NO: 58855 - protein, 380 aa, Pediococcus acidilactici
  misc_feature (1)..(380): tr|A0A1A5VD17|A0A1A5VD17_PEDAC Queuine tRNA-ribosyltran sferase OS=Pediococcus acidilactici OX=1254 GN=tgt PE=3 SV=1
MEPAIKYRLIKKDKHTGARLGEIITPHGTFPTPIFMPVGTQATVKAMSPEELEDLGADIILSNTYHLWVRPGEDIVKEAGGLHQFMNWHKGILTDSGGFQVFSLAKLRDITEEGVHFRNEINGAKMFLSPEKAIQIENDLGPDIMMSLDECPPFFESYDYVKHSVARTSRWAERGLKAHRNPDTQGLFGIIQGAGFEDLRRQSAHDLVSMDFPGYSIGGLSVGESKAEMNRVLEFTTPLIPENKPRYLMGVGSPDALIDGVIRGVDMFDCVLPTRIARNGTCMTSHGRLVVKNAKYARDFTPIDEQCHCYTCRNFTRAYVRHLLKTDETFGLRLTSIHNVYFLVHLMKDVRQAIMDDNLLEFRQNFFDEYGYGKENSKNF

SEQ ID NO: 58856 - protein, 380 aa, Pediococcus argentinicus
  misc_feature (1)..(380): tr|A0A0R2NHK5|A0A0R2NHK5_9LACO Queuine tRNA-ribosyltran sferase OS=Pediococcus argentinicus OX=480391 GN=tgt PE =3 SV=1
MEPAIKYRLIKTEKHTGARLGEVITPHGTFPTPIFMPVGTQATVKAMSPEELDDLGADIILANTYHLWERPGEDIVKEAGGLHKFMNWNKGILTDSGGFQVFSLAKLRDISEEGVRFRNEMNGSKMFLSPEKAMQIENDLGPDIMMSFDECPPYFESYDYVKHSVERTSRWAERGLKAHRNPDTQGLFGIVQGAGFEDLRRQSAADLVSMDFPGYSIGGLSVGESKAEMNRVLDFTTPLIPENKPRYLMGVGSPDSLIDGVIRGIDMFDCVLPTRIARNGTCMTSHGRLVVKNAKYARDFTPLDDNCTCYACRNYTRAYIRHLLKTDETFGLRLTSIHNVHFLVHLMKDVRQAIMDDNLLEFRQNFFDEYGYTENPTKNF

SEQ ID NO: 58857 - protein, 380 aa, Pediococcus cellicola
  misc_feature (1)..(380): tr|A0A0R2IJF8|A0A0R2IJF8_9LACO Queuine tRNA-ribosyltran sferase OS=Pediococcus cellicola OX=319652 GN=tgt PE=3 SV=1
MEPAIKYHLIKKDKHTGARLGEIETPHGTFKTPIFMPVGTQATVKAMSPEELEDIGADIILSNTYHLWVRPGEDIVKEAGGLHKFMNWKKGILTDSGGFQVFSLAKLRDITEEGVHFRNEISGAKMFLSPEKAIQIENDLGPDIMMSFDECPPFFESYDYVKHSVERTSRWAERGLKAHRNPDWQALFGIVQGAGFKALREQSAKDLVSLDFPGYSIGGLSVGESKDEMNRVLEFTTPMLPEHKPRYLMGVGSPDSLIDGVIRGVDMFDCVLPTRIARNGTCMTSHGRLVVKNAKYARDFTPIDDNCDCYTCRNFTRAYVRHLMKTDETFGLRLTSIHNTYFLVHLMKQIRQAIEDDNLLEFREAFFEEYGYNKPHAKNF

SEQ ID NO: 58858 - protein, 380 aa, Pediococcus claussenii
  misc_feature (1)..(380): tr|G8PCM3|G8PCM3_PEDCP Queuine tRNA-ribosyltransferase OS=Pediococcus claussenii (strain ATCC BAA-344 / DSM 14 800 / JCM 18046 / KCTC 3811 / P06) OX=701521 GN=tgt PE= 3 SV=1
MEPAIKYRLIKTEKHTGARLGEIITPHGTFPTPIFMPVGTQATVKAMSPEELNDLGADIILANTYHLWERPGEDIVKEAGGLHKFMNWNKGILTDSGGFQVFSLAKLRDITEEGVHFRNELNGAKMFLSPEKAIQIENDLGPDIMMSFDECPPYFESYEYVKHSVERTSRWAERGLKAHQNPDTQGLFGIVQGAGFEDLRRQSASDLVSLDFPGYSIGGLSVGESKDEMNRVLEFTTPMLPENKPRYLMGVGSPDSLIDGVIRGVDMFDCVLPTRIARNGTCMTSHGRLVVKNAKYARDFTPLDDNCTCYTCRNYTRAYVRHLLKTDETFGLRLTSIHNVHFLVHLMQDVRQAILDDSLLEFRQSFFDEYGYTENPTKNF

SEQ ID NO: 58859 - protein, 380 aa, Pediococcus damnosus
  misc_feature (1)..(380): tr|A0A2G9VE97|A0A2G9VE97_9LACO Queuine tRNA-ribosyltran sferase OS=Pediococcus damnosus OX=51663 GN=tgt PE=3 SV =1
MEPAIKYHLIKTEKHTGARLGEIETPHGTFPTPIFMPVGTQATVKSMSPEELEDIGADIILSNTYHLWVRPGEDIIKEAGGLHKFMNWKKEILTDSGGFQVFSLANLRDISEEGVHFRNEISGAKMFLSPEKAIQIENDLGPDIMMSFDECPPFFESYEYVKHSVERTSRWAERGLKAHQNPDWQALFGIVQGAGFKALREQSAKDLVSMDFPGYSIGGLSVGESKDEMNRVLSFTTPMLPENKPRYLMGVGSPDALIDGVMRGIDMFDCVLPTRIARNGTCMTSHGRLVVKNAKYARDFTPLDDNCQCYTCRNYTRAYVRHLIKTNESFGIRLTSIHNIYFLVHLMKQVHQAIIEDNLLEFRENFFEEYGYNKEDAKNF

SEQ ID NO: 58860 - protein, 380 aa, Pediococcus damnosus
  misc_feature (1)..(380): tr|A0A0R2HLB0|A0A0R2HLB0_9LACO Queuine tRNA-ribosyltran sferase OS=Pediococcus damnosus OX=51663 GN=tgt PE=3 SV =1
MEPAIKYHLIKTEKHTGARLGEIETPHGTFPTPIFMPVGTQATVKSMSPEELEDIGADIILSNTYHLWVRPGEDIIKEAGGLHKFMNWKKGILTDSGGFQVFSLANLRDISEEGVHFRNEISGAKMFLSPEKAIQIENDLGPDIMMSFDECPPFFESYEYVKHSVERTSRWAERGLKAHQNPDWQALFGIVQGAGFKALREQSAKDLVSMDFPGYSIGGLSVGESKDEMNRVLSFTTPMLPENKPRYLMGVGSPDALIDGVMRGIDMFDCVLPTRIARNGTCMTSHGRLVVKNAKYARDFTPLDDNCQCYTCRNYTRAYVRHLIKTNESFGIRLTSIHNIYFLVHLMKQVHQAIIEDNLLEFRENFFEEYGYNKEDAKNF

SEQ ID NO: 58861 - protein, 380 aa, Pediococcus ethanolidurans
  misc_feature (1)..(380): tr|A0A0R2K427|A0A0R2K427_9LACO Queuine tRNA-ribosyltran sferase OS=Pediococcus ethanolidurans OX=319653 GN=tgt PE=3 SV=1
MEPAIKYHLIKTEKHTGARLGEIETPHGTFPTPIFMPVGTQATVKAMSPEELEDIGADIILSNTYHLWVRPGEDIVKEAGGLHKFMNWKRGILTDSGGFQVFSLAKLRDISEEGVHFRNEISGAKMFLSPEKAIQIENDLGPDIMMSFDECPPFFESYEYVKNSVERTSRWAERGLKAHQNPDWQALFGIVQGAGFKALREQSAKDLVSLDFPGYSIGGLSVGESKDEMNRVLEFTTPLLPENKPRYLMGVGSPDSLIDGVIRGVDMFDCVLPTRIARNGTCMTSHGRLVVKNAKYARDFTPIDDNCHCYTCRNFTRAYVRHLMKTDETFGLRLTSIHNTYFLVHLMKQVRQAIKDDNLLEFREAFFEEYGYNQAHPKNF

SEQ ID NO: 58862 - protein, 380 aa, Pediococcus inopinatus
  misc_feature (1)..(380): tr|A0A0R2I6S3|A0A0R2I6S3_9LACO Queuine tRNA-ribosyltran sferase OS=Pediococcus inopinatus OX=114090 GN=tgt PE=3 SV=1
MEPAIKYHLIKKEKHTGARLGEIETPHGTFPTPIFMPVGTQATVKSMSPEELEDIGADIILSNTYHLWVRPGEDIVKEAGGLHKFMNWKRGILTDSGGFQVFSLANLRDISEEGVHFRNEISGAKMFLSPEKAIQIENDLGPDIMMSFDECPPFFESYEYVKHSVERTSRWAERGLKAHQNPDWQALFGIVQGAGFKALREQSAKDLVSMDFPGYSIGGLSVGESKDEMNRVLNFTTPMLPENKPRYLMGVGSPDALIDGVMRGIDMFDCVLPTRIARNGTCMTSHGRLVVKNAIYARDFTPLDDNCQCYTCKNYTRAYVRHLIKTNESFGIRLTSIHNTYFLVHLMKQVRQAIMDDNLLEFRENFFEEYGYNKEDAKNF

SEQ ID NO: 58863 - protein, 380 aa, Pediococcus parvulus
  misc_feature (1)..(380): tr|A0A176THR3|A0A176THR3_9LACO Queuine tRNA-ribosyltran sferase OS=Pediococcus parvulus OX=54062 GN=tgt PE=3 SV =1
MEPAIKYHLIKTEKHTGARLGEIETPHGTFPTPIFMPVGTQATVKAMSPEELEDIGADIILSNTYHLWVRPGEDIVKEAGGLHKFMNWKKGILTDSGGFQVFSLAKLRDISEEGVHFRNEISGAKMFLSPEKAIQIENDLGPDIMMSFDECPPFFESYEYVKHSVERTSRWAERGLKAHQNPDWQALFGIVQGAGFKALREQSAKDLVSLDFPGYSIGGLSVGESKDEMNRVLEFTTPMLPENKPRYLMGVGSPDSLIDGVMRGIDMFDCVLPTRIARNGTCMTSHGRLVVKNAKYARDFTPIDDNCQCYTCRNFTRAYVRHLMKTEETFGLRLTSIHNTYFLVHLMKQVRQAIQDDNLLEFKEAFFEEYGYNQAHPKNF

SEQ ID NO: 58864 - protein, 380 aa, Pediococcus pentosaceus
  misc_feature (1)..(380): sp|Q03ER2|TGT_PEDPA Queuine tRNA-ribosyltransferase OS= Pediococcus pentosaceus (strain ATCC 25745 / CCUG 21536 / LMG 10740 / 183-1w) OX=278197 GN=tgt PE=3 SV=1
MEPAIKYRLIKTDKHTGARLGEIITPHGTFPTPIFMPVGTQATVKAMSPEELEDLGADIILSNTYHLWVRPGEDIVKEGGGLHQFMNWKKGILTDSGGFQVFSLAKLRDITEEGVHFKNELNGANMFLSPEKAIQIENDLGPDIMMSFDECPPYFESYDYVKHSVERTSRWAERGLKAHRNPETQGLFGIIQGAGFEDLRRQSAKDLVSMDFPGYSIGGLSVGESKEEMNRVLDFTTQLIPENKPRYLMGVGSPDALIDGVLRGVDMFDCVLPTRIARNGTCMTSHGRLVVKNAKYARDFTPIDDNCQCYTCRNYTRAYIRHLIKTDETFGLRLTSIHNVYFLVHLMKDVRQAIMDDNLLEFRQNFFEEYGYNKENSKNF

SEQ ID NO: 58865 - protein, 380 aa, Pediococcus pentosaceus
  misc_feature (1)..(380): tr|A0A512K6M7|A0A512K6M7_PEDPE Queuine tRNA-ribosyltran sferase OS=Pediococcus pentosaceus OX=1255 GN=tgt PE=3 SV=1
MEPAIKYRLIKTDKHTGARLGEIITPHGTFPTPIFMPVGTQATVKAMSPEELEDLGADIILSNTYHLWVRPGEDIVKEGGGLHQFMNWKKGILTDSGGFQVFSLAKLRDITEEGVHFKNELNGANMFLSPEKAIQIENDLGPDIMMSFDECPPYFESYDYVKHSVERTSRWAERGLKAHRNPETQGLFGIIQGAGFEDLRRQSAKDLVSMDFPGYSIGGLSVGESKEEMNRVLDFTTQLIPENKPRYLMGVGSPDALIDGVLRGVDMFDCVLPTRIARNGTCMTSHGRLVVKNAKYARDFTPIDDNCQCYTCRNYTRAYIRHLIKTDETFGLRLTSIHNVYFLVHLMKDVRQAIMDDNLLEFRQTFFEEYGYNKENSKNF

SEQ ID NO: 58866 - protein, 380 aa, Pediococcus stilesii
  misc_feature (1)..(380): tr|A0A0R2KXY4|A0A0R2KXY4_9LACO Queuine tRNA-ribosyltran sferase OS=Pediococcus stilesii OX=331679 GN=tgt PE=3 S V=1
MEPAIKYRLIKKDKHTGARLGEIITPHGTFPTPIFMPVGTQATVKAMSPEELEDLGADIILSNTYHLWVRPGEEIVKEAGGLHQFMNWKKGILTDSGGFQVFSLAKLRDITEEGVHFRNELNGAKMFLSPEKAIQIENDLGPDIMMSFDECPPYFESYDYVKHSVERTSRWAERGLKAHRNPETQGLFGIIQGAGFEDLRRQSAKDLVSMDFPGYSIGGLSVGESKDEMNRVLDFTTPLIPENKPRYLMGVGSPDSLIDGVIRGVDMFDCVLPTRIARNGTCMTSHGRLVVKNAKYARDFTPIDDNCNCYTCRNYTRAYVRHLIKTDETFGLRLTSIHNVYFLVHLMKDVRQAIMDDNLLEFRQNFFEEYGYGKENSKNF

SEQ ID NO: 58867 - protein, 376 aa, Pedobacter africanus
  misc_feature (1)..(376): tr|A0A1W2E0M1|A0A1W2E0M1_9SPHI Queuine tRNA-ribosyltran sferase OS=Pedobacter africanus OX=151894 GN=tgt PE=3 S V=1
MKFNLEAADQHSKARAGTITTDHGEIQTPIFMPVGTAGTVKSINQQQLKNDVDAKIILGNTYHLYLRPGLDILERAGGLHQFIGWDRPILTDSGGYQVYSLSKVRKIKEEGVTFRSHIDGSKHLFTPEYAMDIQRTIGADIIMAFDECTPYPCDYKYAANSINMTHRWLKRCCTRFDTTEPKYGFSQTLFPIVQGSVYKDLRIKSAEFIAAMDREGNAIGGLSVGEPAEEMYAMTEVVCDILPYEKPRYLMGVGTPINILENIALGVDMFDCVMPTRNARNGMLFTKNGIINISNKKWADDFSPIEADSDLLADQVYTKAYLRHLMHSKEMLGAQIATLHNLHFYLWLVKTAREKIINGEFSAWKNKMVTILGNKL

SEQ ID NO: 58868 - protein, 376 aa, Pedobacter alluvionis
  misc_feature (1)..(376): tr|A0A497XW48|A0A497XW48_9SPHI Queuine tRNA-ribosyltran sferase OS=Pedobacter alluvionis OX=475253 GN=tgt PE=3 SV=1
MKFSLQANDPLSKARAGTVTTAHGEIQTPIFMPVGTAGTVKAVHQRELKDDIDAKIILGNTYHLYLRPGLDILEKAGGLHKFIGWDRPILTDSGGYQVYSLSKVRKIKEEGVTFHSHIDGSKHLFTPEYAMDIQRTIGADIIMAFDECTPYPCDYTYAAQSIKMTHRWLKRCCERFDTTEPKYGFDQTLFPIVQGSVYKDLRIKSAEFIASMNREGNAIGGLSVGEPAEEMYAMTEVVCNILPEEKPRYLMGVGTPINILENIALGIDMFDCVMPTRNARNGMLFTRNGIINIRNKKWENDFSPLDAESDLHADLVTSKAYLRHLVHSKEMLGAQIATLHNLHFYLWLVKQAREKIIAGEFYEWKNKMVKVLGNKL

SEQ ID NO: 58869 - protein, 376 aa, Pedobacter antarcticus
  misc_feature (1)..(376): tr|A0A081PEF6|A0A081PEF6_9SPHI Queuine tRNA-ribosyltran sferase OS=Pedobacter antarcticus 4BY OX=1358423 GN=tgt PE=3 SV=1
MKFTLQANDIHSKARAGTVTTAHGEIQTPIFMPVGTAGTVKAVHQRELENDINAQIILGNTYHLYLRPGLDVLERAGGLHKFIGWDRPILTDSGGYQVYSLSKVNKIKEEGVTFRSHIDGSKHLFTPENAMDIQRTIGADIIMAFDECTPYPCDYKYAANSINMTHRWLRRCCKRFDETTPKYGFEQTLFPIVQGSVYKDLRVKSAEFIASMGREGNAIGGLSVGEPAEEMYGMTEVVCNVLPEDKPRYLMGVGTPINILENIALGIDMFDCVMPTRNARNGMLFTRNGIINIGNKKWADDFSPIDADSDLYADQVYSKAYLRHLMHSKEMLGAQIATLHNLHFYLWLVKEAREKIISGEFYAWKNKMVTILGNKL

SEQ ID NO: 58870 - protein, 376 aa, Pedobacter antarcticus; identical to SEQ ID NO: 58869
  misc_feature (1)..(376): tr|A0A1I2EE10|A0A1I2EE10_9SPHI Queuine tRNA-ribosyltran sferase OS=Pedobacter antarcticus OX=34086 GN=tgt PE=3 SV=1

SEQ ID NO: 58871 - protein, 376 aa, Pedobacter bauzanensis
  misc_feature (1)..(376): tr|A0A4R1M123|A0A4R1M123_9SPHI Queuine tRNA-ribosyltran sferase OS=Pedobacter bauzanensis OX=653929 GN=tgt PE=3 SV=1
MKFTLKAKDPNSKARLGEIETAHGNIQTPVFMPVGTAGSVKAVHQSELLNDVKAQIILGNTYHLYLRPGLDIIQKAGGLHKFNSWDKPLLTDSGGFQVYSLTEVRKIKEEGVTFQSHIDGSRHLFTPERVMDIQRIIGADIIMAFDECTPYPCDYSYARKSMDMTHRWLKRCCERFDETEPLYGYSQSLFPIVQGSVYKDLRERSAEKIASYNREGNAIGGLSVGEPAEEMYAMTEIVCNILPESKPRYLMGVGTPVNLLENIALGIDMFDCVMPTRNARNGMLFTKEGIINIKNKKWEDDFSPIDESSDLFSDRLYSKAYLRHLIRSKEILGAQIASLHNLHFYLWLMEEARNHIADGTFYNWKNKMTKVLDQKI

SEQ ID NO: 58872 - protein, 376 aa, Pedobacter borealis
  misc_feature (1)..(376): tr|A0A4R8P0G8|A0A4R8P0G8_9SPHI Queuine tRNA-ribosyltran sferase OS=Pedobacter borealis OX=475254 GN=tgt PE=3 SV =1
MKFSLQANDPLSKARAGTVTTAHGEIQTPIFMPVGTAGTVKAVHQRELKNDIDAKIILGNTYHLYLRPGLDILEKAGGLHKFIGWDRPILTDSGGYQVYSLSQVRKIKEEGVTFRSHIDGSKHLFTPEYAMDIQRTIGADIIMAFDECTPYPCDYTYAAKSIKMTHRWLERCCTHFDNTQPKYGFDQTLFPIVQGSVYKDLRIKSAEFIAGMNREGNAIGGLSVGEPAEEMYAMTEVVCDILPAEKPRYLMGVGTPINILENIALGIDMFDCVMPTRNARNGMLFTRNGIINIRNKKWENDFSALDAESDLHADQVTTKAYLRHLVHSNEMLGAQIATLHNLHFYLWLVKQAREKIIAGEFYEWKNKMVKVLGNKL

SEQ ID NO: 58873 - protein, 405 aa, Pedobacter caeni
  misc_feature (1)..(405): tr|A0A1M5H7F2|A0A1M5H7F2_9SPHI Queuine tRNA-ribosyltran sferase OS=Pedobacter caeni OX=288992 GN=tgt PE=3 SV=1
MFLFVDKKFSPFIALFLLLLADFSGAYRYMKFTLQANDTHSKARAGTVTTDHGDIQTPIFMPVGTAGTVKAVHQRELKDDIDAKIILGNTYHLYLRPGLDIIEGAGGLHKFIGWDRPILTDSGGYQVYSLSKVRKIKEEGVTFRSHIDGSKHLFTPEYAMDIQRTIGADIIMAFDECTPYPCDYKYAANSINMTHRWLKRCCNRFDTTEPKYGFNQTLFPIVQGSVYKDLRVKSAEFIAGMGREGNAIGGLSVGEPAEEMYAMTEVVCDILPYDKPRYLMGVGTPINILENIALGVDMFDCVMPTRNARNGMLFTRNGIINIGNKKWENDFSPIDAESDLHADQVYSKAYLRHLMHSKEMLGAQIATLHNLHFYLWLVKTAREKIISGEFYAWKNKMVTILGNKL

SEQ ID NO: 58874 - protein, 376 aa, Pedobacter chitinilyticus
  misc_feature (1)..(376): tr|A0A3S3PXR5|A0A3S3PXR5_9SPHI Queuine tRNA-ribosyltran sferase OS=Pedobacter chitinilyticus OX=2233776 GN=tgt PE=3 SV=1
MKFNLQAKDPNSKARAGVISTAHGDIQTPIFMPVGTAGTVKAVHQKELKEDIKAQIILGNTYHLYLRPGLDILEPAGGLHKFIGWDKPILTDSGGYQVYSLSQVRKIKEEGVTFRSHIDGSKHLFTPEYAMDIQRTIGADIIMAFDECTPYPCDYKYAANSINMTHRWLKRCCERFDTTEPKYGYNQTLFPIVQGSVYKDLRVKSAEFIASMGREGNAIGGLSVGEPAEEMYAMTEVVCDILPYEKPRYLMGVGTPINILENIALGVDMFDCVMPTRNARNGMLFTRNGMINITNKKWASDFSPIDVESDLLADQVYSKAYLRHLMQSKEILGSQIATLHNLHFYLWLVNQAREKIISGEFYEWKNKMVTILGTKL

SEQ ID NO: 58875 - protein, 376 aa, Pedobacter cryoconitis
  misc_feature (1)..(376): tr|A0A127VF38|A0A127VF38_9SPHI Queuine tRNA-ribosyltran sferase OS=Pedobacter cryoconitis OX=188932 GN=tgt PE=3 SV=1
MKFTLQANDPQSKARAGTVTTAHGDIQTPIFMPVGTAGTVKAVHQRELKNDIDAQIILGNTYHLYLRPGLDVLEGAGGLHKFIGWDRPILTDSGGYQVYSLSKVNKIKEEGVTFRSHIDGSKHLFTPEYAMDIQRTIGADIIMAFDECTPYPCDYKYAANSINMTHRWLKRCCARFDTTEPKYGFDQTLFPIVQGSVYKDLRKKSAEFIASMGREGNAIGGLSVGEPAEEMYGMTEVVCDILPADKPRYLMGVGTPINILENIALGVDMFDCVMPTRNARNGMLFTRNGIINIGNKKWADDFSPIDAESDLYADQVYSKAYLRHLMHSKEMLGAQIATLHNLHFYLWLVKEAREKIISGEFYAWKNKMVTILGNKL

SEQ ID NO: 58876 - protein, 376 aa, Pedobacter cryoconitis
  misc_feature (1)..(376): tr|A0A327T939|A0A327T939_9SPHI Queuine tRNA-ribosyltran sferase OS=Pedobacter cryoconitis OX=188932 GN=tgt PE=3 SV=1
MKFTLQANDPQSKARAGTVTTAHGDIQTPIFMPVGTAGTVKAVHQRELKNDIDAQIILGNTYHLYLRPGLDVLEGAGGLHKFIGWDRPILTDSGGYQVYSLSKVNKIKEEGVTFRSHIDGSKHLFTPEYAMDIQRTIGADIIMAFDECTPYPCDYKYAANSINMTHRWLKRCCTRFDTTEPKYGFDQTLFPIVQGSVYKDLRKKSAEFIASMGREGNAIGGLSVGEPAEEMYGMTEVVCDILPADKPRYLMGVGTPINILENIALGVDMFDCVMPTRNARNGMLFTRNGIINIGNKKWADDFSPIDAESDLYADQVYSKAYLRHLMHSKEMLGAQIATLHNLHFYLWLVKEAREKIISGEFYAWKNKMVTILGNKL

SEQ ID NO: 58877 - protein, 376 aa, Pedobacter duraquae
  misc_feature (1)..(376): tr|A0A4R6IQY5|A0A4R6IQY5_9SPHI Queuine tRNA-ribosyltran sferase OS=Pedobacter duraquae OX=425511 GN=tgt PE=3 SV =1
MKFSLQAQDPHSKARAGTVTTAHGDIQTPIFMPVGTAGTVKAVHQRELKDDINAQIILGNTYHLYLRPGLGILENAGGLHKFIGWDRPILTDSGGYQVYSLSKVRKIKEEGVTFRSHIDGSKHLFTPEYAMDIQRTIGADIIMAFDECTPYPCDYKYAAASINMTHRWLKRCCARVDSTSPKYGFEQTLFPIVQGSVYKDLRVKSAEFIASMNREGNAIGGLSVGEPAEEMYGMTEVVCDILPEDKPRYLMGVGTPINILENIALGVDMFDCVMPTRNARNGMLFTRNGIINIGNKKWEDDHSPLDAESDLFADQVYSKAYLRHLMHSKEILGAQIATLHNLNFYLWLVNQAREKIIDGTFYDWKNKMVKVLGQKL

SEQ ID NO: 58878 - protein, 376 aa, Pedobacter ginsengisoli
  misc_feature (1)..(376): tr|A0A2D1U0T1|A0A2D1U0T1_9SPHI Queuine tRNA-ribosyltran sferase OS=Pedobacter ginsengisoli OX=363852 GN=tgt PE= 3 SV=1
MKFSLEAKDTHSKARAGTITTDHGEIQTPIFMPVGTAGTVKAVHQRELKNDIDAKIILGNTYHLYLRPGLDVLEQAGGLHKFIGWDRPILTDSGGYQVYSLSQVRKIKEEGVTFNSHIDGSKHLFTPEYAMDIQRTIGADIIMAFDECTPYPCDYKYAASSINMTHRWLKRCCARFDSTEPKYGFNQTLFPIVQGSVYKDLRKKSAEFIASMDREGNAIGGLSVGEPAEEMYGMTEVVCDILPYEKPRYLMGVGTPINILENIALGVDMFDCVMPTRNARNGMLFTKNGIINIGNKKWANDFSPIEADSDLYADQVYSKAYLRHLMHSKEILGAQIATLHNLHFYLWLVKQAREKIITGEFYAWKNKMVTILGNKL

SEQ ID NO: 58879 - protein, 376 aa, Pedobacter ginsenosidimutans
  misc_feature (1)..(376): tr|A0A0T5VME2|A0A0T5VME2_9SPHI Queuine tRNA-ribosyltran sferase OS=Pedobacter ginsenosidimutans OX=687842 GN=tg t PE=3 SV=1
MKFSLQANDPLSKARAGTVTTAHGEIQTPIFMPVGTAGTVKAVHQRELKDDIDAKIILGNTYHLYLRPGLDILEKAGGLHKFIGWDRPILTDSGGYQVYSLSKVRKIKEEGVTFHSHIDGSKHLFTPEYAMDIQRTIGADIIMAFDECTPYPCDYTYAAQSIKMTHRWLKRCCARFDSTEPKYGFDQTLFPIVQGSVYKDLRIKSAEFIASMNREGNAIGGLSVGEPAEEMYAMTEVVCNILPEEKPRYLMGVGTPINILENIALGIDMFDCVMPTRNARNGMLFTRNGIINIRNKKWENDFSPLDAESDLHVDLVTSKAYLRHLVHSKEMLGAQIATLHNLHFYLWLVKQAREKIIAGEFYEWKNKMVKVLGNKL

SEQ ID NO: 58880 - protein, 376 aa, Pedobacter glucosidilyticus
  misc_feature (1)..(376): tr|A0A0B8XT80|A0A0B8XT80_9SPHI Queuine tRNA-ribosyltran sferase OS=Pedobacter glucosidilyticus OX=1122941 GN=tg t PE=3 SV=1
MKFKLAAQDPLSKARAGEITTDHGTIQTPIFMPVGTAGTVKAVHQRELKDDIKAQIILGNTYHLYLRPGLDVIEKAGGIHKFNGWDLPILTDSGGYQVYSLTEVRKIREEGVTFKSHIDGSKHLFTPENVMDIQRTIGADIIMAFDECTPYPCDYTYARKSVDMTHRWLKRCIDRFDTTKPKYGYSQTLFPIVQGSVYKDLRRKSAEFIAEQNREGNAIGGLSVGEPAEEMYGMTEVVCEILPQDKPRYLMGVGTPINILENIALGIDMFDCVMPTRNARNGMLFTRHGFINIKNEKWKDDFSPIDPDSDLFSDQFYTKAYLRHLIHSKEILGAQIATLHNLHFYLWLVKEAREKIIAGEFYDWKNKMVKALAQRL

SEQ ID NO: 58881 - protein, 376 aa, Pedobacter hartonius
  misc_feature (1)..(376): tr|A0A1H3WXI5|A0A1H3WXI5_9SPHI Queuine tRNA-ribosyltran sferase OS=Pedobacter hartonius OX=425514 GN=tgt PE=3 S V=1
MKFTLQASDTQSKARAGVVTTAHGDIQTPIFMPVGTAGTVKAVHQRELKNDIDAKIILGNTYHLYLRPGLDIIEGAGGLHQFIGWDRPILTDSGGYQVYSLSKVNKIKEEGVTFRSHIDGSKHLFSPEYAMDIQRTIGADIIMAFDECTPYPCDYKYAANSINMTHRWLKRCCNRFDTTEPKYGFDQTLFPIVQGSVYKDLRIKSAEFIASMDREGNAIGGLSVGEPAEEMYAMTEVVCNVLPVEKPRYLMGVGTPINILENIALGIDMFDCVMPTRNARNGMLFTRNGIINIGNKKWADDFSPIDAESDLYADQVYSKAYLRHLMHSKEMLGAQIATLHNLHFYLWLVKEAREKIISGEFYAWKNKMVTILGNKL

SEQ ID NO: 58882 - protein, 376 aa, Pedobacter heparinus
  misc_feature (1)..(376): tr|C6XT83|C6XT83_PEDHD Queuine tRNA-ribosyltransferase OS=Pedobacter heparinus (strain ATCC 13125 / DSM 2366 / CIP 104194 / JCM 7457 / NBRC 12017 / NCIMB 9290 / NRRL B-14731 / HIM 762-3) OX=485917 GN=tgt PE=3 SV=1
MKFNLAAKDIHSKARAGTITTDHGEIQTPIFMPVGTAGTVKSINQQQLKNDIDAKIILGNTYHLYLRPGLDILERAGGLHQFIGWDRPILTDSGGYQVYSLSKVRKIKEEGVTFRSHIDGSKHLFTPEYAMDIQRTIGADIIMAFDECTPYPCDYKYAANSINMTHRWLKRCCTRFDTTTPKYGFDQTLFPIVQGSVYKDLRVKSAEFIAAMGREGNAIGGLSVGEPAEEMYAMTEVVCDILPYEKPRYLMGVGTPINILENIALGVDMFDCVMPTRNARNGMLFTKNGVINISNKKWADDFSPIEAESDLVADQVYSKAYLRHLMHSKEMLGAQIATLHNLHFYLWLVKTAREKIMSGEFYAWKNKMVTILGNKL

SEQ ID NO: 58883 - protein, 376 aa, Pedobacter insulae
  misc_feature (1)..(376): tr|A0A1I2UGA0|A0A1I2UGA0_9SPHI Queuine tRNA-ribosyltran sferase OS=Pedobacter insulae OX=414048 GN=tgt PE=3 SV= 1
MKFNLQANDPQSKARAGTITTAHGDIKTPIFMPVGTAGTVKAVHQRELKEDIKAQIILGNTYHLYLRPGLDIIEPAGGLHKFIGWDKPILTDSGGYQVYSLSKVRKIKEEGVTFRSHIDGSKHLFTPEYAMDIQRTIGADIIMAFDECTPYPCDYKYAANSINMTHRWLKRCCHRFDTTNPKYGFEQTLFPIVQGSVYKDLRIKSAEFIASMDREGNAIGGLSVGEPAEEMYAMTEVVCNVLPAEKPRYLMGVGTPVNILENIALGIDMFDCVMPTRNARNGMLFTKNGIINITNKKWENDFSPIDADSGLYADQVYSKAYLRHLMHSKEILGAQIATLHNLHFYLWLVNEAREKIIAGEFYAWKNKMVGILGNKL

SEQ ID NO: 58884 - protein, 376 aa, Pedobacter jejuensis
  misc_feature (1)..(376): tr|A0A3N0BZ78|A0A3N0BZ78_9SPHI Queuine tRNA-ribosyltran sferase OS=Pedobacter jejuensis OX=1268550 GN=tgt PE=3 SV=1
MKFTLQAKDPLSKARAGTVTTAHGEIQTPIFMPVGTAGTVKAVHQRELEQDINAQIILGNTYHLYLRPGLDTLEKAGGLHKFIGWDRPILTDSGGYQVYSLSKVRKIKEEGVTFNSHIDGSKHLFTPEYAMDIQRTIGADIIMAFDECTPYPCDYKYAAESIKMTHRWLKRCCTRFDTTQPKYGFDQTLFPIVQGSVYKDLRVKSAEFIASMDREGNAIGGLSVGEPAEEMYAMTEVVCDILPYEKPRYLMGVGTPINILENIALGIDMFDCVMPTRNARNGMLFTKNGIINIRNKKWENDFSPIEPDSDLHVDLVTSKAYLRHLVHSKEMLGAQIATLHNLHFYLWLVKQAREKIISGEFYEWKNQMVKVLGNKL

SEQ ID NO: 58885 - protein, 376 aa, Pedobacter kyonggii
  misc_feature (1)..(376): tr|A0A4Q9H8N0|A0A4Q9H8N0_9SPHI Queuine tRNA-ribosyltran sferase OS=Pedobacter kyonggii OX=1926871 GN=tgt PE=3 S V=1
MKFSLQANDPLSKARAGTVTTAHGEIQTPIFMPVGTAGTVKAVHQRELKEDIDAKIILGNTYHLYLRPGLDILEKAGGLHQFIGWDRPILTDSGGYQVYSLSKVRKIKEEGVTFHSHIDGSKHLFTPEYAMDIQRTIGADIIMAFDECTPYPCDYTYAAQSIKMTHRWLKRCCTRFDSTEPKYGFDQTLFPIVQGSVYKDLRIKSAEFIASMNREGNAIGGLSVGEPAEEMYAMTEVVCNILPEEKPRYLMGVGTPINILENIALGIDMFDCVMPTRNARNGMLFTRNGIINIRNKKWENDFSPLDAESDLHADLVTSKAYLRHLVHSKEMLGAQIATLHNLHFYLWLVKQAREKIIAGEFYEWKNKMVRILGNKL

SEQ ID NO: 58886 - protein, 376 aa, Pedobacter kyungheensis
  misc_feature (1)..(376): tr|A0A0C1FEP0|A0A0C1FEP0_9SPHI Queuine tRNA-ribosyltran sferase OS=Pedobacter kyungheensis OX=1069985 GN=tgt PE =3 SV=1
MKFSLQANDPLSKARAGTVTTAHGEIQTPIFMPVGTAGTVKAVHQRELKDDIDAKIILGNTYHLYLRPGLDILEKAGGLHKFIGWDRPILTDSGGYQVYSLSKVRKIKEEGVTFRSHIDGSKHLFTPEYAMDIQRTIGADIIMAFDECTPYPCDYTYAANSIKMTHRWLERCCTHFDNTQPKYGFDQTLFPIVQGSVYKDLRIKSAEFIASMNREGNAIGGLSVGEPAEEMYAMTEVVCNILPADKPRYLMGVGTPINILENIALGIDMFDCVMPTRNARNGMLFTRNGIINIRNKKWENDFSPLDAESDLHADQVTTKAYLRHLVHSNEMLGAQIATLHNLHFYLWLVKQAREKIIAGEFYEWKNKMVKVLGNKL

SEQ ID NO: 58887 - protein, 376 aa, Pedobacter lusitanus
  misc_feature (1)..(376): tr|A0A0D0GL57|A0A0D0GL57_9SPHI Queuine tRNA-ribosyltran sferase OS=Pedobacter lusitanus OX=1503925 GN=tgt PE=3 SV=1
MKFTLQANDPLSKARAGTVTTAHGDIQTPIFMPVGTAGTVKAVHQRELKEDIEAQIILGNTYHLYLRPGLDVLEGAGGLHKFIGWDRPILTDSGGYQVYSLSKVNKIKEEGVTFRSHIDGSKHLFSPEYAMDIQRTIGADIIMAFDECTPYPCDYKYAANSINMTHRWLRRCCARFDSTEPKYGFDQTLFPIVQGSVYKDLRMKSAEFIASMDREGNAIGGLSVGEPAEEMYGMTEVVCDILPADKPRYLMGVGTPINILENIALGVDMFDCVMPTRNARNGMLFTRNGIINIGNKKWADDFSPIDAESDLYADQVYSKAYLRHLMHSKEMLGAQIATLHNLHFYLWLVKEAREKIISGEFYAWKNKMVTILGNKL

SEQ ID NO: 58888 - protein, 376 aa, Pedobacter luteus
  misc_feature (1)..(376): tr|A0A1T5AVY9|A0A1T5AVY9_9SPHI Queuine tRNA-ribosyltran sferase OS=Pedobacter luteus OX=572036 GN=tgt PE=3 SV=1
MKFKLEVTDSHTKARAGEITTDHGVIQTPIFMPVGTAGSVKAVHQRELENDIKAQIILGNTYHLYLRPGLSTLEMAGGLHKFNGWEKPILTDSGGYQVYSLSGVRKIKEEGVTFRSHIDGSKHLFTPEGVMDTQRIIGADIIMAFDECTPYPCEYGYARRSMEMTHRWLKRCCDHFDQTQPKYGYSQTLFPIVQGSVYKDLRKQSAEMIASFEREGNAIGGLSVGEPAEDMYEMTEIVCDILPSDKPRYLMGVGTPVNILENIALGIDMFDCVMPTRNARNGMLFTKNGIINIKNERWKNDFSPIEEDSDLFADRNYSKAYLRHLAHSNEILGSQIATLHNLHFYIWLVSEARAKIIEGTFNEWKNKMVKQVAQRL

SEQ ID NO: 58889 - protein, 376 aa, Pedobacter metabolipauper
  misc_feature (1)..(376): tr|A0A4R6SRN5|A0A4R6SRN5_9SPHI Queuine tRNA-ribosyltran sferase OS=Pedobacter metabolipauper OX=425513 GN=tgt P E=3 SV=1
MKFSLQAKDTHSKARAGTVTTDHGEIQTPIFMPVGTAGTVKAVHQRELKNDIDAKIILGNTYHLYLRPGLDIIEKAGGLHQFIGWDRPILTDSGGYQVYSLSKVRKIKEEGVTFRSHIDGSKHLFTPEYAMDIQRTIGADIIMAFDECTPYPCDYKYAASSINMTHRWLKRCCNRFDTTEPKYGFNQTLFPIVQGSVYKDLRVKSAEFIASMDREGNAIGGLSVGEPAEEMYGMTEVVCDILPYEKPRYLMGVGTPINILENIALGVDMFDCVMPTRNARNGMLFTKNGIINIGNKKWENDFSPIEPDSDLYADQVYSKAYLRHLMHSKEMLGAQIATLHNLHFYIWLVKQAREKIISGEFYAWKNKMVTILGNKL

SEQ ID NO: 58890 - protein, 376 aa, Pedobacter nutrimenti
  misc_feature (1)..(376): tr|A0A318U7W5|A0A318U7W5_9SPHI Queuine tRNA-ribosyltran sferase OS=Pedobacter nutrimenti OX=1241337 GN=tgt PE=3 SV=1
MKFTLEAKDTQSKARAGTVTTAHGEIQTPIFMPVGTAGTVKAVHQRELKNDIDAKIILGNTYHLYLRPGLDTLERAGGLHQFIGWDRPILTDSGGYQVYSLSKVRKIKEEGVTFRSHIDGSKHLFTPEYAMDIQRTIGADIIMAFDECTPYPCDYKYAAASINMTHRWLKRCCTRFDTTEPKYGFDQTLFPIVQGSVYKDLRIKSAEFIASMEREGNAIGGLSVGEPAEEMYAMTEVVCDILPSDKPRYLMGVGTPVNILENIALGVDMFDCVMPTRNARNGMLFTKNGIINIGNKKWANDFSPIEADSDLFADKVYTKAYLRHLMHSKEILGAQIATLHNLHFYLWLVKQAREKIVSGEFTAWKNKMVTILGNKL

SEQ ID NO: 58891 - protein, 376 aa, Pedobacter nyackensis
  misc_feature (1)..(376): tr|A0A1W2AEH6|A0A1W2AEH6_9SPHI Queuine tRNA-ribosyltran sferase OS=Pedobacter nyackensis OX=475255 GN=tgt PE=3 SV=1
MKFNLQAKDIHSKARAGTITTDHGDIQTPIFMPVGTAGTVKSINQQQLKNDIDAKIILGNTYHLYLRPGLDIIEGGGGLHKFIGWDRPILTDSGGFQVYSLSKVRKIKEEGVTFHSHIDGSKHLFTPEYAMDIQRTIGADIIMAFDECTPYPCDYKYAANSINMTHRWLKRCCTRFDTTEPKYGFNQTLFPIVQGSVYKDLRKKSAEFIAAMDREGNAIGGLSVGEPAEEMYGMTEVVCDILPEEKPRYLMGVGTPINILENIALGIDMFDCVMPTRNARNGMLFTKNGIINIGNKKWADDFSPIEADSDLLADQVYSKAYLRHLMHSKEMLGAQIATLHNLHFYLWLVNTAREKIISGEFYAWKNKMVTILGNKL

SEQ ID NO: 58892 - protein, 376 aa, Pedobacter psychrophilus
  misc_feature (1)..(376): tr|A0A179DMG8|A0A179DMG8_9SPHI Queuine tRNA-ribosyltran sferase OS=Pedobacter psychrophilus OX=1826909 GN=tgt P E=3 SV=1
MEFKLAKKDPHSKARAGEITTDHGKIQTPIFMPVGTAATVKAVHQRELAEDIKAQIILGNTYHLYLRPGLETIKLAGGLHKFNGWDKPILTDSGGYQVYSLTEVRKIKEEGVTFKSHIDGSKHLFTPENVMDIQRVIGADIIMAFDECTPYPCDYHYARRSIDMTHRWLKRCIKRFDETVPHYGYSQTLFPIVQGSVYKDLRIKSAEFIAAQNQQGNAIGGLSVGEPAEEMYAMTEVVCNILPEEKPRYLMGVGTPINLLENIALGIDMFDCVMPTRNGRNGMLFTRNGIINIKNEKWKNDFSPIDAESDLFSDLNYSKAYLRHLIHSKEILGAQIASLHNLHFYVWLVGQAREKIINGDFYDWKNKMVQVLGVKL

SEQ ID NO: 58893 - protein, 376 aa, Pedobacter psychrotolerans
  misc_feature (1)..(376): tr|A0A4R2H4X3|A0A4R2H4X3_9SPHI Queuine tRNA-ribosyltran sferase OS=Pedobacter psychrotolerans OX=1843235 GN=tgt PE=3 SV=1
MKFTLQANDPLSKARAGTVTTAHGEIQTPIFMPVGTAGTVKAVHQRELKDDIDAKIILGNTYHLYLRPGLDILETAGGLHKFIGWDRPILTDSGGYQVYSLSKVRKIKEEGVTFHSHIDGSKHLFTPEYAMDIQRTIGADIIMAFDECTPYPCDYTYASQSIKMTHRWLKRCCTHFDNTEPKYGFDQTLFPIVQGSVYKDLRIKSAEFIASMNREGNAIGGLSVGEPAEEMYAMTEVVCDILPYEKPRYLMGVGTPINILENIALGVDMFDCVMPTRNARNGMLFTRNGIINIRNKKWENDFSPLDAESDLHADLVTSKAYLRHLVHSKEMLGAQIATLHNLHFYLWLVKQAREKIISGEFYDWKNKMVKVLGQKL

SEQ ID NO: 58894 - protein, 376 aa, Pedobacter rhizosphaerae
  misc_feature (1)..(376): tr|A0A1H9JTY3|A0A1H9JTY3_9SPHI Queuine tRNA-ribosyltran sferase OS=Pedobacter rhizosphaerae OX=390241 GN=tgt PE =3 SV=1
MKFNLQANDPLSKARAGTITTAHGEIQTPIFMPVGTAGTVKAVHQRELKQDIDAQIILGNTYHLYLRPGLETLEQAGGLHQFIGWDRPILTDSGGYQVYSLSKVRKIKEEGVTFNSHIDGSKHLFTPEYAMDIQRTIGADIIMAFDECTPYPCDYTYAAESVKMTHRWLKRCCTHFDNTEPKYGFDQTLFPIVQGSVYKDLRIKSAEFIASMGREGNAIGGLSVGEPAEEMYAMTEVVCDILPSDKPRYLMGVGTPVNILENIALGVDMFDCVMPTRNARNGMLFTRNGIINIRNKKWENDFSALDAESDLHADQVTSKAYLRHLVHSKEMLGAQIATLHNLHFYLWLVKQAREKILTGEFYEWKNKMVKILGNKL

SEQ ID NO: 58895 - protein, 376 aa, Pedobacter ruber
  misc_feature (1)..(376): tr|A0A1G9QK02|A0A1G9QK02_9SPHI Queuine tRNA-ribosyltran sferase OS=Pedobacter ruber OX=990371 GN=tgt PE=3 SV=1
MKFKLEAEDKNSKARAGEITTDHGVIKTPIFMPVGTAGSVKAVHQHELSNDIKAQIILGNTYHLYLRPGLETLQLAGGLHKFNGWNGPLLTDSGGYQVYSLSGVRKIKEEGVTFRSHIDGSKHLFTPESVMDTQRIIGADIIMAFDECTPYPCEYGYARRSMEMTHRWLKRCCERFDTTEPIYGFDQTLFPIIQGSVYKDLRKQSAEMIASFEREGNAIGGLSVGEPAEEMYEMTEIVCDILPKDKPRYLMGVGTPINLLENIALGIDMFDCVMPTRNARNGMLFTKNGIINIRNERWKNDFSPIEEDSDLFADRNYTKAYLRHLAHSKEILGAQIATLHNLNFYLWLVNEAREKIISGEFTEWKNKMVIQLAQRL

SEQ ID NO: 58896 - protein, 376 aa, Pedobacter soli
  misc_feature (1)..(376): tr|A0A1G6YYB2|A0A1G6YYB2_9SPHI Queuine tRNA-ribosyltran sferase OS=Pedobacter soli OX=390242 GN=tgt PE=3 SV=1
MKFSLQANDPLSKARAGTVTTAHGEIQTPIFMPVGTAGTVKAVHQRELKDDIDAKIILGNTYHLYLRPGLDILEKAGGLHKFIGWDRPILTDSGGYQVYSLSQVRKIKEEGVTFRSHIDGSKHLFTPEYAMDIQRTIGADIIMAFDECTPYPCDYTYAANSIKMTHRWLERCCTHFDNTQPKYGFDQTLFPIVQGSVYKDLRIKSAEFIASMNREGNAIGGLSVGEPAEEMYAMTEVVCNILPADKPRYLMGVGTPINILENIALGIDMFDCVMPTRNARNGMLFTRNGIINIRNKKWENDFSPLDAESDLHADQVTTKAYLRHLVHSNEMLGAQIATLHNLHFYLWLVKQAREKIIAGEFYEWKNKMVKVLGNKL

SEQ ID NO: 58897 - protein, 376 aa, Pedobacter sp.; identical to SEQ ID NO: 58868
  misc_feature (1)..(376): tr|A0A4R2YNJ1|A0A4R2YNJ1_9SPHI Queuine tRNA-ribosyltran sferase OS=Pedobacter sp. CF074 OX=2135714 GN=tgt PE=3 SV=1

SEQ ID NO: 58898 - protein, 376 aa, Pedobacter sp.
  misc_feature (1)..(376): tr|A6EGW3|A6EGW3_9SPHI Queuine tRNA-ribosyltransferase OS=Pedobacter sp. BAL39 OX=391596 GN=tgt PE=3 SV=1
MKFTLAAKDTHSKARAGVVTTDHGDIQTPIFMPVGTAGTVKAVHQRELKEDIDAKIILGNTYHLYLRPGLDIIEQGGGLHKFIGWDRPILTDSGGYQVYSLSKVRKIKEEGVTFRSHIDGSKHLFTPEYVMDIQRTIGADIIMAFDECTPYPCDYKYAANSINMTHRWLKRCCARFDSTTPKYGFDQTLFPIVQGSVYKDLRMKSAEFIASMDREGNAIGGLSVGEPAEEMYAMTEVVCNILPDEKPRYLMGVGTPINILENIALGIDMFDCVMPTRNARNGMLFTRNGIINIGNKKWENDFSPIDADSDLHADQVYSKAYLRHLMHSKEMLGAQIATLHNLHFYLWLVKTAREKIISGEFYAWKNKMVTILGNKL

SEQ ID NO: 58899 - protein, 376 aa, Pedobacter steynii
  misc_feature (1)..(376): tr|A0A1D7QPH0|A0A1D7QPH0_9SPHI Queuine tRNA-ribosyltran sferase OS=Pedobacter steynii OX=430522 GN=tgt PE=3 SV= 1
MKFTLQANDTHSKARAGTVTTDHGEIQTPIFMPVGTAGTVKAVHQRELKDDIDAKIILGNTYHLYLRPGLDIIEQGGGLHKFIGWDRPILTDSGGYQVYSLSKVRKIKEEGVTFRSHIDGSKHLFTPEYAMDIQRTIGADIIMAFDECTPYPCDYKYAANSINMTHRWLKRCCTRFDTTEPKYGFNQTLFPIVQGSVYKDLRVKSAEFIAGMGREGNAIGGLSVGEPAEEMYAMTEVVCDILPYDKPRYLMGVGTPINILENIALGVDMFDCVMPTRNARNGMLFTRNGIINIGNKKWENDFSPIDAESDLHADQVYSKAYLRHLMHSKEMLGAQIATLHNLHFYLWLVRTAREKIISGEFYAWKNKMVTILGNKL

SEQ ID NO: 58900 - protein, 405 aa, Pedobacter steynii
  misc_feature (1)..(405): tr|A0A1G9S196|A0A1G9S196_9SPHI Queuine tRNA-ribosyltran sferase OS=Pedobacter steynii OX=430522 GN=tgt PE=3 SV= 1
MFLFVDKKFNPFIALFLLLLADFSGAYRFMKFTLQANDTHSKARAGTVTTDHGDIQTPIFMPVGTAGTVKAVHQRELKNDIDAKIILGNTYHLYLRPGLDIIEGAGGLHKFIGWDRPILTDSGGYQVYSLSKVRKIKEEGVTFRSHIDGSKHLFTPEYAMDIQRTIGADIIMAFDECTPYPCDYKYAANSINMTHRWLKRCCNRFDTTEPKYGFNQTLFPIVQGSVYKDLRKKSAEFIAGMNREGNAIGGLSVGEPAEEMYGMTEVVCDILPYDKPRYLMGVGTPINILENIALGVDMFDCVMPTRNARNGMLFTRNGIINIGNKKWADDFSPIDAESDLHADQVYSKAYLRHLMHSKEMLGAQIATLHNLHFYLWLVKTAREKIISGEFYAWKNKMVTILGNKL

SEQ ID NO: 58901 - protein, 376 aa, Pedobacter suwonensis
  misc_feature (1)..(376): tr|A0A1I0U7C9|A0A1I0U7C9_9SPHI Queuine tRNA-ribosyltran sferase OS=Pedobacter suwonensis OX=332999 GN=tgt PE=3 SV=1
MKFSLQANDPLSKARAGTVTTAHGEIQTPIFMPVGTAGTVKAVHQRELKNDIDAKIILGNTYHLYLRPGLDILEKAGGLHKFIGWDRPILTDSGGYQVYSLSQVRKIKEEGVTFRSHIDGSKHLFTPEYAMDIQRTIGADIIMAFDECTPYPCDYTYAAKSIKMTHRWLERCCTHFDNTQPKYGFDQTLFPIVQGSVYKDLRIKSAEFIAGMNREGNAIGGLSVGEPAEEMYAMTEVVCDILPAEKPRYLMGVGTPINILENIALGIDMFDCVMPTRNARNGMLFTRNGIINIRNKKWENDFSPLDAESDLHADQVTTKAYLRHLVHSNEMLGAQIATLHNLHFYLWLVKHAREKIIAGEFYEWKNKMVKVLGNKL

SEQ ID NO: 58902 - protein, 376 aa, Pedobacter terrae
  misc_feature (1)..(376): tr|A0A561GCV5|A0A561GCV5_9SPHI Queuine tRNA-ribosyltran sferase OS=Pedobacter terrae OX=405671 GN=tgt PE=3 SV=1
MKFSLQANDPLSKARAGTVTTAHGEIQTPIFMPVGTAGTVKAVHQRELKDDIDAKIILGNTYHLYLRPGLETLEQAGGLHKFIGWDRPILTDSGGYQVYSLSKVRKIKEEGVTFHSHIDGSKHLFTPEYAMDIQRTIGADIIMAFDECTPYPCDYTYAAQSIKMTHRWLKRCCERFDTTEPKYGFDQTLFPIVQGSVYKDLRIKSAEFIASMGREGNAIGGLSVGEPAEEMYAMTEVVCDILPVEKPRYLMGVGTPINILENIALGVDMFDCVMPTRNARNGMLFTRNGIINIRNKKWENDFSPLDAESDLHADLVTSKAYLRHLVHSKEMLGAQIATLHNLHFYLWLVKQAREKIIAGEFYEWKNKMVKVLGNKL

SEQ ID NO: 58903 - protein, 376 aa, Pedobacter terrae
  misc_feature (1)..(376): tr|A0A1G8DY97|A0A1G8DY97_9SPHI Queuine tRNA-ribosyltran sferase OS=Pedobacter terrae OX=405671 GN=tgt PE=3 SV=1
MKFSLQANDPLSKARAGTVTTAHGEIQTPIFMPVGTAGTVKAVHQRELKDDIDAKIILGNTYHLYLRPGLDILEKAGGLHKFIGWDRPILTDSGGYQVYSLSKVRKIKEEGVTFRSHIDGSKHLFTPEYAMDIQRTIGADIIMAFDECTPYPCDYTYAAKSIKMTHRWLERCCTHFDNTQPKYGFDQTLFPIVQGSVYKDLRIKSAEFIASMGREGNAIGGLSVGEPAEEMYAMTEVVCNILPAEKPRYLMGVGTPINILENIALGIDMFDCVMPTRNARNGMLFTRNGIINIRNKKWENDFSALDAESDLHADQVTTKAYLRHLVHSNEMLGAQIATLHNLHFYLWLVKQAREKIIAGEFYEWKNKMVKVLGNKL

SEQ ID NO: 58904 - protein, 376 aa, Pedobacter tournemirensis
  misc_feature (1)..(376): tr|A0A543H1G3|A0A543H1G3_9SPHI Queuine tRNA-ribosyltran sferase OS=Pedobacter tournemirensis OX=699437 GN=tgt P E=3 SV=1
MKFRLEVTDKLSKARAGEISTDHGTIKTPIFMPVGTAGSVKAVHQRELKEDIEAQIILGNTYHLYLRPGLNTLEQAGGLHKFNGWDKPILTDSGGYQVYSLTEVRKIKEEGVTFRSHIDGSKHLFTPEAVMDIQRTIGADIIMAFDECTPYPCEYNYASKSVDMTHRWLKRCCERFDSTEPKYGYSQTLFPIVQGSVYKDLRVKSAEVIASFEREGNAIGGLSVGEPAEEMYEMTDLVCNILPKDKPRYLMGVGTPVNILENIALGVDMFDCVMPTRNGRNGMLFTSEGVINIRNEKWKNDFSPIGPGSDLFADITYSKAYLRHLITSKEILGAQIATLHNLHFYLWLVTQAREKIISGEFYEWKNKMIKKLSQRL

SEQ ID NO: 58905 - protein, 376 aa, Pedobacter tournemirensis
  misc_feature (1)..(376): tr|A0A4V1KIL3|A0A4V1KIL3_9SPHI Queuine tRNA-ribosyltran sferase OS=Pedobacter tournemirensis OX=699437 GN=tgt P E=3 SV=1
MKFRLEVTDKLSKARAGEISTDHGTIKTPIFMPVGTAGSVKAVHQRELKEDIEAQIILGNTYHLYLRPGLDTLEQAGGLHKFNGWDKPILTDSGGYQVYSLTEVRKIKEEGVTFRSHIDGSKHLFTPEAVMDIQRTIGADIIMAFDECTPYPCEYNYASKSVDMTHRWLKRCCERFDSTEPKYGYSQTLFPIVQGSVYKDLRVKSAEVIASFEREGNAIGGLSVGEPAEEMYEMTDLVCNILPKDKPRYLMGVGTPVNILENIALGVDMFDCVMPTRNGRNGMLFTSEGVINIRNEKWKNDFSPIDPGSDLFADITYTKAYLRHLITSKEILGAQIATLHNLHFYLWLVTQAREKIISGEFYEWKNKMIKKLSQRL

SEQ ID NO: 58906 - protein, 376 aa, Pedobacter westerhofensis
  misc_feature (1)..(376): tr|A0A521EX57|A0A521EX57_9SPHI Queuine tRNA-ribosyltran sferase OS=Pedobacter westerhofensis OX=425512 GN=tgt P E=3 SV=1
MKFTLQASDTQSKARAGVVTTAHGDIQTPIFMPVGTAGTVKAVHQRELKEDIDAKIILGNTYHLYLRPGLGVIEGAGGLHKFIGWDRPILTDSGGYQVYSLSKVNKIKEEGVTFRSHIDGSKHLFSPEYAMDIQRTIGADIIMAFDECTPYPCDYKYAANSINMTHRWLKRCCKRFDTTEPKYGFDQTLFPIVQGSVYKDLRMKSAEFIASMDREGNAIGGLSVGEPAEEMYAMTEVVCNILPVEKPRYLMGVGTPINILENIALGIDMFDCVMPTRNARNGMLFTRNGIINIGNKKWADDFSPIDEESDLYADQVYSKAYLRHLMHSKEMLGAQIATLHNLHFYLWLVKEAREKIISGEFYAWKNKMVTILGNKL

SEQ ID NO: 58907 - protein, 376 aa, Pedobacter xixiisoli
  misc_feature (1)..(376): tr|A0A285ZZ61|A0A285ZZ61_9SPHI Queuine tRNA-ribosyltran sferase OS=Pedobacter xixiisoli OX=1476464 GN=tgt PE=3 SV=1
MKFDLQAKDPNSKARAGVISTAHGDIQTPIFMPVGTAGTVKAVHQKELKEDIKAQIILGNTYHLYLRPGLDILEPAGGLHKFIGWDRPILTDSGGYQVYSLSKVRKIKEEGVTFRSHIDGSKHLFTPEYAMDIQRTIGADIIMAFDECTPYPCDYKYAANSINMTHRWLKRCCERFDTTEPKYGYDQTLFPIVQGSVYKDLRVKSAEFIASMGREGNAIGGLSVGEPAEEMYAMTEVVCDILPYEKPRYLMGVGTPVNILENIALGVDMFDCVMPTRNARNGMLFTRNGMINITNKKWANDFSPIDADSDLLADQVYSKAYLRHLMHSKEILGSQIATLHNLHFYLWLVNEAREKIIAGEFYEWKNKMVTILGTKL

SEQ ID NO: 58908 - protein, 376 aa, Pedobacter yonginense
  misc_feature (1)..(376): tr|A0A317EHC2|A0A317EHC2_9SPHI Queuine tRNA-ribosyltran sferase OS=Pedobacter yonginense OX=651869 GN=tgt PE=3 SV=1
MKFSLQANDPLSKARAGTITTAHGEIQTPIFMPVGTAGTVKAVHQRELKEDIDAKIILGNTYHLYLRPGLDILERAGGLHKFIGWDRPILTDSGGYQVYSLSKVRKIKEEGVTFHSHIDGSKHLFTPEYAMDIQRTIGADIIMAFDECTPYPCDYTYAAQSIKMTHRWLKRCCTRFDTTEPKYGFDQTLFPIVQGSVYKDLRMKSAEFIASMNREGNAIGGLSVGEPAEEMYAMTEVVCDILPYEKPRYLMGVGTPINILENIALGIDMFDCVMPTRNARNGMLFTRNGIINIRNKKWEDDFSPLDAESDLHVDLVTSKAYLRHLVHSNEMLGAQIATLHNLHFYLWLVKQAREKILAGEFYEWKNKMVKVLGNKL

SEQ ID NO: 58909 - protein, 376 aa, Pedobacter yulinensis
  misc_feature (1)..(376): tr|A0A2T3HIF6|A0A2T3HIF6_9SPHI Queuine tRNA-ribosyltran sferase OS=Pedobacter yulinensis OX=2126353 GN=tgt PE=3 SV=1
MKFDLQAKDPLSKARAGVVTTDHGAIQTPIFMPVGTAGTVKAVHQRELKEDISAQIILGNTYHLYLRPGIDTLEQAGGLHQFIGWDRPILTDSGGYQVYSLSNVRKIKEEGVTFNSHIDGSRHLFTPEYAMDIQRSIGADIIMAFDECTPYPCDYKYAANSLEMTHRWLRRCCTHFDNTEPKYGFNQTLFPIVQGSVYKDLRVRSAEFIAGMEREGNAIGGLSVGEPAEEMYAMTEVVCDILPADRPRYLMGVGTPVNILENIALGVDMFDCVMPTRNARNGMLFTRHGIINIRNKKWENDFSPIDADSDLLVDRMHSKAYLRHLIHSKEMLGAQIATLHNLHFYLWLVTEARQQIVAGTFYDWKNKMVQILGNKL

SEQ ID NO: 58910 - protein, 381 aa, Pedosphaera parvula
  misc_feature (1)..(381): tr|B9XDJ1|B9XDJ1_PEDPL Queuine tRNA-ribosyltransferase OS=Pedosphaera parvula (strain Ellin514) OX=320771 GN=t gt PE=3 SV=1
MYELLKTDPHSRARLGRLITTRGTINTPTFMPVGTQGSVKALDPRELLDMGTQIILGNTYHLNIRPGLDIITAAGDLHKFINWPYPILTDSGGFQVFSLAKIRKVKPHGVEFRSHLDGSLLFLGPKEAMHIQKVLASDIAMVFDECPPHDSPIREMRAAVERTIRWAKECREQPRAHGQMVFGIVQGGSNAAMREECAKALVPMEFDGYAIGGVSVGEPEPEMMKAVEYTEPFLPATKARYAMGLGTPAQMVELVARGVDMFDCVLPTRVARNGTAFTRKGTISIKAGFNKSDFGPIEEGCDCYACKNFTRAYLRHLLNVNEILGLRMLSVHNSHMYLKVMEDIRASLAAGTFAEFRREFIATYVPSRKVLSAREETRGDK

SEQ ID NO: 58911 - protein, 383 aa, Pedosphaera sp.
  misc_feature (1)..(383): tr|A0A2A2RG76|A0A2A2RG76_9BACT Queuine tRNA-ribosyltran sferase OS=Pedosphaera sp. Tous-C6FEB OX=1982324 GN=tgt PE=3 SV=1
MFELLKTDSSSKARLGRLTTPHGVIETPVFMPVGTQASVKALDPRELVEMGTQIILGNTYHLSIRPGMDIIRAAGGLHGFMNWQLPILTDSGGFQVFSLAKIRKVREHGVEFRSHLDGSKLFLGPKEAMEIQRYLGSDIAMIFDECPPHDAPAKEQQLAVERTIRWAKECREQPRAAGQQVFGIVQGGSNPELREQCAKAITALDFDGYAIGGVSVGEPEPEMMKAVELAEPFLPANKARYAMGLGTPAQLVELVARGVDMFDCVLPTRVARGGTAFTRKGSFAIKGGAVKADFGPIEAGCDCFACQRFSRAYIRHLLNVNEILGLRLVSIHNSHLFLAVMADMRRHLAAGTFAEFRREFIANYVPSRKVLAGRSGDTLVSKE

SEQ ID NO: 58912 - protein, 377 aa, Pedosphaera sp.
  misc_feature (1)..(377): tr|A0A2G4I898|A0A2G4I898_9BACT Queuine tRNA-ribosyltran sferase OS=Pedosphaera sp. OX=2024890 GN=tgt PE=3 SV=1
MFELLKTDTSSKARLGRLTTAHGVIDTPVFMPVGTQGSVKALDPRELVEMGTQIILGNTYHLSIRPGMDIIRAAGGLHGFMNWPLPILTDSGGFQVFSLAKIRKVRENGVEFRSHLDGSKLFLGPKEAMEIQRYLGSDIAMIFDECPPHDAPAKDQLLAVERTIRWAKECRDQPRAQGQKVFGIVQGGSNPELRAHCAKAITALDFDGYAIGGVSVGEPEPEMMKAVELAEPFLPADKARYAMGLGTPAQLVELVARGVDMFDCVLPTRVARGGTAYTRKGSYAIKGGAVKADFGPIEDGCDCFACKRFSRAYIRHLLNVNEILGLRMVSVHNSHLFLAVMADIRRHLAAGTFAEFRREFIAGYVPSRKVLAARAGA

SEQ ID NO: 58913 - protein, 375 aa, Pelagibaca abyssi
  misc_feature (1)..(375): tr|A0A1P8UYI6|A0A1P8UYI6_9RHOB Queuine tRNA-ribosyltran sferase OS=Pelagibaca abyssi OX=1250539 GN=tgt PE=3 SV= 1
MSTASFSLTATDGAARTGVISTPRGEIRTPAFMPVGTAATVKAMLPENVRATGADILLGNTYHLMLRPTAERIARLGGLHRFMNWERPILTDSGGFQVMSLAGLRKLTEEGVSFKSHIDGSKHMLSPERSMEIQRLLGSDIVMAFDECPALPADRKRIEESMRLSMRWAQRSRDAFGDRPGHMLFGIMQGGLERDMREESAKALTAIGFDGYAVGGLAVGEGQEAMFSCLDYAPGFLPQDKPRYLMGVGKPDDIVGAVKRGIDMMDCVLPTRSGRTGQVFTRHGVVNIKNARHADDPRPLDENCSCPACTSYSRAYLHHVFRAQEMISGMLLSWHNLQYFQDIMAGMREAIAGGRFAEWEADFHAGRAEGDIPPL

SEQ ID NO: 58914 - protein, 375 aa, Pelagibaca sp.
  misc_feature (1)..(375): tr|A0A2D6B393|A0A2D6B393_9RHOB Queuine tRNA-ribosyltran sferase OS=Pelagibaca sp. OX=1979400 GN=tgt PE=3 SV=1
MSTTSFTLHATDGKARTGVISTPRGEIRTPAFMPVGTAATVKAMLPEQVRSTGADILLGNTYHLMLRPTAERIARLGGLHQFMNWDRPILTDSGGFQVMSLADLRKLTEEGVSFRSHIDGSKHMLTPERSMEIQRLLGSDIVMCFDECPALPADRKRLEESMRLSMRWAQRSRDAFGDRPGHMLFGIQQGGLEPDLREESAKALTEIGFDGYAVGGLAVGEGQEAMFGCLDHAPDTLPVDKPRYLMGVGKPDDIVGAVKRGIDMMDCVLPTRSGRTGQAFTRRGVVNIKNARHADDPRPLDEHCSCPACTGYSRAYLHHVFRSHEMISGMLLTWHNLQYFQDIMDGMRGAIAEGRFEAWEAAFHAGRAEGDIEPL

SEQ ID NO: 58915 - protein, 368 aa, Pelagibacter sp.
  misc_feature (1)..(368): tr|F2I198|F2I198_PELSM Queuine tRNA-ribosyltransferase OS=Pelagibacter sp. (strain IMCC9063) OX=1002672 GN=tgt PE=3 SV=1
MPCSFKLLNENSGARLGKIITSRGEIDTPAFMPVGTAATVKALLIDQVKGTGAQIILGNTYHLMLRPGIERISRVGGLHQFMNCDLPILTDSGGFQVMSLSKISKVVEDGVYFNSHVDGKKIFLSPEVSIQIQKGLNSDIVMIFDECPEYTSDKNRVKKSVDLSIEWAKRSKKEFGINPEKMLFGIVQGGVFNDLRKDSLKRLEEIGFDGYALGGLAVGEKQQEMFDVLDNIKEDLPRDKPHYLMGVGTPADILGAVKRGIDMFDCVLPTRSGRTGLAYTWEGKKNLKNAKYANDDSPLDPLVNCPASQKYSRSYLNHLVNSKEILASTLLSWHNIAFYQDLTRKIRESVANNDFQNFYNKHFDILNS

SEQ ID NO: 58916 - protein, 370 aa, Pelagibacter ubique
  misc_feature (1)..(370): tr|Q4FLZ2|Q4FLZ2_PELUB Queuine tRNA-ribosyltransferase OS=Pelagibacter ubique (strain HTCC1062) OX=335992 GN=t gt PE=3 SV=1
MALKNFKFNVIESNKFARVGVIETHRGNIQTPAFMPVGTQATVKACLIDDVIKTGSEIILSNTYHLMIRPGVDRIISAGGLHKFMNCKLPILTDSGGFQVMSLSKLNKVDREKGAIFNSHVDGKKFILSPEESIRVQKGLDSDIVMIMDECPKKTTDYKVINKSMELSIYWAERSKIAFGLNPHKALFGIIQGGLFKDLRTKSLNNLIKIGFDGYAIGGLAVGESQNEMFSVLDDLKNIMPDDKPRYLMGVGTPADILGAVKRGVDMFDCVMPTRSGRTGLAFTWNGRVNIKNNKYKNDNEPLDPNCSNLNLNKYSKNYINHLFNTNEILGSTLLTLHNINFYQELMSSIRENIKKGTFDKFHDEYIDKL

SEQ ID NO: 58917 - protein, 370 aa, Pelagibacteraceae bacterium
  misc_feature (1)..(370): tr|A0A0R2RIW1|A0A0R2RIW1_9PROT Queuine tRNA-ribosyltran sferase OS=Pelagibacteraceae bacterium BACL5 MAG-120705 -bin12 OX=1655603 GN=tgt PE=3 SV=1
MALKDFAFKLLKKDKSARLGIIETHRGNILTPAFMPVGTQATVKACTIDDIKKTGSQIILSNTYHLMIRPGVERIISAGGLHQFMNCDLPILTDSGGFQVMSLSKLNKIDREKGAIFNSHVDGKKFYLSPEESIRIQLGLNSDIVMIMDECPKKTTDYDVIKKSMDLSLYWAERSKKAFGINPQKALFGIIQGGLFKDLRISSLKGLENIGFDGYALGGLAVGETQQEMFDVLDNIKDYLPINKPHYLMGVGTPSDILGAVKRGIDMFDCVLPTRSGRTGLAFTWEGRINIKNNKYQTDNSPLDPNCNNLNLNKYSKNYLNHLFNTNEILASMLLTLHNINFYQELMSSIRDHIKNGTFNEFHDKYVAIL

SEQ ID NO: 58918 - protein, 373 aa, Pelagibacteraceae bacterium
  misc_feature (1)..(373): tr|A0A1Z9PWA4|A0A1Z9PWA4_9PROT Queuine tRNA-ribosyltran sferase OS=Pelagibacteraceae bacterium TMED237 OX=19868 15 GN=tgt PE=3 SV=1
MKFKITAECKKSAARTGELYTDHGILKTPFFMPVGTYATVKSQSSEEISSLPSSILLSNTYHLYLRPGIDILKNAQGLHNFMKWKGVILTDSGGYQIYSLENHRKINSEGVTFKSHYDGSIHEFTPEKIIDIQRIIGSDFMMVLDVCPSGEGTVKEWEKAVNLTTKWAYQSYEHYQSTKPIYSHSQSIIPIIQGGTNIELRQKSARELLDLNMNNYAIGGLAVGEPKKDMLSITSLMNNLIPQDKSRYLMGVGTPSDLIECVKRGVDMFDCVIPTRNARNAQLFTDTGKLNIRNACYKDDHSAIDINSKSVFSQKYTKAYLHHLFRMNEILGIRIATAHNLHFYINLMKTIREKIRENLFDDWSKKYLDVINS

SEQ ID NO: 58919 - protein, 358 aa, Pelagibacterales bacterium
  misc_feature (1)..(358): tr|A0A2F0AI75|A0A2F0AI75_9PROT Queuine tRNA-ribosyltran sferase OS=Pelagibacterales bacterium OX=2026776 GN=tgt PE=3 SV=1
MKFIIKSTFKKARAGILSTKYGEIETPVFMPVGTLGTVKGISKEILHKYNFDIILANTYHLMLRPGMDIIKKFGGLNKFMSWNKSILTDSGGFQIMSLGKNVKVDDEGVTFRSHLDGTSIRLNAEKSVEVQKYLDATITMTFDECVPHPYSYSDTEISLNRSSKWTKRSLNAYKKKRGYGIFAIVQGGMHKELRRKSTEELSTMDFDGYAVGGLAVGEGQELMSDITNYCTSNLPFDKPRYLMGVGYPSDILRAVKNGIDMFDCVLPTRSGRTGLAFTTNGMVKIKNAKYSKDNSPLDYDCSCNICTNYSKAYLHHLVKSSEILGSVFLTQHNLFYYKKIMKKIRKGIIEGNLDNLKL

SEQ ID NO: 58920 - protein, 376 aa, Pelagibacterales bacterium
  misc_feature (1)..(376): tr|A0A2E5MS98|A0A2E5MS98_9PROT Queuine tRNA-ribosyltran sferase OS=Pelagibacterales bacterium OX=2026776 GN=tgt PE=3 SV=1
MTISFNVKNTDGFARSGLLETAHGKIKTPVFMPVGTYGAVKGIQPDDLKYIGAEIILSNTYHLMERPGKDIIRDIGGLRKFMNWDGPILTDSGGFQVMSLQNMAKIDNDGVTFKSHIDGSLIRLTPKDSIEMQNALDSTITMVFDECTSYPVKKDLALYSMNLSMKWAKLCRDNFIDKNGYGLFGIVQGSTFNDLRQISSENLINIGFDGYAIGGLAVGEGHEVMINTLKSSINYLPINKPRYLMGVGYPKDIIEAVNLGVDMFDCVIPTRSGRTGKVFTKNGTLNIKNSRHKNDPRSIEEGCSCKICSNNISRAYLYHLFNTKEMLGATYLTIHNINHYIQLMSTLRKAINNNNFNEASKFLLNEYKKGDIEIYN

SEQ ID NO: 58921 - protein, 377 aa, Pelagibacterium halotolerans
  misc_feature (1)..(377): tr|G4R9Q6|G4R9Q6_PELHB Queuine tRNA-ribosyltransferase OS=Pelagibacterium halotolerans (strain DSM 22347 / JCM 15775 / CGMCC 1.7692 / B2) OX=1082931 GN=tgt PE=3 SV=1
MTENFQFTLSATDGMARRGQIDTPRGEIRTPAFMPVGTAGTVKAMYPEQVRETGADIVLGNTYHLMLRPGAERVARLGGLHEFMDWQRPILTDSGGFQVMSLAKLRKLDENGVTFKSHIDGSSHSLTPERSIEIQKLLDSDIIMQLDECVSLPAEHNELERAMELSIRWAERSKKAFDNAKGRALFGIVQGGDNAVLRARSASGLTDIGFDGYAVGGLAVGEPQEVMFRVLDETTPQLPSDKPRYLMGVGKPDDLLGAVGRGIDMFDCVHPTRAGRHGHAYTRFGVVNLKNARHKDDHRPLDEASPNPTARRFSRAYLHHLVRCEEMLGAMILSQINLSYYQELMAGMRNAIENATFVQYCAAVREGWTKGDLPALD

SEQ ID NO: 58922 - protein, 377 aa, Pelagibacterium luteolum
  misc_feature (1)..(377): tr|A0A1G7W054|A0A1G7W054_9RHIZ Queuine tRNA-ribosyltran sferase OS=Pelagibacterium luteolum OX=440168 GN=tgt PE =3 SV=1
MTQDFKFTLQATDGMARRGQIDTPRGEIRTPAFMPVGTAGTVKAMYPEQVRETGADIVLGNTYHLMLRPGAERVDRLGGLHEFMDWQRPILTDSGGFQVMSLAKLRKLDENGVTFKSHIDGSSHSLTPERSIEIQKLLDSDIIMQLDECVSLPAERDELNRAMELSIRWAERSKKAFDNAKGRALFGIVQGGDNPGLRARSAAGLIDIGFHGYAVGGLAVGEPQEVMFTVLNDITPQLPTEKPRYLMGVGKPDDLLGAVARGIDMFDCVHPTRAGRHGHAYTRFGVVNLKNARHKDDHRPLDEESPNPTARRFSRAYLHHLVRCEEMLGAMILSQINLSYYQELMAGMRNAIENTTFDQYSASVREAWAKGDLPALE

SEQ ID NO: 58923 - protein, 375 aa, Pelagibacterium sp.
  misc_feature (1)..(375): tr|A0A1E4E2M2|A0A1E4E2M2_9RHIZ Queuine tRNA-ribosyltran sferase OS=Pelagibacterium sp. SCN 63-126 OX=1660123 GN =tgt PE=3 SV=1
MKLVNFSLLATDGMARRGRIDTPRGEINTPAFMPVGTAGTVKAMYPEQVRETGADILLGNTYHLMLRPGAERVASLGGLHDFMDWQRPILTDSGGFQVMSLAKLRKLTEKGVTFKSHIDGSSYELTPERSIEIQTLLDSDIIMQLDECISLPAERKEMERAMELSIRWADRSKTAFNNQLNRALFGIVQGGDDAELRARSAAGLKSIGFDGYAVGGLAVGEPQEVMFRVLSEVTPELPQDRPRYLMGVGKPDDILGGIERGIDMFDCVHPTRAGRHGHAYTRFGVINLKNARHRDDHRPLDEASPNPNCRRWSRAYLHHLVKAEEILGAMVLSQINLAYYQELTSGARAAIEAGRMTDFAAETRAAWAAGDIAAL

SEQ ID NO: 58924 - protein, 379 aa, Pelagibacterium sp.
  misc_feature (1)..(379): tr|A0A2E7FU64|A0A2E7FU64_9RHIZ Queuine tRNA-ribosyltran sferase OS=Pelagibacterium sp. OX=1967288 GN=tgt PE=3 S V=1
MTENFQFTLSTTDGMARRGKMDTPRGEIRTPAFMPVGTAGTVKAMYPEQVRETGADIVLGNTYHLMLRPGAERVARLGGLHQFMDWQRPILTDSGGFQVMSLAKLRKLDENGVTFKSHIDGSSHSLTPERSIEIQKLLDSDIIMQLDECVSLPAEYAELERAVELSIRWAERSKKAFDNAKGRALFGIVQGGDNAELRARSAAGLIDIGFDGYAVGGLAVGEPQEVMFRVLDETTPQLPADKPRYLMGVGKPDDLLGAVGRGIDMFDCVHPTRAGRHGHAYTRFGVVNLKNARHKDDHRPLDEASPNPTARRFSRAYLHHLVRCEEMLGAMILSQINLSYYQELMAGMRNAIENATFVQYCAEVREGWAKGDLPALDQG

SEQ ID NO: 58925 - protein, 374 aa, Pelagibaculum spongiae
  misc_feature (1)..(374): tr|A0A2V1H1H0|A0A2V1H1H0_9GAMM Queuine tRNA-ribosyltran sferase OS=Pelagibaculum spongiae OX=2080658 GN=tgt PE= 3 SV=1
MKFELLKTDQGARRGRLTFDRGVVETPVFMPVGTYGTVKGLVKEELEEAGAKIILGNTFHLWLRPGTDIIKQHGGLHEFMNWPGPILTDSGGFQVFSLGKMRKITEEGVSFQSPVNGSKVFLNPEISMQVQKDLNSDVVMCFDECTPYPATWEEAKKSMELSLRWAKRSKDAFVEQQNPNALFGIVQGSMDKDLRQISADGLREIGFDGYAIGGLSVGEPKDEMMSTLSFTAPMLPEDKPRYLMGVGKPEDLVEGVRRGVDMFDCVMPTRNARNGHLFTSTGVVKLRNAVNKTDIGPLDETCTCYTCKNYSRAYLHHLDKCNEIAGARLNTIHNTHYYQTLMAGLRKAIEEGKLSDFVADFYEARGETVPPLDQ

SEQ ID NO: 58926 - protein, 376 aa, Pelagicola litoralis
  misc_feature (1)..(376): tr|A0A4U7MY18|A0A4U7MY18_9RHOB Queuine tRNA-ribosyltran sferase OS=Pelagicola litoralis OX=420403 GN=tgt PE=3 S V=1
MTSRFSFDLQATDGKARKGVISTPRGDIRTPAFMPVGTAATVKAMMPESVRATGADILLGNTYHLMLRPTAERIDRLGGLHKFMNWDRPILTDSGGFQVMSLAGLRKLTEKGVTFKSHIDGSRHELTPERSMEIQRLLGSDIVMCFDECPALPATDAEVSKSMQMSMRWAARSKDAFGDRPGHALFGIQQGGVTKDLRAESAALLRDIEFDGYAVGGLAVGEGQEAMFGVLDYAPDMLPEHKPRYLMGVGKPDDIVGAVARGIDMMDCVLPSRSGRTGQVFTRHGVVNIKNARHADDPRPLDENCTCPACSNYSRAYLHHVFRSNEMISGMLLTWHNLHYFQDLMQGMRDAIEIGAFDKFVTDFHEGRAQGDIEPL

SEQ ID NO: 58927 - protein, 376 aa, Pelagicola litorisediminis
  misc_feature (1)..(376): tr|A0A1Y5TDQ8|A0A1Y5TDQ8_9RHOB Queuine tRNA-ribosyltran sferase OS=Pelagicola litorisediminis OX=1312363 GN=tgt PE=3 SV=1
MTRRITFEKLGTDGKARTGVIRTTRGDIRTPAFMPVGTAATVKAMMPESVAETGADILLGNTYHLMLRPGAERIAQLGGLHRFMNWERPILTDSGGFQVMSLADLRKLTEKGVTFKSHIDGSRHELTPERSMEIQRLLGSDIVMCFDECPALPATDQAVAESMRLSMRWAERSKDAFGDRPGHALFGIMQGGVTPDLREESAEALVDIGFDGYAVGGLAVGEGQEAMFGVLDYAPGFLPQDKPRYLMGVGKPDDIVGAVARGIDMMDCVLPSRSGRTGQAWTRRGQVNIKNARHADDPRPLDEACTCPACRNYSRAYLHHVFRAQEMISGMLLTWHNLHYYQELMQSMREAIAAGTFGAFQSDFHAQRSEGDIEPL

SEQ ID NO: 58928 - protein, 376 aa, Pelagicola sp.
  misc_feature (1)..(376): tr|A0A2U2CT89|A0A2U2CT89_9RHOB Queuine tRNA-ribosyltran sferase OS=Pelagicola sp. LXJ1103 OX=2175247 GN=tgt PE= 3 SV=1
MVQKFSFTLEGQDGRARTGVIDTPRGAIRTPAFMPVGTAATVKAMLPSSVAETGADILLGNTYHLMLRPTAERIAQLGGLHKFMNWDKPILTDSGGFQVMSLAGLRKLTEAGVTFKSHIDGSKHELSPERSMEIQKLLGSDIVMCFDECPALPADRARITESMELSMRWAARSRDAFGDRPGYALFGIQQGGLEEDLRARSAEALRAIEFDGYAVGGLAVGEGQEAMFGCLDYAPEQLPEDKPRYLMGVGKPDDLVGAVARGIDMFDCVLPSRSGRTGQVFTRRGVLNIKNARHADDPRPLDEDCTCPACRGYSRAYLHHVFRSQEMISGMLLTWHNLHYYQELMAGMRMAIAAGTFDAFQANFHALRAQGDIEPL

SEQ ID NO: 58929 - protein, 375 aa, Pelagimonas varians
  misc_feature (1)..(375): tr|A0A238JQW0|A0A238JQW0_9RHOB Queuine tRNA-ribosyltran sferase OS=Pelagimonas varians OX=696760 GN=tgt PE=3 SV =1
MAQTSFELKAQDGQARTGVISTPRGDIRTPAFMPVGTAATVKGMMPESVRATGADILLGNTYHLMLRPGAERIDRLGGLHKFMNWDRPILTDSGGFQVMSLSDLRKLTEEGVTFKSHYDGSKHHLTPERSMEVQKLLGSDIVMAFDECPALPADRDRIAQSMRLSMRWAQRSRDAFGDRPGHMLFGIMQGGLESDLREESAKALTDIGFDGYAVGGLAVGEGQDAMFGCLDYAPGFLPEDKPRYLMGVGKPDDIVGAVKRGIDMMDCVLPSRSGRTGQAWTRRGQINIKNARHADDPRPIDEHCTCPACSSYSRAYLHHVFRSHEMISGMLLTWHNLHYFQEIMQGMRDAISEGRFDAWEADFHALRAEGDIEKL

SEQ ID NO: 58930 - protein, 379 aa, Pelagirhabdus alkalitolerans
  misc_feature (1)..(379): tr|A0A1G6HQD7|A0A1G6HQD7_9BACI Queuine tRNA-ribosyltran sferase OS=Pelagirhabdus alkalitolerans OX=1612202 GN=t gt PE=3 SV=1
MASVTYELIKTCKQTGARLGRVHTPHGSFETPVFMPVGTLATVKTMSPEELKEIGADIILSNTYHLWLRPGEDIVKEAGGLHKFMNWDGSILTDSGGFQVFSLSDLRDIEEEGVHFRNHISGEKLFLSPEKAMQIQNDLGPDIMMAFDECPPYPAEHKYMKDSVERTSRWAERCLNGHKRPNDQGLFGIVQGGEYEDLRKQSAKDLTSLDFPGYAIGGLSVGEPKDVMNRVLEFTTPLLPTQKPRYLMGVGSPDSLIDGAIRGVDMFDCVLPTRIARNGTCMTSQGRLVVRNAKFARDFSPLDPNCECHTCRNYSRAYIRHLIKTDETFGLRLTTYHNLYFLVNLMKQVREAIKADRLGDFREAFFEQYGFNKPNAKNF

SEQ ID NO: 58931 - protein, 376 aa, Pelagivirga sediminicola
  misc_feature (1)..(376): tr|A0A2T7GCE5|A0A2T7GCE5_9RHOB Queuine tRNA-ribosyltran sferase OS=Pelagivirga sediminicola OX=2170575 GN=tgt P E=3 SV=1
MTARFEFKLAATDGRARTGAISTPRGQIRTPAFMPVGTAATVKAMLPESVAATGADILLGNTYHLMLRPTAERIAALGGLHKFMNWPGPILTDSGGFQVMSLADLRKLTEEGVAFRSHIDGSRHMLTPERSIEIQALLGSDIVMCFDECPALPATDKAVAESMELSMRWARRSKEAFGERPGHALFGIQQGGVTRELRGASADKLVEIGFDGYAIGGLAVGEGQEAMFGVLDYAPDMLPEGKPRYLMGVGKPDDIVGAVARGVDMMDCVLPSRSGRTGQAWTRRGQVNIKNARHADDPRPLDEDCTCPACRSYSRAYLHHVFRAQEMISGMLLTWHNLHYYQQLMAEMRAAIARGDFGAWQAQFHAQRAEGDIEPL

SEQ ID NO: 58932 - protein, 369 aa, Pelobacter acetylenicus
  misc_feature (1)..(369): tr|A0A1L3GCK1|A0A1L3GCK1_PELAE Queuine tRNA-ribosyltran sferase OS=Pelobacter acetylenicus OX=29542 GN=tgt PE=3 SV=1
MFEFSLLARDSGTAARRGRLSTPHGTIETPIFMPVGTHGAMKAMTPAQVEETGAQIILSNTYHLHLAPGEGLIEKAGGLHRFMHWNRPILTDSGGFQVFSLPKKRITETGVFFRHEITGEEIFLGPSEAMAIQNALGADIIMAFDECIPYPSTHAYAATSIRKTLRWAEACLKSHGRADQALFGIVQGSIYEDLRQECARQMTGMDFPGYAIGGVSVGEGLDLLKKVVDYTAHRLPENKPRYLMGVGLPEDILESVERGMDMFDCVIPTRYARSATLFTRRGRIRLTHRRYRRDFFPVDASCNCYCCANFSRAYLHHLFKSNEILSATLAAIHNVHFYLNMMSEVRQAIENNDFAAFKKNFLEEYGAES

SEQ ID NO: 58933 - protein, 376 aa, Pelobacter acetylenicus
  misc_feature (1)..(376): tr|A0A1L3GJB3|A0A1L3GJB3_PELAE Queuine tRNA-ribosyltran sferase OS=Pelobacter acetylenicus OX=29542 GN=tgt PE=3 SV=1
MKGFRFELLTQDSGSQARRGRMTTRRGVVETPVFMPVGTQGTVKAILPEDLKAEGAQIILANTYHLFLRPGHERIQRLGGLHSFMHWTGPILTDSGGFQVFSLGKLCKISEDGVRFQSHLDGSRQVLTPEVSIAVQEALGADIIMVFDECIPYPSSREYVADSTALSQRWALRSKNARSRRDGAALFGIVQGGMYPDLRRQSAEALVEIGFDGYALGGLSVGEEAERMYEMMDIALPLLPQQCPRYVMGVGTPENLIEGIARGVDMFDCVMPTRNARNGTLFTSFGKISIKQARYADDNGPVDPACGCYVCRNYSRAYLRHLYQSNEILASMLNTRHNLHYYLDLMRQARLAIEQGRFGAFRADFHRRRHDDGSQD

SEQ ID NO: 58934 - protein, 369 aa, Pelobacter carbinolicus
  misc_feature (1)..(369): tr|Q3A580|Q3A580_PELCD Queuine tRNA-ribosyltransferase OS=Pelobacter carbinolicus (strain DSM 2380 / NBRC 1036 41 / GraBd1) OX=338963 GN=tgt PE=3 SV=1
MFEFSLLATDSQTAARRGRLTTPHGTIETPIFMPVGTHGALKAMTPAQVEETGAQIILSNTYHLHLAPGEGLVQKAGGLHSFMNWPHPILTDSGGFQVFSLPKKRITETGVFFRHEMTGEEIFLGPAEAMAIQNTLGADIIMAFDECIPYPATHDYAAKSIRKTLRWAEACLQNHNRSDQALFGIVQGGIYEDLRQECARQMTTMNFPGYAIGGVSVGEGLDLLKKVVDYTAPMLPENKPRYLMGVGLPEDILESVERGMDMFDCVIPTRYARSATLFTRRGRIRLTNRRYRRDFYPVDASCDCYCCRNFSRAYLHHLFKSNEILSATLAAIHNVHFYLNMMKEARQAIEAGDFAAFKKNFLEEYGANK

SEQ ID NO: 58935 - protein, 376 aa, Pelobacter carbinolicus
  misc_feature (1)..(376): tr|Q3A3C2|Q3A3C2_PELCD Queuine tRNA-ribosyltransferase OS=Pelobacter carbinolicus (strain DSM 2380 / NBRC 1036 41 / GraBd1) OX=338963 GN=tgt PE=3 SV=2
MTDFRFELLKQDTTSRARRGRMITRRGVVETPVFMPVGTQGTVKAILPEQLKEEGAQIILANTYHLFLRPGHERVRRLGGLHRFMHWDGPILTDSGGFQVFSLGKLRKISEEGVRFQSHLDGSHQILTPELSIAVQEALGSDIIMVFDECIPYPSSREYVAESTALSTRWAERSKKARSAQDGSALFGIVQGGMHADLRRQSAEQLMEIGFDGYALGGLSVGEEAERMYEMMDVALPLLPDNRPRYVMGVGTPENLIEGIARGVDMFDCVMPTRNARNGTLFTSFGKISIKQARYADDDGPIDPDCGCYVCRHYSRAYLRHLFQSNEILASMLNTRHNLHYYLDLMAQARVAIEEDRFEAFRADFYRRRNDGGLSV

SEQ ID NO: 58936 - protein, 373 aa, Pelobacter propionicus
  misc_feature (1)..(373): tr|A1ARW9|A1ARW9_PELPD Queuine tRNA-ribosyltransferase OS=Pelobacter propionicus (strain DSM 2379 / NBRC 10380 7 / OttBd1) OX=338966 GN=tgt PE=3 SV=1
MEFKLIKKDKQSSARLGVVTTGRGEIQTPIFMPVATHGAMKPLTPAQITETGAQIILSNTYHLHLQPGEGLVKKAGGLHKFMAWDKPILTDSGGFQVFSLPNKRITDEGVFFRHEVTGDEIYLDPASATRIQQDLGADIIMAFDECIPYPCERQYAEQSTKKTIRWLKECQRAMTDNGQALFGIVQGSVFEDLRAYCAREMRALDLPGYAIGGVSVGEGLELLKKVVAWTAPHLPEDKPRYLMGVGLPEDILESVERGIDMFDCVIPTRYARSATLFTRRGKIRLTNKNYKRDFFPVDPSCTCYTCGNFTRAYLHHLFVSNEVLSAVLSAIHNVHFYLNMMAEIRTAIADNRFMEYKSRFLAEYLEGNRRTKQ

SEQ ID NO: 58937 - protein, 374 aa, Pelobacter propionicus
  misc_feature (1)..(374): tr|A1APZ2|A1APZ2_PELPD Queuine tRNA-ribosyltransferase OS=Pelobacter propionicus (strain DSM 2379 / NBRC 10380 7 / OttBd1) OX=338966 GN=tgt PE=3 SV=1
MSTSLFTLLHRDASCGARLGSLNTLHGAIETPIFMPVGTNATVKAMTPDDLLAVNAQIILSNTYHLYLRPGHRLVEQLGGLHSFMNWHRPILTDSGGFQVFSLGELRKISEEGVRFQSHLDGSYHFLTPELSIGIQEALGADIIMCFDECPPATAEYDYVSRSLEMTTRWARRCKQAHRREGQQLFGIIQGGMHYDLRARSLEQIFEIGFDGYALGGLSVGEEKEQMYGVMEACAPLMPQDHPRYIMGIGAPQDLVEAVWHGYDMFDCVMPTRNARNGMLFTSQGRINIKAKIFEEDSGPLDPECGCHVCRNYSRAYLRHLYRAGEILASNLNTYHNLYYFLDLMRQMREAIKNDNLAGFRREFYAKQQIHHKI

SEQ ID NO: 58938 - protein, 369 aa, Pelobacter sp.
  misc_feature (1)..(369): tr|A0A1L3GMV8|A0A1L3GMV8_9DELT Queuine tRNA-ribosyltran sferase OS=Pelobacter sp. SFB93 OX=1842532 GN=tgt PE=3 SV=1
MFKFDLLNTDNSCAARRGRLTTPHGVIETPIFMPVGTHGALKAMTPAQVEETGAQIILSNTYHLHLSPGEGLVEKAGGLHRFMNWQGPILTDSGGFQVFSLPKKRITETGVFFRHENTGEEIFLGPQEAMQIQNTLGADIIMAFDECIPFPATHDYASKSIRKTLRWAEECIKHQARKDQALFGIVQGGIYEDLRQECARIMSDMDFPGYAVGGVSVGEGLELLKKVVDYTAPMLPVHKPRYLMGVGLPEDILESVERGMDMFDCVIPTRYARSATLFTKRGKIRLTNRRYRRDFFPVDPSCDCYCCRNFSRAYLHHLFRSNEILSATLAAIHNVHFYLNMMSQARQAIEQNDFKAFKTEFLGEYLSGN

SEQ ID NO: 58939 - protein, 375 aa, Pelobacter sp.
  misc_feature (1)..(375): tr|A0A1L3GNG7|A0A1L3GNG7_9DELT Queuine tRNA-ribosyltran sferase OS=Pelobacter sp. SFB93 OX=1842532 GN=tgt PE=3 SV=1
MSQFGFTLLHTDPHSQARRGQIQTRRGTIETPVFMPVGTLGTVKGMLPETLKEEGAEIILGNTYHLFLRPGHELVARLGGLHQFMNWDRPILTDSGGFQVFSLGKLRKITEEGVRFQSHIDGSSHMLTPELSIAVQETLGADIIMAFDECIPYPSTRDYVASSTALSGRWARRCKEARRSDDGAALFGIVQGGMYADLRKQSAEELQEIGFDGYALGGLSVGEEAAAMYDMMEAALPLLPADQPRYVMGVGTPENLIEGVARGVDMFDCVMPTRNARNGVLFTNFGKVVIKQARYAEDPLPIDPDCDCYVCRHYSRAYLRHLYQNNEILAAMLHTRHNLHYYLGLMAGARDAIAAGRFTEYRQEFYRRRQPESAA

SEQ ID NO: 58940 - protein, 376 aa, Pelobium manganitolerans
  misc_feature (1)..(376): tr|A0A419S5A8|A0A419S5A8_9SPHI Queuine tRNA-ribosyltran sferase OS=Pelobium manganitolerans OX=1842495 GN=tgt P E=3 SV=1
MKFKLAVQDKNCKARAGEITTDHGTIKTPIFMPVGTAGTVKAVHQRELAEDINAQIILGNTYHLYLRPGLETLKLAGGLHKFNGWDKPILTDSGGYQVYSLTEVRKIKEEGVTFRSHIDGSKHLFTPENVMDTQRIIGADIIMAFDECTPYPCNYHYARRSIDMTHRWLKRCINRFDSTAPLYGYSQTLFPIVQGSVYKDLRIKSAEFIAEQNREGNAIGGLSVGEPAEEMYAMTEVVCNVLPTDKPRYLMGVGTPINILENIALGIDMFDCVMPTRNARNGMLFTRKGIINIKNEKWKNDFSPIDADSDLFYDLNYSKAYLRHLIHSKEILGAQIATLHNLHFYLWLVAEAREKIISGDFYDWKNQMVKVLGQKL

SEQ ID NO: 58941 - protein, 376 aa, Pelodictyon luteolum
  misc_feature (1)..(376): tr|Q3B318|Q3B318_PELLD Queuine tRNA-ribosyltransferase OS=Pelodictyon luteolum (strain DSM 273 / 2530) OX=3192 25 GN=tgt PE=3 SV=1
MNFRLQSTDPRSAARTGILSTGHGDIPTPVFMPVGTRASVKSVEPHELLEQEAHIILTNTYHLYLKPGNHIIRKAGGVHPFMDWHGPLLTDSGGYQVYSLSELRRISEEGVTFKSHLDGSMLQFTPENVVDTQRIIGSDIMMPLDECPSSKADREYIRKSGELTIRWAERARRHFSATAPLYHHPQMLFGITQGGTHSDLRALSAKALVDLDFDGYATGGMAVGEPAEEMYRILELSHTLLPEHKPRYLMGVGTPENILNAIERGIDMFDCVIPTREGRNGRVYTRKGKMNLRSAKYAEDFSPVDEGFGNHVCKHYSRAYIRHLLNVGEILGLKLCTLQNISFFMWLTRTARQRIEEGSFLEWKAGFLEEFNRGEA

SEQ ID NO: 58942 - protein, 376 aa, Pelodictyon luteolum; identical to SEQ ID NO: 58941
  misc_feature (1)..(376): tr|A0A165LEN3|A0A165LEN3_PELLU Queuine tRNA-ribosyltran sferase OS=Pelodictyon luteolum OX=1100 GN=tgt PE=3 SV= 1

SEQ ID NO: 58943 - protein, 377 aa, Pelodictyon phaeoclathratiforme
  misc_feature (1)..(377): tr|B4SBD4|B4SBD4_PELPB Queuine tRNA-ribosyltransferase OS=Pelodictyon phaeoclathratiforme (strain DSM 5477 / B U-1) OX=324925 GN=tgt PE=3 SV=1
MKFSLITTDPHSSARCGVLETSHGTIPTPVFMPVGTRASVKSVEPHELRELNVHIILANTYHLYLKPGNEILQKAGGVHRFMNWDGPLLTDSGGYQVYSLSDLRKISEEGVLFKSHLDGSKQHFTPENVIETERIIGSDIMMPLDECPPSTAEKEYVRISGELTIRWAERARKHFTLTSPLYGHEQYLFGITQGGIHTDLRTSSTNALVDLDFDGYAIGGMAVGEPAEEMYRILELSHPLLPEKKPRYLMGVGTPENILNAIERGIDMFDCVIPTREGRNGRVYTRQGKMNLRSAKYSTDFSSIDEGFDNEVCRNYSRAYLRHLLNVGEILGLKLCTLQNISFFMWLTATARTEIQKGSFMEWKQDFLERFNYNDNA

SEQ ID NO: 58944 - protein, 374 aa, Pelolinea submarina
  misc_feature (1)..(374): tr|A0A347ZSE9|A0A347ZSE9_9CHLR Queuine tRNA-ribosyltran sferase OS=Pelolinea submarina OX=913107 GN=tgt PE=3 SV =1
MEDTKTNITPFSFELVAQDGSARAGILHTPHGDIHTPIFMPVGTQATVKALTPAQLQELEVQILLSNTYHLYLRPGPDVVADMGGLHKFMDWPKPILTDSGGFQVFSMGTLRAIDEEGVTFKSHIDGSTHRFTPEFSISIQEKLGADIIMAFDECPDPQDKEYNMRAMERTHRWAERCLKAKTRADQALFGIVQGGIFPDLRRQSAEFLASLDFPGYGIGGLSVGESKADMLATIEVVTALLPENKPRYLMGVGTPYDLVESIYRGVDMFDCVLPTRLARHHAAQTLQGRMNLANAAYIRDEHPIDPLCTCYTCTHFSRAYLRHLVSTKEILGATLLSIHNIHTLLELSQRIRESIINHKYSELRQELLRNLEQ

SEQ ID NO: 58945 - protein, 375 aa, Pelomonas puraquae
  misc_feature (1)..(375): tr|A0A254N8P4|A0A254N8P4_9BURK Queuine tRNA-ribosyltran sferase OS=Pelomonas puraquae OX=431059 GN=tgt PE=3 SV= 1
MLKFELLKTEGRARRGTLTLNHGVVQTPIFMPVGTYGTVKGVTPRSLNEMGAQIILGNTFHLWMRPGLDVVKQFGGLHRFESWGKPILTDSGGFQVWSLGAMRKISEEGVKFASPVNGDKLLLTPEVSMQIQTVLNSDIVMQFDECTPYETKGVLTTEREAKASMELSLRWAKRCITEFQRLENPNALFGIVQGGMYTNLRDASLAGLAELDLPGYAIGGLSVGEPKAEMQRILDHTGHQLPANKPRYLMGVGTPEDLVEGVSQGIDMFDCVMPTRNARNGHLFTRFGDLRLRNARYKADESPVDPTCSCECCTGFSRAYLHHLDRCGEMLGPMLTSVHNLHYYLNLMQEIRDALDAGRFEAWRAQFHADRARGV

SEQ ID NO: 58946 - protein, 375 aa, Pelomonas saccharophila
  misc_feature (1)..(375): tr|A0A4R3VBW7|A0A4R3VBW7_PELSC Queuine tRNA-ribosyltran sferase OS=Pelomonas saccharophila OX=304 GN=tgt PE=3 S V=1
MLKFDLLKTEGRARRGALTLNHGVVQTPIFMPVGTYGTVKGVTPRSLEEMGAQIILGNTFHLWMRPGLDVITQFGGLHRFESWNKPILTDSGGFQVWSLGDMRKISEEGVKFASPVNGDKLFLTPEISMQIQTTLNSDVVMQFDECTPYESKGQLTTEREARQSMEMSLRWARRCVAEFDRLQNPNALFGIVQGGMYTGLRDASLAGLAELDLPGYAIGGLSVGEPKAEMQRILEHTGHQLPAHKPRYLMGVGTPEDLVEGVSQGIDMFDCVMPTRNARNGHLFTRFGDLRLRNARYKSDEKPVDETCGCECCQGFSRAYLHHLDRCGEMLGPMLTSIHNLHYYLNLMQEMRDALDAGRFAAWRTQFAADRARGV

SEQ ID NO: 58947 - protein, 375 aa, Pelomonas sp.
  misc_feature (1)..(375): tr|A0A0Q7SMQ2|A0A0Q7SMQ2_9BURK Queuine tRNA-ribosyltran sferase OS=Pelomonas sp. Root1444 OX=1736464 GN=tgt PE= 3 SV=1
MLKFELLKTEGRARRGTLTLNHGVVQTPIFMPVGTYGTVKGVTPRSLEEMGAQIILGNTFHLWMRPGLDVVTQFGGLHRFESWSKPILTDSGGFQVWSLGAMRKISEEGVKFASPVNGDKLLLTPEVSMQIQTVLNSDIVMQFDECTPYESKGVLTTEREARSSMELSLRWAKRCITEFDRLQNPNALFGIVQGGMFTNLRDASLAGLAELNLPGYAIGGLSVGEPKAEMQRILEHTGHQLPANKPRYLMGVGTPEDLVEGVSQGIDMFDCVMPTRNARNGHLFTRFGDLRLRNARYKNDEKPVDETCGCECCSGFSRAYLHHLDRCGEMLGPMLTSVHNLHYYLNLMGEIRAALDAGRFGAWRAQFAADRARGV

SEQ ID NO: 58948 - protein, 375 aa, Pelomonas sp.
  misc_feature (1)..(375): tr|A0A2R7TC61|A0A2R7TC61_9BURK Queuine tRNA-ribosyltran sferase OS=Pelomonas sp. HMWF004 OX=2056841 GN=tgt PE=3 SV=1
MLKFDLLKTEGRARRGTLTLNHGVVQTPIFMPVGTYGTVKGVTPRSLHEMGAQIILGNTFHLWMRPGLDVVTQFGGLHRFESWTKPILTDSGGFQVWSLGAMRKISEEGVKFASPVNGDKLFLTPEVSMQIQTVLNSDIVMQFDECTPYETKGVLTTEREARQSMELSLRWAKRCITEFGRLENPNALFGIVQGGMFTHLRDASLAGLAELDLPGYAIGGLSVGEPKAEMQRILGHIGHQLPANKPRYLMGVGTPEDLVEGVSQGIDMFDCVMPTRNARNGHLFTRFGDLRVRNARYKADETPVDATCRCECCTGFSRAYLHHLDRCGEMLGPMLTSVHNLHYYLNLMQEMRDALDAGRFEAWRAQFHADRARGV

SEQ ID NO: 58949 - protein, 369 aa, Pelosinus fermentans
  misc_feature (1)..(369): tr|I9NXG1|I9NXG1_9FIRM Queuine tRNA-ribosyltransferase OS=Pelosinus fermentans JBW45 OX=1192197 GN=tgt PE=3 SV =1
MSVTYELVKKCSKTGARAGRLHTPHGSFDTPIFMPVGTQATVKAMSPDELKDMGAGIILSNTYHLYLRPGHELVAEAGGLHKFMNWDRGILTDSGGFQVFSLGALRKITEEGVAFRSHIDGSKHFLSPEKATQVQMALGSDIIMAFDECVPFPAEHDYARESTERTTRWAERCRQTHTRADQALFGIVQGGMYKDLRSMSAKDLVSLDFPGYAVGGLSVGEPKPLMYEMLEHTVPLLPERKPRYLMGVGTPDCLVEGVMHGIDMFDCVFPTRVARNGTVMTNWGRLVVKNAEYARDFRPLDDKCSCYACRNFSRAYIRHLFKTDEIFGLRLTTIHNLHFLLNFMREMRTAILEDRFLDFRQGFLAQYNR

SEQ ID NO: 58950 - protein, 369 aa, Pelosinus fermentans
  misc_feature (1)..(369): tr|I8RFR9|I8RFR9_9FIRM Queuine tRNA-ribosyltransferase OS=Pelosinus fermentans B4 OX=1149862 GN=tgt PE=3 SV=1
MSVTYELVKKCSKTGARAGRLHTPHGTFDTPIFMPVGTQATVKAMSPDELKDMGAGIILSNTYHLYLRPGHELVAEAGGLHKFMNWDRGILTDSGGFQVFSLGALRKITEEGVTFRSHIDGSKHFLSPEKATKVQMALGSDIIMAFDECVPFPAEHDYARKSTERTTRWAERCRQTHTRADQALFGIVQGGMYKDLRTMSANDLVSLDFPGYAVGGLSVGEPKTLMYEMLEHTVPLLPERKPRYLMGVGTPDCLVEGVMHGIDMFDCVFPTRVARNGTVMTNWGRLVVKNAEYARDFRPLDDKCSCYACRNFSRAYIRHLFKTDEIFGLRLTTIHNLHFLLNFMSKMRTAIIEERFLDFRQEFLAQYNR

SEQ ID NO: 58951 - protein, 369 aa, Pelosinus propionicus
  misc_feature (1)..(369): tr|A0A1I4KTH5|A0A1I4KTH5_9FIRM Queuine tRNA-ribosyltran sferase OS=Pelosinus propionicus DSM 13327 OX=1123291 G N=tgt PE=3 SV=1
MSVTYELVKQCQKTGARAGRLHTPHGTFDTPIFMPVGTQATVKAMSPDELKDMGAGIILSNTYHLYLRPGHELVAEAGGLHKFMNWDRGILTDSGGFQVFSLGALRKITEEGVTFRSHIDGSKHFLSPEKATEVQMALGSDIIMAFDECVPFPAEHDYARKSTERTTRWAERCKKTHTRVDQALFGIIQGGMYKDLRTMSVNDLVSLDFPGYAVGGLSVGEPKTLMYEMLEHTVPLLPEKKPRYLMGVGTPDCLVEGVMHGIDMFDCVFPTRVARNGTVMTNWGRLVVKNAEYARDFRPLDEKCSCYTCRNFSRAYIRHLFKTDEIFGLRLTTIHNLHFLLNFMREMRTAILEDRFPDFRQEFLAGYNR

SEQ ID NO: 58952 - protein, 370 aa, Pelosinus sp.
  misc_feature (1)..(370): tr|A0A075KBF5|A0A075KBF5_9FIRM Queuine tRNA-ribosyltran sferase OS=Pelosinus sp. UFO1 OX=484770 GN=tgt PE=3 SV= 1
MSVTYELVKKCSKTGARAGRLHTPHGTFDTPIFMPVGTQATVKAISPEELKDMGAGIILSNTYHLYLRPGHELVKEAGGLHKFMNWDRGILTDSGGFQVFSLGDLRKITEEGVTFRSHIDGSKHFLSPEKATEIQMALGSDIIMAFDECVPYPADHDYARKSTERTTRWAERCKEAHKRTDQALFGIVQGGMYKDLRTMSAKDLVSLDFPGYAVGGLSVGEPKPLMYEMLEHTVPLLPEGKPRYLMGVGTPDCLVEGVMHGIDMFDCVFPTRVARNGTVMTSWGRLVVKNAEYAKDFRPLDEKCGCYTCQNFSRAYIRHLFKTDEIFGLRLTTIHNLHFLLQFMKEMRKAIIEDNFVEFREEFLAQYNLR

SEQ ID NO: 58953 - protein, 370 aa, Pelotomaculum propionicicum
  misc_feature (1)..(370): tr|A0A4Y7RKD7|A0A4Y7RKD7_9FIRM Queuine tRNA-ribosyltran sferase OS=Pelotomaculum propionicicum OX=258475 GN=tgt PE=3 SV=1
MPVSFTLVRKDSACSARLGLLHTPHGTVETPIFMPVGTQATVKTMTPEEVRDVGGRLILSNTYHLYLRPGHELVREAGGLHRFMNWSGPILTDSGGFQVFSLGPLRRVSEEGVTFRSHIDGSEHFFSPEKAMEVQLALGSDIAMAFDECAPYPCSREYALEALERTTRWARRSAAAHQSETQGLFGIVQGGTFPDLREKSARELVELDFPGYAIGGLSVGEPKQIMYEMLDHTVEFLPEDKPRYLMGVGSPDCLVEGVVRGIDMFDCVLPTRIARNGSVFTRQGKLVVRNAEYARDFSPLDPTCDCYTCRNYSRAYIRHLIKAGEVLGIRLTTIHNLRFVLNLMEEIKEALRQGEIMEFRDRFLSTYQAV

SEQ ID NO: 58954 - protein, 370 aa, Pelotomaculum schinkii
  misc_feature (1)..(370): tr|A0A4Y7RCI5|A0A4Y7RCI5_9FIRM Queuine tRNA-ribosyltran sferase OS=Pelotomaculum schinkii OX=78350 GN=tgt PE=3 SV=1
MVLNYSVIQQDKSCGARLGLLHTTHGTVETPIFMPVGTQAAVKTMTPEEVKEVGGRLILGNTYHLYLRPGQELIREAGGLHRFMNWDGPILTDSGGFQVFSLGPLRKISEEGVTFRSHIDGSEHFFSPEKAVEVQEALGSDIAMVFDECAPYPCTHEYALEALKRTTRWARRCADAHRREDQALFGIVQGGVFADLRRQSALDLVGLDLPGYAIGGLSVGEPKAVMYEMLDVTVGFLPPEKPRYLMGVGSPDCLVEGVVRGIDMFDCVLPTRIARNGTVLTHHGKLVVRNAEYARDFDPLDPTCDCYACRNYSRAYIRHLIKAGEVLGIRLTTIHNLRFIQRLMQEIRDAIRQGNILEYRDNFLKNYLQA

SEQ ID NO: 58955 - protein, 370 aa, Pelotomaculum sp.
  misc_feature (1)..(370): tr|A0A1V4VMI9|A0A1V4VMI9_9FIRM Queuine tRNA-ribosyltran sferase OS=Pelotomaculum sp. PtaB.Bin104 OX=1811693 GN= tgt PE=3 SV=1
MAVSFTVTKKERSGRARLGLLHTPHGTVETPVFMPVGTQATVKTMTPEEVREVGGRIILSNTYHLYLRPGQELIREAGGLHRFMNWDGPILTDSGGFQVFSLGPLRKVTEEGVTFRSHIDGSEHFFSPEKAMEVQETLGSDIAMVFDECAPYPCSREYALEALERTSRWAARCRAVHRREDQGVFGIVQGGTFADLRKKSAYELVELDFSGYAIGGLSVGEPKELMYEMLDYTVPLLPEDKPRYLMGVGSPDCLVEGVARGIDMFDCVLPTRLARNGTVLTRHGKLVVRNAEYTKDFAPFDRDCSCYACRNYSRAYVRHLIKTNEVLGIRLTTIHNLHFVLELMKELREAISEDKITEYRDSFLKGYQGA

SEQ ID NO: 58956 - protein, 370 aa, Pelotomaculum sp.
  misc_feature (1)..(370): tr|A0A1V5BV86|A0A1V5BV86_9FIRM Queuine tRNA-ribosyltran sferase OS=Pelotomaculum sp. PtaU1.Bin065 OX=1811696 GN =tgt PE=3 SV=1
MAVSFTVTNRQKNGRARLGLLHTPHGTVETPVFMPVGTQATVKTMTPEEVCDVGGRLILSNTYHLYLRPGQELVREAGGLHRFMNWSGPILTDSGGFQVFSLGPLRKVSEEGVTFRSHIDGSEHFFSPEKAMEIQMALGSDIAMAFDECAPYPCSYEYAREALDRTSRWAERCLAAHRLKEQGVFGIVQGGVFHDLRKKSAGEIVSLNFAGYAIGGLSVGEPKELMYELLDYTVPFLPEEKPRYLMGVGSPDCLVEGVLRGIDMFDCVLPTRLARNGTVFTRRGRLVVRNAGNARDLNPLDPECGCYVCRNYSRAYIRHLLKAGEVLGIRLTTIHNLSFVLELMKELREAIREGKMVEYRDEFMEKYQYG

SEQ ID NO: 58957 - protein, 370 aa, Pelotomaculum thermopropionicum
  misc_feature (1)..(370): sp|A5D3G6|TGT_PELTS Queuine tRNA-ribosyltransferase OS= Pelotomaculum thermopropionicum (strain DSM 13744 / JCM 10971 / SI) OX=370438 GN=tgt PE=3 SV=1
MAVSFTITYKDESTGARLGLLYTPHGTVETPVFMPVGTQATVKTMTPEEVRDIGGRMILSNTYHLYLRPGHELIREAGGLHRFMHWDGPILTDSGGFQVFSLGPLRKVSEEGVAFRSHIDGSEHFFSPEKAMEVQMALGSDIAMAFDECAPYPCSREYALAATERTTRWARRCRTAHDREDQGLFGIVQGGTFKDLRERSARELVELDFPGYAIGGLSVGEPKQLMYEVLDYTVPLLPEEKPRYLMGVGSPDCLVEGVLRGIDMFDCVLPTRIARNGTALTRQGRLVVRNAEYARDFSPLEPDCDCYACRNYTRAYIRHLIKANEILGIRLTTIHNLYFIMKLMEEIRAAVRQGRMLQFRDDFLRKYQGD

SEQ ID NO: 58958 - protein, 373 aa, Peptoanaerobacter stomatis
  misc_feature (1)..(373): tr|V9HNN1|V9HNN1_9FIRM Queuine tRNA-ribosyltransferase OS=Peptoanaerobacter stomatis OX=796937 GN=tgt PE=3 SV= 1
MQKPLEFEVIKNCTHSKARYGKLKTLHNEFETPVFMPVGTNATVKSMSVDELKEINAQIILSNTYHLYLRPSDLIVKKAGGLHKFMNWDRSILTDSGGFQVFSLGDLRKIKEEGVYFRSHLDGSKHFMGPEESIAIQNNLGSDIMMSFDECAPYPASYEYIKDSYKRTSRWAKRGQIANKNPETQALFGIIQGGMYQDLRYESANELVEMDFLGYSIGGLSVGEPKPLMYEVLDYTVDLIPKEKPRYLMGVGSPDDLFEGVIRGIDMFDCVLPTRIARNGTAMTSNGKVVVRNATYQEDFTPLDEECDCHVCRNYSRAYIRHLIKANEILGARLITYHNLYFLINLMKNIRTAIKEDRLLQYKKDFFAKYYKI

SEQ ID NO: 58959 - protein, 373 aa, Peptoanaerobacter stomatis
  misc_feature (1)..(373): tr|G9XDL4|G9XDL4_9FIRM Queuine tRNA-ribosyltransferase OS=Peptoanaerobacter stomatis OX=796937 GN=tgt PE=3 SV= 1
MQKPLEFEVIKNCTHSKARYGKLKTLHNEFETPIFMPVGTNATVKSMSVDELKEINAQIILSNTYHLYLRPSDLIVKKAGGLHKFMNWDRSILTDSGGFQVFSLGDLRKIKEEGVYFRSHLDGSKHFMGPEESIAVQNNLGSDIMMSFDECAPYPASYEYIKDSYKRTSRWAKRGQIANKNPETQALFGIIQGGMYQDLRYESANELVEMDFLGYSIGGLSVGEPKPLMYEVLDYTVDLIPKEKPRYLMGVGSPDDLFEGVIRGIDMFDCVLPTRIARNGTAMTSNGKVVVRNATYQEDFTPLDEECNCHVCRNYSRAYIRHLIKANEILGARLITYHNLYFLINLMKNIRTAIKEDRLLQYKKDFFAKYYKI

SEQ ID NO: 58960 - protein, 372 aa, Peptoclostridium acidaminophilum
  misc_feature (1)..(372): tr|W8T5X9|W8T5X9_PEPAC Queuine tRNA-ribosyltransferase OS=Peptoclostridium acidaminophilum DSM 3953 OX=1286171 GN=tgt PE=3 SV=1
MAIRYELIKVCKQTGARLGKLHTPHGVIDTPIFMPVGTQATVKAMTPEELKEIEAQIILSNTYHLYIRPGHDIVKKAGGLHKFMNWDRPILTDSGGYQVFSLGPLRKIKEEGVEFRSHLDGSKHFISPEKAIEIENALGADIIMAFDECAPYPADREYVKNSLERTTRWAKRCKEAHKNTDNQALFGIIQGGMYKDLREQSAREITAIDLPGYAIGGLSVGEPKPLMYEVLDYTVPLMPSDKPRYLMGVGSPDDLIEGVLRGIDMFDCVLPTRIARNGTAFTSGGKVVVRNAIYQEDFTPLDPECDCYTCRNYTKAYLRHLVKCNEILASRLLTYHNLYFLINLMKNVRQAIMDDRLMDFRNEFFEKFGYEK

SEQ ID NO: 58961 - protein, 373 aa, Peptoclostridium litorale
  misc_feature (1)..(373): tr|A0A069RH28|A0A069RH28_PEPLI Queuine tRNA-ribosyltran sferase OS=Peptoclostridium litorale DSM 5388 OX=112132 4 GN=tgt PE=3 SV=1
MSAIKFELIKTCKQTGARLGKIQTPHGEIQTPIFMPVGTLATVKAMTPEELKDINAQIILSNTYHLYMRPGHELVEKAGGLHKFMNWDRPILTDSGGFQVFSLGPLRKIKEEGVEFRSHIDGSKHFISPEKAIEIENALGADIIMAFDECAPYPADREYVKNSLERTTRWAQRCKDAHKNTERQALFGIVQGGMYKDLREQSAKEITDIGFPGYAIGGLSVGEPKPIMYEVLEYTTPLLPEDKPRYLMGVGSPDDLIEGVLRGVDMFDCVLPTRIARNGTAFTSQGKVVARNAIYADDFRPLDPECDCYTCKNYTRAYIRHLVKCNEILASRLLTYHNLHFLLKLMEDVRTAIQEDRLMDFRNEFFEKYGYTK

SEQ ID NO: 58962 - protein, 373 aa, Peptoclostridium sp.; identical to SEQ ID NO: 53991
  misc_feature (1)..(373): tr|A0A416Q4M4|A0A416Q4M4_9FIRM Queuine tRNA-ribosyltran sferase OS=Peptoclostridium sp. AF21-18 OX=2292243 GN=t gt PE=3 SV=1

SEQ ID NO: 58963 - protein, 370 aa, Peptococcaceae bacterium
  misc_feature (1)..(370): tr|A0A0F2NB63|A0A0F2NB63_9FIRM Queuine tRNA-ribosyltran sferase OS=Peptococcaceae bacterium BRH_c4a OX=1629716 GN=tgt PE=3 SV=1
MTVSFREIKRDSVTKARRGELHTPHGVVETPVFMPVGTQATVKTMTPEEVQDAGGRLILGNTYHLYLRPGHRIVAEAGGLHRFMNWGGPILTDSGGFQVFSLGPLRKIEEEGVWFRSHIDGSEHYFSPEKAVEIQEALGSDIAMAFDECAPYPCTKEYALKAVERTTRWAQRCKKAHRREDQSLFGIIQGGVFGDLRRKSAAELVELDFPGYGIGGLSVGEPKDLMYETLEVTIPLIPNDRPRYLMGVGSPDCLLEGVARGVDMFDCVLPTRIARNGTVFTHQGKLVVRNAEYARDFSPLDAECDCYTCRNYTRAYVRHLIKANEILGVRLTTMHNLYFTLNLMHNIRVAIDQGRFDAYKRDFLSKFNLC

SEQ ID NO: 58964 - protein, 373 aa, Peptococcaceae bacterium
  misc_feature (1)..(373): tr|A0A0J1I1P1|A0A0J1I1P1_9FIRM Queuine tRNA-ribosyltran sferase OS=Peptococcaceae bacterium CEB3 OX=999898 GN=t gt PE=3 SV=1
MAAVHLEILKEDLKTRARLGRLHTPHGIIETPVFMPVGTQATVKTMTPEELEEIGAGIILSNTYHLFLRPGPELIRAAGGLHSFMHWRGAILTDSGGFQVFSLGDLRRISEEGVEFRSHLDGSRQFLSPEIATEAQMALGSDIVMAFDECAPYPCSHEYARDSLARTTRWALRCKETLGAREGQALFGIVQGGTFQDLRRESAAGITALDLPGYAVGGLSVGEPKEVMYEILDDTVPLLPADKPRYLMGVGSPDALIEGVMRGIDMFDCVLPTRIARNGTALTRFGKLVVRNATVARDFSAIDPTCDCYTCRHYSRAYVRHLLKADEILGLRLMTIHNLRFLQNLMREIREAIAADRLPEYRKEFFAGYGYPL

SEQ ID NO: 58965 - protein, 369 aa, Peptococcus niger
  misc_feature (1)..(369): tr|A0A1G6S1G2|A0A1G6S1G2_PEPNI Queuine tRNA-ribosyltran sferase OS=Peptococcus niger OX=2741 GN=tgt PE=3 SV=1
MSFEFEKLVEASDSKARLGKFHTPHGVINTPTFMPVGTQATVKTLSPEEVKEAKSQIILANTYHLYLRPGHELIRSAGGLHRFMHWDGPILTDSGGFQVFSLGDLRKITEEGVLFRSHLDGSKHLFTPESVMGIENALGADIIMAFDECTPADADEAYARQSLERTHRWLKRCAAAHKRPDQALFGIVQGGIFPELRLESIQRTLEVDLPGYAIGGLSVGEPNEVMYDLLDQTADELPKDKPRYLMGVGNPDNLVEGVGYGIDMFDCVQATRIARHGAFWTGQGRENIRNAKNQEDFSPLENGCGCYACQHYSRAYIRHLVQAKEVFGIRLLSLHNIYFLNHLMEQLREAIRQDTYQAFRKSFFAQYTV

SEQ ID NO: 58966 - protein, 370 aa, Peptoniphilus asaccharolyticus
  misc_feature (1)..(370): tr|A0A1W1USS8|A0A1W1USS8_PEPAS Queuine tRNA-ribosyltran sferase OS=Peptoniphilus asaccharolyticus DSM 20463 OX= 573058 GN=tgt PE=3 SV=1
MFKFELQKTAKDSKARLGKIITPHGEIETPIFMPVGTRATVKTMTPEEVKDLGAQIILSNTYHLFLKPGMDIIEKAGGLHKFMNWDKPILTDSGGFQVFSLSGNRKITEEGVEFRSHIDGSKKFISPEVSIDIQNTLGSDIIMAFDECAPYPSSYEYIYDSMMRTTRWAERCKAHHTREDQALFGIIQGGMYKDLREISAKDLVSMDFPGYAVGGLSVGEPLEIMNEVLDHTTEFMPQNKPRYLMGVGSPDYLFEAVERGIDMADCVLPTRIARNGTVMTSQGKLVIKNAKYKEDFSPLDPECDCYTCRNYSRAYMRHLFNVDEILGLRLATIHNLRFLIKLMEDIRESIRGDYFLEFKSDFYRKYGYNK

SEQ ID NO: 58967 - protein, 373 aa, Peptoniphilus coxii
  misc_feature (1)..(373): tr|A0A134ABC8|A0A134ABC8_9FIRM Queuine tRNA-ribosyltran sferase OS=Peptoniphilus coxii OX=755172 GN=tgt PE=3 SV =1
MKFTVTHESSNTKARRGVLETAHGTIQTPIFMPVGTQATVKTMTPEDLESMNAQIILSNTYHLFLRPGTDIIAKAGGLHKFMNWDKPILTDSGGFQVFSLSHRRKITEEGVMFRSHIDGSKQFLSPEKSMEIQHILGSDIMMAFDECAPYPATREYIAHSSDRTTRWAERCKIYHNNKEGQNLFGIVQGGMYKDLRKKSAEELVSLDFPGYAVGGLSVGEPIELMCDVLDYTTDFMPKDKPRYLMGVGTPDYLFEAVERGIDMADCVLPTRNARKGTVFTAHGKLVIKNARYAEDFLPLDPECDCYVCRNYSRAYIRHLFKANEILGLRLASYHNLYFLLKLMENIRTAIENDSFLSFKDDFYAKYGYNNING

SEQ ID NO: 58968 - protein, 371 aa, Peptoniphilus duerdenii
  misc_feature (1)..(371): tr|E0NMT2|E0NMT2_9FIRM Queuine tRNA-ribosyltransferase OS=Peptoniphilus duerdenii ATCC BAA-1640 OX=862517 GN=t gt PE=3 SV=1
MLEYKLIKKSKDTKARVGEIKTNHGIIKTPVFMPVGTRATVKTMTPEEVKDLGAQIILSNTYHLFLRPGPEIIEKAGGLHKFMNWHGPILTDSGGFQVFSLSANRKITEEGVTFRSHIDGSKQFLSPEVSIDVQNSLGSDIIMAFDECAPYPATYEYIEHSMNRTTRWAKRCKDHHKNTDNQALFGIVQGGMYKDLRKKSAEDLVAMDFPGYAVGGLSVGEPKDIMVDILDYTTDFLPEDKPRYLMGVGTPDYLFEAVEHGIDMADCVLPTRIARNGTAMTSVGRVIAKNGKYKEDFTSLDENCDCYTCKNYTKAYIRHLFNVNEILAYRLLSIHNIYFLTKLMENIRNAILEDRFLEYKKEFYESYGYED

SEQ ID NO: 58969 - protein, 370 aa, Peptoniphilus grossensis
  misc_feature (1)..(370): tr|A0A1U7LYM1|A0A1U7LYM1_9FIRM Queuine tRNA-ribosyltran sferase OS=Peptoniphilus grossensis OX=1465756 GN=tgt P E=3 SV=1
MFKFELLKTAKDSKARLGKITTNHGEIETPIFMPVGTRATVKTMTPDELKEIGSQIILSNTYHLFLRPGTEIIEKAGGLHKFMNWDKPILTDSGGFQVFSLSDNRKITEEGVHFRSHIDGSKMFISPEKSIDIQNILGSDIIMAFDECAPYPASHEYIDNSMRRTLRWAERCKEHHKNTDNQTLFGIIQGGMYKDLREISAREMVDMDFKGYSIGGLSVGEPIDLMNDILDFTTDFMPESKPRYLMGVGSPDYLFEAVERGVDMADCVLPTRIARNGTVLTHNGKIAIKNALYKEDFSALDKECDCYTCRNFSKAYIRHLFNVDEILGMRLATIHNLYFLLDMMKNIRESIRGDYFLEYKDDFYKKYGYK

SEQ ID NO: 58970 - protein, 372 aa, Peptoniphilus harei
  misc_feature (1)..(372): tr|A0A2X1Y0C9|A0A2X1Y0C9_9FIRM Queuine tRNA-ribosyltran sferase OS=Peptoniphilus harei OX=54005 GN=tgt PE=3 SV= 1
MFKFDLLKTSKDSKARLGKITTNHGEIETPIFMPVGTRATVKTMTPDELKGIGAQIILSNTYHLFLRPGTEIIEKAGGLHKFMNWDKPILTDSGGFQVFSLSDNRKITEEGVHFRSHIDGSKMFISPEKSIDIQNILGSDIIMAFDECAPYPASHEYIDHSMRRTLRWAQRCKDYHKNVDNQTLFGIIQGGMYKDLREISAKEMVDMDFKGYSIGGLSVGEPIDLMTEILDYTTDFMPENKPRYLMGVGSPDYLFEAVERGVDMADCVLPTRIARNGTVLTHQGRIPIKNAVYKEDFSRLDDECDCYTCRNFSKAYLRHLFNVDEILGMRLATIHNLYFLIDMMENIRESIRGDYFLEYKRDFYKKYGYKQD

SEQ ID NO: 58971 - protein, 370 aa, Peptoniphilus harei
  misc_feature (1)..(370): tr|E4KZ33|E4KZ33_9FIRM Queuine tRNA-ribosyltransferase OS=Peptoniphilus harei ACS-146-V-Sch2b OX=908338 GN=tgt PE=3 SV=1
MFKFELLKTSKDSKARLGKITTNHGEIETPIFMPVGTRATVKTMTPEELKDIGAQIILSNTYHLFLRPGTEIIEKAGGLHKFMNWDKPILTDSGGFQVFSLSDNRKITEEGVHFRSHIDGSKMFISPEKSIDIQNILGSDIIMAFDECAPYPASHEYIDHSMRRTLRWAERCKNHHKNVDNQTLFGIIQGGMYKDLREISAKEMVDMDFKGYSIGGLSVGEPIDLMTEILDYTTDFMPENKPRYLMGVGSPDYLFEAVERGVDMADCVLPTRIARNGTVLTHQGRIPIKNAIYKDDFSRLDDECDCYTCRNYSKAYIRHLFNVDEILGMRLATIHNLYFLIDMMKNIRESIKGDYFLEYKKDFYKKYGYK

SEQ ID NO: 58972 - protein, 370 aa, Peptoniphilus indolicus
  misc_feature (1)..(370): tr|A0A379DF08|A0A379DF08_9FIRM Queuine tRNA-ribosyltran sferase OS=Peptoniphilus indolicus OX=33030 GN=tgt PE=3 SV=1
MFKFELEKTSKGSKARLGKIITPHGEIETPIFMPVGTRATVKTMTPEEVKDLGAQIILSNTYHLFLKPGMDIIEKAGGLHKFMNWDKPILTDSGGFQVFSLSGNRKISEEGVEFRSHIDGSKKFISPEVSIDIQNTLGSDIIMAFDECAPYPSSYEYIYDSMMRTTRWAERCKAHHKREDQALFGIIQGGMYKDLREISAKDLVAMDFPGYAVGGLSVGEPLELMNEILDHTTEFMPQDKPRYLMGVGTPDYLFEAVERGIDMADCVLPTRIARNGTVMTSNGKLVIKNAKYKEDFSPLDPECDCYTCRNYSRAYIRHLFNVDEILGLRLATIHNLRFLIKLMEDIRESIRGDYFLEFKDDFYRKYGYNK

SEQ ID NO: 58973 - protein, 370 aa, Peptoniphilus indolicus; identical to SEQ ID NO: 58972
  misc_feature (1)..(370): tr|G4D5T6|G4D5T6_9FIRM Queuine tRNA-ribosyltransferase OS=Peptoniphilus indolicus ATCC 29427 OX=997350 GN=tgt PE=3 SV=1

SEQ ID NO: 58974 - protein, 371 aa, Peptoniphilus ivorii
  misc_feature (1)..(371): tr|A0A448V1X7|A0A448V1X7_9FIRM Queuine tRNA-ribosyltran sferase OS=Peptoniphilus ivorii OX=54006 GN=tgt PE=3 SV =1
MKFTVTHTSSDTKARRGVLETAHGTIQTPIFMPVGTLATVKTMTPEELKEIGAQIILSNTYHLFLRPGMEIMKEAGGLHKFMHWDGPILTDSGGFQVFSLAHRRKITEEGVTFRSHIDGSKQFLSPEKSIEIQHILGSDIIMAFDECAPYPATREYIEKSSERTSRWALRCKEYHGDRVDQNLFGIVQGGMYKEIRRRSADQLVAMDFPGYAVGGLSVGEPLDLMCDILDFTTDFLPKDKPRYLMGVGTPDYLFEAVERGIDMADCVLPTRNARNGTCMTSEGKLVVKNAKYAKDFRPLDPECDCYVCRNYSRAYIRHLFQTKEVLALRLASYHNLYFLLQLMERIRASVEGDYFLQYKDDFYRKYGYNSK

SEQ ID NO: 58975 - protein, 370 aa, Peptoniphilus lacrimalis
  misc_feature (1)..(370): tr|D1VUV8|D1VUV8_9FIRM Queuine tRNA-ribosyltransferase OS=Peptoniphilus lacrimalis 315-B OX=596330 GN=tgt PE=3 SV=1
MFKFELYKKAKDSKARLGKIITDHGEIETPIFMPVGTRATVKTMASEELKKIGAQIILSNTYHLFLRPGSEIIKKAGGLHKFMHWDKPILTDSGGFQVFSLSDNRKITEEGVEFRSHIDGSKKFLSPEVSIEMQNILGSDIIMSFDECAPYPASYDYVEKSMQRTLRWAKRGKDFHKNSDHQALFGIIQGGMYKDLRKISAKEMVDMDFPGYSVGGLSVGEPKEIMNEILDYTTDFMPENKPRYLMGVGSPDYLFEAVERGIDMADCVLPTRIARNGSVITHRGKLVIRNAKYKEDFSPLDQECDCYVCRNYTRAYIRHLFNVDEILGPRLATIHNLYFLLNMMENIRESIRGDYFLEYKNDFYKKYGYN

SEQ ID NO: 58976 - protein, 433 aa, Peptoniphilus lacrimalis; identical to SEQ ID NO: 55548
  misc_feature (1)..(433): tr|A0A2N6SJZ5|A0A2N6SJZ5_9FIRM Queuine tRNA-ribosyltran sferase OS=Peptoniphilus lacrimalis OX=33031 GN=tgt PE= 3 SV=1

SEQ ID NO: 58977 - protein, 376 aa, Peptoniphilus sp.
  misc_feature (1)..(376): tr|D7N5T0|D7N5T0_9FIRM Queuine tRNA-ribosyltransferase OS=Peptoniphilus sp. oral taxon 386 str. F0131 OX=57560 9 GN=tgt PE=3 SV=1
MFEFELIKESKECKARLGKIKTTHGEIETPIFMPVGTRATVKTMTPEELKELEAQIILSNTYHLYLKPGMEIIEKAGGLHKFMNWDKPILTDSGGFQVFSLSNNRKISEEGVEFRSHIDGSKKFLSPEISVDIQNTLGSDIMMCFDECAPYPSSYEYILNSMNRTTRWARRCKDHHKNVDNQALFGIIQGGMYKDLREISAKDLVALDFPGYAVGGLSVGEPLELMNEILDFTTDFMPKNKPRYLMGVGSPDYLFEAVERGIDMADCVLPTRIARNGTVITSKGKLVIKNAKYKDDFTPIDDECDCYTCKNYSRAYIRHLFNVDEILALRLATIHNLHFLINLMKKIRESIKNDTFMEFKDDFYNKYGYNKIRREF

SEQ ID NO: 58978 - protein, 370 aa, Peptoniphilus sp.
  misc_feature (1)..(370): tr|A0A1E9ADB9|A0A1E9ADB9_9FIRM Queuine tRNA-ribosyltran sferase OS=Peptoniphilus sp. HMSC062D09 OX=1739305 GN=t gt PE=3 SV=1
MFKFELLKTAKDSKARLGKITTNHGEIETPIFMPVGTRATVKTMTPDELKKIGSQIILSNTYHLFLRPGTDIIEKAGGLHNFMNWDKPILTDSGGFQVFSLSDNRKITEEGVHFRSHIDGSKMFISPEKSIDIQNVLGSDIMMAFDECAPYPASHEYIDNSMRRTLRWAERCKEHHKNIDKQTLFGIIQGGMYKDLREISAKEMVDMDFKGYSIGGLSVGEPLDLMNDILDYTTDFMPENKPRYLMGVGSPDYLFEAVERGVDMADCVLPTRIARNGTVLTHKGRIAIKNALYKEDFSSLDEDCDCYTCRNFSKAYIRHLFNVDEILGMRLATIHNLYFLLDMMKNIRESIKGDYFLEYKNDFYKKYGYK

SEQ ID NO: 58979 - protein, 373 aa, Peptostreptococcaceae bacterium
  misc_feature (1)..(373): tr|J4KBF8|J4KBF8_9FIRM Queuine tRNA-ribosyltransferase OS=Peptostreptococcaceae bacterium AS15 OX=936556 GN=tg t PE=3 SV=1
MNKPLKFEVIKKCNQSKARLGKIKTLHNEFETPVFMPVGTNATVKSMNEKELKEIGANIILSNTYHLHLRPGDEIVKKAGGLHEFMHWDRSILTDSGGFQVFSLGDLRKIKEEGVYFSSHLDGSKHFMGPEESIAVQNNLGSDIMMSFDECAPYPASYEYIRDSYKRTSRWAKRGKDANRNPETQALFGIIQGGMFEDLRYESANELVEMDFDGYSIGGLSVGEPKELMYEVLDYTVDIIPSEKPRYLMGVGSPDDLFEGVIRGVDMFDCVLPTRIARNGTAMTSNGKVVVRNATYAEDFTPLDHECDCYVCKNYSRAYIRHLVKANEILGARLITYHNLYFLLRMMEKIRQSIRDGRLLEYKKEFFTKYYGV

SEQ ID NO: 58980 - protein, 373 aa, Peptostreptococcaceae bacterium
  misc_feature (1)..(373): tr|A0A1I1X6H4|A0A1I1X6H4_9FIRM Queuine tRNA-ribosyltran sferase OS=Peptostreptococcaceae bacterium pGA-8 OX=152 0829 GN=tgt PE=3 SV=1
MKHSLTYELIKKDSRTKARRGVIHTLRGDIQTPVFMPVGTQATVKAMRPEQVEESGAEIILANTYHLMLRPGHKLVEEAGGLHKFMNWNKPILTDSGGFQVFSLKGLRKITEDGVTFQSYIDGSRHILTPEIAVEVQTSLGSDIMMAFDECPPYPADWHYVKKSLDRTNRWLQRCKDAHHNTEKQALFGIMQGGMYYDLRKESAEKIVEMDLPGYSIGGLSVGEPKEQMLEVLDYCVDFLPDNKPRYVMGVGTPDYLFEGVERGVDMFDCVLPTRVARNGQAMTSEGPLNMKNKRFEHDFTPLDHKCDCYTCRNYSRAYIRHLVKSNEIMASMLLSNHNLHFLINMMKGIRKSIEEDRFLEFKKEVYEGYYGK

SEQ ID NO: 58981 - protein, 372 aa, Peptostreptococcus anaerobius
  misc_feature (1)..(372): tr|R5J7K3|R5J7K3_9FIRM Queuine tRNA-ribosyltransferase OS=Peptostreptococcus anaerobius CAG:621 OX=1263100 GN= tgt PE=3 SV=1
MYAVRYELIKTCKQTGARLGRLHTPHGVIDTPIFMPVGTQATVKSMTPEELKEIGSQIILSNTYHLYLRPGHELIKKAGGLHKFMNWDRPILTDSGGFQVFSLGPLRKITEEGVEFRSHHDGSKHFLTPEKVMEIENALGPDIMMAFDECAPYPADREYVKNSLERTTRWLERCKAAHKNPENQALFGIVQGGMYKDLREQSAREITAIDLPGYAIGGLSVGEPKELMYEILEYTTPLLPEDKPRYLMGVGSPDDLIEGVIRGIDMFDCVLPTRIARNGTAMTSQGKVVVRNASYAEDFTPLDPECDCYTCRNYTKSYIRHLVKTNEILGARLISNHNLHFLLNLMKDVRQAIMDDRLMDFRNEFFAKYYGK

SEQ ID NO: 58982 - protein, 372 aa, Peptostreptococcus anaerobius
  misc_feature (1)..(372): tr|D3MPV7|D3MPV7_9FIRM Queuine tRNA-ribosyltransferase OS=Peptostreptococcus anaerobius 653-L OX=596329 GN=tgt PE=3 SV=1
MYAVRYELIKTCKQTGARLGRLHTPHGVIDTPIFMPVGTQATVKSMTPEELKEIGSQIILSNTYHLYLRPGHELIKKAGGLHKFMNWDRPILTDSGGFQVFSLGPLRKITEEGVEFRSHHDGSKHFLTPEKVMEIENALGPDIMMAFDECAPYPADREYVKNSLERTTRWLERCKAAHKNPENQALFGIVQGGMYKDLREQSAREITAIDLPGYAIGGLSVGEPKDLMYEILEYTTPLLPEDKPRYLMGVGSPDDLIEGVIRGIDMFDCVLPTRIARNGTAMTSQGKVVVRNASYAEDFTPLDPECDCYTCRNYTKSYIRHLVKTNEILGARLISNHNLHFLLNLMKDVRQAIMDDRLMDFRNEFFAKYYGK

SEQ ID NO: 58983 - protein, 372 aa, Peptostreptococcus russellii
  misc_feature (1)..(372): tr|A0A2P7Q0R2|A0A2P7Q0R2_9FIRM Queuine tRNA-ribosyltran sferase OS=Peptostreptococcus russellii OX=215200 GN=tg t PE=3 SV=1
MYAVRYELIKTCKQTGARLGRLHTPHGVIDTPIFMPVGTQATVKSLTPEELKEIEAQIILSNTYHLYLRPGHEIVKKAGGLHKFMNWDKPILTDSGGFQVFSLGPLRKISEEGVEFRSHIDGSKHMLTPEKAVEIQNALGSDIMMAFDECAPYPADREYVKNSLERTTRWLQRCKDAHKNTENQALFGIVQGGMYKDLREQSAKEITSIDLPGYAVGGLSVGEPKELMYEVLDYTVPLLPEDKPRYLMGVGTPDILIDGAIRGIDMFDCVLPTRIARNGTAMTSQGKVVVRNAVYAEDFTTLDPECDCYACKNYTKAYIRHLIKTNEILGARLLSIHNLRFLIKLMENVRQAIMEDRLMDFRNEFFEKYYGK

SEQ ID NO: 58984 - protein, 374 aa, Peptostreptococcus russellii
  misc_feature (1)..(374): tr|A0A1H8I8T6|A0A1H8I8T6_9FIRM Queuine tRNA-ribosyltran sferase OS=Peptostreptococcus russellii OX=215200 GN=tg t PE=3 SV=1
MYAVRYELIKKCKQSGARLGRLHTPHGVIDTPIFMPVGTQATVKSMTPEELKEIDAQIILSNTYHLYLRPGHELIKKAGGLHNFMHWDRPILTDSGGFQVFSLGPLRKITEEGVEFRSHIDGSKHMLSPEKAMEIQNALGSDIMMAFDECAPYPADREYVKKSLERTTRWLQRCKDAHKNTENQALFGIVQGGMYKDLREQSAKEITAIDLPGYAIGGLSVGEPKELMYEVLDYTVGLLPENKPRYLMGVGTPDILIEAAIRGIDMCDCVLPTRIARNGTAMTSQGKVVVRNATYAEDFTTLDPECDCYTCRNYTKAYIRHLIKTNEILGARLLSIHNLRFLLKLMEDVRQAIMDDRLLDFRDEFYKKYYGESK

SEQ ID NO: 58985 - protein, 372 aa, Peptostreptococcus sp.
  misc_feature (1)..(372): tr|A0A1I1YME6|A0A1I1YME6_9FIRM Queuine tRNA-ribosyltran sferase OS=Peptostreptococcus sp. D1 OX=72304 GN=tgt PE =3 SV=1
MYAVRYELIKKCRQSGARLGRLHTPHGIIETPIFMPVGTQATVKSMTPEELKEIGSQIILSNTYHLYMRPGYELIKKAGGLHEFMQWDKPILTDSGGFQVFSLGPLRKITEEGVEFRSHLDGSRHTITPEKAVEIQTALGSDIMMAFDECAPYPADRDYVKKSLERTTRWLRRCKDAHKNTENQALFGIVQGGMYKDLREQSAREITAIDLPGYAIGGLSVGEPKDIMYDILGHTVQFLPEDKPRYLMGVGSPDDLLEGVIRGVDMFDCVLPTRIARNGTAMTSQGKVVVRNATYAEDFSSLDPECDCYTCRNYTKAYIRHLIKANEILGARLLTIHNLRFLLKLMENIRTAIHEDRLLDFKEEFLKKYYQK

SEQ ID NO: 58986 - protein, 372 aa, Peptostreptococcus sp.
  misc_feature (1)..(372): tr|A0A095XYZ8|A0A095XYZ8_9FIRM Queuine tRNA-ribosyltran sferase OS=Peptostreptococcus sp. MV1 OX=1219626 GN=tgt PE=3 SV=1
MYAVRYELIKTCKQTGARLGRLHTPHGIIETPIFMPVGTQATVKAMTPEELKEIGSQIILSNTYHLYMRPGHDLIERAGGLHKFMNWDKPILTDSGGFQVFSLGPLRKIKEEGVEFRSHLDGSKHFLSPEKAMEIQNSLGSDIMMAFDECAPYPADRQYVKNSLERTTRWLERCKEAHKYPEKQALFGIVQGGMYKDLREQSAKEITAIDLPGYAIGGLSVGEPKEMMYEVLDYTVPLLPEDKPRYLMGVGSPDDLLEGVLRGIDMFDCVLPTRIARNGTAMTSQGKVVVRNASYAEDFTTLDPECDCYTCRNYTKAYIRHLIKCNEILGARLLTIHNLHFLLKLMENVRQAIREDRLLDFKNDFFAKYYGK

SEQ ID NO: 58987 - protein, 382 aa, Peptostreptococcus stomatis
  misc_feature (1)..(382): tr|E0E404|E0E404_9FIRM Queuine tRNA-ribosyltransferase OS=Peptostreptococcus stomatis DSM 17678 OX=596315 GN=t gt PE=3 SV=1
MIEKDYERKYMYAVRYELIKTCKQTGARLGRLHTPHGVIETPIFMPVGTQATVKAMTPEELKDIGSQIILSNTYHLYMRPGHDLIERAGGLHKFMNWDKPILTDSGGFQVFSLGPLRKIKEEGVEFRSHLDGSKHFLSPEKATEIQNALGSDIIMAFDECAPYPADRQYVKNSLERTTRWLERCKAAHKYPERQALFGIVQGGMYKELREQSAREITAIDLPGYAIGGLSVGEPKEMMYEVLDYTVPLLPEDKPRYLMGVGSPDDLLEGVLRGIDMFDCVLPTRIARNGTAMTSQGKVVVRNASYAEDFTSLDPECDCYTCRNYTKAYLRHLIKCNEILGARLLTIHNLHFLLKLMENVREAIREDRLLDYKKDFFEKYYGK

SEQ ID NO: 58988 - protein, 380 aa, Peredibacter sp.
  misc_feature (1)..(380): tr|A0A2E5CAL8|A0A2E5CAL8_9PROT Queuine tRNA-ribosyltran sferase OS=Peredibacter sp. OX=2024850 GN=tgt PE=3 SV=1
MEITKEVNKHFKYKLIHKDKNCNARAGVIITPHGEIPTPVFMPVGTHGAIKALQPNQLKDMDIPIILSNTYHLHLTPGSDLVKKAGGLHKFMAWDRPILTDSGGFQVFSLQGNSITEEGSKFKGPKGKDILLTPETSIQIQQNLGSDIMMAFDECIPYPADKKYVKRSIDRTHRWLDRCINSWDNPKQALFGIIQGSTYDEFRDECLEEVVKRDLPGYAIGGVSVGEGPELMEKAVKYVAPKMPEDKPRYVMGVGMPEDLFMIWENGVDMSDCIIPTKFARGGTLFTNRGKIRITHKNYRRDFFPIEPNLKDYVNSNFTRAYIKHLFDSNEILGQILATAHNIAFYKSLADRAREAILEDRFLDFKKEFLDGYSRQDGKR

SEQ ID NO: 58989 - protein, 370 aa, Peredibacter sp.
  misc_feature (1)..(370): tr|A0A2E5CAK2|A0A2E5CAK2_9PROT Queuine tRNA-ribosyltran sferase OS=Peredibacter sp. OX=2024850 GN=tgt PE=3 SV=1
MSIYKLEGQSGNARAGVVTTEHGEIQTPIFMPVGTRGAVKAIWHHELKEVGAEIILGNTYHLFLRPGHELIEKMGGLHKFMNWDRPILTDSGGYQVFSLGDLNKVTEEGVRFQSHLDGSYHMLSPEKSMEIQKALGSDIVMIFDECPALPASKDRLRESMELTLRWAKRCADYPLQDHQNLFGIVQGGLHEDLREECMERLEELDLPGLALGGLSVGEKNEEMVDFLNSFTPKMPEHKPRYLMGVGKPLDILNGIRAGIDMFDCVLPTRNARNGQFLTSHGPVNIKKQKFQFDELPPDPECDCKVCSNYSRSYVRHLFTVGEYLGGQMISYHNLHFYLKMVKEARAAILEDKFDDYYKEFYKKYTSERWK

SEQ ID NO: 58990 - protein, 371 aa, Perlucidibaca sp.
  misc_feature (1)..(371): tr|A0A2P6ASQ7|A0A2P6ASQ7_9GAMM Queuine tRNA-ribosyltran sferase OS=Perlucidibaca sp. HR-E OX=2094561 GN=tgt PE= 3 SV=1
MRFTLKATDGKARRGELTFARGTVQTPAFMPVGTYGTVKGMLPRDIHAIGAEIILGNTFHLWLRPGTEIIKAHGDLHDFTQWQGPILTDSGGFQVFSLGKLRKITEEGVRFQSPVDGSKVFLSPEESMRIQRDLGSDIVMIFDECTPYPATHEEADRSLVLSLRWAKRSKGAHGDNPNALFGIVQGGMYEDLRLKSLDGLQAIGFDGYAIGGLSVGEPKEDMIRILDFLPGHLPADKPRYVMGVGKPEDLVEGVRRGIDMFDCVMPTRNARNGHYFVTDGIVRIRNSQYKTDTGPLDPHCDCEACTGFSRAYLHHLDKCGEMLGAQLGTIHNLRYYQRLMAGLREAIEHGRLQPFVDDFYARRGLPTPPLN

SEQ ID NO: 58991 - protein, 371 aa, Permianibacter aggregans
  misc_feature (1)..(371): tr|A0A4R6V2L1|A0A4R6V2L1_9GAMM Queuine tRNA-ribosyltran sferase OS=Permianibacter aggregans OX=1510150 GN=tgt P E=3 SV=1
MKFQLKATDGQARRGELQFERGTVQTPAFMPVGTYGAVKSMSPDDLKAIGAEIILGNTFHLMLRPGPELLEKLGGLHGFGGWQGPILTDSGGFQVFSLGELRKISEQGVEFRSPIDGSKVWLDPERSMAVQRSIGADIVMIFDECTPYPATYEQAKFSMELSLRWAERSKKAHGDNPAALFGIVQGGMYLDLRKVSLEGLTNIGFDGYAIGGLSVGEPKHEMVKVLNAVTPQLPTDRPRYLMGVGKPEDIVEAVRRGVDMFDCVMPTRNARNAHLFTTEGVVRLRNAKYRDDQRPVEEGCDCYSCQNFSRAYLHHLDKCKETLGARLNTIHNLHYYQRVMAGLRGAIETGNLAAFVDEFYQRRGEKTPPLQ

SEQ ID NO: 58992 - protein, 378 aa, Persephonella hydrogeniphila
  misc_feature (1)..(378): tr|A0A285NBT0|A0A285NBT0_9AQUI Queuine tRNA-ribosyltran sferase OS=Persephonella hydrogeniphila OX=198703 GN=tg t PE=3 SV=1
MFEFELLKKDGNARLGKIYTAHGEIETPVFMPVGTQGTVKAVTKEQLLSTKPQIILGNTYHLYLRPGIEVLEYFGGLHRFMNWGKPILTDSGGFQVFSLSREKKKEGKHKAEVILTEEGVKFKSHLDGSWHFFTPELVIHIQEIIGSDIMMPLDVCPPYPVSHTTAKDAVDKTIRWLERSKKAKKNEWQALFGIIQGSVYSDLRRESAIKTVDLDMDGYSIGGLSVGEPAELMYEMTEIVIPFIPEDKPRYLMGVGTPENIIESVERGVDMFDCVMPTRNARNGTLFTTYGRLNIKAAKHRFSDEPVDSECDCYTCKNFSRGYVRHLFNAEEITGMILATIHNLRFYTRLMEEIRKSIKESKFLEFKKEFLDKYTGLK

SEQ ID NO: 58993 - protein, 348 aa, Persephonella marina
  misc_feature (1)..(348): tr|C0QSJ4|C0QSJ4_PERMH Queuine tRNA-ribosyltransferase OS=Persephonella marina (strain DSM 14350 / EX-H1) OX=1 23214 GN=tgt PE=3 SV=1
MPVGTQGTVKAVTKDQLLSTKPQIILGNTYHLYLRPGVDVLKHFGGLHRFMNWDLPILTDSGGFQVFSLAKEKNVQGKHKTEVILTEEGVKFRSHLDGSWHFFTPELVIQIQEIIGSDIIMPLDVCPPYPVSHTTARDAVEKTIRWLERSKKAKKDNGQALFGIVQGSTYPDLRRESALKTVEMEMDGYSIGGLSVGEPAEFMYEMTQIVVEILPENRPRYLMGVGTPENIVESVDKGVDMFDCVMPTRNARNGTLFTHYGRLNIKAAKHRLSDDPVDPECDCYTCRNFSRGYLRHLYNAEEITGMILGTIHNLRYYSLLMEKIRDSIRKGRFKQFKKEFYDKQSVVK

SEQ ID NO: 58994 - protein, 378 aa, Persephonella sp.
  misc_feature (1)..(378): tr|A0A432S306|A0A432S306_9AQUI Queuine tRNA-ribosyltran sferase OS=Persephonella sp. OX=2060922 GN=tgt PE=3 SV= 1
MKFELIKTDGNARLGKIYTKHGTIETPVFMPVGTQGTVKAITKEQLLDINTQIILGNTYHLYLRPGLEVLKHFKGLHNFMNWEKPILTDSGGFQVFSLALNKKVKSGKHKADVKITEDGVKFKSHLDGSWHYFTPEFVIEIQEIIGSDIMMPLDICPPYPVSYQTAKESVEKTLRWLERSKKAKKNEWQGLFGIIQGSTYEDLRVYSAIKTVELDMDGYSIGGLSVGEPTEYMYSMTEAVVPYLPKDKPRYLMGVGTPENIIESVSRGIDMFDCVMPTRNARNGTLFTHYGRLNIKAGKHKLSDEPIDKDCDCYTCKNFSRGYIRHLFNAEEITGMTLATIHNLRFYMKLMEDIREAIKNDRFEEFKSEFYEKYNNNL

SEQ ID NO: 58995 - protein, 380 aa, Persephonella sp.
  misc_feature (1)..(380): tr|A0A432S0E2|A0A432S0E2_9AQUI Queuine tRNA-ribosyltran sferase OS=Persephonella sp. OX=2060922 GN=tgt PE=3 SV= 1
MKFELLNKDGRARLGKIYTERGVIETPVFMPVGTQGSVKALTKQHLLDIKAQIILGNTYHLYLRPGLEVLKHFKGLHNFINWEKPILTDSGGFQVFSLALNKKVKSGKHKAEVKITEEGVRFKSHLDGSWHYFTPEFVIEIQEIIGSDIMMPLDICPPYPVSYQSAKDSVEKTLRWLERSKRRKRYKNQALFGIIQGSTYEDLRIYSAIKTVEMDMDGYSIGGLSVGEPTEYMYSMTEVVVNYLPEDKPRYLMGVGTPENIIESVDRGIDMFDCVMPTRNARNGTLFTHYGRLNIKAGKYKLSEEPIDKDCDCYTCKNFSRGYIRHLFNAEEITGMILATIHNLRFYTKLMEDIRKAIRKNRFKEFKNNFYLKYYSEGSY

SEQ ID NO: 58996 - protein, 376 aa, Petrimonas mucosa
  misc_feature (1)..(376): tr|A0A1G4G356|A0A1G4G356_9PORP Queuine tRNA-ribosyltran sferase OS=Petrimonas mucosa OX=1642646 GN=tgt PE=3 SV= 1
MKFELQHTDPRSNARAGVITTDHGHIETPVFMPVGTIGSVKAVQMTELKEDIKAQIILGNTYHLYLRPGLKVLEGAGGLHRFNSWNRPILTDSGGFQVFSLAGNRKLTEEGAEFRSHIDGSKHFFTPEKVMDIQRTIGADIIMAFDECTPGDADYAYAKKSLDLTERWLKRCIDRFKETECPYGYRQTLFPIVQGCVFPDLRRRAAENVASLEADGNAIGGLAVGEPTEKMYEMVELVNEILPKDKPRYLMGVGTPANLLEAVERGVDMFDCIMPTRNGRNGQIFTKNGILNMRNERWKEDFSPIEEEGASFVDTLYSKAYLRHLINTNEILGLQIASVHNLAFYTWLMREARKHIIEGDFSSWKRIMVERTMQRL

SEQ ID NO: 58997 - protein, 376 aa, Petrimonas sp.
  misc_feature (1)..(376): tr|A0A3G9DNE0|A0A3G9DNE0_9PORP Queuine tRNA-ribosyltran sferase OS=Petrimonas sp. IBARAKI OX=1978337 GN=tgt PE= 3 SV=1
MKFELQHTDSSSQARAGLITTDHGQIKTPVFMPVGTVGSVKAVQITELKDDIKAQIILGNTYHLYLRPGLDIMQLAGGLHKFNSWERPILTDSGGFQVFSLAENRKLTEEGAEFRSHIDGSKHFFSPEKVVDIQRIIGADIMMAFDECTPGDADYDYAKKSLELTERWLKRCMDRFNETEGLYGYKQTLFPIVQGCVYPDLRRRAAENVASFEADGNAIGGLAVGEPTEKMYEMVELVNEILPKDKPRYLMGVGTPANLLEGIERGVDMFDCIMPTRNGRNGQIFTKNGILNMRNERWKKDFSPIEEAGASYVDTLYSKAYLRHLINTNEILGLQIASVHNLAFYTWLMQEARKHIIEGDFPSWKRTMVERTMQRL

SEQ ID NO: 58998 - protein, 375 aa, Petrocella atlantisensis
  misc_feature (1)..(375): tr|A0A3P7S2Q6|A0A3P7S2Q6_9FIRM Queuine tRNA-ribosyltran sferase OS=Petrocella atlantisensis OX=2173034 GN=tgt P E=3 SV=1
MYELLKKDGMAKRGTFHTVHGPIQTPVFMNVGTVAAIKGGVSTNDLKDIKCQVQLSNTYHLHVRTGDATIKKLGGLHKFMVWDRPILTDSGGFQVFSLAALRKIKEEGVYFSSHIDGHKIFMGPEESMQIQSNLSSTIAMAFDECPPIPATRKYVIDSVDRTTRWLERCRKELTRLNSLESTINNRQMLFGINQGGIYDDLRIEHAKVIGDMNLDGYAIGGLAVGESHDEMYRILESTVPYMPENKPTYLMGVGTPENILEAVERGVDFFDCVYPTRNGRHGHVYTNHGKMNIYNAKFELDERPIEEGCGCEACKTYSRAYIRHLMKAKEMLGMRLCVMHNLYFYNTMMEEIRDAIEKGVYQAYKKAKIDGMNIK

SEQ ID NO: 58999 - protein, 375 aa, Petrotoga halophila
  misc_feature (1)..(375): tr|A0A2S5EJV7|A0A2S5EJV7_9BACT Queuine tRNA-ribosyltran sferase OS=Petrotoga halophila DSM 16923 OX=1122953 GN= tgt PE=3 SV=1
MDDSPIKFELIHIDRYTGARRGRIVTKHGTIETPVFMPVGTNATVKTLTNSLLNDINTEIILANAFHLYLRPGLEVLEHFQGLHNFMNWEKPILTDSGGFQVFSLPNTRLTDEKVIFKSPLDGSQIELTPEKSLDIQKVIGSDIAMVLDVCINSLSGYDAVKDSVQKTFNWALRSKRYHNSNGQALFGIVQGGLFEDLRNLSLSQITSLDFDGYALGGLAVGEKYQDSEKILKAFGNKLPENKPRYIMGIGSPTMMFLSVENGLDMFDCVLPTRMGRHGTALTWKGKLNLKSSEVKFDQKPIDEKCDCYTCKNHSRGYIHHLFKKDEVLGKILLSIHNLRFNISLVEKMREAIENDEFKFFKDEFFSSSTYSLTN

SEQ ID NO: 59000 - protein, 370 aa, Petrotoga mexicana
  misc_feature (1)..(370): tr|A0A2K1PEG8|A0A2K1PEG8_9BACT Queuine tRNA-ribosyltran sferase OS=Petrotoga mexicana DSM 14811 OX=1122954 GN=t gt PE=3 SV=1
MKFELIHIDRYTGARRGRIITKHGTIETPVFMPVGTNATVKTLTNSLLNDINTEIILANAFHLYLRPGLEVLDHFQGLHNFMNWKKPILTDSGGFQVFSLPNTRLTDEKVIFKSPLDGSQIELTPEKSLDIQKVIGSDIAMVLDVCINSLSGYDAVKDSVQKTFNWALRSKRYHNNNGQALFGIVQGGLFEDLRKLSLSQITSLDFDGYALGGLAVGEKYQDSEKILKAFGNKLPENKPRYIMGIGSPTMMFLSVENGMDMFDCVLPTRMGRHGTALTWKGKLNLKSSQVKFDQKPIDEECDCYTCKNHSRGYIHHLFKKDEVLGKILLSIHNLRFNISLVAKMREAIENDDFKFLKEEFFKSSTYSLTN

SEQ ID NO: 59001 - protein, 375 aa, Petrotoga miotherma
  misc_feature (1)..(375): tr|A0A2K1P3Y8|A0A2K1P3Y8_9BACT Queuine tRNA-ribosyltran sferase OS=Petrotoga miotherma DSM 10691 OX=1434326 GN= tgt PE=3 SV=1
MDDSPIKFEIIHIDKYTGARRGRIITKHGIVETPVFMPVGTNATVKTLTNSLLNDINTEIILANAFHLYLKPGLEVLEHFQGLHNFMNWEKPILTDSGGFQVFSLPNTRLSDEKVIFKSPLDGSQIELTPEKSLDIQKVIGSDIAMVLDVCINSLSGYDAVKDSVQKTFNWALRSKRYHNNNGQALFGIVQGGLFEDLRNLSLSQITSLDFDGYALGGLAVGEKYQDSEKILKAFGNKLPENKPRYIMGIGSPTMMFLSVENGMDMFDCVLPTRMGRHGTALTWKGKLNLKSSQVKFDQKPIDEECDCYTCKNHSRGYIHHLFKKDEVLGKILLSIHNLRFNISLVEKMREAIENDDFKFLKEEFFNSSTYSLTN

SEQ ID NO: 59002 - protein, 378 aa, Petrotoga mobilis
  misc_feature (1)..(378): tr|A0A124FEY9|A0A124FEY9_9BACT Queuine tRNA-ribosyltran sferase OS=Petrotoga mobilis OX=69499 GN=tgt PE=3 SV=1
MDDSPIKFELIHIDRYTGARRGRIVTKHGTIETPVFMPVGTNATVKTLTNSLLNDINTEIILANAFHLYLRPGLEVLEHFQGLHNFMNWEKPILTDSGGFQVFSLPNTRLTDEKVIFKSPLDGSQIELTPEKSLDIQKVIGSDIAMVLDVCINSLSGYDAVKDSVQKTFNWALRSKRYHNNNHNNGQALFGIVQGGLFEDLRELSLSQITSLDFDGYALGGLAVGEKYQDSEKILKAFGNKLPENKPRYIMGIGSPTMMFLSVENGMDMFDCVLPTRMGRHGTALTWKGKLNLKSSLVKFDQKPIDEECDCYTCKNHSRGYIHHLFKKDEVLGKVLLSIHNLRFNISLVEKMREAIENDNFKFFKDEFFKSSTYSLTN

SEQ ID NO: 59003 - protein, 375 aa, Petrotoga mobilis; identical to SEQ ID NO: 58999
  misc_feature (1)..(375): tr|A9BF77|A9BF77_PETMO Queuine tRNA-ribosyltransferase OS=Petrotoga mobilis (strain DSM 10674 / SJ95) OX=40383 3 GN=tgt PE=3 SV=1

SEQ ID NO: 59004 - protein, 378 aa, Petrotoga olearia
  misc_feature (1)..(378): tr|A0A2K1P5C8|A0A2K1P5C8_9BACT Queuine tRNA-ribosyltran sferase OS=Petrotoga olearia DSM 13574 OX=1122955 GN=tg t PE=3 SV=1
MDDSPIQFELIHIDRYTGARRGRIITKHGIVETPVFMPVGTNATVKTLTNSLLNDINSEIILANAFHLYLRPGLEILEHFKGLHNFMNWEKPILTDSGGFQIFSLPHTKLTDEKVIFKSPLDGSQIELTPEKSLDIQKVIGSDIAMVLDVCINSLSGYDAVKDSVQKTFNWALRSKRYHNNNHNNGQALFGIFQGGLFEDLRELSLSQITSLDFDGYALGGLAVGEKYQDSEKILKAFGNKLPENKPRYIMGIGSPTMMFLSVENGMDMFDCVLPTRMGRHGTALTWKGKLNLKSSLVKFDQKPIDEECDCYTCKNHSRGYIHHLFKKDEVLGKVLLSIHNLRFNISLVEKMREAIENDDFKFFKDEFFKSSTYSLTN

SEQ ID NO: 59005 - protein, 378 aa, Petrotoga sibirica
  misc_feature (1)..(378): tr|A0A4R8EXL9|A0A4R8EXL9_9BACT Queuine tRNA-ribosyltran sferase OS=Petrotoga sibirica OX=156202 GN=tgt PE=3 SV= 1
MDDSPIKFELIHTDKYTGARRGRIITKHGTIETPVFMPVGTNATVKTLTNSLLNDINSEIILANAFHLYLRPGLEILEHFKGLHNFMNWEKPILTDSGGFQVFSLPNTKLTDEKVIFKSPLDGSQIELTPEKSLDIQKVIGSDIAMVLDVCINSLSGYDAVKDSVQKTFNWALRSKRYHNNNHNNGQALFGIVQGGLFEDLRELSLSQITSLDFDGYALGGLAVGEKYQDSEKILKAFGNKLPENKPRYIMGIGSPTMMFLSVENGMDMFDCVLPTRMGRHGTALTWKGKLNLKSSQVKFDQKPIDEECDCYTCKNHSRGYIHHLFKKDEVLGKVLLSIHNLRFNISLVEKMREAIENDNFKFLKDEFFKSSTYSLTN

SEQ ID NO: 59006 - protein, 375 aa, Petrotoga sp.
  misc_feature (1)..(375): tr|A0A328PYS0|A0A328PYS0_9BACT Queuine tRNA-ribosyltran sferase OS=Petrotoga sp. 9PW.55.5.1 OX=1308979 GN=tgt P E=3 SV=1
MEETPIKFELLHVDKYTGARRGRIITKRGIIETPVFMPVGTNATVKGLTKSNLEEINSEIILANAFHLYLRPGLEVLDHFNGLHNFMNWERPILTDSGGFQVFSLPNTKLTDEKVIFKSPLDGSKIELTPEKSLDIQKVIDSDIAMVLDVCVNSKSNYDTVKDSVIKTFNWALRSKEYHNHKTQALFGIVQGGLYKDLRELSLSQITSLDFDGYALGGLAVGEKYQESEKILNSFGNRLPENKPRYIMGIGSPTMMFLSVENGMDMFDCVLPTRMGRHGTALTFEGKINLKSSNVKYDEKPIDEQCDCYTCRNHSRGYIHHLFKKDEILGKVLLSIHNLRFNIFLIEKMRTAIENDDFKYLKEEFFNNSTYSLTN

SEQ ID NO: 59007 - protein, 378 aa, Petrotoga sp.; identical to SEQ ID NO: 59005
  misc_feature (1)..(378): tr|A0A2S5EEJ9|A0A2S5EEJ9_9BACT Queuine tRNA-ribosyltran sferase OS=Petrotoga sp. SL27 OX=1445612 GN=tgt PE=3 SV =1

SEQ ID NO: 59008 - protein, 376 aa, Phaeobacter gallaeciensis
  misc_feature (1)..(376): tr|V9WG06|V9WG06_9RHOB Queuine tRNA-ribosyltransferase OS=Phaeobacter gallaeciensis DSM 26640 OX=1423144 GN=tg t PE=3 SV=1
MAPKISFDLKATDGKARTGVINTPRGEIRTPAFMPVGTAATVKAMMPESVRATGADILLGNTYHLMLRPTAERIDRLGGLHKFMNWDRPILTDSGGFQVMSLAGLRKLTEKGVTFKSHVDGSKHELTPERSMEIQKLLGSDIVMCFDECPALPADRDRIAESMRLSMRWAERSREAFGDRPGHALFGIMQGGLEQDLREESAEALTKIGFEGYAVGGLAVGEGQEAMFDCLDYAPGFLPEDKPRYLMGVGKPDDIVGAVARGIDMMDCVLPSRSGRTGQAFTRYGVVNIKNARHQDDPRPLDEKCSCPACSNYSRAYLHHVFRSNEMISGMLLTWHNLHYFQEIMQGMRDAIAAGTFEAWQKDFHDTRAQGDIERL

SEQ ID NO: 59009 - protein, 376 aa, Phaeobacter gallaeciensis
  misc_feature (1)..(376): tr|A0A366WS09|A0A366WS09_9RHOB Queuine tRNA-ribosyltran sferase OS=Phaeobacter gallaeciensis OX=60890 GN=tgt PE =3 SV=1
MSDRISFDLHATDGKARTGVINTPRGDIRTPAFMPVGTAATVKAMMPESVRETGADILLGNTYHLMLRPTAERIDRLGGLHKFMNWDRPILTDSGGFQVMSLANLRKLTEKGVTFKSHVDGSKHELTPERSMEIQKLLGSDIVMCFDECPALPADRDRIAESMRLSMRWAERSKDAFGDRPGHALFGIMQGGLEQDLREESAAALTKIGFDGYAVGGLAVGEGQEAMFDCLDYAPDYLPQDKPRYLMGVGKPDDIVGAVARGIDMMDCVLPSRSGRTGQVFTRNGVVNIKNARHADDPRPLDEACSCPACSKYSRAYLHHVFRSNEMISGMLLTWHNLHYFQEIMQGMRDAIAAGTFASWQADFHAQRAQGDIEPL

SEQ ID NO: 59010 - protein, 376 aa, Phaeobacter inhibens
  misc_feature (1)..(376): tr|A0A135INY1|A0A135INY1_9RHOB Queuine tRNA-ribosyltran sferase OS=Phaeobacter inhibens OX=221822 GN=tgt PE=3 S V=1
MAPKISFDLKATDGKARTGVINTPRGEIRTPAFMPVGTAATVKAMMPESVRATGADILLGNTYHLMLRPTAERIDRLGGLHKFMNWERPILTDSGGFQVMSLAGLRKLTEKGVTFKSHVDGSKHELTPERSMEIQKLLGSDIVMCFDECPALPADRDRIAESMRLSMRWAERSREAFGDRPGHALFGIMQGGLEQDLREESAEALTKIGFEGYAVGGLAVGEGQEAMFDCLDYAPGFLPEDKPRYLMGVGKPDDIVGAVARGIDMMDCVLPSRSGRTGQAFTRYGVVNIKNARHQDDPRPLDEKCSCPACSNYSRAYLHHVFRSNEMISGMLLTWHNLHYFQEIMGGMRDAIAAGTFEAWQKDFHDTRAQGDIERL

SEQ ID NO: 59011 - protein, 376 aa, Phaeobacter inhibens
  misc_feature (1)..(376): tr|A0A2I7KA40|A0A2I7KA40_9RHOB Queuine tRNA-ribosyltran sferase OS=Phaeobacter inhibens OX=221822 GN=tgt PE=3 S V=1
MAPKISFDLKATDGKARTGVINTPRGEIRTPAFMPVGTAATVKAMMPESVRATGADILLGNTYHLMLRPTAERIDRLGGLHKFMNWERPILTDSGGFQVMSLAGLRKLTEKGVTFKSHVDGSKHELTPERSMEIQKLLGSDIVMCFDECPALPADRDRIAESMRLSMRWAERSREAFGDRPGHALFGIMQGGLEQDLREESAEALTKIGFEGYAVGGLAVGEGQEAMFDCLDYAPGFLPEDKPRYLMGVGKPDDIVGAVARGIDMMDCVLPSRSGRTGQAFTRYGVVNIKNARHQDDPRPLDEKCSCPACSNYSRAYLHHVFRSNEMISGMLLTWHNLHYFQEIMSGMRDAIAAGTFEAWQKDFHDTRAQGDIERL

SEQ ID NO: 59012 - protein, 376 aa, Phaeobacter italicus
  misc_feature (1)..(376): tr|A0A0H5CYN7|A0A0H5CYN7_9RHOB Queuine tRNA-ribosyltran sferase OS=Phaeobacter italicus OX=481446 GN=tgt PE=3 S V=1
MAELFNFELKATDGKARTGVINTPRGEIRTPAFMPVGTAATVKAMMPESVRATGADILLGNTYHLMLRPTAERIDRLGGLHKFMNWERPILTDSGGFQVMSLAGLRKLTEKGVTFKSHVDGSKHELTPERSMEIQRLLGSDIVMCFDECPALPADRDRIAESMRLSMRWAERSREAFGDRPGHALFGIMQGGLEQDLREESAEALKKIGFEGYAVGGLAVGEGQEAMFDCLDYAPGFLPEDKPRYLMGVGKPDDIVGAVARGIDMMDCVLPSRSGRTGQAFTRYGVVNIKNARHQDDPRPLDEKCSCPACSNYSRAYLHHVFRSNEMISGMLLTWHNLHYFQEIMGGMRDAIAAGTFEAWQKDFHDTRAQGDIERL

SEQ ID NO: 59013 - protein, 376 aa, Phaeobacter piscinae
  misc_feature (1)..(376): tr|A0A291FPS9|A0A291FPS9_9RHOB Queuine tRNA-ribosyltran sferase OS=Phaeobacter piscinae OX=1580596 GN=tgt PE=3 SV=1
MAPKISFDLKATDGKARTGVINTPRGEIRTPAFMPVGTAATVKAMMPESVRATGADILLGNTYHLMLRPTAERIDRLGGLHKFMNWDRPILTDSGGFQVMSLAGLRKLTEKGVTFKSHVDGSKHELTPERSMEIQKLLGSDIVMCFDECPALPADRDRIAESMRLSMRWAERSREAFGDRPGHALFGIMQGGLEQDLREESAEALTKIGFEGYAVGGLAVGEGQEAMFDCLDYAPGFLPEDKPRYLMGVGKPDDIVGAVARGIDMMDCVLPSRSGRTGQAFTRYGVVNIKNARHQDDPRPLDENCTCPACSNYSRAYLHHVFRSNEMISGMLLTWHNLHYFQEIMGGMREAIAAGTFEAWQKDFHDTRAQGDIERL

SEQ ID NO: 59014 - protein, 376 aa, Phaeobacter piscinae
  misc_feature (1)..(376): tr|A0A291G120|A0A291G120_9RHOB Queuine tRNA-ribosyltran sferase OS=Phaeobacter piscinae OX=1580596 GN=tgt PE=3 SV=1
MAPKISFDLKATDGKARTGVINTPRGEIRTPAFMPVGTAATVKAMMPESVRATGADILLGNTYHLMLRPTAERIDRLGGLHKFMNWERPILTDSGGFQVMSLAGLRKLTEKGVTFKSHVDGSKHELTPERSMEIQKLLGSDIVMCFDECPALPADRDRIAESMRLSMRWAERSREAFGDRPGHALFGIMQGGLEQDLREESAEALTKIGFEGYAVGGLAVGEGQEAMFECLDYAPGFLPEDKPRYLMGVGKPDDIVGAVARGIDMMDCVLPSRSGRTGQAFTRYGVVNIKNARHQDDPRPLDENCSCPACSTYSRAYLHHVFRSNEMISGMLLTWHNLHYFQEIMGGMRDAIAAGTFEAWQKDFHDTRAQGDIERL

SEQ ID NO: 59015 - protein, 460 aa, Phaeobacter porticola
  misc_feature (1)..(460): tr|A0A1L3I5S5|A0A1L3I5S5_9RHOB Queuine tRNA-ribosyltran sferase OS=Phaeobacter porticola OX=1844006 GN=tgt PE=3 SV=1
MARAVLADKGKRTRRAASLLSESQAQCSGKAHCRLENQPEIGHIRQAVPVGFLIAQSRVQVADDPVGKSPAVAGPRVRQPKEDIMAPKISFDLKATDGKARTGVINTPRGEIRTPAFMPVGTAATVKAMMPESVRATGADILLGNTYHLMLRPTAERIDRLGGLHKFMNWERPILTDSGGFQVMSLAGLRKLTEKGVTFKSHVDGSKHELTPERSMEIQKLLGSDIVMCFDECPALPADRDRIAESMRLSMRWAERSREAFGDRPGHALFGIMQGGLEQDLREESAEALTKIGFEGYAVGGLAVGEGQEAMFDCLDYAPGFLPEDKPRYLMGVGKPDDIVGAVARGIDMMDCVLPSRSGRTGQAFTRYGVVNIKNARHQDDPRPLDETCSCPACSNYSRAYLHHVFRSNEMISGMLLTWHNLHYFQEIMGGMRDAIAAGTFEAWQKDFHDTRAQGDIERL

SEQ ID NO: 59016 - protein, 376 aa, Phaeobacter sp.
  misc_feature (1)..(376): tr|A0A384GKI0|A0A384GKI0_9RHOB Queuine tRNA-ribosyltran sferase OS=Phaeobacter sp. S60 OX=1569353 GN=tgt PE=3 S V=1
MAPKISFDLKATDGKARTGVINTPRGEIRTPAFMPVGTAATVKAMMPESVRATGADILLGNTYHLMLRPTAERIDRLGGLHKFMNWERPILTDSGGFQVMSLAGLRKLTEKGVTFKSHVDGSKHELTPERSMEIQKLLGSDIVMCFDECPALPADRDRIAESMRLSMRWAERSREAFGDRPGHALFGIMQGGLEQDLREESAEALTKIGFEGYAVGGLAVGEGQEAMFDCLDYAPGFLPEDKPRYLMGVGKPDDIVGAVARGIDMMDCVLPSRSGRTGQAFTRYGVVNIKNARHQDDPRPLDENCTCPACSNYSRAYLHHVFRSNEMISGMLLTWHNLHYFQEIMGGMRDAIAAGTFEAWQKDFHDTRAQGDIERL

SEQ ID NO: 59017 - protein, 375 aa, Phaeobacter sp.
  misc_feature (1)..(375): tr|A0A254QM68|A0A254QM68_9RHOB Queuine tRNA-ribosyltran sferase OS=Phaeobacter sp. 22II1-1F12B OX=1317111 GN=tg t PE=3 SV=1
MSRFSYQLNATDGRARTGVISTPRGEIRTPAFMPVGTAATVKAMMPESVAATGADILLGNTYHLMLRPGAERVDRLGGLHKFMNWEKPILTDSGGFQVMSLAGLRKLTEQGVTFKSHVDGSKHELTPERSMEIQRLLGSDIVMCFDECPALPADEKRVAESMRLSMRWAERSRDAFGDRPGHALFGIQQGGVTQELRAESAEKLREIGFDGYAVGGLAVGEGQETMFEVLDYAPEMLPEDRPRYLMGVGKPDDIVGAVKRGIDMMDCVLPSRSGRTGQVFTRRGVVNIKNARHADDPRPLDEECGCPACRNYSRAYLHHVFRAQEMISGMLLTWHNLHYYQDIMAGMRGAISEGRFAAWEAEFHAGRAQGDIEPL

SEQ ID NO: 59018 - protein, 377 aa, Phaeodactylibacter luteus
  misc_feature (1)..(377): tr|A0A5C6RI95|A0A5C6RI95_9BACT Queuine tRNA-ribosyltran sferase OS=Phaeodactylibacter luteus OX=1564516 GN=tgt PE=3 SV=1
MFSYTLQKTATDCGARAGQIETAHGVIQTPIFMPVGTLGTVKGVHQRELAEDIRAQIILGNTYHLYLRPGLDVLEGAGGLHAFNGWKKPILTDSGGYQVYSLSGQRKITEEGVTFRSHIDGSKHFFSPERAIDIQRSIGADIIMAFDECPPYPCDYRYAKDSMHMTHRWLKRCMAQMGATSGRYGYEQTLFPIVQGSTYPDLRRASAETIAEAGQPGNAIGGLSVGEPAEDMYETTELVCGILPKEKPRYLMGVGTPDNILECIALGVDMFDCVLPTRNARHGMLYTAQGVINIKNAKWKEDFSPIDEHTPCFASQQYSKAYVRHLMHTKELLGPQIASLHNLSFYLWLVGEARKHILEGDFLPWKNQMVKQMQRRL

SEQ ID NO: 59019 - protein, 377 aa, Phaeodactylibacter xiamenensis
  misc_feature (1)..(377): tr|A0A098S911|A0A098S911_9BACT Queuine tRNA-ribosyltran sferase OS=Phaeodactylibacter xiamenensis OX=1524460 GN =tgt PE=3 SV=1
MFTFQLQHTDPKSAARAGRIETAHGEIQTPIFMPVGTLGTVKGVHQRELESDIRAQIILGNTYHLYLRPGLEILENAGGLHGFNGWKRPMLTDSGGYQVYSLSAQRKIDEEGVTFRSHIDGSSHTFTPERAIDIQRIIGADIIMAFDECPPYPCDYEYAKNSMELTHRWLDRCVKRMAETGGKYGYEQTLFPIVQGSTYPDLRRKSAETIAAAGQPGNAIGGLSVGEPAEAMYETTDQVCHILPKDKPRYLMGVGTPENILECIALGVDMFDCVLPTRNARHGMLYTSEGIINIKNAKWKDDFSPVDASNPCYASQQYSKAYLRHLMHTKELLGPQIASLHNLSFYLWLVGEARQHIIDGDFASWKEEMVKRVQRRL

SEQ ID NO: 59020 - protein, 375 aa, Phaeospirillum fulvum
  misc_feature (1)..(375): tr|A0A1H6HJQ7|A0A1H6HJQ7_PHAFV Queuine tRNA-ribosyltran sferase OS=Phaeospirillum fulvum OX=1082 GN=tgt PE=3 SV =1
MTSFRYERFASDGAARLGRLHTAHGAIDTPAFMPVGTAATVKAMQPESVAATGAQIVLGNTYHLMLRPGAERIDRLGGLHRFMNWSGPILTDSGGFQVMSLAKLRKLDENGVTFQSHHDGSSHHLSPERSMEIQRLLGADITMAFDECTPFPATPAQAAESMRLSMRWAVRSKTAFVERPGHGLFGIVQGGIYPDLRAESAQALIEIGFDGYAVGGLAVGEGQEAMFATLDSTVPLLPEDRPRYLMGVGRPSDIVGAVLRGIDMFDCVMPTRSGRTAQAFTRRGTVNLRNARHQDDPRPLEEGCGCPACRSYSRAYLHHLIRSEEILGPMLLTWHNIQAYQDLMRDLRAAIGEGRVAAFAAEAAAREALGDIPPL

SEQ ID NO: 59021 - protein, 375 aa, Phaeospirillum fulvum
  misc_feature (1)..(375): tr|S9SF70|S9SF70_PHAFV Queuine tRNA-ribosyltransferase OS=Phaeospirillum fulvum MGU-K5 OX=1316936 GN=tgt PE=3 SV=1
MTSFRYERFASDGAARLGRLHTAHGAIDTPAFMPVGTAATVKAMQPESVAATGAQIVLGNTYHLMLRPGAERIDRLGGLHRFMNWSGPILTDSGGFQVMSLAKLRKLDENGVTFQSHHDGSSHHLSPERSMEIQRLLGSDITMAFDECTPFPATPAQAAESMRLSMRWAVRSKTAFVERPGHGLFGIVQGGIYPDLRAESAQALIEIGFDGYAVGGLAVGEGQEAMFATLDATVPLLPEDRPRYLMGVGRPSDIIGAVLRGIDMFDCVMPTRSGRTAQAFTRRGTVNLRNARHQDDPRPLEEGCGCPACRSYSRAYLHHLIRSEEILGPMLLTWHNIQAYQDLMRDLRAAIGEGRVAAFAAEAAAREALGDIPPL

SEQ ID NO: 59022 - protein, 375 aa, Phaeospirillum molischianum
  misc_feature (1)..(375): tr|H8FU18|H8FU18_PHAMO Queuine tRNA-ribosyltransferase OS=Phaeospirillum molischianum DSM 120 OX=1150626 GN=tg t PE=3 SV=1
MTSFRYERFATDGAARLGRLHTAHGAIDTPAFMPVGTAATVKAMQPESVAATGAQIVLGNTYHLMLRPGAERIDRLGGLHRFMNWSGPILTDSGGFQVMSLAKLRKLDENGVTFQSHHDGSSHHLSPERSMEIQRLLGADITMAFDECTPFPATPAQAADSMRLSMRWAVRSKAAFVERPGHGLFGIVQGGIYSDLRAESARALIDIGFDGYAVGGLAVGEGQEAMFATLDATVPLLPEDRPRYLMGVGRPSDIVGAVLRGIDMFDCVMPTRSGRTAQAFTRRGTVNLRNARHQDDPRPLEEGCACPACRSYSRAYLHHLIRSEEILGPMLLTWHNIQAYQDLMRDLRAAIGAGRVAAFAAEAAAREALGDIPAL

SEQ ID NO: 59023 - protein, 370 aa, Phascolarctobacterium faecium
  misc_feature (1)..(370): tr|A0A3G9HF33|A0A3G9HF33_9FIRM Queuine tRNA-ribosyltran sferase OS=Phascolarctobacterium faecium OX=33025 GN=tg t PE=3 SV=1
MHAVTYELIKECSRSGARLGKLHTPHGTFDTPMFMPVGTQATVKTLAPEELYAMGSQVILSNTYHLFLRPGHELVKKAGGLHNFMRYDRGMLTDSGGFQVFSLGAMRKIKEEGVTFRSHIDGSKKFLSPEIATEVQEALGADIAMAFDECIPYPADFDYAKESTLRTTRWAKRCLDIHTREDQSMFGIVQGGMYPELRKMSADQLTEMDFAGYGIGGLSVGEPKPLMYDILNQTTEHMPKNKARYLMGVGTPDCIVEAVNLGVDMFDCVFPTRVARNGTAMIPEGRLVVRNAAYAEDFRPIDERCGCYTCRNFSRAYIRHLFKAEELFALRLLTIHNLHFLLDFTKQIRSAIASDTFPELRERFLENYRG

SEQ ID NO: 59024 - protein, 370 aa, Phascolarctobacterium sp.; identical to SEQ ID NO: 59023
  misc_feature (1)..(370): tr|R6IJR1|R6IJR1_9FIRM Queuine tRNA-ribosyltransferase OS=Phascolarctobacterium sp. CAG:207 OX=1262914 GN=tgt PE=3 SV=1

SEQ ID NO: 59025 - protein, 327 aa, Phascolarctobacterium sp.
  misc_feature (1)..(327): tr|R6HDV4|R6HDV4_9FIRM Queuine tRNA-ribosyltransferase OS=Phascolarctobacterium sp. CAG:266 OX=1262915 GN=tgt PE=3 SV=1
  misc_feature (310)..(311): Xaa can be any naturally occurring amino acid
MHAVTYELIKECSRSGARLGRLHTPHGTFETPMFMPVGTQATVKTLSPEELYDMGSQVILSNTYHLFLRPGHELVKKAGGLHKFMNYKRGMLTDSGGFQVFSLGAMRKIKEEGVTFRSHIDGSRQFLSPEIATQVQEALGADIAMAFDECIPYPADYDYAKQSTERTTRWAKRCLEAHTREDQSLFGIVQGGMYKDLRKMSADSLTDMDFAGYGIGGLSVGEPKPMMYDILGETTQHLPKNKARYLMGVGTADCIIEGVNLGVDMFDCVFPTRVARNGTAMVPEGRLVVRNKTYAEDFRPIDERCGCYTXXLLYLPQLFARVYQASV

SEQ ID NO: 59026 - protein, 371 aa, Phascolarctobacterium succinatutens
  misc_feature (1)..(371): tr|R6WU41|R6WU41_9FIRM Queuine tRNA-ribosyltransferase OS=Phascolarctobacterium succinatutens CAG:287 OX=12631 01 GN=tgt PE=3 SV=1
MTKHAVTYELIKECPRSGARLGRLHTPHGTFETPMFMPVGTQATVKTLAPEELYDMGSQVILSNTYHLFLRPGHELVRKAGGLHKFMNYKRGMLTDSGGFQVFSLGAMRKITEEGVMFRSHIDGSKQFLSPEVSTQVQEALGADIAMAFDECIPYPADFDYAKRSTERTTRWAKRCLETHTREDQSMFGIVQGGMYPELRRMSVQQLTELDFAGYGIGGLSVGEPKPMMYDILSQTTELMPKDKARYLMGVGTADCIVEAVNLGVDMFDCVFPTRVARNGTAMTHTGRLVVRNATYAEDFRPIEEGCDCYACRNFSRAYIRHLFKAEEIFGLRLLSIHNLHFLLHFAKEIREAIANDCFPEFRERFLENYR

SEQ ID NO: 59027 - protein, 371 aa, Phascolarctobacterium succinatutens
  misc_feature (1)..(371): tr|E8LGA8|E8LGA8_9FIRM Queuine tRNA-ribosyltransferase OS=Phascolarctobacterium succinatutens YIT 12067 OX=626 939 GN=tgt PE=3 SV=1
MTKHAVTYELIKECPRSGARLGRLHTPHGTFETPMFMPVGTQATVKTLAPEELYDMGSQVILSNTYHLFLRPGHELVRKAGGLHKFMNYKRGMLTDSGGFQVFSLGAMRKITEEGVMFRSHIDGSKQFLSPEVSTQVQEALGADIAMAFDECIPYPADFDYAKRSTERTTRWAKRCLETHTREDQSMFGIVQGGMYPELRRMSVQQLTELDFAGYGIGGLSVGEPKSMMYDILSHTTELMPKDKARYLMGVGTADCIVEAVNLGVDMFDCVFPTRVARNGTAMTHTGRLVVRNATYAEDFRPIEEGCDCYACRNFSRAYIRHLFKAEEIFGLRLLSIHNLHFLLHFAKEIREAIANDCFPEFRERFLENYR

SEQ ID NO: 59028 - protein, 372 aa, Phenylobacterium deserti
  misc_feature (1)..(372): tr|A0A328ACR6|A0A328ACR6_9CAUL Queuine tRNA-ribosyltran sferase OS=Phenylobacterium deserti OX=1914756 GN=tgt P E=3 SV=1
MAAFPFKIDATDGRARTGILATPRGDIRTPAFMPVGTVGTVKAMTVDQVKSTSADIILGNTYHLMLRPTAERVARLGGLHKFMRWDKPILTDSGGFQVMSLSKICKVKEEAVTFQSHLDGSRHVLSPERSMEIQADLLGSDIVMQLDELVSLPTTEDKAADAMRRSARWAQRCKDAFGTRDAQALFGIQQGGTFASLRQESADRLREIGFDGYAIGGLAVGEGHEGMVEVLDYAPEMLPAERPRYLMGVGKPIDIVEAVARGVDMFDCVLPTRSGRHGQAWTWDGPINLKNARFAEDENPLDSNSSVSPSCDYSKAYLHHLVRADEILGQVLLSWHNIAFFQDLMSQLRAAIAEGRLEAFRRTFADRQRRMG

SEQ ID NO: 59029 - protein, 371 aa, Phenylobacterium hankyongense
  misc_feature (1)..(371): tr|A0A328B4J3|A0A328B4J3_9CAUL Queuine tRNA-ribosyltran sferase OS=Phenylobacterium hankyongense OX=1813876 GN= tgt PE=3 SV=1
MAGFPFTIAATDGEARTGVLSTSRGDIRTPAFMPVGTAATVKALTVDQVAQSGADIILGNTYHLMLRPTAERVARLGGLHRFMRWEKPILTDSGGFQVMSLSKISKVKEDAVTFQSHLDGSRHVLSPERSIEIQADLLGSDIVMQLDECVAWPAEEARAAEAMRLSARWAQRCKNAFGERDTQALFGIQQGSTFEALRRESADRLIEIGFDGYAIGGLAVGEGHEGMVEVLEYAPAMLPADRPRYLMGVGKPIDLVEAVARGVDMFDCVLPTRSGRHGQAWTWEGSVNLKNARFADDDEPLDPTSDVPASRDYSKAYLHHLVKSEEILGQVLLSWHNIGFFQTLMVQLRAAIAEGRLDAFRREFKARQRIG

SEQ ID NO: 59030 - protein, 373 aa, Phenylobacterium kunshanense
  misc_feature (1)..(373): tr|A0A328BU22|A0A328BU22_9CAUL Queuine tRNA-ribosyltran sferase OS=Phenylobacterium kunshanense OX=1445034 GN=t gt PE=3 SV=1
MGAFPFTVAASDGRARTGVLSTPRGEIRTPAFMPVGTAGTVKALTVEQVAATGADIILGNTYHLMLRPTAERVRRMGGLHRFMRWEKPILTDSGGFQVMSLSKISKVTEEAVTFQSHLDGSRHVLSPERSMEIQADLLGSDIVMQLDELVALPADETRAADAMRRSARWGDRSKAAFGAREAQALFGIQQGGTWEHLRRESAERMIETGFDGYAIGGLAVGEGHEAMVEVLDFAPAMLPADRPRYLMGVGKPIDIVEAVYRGVDMFDCVLPTRSGRHGQAWTWDGPINLKNARFAEDDTPLDAASPVSASRDYSKAYLHHLVKANEILGQVLLSWHNLAFFQALMAEMRAAIAEGRMEAFRAGFASRQLRNAP

SEQ ID NO: 59031 - protein, 371 aa, Phenylobacterium sp.
  misc_feature (1)..(371): tr|A0A0Q7EYK7|A0A0Q7EYK7_9CAUL Queuine tRNA-ribosyltran sferase OS=Phenylobacterium sp. Root1290 OX=1736445 GN= tgt PE=3 SV=1
MGAFPFEIAATDGAARTGVLKTARGDIRTPAFMPVGTAATVKALTVDQVRSTGADIILGNTYHLMLRPTAERVARLGGLHKFMRWEHPILTDSGGFQVMSLSKIAKVTEESVAFQSHIDGSKHVLTPERSIEIQADLLGSDIVMQLDECVAWPAEEARARQAMQLSARWAQRSKDAFGARDAQALFGIQQGSTFEHLRRESAERLIEIGFDGYALGGLAVGEGHEAMCEVLDYAPAMLPVDRPRYLMGVGKPIDLVEAVARGVDMFDCVLPTRSGRHGQAWTWEGAVNLKNARFAEDDTPLDETSDCPASSQYSKAYLHHLVKAEEILGQVLLSWHNIAHFQALTAAMRAAIAEGRFEQFRRDFKARQRTG

SEQ ID NO: 59032 - protein, 378 aa, Phenylobacterium sp.
  misc_feature (1)..(378): tr|A0A1E4GUU9|A0A1E4GUU9_9CAUL Queuine tRNA-ribosyltran sferase OS=Phenylobacterium sp. SCN 70-31 OX=1660129 GN =tgt PE=3 SV=1
MTAFPFTVQATDGRARTGVLSTPRGEIRTPAFMPVGTAATVKALTVDQVAATGADILLGNTYHLMLRPTAERVKRLGGLHRFMRWDRPILTDSGGFQVMSLSKIAKVTEEAVTFQSHLDGSRHVLSPERSMEIQADLLGSDIVMQLDELVALPATPERAGEAMRLSARWGQRSKNAFGERDAQNLFAIQQGGLDPALRGESAERLIEIGFDGYAIGGLAVGEGHQAMCEALDFAPGMLPAERPRYLMGVGKPIDIVEAVYRGVDMFDCVLPTRSGRHGQAWTWDGPLNLKNARFAEDETPLDADSDVPASRDYSKAYLHHLVKSDEILGQVLLSWHNLAFFQALMTALRSAVSEGRISAFRRSFAARQSARPGSDSGG

SEQ ID NO: 59033 - protein, 371 aa, Phenylobacterium zucineum
  misc_feature (1)..(371): tr|B4R9Q4|B4R9Q4_PHEZH Queuine tRNA-ribosyltransferase OS=Phenylobacterium zucineum (strain HLK1) OX=450851 GN =tgt PE=3 SV=1
MAAFPFTIAATDGKARTGVLSTPRGDIRTPAFMPVGTAGTVKALTVEQVAATGADILLGNTYHLMLRPTAERVRRLGGLHRFMRWEKPILTDSGGFQVMSLSQISKVTEDSVTFQSHLDGSRHVLTPERSIEIQADLLGSDIVMQLDELVALPAERDRAAEAMRRSARWGQRCRDAFGAREAQALFAIQQGGTDEALRAESAERLREIGFDGYAIGGLAVGEGHEAMCEVLDYAPGMLPAERPRYLMGVGKPIDIVEAVYRGVDMFDCVLPTRSGRHGQAWTWDGPLNLKNARFAEDEEPLDPTIPVSASRDYSKAYLHHLVKAGEILGQVLLSWHNVAFFQALMGEMRAAIAERRMEAFRRDFAARQKAR

SEQ ID NO: 59034 - protein, 373 aa, Phenylobacterium zucineum
  misc_feature (1)..(373): tr|A0A2W5P1V2|A0A2W5P1V2_9CAUL Queuine tRNA-ribosyltran sferase OS=Phenylobacterium zucineum OX=284016 GN=tgt P E=3 SV=1
MSAFPFTIAATEGKARTGVLSTPRGEIRTPAFMPVGTAGTVKALTVEQVGATGADIILGNTYHLMLRPTAERVRRLGGLHRFMRWEKPILTDSGGFQVMSLSKISKVTEEAVTFQSHIDGSRHVLSPERSMEIQADLLGSDIVMQLDELVALPADENRAAEAMRRSARWGTRSKNAFGERDSQALFGIQQGGTWEHLRRESAERMIETGFDGYAIGGLAVGEGHEAMCEVLDFAPGMLPVDRPRYLMGVGKPIDIVEAVFRGVDMFDCVLPTRSGRHGQAWTWDGPINLKNARFAEDDTPLDATSTVSASRDYSKAYLHHLVKAEEILGQVLLSWHNLAFFQALMAEMRAAIAEGRMATFRADFAARQQRPAA

SEQ ID NO: 59035 - protein, 386 aa, Phocoenobacter uteri
  misc_feature (1)..(386): tr|A0A379C902|A0A379C902_9PAST Queuine tRNA-ribosyltran sferase OS=Phocoenobacter uteri OX=146806 GN=tgt PE=3 S V=1
MKYTLHKTSGVARRGHMSFERNVNGEIKEFKVQTPAFMPVGTYGTVKGMTPEEVAATGAEILLGNTFHLWLRPGQDVMKMHGDLHGFMKWDAPILTDSGGFQVFSLAKMRKITEEGVNFRHPINGSKIFLSPEKSMEIQYDLGSDIVMIFDECAPYPSTFDYTKQSMEMSARWAKRSRQRFDELGNKNALFGIVQGGVFEELRKISVDELLKIGFDGYAVGGLAVGEPKEDMHRILEFTCPLLPADKPRYLMGVGKPEDLVEGVRRGIDMFDCVMPTRNARNGHLFVTDGVVKIRNAKYREDTSPLDPHCDCYTCKNYTKAYLYHLDKCGEILGARLNTIHNLRYYQRLMAEIRQSIDEDRFDDFVVEFYQRMGREVPPLQKEVQK

SEQ ID NO: 59036 - protein, 370 aa, Phorcysia thermohydrogeniphila
  misc_feature (1)..(370): tr|A0A4R1GAI0|A0A4R1GAI0_9BACT Queuine tRNA-ribosyltran sferase OS=Phorcysia thermohydrogeniphila OX=936138 GN= tgt PE=3 SV=1
MEFQVIRKDGNARYGILRGTHGETETPCFMPVGTLGAVKGVTWDRIGQMGYSLVLSNVYHLYLRPGLEILQEAGGIHPFTGWKGLILTDSGGFQVFSLSKLMKITEDGIYFKSHIDGSEHFFSPEFVVEFEEKIGVDIGMVLDECTPYPATYEYAKHSMERTVRWALRSIRARTTDKTAIFAIVQGGVYNDLRLKCVEMLSELPFEGFAIGGLSVGEPKDEMYRITRLVASQLPEDKPRYLMGVGKPEDILEAVEAGVDMFDCVIPTRNARNGTLFTSRGKINIKAAKFKRDFSPVDPECDCYTCKNFSRAYLRHLYVSGEINAAILNTIHNLHFYGRLMKDIREAIKKGKFQEFKRNFLEKYSSQEGSG

SEQ ID NO: 59037 - protein, 370 aa, Phormidesmis priestleyi
  misc_feature (1)..(370): tr|A0A2W4ZR99|A0A2W4ZR99_9CYAN Queuine tRNA-ribosyltran sferase OS=Phormidesmis priestleyi OX=268141 GN=tgt PE= 3 SV=1
MTAFTYQLQAQCSCTKARAGIFHTPHGPVHTPRFMPVGTLANVKTVTPDQLKSCQAEMVLANTYHLHLQPGEDLVAEAGGVHQFMGWDGPMLTDSGGFQVFSLSEMRKVTDEGATFRSPRDGRIIEMPPERSIEIQNQLGADVIMAFDECPPYPATREAVVAATDRTYRWLKRCIQAHDRTDQALFGIVQGGTYLDLRAEAAKDLADLDLLGYAIGGVSVGEPPALIEKIVQATTPLLPYDKPRYLMGVGTYREMAQAIAAGIDLFDCVIPTRLARHGAALTQGDRWNLKNSRFRRDLTPIDADCPCYTCQTFTRAYLCHLLHAKELLVYTLLSIHNITELIRFTTTIREAILNDRFVELFGHWLSDASG

SEQ ID NO: 59038 - protein, 398 aa, Phormidesmis priestleyi
  misc_feature (1)..(398): tr|A0A0N8KMW8|A0A0N8KMW8_9CYAN Queuine tRNA-ribosyltran sferase OS=Phormidesmis priestleyi Ana OX=1666911 GN=tg t PE=3 SV=1
MTSAIASSFSYQLQAKCSCTKARAGIFHTPHGPVHTPRFMPVGTLANVKTITPAQLKDCKAEMVLANTYHLHLQPGEDLIAEAGGVHKFMGWDGPMLTDSGGFQVFSLSEMRTVTDEGATFRSPRDGRIIEMPPERSIEIQNQLGADVIMAFDECPPYPATREAVVSATDRTYRWLKRCINAHDRPDQALFPIVQGGTYLDLRADAAKALAQLDMPGYAIGGVSVGEPPALIEKIVQATTPLLPESKPRYLMGVGTYKEMAQAIAAGIDLFDCVIPTRLARHGAALVGSMSPEIMSPELAHGDPSSANGFSSENPSYRWNLKNARFRRDLSPLDPNCPCYTCQNFTRAYLCHLIHAKELLAYTLLSIHNITELIRFTTAIREAILADRFSQAFAKWLM

SEQ ID NO: 59039 - protein, 392 aa, Phormidium ambiguum
  misc_feature (1)..(392): tr|A0A1U7INJ3|A0A1U7INJ3_9CYAN Queuine tRNA-ribosyltran sferase OS=Phormidium ambiguum IAM M-71 OX=454136 GN=tg t PE=3 SV=1
MNSGFQFVCQACCDRSQARAGVFSTPHGEVETPRFMPVGTLATVKTVTPRQLQATGAQMVLANTYHLHLQPGEQIVAGAGGLHKFMAWKGPILTDSGGFQVFSLSELRKITENGVTFRSPRDGRIIELTPEKSIQIQNALGADVIMAFDECPPYPATREDVVLATERTYRWLKRCITAHKRQDQALFGIVQGGVFLDLRQEAAVSLRELDLPGYAIGGVSVGEPPELIEKIVRATAPMLPAEKPRYLMGVGTYREMVQAIAAGIDLFDCVIPTRWARHGTVVVAGERWNLKNARFREDFTPLDESCDCYTCQNFTRAYLCHLVRSREILAYTLLSIHNITELVRFTQKIRAAILRGSFTEDFAEWLAPTPSSLEPSHVKIYGNSENCVGKEG

SEQ ID NO: 59040 - protein, 339 aa, Phormidium sp.
  misc_feature (1)..(339): tr|A0A0P8DPW8|A0A0P8DPW8_9CYAN Queuine tRNA-ribosyltran sferase OS=Phormidium sp. OSCR OX=1666905 GN=tgt PE=3 S V=1
MPVGTLANVKTLTPAQLKGTGAQMVLANTYHLHLQPGEDIVAEAGGLHRFMGWEGPMLTDSGGFQVFSLSEMRTITEEGVTFRSPRDGARIHLTPERSIEIQNALGADVIMAFDECPPYPASREAVELATARTERWLKRCIDYHARSPQAQQQALFGIVQGGVYTDLRAKAAAALQRLELPGYAIGGVSVGEPPELIEAIVKATTPLLPQHKPRYLMGVGTYREMAGAIASGIDLFDCVIPTRLGRHGAAFVRGERWNLKNARFRRDYEPLDEECPCYACENFSRAYLSHLVRSRELLAYTLLSIHNITELIRFTQRIRQSILDGCFAREFASWLKPAP

SEQ ID NO: 59041 - protein, 374 aa, Phormidium sp.
  misc_feature (1)..(374): tr|A0A522X971|A0A522X971_9CYAN Queuine tRNA-ribosyltran sferase OS=Phormidium sp. SL48-SHIP OX=2518363 GN=tgt P E=3 SV=1
MNQFFKYHIQAICPDTGARAGVFETPHGIVETPRFMPVGTLANVKTLTPAQLQGTGAQMVLANTYHLHLQPGEDIVAEAGGLHRFMGWDGPMLTDSGGFQVFSLSEMRTITEEGVTFRSPRDGARIHLTPERSMEIQNALGADVIMAFDECPPYPASREAVELATARTERWLKRCIDYHQKSPQAQQQALFGIVQGGVYTDIRAKAAAALQRLELPGYAIGGVSVGEPPELIEAIVKATTPLLPPHKPRYLMGVGTYREMAGAIASGIDLFDCVIPTRLGRHGAAFVRGERWNLKNARFRRDYGPLDEDCPCYACENFSRAYLSHLVRSQELLAYTLLSIHNITELIRFTQRIRQSILDGCFAQDFAAWLKPAP

SEQ ID NO: 59042 - protein, 392 aa, Phormidium tenue
  misc_feature (1)..(392): tr|A0A1U7J5H8|A0A1U7J5H8_9CYAN Queuine tRNA-ribosyltran sferase OS=Phormidium tenue NIES-30 OX=549789 GN=tgt PE =3 SV=1
MRPVFSLSDRFILTKAFSFSCDARCSHTQARAGTFTTPHGPVHTPRFMPVGTLANVKTVTPAQLATTGAQMVLSNTYHLHLQPGEDIVAEAGGLHRFMGWDGPMLTDSGGFQVFSLSQMRTITEDGVTFKSPKDGRIINIRPETSIQIQNDLGADVIMAFDECPPYPCSRETIKASTDRTWRWLQRCVEAHQRPDQALFGIVQGGVYPDLRTEAAQQLATLDLPGYAIGGVSVGEPPELIETIVKATAPCLPEHKPRYLMGVGTYREMTQAIAAGVDLFDCVIPTRLARHGAALVAGERWNLKNQRFRRDYTPIDAACPCYTCQNFTRAYLCHLIHAKEMLAFTLISIHNITELVRFTQRIREAILGDRFTTEFAHWLAPNAIAADLDAPPS

SEQ ID NO: 59043 - protein, 339 aa, Phormidium willei
  misc_feature (1)..(339): tr|A0A168U241|A0A168U241_9CYAN Queuine tRNA-ribosyltran sferase OS=Phormidium willei BDU 130791 OX=399101 GN=tg t PE=3 SV=1
MPVGTLANVKTLTPAQLQGTGAQMVLANTYHLHLQPGEDIVAEAGGLHRFMGWDGPMLTDSGGFQVFSLSEMRTITEEGVTFRSPRDGARIHLTPERSMEIQNALGADVIMAFDECPPYPASREAVELATARTERWLKRCIDYHQKSPQAQQQALFGIVQGGVYTDLRAKAAAALQRLELPGYAIGGVSVGEPPELIESIVKATTPLLPPDKPRYLMGVGTYREMAGAIASGIDLFDCVIPTRLGRHGAAFVRGERWNLKNARFRRDYGPLDEDCPCYACENFSRAYLSHLVRSQELLAYTLLSIHNITELIRFTQRIRQSILDGCFAQDFADWLKRAP

SEQ ID NO: 59044 - protein, 375 aa, Photobacterium angustum
  misc_feature (1)..(375): tr|Q1ZRC7|Q1ZRC7_PHOAS Queuine tRNA-ribosyltransferase OS=Photobacterium angustum (strain S14 / CCUG 15956) OX =314292 GN=tgt PE=3 SV=1
MKFELDKTQGRARRGRLQFERGTVETPAFMPVGTYGTVKGMTPEEVKDTGAQILLGNTFHLWLRPGQEVMKLHGDLHDFMQWQGPILTDSGGFQVFSLGSLRKITEEGVHFRNPVNGDKIFMDAEKSMEIQKDLGSDIVMIFDECTPYPATHDEAKKSMEMSLRWAQRSRNHFDKQENPNALFGIVQGGVYEDLRDVSVEGLTKIGFDGYAVGGLAVGEPKEDMHRILEHTCPQLPEDKPRYLMGVGKPEDLVEGVRRGIDMFDCVMPTRNARNGHLFVTGGVIKIRNAKHKTDTTPLDPHCDCYTCKNYSKAYLYHLDKCNEILGARLNTIHNLRYYQRLMASIRKSIEEDRFDAFVEEFYARRDREVPPLQNV

SEQ ID NO: 59045 - protein, 375 aa, Photobacterium angustum; identical to SEQ ID NO: 59044
  misc_feature (1)..(375): tr|A0A2S7VXC7|A0A2S7VXC7_PHOAN Queuine tRNA-ribosyltran sferase OS=Photobacterium angustum OX=661 GN=tgt PE=3 S V=1

SEQ ID NO: 59046 - protein, 376 aa, Photobacterium aphoticum
  misc_feature (1)..(376): tr|A0A090RMA6|A0A090RMA6_9GAMM Queuine tRNA-ribosyltran sferase OS=Photobacterium aphoticum OX=754436 GN=tgt PE =3 SV=1
MKFELDKTQGRARRGRLQFERGTVETPAFMPVGTYGTVKGMTPEEVKETGAQILLGNTFHLWLRPGQEVMKMHGDLHDFMNWQGPILTDSGGFQVFSLGAMRKITEEGVHFRNPVNGDKIFMDAEKSMEIQYDLGSDVVMIFDECTPYPATHDEAKQSMEMSLRWAQRSRNHFDKLGNKNALFGIVQGGVYEDLRDVSVDGLTKIGFDGYAVGGLAVGEPKEDMHRILEHTCPQLPVDKPRYLMGVGKPEDLVEGVRRGIDMFDCVMPTRNARNGHLFVTGGVIKIRNAKHKTDTTPLDPHCDCYTCRNYTKAYLYHLDKCNEILGARLNTIHNLRYYQRLMESIRKAIDEDRFDAFVEEFYARRNREVPPLNDNQ

SEQ ID NO: 59047 - protein, 376 aa, Photobacterium aquae
  misc_feature (1)..(376): tr|A0A0J1H2H9|A0A0J1H2H9_9GAMM Queuine tRNA-ribosyltran sferase OS=Photobacterium aquae OX=1195763 GN=tgt PE=3 SV=1
MKFELDKTQGNARRGRLVFERGTVETPAFMPVGTYGTVKGMTPEEVKDTGAQILLGNTFHLWLRPGQEVMKLHGDLHDFMNWQGPILTDSGGFQVFSLGAMRKITEEGVHFRNPVNGDKIFMDAEKSMQIQYDLGSDIVMIFDECTPYPATHDEAKTSMEMSLRWAQRSRNEFDRQENPNALFGIVQGGVYEDLRDVSVEGLTKIGFDGYAVGGLAVGEPKEDMHRILEHTCPQLPQDKPRYLMGVGKPEDLVEGVRRGIDMFDCVMPTRNARNGHLFVTGGVIKIRNAKHKTDTTPLDPHCDCYTCRNYSKAYLYHLDKCNEILGARLNTIHNLRYYQRLMASIRKAIEEDRFDAFVEEFYARRNREVPPLNDNN

SEQ ID NO: 59048 - protein, 389 aa, Photobacterium aquimaris
  misc_feature (1)..(389): tr|A0A2T3IJI0|A0A2T3IJI0_9GAMM Queuine tRNA-ribosyltran sferase OS=Photobacterium aquimaris OX=512643 GN=tgt PE =3 SV=1
MGTCQIVSLAFGGLVKFELDKTQGRARRGRLQFERGTVETPAFMPVGTYGTVKGMTPEEVEDTGAQIILGNTFHLWLRPGQEVMKMHGDLHDFMQWKGPILTDSGGFQVFSLGALRKITEEGVHFRNPVNGDKIFMDAEKSMEIQKDLGSDIVMIFDECTPYPATHDEAKKSMEMSLRWAQRSRNHFDKLENPNALFGIVQGGVYEDLRDVSVAGLTKIGFDGYAVGGLAVGEPKEDMHRVLEHTCPQLPEDKPRYLMGVGKPEDLVEGVRRGIDMFDCVMPTRNARNAHLFVTGGVIKIRNAKHKTDTTPLDPDCDCYTCRHYSKAYLYHLDKCNEILGARLNTIHNLRYYQRLMASIRKSIEEDRFDAFVEEFYARRDREVPPLQIV

SEQ ID NO: 59049 - protein, 389 aa, Photobacterium aquimaris
  misc_feature (1)..(389): tr|A0A2T3I0I6|A0A2T3I0I6_9GAMM Queuine tRNA-ribosyltran sferase OS=Photobacterium aquimaris OX=512643 GN=tgt PE =3 SV=1
MGTCQIVSLAFGGLVKFELDKTQGRARRGRLQFERGTVETPAFMPVGTYGTVKGMTPEEVEDTGAQIILGNTFHLWLRPGQEVMKMHGDLHDFMQWKGPILTDSGGFQVFSLGALRKITEEGVHFRNPVNGDKIFMDAEKSMEIQKDLGSDIVMIFDECTPYPATHDEAKKSMEMSLRWAQRSRNHFDKLENPNALFGIVQGGVYEDLRDVSVAGLTKIGFDGYAVGGLAVGEPKEDMHRILEHTCPQLPEDKPRYLMGVGKPEDLVEGVRRGIDMFDCVMPTRNARNAHLFVTGGVIKIRNAKHKTDTTPLDPDCDCYTCRHYSKAYLYHLDKCNEILGARLNTIHNLRYYQRLMASIRKSIEEDRFDAFVEEFYARRDREVPPLQIV

SEQ ID NO: 59050 - protein, 375 aa, Photobacterium carnosum
  misc_feature (1)..(375): tr|A0A2N4UMT3|A0A2N4UMT3_9GAMM Queuine tRNA-ribosyltran sferase OS=Photobacterium carnosum OX=2023717 GN=tgt PE =3 SV=1
MKFELDKTQGRARRGRLQFERGTVETPAFMPVGTYGTVKGMTPEEVAETGAQIILGNTFHLWLRPGQEVMKMHGDLHDFMQWKGPILTDSGGFQVFSLGALRKITEEGVHFRNPVNGDRIFMDAEKSMEIQKDLGSDIVMIFDECTPYPATHDEAKKSMEMSLRWAQRSRNHFNELENKNALFGIVQGGVYEDLRDVSVEGLTNIGFDGYAVGGLAVGEPKEDMHRILEHTCPKLPADKPRYLMGVGKPEDLVEGVRRGIDMFDCVMPTRNARNAHLFVTGGVIKIRNAKHKIDTTSLDPECDCYTCKNYSKAYLYHLDKCNEILGARLNTIHNLRYYQRLMASIRKAIDEDRFDAFVEEFYARRDREVPPFQIV

SEQ ID NO: 59051 - protein, 377 aa, Photobacterium damsela
  misc_feature (1)..(377): tr|A0A1Q9H758|A0A1Q9H758_PHODP Queuine tRNA-ribosyltran sferase OS=Photobacterium damsela subsp. piscicida OX=3 8294 GN=tgt PE=3 SV=1
MKLKFELDKKQGNARRGRLIFERGTVETPAFMPVGTYGTVKGMTPEEVKDTGAQILLGNTFHLWLRPGQEVMKLHGDLHDFMQWQGPILTDSGGFQVFSLGDIRKITEEGVHFRNPVNGDKIFMDAEKSMEIQKDLGSDIVMIFDECTPYPATHDEAKKSMEMSLRWAQRSRNHFDKLDNQNSLFGIVQGGVYEELRDVSVEGLTKIGFDGYAVGGLAVGEPKEDMHRVLEHTCLQLPEDKPRYLMGVGKPEDLVEGVRRGIDMFDCVMPTRNARNGHLFVTGGVVKIRNASHKTDTTPLDPQCDCYTCRNYSKAYLHHLDKCNEILGARLNTIHNLRYYQRLMASIRKAIEEDRFDAFVEEFYARRNREVPPLQKG

SEQ ID NO: 59052 - protein, 377 aa, Photobacterium damselae
  misc_feature (1)..(377): tr|D0YZK7|D0YZK7_PHODD Queuine tRNA-ribosyltransferase OS=Photobacterium damselae subsp. damselae CIP 102761 O X=675817 GN=tgt PE=3 SV=1
MKLKFELDKKQGNARRGRLIFERGTVETPAFMPVGTYGTVKGMTPEEVKDTGAQILLGNTFHLWLRPGQEVMKLHGDLHDFMQWQGPILTDSGGFQVFSLGDIRKITEEGVHFRNPVNGDKIFMDAEKSMEIQKDLGSDIVMIFDECTPYPATHDEAKKSMEMSLRWAQRSRNHFDKLDNQNSLFGIVQGGVYEDLRDVSVEGLTKIGFDGYAVGGLAVGEPKEDMHRVLEHTCPQLPEDKPRYLMGVGKPEDLVEGVRRGIDMFDCVMPTRNARNGHLFVTGGVVKIRNASHKTDTTPLDPQCDCYTCRNYSKAYLHHLDKCNEILGARLNTIHNLRYYQRLMASIRKAIEEDRFDAFVEEFYARRNREVPPLQKG

SEQ ID NO: 59053 - protein, 377 aa, Photobacterium damselae; identical to SEQ ID NO: 59052
  misc_feature (1)..(377): tr|A0A2T3IBV2|A0A2T3IBV2_9GAMM Queuine tRNA-ribosyltran sferase OS=Photobacterium damselae OX=38293 GN=tgt PE=3 SV=1

SEQ ID NO: 59054 - protein, 375 aa, Photobacterium frigidiphilum
  misc_feature (1)..(375): tr|A0A2T3JF65|A0A2T3JF65_9GAMM Queuine tRNA-ribosyltran sferase OS=Photobacterium frigidiphilum OX=264736 GN=tg t PE=3 SV=1
MKFELDKTQGRARRGRLQFERGTVETPAFMPVGTYGTVKGMTPEEVKETGAQILLGNTFHLWLRPGQEVMKLHGDLHDFMQWHGPILTDSGGFQVFSLGATRKITEEGVHFRNPVNGDKVFMDAEKSMEIQYDLGSDIVMIFDECTPYPATHDEAKKSMEMSLRWAQRSRNHFDKQENPNALFGIIQGGVYEDLRDVSVDGLTNIGFDGYAVGGLAVGEPKEDMHRILEHTCPQLPEDKPRYLMGVGKPEDLVEGVRRGIDMFDCVMPTRNARNGHLFVTGGVIKIRNAKHKTDTTPLDPHCDCYTCLNYSKAYLYHLDKCNEILGSRLNTIHNLRYYQRLMASIRSAIEEDRFDAFVEEFYARRDREVPPLQNA

SEQ ID NO: 59055 - protein, 376 aa, Photobacterium gaetbulicola
  misc_feature (1)..(376): tr|A0A0B9FT35|A0A0B9FT35_9GAMM Queuine tRNA-ribosyltran sferase OS=Photobacterium gaetbulicola OX=1295392 GN=tg t PE=3 SV=1
MKFELDKTQGRARRGRLQFERGTVETPAFMPVGTYGTVKGMTPEEVKETGAQILLGNTFHLWLRPGQEVMKMHGDLHDFMQWQGPILTDSGGFQVFSLGDIRKITEEGVHFRNPVNGDKIFMDAEKSMEIQKDLGSDVVMIFDECTPYPATHDEAKKSMEMSLRWAQRSRNHFDKLGNKNALFGIVQGSVYEDLRDVSVEGLTKIGFDGYAVGGLAVGEPKEDMHRVLEHTCPQLPEDKPRYLMGVGKPEDLVEGVRRGIDMFDCVMPTRNARNGHLFVTGGVIKIRNAKHKTDTTPLDPHCDCYTCRNYSKAYLYHLDKCNEILGARLNTIHNLRYYQRLMESIRKAIEEDRFDVFVEEFYARRNREVPPLNDNK

SEQ ID NO: 59056 - protein, 376 aa, Photobacterium gaetbulicola; identical to SEQ ID NO: 59055
  misc_feature (1)..(376): tr|A0A0C5WDC8|A0A0C5WDC8_9GAMM Queuine tRNA-ribosyltran sferase OS=Photobacterium gaetbulicola Gung47 OX=658445 GN=tgt PE=3 SV=1

SEQ ID NO: 59057 - protein, 375 aa, Photobacterium galatheae
  misc_feature (1)..(375): tr|A0A066RWY8|A0A066RWY8_9GAMM Queuine tRNA-ribosyltran sferase OS=Photobacterium galatheae OX=1654360 GN=tgt P E=3 SV=1
MKFELDKSLGRARRGRLVFERGTVETPAFMPVGTYGTVKGMTPEEVKETGAQILLGNTFHLWLRPGQEVMKLHGDLHDFMQWQGPILTDSGGFQVFSLGDIRKITEEGVHFRNPVNGDKIFMDAEKSMEIQYDLGSDVVMIFDECTPYPATHEEAKQSMEMSLRWAKRSRNHFDKLENKNALFGIVQGGVYEDLRDVSVKGLTEIGFDGYAVGGLAVGEPKEDMHRVLEHTCPQLPEDKPRYLMGVGKPEDLVEGVRRGIDMFDCVMPTRNARNGHLFVTGGVIKIRNAKHKTDTSPLDPHCDCYTCRNYSKAYLYHLDKCNEILGARLNTIHNLRYYQRLMESIRQAIEEDRFDAFVEEFYARRNREVPPLKDV

SEQ ID NO: 59058 - protein, 376 aa, Photobacterium ganghwense
  misc_feature (1)..(376): tr|A0A0J1H7S8|A0A0J1H7S8_9GAMM Queuine tRNA-ribosyltran sferase OS=Photobacterium ganghwense OX=320778 GN=tgt P E=3 SV=1
MKFELDKTQGRARRGRLKFERGTVETPAFMPVGTYGTVKGMTPEEVKDTGAQILLGNTFHLWLRPGQEVMKLHGDLHDFMQWQGPILTDSGGFQVFSLGDIRKITEEGVHFRNPVNGDKIFMDAEKSMEIQNDLGSDIVMIFDECTPYPATHDEAKKSMEMSLRWAQRSRNHHDKLGNKNALFGIVQGSVYEDLRDVSVEGLTNIGFDGYAVGGLAVGEPKEDMHRVLEHTCPQLPEDKPRYLMGVGKPEDLVEGVRRGIDMFDCVMPTRNARNGHLFVTGGVIKIRNAKHKTDTSPLDPHCDCYTCRNYSKAYLYHLDKCNEILGARLNTIHNLRYYQRLMASIRKAIEEDRFDAFVEEFYARRNREVPPLNENN

SEQ ID NO: 59059 - protein, 375 aa, Photobacterium halotolerans
  misc_feature (1)..(375): tr|A0A0F5VIA6|A0A0F5VIA6_9GAMM Queuine tRNA-ribosyltran sferase OS=Photobacterium halotolerans OX=265726 GN=tgt PE=3 SV=1
MKFELDKTQGRARRGRLVFERGTVETPAFMPVGTYGTVKGMTPEEVKDTGAQILLGNTFHLWLRPGQEVMKLHGDLHDFMQWQGPILTDSGGFQVFSLGDIRKITEEGVHFRNPVNGDKIFMDAEKSMEIQYDLGSDIVMIFDECTPYPATHDEAKTSMEMSLRWAKRSRNHFDKMGNKNALFGIVQGSVYEDLRDVSVKGLTEIGFDGYAVGGLAVGEPKEDMHRVLEHTCPQLPEDKPRYLMGVGKPEDLVEGVRRGIDMFDCVMPTRNARNGHLFVTGGVIKIRNAKHKTDTSPLDPHCDCYTCRNYSKAYLYHLDKCNEILGARLNTIHNLRYYQRLMESIRQAIEEDRFDAFVEEFYARRDREVPPLKNV

SEQ ID NO: 59060 - protein, 375 aa, Photobacterium iliopiscarium
  misc_feature (1)..(375): tr|A0A0D8P0Z1|A0A0D8P0Z1_9GAMM Queuine tRNA-ribosyltran sferase OS=Photobacterium iliopiscarium OX=56192 GN=tgt PE=3 SV=1
MKFELDKTQGRARRGRLQFERGTVETPAFMPVGTYGTVKGMTPEEVEETGAQIILGNTFHLWLRPGQEVMKMHGDLHDFMQWKGPILTDSGGFQVFSLGALRKITEEGVHFRNPVNGDKIFMDAEKSMEIQKDLGSDIVMIFDECTPYPATHDEAKKSMEMSLRWAQRSRNHFDELENPNALFGIVQGGVYEDLRDVSVEGLTKIGFDGYAVGGLAVGEPKEDMHRILEHTCPKLPEDKPRYLMGVGKPEDLVEGVRRGIDMFDCVMPTRNARNAHLFVTGGVIKIRNAKHKTDTTSLDPECDCYTCRHYSKAYLYHLDKCNEILGARLNTIHNLRYYQRLMASIRKSIEEDRFDAFVEEFYARRDREVPPLQIV

SEQ ID NO: 59061 - protein, 375 aa, Photobacterium indicum
  misc_feature (1)..(375): tr|A0A2T3LC89|A0A2T3LC89_9GAMM Queuine tRNA-ribosyltran sferase OS=Photobacterium indicum OX=81447 GN=tgt PE=3 SV=1
MKFELDKTQGRARRGRLQFERGTVETPAFMPVGTYGTVKGMTPEEVKDTGAQILLGNTFHLWLRPGQEVMKLHGDLHDFMQWHGPILTDSGGFQVFSLGATRKITEEGVHFRNPVNGDKVFMDAEKSMEIQYDLGSDIVMIFDECTPYPATHDEAKKSMEMSLRWAQRSRNHFDKQENPNALFGIIQGGVYEDLRDVSVDGLTNIGFDGYAVGGLAVGEPKEDMHRILEHTCPQLPEDKPRYLMGVGKPEDLVEGVRRGIDMFDCVMPTRNARNGHLFVTGGVIKIRNAKHKTDTTPLDPHCDCYTCRNYSKAYLYHLDKCNEILGSRLNTIHNLRYYQRLMASIRSAIEEDRFDAFVEEFYARRDREVPPLKNA

SEQ ID NO: 59062 - protein, 375 aa, Photobacterium jeanii
  misc_feature (1)..(375): tr|A0A178KC79|A0A178KC79_9GAMM Queuine tRNA-ribosyltran sferase OS=Photobacterium jeanii OX=858640 GN=tgt PE=3 SV=1
MKFELDKSQGRARRGRLKFERGTVETPAFMPVGTYGTVKGMTPEEVKDTGAQILLGNTFHLWLRPGQEVMKLHGDLHDFMQWQGPILTDSGGFQVFSLGAMRKITEEGVHFRNPVNGDKIFMDAEKSMEIQYDLGSDIVMIFDECTPYPATHDEAKKSMEMSLRWAQRSRNHFDKQENPNALFGIVQGGVYEDLRDVSVEGLTKIGFDGYAVGGLAVGEPKEDMHRILEHTCPQLPEDKPRYLMGVGKPEDLVEGVRRGIDMFDCVMPTRNARNGHLFVTGGVIKIRNAKHKTDTTPLDPHCDCYTCRNYSKAYLYHLDKCNEILGARLNTIHNLRYYQRLMESIRKAIDEDRFDAFVEEFYARRDREVPPLKNA

SEQ ID NO: 59063 - protein, 389 aa, Photobacterium kishitanii
  misc_feature (1)..(389): tr|A0A2T3QUN8|A0A2T3QUN8_9GAMM Queuine tRNA-ribosyltran sferase OS=Photobacterium kishitanii OX=318456 GN=tgt P E=3 SV=1
MGICQIVSLAFGGLVKFELDKTQGRARRGRLQFERGTVETPAFMPVGTYGTVKGMTPEEVEDTGAQIILGNTFHLWLRPGQEVMKMHGDLHDFMQWKGPILTDSGGFQVFSLGALRKITEEGVHFRNPVNGDKIFMDAEKSMEIQKDLGSDIVMIFDECTPYPATHDEAKKSMEMSLRWAQRSRNHFDKLENPNALFGIVQGGVYEDLRDVSVEGLTSIGFDGYAVGGLAVGEPKEDMHRILEHTCPKLPEDKPRYLMGVGKPEDLVEGVRRGIDMFDCVMPTRNARNAHLFVTGGVIKIRNAKHKTDTTPLDPECDCYTCRHYSKAYLYHLDKCNEILGARLNTIHNLRYYQRLMASIRKSIEEDRFDAFVEEFYARRDREVPPLQIV

SEQ ID NO: 59064 - protein, 374 aa, Photobacterium leiognathi
  misc_feature (1)..(374): tr|X0P7M6|X0P7M6_PHOLE Queuine tRNA-ribosyltransferase OS=Photobacterium leiognathi lrivu.4.1 OX=1248232 GN=tg t PE=3 SV=1
MKFELDKTQGRARRGRLQFERGTVETPAFMPVGTYGTVKGMTPEEVKDTGAQILLGNTFHLWLRPGQEVMKLHGDLHDFMQWQGPILTDSGGFQVFSLGSLRKITEEGVHFRNPVNGDKIFMDAEKSMEIQKDLGSDIVMIFDECTPYPATHEEAKKSMEMSLRWAKRSRNHFDKLENPNALFGIVQGGVYEDLRDVSVEGLTNIGFDGYAVGGLAVGEPKEDMHRILEHTCPQLPEDKPRYLMGVGKPEDLVEGVRRGIDMFDCVMPTRNARNGHLFVTGGVIKIRNAKHKTDTTPLDPHCDCYTCRNYSKAYLYHLDKCNEILGARLNTIHNLRYYQRLMESIRKSIEEDRFDAFVEEFYARRDREVPPLNV

SEQ ID NO: 59065 - protein, 374 aa, Photobacterium leiognathi; identical to SEQ ID NO: 59064
  misc_feature (1)..(374): tr|A0A0M9FCJ5|A0A0M9FCJ5_PHOLD Queuine tRNA-ribosyltran sferase OS=Photobacterium leiognathi subsp. mandapamens is OX=48408 GN=tgt PE=3 SV=1

SEQ ID NO: 59066 - protein, 375 aa, Photobacterium lipolyticum
  misc_feature (1)..(375): tr|A0A2T3MS38|A0A2T3MS38_9GAMM Queuine tRNA-ribosyltran sferase OS=Photobacterium lipolyticum OX=266810 GN=tgt PE=3 SV=1
MKFELDKTQGRARRGRLQFDRGTVETPAFMPVGTYGTVKGMTPEEVQDTGAQIILGNTFHLWLRPGQEVMKLHGDLHDFMQWKGPILTDSGGFQVFSLGAMRKITEEGVHFRNPVNGDKIFMDAEKSMEIQYDLGSDIVMIFDECTPYPATHDEAKKSMEMSLRWAQRSRNQFDKQENPNALFGIVQGGVYEDLRDVSVEGLTNIGFDGYAVGGLAVGEPKEDMHRILEHTCPKLPEDKPRYLMGVGKPEDLVEGVRRGIDMFDCVMPTRNARNGHLFVTGGVIKIRNAKHKTDTTPLDPHCDCYTCRNYSKAYLYHLDKCNEILGARLNTIHNLRYYQRLMASIRKAIEEDRFDAFVEEFYARRDREVPPLNNA

SEQ ID NO: 59067 - protein, 376 aa, Photobacterium lutimaris
  misc_feature (1)..(376): tr|A0A2T3IUS6|A0A2T3IUS6_9GAMM Queuine tRNA-ribosyltran sferase OS=Photobacterium lutimaris OX=388278 GN=tgt PE =3 SV=1
MKFELDKTLGRARRGRLQFERGTVETPAFMPVGTYGTVKGMTPEEVEETGAQILLGNTFHLWLRPGQEVMKMHGDLHDFMQWQGPILTDSGGFQVFSLGDIRKITEEGVHFRNPVNGDKIFMDAEKSMEIQKDLGSDVVMIFDECTPYPATHDEAKKSMEMSLRWAQRSRNHFDKLGNKNALFGIVQGGVYEDLRDVSVEGLTNIGFDGYAVGGLAVGEPKEDMHRVLEHTCPQLPEDKPRYLMGVGKPEDLVEGVRRGIDMFDCVMPTRNARNGHLFVTGGVIKIRNAKHKTDTTPLDPHCDCYTCRKYSKAYLYHLDKCNEILGARLNTIHNLRYYQRLMESIRSAIEEDRFDVFVEEFYARRNREVPPLNDNK

SEQ ID NO: 59068 - protein, 376 aa, Photobacterium marinum
  misc_feature (1)..(376): tr|L8JD12|L8JD12_9GAMM Queuine tRNA-ribosyltransferase OS=Photobacterium marinum OX=1056511 GN=tgt PE=3 SV=1
MKFELDKTQGRARRGRLQFERGTVETPAFMPVGTYGTVKGMTPEEVKDTGAQILLGNTFHLWLRPGQEVMKMHGDLHDFMQWQGPILTDSGGFQVFSLGDIRKITEEGVHFRNPVNGDKIFMDAEKSMEIQKDLGSDIVMIFDECTPYPATHDEAKKSMEMSLRWAQRSRNHFDKLGNKNSLFGIVQGSVYEDLRDVSVEGLTNIGFDGYAVGGLAVGEPKEDMHRILEHTCPQLPEDKPRYLMGVGKPEDLVEGVRRGIDMFDCVMPTRNARNGHLFVTGGVIKIRNAKHKTDTTPLDPHCDCYTCRNYTKAYLYHLDKCNEILGARLNTIHNLRYYQRLMASIRKAIEEDRFDAFVEEFYARRDREVPPLNDNK

SEQ ID NO: 59069 - protein, 389 aa, Photobacterium phosphoreum
  misc_feature (1)..(389): tr|A0A2T3PRU3|A0A2T3PRU3_PHOPO Queuine tRNA-ribosyltran sferase OS=Photobacterium phosphoreum OX=659 GN=tgt PE= 3 SV=1
MGICQIVSLAFGGLVKFELDKTQGRARRGRLQFERGTVETPAFMPVGTYGTVKGMTPEEVEQTGAQIILGNTFHLWLRPGQEVMKMHGDLHDFMQWKGPILTDSGGFQVFSLGALRKITEEGVHFRNPVNGDKIFMDAEKSMEIQKDLGSDIVMIFDECTPYPATHDEAKKSMEMSLRWAQRSRNHFDELENKNALFGIIQGGVYEDLRDVSVEGLTKIGFDGYAVGGLAVGEPKEDMHRILEHTCPQLPEDKPRYLMGVGKPEDLVEGVRRGIDMFDCVMPTRNARNAHLFVTGGVIKIRNAKHKTDTTTLDPECDCYTCKNYSKAYLYHLDKCNEILGARLNTIHNLRYYQRLMASIRKAIDEDRFDAFVEEFYARRDREVPPLQIV

SEQ ID NO: 59070 - protein, 389 aa, Photobacterium phosphoreum
  misc_feature (1)..(389): tr|A0A2T3JYF5|A0A2T3JYF5_PHOPO Queuine tRNA-ribosyltran sferase OS=Photobacterium phosphoreum OX=659 GN=tgt PE= 3 SV=1
MGICQIVSLAFGGLVKFELDKTQGRARRGRLQFERGTVETPAFMPVGTYGTVKGMTPEEVEQTGAQIILGNTFHLWLRPGQEVMKMHGDLHDFMQWKGPILTDSGGFQVFSLGALRKITEEGVHFRNPVNGDKIFMDAEKSMEIQKDLGSDIVMIFDECTPYPATHDEAKKSMEMSLRWAQRSRNHFDELENKNALFGIIQGGVYEDLRDVSVEGLTKIGFDGYAVGGLAVGEPKEDMHRILEHTCPQLPEDKPRYLMGVGKPEDLVEGVRRGIDMFDCVMPTRNARNAHLFVTGGVIKIRNAKHKTDTTTLDPDCDCYTCKNYSKAYLYHLDKCNEILGARLNTIHNLRYYQRLMASIRKAIDEDRFDAFVEEFYARRDREVPPLQIV

SEQ ID NO: 59071 - protein, 375 aa, Photobacterium piscicola
  misc_feature (1)..(375): tr|A0A1T5I4F8|A0A1T5I4F8_9GAMM Queuine tRNA-ribosyltran sferase OS=Photobacterium piscicola OX=1378299 GN=tgt P E=3 SV=1
MKFELDKTQGRARRGRLQFERGTVETPAFMPVGTYGTVKGMTPEEVEETGAQIILGNTFHLWLRPGQEVMKMHGDLHDFMQWKGPILTDSGGFQVFSLGALRKITEEGVHFRNPVNGDKIFMDAEKSMEIQYDLGSDIVMIFDECTPYPATHDEAKKSMEMSLRWAQRSRNHFDKLENPNALFGIVQGGVYEDLRDVSVEGLTNIGFDGYAVGGLAVGEPKEDMHRILEHTCPKLPQDKPRYLMGVGKPEDLVEGVRRGIDMFDCVMPTRNARNAHLFVTGGVIKIRNAKHKTDTTPLDPECDCYTCRHYSKAYLYHLDKCNEILGARLNTIHNLRYYQRLMASIRKSIEEDRFDAFVEEFYARRDREVPPLQIV

SEQ ID NO: 59072 - protein, 375 aa, Photobacterium profundum
  misc_feature (1)..(375): sp|Q6LU69|TGT_PHOPR Queuine tRNA-ribosyltransferase OS= Photobacterium profundum (strain SS9) OX=298386 GN=tgt PE=3 SV=1
MKFELDKTQGRARRGRLQFERGTVETPAFMPVGTYGTVKGMTPEEVKETGAQILLGNTFHLWLRPGQEVMKLHGDLHDFMQWHGPILTDSGGFQVFSLGATRKITEEGVHFRNPVNGDKVFMDAEKSMEIQYDLGSDIVMIFDECTPYPATHDEAKKSMEMSLRWAQRSRNHFDKQENPNALFGIIQGGVYEDLRDVSVDGLTNIGFDGYAVGGLAVGEPKEDMHRILEHTCPQLPEDKPRYLMGVGKPEDLVEGVRRGIDMFDCVMPTRNARNGHLFVTGGVIKIRNAKHKTDTTPLDPHCDCYTCLNYSKAYLYHLDKCNEILGSRLNTIHNLRYYQRLMASIRSAIEEDRFDVFVEEFYARRDREVPPLKNA

SEQ ID NO: 59073 - protein, 375 aa, Photobacterium profundum; identical to SEQ ID NO: 59061
  misc_feature (1)..(375): tr|Q1YX64|Q1YX64_9GAMM Queuine tRNA-ribosyltransferase OS=Photobacterium profundum 3TCK OX=314280 GN=tgt PE=3 SV=1

SEQ ID NO: 59074 - protein, 375 aa, Photobacterium proteolyticum
  misc_feature (1)..(375): tr|A0A1Q9GMK0|A0A1Q9GMK0_9GAMM Queuine tRNA-ribosyltran sferase OS=Photobacterium proteolyticum OX=1903952 GN=t gt PE=3 SV=1
MKFELDKTQGRARRGRLQFERGTVETPAFMPVGTYGTVKGMTPEEVQDTGAQIILGNTFHLWLRPGQEVMKMHGDLHDFMQWQGPILTDSGGFQVFSLGDIRKITEEGVHFRNPVNGDKIFMDAEKSMEIQKDLGSDIVMIFDECTPYPATHDEAKKSMEMSLRWAQRSRNHFDKLGNKNALFGIVQGSVYEDLRDVSVEGLTNIGFDGYAVGGLAVGEPKEDMHRVLEHTCPQLPEDKPRYLMGVGKPEDLVEGVRRGIDMFDCVMPTRNARNGHLFVTGGVIKIRNAKHKTDTTPLDPHCDCYTCRNYSKAYLYHLDKCNEILGARLNTIHNLRYYQRLMASIRKAIEEDRFDAFVEEFYARRDREVPPLKNA

SEQ ID NO: 59075 - protein, 376 aa, Photobacterium rosenbergii; identical to SEQ ID NO: 59055
  misc_feature (1)..(376): tr|A0A2T3N278|A0A2T3N278_9GAMM Queuine tRNA-ribosyltran sferase OS=Photobacterium rosenbergii OX=294936 GN=tgt PE=3 SV=1

SEQ ID NO: 59076 - protein, 376 aa, Photobacterium sanctipauli
  misc_feature (1)..(376): tr|A0A2T3NB38|A0A2T3NB38_9GAMM Queuine tRNA-ribosyltran sferase OS=Photobacterium sanctipauli OX=1342794 GN=tgt PE=3 SV=1
MKFELDKTQGRARRGRLQFERGTVETPAFMPVGTYGTVKGMTPEEVKETGAQILLGNTFHLWLRPGQEVMKMHGDLHDFMQWQGPILTDSGGFQVFSLGDIRKITEEGVHFRNPVNGDKIFMDAEKSMEIQKDLGSDVVMIFDECTPYPATHEEAKKSMEMSLRWAQRSRNHFDKLGNKNALFGIVQGSVYEDLRDVSVEGLTKIGFDGYAVGGLAVGEPKEDMHRVLEHTCPQLPEDKPRYLMGVGKPEDLVEGVRRGIDMFDCVMPTRNARNGHLFVTGGVIKIRNAKHKTDTTALDPHCDCYTCRNYSKAYLYHLDKCNEILGARLNTIHNLRYYQRLMESIRSAIEEDRFDAFVEEFYARRDREVPPLNDNQ

SEQ ID NO: 59077 - protein, 375 aa, Photobacterium sanguinicancri
  misc_feature (1)..(375): tr|A0A135ZMX5|A0A135ZMX5_9GAMM Queuine tRNA-ribosyltran sferase OS=Photobacterium sanguinicancri OX=875932 GN=t gt PE=3 SV=1
MKFELDKTQGRARRGRLQFERGTVETPAFMPVGTYGTVKGMTPEEVKETGAQILLGNTFHLWLRPGQEVMKLHGDLHDFMQWQGPILTDSGGFQVFSLGATRKITEEGVHFRNPVNGDKVFMDAEKSMEIQYDLGSDIVMIFDECTPYPATHDEAKKSMEMSLRWAQRSRNHFDKQENPNSLFGIVQGGVYEDLRDVSVEGLTNIGFDGYAVGGLAVGEPKEDMHRILEHTCPKLPQDKPRYLMGVGKPEDLVEGVRRGIDMFDCVMPTRNARNGHLFVTGGVIKIRNAKHKTDTTPLDPHCDCYTCRNYSKAYLYHLDKCNEILGSRLNTIHNLRYYQRLMESIRTAIDEDRFDAFVDEFYARRDREVPPLKNA

SEQ ID NO: 59078 - protein, 392 aa, Photobacterium sanguinicancri
  misc_feature (1)..(392): tr|A0A264TFQ0|A0A264TFQ0_9GAMM Queuine tRNA-ribosyltran sferase OS=Photobacterium sanguinicancri OX=875932 GN=t gt PE=3 SV=1
MTSRLLCQIVSLAFGGCVKFELDKTQGRARRGRLQFERGTVETPAFMPVGTYGTVKGMTPEEVKETGAQILLGNTFHLWLRPGQEVMKLHGDLHDFMQWQGPILTDSGGFQVFSLGATRKITEEGVHFRNPVNGDKVFMDAEKSMEIQYDLGSDIVMIFDECTPYPATHDEAKKSMEMSLRWAQRSRNHFDKQENPNSLFGIVQGGVYEDLRDVSVEGLTNIGFDGYAVGGLAVGEPKEDMHRILEHTCPKLPQDKPRYLMGVGKPEDLVEGVRRGIDMFDCVMPTRNARNGHLFVTGGVIKIRNAKHKTDTTPLDPHCDCYTCRNYSKAYLYHLDKCNEILGSRLNTIHNLRYYQRLMESIRTAIDEDRFDAFVDEFYARRDREVPPLKNA

SEQ ID NO: 59079 - protein, 375 aa, Photobacterium sp.
  misc_feature (1)..(375): tr|Q2C7I4|Q2C7I4_9GAMM Queuine tRNA-ribosyltransferase OS=Photobacterium sp. SKA34 OX=121723 GN=tgt PE=3 SV=1
MKFELDKTQGRARRGRLQFERGTVETPAFMPVGTYGTVKGMTPEEVKETGAQILLGNTFHLWLRPGQEVMKLHGDLHDFMQWQGPILTDSGGFQVFSLGSLRKITEEGVHFRNPVNGDKIFMDAEKSMEIQKDLGSDIVMIFDECTPYPATHDEAKKSMEMSLRWAQRSRNHFDKQENPNALFGIVQGGVYEDLRDVSVEGLTKIGFDGYAVGGLAVGEPKEDMHRILEHTCPQLPEDKPRYLMGVGKPEDLVEGVRRGIDMFDCVMPTRNARNGHLFVTGGVIKIRNAKHKTDTTPLDPHCDCYTCKNYSKAYLYHLDKCNEILGARLNTIHNLRYYQRLMASVRKSIEEDRFDAFVEEFYARRDREVPPLQNV

SEQ ID NO: 59080 - protein, 375 aa, Photobacterium sp.
  misc_feature (1)..(375): tr|A0A444JKN2|A0A444JKN2_9GAMM Queuine tRNA-ribosyltran sferase OS=Photobacterium sp. BEI 247 OX=2485123 GN=tgt PE=3 SV=1
MKFELDKTQGRARRGRLQFERGTVETPAFMPVGTYGTVKGMTPEEVQDTGAQIILGNTFHLWLRPGQEVMKMHGDLHDFMQWQGPILTDSGGFQVFSLGDIRKITEEGVHFRNPVNGDKIFMDAEKSMEIQKDLGSDIVMIFDECTPYPATHDEAKQSMEMSLRWAQRSRNHFDKLDNKNALFGIVQGSVYEDLRDVSVEGLTNIGFDGYAVGGLAVGEPKEDMHRVLEHTCPQLPEDKPRYLMGVGKPEDLVEGVRRGIDMFDCVMPTRNARNGHLFVTGGVIKIRNAKHKTDTTPLDPHCDCYTCRNYSKAYLYHLDKCNEILGSRLNTIHNLRYYQRLMASIRQAIEEDRFDAFVEEFYARRDREVPPLKNA

SEQ ID NO: 59081 - protein, 375 aa, Photobacterium swingsii
  misc_feature (1)..(375): tr|A0A0J8Y0U1|A0A0J8Y0U1_9GAMM Queuine tRNA-ribosyltran sferase OS=Photobacterium swingsii OX=680026 GN=tgt PE= 3 SV=1
MKFELDKTQGRARRGRLQFERGTVETPAFMPVGTYGTVKGMTPEEVKDTGAQILLGNTFHLWLRPGQEVMKLHGDLHDFMQWQGPILTDSGGFQVFSLGAMRKITEEGVHFRNPVNGDKIFMDAEKSMEIQYDLGSDIVMIFDECTPYPATHDEAKKSMEMSLRWAQRSRNHFDKQENPNALFGIVQGGVYEDLRDVSVEGLTKIGFDGYAVGGLAVGEPKEDMHRILEHTCPQLPQDKPRYLMGVGKPEDLVEGVRRGIDMFDCVMPTRNARNGHLFVTGGVIKIRNAKHKTDTTPLDPHCDCYTCRNYSKAYLYHLDKCNEILGSRLNTIHNLRYYQRLMESIRKAIDEDRFDAFVEEFYARRDREVPPLKNA

SEQ ID NO: 59082 - protein, 395 aa, Photobacterium toruni
  misc_feature (1)..(395): tr|A0A1T4UC88|A0A1T4UC88_9GAMM Queuine tRNA-ribosyltran sferase OS=Photobacterium toruni OX=1935446 GN=tgt PE=3 SV=1
MGLNPIMGTCQIVSLAFGGLVKFELDKTQGRARRGRLQFERGTVETPAFMPVGTYGTVKGMTPEEVEETGAQIILGNTFHLWLRPGQEVMKMHGDLHDFMQWKGPILTDSGGFQVFSLGALRKITEEGVHFRNPVNGDKIFMDAEKSMEIQKDLGSDIVMIFDECTPYPATHDEAKKSMEMSLRWAQRSRNHFDKLENPNALFGIVQGGVYEDLRDVSVEGLTKIGFDGYAVGGLAVGEPKEDMHRILEHTCPQLPEDKPRYLMGVGKPEDLVEGVRRGIDMFDCVMPTRNARNAHLFVTGGVIKIRNAKHKTDTTPLDPDCDCYTCRHYSKAYLYHLDKCNEILGARLNTIHNLRYYQRLMASIRKSIEEDRFDAFVEEFYARRDREVPPLQIV

SEQ ID NO: 59083 - protein, 374 aa, Photorhabdus asymbiotica
  misc_feature (1)..(374): tr|C7BJQ3|C7BJQ3_PHOAA Queuine tRNA-ribosyltransferase OS=Photorhabdus asymbiotica subsp. asymbiotica (strain ATCC 43949 / 3105-77) OX=553480 GN=tgt PE=3 SV=1
MKFELQTTDGQARRGRLVFERGVVETPAFMPVGTYGTVKGMTPEEVKETGAQILLGNTFHLWLRPGQEIMKQHGDLHGFMQWHGPILTDSGGFQVFSLGAMRKIKEEGVHFRNPINGTPVFLSPEKSMEIQYDLGSDIVMIFDECTPYPANWDYAKRSMEMSLRWAARSRKRFDELQNKNALFGIIQGSIYEDLRDISVKSLVDIGFDGYAVGGLAVGEPKEDMHRILEHVCPQIPQDKPRYLMGVGKPEDLVEGVRRGIDMFDCVMPTRNARNGHLFVTEGVIKIRNAKHKEDTSPLDEQCDCYTCRNYSRAYLHHLDRCNEILGARLNTIHNLRYYQRLMAGLRKAIEEGNLEQFVEDFYQRIGKPVPLLNV

SEQ ID NO: 59084 - protein, 374 aa, Photorhabdus australis
  misc_feature (1)..(374): tr|A0A1C0U4M1|A0A1C0U4M1_9GAMM Queuine tRNA-ribosyltran sferase OS=Photorhabdus australis OX=286156 GN=tgt PE=3 SV=1
MKFELHTTDGQARRGRLVFERGVVETPAFMPVGTYGTVKGMTPEEVKETGAQILLGNTFHLWLRPGQEIMKMHGDLHGFMQWHGPILTDSGGFQVFSLGAMRKIKEEGVHFRNPINGTPVFLSPEKSMEIQYDLGSDIVMIFDECTPYPADWDYAKRSMEMSLRWAARSRKRFDELQNKNALFGIIQGSIYEDLRDISVKGLVEIGFDGYAVGGLAVGEPKEDMHRILEHICPQIPQDKPRYLMGVGKPEDLVEGVRRGIDMFDCVMPTRNARNGHLFVTEGVIKIRNAKHKEDTSPLDEQCDCYTCRNYSRAYLHHLDRCNEILGARLNTIHNLRYYQRLMAGLRQAIEEGNLEQFVEDFYQRIGKPVPLLNV

SEQ ID NO: 59085 - protein, 374 aa, Photorhabdus bodei
  misc_feature (1)..(374): tr|A0A329XA05|A0A329XA05_9GAMM Queuine tRNA-ribosyltran sferase OS=Photorhabdus bodei OX=2029681 GN=tgt PE=3 SV =1
MKFELQTTDGQARRGRLIFERGVVETPAFMPVGTYGTVKGMTPEEVKETGAQILLGNTFHLWLRPGQEIMKLHGDLHGFMQWHGPILTDSGGFQVFSLGAMRKIKEEGVHFRNPINGTPVFLSPEKSMEIQYDLGSDIVMIFDECTPYPADWDYAKRSMEMSLRWAARSRKRFDELQNKNALFGIIQGSIYEDLRDISVKGLVEIGFDGYAVGGLAVGEPKEDMHRILEHVCPQIPQDKPRYLMGVGKPEDLVEGVRRGIDMFDCVMPTRNARNGHLFVTDGVIKIRNAKHKEDTSPLDEQCDCYTCRNYSRAYLHHLDRCNEILGARLNTIHNLRYYQRLMAKIRQAIEEGNLEQFVEDFYQRIGKPVPALSI

SEQ ID NO: 59086 - protein, 374 aa, Photorhabdus heterorhabditis
  misc_feature (1)..(374): tr|A0A0M9CWH7|A0A0M9CWH7_9GAMM Queuine tRNA-ribosyltran sferase OS=Photorhabdus heterorhabditis OX=880156 GN=tg t PE=3 SV=1
MKFELQTTDGQARRGRLVFERGVVETPAFMPVGTYGTVKGMTPEEVKETGAQILLGNTFHLWLRPGQEIMKLHGDLHGFMQWHGPILTDSGGFQVFSLGAMRKIKEEGVHFRNPINGTPVFLSPEKSMEIQYDLGSDIVMIFDECTPYPADWDYAKRSMEMSLRWAARSRKRFDELQNKNALFGIIQGSVYEDLRDISIKGLVEIGFDGYAVGGLAVGEPKEDMHRILEHVCPQIPQDKPRYLMGVGKPEDLVEGVRRGIDMFDCVMPTRNARNGHLFVTEGVIKIRNAKYKEDTAPLDEQCDCYTCRNYSRAYLHHLDRCNEILGARLNTIHNLRYYQRLMAGLRKAIEEGNLEQFVEDFYQRIGKPVPLLNV

SEQ ID NO: 59087 - protein, 374 aa, Photorhabdus khanii
  misc_feature (1)..(374): tr|W3VAY8|W3VAY8_9GAMM Queuine tRNA-ribosyltransferase OS=Photorhabdus khanii NC19 OX=1004151 GN=tgt PE=3 SV=1
MKFELQTTDGKARRGRLVFERGVVETPAFMPVGTYGTVKGMTPEEVKETGAQILLGNTFHLWLRPGQEIMKLHGDLHGFMQWHGPILTDSGGFQVFSLGAMRKIKEEGVHFRNPINGTPVFLSPEKSMEIQYDLGSDIVMIFDECTPYPADWDYAKRSMEMSLRWAARSRQRFDELQNKNALFGIIQGSIYEDLRDISVKGLVEIGFDGYAVGGLAVGEPKEDMHRVLEHVCPQIPQDKPRYLMGVGKPEDLVEGVRRGIDMFDCVMPTRNARNGHLFVTEGVIKIRNAKHKEDISPLDEQCDCYTCQNYSRAYLHHLDRCNEILGARLNTIHNLRYYQRLMAGIRKAIEEGNLEQFVEDFYQRIGKPVPLLNV

SEQ ID NO: 59088 - protein, 374 aa, Photorhabdus laumondii
  misc_feature (1)..(374): sp|Q7MB01|TGT_PHOLL Queuine tRNA-ribosyltransferase OS= Photorhabdus laumondii subsp. laumondii (strain DSM 151 39 / CIP 105565 / TT01) OX=243265 GN=tgt PE=3 SV=1
MKFELQTTDGQARRGRLIFERGVVETPAFMPVGTYGTVKGMTPEEVKETGAQILLGNTFHLWLRPGQEIMKLHGDLHGFMQWHGPILTDSGGFQVFSLGAMRKIKEEGVHFRNPINGTPVFLSPEKSMEIQYDLGSDIVMIFDECTPYPADWDYAKRSMEMSLRWAARSRKRFDELQNKNALFGIIQGSIYEDLRDISVKGLVEIGFDGYAVGGLAVGEPKEDMHRILEHVCPQIPQDKPRYLMGVGKPEDLVEGVRRGIDMFDCVMPTRNARNGHLFVTHGVIKIRNAKHKEDTSPLDEQCDCYTCRNYSRAYLHHLDRCNEILGARLNTIHNLRYYQRLMAKIRQAIEEGNLEQFVEDFYQRIGKPVPALSI

SEQ ID NO: 59089 - protein, 374 aa, Photorhabdus laumondii; identical to SEQ ID NO: 59088
  misc_feature (1)..(374): tr|A0A329VM31|A0A329VM31_9GAMM Queuine tRNA-ribosyltran sferase OS=Photorhabdus laumondii subsp. clarkei OX=202 9685 GN=tgt PE=3 SV=1

SEQ ID NO: 59090 - protein, 374 aa, Photorhabdus luminescens
  misc_feature (1)..(374): tr|A0A5C4REG1|A0A5C4REG1_PHOLU Queuine tRNA-ribosyltran sferase OS=Photorhabdus luminescens subsp. sonorensis O X=1173677 GN=tgt PE=3 SV=1
MKFELQTTDGQARRGRLIFERGVVETPAFMPVGTYGTVKGMTPEEVKETGAQILLGNTFHLWLRPGQEIMKLHGDLHGFMQWHGPILTDSGGFQVFSLGAMRKIKEEGVHFRNPINGTPVFLSPEKSMEIQYDLGSDIVMIFDECTPYPADWDYAKRSMEMSLRWAARSRKRFDELQNKNALFGIIQGSVYEDLRDISVKCLVEIGFDGYAVGGLAVGEPKEDMHRILEHVCPQIPQDKPRYLMGVGKPEDLVEGVRRGIDMFDCVMPTRNARNGHLFVTNGVIKIRNAKHKEDTSPLDEQCDCYTCRNYSRAYLHHLDRCNEILGARLNTIHNLRYYQRLMAKIRQAIEEGNLEQFVEDFYQRIGKPVPALSI

SEQ ID NO: 59091 - protein, 374 aa, Photorhabdus luminescens
  misc_feature (1)..(374): tr|A0A2S8Q9P4|A0A2S8Q9P4_PHOLU Queuine tRNA-ribosyltran sferase OS=Photorhabdus luminescens OX=29488 GN=tgt PE= 3 SV=1
MKFELQTTDGQARRGRLIFERGVVETPAFMPVGTYGTVKGMTPEEVKDTGAQILLGNTFHLWLRPGQEIMKLHGDLHGFMQWHGPILTDSGGFQVFSLGAMRKIKEEGVHFRNPINGTPVFLSPEKSMEIQYDLGSDIVMIFDECTPYPADWDYAKRSMEMSLRWAARSRKRFDELQNKNALFGIIQGSIYEDLRDISVKGLVEIGFDGYAVGGLAVGEPKEDMHRILEHVCPQIPQDKPRYLMGVGKPEDLVEGVRRGIDMFDCVMPTRNARNGHLFVTNGVIKIRNAKHKEDTSPLDEQCDCYTCRNYSRAYLHHLDRCNEILGARLNTIHNLRYYQRLMAKIRQAIEEGNLEQFVEDFYQRIGKPVPALSI

SEQ ID NO: 59092 - protein, 374 aa, Photorhabdus namnaonensis
  misc_feature (1)..(374): tr|A0A1B8YMP9|A0A1B8YMP9_9GAMM Queuine tRNA-ribosyltran sferase OS=Photorhabdus namnaonensis OX=1851568 GN=tgt PE=3 SV=1
MKFELQTTDGQARRGRLIFERGVVETPAFMPVGTYGTVKGMTPEEVKETGAQILLGNTFHLWLRPGQEIMKLHGDLHGFMQWHGPILTDSGGFQVFSLGAMRKIKEEGVHFRNPINGTPVFLSPEKSMEIQYDLGSDIVMIFDECTPYPADWDYAKRSMEMSLRWAARSRKRFDELQNKNALFGIIQGSIYEDLRDVSVKSLVEIGFDGYAVGGLAVGEPKEDMHRILEHVCPQIPQDKPRYLMGVGKPEDLVEGVRRGIDMFDCVMPTRNARNGHLFVTNGVIKIRNAKHKEDTSPLDEQCDCYTCRNYSRAYLHHLDRCNEILGARLNTIHNLRYYQRLMAKIRQAIEEGNLEQFVEDFYQRIGKPVPALSI

SEQ ID NO: 59093 - protein, 374 aa, Photorhabdus sp.
  misc_feature (1)..(374): tr|A0A329VS03|A0A329VS03_9GAMM Queuine tRNA-ribosyltran sferase OS=Photorhabdus sp. S9-53 OX=2029683 GN=tgt PE= 3 SV=1
MKFELQTTDGQARRGRLIFERGVVETPAFMPVGTYGTVKGMTPEEVKETGAQILLGNTFHLWLRPGQEIMKLHGDLHGFMQWHGPILTDSGGFQVFSLGAMRKIKEEGVHFRNPINGTPVFLSPEKSMEIQYDLGSDIVMIFDECTPYPADWDYAKRSMEMSLRWAARSRKRFDELQNKNALFGIIQGSIYEDLRDISVKGLVEIGFDGYAVGGLAVGEPKEDMHRILEHVCPQIPQDKPRYLMGVGKPEDLVEGGRRGIDMFDCVMPTRNARNGHLFVTDGVIKIRNAKHKEDTSPLDEQCDCYTCRNYSRAYLHHLDRCNEILGARLNTIHNLRYYQRLMAKIRQAIEEGNLEQFVEDFYQRIGKPVPALSI

SEQ ID NO: 59094 - protein, 374 aa, Photorhabdus sp.
  misc_feature (1)..(374): tr|A0A4R4IX49|A0A4R4IX49_9GAMM Queuine tRNA-ribosyltran sferase OS=Photorhabdus sp. MEX47-22 OX=2100167 GN=tgt PE=3 SV=1
MKFELQTTNGQARRGRLIFERGVVETPAFMPVGTYGTVKGMTPEEVKETGAQILLGNTFHLWLRPGQEIMKLHGDLHGFMQWHGPILTDSGGFQVFSLGAMRKIKEEGVHFRNPINGTPVFLSPEKSMEIQYDLGSDIVMIFDECTPYPADWDYAKRSMEMSLRWAARSRKRFDELQNKNALFGIIQGSVYEDLRDISVKGLVEIGFDGYAVGGLAVGEPKEDMHRILEHVCPQIPQDKPRYLMGVGKPEDLVEGVRRGIDMFDCVMPTRNARNGHLFVTNGVIKIRNAKHKEDTSPLDEQCDCYTCRNYSRAYLHHLDRCNEILGARLNTIHNLRYYQRLMAKIRQAIEEGNLEQFVEDFYQRIGKPVPALSI

SEQ ID NO: 59095 - protein, 374 aa, Photorhabdus temperata
  misc_feature (1)..(374): tr|U7R505|U7R505_PHOTE Queuine tRNA-ribosyltransferase OS=Photorhabdus temperata J3 OX=1389415 GN=tgt PE=3 SV= 1
MKFELQTTDGQARRGRLVFERGVVETPAFMPVGTYGTVKGMTPEEVKETGAQILLGNTFHLWLRPGQEIMKLHGDLHGFMQWHGPILTDSGGFQVFSLGAMRKIKEEGVHFRNPINGTPVFLSPEKSMEIQYDLGSDIVMIFDECTPYPADWDYAKRSMEMSLRWAARSRKRFDELQNKNALFGIIQGSVYEDLRDISVKGLVEIGFDGYAVGGLAVGEPKEDMHRVLEHVCPQIPQDKPRYLMGVGKPEDLVEGVRRGIDMFDCVMPTRNARNGHLFVTDGVIKIRNAKHKEDTSPLDEQCDCYTCRNYSRAYLHHLDRCNEILGARLNTIHNLRYYQRLMAGIRKAIEEGNLEQFVEDFYQRIGKPVPLLNI

SEQ ID NO: 59096 - protein, 374 aa, Photorhabdus temperata; identical to SEQ ID NO: 59095
  misc_feature (1)..(374): tr|T0PEZ6|T0PEZ6_PHOTE Queuine tRNA-ribosyltransferase OS=Photorhabdus temperata subsp. temperata M1021 OX=122 1520 GN=tgt PE=3 SV=1

SEQ ID NO: 59097 - protein, 374 aa, Photorhabdus thracensis
  misc_feature (1)..(374): tr|A0A0F7LKH8|A0A0F7LKH8_9GAMM Queuine tRNA-ribosyltran sferase OS=Photorhabdus thracensis OX=230089 GN=tgt PE= 3 SV=1
MKFELQTTDGQARRGRLVFERGVVETPAFMPVGTYGTVKGMTPEEVKETGAQILLGNTFHLWLRPGQEIMKLHGDLHGFMQWHGPILTDSGGFQVFSLGAMRKIKEEGVHFRNPINGTPVFLSPEKSMEIQYDLGSDIVMIFDECTPYPADWDYAKRSMEMSLRWATRSRKRFDELQNKNALFGIIQGSVYEDLRDISVKGLVEIGFDGYAVGGLAVGEPKEDMHRVLEHVCPQIPQDKPRYLMGVGKPEDLVEGVRRGIDMFDCVMPTRNARNGHLFVTDGVIKIRNAKHKEDTSPLDEQCDCYTCRNYSRAYLHHLDRCNEILGARLNTIHNLRYYQRLMAGIRKAIEEGNLEQFVEDFYQRIGKPVPLLNI

SEQ ID NO: 59098 - protein, 378 aa, Phreatobacter cathodiphilus
  misc_feature (1)..(378): tr|A0A2S0NA42|A0A2S0NA42_9PROT Queuine tRNA-ribosyltran sferase OS=Phreatobacter cathodiphilus OX=1868589 GN=tg t PE=3 SV=1
MTGFSFAIAARDGAARTGVVSTPRGPIRTPAFMPVGTQATVKGMYMDQVKALGADVILGNTYHLMLRPGAERIAKLGGLHRFGGWTGPILTDSGGFQVMSLAKLRKLTEQGVTFSSHVDGSRFELTPERSVEIQGLLGADIQMQLDECVALPNERAAIDKAMQLSLRWAERSKRAFEAQPEGRALFGIVQGGDQPDLRIASARALAAMDFPGYSIGGLAVGEPQEVMLAMIEAVMPHLPEEKPHYLMGVGTPDDLLAAVARGVDMFDCVMPTRNGRHGQAFTRFGKVNFRNARHAEDPRPLDETSSCPAARDYSRAYLHHLVRTEEMLGSMLITWINLAYYQELMAGAREAIARGAYADYMAAVREGWARGDIAPWQG

SEQ ID NO: 59099 - protein, 381 aa, Phreatobacter oligotrophus
  misc_feature (1)..(381): tr|A0A2T4Z524|A0A2T4Z524_9PROT Queuine tRNA-ribosyltran sferase OS=Phreatobacter oligotrophus OX=1122261 GN=tgt PE=3 SV=1
MTPVPGFSFAVHGRDGAARTGVVTTPRGAIRTPAFMPVGTQATVKGMYMDQVKALGADVILGNTYHLMLRPGAERIAALGGLHRFGGWSGPILTDSGGFQVMSLAKLRKLTEQGVTFASHVDGSRFELTPERSVEIQGLLGADIQMQLDECVALPNERAAIDKAMQLSLRWAERSRRAFEAQPAGRALFGIVQGGDQPDLRVASAKALAAMDFPGYSIGGLAVGEPQAVMLAMIEEVMPHLPDDKPHYLMGVGTPDDLLAAVARGVDMFDCVMPTRNGRHGQAFTRFGKVNFRNARHADDPRPLDEASSCPAARDYSRAYLHHLVRTEEMLGSMLITWINLAYYQELMAGARAAIAAGRYADYMAEVRDGWARGDIEPWTS

SEQ ID NO: 59100 - protein, 381 aa, Phreatobacter sp.
  misc_feature (1)..(381): tr|A0A4D7QMZ4|A0A4D7QMZ4_9PROT Queuine tRNA-ribosyltran sferase OS=Phreatobacter sp. NMCR1094 OX=2570229 GN=tgt PE=3 SV=1
MTDPTGFSFEITARDGAARTGLITTPRGHIRTPAFMPVGTQATVKGMYMDQVKALGADVILGNTYHLMLRPGAERVAALGGLHQFGGWKGPILTDSGGFQVMSLAKLRKLTEQGVTFASHIDGSRFELTPERSIEIQGLLGADIQMQLDECVSLPNDRATIEKSTHLSLRWAERSKRAFETQPKGRALFGIVQGGDIPDLRVESAKALTDMDFPGYSIGGLAVGEPQAVMLAMIETVMPHLPDAKPHYLMGVGTPDDLLGAVACGVDMFDCVMPTRNGRHGQAFSRFGKINFRNARHAADPRPIDEASSCPAARDYSRAYLHHLIRTEEMLGSMLVTWINLAYYQDLMAGARAAIAAGRYADYAAEVREGWARGDIEPMAV

SEQ ID NO: 59101 - protein, 395 aa, Phreatobacter stygius
  misc_feature (1)..(395): tr|A0A4D7BFX3|A0A4D7BFX3_9PROT Queuine tRNA-ribosyltran sferase OS=Phreatobacter stygius OX=1940610 GN=tgt PE=3 SV=1
MSHRPDHEPSTASAGDAPAGFSFRIDGRDGAARTGVITTPRGAIRTPAFMPVGTQATVKGMYMDQVRALGADVILGNTYHLMLRPGAERVAGLGGLHRFGGWSGPILTDSGGFQVMSLSKLRKLSEQGVTFASHIDGSRFELTPERSIEIQGLLGSDIQMQLDECVALPNERAVIDKAMRLSIRWAERSRRAFESQPKGRALFGIVQGGDQPDLRVESARALAAMDFPGYSIGGLAVGEPQDVMLAMIETVMPHLPDDKPHYLMGVGTPDDLIGAIARGVDMFDCVMPTRNGRHGQAFSRFGKLNFRNARHAEDPRPVDETSSCPAARDYSRAYLHHLIRTEEMLGSMLVTWINLAYYQDLMAGARAAIAAGRFTDYAAEVRAGWQRGDLAPYGG

SEQ ID NO: 59102 - protein, 428 aa, Phycicoccus sp.
  misc_feature (1)..(428): tr|A0A542IKG9|A0A542IKG9_9MICC Queuine tRNA-ribosyltran sferase OS=Phycicoccus sp. SLBN-51 OX=1456756 GN=tgt PE =3 SV=1
MPANPAFALPETRSQFSFTVGTRLTDSCPPTDARMADNGGEFLGRTGTIATPHGEIQTPAFIAVGTKATVKAVLPESMADLGAQALLANAYHLYLQPGPDILDEAGGLGAFMNWPGPTFTDSGGFQVMSLGSGFKKVIDMKSVDASGPDDAVAPGKERLAHIDDDGVWFKSYLNGDRHRFSPEISMQVQHRIGADIMFAFDELTTLQNSRRYQEESLERTRLWAERCIEEHFRLTESRAGKPYQALFGVIQGAQYEDLRRKACRDLAAMPFDGFGIGGALEKENLGTIVRWCNEELPEDKPRHLLGISEPDDIFTAIENGADTFDCVSPTRVARNSAFYTPYGRFNLSGAKYKRDFGPLQEGCDCYACANYSRAYIHHLYKAKEMVSATLISIHNERFVVKMVDDARLAIESGTFFDFKADTLGRYYS

SEQ ID NO: 59103 - protein, 387 aa, Phycisphaera mikurensis
  misc_feature (1)..(387): tr|I0IGY6|I0IGY6_PHYMF Queuine tRNA-ribosyltransferase OS=Phycisphaera mikurensis (strain NBRC 102666 / KCTC 2 2515 / FYK2301M01) OX=1142394 GN=tgt PE=3 SV=1
MKFELHHASGPAGPRTGTVHTPHGSFPTPAFMTVGTQGTVKGVTPEQVRATGAGILLGNTYHLLLRPGPELLERAGGLHRFMRWDGPILTDSGGFQVFSLGHINRIGEDGVVFKNPLNGDLVDLTPERSIATQHAIGGDILMAFDDCPPAGGDDPAAARERSKLAMERTHRWLDRCVAFHRGRGRDGRQALFGIVQGGTDEGDRAACVEAVCSHDLPGYAIGGVAVGEDTAAIDRIVAHTAPLMPADKPRYLMGVGYPRDIVAAVRSGVDLFDCVLPTRHGRSGHAFTAAGALKLKNAPFREDFAVLEDACDCPACVGGYTRAYLHHLVKCGEILGGVLLTLHNLRLYQRLMADLRATIPGGRWDAFFSRWPCAIGPEEGQAADERR

SEQ ID NO: 59104 - protein, 421 aa, Phycisphaera sp.
  misc_feature (1)..(421): tr|A0A2G1ZUG6|A0A2G1ZUG6_9BACT Queuine tRNA-ribosyltran sferase OS=Phycisphaera sp. OX=2030824 GN=tgt PE=3 SV=1
  misc_feature (305)..(305): Xaa can be any naturally occurring amino acid
  misc_feature (307)..(307): Xaa can be any naturally occurring amino acid
  misc_feature (359)..(359): Xaa can be any naturally occurring amino acid
MGSALTFEITHRCPKTNARVGVATTPHGEFATPAFMTVGTKGTVKGLYPGMLRQAGVEVLLGNTYHLLLRPGPDVVESLGGLHTMMGWNGPILTDSGGYQAYSMADINAIDDDGVTFKSILNGEMIRMGPDEAIDIQNKLGADIIMAFDDCPPSVDPDAGPTNQTRLKLATKRDSRSGKAYDHAARLRISNERTVRWLERCKKAHRRPGDQALFGIVQGGTDLDERRWSAENIAAIDLPGYAIGGVAVGETADDIDRVVQFTAPLLPEDKPRYLMGVGYERDILSAVLAGVDMFDCVLPTRNGRXAXAFTRTGQIKLKNAKFTRDTAVIEPGCDCHACDPARHGLMTVDGTGFSRGTIXHLFNAGEMLGPILVSLHNVRHFQLLMLDIRRAVRDDDWLSFASGWPVAVDGLSDELRGRLGL

SEQ ID NO: 59105 - protein, 398 aa, Phycisphaera sp.
  misc_feature (1)..(398): tr|A0A424JY83|A0A424JY83_9BACT Queuine tRNA-ribosyltran sferase OS=Phycisphaera sp. TMED24 OX=1986832 GN=tgt PE =3 SV=1
MSGPLRFEVEATCSESGARLGRVETPHGGFDTPAFMPVGTQSCVKGLWPDQVAETGSQIILNNAYHLMLRPGDAAVARRGGCHQFMRWSGPILTDSGGYQAYSMAHINRLDEDGVRFRSIVDGAWVDLGPERSMEVQNNIGADIIMAFDDCPPAGDPKEVVGFRKRVTTDGHRGLEHHDRLRDAHERTVRWLDRCVKAHQRPSDQALFGIVQGGTDLDLRAASVEAICQHDLPGFAVGGVAVGERPEQIAEVVAFTAPRLPAQKPRYLMGVGYEQDIVHAVRSGIDMFDCVLPTRNARNAQAFTRSGRMNLKNAKFAEDDAPIDSSCDCATCTGGYSRAYIRHLLNASESMAGSLVATHNLRHFQRLMLDIRQAIRDNDWSAFRAGWPELRTDLAPLS

SEQ ID NO: 59106 - protein, 421 aa, Phycisphaeraceae bacterium
  misc_feature (1)..(421): tr|A0A1Z9QFY4|A0A1Z9QFY4_9BACT Queuine tRNA-ribosyltran sferase OS=Phycisphaeraceae bacterium TMED231 OX=198683 1 GN=tgt PE=3 SV=1
  misc_feature (183)..(183): Xaa can be any naturally occurring amino acid
  misc_feature (186)..(186): Xaa can be any naturally occurring amino acid
  misc_feature (192)..(192): Xaa can be any naturally occurring amino acid
  misc_feature (196)..(197): Xaa can be any naturally occurring amino acid
  misc_feature (215)..(215): Xaa can be any naturally occurring amino acid
  misc_feature (218)..(218): Xaa can be any naturally occurring amino acid
  misc_feature (222)..(222): Xaa can be any naturally occurring amino acid
  misc_feature (228)..(228): Xaa can be any naturally occurring amino acid
  misc_feature (241)..(241): Xaa can be any naturally occurring amino acid
  misc_feature (244)..(244): Xaa can be any naturally occurring amino acid
  misc_feature (248)..(248): Xaa can be any naturally occurring amino acid
  misc_feature (259)..(259): Xaa can be any naturally occurring amino acid
  misc_feature (263)..(263): Xaa can be any naturally occurring amino acid
  misc_feature (276)..(276): Xaa can be any naturally occurring amino acid
  misc_feature (302)..(302): Xaa can be any naturally occurring amino acid
  misc_feature (306)..(306): Xaa can be any naturally occurring amino acid
  misc_feature (315)..(315): Xaa can be any naturally occurring amino acid
  misc_feature (317)..(317): Xaa can be any naturally occurring amino acid
  misc_feature (321)..(321): Xaa can be any naturally occurring amino acid
  misc_feature (337)..(337): Xaa can be any naturally occurring amino acid
  misc_feature (342)..(342): Xaa can be any naturally occurring amino acid
  misc_feature (345)..(346): Xaa can be any naturally occurring amino acid
  misc_feature (348)..(348): Xaa can be any naturally occurring amino acid
  misc_feature (354)..(354): Xaa can be any naturally occurring amino acid
  misc_feature (358)..(358): Xaa can be any naturally occurring amino acid
MTGPLRFKVESRCSTNSARTGTVSTPHGDFKTPAFMPVATAAAMKGVLPSQVRETGSEILLNNAYHLMLRPGTELLERFGGSHRFMRWDGPILTDSGGYQAFSMSDINAIDEDGVTFKSFVDGSRVHLGPESSMAVQNAIGADIIMAFDDCPPSPHARHGSGSPRTRIPTPKDWQKRLRTANXRTXRWLERXVRAXXRPDEQALFGIVQGGTDLXRRXASIXGVCGLXLPGYAIGGVAVGXGPXLIRXIVEFTAPRLPXDRPXYLMGVGYERDIVXAVAAGVDMFDCVLPTRNGRMASVFTXQGPXRLRHARFRXDXGPIXPACDCPACGGGFSRAXLRHCXFAXXMXGPILCXLHNXRHFQRLLLDIRAAIRDDSWSSLAGRWPVLGAPDGLQKAADGSSVASSTADAELKPDAEGSKTS

SEQ ID NO: 59107 - protein, 398 aa, Phycisphaeraceae bacterium
  misc_feature (1)..(398): tr|A0A520Q5C3|A0A520Q5C3_9BACT Queuine tRNA-ribosyltran sferase OS=Phycisphaeraceae bacterium OX=2026777 GN=tgt PE=3 SV=1
MSGPLRFEVSATCSESNARLGRVETPHGGFDTPAFMPVGTQSCVKGLWPHQVEETGSQIILNNAYHLMLRPGDAAVARRGGCHQFMRWSGPILTDSGGYQAYSMAHINRLDEDGVRFRSIVDGAWVDLGPERSMEVQNNIGADIIMAFDDCPPAGDPQDVVGFRKRVTTDGHRGLAHHERLRDAHERTVRWLDRCVKAHQRPTDQALFGIVQGGTDLELRAASVEAICQHDLPGFAVGGVAVGERPEQIAEVVAFTAPRLPAQKPRYLMGVGYEQDIVHAVRSGIDMFDCVLPTRNARNAQAFTRSGRMNLKNAKFAEDDAPIDSSCDCATCTGGYSRAYIRHLLNASESMAGSLVATHNLRHFQRLMLDIRRAIRDNDWSAFRAGWPELRTDLAPLS

SEQ ID NO: 59108 - protein, 353 aa, Phycisphaerae bacterium
  misc_feature (1)..(353): tr|A0A5C5W5P6|A0A5C5W5P6_9BACT Queuine tRNA-ribosyltran sferase OS=Phycisphaerae bacterium RAS1 OX=2528034 GN=t gt PE=3 SV=1
MPVGTRATVKSLTPEQVAAGGAQIILANTYHLLLRPGPGVVAQLGGLQRFSGWNGPMLTDSGGFQVFSLADLRRLDDDGVEFRSHIDGSPVRLTPQCSIETQNALGADIIMAFDECPALGEQNVGTWGRGKGDDRVCDAVRRTILWARRSKEAHARRDQALYGIVQGGLDLDLRQRCIDELIEIGFDGYAIGGLSVGEPPPAMWALLDAFADRLPADRPRYLMGVGRPIDIVRAVAAGVDQFDCVLPTRNGRKGYAFTSRGVTRLRNAAHKLDSGPLDPLCGCYCCRNFSRGYLRHLFMCEELLGGTLVSLHNLAFYQSLMRAMREAIERDVFAAWMAAYVDAEFRMSNSEYD

SEQ ID NO: 59109 - protein, 375 aa, Phycisphaerae bacterium
  misc_feature (1)..(375): tr|A0A1Q2MHI5|A0A1Q2MHI5_9BACT Queuine tRNA-ribosyltran sferase OS=Phycisphaerae bacterium SM-Chi-D1 OX=1851148 GN=tgt PE=3 SV=1
MSIGKFEILCKDAKSNARKGLLTTGHGDIRTPVFMPVGTRGSVKGLTPEMVKDIGSQIILANTYHMYLRPGIDVVEQLGGLHKLMAWDAPILTDSGGYQVFSLSTLNRIGDDGVEFASHIDGQRIYLDPAIATDAQNRLGADIIMAFDECAPYPCERERLVSATERSIRWAKICKDSHKNDLQLLFAIVQGGIDLELRSYCADKLVEIGFPGYAMGGLSVGEGFDNMIRTTAHTVRHLPEDKPRYLMGVGMPADLIAGVREGIDMFDCVLPTRNGRNASAFTEEGPIKLRNSVYTTDIRPLEEGCGCYCCRNFSRGTLRHFFNVGEMLGPTLVSIHNITFLQRIMDKIHKNIDNNTFSEWSEEKLKKYAACGYVR

SEQ ID NO: 59110 - protein, 393 aa, Phycisphaerales bacterium
  misc_feature (1)..(393): tr|A0A3D1EWP6|A0A3D1EWP6_9BACT Queuine tRNA-ribosyltran sferase OS=Phycisphaerales bacterium OX=2052180 GN=tgt PE=3 SV=1
MSDSPALKYELLVKDPSTHARLGRVTTVHGSFDTPAFMPVGTQGAVKGILHEDLSDLGAQIILGNTYHLMLRPGSELVAKMGGLQKWTTWNKPMLTDSGGFQVFSLSDANKITEDGVVFKSHLNGARIELTPERSMQVQNELGADIMMAFDDCPPAAQRDDADQSTGLTRHAIEQEQYLKRLKLACERSNRWLGRCVKAHARKSEQSLFGIIQGGIDLEQRKWCVDEVCSHDLPGYAIGGVAVGEGFEQLKRVVEYTAPLMPSDKPRYLMGVGYERDILTAVQAGVDMFDCVLPTRNARNANAFTPNGQMRLRNAQFADDPRPIVEGCDCACCARGYSRSYLRHMFMAKEMLGPILVTLHNLRHFQRFLLDIRTAIRDNNWSFVTERWPVACL

SEQ ID NO: 59111 - protein, 412 aa, Phycisphaerales bacterium
  misc_feature (1)..(412): tr|A0A3D0MLG4|A0A3D0MLG4_9BACT Queuine tRNA-ribosyltran sferase OS=Phycisphaerales bacterium OX=2052180 GN=tgt PE=3 SV=1
MSNPLRFEITHSSASCDARVGRISVPHGSFQTPAFMPVGTRGSVKGLLPEQVAATGSQIILNNAWHLMLRPGDELIASLGGVHAFMQWDGPILTDSGGFQAWSLADTSLLGDDGIVFKSIIDGSKIELTPERSMQVQNNLGADIIMAFDDCPPSVDASTRVRQQRPELAAAHDQQIGHDHHQRLVEAIDRTARWLERCVAAHGRSDEQALFGIVQGGSDEGLRCRSAEQVTSFDLPGYAIGGVAVGESTETLHETVRMTAPMLPVDRPRYLMGVGYERDLVAAVRAGVDMFDCVLPSRNGRSGGIFTAKGRLQIRNARFREDQSVLEPGCDCQACGGGFSRAYLRHLFISGEMLGPILLSLHNIRHFQRLMVDIRRAIRDDAWSSLVQAWPVLGDPVAEGRSSLVPPDLAGP

SEQ ID NO: 59112 - protein, 376 aa, Phyllobacteriaceae bacterium
  misc_feature (1)..(376): tr|A0A2E1XTU2|A0A2E1XTU2_9RHIZ Queuine tRNA-ribosyltran sferase OS=Phyllobacteriaceae bacterium OX=1871068 GN=t gt PE=3 SV=1
MSSEFTFTLLATDGGARRGEITMPRGTIRTPAFMPVGTGGTVKAMYMDQVRDLGADIILGNTYHLMLRPGAERVARLGGLHEFARWPHPILTDSGGFQVMSLAALRKLDERGVTFKSHIDGVKYEMTPERSIEIQGLLDSDIQMQLDECIRLPAEAGDVERAMELSLRWAERCKTAFGDQPGKAMFGIVQGGDVPALRVRSAEALKAMDLKGYAVGGLAVGEPQAVMLEMLDAVCPVLPGEKPRYLMGVGTPDDILKSVARGIDMFDCVMPTRAGRHGLAYTRFGKINLRNARHAEDPRPLDPDSDCPASRDYSRAYLHHLVRSGEALGGMLLTWNNLAYYQRLMQGARDAIEAGRYGDYMAQTQAGWERGDLAPL

SEQ ID NO: 59113 - protein, 375 aa, Phyllobacteriaceae bacterium
  misc_feature (1)..(375): tr|A0A3A8ADJ2|A0A3A8ADJ2_9RHIZ Queuine tRNA-ribosyltran sferase OS=Phyllobacteriaceae bacterium StC1 OX=2184161 GN=tgt PE=3 SV=1
MAEFGFTLHATDGGARRGTVTTGRGDIATPAFMPVGTAGTVKGLYLDQVKGAGADIILGNTYHLMLRPGAERIDRLGGLHGFIGWDGPILTDSGGFQVMSLSALRQMSEKGVTFKSHVDGAIHEMSPERSIEIQGLLGSDIQMQLDECVALPTDAETMKAAMELSLRWAERCRVAFGEQPGKAMFGIVQGGDDEKLRVQSAEALKAMDLKGYSIGGLAVGEPQEVMLAMLDVVCPILPAHKPRYLMGVGTPQDLLRSVARGVDMFDCVMPTRSGRHGLAFTRRGRVNLKNARHAEDHRPLDDEMNCPASRTYSRAYLHHLIRSGEMLGMMLLSWHNTYYYQWLMAEMRRAIEQRRFADFSAETEAMWEAGDIAAL

SEQ ID NO: 59114 - protein, 377 aa, Phyllobacterium bourgognense
  misc_feature (1)..(377): tr|A0A368Z1H1|A0A368Z1H1_9RHIZ Queuine tRNA-ribosyltran sferase OS=Phyllobacterium bourgognense OX=314236 GN=tg t PE=3 SV=1
MSENFEFKLNATDGKARRGEITMPRGTVRTPAFMPVGTGGTVKAMYMDQVRDLGADIILGNTYHLMLRPGAERVAKLGGLHEFARWPEPILTDSGGFQVMSLAQLRKLTESGVTFRSHIDGRAYEMTPERSIEIQGLLDSDIQMQLDECVALPSTPKDIQRAMELSLRWAERCKIAFGKQPGKAMFGIVQGGDVADLRIRSAQALTGMDLKGYAVGGLAVGEPQDVMLEMLDVTCPELPDDKPRYLMGVGTPDDILKSVARGIDMFDCVMPTRAGRHGLAFTRRGKVNLRNARHADDPRPLDEESPCPAARDYSRAYLHHLVKSGEALGAMLLTWNNLSYYQQLMQGIRDAIESSNFNRFTEETQVTWARGDIPLLA

SEQ ID NO: 59115 - protein, 378 aa, Phyllobacterium brassicacearum
  misc_feature (1)..(378): tr|A0A2P7BSV6|A0A2P7BSV6_9RHIZ Queuine tRNA-ribosyltran sferase OS=Phyllobacterium brassicacearum OX=314235 GN= tgt PE=3 SV=1
MTSENFEFKLIANDGKARRGEITMPRGTVRTPAFMPVGTGGTVKAMYMDQVRELGADIILGNTYHLMLRPSAERVAKLGGLHEFARWPGPILTDSGGFQVMSLAQLRKLTEKSVTFRSHIDGSAYEMSPERSIEIQGLLDSDIQMQLDECVALPSTPQDIQRAMELSLRWAERCKAAFGNQPGKAMFGIVQGGDVADLRIRSAQALKAMDLKGYAVGGLAVGEPQHVMLEMLDITCPELPQEKPRYLMGVGTPDDILKSVARGIDMFDCVMPTRAGRHGLAFTRRGKINLRNARHADDPRPLDEESPCPAARDYSRAYLHHLVKSGEALGGMLLTWNNLSYYQQLMQGIRDAIEGKRYSAFMDETQNTWTRGDIPVFA

SEQ ID NO: 59116 - protein, 377 aa, Phyllobacterium endophyticum
  misc_feature (1)..(377): tr|A0A2P7AX90|A0A2P7AX90_9RHIZ Queuine tRNA-ribosyltran sferase OS=Phyllobacterium endophyticum OX=1149773 GN=t gt PE=3 SV=1
MNENFQFKLIATDGKARRGEITMPRGTVRTPAFMPVGTGGTVKAMYMDQVRDLGADIILGNTYHLMLRPGAERVAKLGGLHDFARWPGPILTDSGGFQVMSLAQLRKLTESGVTFRSHIDGRAYEMTPERSIEIQGLLDSDIQMQLDECVALPSTPADIQRAMELSLRWAERCKAAFGNQPGKAMFGIVQGGDIADLRIRSAQALKNMDLKGYAVGGLAVGEPQEIMLEMLDATCPELPGDKPRYLMGVGTPDDILKSVARGIDMFDCVMPTRAGRHGLAFTRRGKVNLRNARHADDPRPLDEESTCPAARDYSRAYLHHLVKSGESLGAMLLTWNNLSYYQHLMQGIRSAIEAGNFNGFAGETQAAWEQGDIARYA

SEQ ID NO: 59117 - protein, 379 aa, Phyllobacterium leguminum
  misc_feature (1)..(379): tr|A0A318T2G3|A0A318T2G3_9RHIZ Queuine tRNA-ribosyltran sferase OS=Phyllobacterium leguminum OX=314237 GN=tgt P E=3 SV=1
MKNPSTDFQFKLLATDGAARRGEITMPRGTVRTPAFMPVGTGGTVKAMYMDQVRDLGSDIILGNTYHLMLRPGAERVARLGGLHDFARWPGPILTDSGGFQVMSLAQLRKLNENGVTFQSHIDGRAYEMTPERSIEIQGLLDSDIQMQLDECVALPGQERDIERAMELSLRWAERCKTAFGDQPGKAMFGIVQGGDIPRLRERSATALKAMDLKGYSVGGLAVGEPQAVMLEMLDVVCPVLPAEKPRYLMGVGTPDDILKSVARGIDMFDCVMPTRAGRHGLAFTRHGKINLRNARHAEDHRPLDEESDCPAARDYSRAYLHHLIKSGEFLGAMLLTWNNLAYYQKLMQGCRDAIEAGRYADFVAQTQVGWEKGDIAPL

SEQ ID NO: 59118 - protein, 377 aa, Phyllobacterium myrsinacearum
  misc_feature (1)..(377): tr|A0A2S9K016|A0A2S9K016_9RHIZ Queuine tRNA-ribosyltran sferase OS=Phyllobacterium myrsinacearum OX=28101 GN=tg t PE=3 SV=1
MTENFEFKLIATDGKARRGEITMPRGTVRTPAFMPVGTAGTVKAMYMDQVAELGADIILGNTYHLMLRPSAERIAKLGGLHDFARWPGPILTDSGGFQVMSLAQLRKLDEKGVTFRSHIDGRAHEMSPERSIEIQGLLDSDIQMQLDECVALPATPKDIQRAMELSLRWAERCKTAFGTQPGKAMFGIVQGGDVPDLRIRSAQALKAMDLKGYAVGGLAVGEPQEVMLDMLDVTCPELPEEKPRYLMGVGTPDDILKSVARGIDMFDCVMPTRAGRHGLAFTRRGKVNLRNARHADDPRPLDEESSCPAARDYSRAYLHHLVKSGEALGGMLLTWNNLAYYQQHMQGIRNAIEAKRFDAFSAETQAAWAEGDIKPYA

SEQ ID NO: 59119 - protein, 377 aa, Phyllobacterium salinisoli
  misc_feature (1)..(377): tr|A0A368K586|A0A368K586_9RHIZ Queuine tRNA-ribosyltran sferase OS=Phyllobacterium salinisoli OX=1899321 GN=tgt PE=3 SV=1
MISKTFQFKVLATDGKARRGEITMPRGTVRTPAFMPVGTGGTVKAMYMDQVRDLGSDIILGNTYHLMLRPGAERVARLGGLHDFARWPGPILTDSGGFQVMSLAQLRKLNENGVTFRSHIDGRAYEMTPERSIEIQGLLDSDIQMQLDECVALPAQEREMERAMELSLRWAERCRTAFGEQPGKAMFGIVQGGDNARLRTHSAEALKAMDLKGYSIGGLAVGEPQNVMLEMLDVVCPVLPAEKPRYLMGVGTPDDILKSVARGVDMFDCVMPTRAGRHGLAFTRHGKINLRNARHAEDPRPLDEESNCPAARDYSRAYLHHLVKSGEFLGAMLLTWNNLAYYQSLMQGCRDAIEAGEFENFAGATQERWVRGDLPAL

SEQ ID NO: 59120 - protein, 377 aa, Phyllobacterium sophorae
  misc_feature (1)..(377): tr|A0A2P7BJ74|A0A2P7BJ74_9RHIZ Queuine tRNA-ribosyltran sferase OS=Phyllobacterium sophorae OX=1520277 GN=tgt P E=3 SV=1
MSENFEFKLIATDGMARRGEITMPRGTVRTPAFMPVGTGGTVKAMYMDQVRDLGADIILGNTYHLMLRPSAERVAKLGGLHEFARWAGPILTDSGGFQVMSLAQLRKLTEKGVTFRSHIDGRAYEMSPERSIEIQGLLDSDIQMQLDECVALPSTPKDIERAMELSLRWAERCKVAFGNQPGKAMFGIVQGGDVADLRVRSAQALKAMDLKGYAIGGLAVGEPQDVMLEMLDITCPELPVEKPRYLMGVGTPDDILKSVARGIDMFDCVMPTRAGRHGLAFTRRGKVNLRNARHADDPRPLDEESPCPAARDYSRAYLHHLVKSGEALGGMLLTWNNLSYYQQLMQGIRDAIEAGRYSTFAEETQAAWGRGDIPLLA

SEQ ID NO: 59121 - protein, 377 aa, Phyllobacterium sp.
  misc_feature (1)..(377): tr|A0A1H0E221|A0A1H0E221_9RHIZ Queuine tRNA-ribosyltran sferase OS=Phyllobacterium sp. OV277 OX=1882772 GN=tgt PE=3 SV=1
MTENFEFKLIATDGKARRGEITMPRGTVRTPAFMPVGTAGTVKAMYMDQVADLGADIILGNTYHLMLRPSAERIAKLGGLHDFARWPGPILTDSGGFQVMSLAQLRKLDEKGVTFRSHIDGRAYEMSPERSIEIQGLLDSDIQMQLDECVALPSTPKDIQRAMELSLRWAERCKTAFGVQPGKAMFGIVQGGDVPDLRIRSAQALKAMDLKGYAVGGLAVGEPQDVMLDMLDVTCPELPTEKPRYLMGVGTPDDILKSVARGIDMFDCVMPTRAGRHGLAFTRRGKVNLRNARHADDPRPLDEESSCPAARDYSRAYLHHLVKSGEALGGMLLTWNNLAYYQQHMQGIRNAIEAKRFEAFSEETQGAWAQGDIPVYA

SEQ ID NO: 59122 - protein, 377 aa, Phyllobacterium sp.
  misc_feature (1)..(377): tr|J3HT89|J3HT89_9RHIZ Queuine tRNA-ribosyltransferase OS=Phyllobacterium sp. YR531 OX=1144343 GN=tgt PE=3 SV= 1
MTSENFEFKLIATDGKARRGEITMPRGTVRTPAFMPVGTAGTVKAMYMDQVRDLGADIILGNTYHLMLRPGAERVAKLGGLHDFARWPGPILTDSGGFQVMSLAQLRKLDEKGVTFRSHIDGRAYEMTPERSIEIQGLLDSDIQMQLDECVALPSTPKDIQRAMELSLRWAERCKVAFGTQPGKAMFGIVQGGDVPDLRIRSAQALKSMDLKGYAVGGLAVGEPQEVMLDMLDVTCPELPTEKPRYLMGVGTPDDILKSVARGIDMFDCVMPTRAGRHGLAFTRRGKVNLRNARHADDPRPLDEESTCPAARDYSRAYLHHLVKSGEALGGMLLTWNNLAYYQQLMQGVRSAIEATRFDDFVSETQAAWATGDIPVN

SEQ ID NO: 59123 - protein, 378 aa, Phyllobacterium zundukense
  misc_feature (1)..(378): tr|A0A2N9W543|A0A2N9W543_9RHIZ Queuine tRNA-ribosyltran sferase OS=Phyllobacterium zundukense OX=1867719 GN=tgt PE=3 SV=1
MTSENFEFKLIATDGKARRGEITMPRGTVRTPAFMPVGTGGTVKAMYMDQVRDLGADIILGNTYHLMLRPSAERVAKLGGLHEFSRWQGPILTDSGGFQVMSLAQLRKLTEKGVTFRSHIDGRAYEMSPERSIEIQGLLDSDIQMQLDECVALPSTPKDIQRAMELSLRWAERCKVAFGDQPGKAMFGIVQGGDVADLRVRSAQALKAMDLKGYAVGGLAVGEPQDVMLEMLDITCPELPVEKPRYLMGVGTPDDILKSVARGIDMFDCVMPTRAGRHGLAFTRRGKVNLRNARHADDPRPLDEESPCPAARDYSRAYLHHLVKSGEALGGMLLTWNNLSYYQQLMQGIRDTIEAGRYTAFTEETQAAWTQGDIPVFA

SEQ ID NO: 59124 - protein, 375 aa, Phytobacter diazotrophicus; identical to SEQ ID NO: 56374
  misc_feature (1)..(375): tr|A0A4R4B2F7|A0A4R4B2F7_9GAMM Queuine tRNA-ribosyltran sferase OS=Phytobacter diazotrophicus OX=395631 GN=tgt PE=3 SV=1

SEQ ID NO: 59125 - protein, 375 aa, Phytobacter ursingii
  misc_feature (1)..(375): tr|A0A508UD18|A0A508UD18_9GAMM Queuine tRNA-ribosyltran sferase OS=Phytobacter ursingii OX=1972431 GN=tgt PE=3 SV=1
MKFELDTTDGRARRGRLVFDRGVVETPAFMPVGTYGTVKGMTPEEVEATGAQIILGNTFHLWLRPGQEIMKLHGDLHDFMQWKGPILTDSGGFQVFSLGDIRKITEKGVHFRNPINGDPIFLDPEKSMEIQYDLGSDIVMIFDECTPYPADWDYAKRSMEMSLRWAKRSRDRFDSLENPNALFGIIQGSVYEDLRDISVKGLVEIGFDGYAVGGLAVGEPKEDMHRILEHVCPQIPTDKPRYLMGVGKPEDLVEGVRRGIDMFDCVMPTRNARNGHLFVTNGVVKIRNAKYKSDTGSLDPECDCYTCRNYSLAYLHHLDRCNEILGARLNTIHNLRYYQRLMAGLRKAIEEGKLESFVTDFYQRQGRDVPPLNVA

SEQ ID NO: 59126 - protein, 375 aa, Phytobacter ursingii; identical to SEQ ID NO: 56372
  misc_feature (1)..(375): tr|A0A0G3QC96|A0A0G3QC96_9GAMM Queuine tRNA-ribosyltran sferase OS=Phytobacter ursingii OX=1972431 GN=tgt PE=3 SV=1

SEQ ID NO: 59127 - protein, 397 aa, Pigmentiphaga aceris
  misc_feature (1)..(397): tr|A0A5C0B1M2|A0A5C0B1M2_9BURK Queuine tRNA-ribosyltran sferase OS=Pigmentiphaga aceris OX=1940612 GN=tgt PE=3 SV=1
MNGLTNGLTNDNENKAGNAPTNGLSFELLATDGLARRGRMTLNHGVVETPIFMPVGTYGTVKAMAPNELVEIGSQIVLGNTFHLWLRPGTEIMDAHKGLHGFMQWNKPILTDSGGFQVFSLEGLRKITEEGVKFASPIDGTRLFLTPEESMRIQRSLNSDIAMVFDECTPYMVGDRPATTEEAAKSMRMSMRWAQRSKDEFNRLENPNALFGIVQGGMYEPLRDESLAGLTDIGFHGYAIGGLSVGEPKEDMLRILDHVGPKLPQNAPRYLMGVGTPEDLVEGVTKGIDMFDCVMPTRNARNGWLFTRFGDVKIRNARYRADMAPLDETCGCYTCRNFTRSYLHHLFRSNEILGARLNTIHNLYFYLDLMQQMRDAIGGGTFAAWRAAFAADRARGV

SEQ ID NO: 59128 - protein, 377 aa, Pigmentiphaga kullae
  misc_feature (1)..(377): tr|A0A4V2F451|A0A4V2F451_9BURK Queuine tRNA-ribosyltran sferase OS=Pigmentiphaga kullae OX=151784 GN=tgt PE=3 S V=1
MNGLKFELLATEGQARRGRVTLNHGVVETPIFMPVGTYGTVKAMAPYELDEVGAQIVLGNTFHLWLRPGTQIIDAHGGLHGFMQWHKPILTDSGGFQVFSLEGLRKITEEGVRFASPIDGARLMLTPEESMRIQRSLNSDIAMVFDECTPYAIDGRPATVDEAATSMRMSLRWARRSRNEFDALENPNALFGIVQGGMYEALRDESLAGLTDIGFHGYAIGGLSVGEPKEDMLRILAHVAPRLPQDAPRYLMGVGTPEDLVDGVAAGVDMFDCVMPTRNARNGWLFTRYGDVKIRNARYRDDTRPLDETCGCYTCQNFSRSYLHHLFRSNEILGARLNTIHNLHYYLQLMQEMRDAIAGGVFAAWRAEFAANRARGV

SEQ ID NO: 59129 - protein, 377 aa, Pigmentiphaga sp.
  misc_feature (1)..(377): tr|A0A208XMJ1|A0A208XMJ1_9BURK Queuine tRNA-ribosyltran sferase OS=Pigmentiphaga sp. NML080357 OX=2008675 GN=tg t PE=3 SV=1
MNGLKFELLATEGLARRGRVTLNHGVVETPIFMPVGTYGTVKAMAPNELVEIGAQIVLGNTFHLWLRPGTQIIDAHGGLHGFMQWHKPILTDSGGFQVFSLEGLRKITEEGVRFASPIDGARLMLTPEESMRIQRSLNSDIAMVFDECTPYAIDGRPATVDEAATSMRMSLRWARRSRNEFDALENPNALFGIVQGGMYEPLRDESLAGLVDIGFHGYAIGGLSVGEPKEDMLRILAHVAPRLPQDAPRYLMGVGTPEDLVDGVAAGVDMFDCVMPTRNARNGWLFTRYGDVKIRNARYRDDTRPLDETCGCYTCRNFSRAYLHHLFRSNEILGARLNTIHNLYYYLNLMQEMRDAIAGGVFAAWRAEFAANRARGV

SEQ ID NO: 59130 - protein, 377 aa, Pigmentiphaga sp.
  misc_feature (1)..(377): tr|A0A3G8GHC4|A0A3G8GHC4_9BURK Queuine tRNA-ribosyltran sferase OS=Pigmentiphaga sp. H8 OX=2488560 GN=tgt PE=3 SV=1
MNGLKFELLATEGQARRGRVTLNHGVVETPIFMPVGTYGTVKAMAPYELDEVGAQIVLGNTFHLWLRPGTQIIDAHGGLHGFMQWHKPILTDSGGFQVFSLEGLRKITEEGVRFASPIDGARLMLTPEESMRIQRSLNSDIAMVFDECTPYAIDGRPATVDEAATSMRMSLRWARRSRNEFEALENPNALFGIVQGGMYESLRDESLAGLQDIGFHGYAIGGLSVGEPKEDMLRILAHVAPRLPQDAPRYLMGVGTPEDLVDGVAAGVDMFDCVMPTRNARNGWLFTRYGDVKIRNARYRDDTRPLDETCGCYTCQNFSRSYLHHLFRSNEILGARLNTIHNLHYYLQLMQEMRDAIAGGVFAAWRAEFAANRARGV

SEQ ID NO: 59131 - protein, 379 aa, Pilibacter termitis
  misc_feature (1)..(379): tr|A0A1T4L385|A0A1T4L385_9ENTE Queuine tRNA-ribosyltran sferase OS=Pilibacter termitis OX=263852 GN=tgt PE=3 SV =1
MSAIQYRLIKKEKHTGARLGEIITPHGTFPTPMFMPVGTLATVKTISPEELKEMGAGVILSNTYHLWLRPGDELVKKAGGLHKFMNWDQPILTDSGGFQVFSLSDMRNIEEEGVHFRNHLNGAKLFLSPEKAIQIQNNLGSDIMMSFDECPPFDESYDYVKKSVERTSRWALRGLNAHQNPESQGLFGIVQGAGFEDLRKQSARDLVSMDFPGYSIGGLSVGEPKEEMNRVLDFTTPLLPENKPRYLMGVGTADSLIDGVIRGIDMFDCVLPTRIARNGTCMTHSGRLVVKNAQFAEDFRPLDEKCDCYVCKNYTRAYIRHLIKCDETFGIRLTSYHNLYFLIQLMKNVREAIMNDNLLEFREAFFEEYGFNKENAKAF

SEQ ID NO: 59132 - protein, 377 aa, Pirellula sp.
  misc_feature (1)..(377): tr|A0A142XVE3|A0A142XVE3_9PLAN Queuine tRNA-ribosyltran sferase OS=Pirellula sp. SH-Sr6A OX=1632865 GN=tgt PE=3 SV=1
MVQSSRFPFELLGVDASTHARRGRLHLTHGVVQTPAFMPVGTQGTVKGLTIDQVESTGAEILLGNTYHLALRPTSELVAELDGLHRFIGWDKPILTDSGGFQIFSLGDLNQVTEDGATFKSHLNGSKIHLRPEDSIRIQQELGSDVAMVLDHVIALPAEKSAVLDAMHRSIRWAERCKRYASREDQALFAIVQGGLDIELRQQCAEGLVSIGFDGYAVGGLSVGEPPEEMLRVLDGICPVLPTDQPRYLMGVGTPIDLVEGVARGIDMFDCVMPTRNGRNALAFTADGPLRMRNSCHTRDARPIEEDCPCLACRHSRAYIRHLFMCDEMLGPTLLSIHNLTFYQRLMAAARSAIEENRYGVFLDEQRVRLAPKKSQD

SEQ ID NO: 59133 - protein, 373 aa, Pirellula staleyi
  misc_feature (1)..(373): tr|D2R233|D2R233_PIRSD Queuine tRNA-ribosyltransferase OS=Pirellula staleyi (strain ATCC 27377 / DSM 6068 / IC PB 4128) OX=530564 GN=tgt PE=3 SV=1
MASQFSFSLLAHDSTTAARRSVFCTPHGEVQMPAFMPVGTLGTVKGLTIDMVRATGAQMVLSNTYHLALRPGDEVVRHHGGLHNFMLWDGPILTDSGGFQVFSLASQRKITEQSAMFRSHIDGSLLDLSPEKAIQIQENLGSDVAMVLDHVVELPSPKEVVRDACERSIRWAKRCQEAATRDDQAQFAIVQGGLDPEMRVWCAGELAKLNFPGYAIGGLSVGETPEAMYAVLDAVMPAMPVDKPRYLMGVGRPIDLLEAIRRGVDLFDCVLPTRNGRNAQAFTDQGPIRLRNNKYQLDREPLDPHCPCPACRHSKGYIRHLFIAGEMLGPMLLTAHNITYYQRLMAEARAAIEAGEFETFYQRKKAGWTAAGG

SEQ ID NO: 59134 - protein, 379 aa, Piscibacillus halophilus
  misc_feature (1)..(379): tr|A0A1H9BWK3|A0A1H9BWK3_9BACI Queuine tRNA-ribosyltran sferase OS=Piscibacillus halophilus OX=571933 GN=tgt PE =3 SV=1
MTAIKYELIKTCKQTGARLGRVTTPHGSFETPVFMPVGTLATVKTMAPEELKDIGANIILSNTYHLWLRPGEDIVEEAGGLHKFMNWDGSILTDSGGFQVFSLSDMRKIEEKGVHFRNHLSGEKLFLSPEGATKIQNSLGSDIMMAFDECPPYPATYDYMKSSVERTSRWAERCLEAHQKPDQQGLFGIVQGGEYEDLRKQSAQDLISLDFPGYAIGGLSVGEPKDVMNRVLDFTTPLLPDDKPRYLMGVGSPDSLVDGAIRGVDMFDCVLPTRIARNGTCMTSKGRVVVRNAKFARDFTPLDDDCDCYTCRNYTKAYLRHLIKTNETLGIRLTTYHNLYFLVKLMKDVREAIKEDRLGDFRDQFFDQYGFNKPNAKNF

SEQ ID NO: 59135 - protein, 381 aa, Pisciglobus halotolerans
  misc_feature (1)..(381): tr|A0A1I3CS23|A0A1I3CS23_9LACT Queuine tRNA-ribosyltran sferase OS=Pisciglobus halotolerans OX=745365 GN=tgt PE =3 SV=1
MVEPAIKYRLIKEEKHTGARLGEIITPHGTFPTPMFMPVGTLATVKSISPEELDEMGASIILSNTYHLWLRPGEDLVAEAGGLHKFMNWDKGILTDSGGFQVFSLADMRKIEEEGVHFRNHLNGAKMFLSPEKAIDIQNKLGPDIMMSFDECPPFNESHDYMKRSVERTSRWAERGLKAHANPKTQGLFGIIQGGGFEDLRKQSARDLVSLDFPGYSIGGLSVGESKEEMNRVLEYTTPLIPQLKPRYLMGVGTPDSFIDGVIRGIDMFDCVLPTRIARNGTCMTHKGRLVVKNAQYARDFGPIDDQCNCYTCRNYSRAYIRHLFKADETFGLRLTSYHNLYFLLDVMRNIRQAIKDDQLLEYREHFFEEYGYNKPGAKNF

SEQ ID NO: 59136 - protein, 371 aa, Piscirickettsia litoralis
  misc_feature (1)..(371): tr|A0A1E3GG19|A0A1E3GG19_9GAMM Queuine tRNA-ribosyltran sferase (Fragment) OS=Piscirickettsia litoralis OX=1891 921 GN=BGC07_01930 PE=3 SV=1
MSFELLRKDGKARRGRLSFPRGVVETPAFMPVGTYGTVKGLTPEEVSATGAHIVLGNTFHLMLRPGTDIIEQHGDLHDFMQWQGPILTDSGGFQVFSLGALRKLDEKGVTFRSPVNGSKVFMGPEESMEVQRKLGSDIVMIFDECTPYPASYETARESMELSLRWARRSKDAHGDNPAALFGIIQGGMYPDLRKRSTEGLLEIGFDGYAIGGLSVGEPKGEMFSTLEATTPLMLEDKPRYLMGVGTPDDLVEGVRRGVDMFDCVMPTRNARNGHLFTSTGVIRLRNSANKTDTRPVDEDCACSTCRNYSRAYLHHLDKCNEMLGARLNTVHNLHYYQKVMSGLRTAIDAGKLDEFVCQYYAKQNKEVPELT

SEQ ID NO: 59137 - protein, 374 aa, Piscirickettsia salmonis
  misc_feature (1)..(374): tr|A0A0K2L2H8|A0A0K2L2H8_PISSA Queuine tRNA-ribosyltran sferase OS=Piscirickettsia salmonis OX=1238 GN=tgt PE=3 SV=1
MSHMSFELLHKDGRARRGRLSFPRGVVETPAFMPVGTYGTVKGLTPEEVSATGAHIVLGNTFHLMLRPGTEIIEQHGDLHDFMQWQGPILTDSGGFQVFSLGALRKLDEKGVTFRSPVNGSKVFMGPEESMWVQRKLGSDIVMIFDECTPYPASYETARESMELSLRWARRSKDAHGDNSAALFGIIQGGMYPDLRQRSTEGLLEIGFDGYAIGGLSVGEPKHEMFSTLDATTPLMQEDKPRYLMGVGTPDDLVEGVRRGVDMFDCVMPTRNARNGHLFTSEGVIRLRNSANKTDTRPVDEACACSTCRHYSRAYLHHLDKCNEMLGARLNTVHNLHYYQKVMRGLRTAIDAGKLDEFVCQYYAKQNKDVPELA

SEQ ID NO: 59138 - protein, 374 aa, Piscirickettsia salmonis
  misc_feature (1)..(374): tr|A0A0K2DYD1|A0A0K2DYD1_PISSA Queuine tRNA-ribosyltran sferase OS=Piscirickettsia salmonis OX=1238 GN=tgt PE=3 SV=1
MSHMSFELLHKDGRARRGRLSFPRGVVETPAFMPVGTYGTVKGLTPEEVSATGAHIVLGNTFHLMLRPGTEIIEQHGDLHDFMQWQGPILTDSGGFQVFSLGALRKLDEKGVTFRSPVNGSKVFMGPEESMWVQRKLGSDIVMIFDECTPYPASYETARESMELSLRWARRSKDAHGDNPAALFGIIQGGMYPDLRQRSTEGLLEIGFDGYAIGGLSVGEPKHEMFSTLDATTPLMQEDKPRYLMGVGTPDDLVEGVRRGVDMFDCVMPTRNARNGHLFTSEGVIRLRNSANKTDTRPVDEACACSTCRHYSRAYLHHLDKCNEMLGARLNTVHNLHYYQKVMRGLRTAIDAGKLDEFVCQYYAKQNKDVPELA

SEQ ID NO: 59139 - protein, 371 aa, Piscirickettsiaceae bacterium
  misc_feature (1)..(371): tr|A0A3M8FMC6|A0A3M8FMC6_9GAMM Queuine tRNA-ribosyltran sferase OS=Piscirickettsiaceae bacterium NZ-RLO2 OX=216 3606 GN=tgt PE=3 SV=1
MSFELLHKDGRARRGRLSFPRGVVETPAFMPVGTYGTVKGLTPEEVSATGAHIVLGNTFHLMLRPGTEIIEQHGDLHDFMQWQGPILTDSGGFQVFSLGALRKLDEKGVTFRSPVNGSKVFMGPEESMWVQRKLGSDIVMIFDECTPYPASYETARESMELSLRWARRSKDAHGDNPAALFGIIQGGMYPDLRQRSTEGLLEIGFDGYAIGGLSVGEPKHEMFSTLDATTPLMQEDKPRYLMGVGTPDDLVEGVRRGVDMFDCVMPTRNARNGHLFTSEGVIRLRNSGNKTDTRPVDEACACSTCRHYSRAYLHHLDKCNEMLGARLNTVHNLHYYQKVMRGLRTAIDAGKLDEFVCQYYAKQNKDVPELA

SEQ ID NO: 59140 - protein, 371 aa, Piscirickettsiaceae bacterium
  misc_feature (1)..(371): tr|A0A2A4WFB4|A0A2A4WFB4_9GAMM Queuine tRNA-ribosyltran sferase OS=Piscirickettsiaceae bacterium OX=2030828 GN= tgt PE=3 SV=1
MKFDLLKTESTARRGRLTFDRGTIETPAFMPVGTYGTVKAMAPEAIVETGAEIVLGNTFHLMLRPGVDVIQAHGDLHDFMHWDKPILTDSGGFQVFSLDEMRKITEEGVHFRSPVDGRKVFMGPEESMEVQRQLGSDIVMIFDECTPFPATEEEAKTSMQLSLRWAKRSKDAHGENPSALFGIIQGGMYEHLRDESLQELMNINFDGFAVGGLSVGEPKDDRERILEHIVPNMPDDKPRYLMGVGKPEDIVEAVLKGIDMFDCVMPTRNARNGYLFTRKGLVKIRNKKYQFDTSPVDAECECYTCKNYTRSYLRHLDKCKEILGSQLNTIHNLHYYQDLMRGLRKAIDEGSLDEFVEDFYQQQGKTPNAVA

SEQ ID NO: 59141 - protein, 377 aa, Pistricoccus aurantiacus
  misc_feature (1)..(377): tr|A0A5B8SRL3|A0A5B8SRL3_9GAMM Queuine tRNA-ribosyltran sferase OS=Pistricoccus aurantiacus OX=1883414 GN=tgt P E=3 SV=1
MRDECFMQFERLARDGRARRGRLTFPRGTVDTPAFMPVGTYGTVKGMTPASIKEIGAEIILGNTFHLWLRPGTEVIEAHGDLHDFAQWDKPILTDSGGFQVFSLGETRKITEQGVHFRSPVDGAKVFMGPEESMAVQRSLGSDIVMIFDECTPYPASIEEAERSMELSLRWARRSRDAHGSSPSALFGIIQGGMYPELRKRSLEGLLKIGFDGLAIGGLSVGEPKEEMIKVLDYLPTWMPEEAPRYLMGVGKPEDLVESVRRGIDMFDCVMPTRNARNGHLFTFAGTVKIRNATHRHDTRPLEDGCDCYTCRHFSRSYLHHLDRCGEMLGSMLNTIHNLRHYQRLMAGLRGAIEAGTLANFVDTYYAGRGLAVPPGP

SEQ ID NO: 59142 - protein, 372 aa, Planctomicrobium piriforme
  misc_feature (1)..(372): tr|A0A1I3HHG9|A0A1I3HHG9_9PLAN Queuine tRNA-ribosyltran sferase OS=Planctomicrobium piriforme OX=1576369 GN=tgt PE=3 SV=1
MTSFAFHLDYTDPTSRARLGRFETPHGVVETPIFMPVGTRGTVKGIWPDELREMGAKMILANTYHLALRPGESVVKDLGGLHAFMNWQGPILTDSGGYQVFSLAELRQMDRDRVVFKSHVDGSMFDLTPARAVQIQEDLGADVIMCLDECPPHDAPAEKMQAAVDRTTRWAALCRDAQKRPDQALFGILQGGTDQAMRERSAEGLLPLDFPGYAIGGLSVGEAPADMYSTLDFTVPLLPEHKPRYLMGVGRPIDIIEAVLRGVDMFDCVMPTRNARNATAFTSHGLVKMRNLRYQRDTRPLDANCNCPTCQQFSRGYLRHLFQVEEMLGAQALTVHNLAYYQQVMRDLRAAIKSNSAQEFRLDHLARMTADP

SEQ ID NO: 59143 - protein, 393 aa, Planctomyces sp.
  misc_feature (1)..(393): tr|A0A2E8EZV6|A0A2E8EZV6_9PLAN Queuine tRNA-ribosyltran sferase OS=Planctomyces sp. OX=37635 GN=tgt PE=3 SV=1
MESLSFSFRLDHTDGLARAGELITSHGNVATPAFMTVATQATVKSLLPEEVESLGAEIVLSNAYHLYLRPGVDAVARLGGLHRFMGWSKPILTDSGGFQAFSMGALRKIDEDGIRFRSHIDGSEHRFGPELAIANQRGLGADIIMCLDQCIAHGVSKDEVRRAMDRTHRWAQICYDSHQASGKADVHALFGIVQGGAFSDLRDESARHITGIPFPGYAIGGLAVGESKAELYQVAGQVAGQLPKDKPRYLMGVGSPEDLVECVARGVDMFDCVLPTRVARNGALFTRTGRVDITKRRYADQAEPLDEDCDCYGCRNFSAAYLWHLFKAKELLALRLATMHNLRFILRLMKDMREAILENRFGGFQREFWDAYRPTDEAARQAQKDKWLKARGG

SEQ ID NO: 59144 - protein, 372 aa, Planctomyces sp.
  misc_feature (1)..(372): tr|A0A2E3GVZ2|A0A2E3GVZ2_9PLAN Queuine tRNA-ribosyltran sferase OS=Planctomyces sp. OX=37635 GN=tgt PE=3 SV=1
MSQFRFELEHVDRHTGARAGKWHTPHGVVQTPTFMPVGTLGTVKGLLPEQLREAGAEMILANTYHLALRPGADVVADLGGLHEFSKWDGPILTDSGGFQVFSLAKLSKLTDDKVVFRSHIDGSVLELSPEKAIDIQEKLGADCIMCLDECPPHDVEKPRLRKAIERTTAWAKRCRDAQKRDDQALFGIVQGGIDQELRETSAAGLLPLDFPGYAIGGLSVGEDPQDMYRTLDFTTPLLPKEKPRYLMGVGKPVDLVEGILRGVDMFDCVMPTRNGRNAMAFTSNGPVKIRNAKYQRDEQPLDAEGASRVGREYSRGYLRHLFMAGEMLGPILLSWHNIAFYEQLVRDMRTAILNDESAEFRSRQLARWGMEP

SEQ ID NO: 59145 - protein, 372 aa, Planctomycetaceae bacterium
  misc_feature (1)..(372): tr|A0A1Z8MRA7|A0A1Z8MRA7_9PLAN Queuine tRNA-ribosyltran sferase OS=Planctomycetaceae bacterium TMED10 OX=198683 3 GN=tgt PE=3 SV=1
  misc_feature (30)..(30): Xaa can be any naturally occurring amino acid
MPAPAFSFQLRHRSADSLARCSEFTTPHGXVALPAFMPVGTLGTVKGVAVEQLRASGTEFVLSNTYHLALRPGAETVRNLGGLHRFMGWSGPILTDSGGYQIFSLAARTRITEQGATFRSHIDGRSIELTPERAIAIQEDLGSDVAMVLDHVVGLPSTSKEVALAMERSLRWAERCRAAAKREDQALFGIVQGGLDGDLREQSAKGLVALDFPGYAIGGLSVGETHEEMVETLKSTVPHLPEDRPRYLMGVGRPQDILQAIGQGVDMFDCVLPTRSGRHGVAFTSRGTIRLKNECHREKVEPLEENCPCLACQHSLGYLRHLFVSNEMLGPILLSIHNITYYQRLLRGAREAILADQYGAFCEACFKGWQMG

SEQ ID NO: 59146 - protein, 373 aa, Planctomycetaceae bacterium
  misc_feature (1)..(373): tr|A0A352L0T6|A0A352L0T6_9PLAN Queuine tRNA-ribosyltran sferase OS=Planctomycetaceae bacterium OX=2026779 GN=tg t PE=3 SV=1
MSASFSFHLDAVDPGTAGRAGRWQTPHGTVQTPAFMPVGTLATVKGLLPSQLRAAGAQMVLANTYHLALRPGEKTVAEHGGLHRFMDWDGPILTDSGGFQVFSLAGMRKLTDDKVVFRSHIDGALLELTPERAVEIQEALGADCIMCLDECPPSGESVPKIQQAVDRTTRWAERCRAAQKRTDQALFAIVQGGLHAELRGRSAEGLLKIGFPGYAVGGLSVGEPPAQMYATLDCTVPLLPSDRPRYLMGVGRPEDILEAVCRGIDMFDCVMPTRNGRNAMVFTSRGPVRLRNAVHAKDQSPLDPECPCVACQRYTRSYLRHLFVAGEMLGPILASLHNITYYQTLVRQIREAVLAGTLQQFRTAQLARWGSVH

SEQ ID NO: 59147 - protein, 370 aa, Planctomycetales bacterium
  misc_feature (1)..(370): tr|A0A1W9T9N7|A0A1W9T9N7_9BACT Queuine tRNA-ribosyltran sferase OS=Planctomycetales bacterium 4572_13 OX=197163 8 GN=tgt PE=3 SV=1
MKSYELVNQDADSRARRGRLLTAHGVVETPVFMPVGTRGCVKGITPAQLATTGAQIVLANTYHMVIRPGTEVVESLGDLHGLMGWDGPILTDSGGYQVFSLSTLNRIGDDGVEFASHIDGAKIYLDPTVATQTQNRLGADVIMCFDECTPWPCPADRLRKAVERTIRWAQQCKDTHANEKQRLFGIVQGGVDLELRSACAQKLIPMDFDGYAIGGLSVGEGHEHMIRTVEHTTAMLPEDKPRYLMGVGMPVDIVEAVRAGVDMFDCVLPTRNGRNAYAFTNNGPIRLRNSQYVKDAGPIETDCPCYACQNFGKGTLRHFFNVGEMLGPILVSIHNLTYYQRLTNEIRTQIENKTYNEWADAFCGKHKGEA

SEQ ID NO: 59148 - protein, 300 aa, Planctomycetales bacterium
  misc_feature (1)..(300): tr|A0A1V4QSU7|A0A1V4QSU7_9BACT Queuine tRNA-ribosyltran sferase (Fragment) OS=Planctomycetales bacterium 4484_1 13 OX=1956161 GN=B1H03_05335 PE=3 SV=1
MSASGIFELAATDGAARAGLLHLASGDVPTPYFMPIATRGMVKDATFDDLAAIGFPLILMNTYHLICRPGVEVIRKLNGLRKFSGWERAILTDSGGFQIFSLSPMTEISGEGVRFRDYASGDEFFLSPEDCVDTQLAFGSDVAMALDICTRLPAERKQVEDDLLITHEWMARGHQHWVAKGGAETGTQLFGIVQGGLERDLREKSIELVSGLGFAGIGVGGLSVGESREDYEDIAAFCAQRLPEDRPRYLMGVGTPADILQAAGMGYDLFDCVLPTRMARHGVAYGWDGYVHIRQEKWKL

SEQ ID NO: 59149 - protein, 380 aa, Planctomycetes bacterium
  misc_feature (1)..(380): tr|A0A1G2Y3J3|A0A1G2Y3J3_9BACT Queuine tRNA-ribosyltran sferase OS=Planctomycetes bacterium GWF2_42_9 OX=180195 8 GN=tgt PE=3 SV=1
MEVFELKNKDPNCNARTGFLNTYHGRIKTPVFMPVGTRATVKGLMPAQLADAGSQIVLGNTFHLMLRPGTEIIEKIGGLHKFMAWNKPILTDSGGFQVFSLSEINKINDDGTEFASPYDGAKIKLDATSATAIQNKLGADIIMCFDQCPAHDAPEKEQLKAVERTIRWASVCKKHHANDKQLLFGIVQGQTDLNLRKSCADELIKMDFPGYALGGLSVGEGTEEMLKTVRFAAPLLPENKPRYLMGVGTPADLIQCVEAGIDMFDCVMPTRNGRNALAFTSEGPIRLRNSSFIDDQNPIDSQCGCYCCRNFTRSAIRHYFNVGEMLGPILLSLHNIVFYHNLMDKIRENVENGTFTKWAEAALKSPAYKRNGSEKLTLNN

SEQ ID NO: 59150 - protein, 370 aa, Planctomycetes bacterium
  misc_feature (1)..(370): tr|A0A1G2Z2V5|A0A1G2Z2V5_9BACT Queuine tRNA-ribosyltran sferase OS=Planctomycetes bacterium RBG_13_50_24 OX=180 1962 GN=tgt PE=3 SV=1
MFTETANFQILYQDSSSSARLGLLQTAHGKIETPAFMPVGTAGAVKGITPQQLKETGAGIILGNTYHLLLRPGVETIEKLGGLHKFMAWDRPILTDSGGYQVFSLSPLTKIDDDGVEFASHVDGAKIYLNAEIATEIQNRLDADIIMCFDQCTPAGVDIPELEKAVERTILWAKRCKKAHNKPNQMLFAIVQGGINPDLRTHCAEELVKTGFDGYAVGGLSVGEGHNDMIQTVSHTTPLLPTDKPRYLMGVGTPVDIIAAVSAGIDMFDCVLPTRNGRNAFAFTENGPLRLRNNVHIDDTMPIETGCDCYCCRNFSRGALRHFFNSGEMLGPILVSIHNLTFYQRLMAKIRQAIKRNKLADLAKEFINNN

SEQ ID NO: 59151 - protein, 375 aa, Planctomycetia bacterium
  misc_feature (1)..(375): tr|A0A257U7J1|A0A257U7J1_9BACT Queuine tRNA-ribosyltran sferase OS=Planctomycetia bacterium 21-64-5 OX=1970542 GN=tgt PE=3 SV=1
MTEPGAFAFRLLHQDAGCRARRSTFHTPHGAVEMPAFMPVGTQGTVKGLAIDQLRSTGAQMVLANTYHLALRPGEEVVAELGGLHAFMGFSGPILTDSGGFQIFSLAVMARIDEQGATFRSHIDGSLVALSPERAVSLQEALGSDVAMVLDHVVALPGGPPAVREAAERTVRWAERSRDAHRRRDQAQFGIIQGGLDEPLRVWCAEQLAALDFTGYAVGGLSVGESPEEMYRVLDFTVPAMPDNKPRYLMGVGRPQDLLEAIERGIDLFDCVMPTRNGRNAVAFTDVGPLRLRNKQFERDLRPLDADCPCAACRHSRGYLRHLFMAREMLGPVLLSIHNLTYYQRLLAAAREAIEADRFVEYRRGKEQVWRSGTP

SEQ ID NO: 59152 - protein, 374 aa, Planctomycetia bacterium
  misc_feature (1)..(374): tr|A0A3D3KP75|A0A3D3KP75_9BACT Queuine tRNA-ribosyltran sferase OS=Planctomycetia bacterium OX=2052181 GN=tgt P E=3 SV=1
MRFRILRADNRSKARCGEMETSHGTVKTPVFMPVGTQATVKTLTPVQLRELGVEAIICNAYHLSLRPGEQIIKDMGGIHRFMGWDRTIVTDSGGYQVFSLRNISRTSDEGVEFSSPFTGERIFFSPERVIDIQIALGSDIMMPFDQCVPYPCERDDAKEAMLRTDRWTRRCLAALSKRESNGQALFGIVQGSVFRELRQESVERLGEMDLDGYAVGGLSVGEGRYLMNEVLGYTVEKLPWDKPRYLMGVGSPADILDAVEHGVDMFDCVLPTRNGRNGCAFTKGGKIKLFNSIYREDKRPLDDTCDCYTCRTFSRAYLRHLFFAGEILALTLVSLHNVYFFQEMMRGIREAVLAGTFVRFKEKFLEVQEKEDSK

SEQ ID NO: 59153 - protein, 374 aa, Planctopirus ephydatiae
  misc_feature (1)..(374): tr|A0A518GN51|A0A518GN51_9PLAN Queuine tRNA-ribosyltran sferase OS=Planctopirus ephydatiae OX=2528019 GN=tgt PE =3 SV=1
MGLSKFAFTLLATDPKSMARAGLWETPHGTIETPAFMPVGTAGTVKGLTPDQLVATGARKILANTYHLALRPGPEVVADLGGLHRFFDWSGPILTDSGGFQIFSLAKLSRMTEEGVTFRSHLDGSALNLTPEKAMSIQEFLGADVIMCLDECPPADAPEEHILRAVDRTTRWAARCREAHQRSDQALFGIVQGGTIESLRIRSAEALLPFDFPGYAVGGLSVGEPPPEMYRTLEFTTPVLPVQKPRYLMGVGRPIDLIEGVLRGIDLFDCVMPTRNGRNGMAFTSTGPVRLKNARHLRDTSPLDAECPCQACQRFSRGYLRHLFMCGEMLGPILLTLHNLTFYQRLMKGLREAILEGRGHEFRASQLARWGESG

SEQ ID NO: 59154 - protein, 372 aa, Planctopirus hydrillae
  misc_feature (1)..(372): tr|A0A1C3E5Z6|A0A1C3E5Z6_9PLAN Queuine tRNA-ribosyltran sferase OS=Planctopirus hydrillae OX=1841610 GN=tgt PE= 3 SV=1
MSKFAFTLLATDPTSMARAGLWETPHGTIETPAFMPVGTAGTVKGLTPDQLAATGARKILANTYHLALRPGPEVVADLGGLHRFFDWSGPILTDSGGFQIFSLAKLSRMTEEGVTFRSHLDGSALNLTPEKAMSIQEFLGADVIMCLDECPPADAPEEHILRAVDRTTRWAARCREAHQRSDQALFGIVQGGTIESLRIRSAEALLPFDFPGYAVGGLSVGEPPPEMYRTLEFTTPVLPVQKPRYLMGVGRPIDLIEGVLRGIDLFDCVMPTRNGRNGMAFTSTGPVRLKNARHLRDTGPLDAECPCQACQRFSRGYLRHLFMCGEMLGPILLTLHNLTFYQRLMKGLREAILEGRGHEFRASQLARWGESG

SEQ ID NO: 59155 - protein, 372 aa, Planctopirus limnophila
  misc_feature (1)..(372): tr|D5SVB1|D5SVB1_PLAL2 Queuine tRNA-ribosyltransferase OS=Planctopirus limnophila (strain ATCC 43296 / DSM 377 6 / IFAM 1008 / 290) OX=521674 GN=tgt PE=3 SV=1
MSKFAFSLLATDPKSMARAGLWETPHGTIETPAFMPVGTAGTVKGLTPDQLAATGAKKILANTYHLALRPGPEVVADLGGLHRFFDWSGPILTDSGGFQIFSLAKLSRMTEEGVTFRSHLDGSALNLTPEKAMSIQEFLGADVIMCLDECPPADAPEEHILRAVDRTTRWAARCREAHQRSDQALFGIVQGGTIESLRIRSAEALLPFDFPGYAVGGLSVGEPPPEMYRTLEFTTPVLPVQKPRYLMGVGRPIDLIEGVLRGIDLFDCVMPTRNGRNGMAFTSTGPVRLKNARHLRDTSPLDAECPCQACQRFSRGYLRHLFMCGEMLGPILLTLHNLTFYQRLMKGLREAILEGRGIEFRASQLARWGESG

SEQ ID NO: 59156 - protein, 377 aa, Planifilum fimeticola
  misc_feature (1)..(377): tr|A0A2T0LBS4|A0A2T0LBS4_9BACL Queuine tRNA-ribosyltran sferase OS=Planifilum fimeticola OX=201975 GN=tgt PE=3 SV=1
MAVRYELIKVCKQSGARLGRLHTPHGTFETPMFMPVGTQATVKTMSPEELKEIGSGVILANTYHLYLRPGHEVVREAGGLHRFMNWNRGILTDSGGFQVFSLSTLRKITEEGVSFRSHISGEPLFLSPEKSIEVQNALGADIIMAFDECPPFPAEREYVRASLERTTRWAERCLRAHRRPEDQALFGIVQGGMYRDLREQSAAQLVAMDFPGYAVGGLSVGEPKELMYEILSHTTPLLPAGKPRYLMGVGSPDALIEGVIRGIDMFDCVLPTRIARNGTTMTSQGRLVVRNARYARDFSPLDPECDCYTCRHYTRAYIRHLIKADETFGLRLTTYHNLYFLTRLMERVREAIREDRLLDFRDQFFAKYYGGDQVKAF

SEQ ID NO: 59157 - protein, 377 aa, Planifilum fulgidum
  misc_feature (1)..(377): tr|A0A1I2QUQ9|A0A1I2QUQ9_9BACL Queuine tRNA-ribosyltran sferase OS=Planifilum fulgidum OX=201973 GN=tgt PE=3 SV =1
MAVRYELIKVCKQSGARLGRLHTPHGTFETPMFMPVGTQATVKTMSPEELEEIGSGIILANTYHLYLRPGHEIVREAGGLHRFMNWNRGILTDSGGFQVFSLSPLRKITEEGVSFRSHISGEPLFLSPEKSIEVQNALGADIIMAFDECPPYPAEREYVRASLERTTRWAERCLKAHRRPQDQALFGIVQGGMYKDLREQSAKQLVAMDFPGYAVGGLSVGEPKELMYEILSHTTPLLPADKPRYLMGVGSPDALIEGVIRGIDMFDCVLPTRIARNGTTMTSQGRLVVRNARYARDFSPLDPECDCYTCRHYTRAYIRHLIKADEIFGLRLTTYHNLYFLTRLMERIREAIRKDRLLDFRDQFFARYYGEDPIKAF

SEQ ID NO: 59158 - protein, 336 aa, Planktomarina sp.
  misc_feature (1)..(336): tr|A0A2E0AD67|A0A2E0AD67_9RHOB Queuine tRNA-ribosyltran sferase (Fragment) OS=Planktomarina sp. OX=2024851 GN=C MK01_03990 PE=3 SV=1
MIKQNYFKLKATSGKARLGCFKTPRGEIATPAFMPVGTAATVKAMLPLSVRETGADILLCNTYHLMLRPTAERINRLGGLHSFMNWDRPILTDSGGFQVMSLANLRKVTDDGVTFKSHIDGSRHHLSPERSIEIQQLLDSDILMCFDECPALPAKYDRIADSMRMSMIWAGRSRAVFDESRGKALFGIQQGGLEEKLREESAEKLRSIGFEGYAVGGLAVGEGQSAMFEVLDFAPNQLPVEKPRYLMGVGKPDDIVGAVARGIDMMDCVLPTRSGRTGQVFTRYGALNIKNARHQDDPRPLDELCGCPACKNYSRAYLHHVFRSQEIISSMLLTWH

SEQ ID NO: 59159 - protein, 376 aa, Planktotalea frisia
  misc_feature (1)..(376): tr|A0A1L9NV49|A0A1L9NV49_9RHOB Queuine tRNA-ribosyltran sferase OS=Planktotalea frisia OX=696762 GN=tgt PE=3 SV =1
MTERFSYTLNATDGRARTGVINTPRGDIRTPAFMPVGTAATVKAMMPESVRATGADILLGNTYHLMLRPTAERIDRLGGLHKFMNWDRPILTDSGGFQVMSLAELRKLTEEGVTFKSHIDGSKHHLTPERSMEIQKLLGSDIVMCFDECPALPASDEDVRKSMELSMRWAQRSRDAFGDRPGHALFGIQQGGVTEELRGISAEKLREIEFDGYAVGGLAVGEGQEAMFGVLDYAPDMLPKDKPRYLMGVGKPDDIVGAVARGIDMMDCVLPSRSGRTGQAWTRRGQVNIKNARHSDDPRPLDEACTCPACSNYSRAYLNHVFRSHEMISGMLITWHNLHYYQELMQGMRDAISAGTFEAFQAEFHATRAMGDIEPL

SEQ ID NO: 59160 - protein, 386 aa, Planktothrix agardhii
  misc_feature (1)..(386): tr|A0A2Z6CEM9|A0A2Z6CEM9_PLAAG Queuine tRNA-ribosyltran sferase OS=Planktothrix agardhii NIES-204 OX=282423 GN= tgt PE=3 SV=1
MSHPFSFEIQARCSQTKARVGLFHTPHGWVETPRFMPVGTLANVKTLTPAHLKDAGAQMVLSNTYHLHLQPGEKIVAGAGGLHRFMGWDGPMLTDSGGFQVFSLSKINTITEEGVTFRSPHDGRLINFTPELSIQIQNELGADVIMAFDECPPYPATREAVVKATERTKRWLERCIKAHKRPDQALFGIVQGGVHADLRQQAARDLVEFDLPGYAIGGVSVGEPSALIEKIVQVTTPILPFNKPRYLMGIGTYREMAQAIAAGIDLFDCVIPTRLGRHGAALVQGERWNLKNAQFREDFRPLDATCPCYTCQNFSRAYLSHLVRAKEVLGYTLIAIHNVTELIRFTQRIRESILNHRFAEEFQFWLTSTDAEATLEDDEIDKRSDH

SEQ ID NO: 59161 - protein, 316 aa, Planktothrix agardhii
  misc_feature (1)..(316): tr|A0A073CE77|A0A073CE77_PLAAG Queuine tRNA-ribosyltran sferase OS=Planktothrix agardhii NIVA-CYA 126/8 OX=3884 67 GN=A19Y_1362 PE=4 SV=1
MMISYADFHKMPSQRKQAMEKGLHEHLGVPKNVKFYLDNGAFSFVKNNQEVPVKEYAEFVREAKPDWFPIPQDFIPTPKMTLEEQEECFNKTMNMNFRYYQGDYVPVVHISNFLEKYIEKIIESKALSNKPYIALGGIVPNLLRASKAIPYKQIIDNLIHFRQQFPDQKLHIFGIGGTATLHLAGLLGINSVDSSGWRNRAARGLIQLPGTGDRIISQLGNWRGRTISKEEEEKLKQCQCPGCKQGGLEGLKLSGGIGFYNRATHNLWVLLEEARQIQEHLHILKDYETWYQEHLDNTTYRPLIQELILELKLFTN

SEQ ID NO: 59162 - protein, 387 aa, Planktothrix rubescens
  misc_feature (1)..(387): tr|A0A1J1L3G8|A0A1J1L3G8_PLARU Queuine tRNA-ribosyltran sferase OS=Planktothrix rubescens OX=59512 GN=tgt PE=3 SV=1
MSHPFSFEVQACCSQTKARVGLFHTPHGWVETPRFMPVGTLANVKTLTPAHLKDAGAQMVLSNTYHLHLQPGEKIVAGAGGLHRFMGWDGPMLTDSGGFQVFSLSKINTITEEGVTFRSPHDGRLINFTPELSIQIQNELGADVIMAFDECPPYPATREAVVKATERTKRWLERCIKAHKRSDQALFGIVQGGVHADLRQQAARDLVEFDLPGYAIGGVSVGEPSALIEKIVQVTTPILPFNKPRYLMGIGTYREMAQAIAAGVDLFDCVIPTRLGRHGAALVQGERWNLKNAQFREDYRPLDATCPCYTCQNFSRAYLSHLVRAKEVLSYTLIAIHNVTELIRFTQRIRESILNNRFADEFEFWLTSTDASATLEDDEIDKRSDHP

SEQ ID NO: 59163 - protein, 383 aa, Planktothrix sp.
  misc_feature (1)..(383): tr|A0A3C1P9F4|A0A3C1P9F4_9CYAN Queuine tRNA-ribosyltran sferase OS=Planktothrix sp. UBA8402 OX=2055759 GN=tgt P E=3 SV=1
MSHPFSFEVQACCSQTKARVGLFHTPHGWVETPRFMPVGTLANVKTLTPAHLKDAGAQMVLSNTYHLHLQPGEKIVAGAGGLHRFMGWDGPMLTDSGGFQVFSLSKINTITEEGVTFRSPHDGRLIHFTPELSIQVQNELGADVIMAFDECPPYPATREAVVKATERTKRWLERCIKAHKRTDQALFGIVQGGVYADLRQQAAQDLAEFDLPGYAIGGVSVGEPSALIEKIVQVTTPILPFNKPRYLMGIGTYREMAQAIAAGVDLFDCVIPTRLGRHGAALVQGERWNLKNAQFREDYRPLDATCPCYTCQNFSRAYLSHLVRAKEVLSYTLIAIHNVTELIRFTQRIRESILNHRFADEFQFWLTSTDAVATLEDYEIDSP

SEQ ID NO: 59164 - protein, 386 aa, Planktothrix sp.
  misc_feature (1)..(386): tr|A0A1T4ZGI7|A0A1T4ZGI7_9CYAN Queuine tRNA-ribosyltran sferase OS=Planktothrix sp. PCC 11201 OX=1729650 GN=tgt PE=3 SV=1
MSHPFSFEVQACCSQTKARVGLFHTPHGWVETPRFMPVGTLANVKTLTPAHLKDAGAQMVLSNTYHLHLQPGEKIVAGAGGLHRFMGWDGPMLTDSGGFQVFSLSKINTITEEGVTFRSPHDGRLINFTPELSIQIQNELGADVIMAFDECPPYPATREAVVKATERTKRWLERCIKAHKRPDQALFGIVQGGVHADLRQQAARDLVEFDLPGYAIGGVSVGEPSALIEKIVQVTTPILPFNKPRYLMGIGTYREMAQAIAAGVDVFDCVIPTRLGRHGAALVQGERWNLKNAQFREDYRPLDATCPCYTCQNFSRAYLSHLVRAKEVLSYTLIAIHNVTELIRFTQRIRESILNHRFADEFKFWLTSTDAEATLEDYEIDKRSDH

SEQ ID NO: 59165 - protein, 387 aa, Planktothrix tepida
  misc_feature (1)..(387): tr|A0A1J1LQL1|A0A1J1LQL1_9CYAN Queuine tRNA-ribosyltran sferase OS=Planktothrix tepida PCC 9214 OX=671072 GN=tg t PE=3 SV=1
MSHPFSFEVQACCSQTKARVGLFHTPHGWVETPRFMPVGTLANVKTLTPAHLKDAGAQMVLSNTYHLHLQPGENIVARAGGLHRFMGWDGPILTDSGGFQVFSLSEIRTITEDGVTFRSPHDGKIINFTPERSIQIQNELGADVIMAFDECPPYPASREAVLKATERTKRWLERCINAHQRSDQALFAIVQGGIYADLRQKAAQELVEFDLPGYAIGGVSVGEPVTLIEKIVQVTTPILPFNKPRYLMGVGTYREMAQAIAAGVDLFDCVIPTRLARHGAALIKGERLNLKNAQFREDFQPLDETCPCYTCQNFSRAYISHLVRAKELLGYTLISIHNVTELIRFTQRIRDAILNHRFAEEFQFWLSPAPDTETVLDEVEINKRSHG

SEQ ID NO: 59166 - protein, 380 aa, Planococcus antarcticus
  misc_feature (1)..(380): tr|A0A1C7DIA5|A0A1C7DIA5_9BACL Queuine tRNA-ribosyltran sferase OS=Planococcus antarcticus DSM 14505 OX=1185653 GN=tgt PE=3 SV=1
MTPAVTYEHIKTCKQTGARLGIVHTPHGSFETPAFMPVGTQATVKTMSPEELKAMNAGIILSNTYHLWLRPGNDVIKEAGGLHKFMNWDRPILTDSGGFQVFSLSEFRNIKEEGVHFRNHMNGDKLFLSPEKAMHIQNDLGSDIMMAFDECPPFPATHEYMKSSVERTSRWAERCLEAHERKADQGLFGIIQGGEFEDLRKQSAQDLVSLDFPGYAIGGLSVGEPKDVMNRALEFTTPLMPADKPRYLMGVGSPDSLIDGAIRGIDMFDCVLPTRIARNGTLMTSTGRLNIKNAAFKRDFGPIDDKCDCYTCTNYSRAYVHHLIRADETFGIRLTSYHNLQFLLNLMGQVRQAIREDRLGDFREEFFEAYGFNKPNAKNF

SEQ ID NO: 59167 - protein, 380 aa, Planococcus citreus
  misc_feature (1)..(380): tr|A0A497YHU6|A0A497YHU6_9BACL Queuine tRNA-ribosyltran sferase OS=Planococcus citreus OX=1373 GN=tgt PE=3 SV=1
MTHAVTYEHIKTCKQTGARLGIVHTPHGSFETPAFMPVGTQATVKTMSPEELKAMNAGIILSNTYHLWLRPGNDVIKEAGGLHKFMNWDRPILTDSGGFQVFSLSEFRNIKEEGVHFRNHMNGDKLFLSPEKAMQIQNDLGSDIMMAFDECPPYPATHDYMKSSVERTSRWAERCLEAHARPQDQGLFGIIQGGEYEDLRRQSAEDLVALDFPGYAIGGLSVGEPKDVMNRALEFTTPFMPFDKPRYLMGVGSPDSLIDGSIRGIDMFDCVLPTRIARNGTLMTSEGRLNLKNAKFKRDFTPIDEKCTCYTCTNYTRAYVHHLLRADETFGIRLTSYHNLHFLLNLMEQVRQAIREDRLGDFREEFFEAYGFNKPNAKNF

SEQ ID NO: 59168 - protein, 380 aa, Planococcus donghaensis
  misc_feature (1)..(380): tr|A0A1C7EIL8|A0A1C7EIL8_9BACL Queuine tRNA-ribosyltran sferase OS=Planococcus donghaensis OX=414778 GN=tgt PE= 3 SV=1
MTAAVTYEHIKTCKQTGARLGIVHTPHGSFETPAFMPVGTQATVKTMSPEELKAMNAGIILSNTYHLWLRPGNDVIKEAGGLHKFMNWDRPILTDSGGFQVFSLSEFRNIKEEGVHFRNHMNGDKLFLSPEKAMHIQNDLGSDIMMAFDECPPFPATHEYMKSSVERTSRWAERCLEAHQRPQDQGLFGIIQGGEFEDLRKQSAQDLVSLDFPGYAIGGLSVGEPKDVMNRALEFTTPLMPANKPRYLMGVGSPDSLIDGAIRGIDMFDCVLPTRIARNGTLMTSTGRLNIKNAAFKRDFGPIDEKCDCYTCTNYSRAYVHHLIRADETFGIRLTSYHNLQFLLNLMGQVRQAIREDRLGDFREEFFEAYGFNKPNAKNF

SEQ ID NO: 59169 - protein, 380 aa, Planococcus donghaensis
  misc_feature (1)..(380): tr|E7RIL5|E7RIL5_9BACL Queuine tRNA-ribosyltransferase OS=Planococcus donghaensis MPA1U2 OX=933115 GN=tgt PE=3 SV=1
MTAAVTYEHIKACKQTGARLGIVHTPHGSFETPAFMPVGTQATVKTMSPEELKAMNAGIILSNTYHLWLRPGNDVIKEAGGLHKFMNWDRPILTDSGGFQVFSLSEFRNIKEEGVHFRNHMNGDKLFLSPEKAMHIQNDLGSDIMMAFDECPPFPATHEYMKSSVERTSRWAERCLEAHQRPQDQGLFGIIQGGEFEDLRKQSAQDLVSLDFPGYAIGGLSVGEPKDVMNRALEFTTPLMPANKPRYLMGVGSPDSLIDGAIRGIDMFDCVLPTRIARNGTLMTSTGRLNIKNAAFKRDFGPIDEKCDCYTCTNYSRAYVHHLIRADETFGIRLTSYHNLQFLLNLMGQVRQAIREDRLGDFREEFFEAYGFNKPNAKNF

SEQ ID NO: 59170 - protein, 380 aa, Planococcus halocryophilus
  misc_feature (1)..(380): tr|A0A1C7DNN5|A0A1C7DNN5_9BACL Queuine tRNA-ribosyltran sferase OS=Planococcus halocryophilus OX=1215089 GN=tgt PE=3 SV=1
MTAAVTYEHIKTCKQTGARLGIVHTPHGSFETPAFMPVGTQATVKTMSPEELKAMNAGIILSNTYHLWLRPGNDVIKEAGGLHKFMNWDRPILTDSGGFQVFSLSEFRNIKEEGVHFRNHMNGDKLFLSPEKAMHIQNDLGSDIMMAFDECPPFPATHEYMKSSVERTSRWAERCLEAHQRPQDQGLFGIIQGGEFEDLRKQSAQDLVSLDFPGYAIGGLSVGEPKDVMNRALEFTTPLMPADKPRYLMGVGSPDSLIDGAIRGIDMFDCVLPTRIARNGTLMTSTGRLNIKNAAFKRDFGPIDEKCDCYTCTNYSRAYVHHLIRADETFGIRLTSYHNLQFLLNLMRQVRQAIREDRLGDFREEFFEAYGFNKPNAKNF

SEQ ID NO: 59171 - protein, 380 aa, Planococcus halotolerans
  misc_feature (1)..(380): tr|A0A365KUA1|A0A365KUA1_9BACL Queuine tRNA-ribosyltran sferase OS=Planococcus halotolerans OX=2233542 GN=tgt P E=3 SV=1
MTEAIRYEHIKTCKQTGARLGIVHTPHGSFETPAFMPVGTQATVKTMSPEELKAMNAGIILSNTYHLWLRPGNDVIKEAGGLHKFMNWDRPILTDSGGFQVFSLSEFRNIKEEGVHFRNHMNGDKLFLSPEKAMEIQNDLGSDIMMAFDECPPYPASHEYMKSSVERTSRWAERCLEAHARKDVQGLFGIIQGGEYEDLRKQSAQDLVSLDFPGYAIGGLSVGEPKDVMNRALEFTTPLMPANKPRYLMGVGSPDSLIDGAIRGIDMFDCVLPTRIARNGTLMTSTGRLNIKNAAFKRDFNPIDEKCDCYTCKNYTRAYVHHLIRADETFGIRLTSYHNLQFLLNLMEQVRQAIREDRLGDFREEFFEAYGFNKPNAKNF

SEQ ID NO: 59172 - protein, 380 aa, Planococcus kocurii
  misc_feature (1)..(380): tr|A0A0U2ZI86|A0A0U2ZI86_9BACL Queuine tRNA-ribosyltran sferase OS=Planococcus kocurii OX=1374 GN=tgt PE=3 SV=1
MTAAVTYEHIKTCKQTGARLGIVHTPHGSFETPAFMPVGTQATVKTMSPEELKAMNAGIILSNTYHLWLRPGNDVIKEAGGLHKFMNWDRPILTDSGGFQVFSLSEFRNIKEEGVHFRNHMNGDKLFLSPEKAMHIQNDLGSDIMMAFDECPPFPATHEYMKSSVERTSRWAERCLEAHQRPQDQALFGIIQGGEFEDLRKQSAQDLVSLDFPGYAIGGLSVGEPKDVMNRALEYTTPLMPADKPRYLMGVGSPDSLIDGAIRGIDMFDCVLPTRIARNGTLMTSTGRLNIKNAAFKRDFGPIDDKCDCYTCTNYSRAYVHHLIRADETFGIRLTSYHNLQFLLNLMGQVRQAIREDRLGDFREEFFEAYGFNKPNAKNF

SEQ ID NO: 59173 - protein, 380 aa, Planococcus maitriensis
  misc_feature (1)..(380): tr|A0A365K7D6|A0A365K7D6_9BACL Queuine tRNA-ribosyltran sferase OS=Planococcus maitriensis OX=221799 GN=tgt PE= 3 SV=1
MTHAVTYEHIKTCKQTGARLGIVHTPHGSFETPAFMPVGTQATVKTMSPEELKAMNAGIILSNTYHLWLRPGNDVIKEAGGLHKFMNWDRPILTDSGGFQVFSLSEFRNIKEEGVHFRNHMNGDKLFLSPEKAMQIQNDLGSDIMMAFDECPPYPATHEYMKSSVERTSRWAERCLEAHARPQDQGLFGIIQGGEYEDLRRQSAEDLVALDFPGYAIGGLSVGEPKDVMNRALEFTTPFMPFDKPRYLMGVGSPDSLIDGSIRGIDMFDCVLPTRIARNGTLMTSTGRLNLKNAKFKHDFTAIDEKCTCYTCTNYTRAYVHHLLRADETFGIRLTSYHNLHFLLNLMEQVRQAIREDRLGDFREEFFEAYGFNKPNAKNF

SEQ ID NO: 59174 - protein, 380 aa, Planococcus maritimus
  misc_feature (1)..(380): tr|A0A150W5B7|A0A150W5B7_PLAMR Queuine tRNA-ribosyltran sferase OS=Planococcus maritimus OX=192421 GN=tgt PE=3 SV=1
MTHAVTYEHIKTCKQTGARLGIVHTPHGSFETPAFMPVGTQATVKTMSPEELKAMNAGIILSNTYHLWLRPGNDVIKEAGGLHKFMNWDRPILTDSGGFQVFSLSEFRNIKEEGVHFRNHMNGDKLFLSPEKAMQIQNDLGSDIMMAFDECPPYPATHEYMKSSVERTSRWAERCLAAHARPEDQGLFGIIQGGEYEDLRRQSAEDLVALDFPGYAIGGLSVGEPKDVMNRALEFTTPFMPFDKPRYLMGVGSPDSLIDGAIRGIDMFDCVLPTRIARNGTLMTSEGRLNLKNAKFKRDFTPIDEKCTCYTCTNYTRAYVHHLLRADETFGIRLTSYHNLHFLLNLMEQVRQAIREDRLGDFREEFFEAYGFNKPNAKNF

SEQ ID NO: 59175 - protein, 380 aa, Planococcus massiliensis
  misc_feature (1)..(380): tr|A0A098EL76|A0A098EL76_9BACL Queuine tRNA-ribosyltran sferase OS=Planococcus massiliensis OX=1499687 GN=tgt P E=3 SV=1
MTQAVWYEHIKTCKQTGARLGIVHTPHGSFETPAFMPVGTQATVKTMSPEELKAMNAGIILSNTYHLWLRPGNDVIREAGGLHKFMNWDRPILTDSGGFQVFSLSEFRNIKEEGVHFRNHMNGDKLFLSPEKAMEIQNDLGSDIMMAFDECPPYPASHDYMKSSVERTSRWAERCLEAHARKNDQGLFGIVQGGEYEDLRKQSARDLVSLDFPGYAIGGLSVGEPKDVMNRALEFTTPLLPENKPRYLMGVGSPDSLIDGAIRGVDMFDCVLPTRIARNGTLMTSTGRLNVKNAAFKRDFGPIDEKCDCYTCTNYTRAYVHHLIRTDETFGIRLTSYHNLHFLLNLMEQVRQAIREDRLGDFREEFFEAYGFNKPNAKNF

SEQ ID NO: 59176 - protein, 380 aa, Planococcus plakortidis
  misc_feature (1)..(380): tr|A0A1C7E6W8|A0A1C7E6W8_9BACL Queuine tRNA-ribosyltran sferase OS=Planococcus plakortidis OX=1038856 GN=tgt PE =3 SV=1
MTHAVTYEHIKTCKQTGARLGIVHTPHGSFETPAFMPVGTQATVKTMSPEELKAMNAGIILSNTYHLWLRPGNDVIREAGGLHKFMNWDRPILTDSGGFQVFSLSEFRNIKEEGVHFRNHMNGDKLFLSPEKAMQIQNDLGSDIMMAFDECPPYPATHEYMKSSVERTSRWAERCLEAHARPQDQGLFGIIQGGEYEDLRRQSAEDLVALDFPGYAIGGLSVGEPKDVMNRALEFTTPFMPFDKPRYLMGVGSPDSLIDGSIRGIDMFDCVLPTRIARNGTLMTSTGRLNLKNAKFKRDFTPIDEKCTCYTCTNYTRAYVHHLLRADETFGIRLTSYHNLHFLLNLMEQVRQAIREDRLGDFREEFFEAYGFNKPNAKNF

SEQ ID NO: 59177 - protein, 380 aa, Planococcus rifietoensis
  misc_feature (1)..(380): tr|A0A0U2Q6P8|A0A0U2Q6P8_9BACL Queuine tRNA-ribosyltran sferase OS=Planococcus rifietoensis OX=200991 GN=tgt PE =3 SV=1
MTHAVTYEHIKTCKQTGARLGIVHTPHGSFETPAFMPVGTQATVKTMSPEELKAMNAGIILSNTYHLWLRPGNDVIKEAGGLHKFMNWDRPILTDSGGFQVFSLSEFRNIKEEGVHFRNHMNGDKLFLSPEKAMQIQNDLGSDIMMAFDECPPYPATHEYMKSSVERTSRWAERCLAAHERPQDQGLFGIIQGGEYEDLRRQSAEDLVALDFPGYAIGGLSVGEPKDVMNRALEFTTPFMPFDKPRYLMGVGSPDSLIDGAIRGIDMFDCVLPTRIARNGTLMTSEGRLNLKNAKFKRDFTPIDEKCTCYTCTNYTRAYVHHLLRADETFGIRLTSYHNLHFLLNLMEQVRQAIREDRLGDFREEFFEAYGFNKPNAKNF

SEQ ID NO: 59178 - protein, 380 aa, Planococcus salinus
  misc_feature (1)..(380): tr|A0A3M8PB63|A0A3M8PB63_9BACL Queuine tRNA-ribosyltran sferase OS=Planococcus salinus OX=1848460 GN=tgt PE=3 S V=1
MTQAVTYEHIKTCKQTGARLGIVHTPHGSFETPAFMPVGTQATVKTMSPEELKAMDAGIILSNTYHLWLRPGNDVVKEAGGLHKFMNWDRPILTDSGGFQVFSLSEFRNIKEEGVHFRNHMNGDKLFLSPEKAMQIQNDLGSDIMMAFDECPPYPASHEYMKSSVERTSRWAERCLEAHGRKEDQGLFGIIQGGEYEDLRKQSAQDLVSLDFPGYAIGGLSVGEPKDVMNRALEFTTPLMPFNKPRYLMGVGSPDSLIDGAIRGIDMFDCVLPTRIARNGTLMTSTGRLNVKNAAFKRDFGPIDEKCDCYTCQNYSRAYVHHLIRADETFGLRLTSYHNLRFLLNLMEQVRQAIREDRLGDFREEFFEAYGFNKPNAKNF

SEQ ID NO: 59179 - protein, 380 aa, Planococcus sp.
  misc_feature (1)..(380): tr|A0A5C5T242|A0A5C5T242_9BACL Queuine tRNA-ribosyltran sferase OS=Planococcus sp. CPCC 101016 OX=2599617 GN=tg t PE=3 SV=1
MTAAVTYEHIKTCKQTGARLGIVHTPHGSFETPAFMPVGTQATVKTMSPEELKAMNAGIILSNTYHLWLRPGNDIIKEAGGLHKFMNWDRPILTDSGGFQVFSLSEFRNIKEEGVHFRNHMNGDKLFLSPEKAMQIQNDLGSDIMMAFDECPPFPATHEYMKSSVERTSRWAERCLEAHERKADQGLFGIIQGGEFEDLRKQSAQDLVSLDFPGYAIGGLSVGEPKDVMNRALEFTTPLMPANKPRYLMGVGSPDSLIDGAIRGIDMFDCVLPTRIARNGTLMTSTGRLNIKNAAFKRDFGPIDEKCDCYTCKNYSRAYVHHLIRADETFGIRLTSYHNLQFLLNLMEQVRQAIREDRLGDFREEFFEAYGFNKPNAKNF

SEQ ID NO: 59180 - protein, 380 aa, Planococcus sp.; identical to SEQ ID NO: 59172
  misc_feature (1)..(380): tr|A0A5B0CW75|A0A5B0CW75_9BACL Queuine tRNA-ribosyltran sferase OS=Planococcus sp. ANT_H30 OX=2597347 GN=tgt PE =3 SV=1

SEQ ID NO: 59181 - protein, 380 aa, Planococcus versutus
  misc_feature (1)..(380): tr|A0A1B1RXF1|A0A1B1RXF1_9BACL Queuine tRNA-ribosyltran sferase OS=Planococcus versutus OX=1302659 GN=tgt PE=3 SV=1
MTPAVTYEHIKTCKQTGARLGIVHTPHGSFETPAFMPVGTQATVKTMSPEELKAMNAGIILSNTYHLWLRPGNDVIKEAGGLHKFMNWDRPILTDSGGFQVFSLSEFRNIKEEGVHFRNHMNGDKLFLSPEKAMHIQNDLGSDIMMAFDECPPFPATHEYMKSSVERTSRWAERCLKAHQRPQDQGLFGIIQGGEFEDLRKQSAQDLVSLDFPGYAIGGLSVGEPKDVMNRALEFTTPLMPADKPRYLMGVGSPDSLIDGAIRGIDMFDCVLPTRIARNGTLMTSTGRLNIKNAAFKRDFGPIDDKCDCYTCKNYSRAYVHHLIRADETFGIRLTSYHNLQFLLNLMGQVRQAIREDRLGDFREEFFEAYGFNKPNAKNF

SEQ ID NO: 59182 - protein, 380 aa, Planomicrobium glaciei
  misc_feature (1)..(380): tr|A0A1G8IP06|A0A1G8IP06_9BACL Queuine tRNA-ribosyltran sferase OS=Planomicrobium glaciei OX=459472 GN=tgt PE=3 SV=1
MTEAVWYEHIKTCKQTGARLGIVHTPHGSFETPAFMPVGTQATVKTMSPEELKAMDAGIILSNTYHLWLRPGNDVIREAGGLHKFMNWDRPILTDSGGFQVFSLSEFRNIKEEGVHFRNHMNGDKLFLSPEKAMEIQNDLGSDIMMAFDECPPYPASHEYMKSSVERTSRWAERCMEAHARKKDQGLFGIIQGGEYEDLRKQSARDLVSLDFPGYAIGGLSVGEPKDVMNRALEFTTPLLPTDKPRYLMGVGSPDSLIDGAIRGVDMFDCVLPTRIARNGTLMTSTGRLNIKNAAFKRDFTPIDEKCDCYTCTNYTRAYVHHLIRADETFGIRLTSYHNLQFLLNLMKQVRQAIREDRLGDFREEFFEAYGFNKPNAKNF

SEQ ID NO: 59183 - protein, 380 aa, Planomicrobium soli
  misc_feature (1)..(380): tr|A0A2P8GMC3|A0A2P8GMC3_9BACL Queuine tRNA-ribosyltran sferase OS=Planomicrobium soli OX=1176648 GN=tgt PE=3 S V=1
MTPAVTYEHIKTCKQTGARLGIVHTPHGSFETPAFMPVGTQATVKTMSPEELKAMNAGIILSNTYHLWLRPGNDVIKEAGGLHKFMNWDRPILTDSGGFQVFSLSEFRNIKEEGVHFRNHMNGDKLFLSPEKAMQIQNDLGSDIMMAFDECPPYPASHEYMKSSVERTSRWAERCLEAHARPNEQALFGIIQGGEYEDLRQQSARDLVSLDFPGYAIGGLSVGEPKDVMNRALEFTTPLMPFDKPRYLMGVGSPDSLIDGAIRGVDMFDCVLPTRIARNGTLMTSTGRLNIKNAAFKRDFGPIDEKCDCYTCTNYTRAYVHHLIRADETFGIRLTSYHNLQFLLNLMEQVRQAIREDRLGDFREEFFEAYGFNLPNAKNF

SEQ ID NO: 59184 - protein, 379 aa, Planomicrobium sp.
  misc_feature (1)..(379): tr|A0A5C5T7B4|A0A5C5T7B4_9BACL Queuine tRNA-ribosyltran sferase OS=Planomicrobium sp. CPCC 101079 OX=2599618 GN =tgt PE=3 SV=1
MPAVTYEHIKTCKQTGARLGIVHTPHGSFETPAFMPVGTQATVKTMSPEELKAMNAGIILSNTYHLWLRPGNDVIKEAGGLHKFMNWDRPILTDSGGFQVFSLSEFRNIKEEGVHFRNHMNGDKLFLSPEKAMQIQNDLGSDIMMAFDECPPYPASHEYMKSSVERTSRWAERCLEAHARPNDQALFGIIQGGEYEDLRKQSARDLVSLDFPGYAIGGLSVGEPKDVMNRALEFTTPLMPFDKPRYLMGVGSPDSLIDGAIRGVDMFDCVLPTRIARNGTLMTSTGRLNIKNAAFKRDFGPIDEKCDCYTCTNYTRAYVHHLIRADETFGIRLTSYHNLQFLLNLMEQVRQAIREDRLGDFREEFFEAYGFNLPNAKNF

SEQ ID NO: 59185 - protein, 380 aa, Planomicrobium sp.
  misc_feature (1)..(380): tr|A0A3L7JPI9|A0A3L7JPI9_9BACL Queuine tRNA-ribosyltran sferase OS=Planomicrobium sp. Y74 OX=2478977 GN=tgt PE= 3 SV=1
MTEAIRYEHIKTCKQTGARLGIVHTPHGSFETPAFMPVGTQATVKTMSPEELKAMNAGIILSNTYHLWLRPGNDVIKEAGGLHKFMNWDRPILTDSGGFQVFSLSEFRNIKEEGVHFRNHMNGDKLFLSPEKAMEIQNDLGSDIMMAFDECPPYPASHEYMKSSVERTSRWAERCLEAHARKDVQGLFGIIQGGEYEDLRKQSAQDLVSLDFPGYAIGGLSVGEPKDVMNRALEFTTPLMPTNKPRYLMGVGSPDSLIDGAIRGVDMFDCVLPTRIARNGTLMTSTGRLNIKNAAFKRDFNPIDEKCDCYTCKNYTRAYVHHLIRADETFGIRLTSYHNLQFLLNLMEQVRQAIREDRLGDFREEFFEAYGFNKPNAKNF

SEQ ID NO: 59186 - protein, 373 aa, Plasticicumulans acidivorans
  misc_feature (1)..(373): tr|A0A317MRQ0|A0A317MRQ0_9GAMM Queuine tRNA-ribosyltran sferase OS=Plasticicumulans acidivorans OX=886464 GN=tg t PE=3 SV=1
MHFQLLNADGPARRGRLTFDRGTVETPAFMPVGTYGTVKAMTPEELTDIGAQIILGNTFHLMLRPGTEVIQAHGDLHDFMHWGGPILTDSGGFQVFSLAELRKIDERGVTFQNPVNGDRVFLGPEESMAVQHALGSDIVMIFDECTPYPATEEQARSSMELSLRWAKRSRAAFDALGNRNALFGIVQGGMYPPLRTRSAQGLQEIGFDGYAIGGLAVGEPMSERNLMLEHTTPLLPAERPRYLMGVGKPEDIVESVARGIDMFDCVMPTRNARNGHYFTWDGDVRIRNSRYRLDTRPISEDCGCYACRHYSRAYLRHLDRNQEILGARLASIHNLYFYQDLMRGIRAAIAENRFEAFRLDFHARRQGGGDARV

SEQ ID NO: 59187 - protein, 373 aa, Plasticicumulans lactativorans
  misc_feature (1)..(373): tr|A0A4R2L6D9|A0A4R2L6D9_9GAMM Queuine tRNA-ribosyltran sferase OS=Plasticicumulans lactativorans OX=1133106 GN =tgt PE=3 SV=1
MQFELLHTDGAARRGRLRFARGSVETPVFMPVGTYATVKAMTPEELRASGAEIILGNTFHLWLRPGTEVIRAHGDLHGFMHWDGPILTDSGGFQVFSLAELRTISEAGVSFRSPVNGDRVFLGPEESMQIQHALGSDVVMIFDECTPFPATEEQARASMELSLRWAARSRAEHDRLGNAQALFGIVQGGMYPALRAASAAGLQAIGFDGYAIGGLAVGEPMAVRNAMLDSTVPHLPAARPRYLMGVGKPEDLVEGVLRGVDMFDCVMPTRNARNGHYFTHDGDVRIRNSRYRDDTRPIAEDCDCYTCAHYSRAYLRHLDNCDEILGARLGTLHNCRYYQQLMARLRDAIAAGRLAEYVREFYARRGKPSDARV

SEQ ID NO: 59188 - protein, 374 aa, Plautia stali
  misc_feature (1)..(374): tr|U3U397|U3U397_9ENTR Queuine tRNA-ribosyltransferase OS=Plautia stali symbiont OX=891974 GN=tgt PE=3 SV=1
MKFELDTTDGRARRGRLVFDRGVVETPAFMPVGTYGTVKGMTPEEVKETSAQILLGNTFHLWLRPGQEIMKLHGDLHDFMHWQGPILTDSGGFQMFSLGDIRKITEAGVHFRNPINGDPIFLDPEKSMEIQFDLGSDIVMIFDECTPYPADWDYAKRSMEMSLRWAQRSRDRFDALGNKNALFGIIQGGVYEDLRDVSVKGLVEIGFDGYAVGGLAVGEPKEDMHRILEHVCPQIPQDKPRYLMGVGKPEDLVEGVRRGIDMFDCVMPTRNARNGHLFVTNGVVKIRNAKYKDDTAPLDAECDCYTCRNYTRAYLHHLDRCNEILGARLNTIHNLRYYQRLMAGLRQAIEEGKLEHFVSEFYQRTGKAVPPLNV

SEQ ID NO: 59189 - protein, 368 aa, Pleionea mediterranea
  misc_feature (1)..(368): tr|A0A316FQ76|A0A316FQ76_9GAMM Queuine tRNA-ribosyltran sferase OS=Pleionea mediterranea OX=523701 GN=tgt PE=3 SV=1
MATDGVARRGELSFSRGKVQTPAFMPVGTYGTVKAMSPDDVKAIGAEIVLGNTFHLMLRPGTEIIKQHGDLHDFMHWQGPILTDSGGFQVFSLGELRKITEKGVEFRSPINGSKVFLGPEESMQVQRDLGSDIVMIFDECTPYPATWEEAKSSMEMSLRWAERSKTAHGDNPNALFGIVQGGMYEDLRQVSAEGLKQIGFDGYALGGLSVGETKEEMKQVLNYTVPLLPEQKPRYLMGVGKPEDIVEAVRRGIDMFDCVMPTRNARNGHLFTADGVVRLRNSPHKRDTGPIEEACDCYTCKNYSRSYLHHLDKCGEILGARLTTIHNLRYYQRLMASLRDAIETGTLADFVADFYQRRGLDVPALNES

SEQ ID NO: 59190 - protein, 378 aa, Pleomorphomonas carboxyditropha
  misc_feature (1)..(378): tr|A0A2G9WVT7|A0A2G9WVT7_9RHIZ Queuine tRNA-ribosyltran sferase OS=Pleomorphomonas carboxyditropha OX=2023338 G N=tgt PE=3 SV=1
MTQPFSFRLLATDGRARRGEILTPHGVVRTPAFMPVGTLGTVKAMFMDDVKATGADVILGNTYHLMLRPGAERVAALGGLHKFSTWDKTILTDSGGFQVMSLAKLRRMDEQGVTFQSHIDGSRHELTPERSIEIQGLLGSDIQMQLDECVRLPAEPKEVERGMRLSLRWAERSRRQFEAMGGPQKGQGLYGIVQGGDVSSLRGISARELSAMPFEGYSVGGLAVGEPQAVMLEMIDVVDPILPQGKPRYLMGVGTPDDIIESVARGIDQFDCVMPTRAGRHGLAYTRFGKLNFKNARHMDDPRPIDPTSDCPAARDYSRAYIHHLVRTGESLGAMLLTWVNVAYYQSLMAGIRDAIEAGRFEAFKAETKAAWARGENG

SEQ ID NO: 59191 - protein, 378 aa, Pleomorphomonas diazotrophica
  misc_feature (1)..(378): tr|A0A2N3M2M9|A0A2N3M2M9_9RHIZ Queuine tRNA-ribosyltran sferase OS=Pleomorphomonas diazotrophica OX=1166257 GN= tgt PE=3 SV=1
MTQPFSFRLLATDGRARRGEIVTPHGVVRTPAFMPVGTLGTVKAMFMDDVKATGADVVLGNTYHLMLRPGAERVAALGGLHKFSTWDKTILTDSGGFQVMSLAQLRKMDERGVTFQSHIDGSRHELTPERSIEIQGLLGSDIQMQLDECVRLPAEPKEVERGMQLSLRWAERSRRQFEAMGGPEKGQGLYGIVQGGDVPSLREVSARELSAMPFEGYSVGGLAVGEPQAVMLKMIDVVDPILPRDKPRYLMGVGTPDDIIESVARGIDQFDCVMPTRAGRHGLAYTRFGKLNFKNARHMDDPRPIDPTSDCPAARDYSRAYIHHLVRTGEALGAMLLTWVNVAYYQSLMQGIRDAIEAGRFEEFKAETKAAWARGENG

SEQ ID NO: 59192 - protein, 378 aa, Pleomorphomonas sp.
  misc_feature (1)..(378): tr|A0A4R8FIH8|A0A4R8FIH8_9RHIZ Queuine tRNA-ribosyltran sferase OS=Pleomorphomonas sp. CF100 OX=2135722 GN=tgt PE=3 SV=1
MTQPFSFRLLATDGRARRGEIVTPHGIVRTPAFMPVGTLGTVKAMFMDDVKATGADVILGNTYHLMLRPGAERVAALGGLHKFSTWDKTILTDSGGFQVMSLAQLRKMDEHGVTFQSHIDGSRHELTPERSIEIQGLLGSDIQMQLDECVRLPAEPKEVERGMRLSLRWAERSRRQFEAMGGPEKGQGLYGIVQGGDVPALREVSARELSAMPFEGFSVGGLAVGEPQAVMLAMIDVVDPILPRDKPRYLMGVGTPDDIIESVARGIDQFDCVMPTRAGRHGLAYTRFGKLNFKNARHMDDPRPIDPTSDCPAARDYSRAYIHHLVRTGEALGAMLLTWVNVAYYQSLMQGVRDAIEAGRFEGFKAETKAAWARGENG

SEQ ID NO: 59193 - protein, 390 aa, Pleomorphomonas sp.; identical to SEQ ID NO: 58357
  misc_feature (1)..(390): tr|A0A2Z6HWH4|A0A2Z6HWH4_9RHIZ Queuine tRNA-ribosyltran sferase OS=Pleomorphomonas sp. SM30 OX=1885025 GN=tgt P E=3 SV=1

SEQ ID NO: 59194 - protein, 416 aa, Plesiocystis pacifica
  misc_feature (1)..(416): tr|A6G9V6|A6G9V6_9DELT Queuine tRNA-ribosyltransferase OS=Plesiocystis pacifica SIR-1 OX=391625 GN=tgt PE=3 SV =1
MSEPTAPPEVDLRPDPAADLAPFEALGRRSEGDPAPGTLEIVAEDPDSDARSCRLWTGHGPVETPCFMPVGTYGAVKGLLPEELRTVGSQVVLANAYHLTHRPGPERVRSLGGIHGFMHWPGPVLTDSGGYQVFSLRSLQKIDDSGVDYRTHFDGSKARMTPRSVLEAEAAIGPDICMILDHCPPGDADRSAMRAAMERTTRWAREAARLRRDILRPEQLCFGIVQGGTDLELRREHVDALAELDFDGYALGGLSVGEPIPKMHATFAAIAPRMPKHKPRYVMGIGTPADLLAAIRSGVDMFDCVIPSRHARNGQILTFQGRFNIRNGRFRTDDRPPDPDCACPVCSRFSRAYLRHLHVHNDPLYVRLATIHNLYFFHQWVAAQRQAIRAGNYAAVAAALDAVLAERRHPGDGAKG

SEQ ID NO: 59195 - protein, 375 aa, Plesiomonas shigelloides
  misc_feature (1)..(375): tr|R8ATS5|R8ATS5_PLESH Queuine tRNA-ribosyltransferase OS=Plesiomonas shigelloides 302-73 OX=1315976 GN=tgt PE =3 SV=1
MKYELITTQGNARRGRLVFERGTVETPAFMPVGTYGTVKGMTPEEVQETGAQILLGNTFHLWLRPGQDIMRKHGDLHDFMKWPGPILTDSGGFQVFSLGDIRKITEEGVHFRNPVNGDKIFLSPEKSMEIQYDLGSDIVMIFDECTPYPADWDYAKRSMEMSLRWADRCRKHFDQLGNKNALFGIVQGSVYEDLRDISVKGLTEIGFDGYAVGGLAVGEPKEDMHRILEHTCPQLPQDKPRYLMGVGKPEDLVEGVRRGIDMFDCVMPTRNARNGHLFVTDGVVKIRNAKYRDDLSPLDAECDCYTCRNYTRAYLHHLDRCNEILGARLNTIHNLRYYQRLMAGIRQAIENGNFDTFVTEFYTRIGKPVPPLNHK

SEQ ID NO: 59196 - protein, 375 aa, Plesiomonas shigelloides; identical to SEQ ID NO: 59195
  misc_feature (1)..(375): tr|A0A2P1VPW0|A0A2P1VPW0_PLESH Queuine tRNA-ribosyltran sferase OS=Plesiomonas shigelloides OX=703 GN=tgt PE=3 SV=1

SEQ ID NO: 59197 - protein, 371 aa, Pleurocapsa sp.
  misc_feature (1)..(371): tr|A0A2T1CVE0|A0A2T1CVE0_9CYAN Queuine tRNA-ribosyltran sferase OS=Pleurocapsa sp. CCALA 161 OX=2107688 GN=tgt PE=3 SV=1
MGFSFACQANCSHTQARAGVFHTPHGIVETPRFMPVGTLATVKGVIPQQLEAANSQMILANTYHLHLQPGEDIVREAGGLHRFMAWNKPILTDSGGFQVFSLSEMRKVSEEGVIFKSPRDGSTINITPERSIQIQNALGADVIMAFDECPPADATKEQVQAATDRSYRWLKRCVAQHQNTARQALFGIVQGGIHLDLRQKAVEQLAELDLPGYAIGGVSVGEDPQLINATVRHTAPLLPANKPRYLMGVGTYREMAQAIASGIDLFDCVIPTRLGRHGAALIRGKRTNIKNATYKRDYRPLDETCSCYACQNFSRAYLNHMLRSQEMVGYIMLSLHNITELIRFTQEIREAIFKGTFATDFAHWLNDEADN

SEQ ID NO: 59198 - protein, 368 aa, Pleurocapsa sp.
  misc_feature (1)..(368): tr|K9T9B6|K9T9B6_9CYAN Queuine tRNA-ribosyltransferase OS=Pleurocapsa sp. PCC 7327 OX=118163 GN=tgt PE=3 SV=1
MGFSFECRASCRQTGARAGIWHTPHGCVETPRFMPVGTLATVKGLTPAQIQTTGAQMILANTYHLHLQPGEAIVEKAGGLHEFMGWQGPILTDSGGFQVFSLSELRQIDESGVTFRSPRDGRIIQLTPERSIQIQNALGADVIMAFDECPPAGAAHEEVVAATERTYRWLERCLNAHQRPQEQALFGIVQGGIYPDLRCAAAESLVKLDLPGYAIGGVSVGEEPELIHKIVRITAPMLPPEKPRYLMGVGTYKEMVVAIASGIDLFDCVIPTRFGRHGAALVRGERLNLKNAQFREDFTPLDPTCPCYTCQNFSRAYLNHLVKSREMLGYILLSLHNISELVRFTQQIREAILRDRFVEEFGSWLDDR

SEQ ID NO: 59199 - protein, 375 aa, Pluralibacter gergoviae
  misc_feature (1)..(375): tr|A0A089PUL8|A0A089PUL8_PLUGE Queuine tRNA-ribosyltran sferase OS=Pluralibacter gergoviae OX=61647 GN=tgt PE=3 SV=1
MKFELDTTDGRARRGRLVFDRGVVETPAFMPVGTYGTVKGMTPEEVEATGAQIILGNTFHLWLRPGQEIMKLHGDLHDFMQWKGPILTDSGGFQVFSLGDIRKITEQGVHFRNPINGDPIFLDPEKSMEIQYDLGSDIVMIFDECTPYPADWDYARRSMEMSLRWAKRSRDRFDGLGNKNALFGIIQGSVYEDLRDISVKGLVEIGFDGYAVGGLAVGEPKEDMHRILEHVCPQIPADKPRYLMGVGKPEDLVEGVRRGIDMFDCVMPTRNARNGHLFVTDGVVKIRNAKHKSDTAPLDAECDCYTCKHYSRAYLHHLDRCNEILGARLNTIHNLRYYQRLMAGLRKAIEEGKLEGFVTEFYQRQGRPVPPLNVD

SEQ ID NO: 59200 - protein, 375 aa, Pluralibacter gergoviae
  misc_feature (1)..(375): tr|A0A1S2BLF2|A0A1S2BLF2_PLUGE Queuine tRNA-ribosyltran sferase OS=Pluralibacter gergoviae OX=61647 GN=tgt PE=3 SV=1
MKFELDTTDGRARRGRLVFDRGVVETPAFMPVGTYGTVKGMTPEEVEATGAQIILGNTFHLWLRPGQEIMKLHGDLHDFMQWKGPILTDSGGFQVFSLGDIRKITEQGVHFRNPINGDPIFLDPEKSMEIQYDLGSDIVMIFDECTPYPADWDYAKRSMEMSLRWAKRSRDRFDGLGNKNALFGIIQGSVYEDLRDISVKGLVEIGFDGYAVGGLAVGEPKEDMHRILEHVCPQIPADKPRYLMGVGKPEDLVEGVRRGIDMFDCVMPTRNARNGHLFVTDGVVKIRNAKHKSDTAPLDAECDCYTCKHYSRAYLHHLDRCNEILGARLNTIHNLRYYQRLMAGLRKAIEEGKLEGFVTEFYQRQGRPVPPLNVD

SEQ ID NO: 59201 - protein, 370 aa, Pokkaliibacter plantistimulans
  misc_feature (1)..(370): tr|A0A318C890|A0A318C890_9GAMM Queuine tRNA-ribosyltran sferase OS=Pokkaliibacter plantistimulans OX=1635171 GN =tgt PE=3 SV=1
MQFELLAEEGQARRGRLTFPRGVVETPAFMPVGTYGTVKGMLPRDIEEIGAQIILGNTFHLMLRPGTEVVKKHGGLHEFNQWPKPILTDSGGFQVFSLGKMRKITEHGVTFRSPVDGAKVELTPERSMEVQRDLGSDVVMIFDECTPYPATERQAADSMRLSLRWAKRSKAAHGENPAALFGIVQGGMYEYLREESLAGLTEIGFDGYAIGGLSVGEPKDDMMRILSHTAPKLPKDRPRYLMGVGRPEDLVEGVRRGVDMFDCVMPTRNARNGHLFTSEGVIKIRNARHREDTGTLDPECDCYTCQNFSRAYLHHLDKCGEMLAAQLNTIHNLRYYQTLMAGLRGAIEAGTLGDFVDDFYQRRGMTTPPL

SEQ ID NO: 59202 - protein, 376 aa, Polaribacter atrinae
  misc_feature (1)..(376): tr|A0A176T4I0|A0A176T4I0_9FLAO Queuine tRNA-ribosyltran sferase OS=Polaribacter atrinae OX=1333662 GN=tgt PE=3 SV=1
MKFDLKITDPKSKARAGVITTDHGVIETPIFMPVGTVGTVKGVHQTELKNDINPDIILGNTYHLYLRPGLDILEKAGGLHKFMNWDRNILTDSGGYQVYSLSGRRKINEEGVKFKSHIDGSMHHFTPENVMETQRTIGADIIMAFDECTPYPCDYNYAKRSMHMTHRWLTRCINHLDKLPYKYGFEQTFMPIVQGSTYKDLRRQSAEYIANSGQQANAIGGLSVGEPAEEMYAMTEVVTEILPEDKPRYLMGVGTPINILENIALGIDMFDCVMPTRNARNGMLFTAHGSINIKNKKWAEDFSPIDDMGITGVDTMYSKAYLRHLFAAKEMLGKQIASIHNLGFYVWLTREARKHILAGDFREWKDMMVKQMDKRL

SEQ ID NO: 59203 - protein, 376 aa, Polaribacter butkevichii
  misc_feature (1)..(376): tr|A0A2P6CBI6|A0A2P6CBI6_9FLAO Queuine tRNA-ribosyltran sferase OS=Polaribacter butkevichii OX=218490 GN=tgt PE =3 SV=1
MKFDLKITDPKSKARAGVITTDHGEIETPIFMPVGTVGTVKGVHQTELKNEINPDIILGNTYHLYLRPGMDILEKAGGLHKFMNWDRNILTDSGGYQVYSLSGRRKINEEGVKFKSHIDGSMHFFTPENVMETQRTIGADIIMAFDECTPYPCDYNYAKRSMHMTHRWLDRCISHLDKVPYKYGYEQTFMPIVQGSTYKDLRRQSAEYIANSGQQANAIGGLSVGEPAEEMYAMTEVVTEILPEDKPRYLMGVGTPINILENIALGIDMFDCVMPTRNARNGMLFTAHGSINIKNKKWAEDFSPIDDMGITWVDTMYSKAYLRHLFAAKEMLGKQIASIHNLGFYVWLTREARKHILAGDFREWKDMMVKQMDKRL

SEQ ID NO: 59204 - protein, 376 aa, Polaribacter dokdonensis
  misc_feature (1)..(376): tr|A0A0M9CHU5|A0A0M9CHU5_9FLAO Queuine tRNA-ribosyltran sferase OS=Polaribacter dokdonensis DSW-5 OX=1300348 GN =tgt PE=3 SV=1
MKFDLKLTDPKSKARAGSITTAHGVIETPIFMPVGTVGTVKGVHQTELKNDINPDIILGNTYHLYLRPKLDILEKAGGLHKFMNWDRNILTDSGGYQVYSLSGRRKINEEGVKFKSHIDGSMHFFTPENVMETQRTIGADFIMAFDECTPYPCDYNYAKRSMHMTHRWLKRCINHLEDLPFKYGFEQTFMPIVQGSTYKDLRRQSAEYIANSDQKANAIGGLSVGEPAEEMYAMTEVVTEILPEDKPRYLMGVGTPINILENIALGIDMFDCVMPTRNARNGMLFTAHGSINIKNKKWAEDFSPIDEMGITSVDTMYSKAYLRHLFVSKEMLGKQIASIHNLGFYVWLTREARKHIIAGDFREWKDMMVKQMDKRL

SEQ ID NO: 59205 - protein, 376 aa, Polaribacter filamentus
  misc_feature (1)..(376): tr|A0A2S7KY41|A0A2S7KY41_9FLAO Queuine tRNA-ribosyltran sferase OS=Polaribacter filamentus OX=53483 GN=tgt PE=3 SV=1
MKFDLKITDPKSKARAGVLTTDHGVIETPIFMPVGTVGTVKGVHQTELKNEINPDIILGNTYHLYLRPGLDILEKAGGLHKFMNWDRNILTDSGGYQVYSLSARRKINEEGVKFKSHIDGSMHFFTPENVMETQRTIGADIIMAFDECTPYPCDYNYAKRSMHMTHRWLNRCINHLEKLPFKYGFEQTFFPIVQGSTYKDLRQQSAEYIANAGAQGNAIGGLSVGEPAEEMYAMTEVVTAILPEDKPRYLMGVGTPINILENIALGIDMFDCVMPTRNARNGMLFTAHGTINIKNKKWEDDFSAIDELGTTWVDTYYTKAYLRHLFAAKEMLGKQIASIHNLGFYVWLTREARKHILAGDFREWKDKMVVQMDKRL

SEQ ID NO: 59206 - protein, 376 aa, Polaribacter gangjinensis
  misc_feature (1)..(376): tr|A0A2S7WAU3|A0A2S7WAU3_9FLAO Queuine tRNA-ribosyltran sferase OS=Polaribacter gangjinensis OX=574710 GN=tgt P E=3 SV=1
MKFDLKLTDPKSKARAGVITTDHGEIQTPIFMPVGTVGTVKGVHQTELKNEINPDIILGNTYHLFLRPKTSILEQAGGLHKFMNWDRNILTDSGGYQVYSLSSNRKINEEGVKFKSHIDGSTHVFTPENVMEIQREIGADIIMAFDECTPYPCDYNYAKRSMHMTHRWLDRCINHLEKLPFKYGYEQTFFPIVQGSTYKDLRKQSADYIANAGAQGNAIGGLSVGEPAEEMYAMTEIVTAILPEDKPRYLMGVGTPINILENIALGIDMFDCVMPTRNARNGMLFTAHGTINIKNKKWENDFSPIDEMAITYVDTLYTKAYLRHLFAANEMLGKQIATIHNLGFYLWLTRQAREHILAGDFREWKDKMVIQMDKRL

SEQ ID NO: 59207 - protein, 376 aa, Polaribacter glomeratus
  misc_feature (1)..(376): tr|A0A2S7WUX6|A0A2S7WUX6_9FLAO Queuine tRNA-ribosyltran sferase OS=Polaribacter glomeratus OX=102 GN=tgt PE=3 S V=1
MKFDLKITDPKSKARAGVITTDHGIIETPIFMPVGTVGTVKGVHQTELKNEINPDIILGNTYHLYLRPGLDILEKAGGLHKFMNWDRNILTDSGGYQVYSLSARRKINEEGVKFKSHIDGSMHFFTPENVMETQRTIGADIIMAFDECTPYPCDYNYAKRSMHMTHRWLNRCINHLEKLPFKYGFEQTFMPIVQGSTYKDLRAQSAEFIANTNQQANAIGGLSVGEPAEEMYAMTEVVTAILPEDKPRYLMGVGTPINILENIALGIDMFDCVMPTRNARNGMLFTAHGTINIKNKKWEDDFSAIDELGTTWVDTYYTKAYLRHLFAAKEMLGKQIASIHNLGFYVWLTREARKHILAGDFREWKDKMVVQMDKRL

SEQ ID NO: 59208 - protein, 376 aa, Polaribacter irgensii
  misc_feature (1)..(376): tr|A4BZD1|A4BZD1_9FLAO Queuine tRNA-ribosyltransferase OS=Polaribacter irgensii 23-P OX=313594 GN=tgt PE=3 SV= 1
MKFDLKLTDPKSKARAGIITTDHGTIETPIFMPVGTLGTVKGVHQTELKEQVNPDIILANTYHLFLRPGMDILERAGGLHQFMNWDRPILTDSGGYQVYSLSGRRKINEEGVKFKSHIDGSMHFFTPENVMETQRTIGADIIMAFDECTPYPCDYNYAKRSMHMTHRWLDRCINHLEKLPYKYGFEQTFMPIVQGSTYKDLRRQSAEYIANAGAQANAIGGLSVGEPADEMYAMTEVVTEILPEDKPRYLMGVGTPINILENIALGIDMFDCVMPTRNARNGMLFTAHGTINIKNKKWEDDFSPIDDMGITGVDTMYSKAYLRHLFAAKEMLGKQIASIHNLGFYVWLTREARRHILAGDFRAWKDKMVVQMDKRL

SEQ ID NO: 59209 - protein, 376 aa, Polaribacter porphyrae
  misc_feature (1)..(376): tr|A0A2S7WLE9|A0A2S7WLE9_9FLAO Queuine tRNA-ribosyltran sferase OS=Polaribacter porphyrae OX=1137780 GN=tgt PE= 3 SV=1
MNFDLKTTDPKSQARAGTITTDHGVIETPIFMPVGTVGTVKGVHQTELKNEINPDIILGNTYHLYLRPKLDILEQAGGLHQFMNWNRNILTDSGGYQVYSLSGRRKINEEGVKFKSHIDGSTHFFTPENVMETQRTIGADIIMAFDECTPYPCDYNYAKRSMHMTHRWLDRCINHLKKLPFKYGFEQTFMPIVQGSTYKDLRKQSAEYIANSNQQANAIGGLSVGEPAEEMYAMTEVVTAILPEDKPRYLMGVGTPINILENIALGIDMFDCVMPTRNARNGMLFTAHGTINIKNKKWENDFSPIDEMGITYVDTMYSKAYLKHLFSAKEMLGKQIASIHNLGFYVWLTREARKHILAGDFRAWKDKMVIQMDKRL

SEQ ID NO: 59210 - protein, 376 aa, Polaribacter reichenbachii
  misc_feature (1)..(376): tr|A0A1B8U093|A0A1B8U093_9FLAO Queuine tRNA-ribosyltran sferase OS=Polaribacter reichenbachii OX=996801 GN=tgt PE=3 SV=1
MKFDLKLTDPKSKARAGSITTDHGVIETPIFMPVGTVGTVKGVHQTELKTEVNPDIILGNTYHLYLRPGLEILEKAGGLHKFMNWDRNILTDSGGYQVYSLSGRRKINEQGVKFKSHIDGSMHFFTPENVMETQRTIGADIIMAFDECTPYPCDYNYAKRSMHMTHRWLDRCINHLEKLPFKYGFEQTFMPIVQGSTYKDLRRQSAEYIANSNQAANAIGGLSVGEPAEEMYAMTEVVTEILPEDKPRYLMGVGTPINILENIALGIDMFDCVMPTRNARNGMLFTAHGTINIKNKKWEDDFSPIDEMGITGVDTYYTKAYLRHLFAAKEMLGKQIASIHNLGFYVWLTREARKHILAGDFREWKDMMVKQMDKRL

SEQ ID NO: 59211 - protein, 376 aa, Polaribacter sejongensis
  misc_feature (1)..(376): tr|A0A2K8VN66|A0A2K8VN66_9FLAO Queuine tRNA-ribosyltran sferase OS=Polaribacter sejongensis OX=985043 GN=tgt PE =3 SV=1
MKFDLKITDPKSKARAGVITTDHGVIETPIFMPVGTVGTVKGVHQTELKNDINPDIILGNTYHLYLRPGLDILEKAGGLHKFMNWDRNILTDSGGYQVYSLSGRRKINEEGVKFKSHIDGSTHHFTPENVMETQRTIGADIIMAFDECTPYPCDYNYAKRSMHMTHRWLTRCINHLDKLPYKYGFEQTFMPIVQGSTYKDLRRQSAEYIANSGQQANAIGGLSVGEPAEEMYAMTEVVTEILPEDKPRYLMGVGTPINILENIALGIDMFDCVMPTRNARNGMLFTAHGSINIKNKKWAEDFSPIDDMGITGVDTMYSKAYLRHLFAAKEMLGKQIASIHNLGFYVWLTREARKHIIAGDFREWKDMMVKQMDKRL

SEQ ID NO: 59212 - protein, 376 aa, Polaribacter sp.
  misc_feature (1)..(376): tr|A0A1Y0MC64|A0A1Y0MC64_9FLAO Queuine tRNA-ribosyltran sferase OS=Polaribacter sp. SA4-10 OX=754397 GN=tgt PE= 3 SV=1
MKFDLKITDPKSKARAGVITTDHGEIETPIFMPVGTVGTVKGVHQTELKDEIKPDIILANTYHLFLRPGMEILEKAGGLHKFMNWDSNILTDSGGYQVYSLSGRRKINEEGVKFKSHIDGSMHFFTPENVMETQRTIGADIIMAFDECTPYPCDYNYAKRSMHMTHRWLDRCINHLEKVPFKYGFEQTFMPIVQGSTYKDLRAQSAEYIANSGQQANAIGGLSVGEPAEEMYAMTEVVTAILPEDKPRYLMGVGTPINILENIALGIDMFDCVMPTRNARNGMLFTAHGSINIKNKKWADDFSPIDDMDITWVDTMYSKAYLRHLFAAKEMLGKQIASIHNLGFYVWLTREARKHIIAGDFREWKDKMVKQMDKRL

SEQ ID NO: 59213 - protein, 376 aa, Polaribacter sp.
  misc_feature (1)..(376): tr|A0A099Y5E1|A0A099Y5E1_9FLAO Queuine tRNA-ribosyltran sferase OS=Polaribacter sp. Hel1_85 OX=1250005 GN=tgt P E=3 SV=1
MKFDLKITDPKSKARAGVITTDHGEIETPIFMPVGTVGTVKGVHQTELKNEINPDIILGNTYHLYLRPGLDILEKAGGLHKFMNWDRNILTDSGGYQVYSLSGRRKINEEGVKFKSHIDGSMHFFTPENVMETQRTIGADIIMAFDECTPYPCDYNYAKRSMHMTHRWLDRCINHLDKLPFKYGFEQTFMPIVQGSTYKDLRRQSAEYIANSGQKANAIGGLSVGEPAEEMYAMTEVVTEILPEDKPRYLMGVGTPINILENIALGIDMFDCVMPTRNARNGMLFTAHGSINIKNKKWAEDFSPIDDMGITWVDTMYSKAYLRHLFAAKEMLGKQIASIHNLGFYVWLTREARKHILAGDFREWKDKMVKQMDNRL

SEQ ID NO: 59214 - protein, 376 aa, Polaribacter vadi
  misc_feature (1)..(376): tr|A0A1B8TXN8|A0A1B8TXN8_9FLAO Queuine tRNA-ribosyltran sferase OS=Polaribacter vadi OX=1774273 GN=tgt PE=3 SV= 1
MKFDLKITDPKSKARAGTITTDHGVIETPIFMPVGTVGTVKGVHQNELKNQVNPDIILANTYHLYLRPKLDVLEAAGGLHKFMNWDRNILTDSGGYQVYSLSGRRKINEEGVKFKSHIDGSMHFFTPENVMETQRTIGADIIMAFDECTPYPCDYNYAKRSMHMTHRWLDRCTNHLEKLPFKYGFEQTFMPIVQGSTYKDLRKQSAEYIANSNQKANAIGGLSVGEPAEEMYAMTEVVTEILPEDKPRYLMGVGTPINILENIALGIDMFDCVMPTRNARNGMLFTAHGSINIKNKKWEKDFSPIDEMGITEVDTYYSKAYLRHLFVAKEMLGKQIASIHNLGFYVWLTREARKHIIAGDFREWKDKMVKQMDNRL

SEQ ID NO: 59215 - protein, 387 aa, Polaromonas naphthalenivorans
  misc_feature (1)..(387): sp|A1VJ15|TGT_POLNA Queuine tRNA-ribosyltransferase OS= Polaromonas naphthalenivorans (strain CJ2) OX=365044 GN =tgt PE=3 SV=1
MLEFEVLKTDPATVDSEGAYLGSYARRGQLTLNHGVVQTPIFMPVGTYGTVKGVTPQSLHDMNAQIILGNTFHLWMRPGLDVVAQFGGLHKFESWHKPILTDSGGFQVWSLGEMRKISEEGVKFASPVNGDKLFLTPEISMQIQTLLNSDIVMQFDECTPYDTKGHITTEGEARSSMELSRRWAKRCEIEFDKLENPNALFGIVQGGMFENLRQESLDALVEMDFPGYAVGGVSVGEPKEEMLRIMAHTPHRLPAHKPRYLMGVGTPEDLVEGVASGVDMFDCVMPTRNARNGHMFTRFGDLKIRNARYKSEEAPVDSTCGCYTCRNFSRAYMHHLDRCGEMLGPMLSSIHNLHYYLNLMQEVRGALDAGRFGEFVRQFKADRQRGV

SEQ ID NO: 59216 - protein, 398 aa, Polaromonas sp.
  misc_feature (1)..(398): sp|Q12GB2|TGT_POLSJ Queuine tRNA-ribosyltransferase OS= Polaromonas sp. (strain JS666 / ATCC BAA-500) OX=296591 GN=tgt PE=3 SV=1
MLEFEVLKTDARTGEGANAHPGSHARRGQLTLTHGVVQTPIFMPVGTYGTVKGVMPQSLHEMGAQIILGNTFHLWMRPGLDVMKQFGGLHRFESWDKPILTDSGGFQVWSLGDMRKISEEGVKFASPVNGDKLFLTPEISMQIQTVLNSDIVMQFDECTPYDTKGHITTESEARSSMELSLRWAKRCVAEFDKLENPNALFGIVQGGMYQNLRHESLEALVELDLPGYAVGGVSVGEPKEEMQRIMAHTPHRLPADKPRYLMGVGTPEDLVEGVGAGIDMFDCVMPTRNARNGHLFTRFGDLKIRNARHKADEQPLDTTCTCYTCKGRTMPDGSTSGGFSRAYLHHLDRCGEMLGPMLASIHNLHYYLNLMQEIRDALDAGRFGEFAARFRTDRLRGV

SEQ ID NO: 59217 - protein, 375 aa, Polaromonas sp.
  misc_feature (1)..(375): tr|A0A068YV47|A0A068YV47_9BURK Queuine tRNA-ribosyltran sferase OS=Polaromonas sp. CG9_12 OX=1504672 GN=tgt PE= 3 SV=1
MLTFELLKTEGHARRGTLTLNHGVVQTPIFMPVGTYGTVKGVMPQSLIEMGAQIILGNTFHLWMRPGLDVVKQFGGLHKFENWHKPILTDSGGFQVWSLGEMRKISEEGVKFASPVNGDKLFLTPEISMQIQTLLNSDIVMQFDECTPYDTKGHITTESEARSSMELSRRWAKRCETEFDKLENPNALFGIVQGGMFENLRQESLEALVEMDFPGYAVGGVSVGEPKEEMLRIMAHTPHRLPADKPRYLMGVGTPEDLVEGVAAGVDMFDCVMPTRNARNGHMFTRFGDLKIRNARYKSEEAPVDSSCSCYTCRNFSRAYMHHLDRCGEMLGPMLSSIHNLHYYLNLMQEVRDALDAGRFGEFARQFKVDRQRGV

SEQ ID NO: 59218 - protein, 397 aa, [Polyangium] brachysporum
  misc_feature (1)..(397): tr|A0A0G3BRQ9|A0A0G3BRQ9_9BURK Queuine tRNA-ribosyltran sferase OS=[Polyangium] brachysporum OX=413882 GN=tgt P E=3 SV=1
MDHHTLPSSASARIPLPSGLQFEVLKTEGHARRGRLTLNHGVVETPIFMPVGTYGTVKGVMPRSLEEMGAQIILGNTFHLWLRPGMDVLRPFGGLHRFEGWHKPILTDSGGFQVWSLGDMRKISEEGVKFASPVNGDKLFLTPEVSMQIQHVLNSDVVMQFDECTPYIMGDKASGRLTTEKEARYSMELSLRWAKRCQLEFERLQNPNALFGIVQGGMFTHLRDESLAGLELLDFPGLAVGGLSVGEPKAEMLRVLEHIGPRLPAHKPHYLMGVGTPEDLVDGVANGIDMFDCVMPTRNARNGHLFTRYGDLRLRNTRYKTDERPLDESCSCYTCTNFSRAYLHHLDRCGEMLGPMLTSVHNLHYYLDLMREVRESLDAGGFEAFRRQFATDRARGV

SEQ ID NO: 59219 - protein, 382 aa, Polyangium fumosum
  misc_feature (1)..(382): tr|A0A4V5PNG8|A0A4V5PNG8_9DELT Queuine tRNA-ribosyltran sferase OS=Polyangium fumosum OX=889272 GN=tgt PE=3 SV= 1
MSGPSTPGYAFRTLATSGAARAGVLTTPHGDVPTPTFMPVGTQGSVKTMSPDEVAATGARIVLGNTYHLWLRPGPEVVAELGGLHGFTKWPHAMLTDSGGFQAFSLAERRQTSEDGFVFRSHLDGAKKVLTPEVAMQVQGKIGADIAMQLDICPPGDASRADFEAACARTTRWARRCLAAKRPDQAVFGIVQGGTDPALRRAHAEELAAMPFDGLALGGFSVGEPIARMHEVLLEVAHTLDPERPRYLMGVGTPYDLVRAIGAGVDMFDCVLPTRNARNGQALTRTGKVVIKQARYRTDPSPLDPTCTCPTCAAGYSRAYLRHLFIASELLVLRLITVHNLHLYGTLVREAREAILAGRYDVFAKEWLAGLEAGAAEHAPAT

SEQ ID NO: 59220 - protein, 386 aa, Polyangium sp.
  misc_feature (1)..(386): tr|A0A4U1H313|A0A4U1H313_9DELT Queuine tRNA-ribosyltran sferase OS=Polyangium sp. SDU3-1 OX=2567896 GN=tgt PE=3 SV=1
MSGPSTPGYSFKVLGTSGAARAGVLTTPHGEVPTPTFMPVGTQGSVKTLTPHEVAATGARIVLGNTYHLWLRPGPELVAELGGLHRFTHWPHAMLTDSGGFQAFSLAERRTMSEDGFVFRSHLDGSKRSLTPEEAMRVQGLLGADIAMQLDVCPPGQAPRAEVEQACRMTTRWAARCLAAKRPDQAVFGIVQGSVHPDLRRAHAEELAALPFDGLALGGFSVGEPIARMHEVLLEAAPALDPERPRYLMGVGTPYDLVRAIGAGVDMFDCVLPTRNARNGQALTRTGKIVIKQARYRNDPSPLDPTCDCPTCAEGYSRAYLRHLFLAGEILVLRLFTAHNLHLYGTLVREAREAILAGRYEAFAKAWLDGLGAGASEEAAAADART

SEQ ID NO: 59221 - protein, 372 aa, Polycyclovorans sp.
  misc_feature (1)..(372): tr|A0A2E2JCW8|A0A2E2JCW8_9GAMM Queuine tRNA-ribosyltran sferase OS=Polycyclovorans sp. OX=2024852 GN=tgt PE=3 S V=1
MSFEVLARDGHARRGRLQLAHGVVETPVFMPVGTYGTVKSLTPEDLLAVGSQIILGNTFHLMLRPGKAAFERVGGLHPFMHWDKPILTDSGGFQVWSLASLRKITEAGVHFSSPVNGDKLFLSPETAVQMQHALNADIVMQFDECTPYPATEAQAEASMSLSTRWALRCKDAHGNNGNKLYGIVQGGMYADLRRQSLQALEAIGFDGYAIGGLSVGETEDERIAVLDTLAPLLPVNSPRYLMGVGTPRDLVQAVARGIDQFDCVMPTRNARNGHLFTHQGVVKIRNAKYRDDDSPLDPACDCYTCTHYSRAYLYHLDRCDEMLGPRLNTIHNLHYYHRLMADMRAHIETGRFSAFAADFLASAAGAPKSSAA

SEQ ID NO: 59222 - protein, 374 aa, Polymorphobacter sp.
  misc_feature (1)..(374): tr|A0A4Y9EPL0|A0A4Y9EPL0_9SPHN Queuine tRNA-ribosyltran sferase OS=Polymorphobacter sp. DJ1R-1 OX=2511025 GN=tg t PE=3 SV=1
MTRFDFNIHATDGAARTGVIRMQRGDIRTPAFMPVGTAATVKAMRPAEVRASGAEIILGNTYHLMLRPTAERIARLGGLHKFMGWERPILTDSGGFQVMSLGALSKLTEDGVTFASHLDGSKHLITPERSMEIQRLLGSDIVMAFDECTPYPATRVQAESSMLRSMRWAQRSRDGFDSGIDHASRSALFGIQQGSTFEDLRAVSAAKLIDIGFDGYAIGGLAVGEGQAAMFSVLDYAPGQLPADRPRYLMGVGKPDDIVGAVERGIDMFDCVLPTRSGRTGQAFTHAGPINLRNARFAEDEAPLDATCACPVCKTNSRAYIHHLIKSSEILGAMLMTEHNVWFYQQLMAGLRAAIAAGELTKFANDFRAQYGAR

SEQ ID NO: 59223 - protein, 382 aa, Polymorphum gilvum
  misc_feature (1)..(382): tr|F2IZS5|F2IZS5_POLGS Queuine tRNA-ribosyltransferase OS=Polymorphum gilvum (strain LMG 25793 / CGMCC 1.9160 / SL003B-26A1) OX=991905 GN=tgt PE=3 SV=1
MTAKPFSFRLIATDGAARRGEIETPHGLVRTPAFMPVGTQATVKAMYPDQVRALGSDVVLGNTYHLMLRPTAERVARLGGLHRFMNWPHTILTDSGGFQVMSLAQLRKLDETGVRFQSHIDGQKYHLTPERSIEIQGLLGSDIQMQLDECIGLPAPREEAQRAMELSLRWAERSRAQFEAMGGPAKGQGLYGIVQGGDVAELRIASARALADMPFEGYSVGGLAVGEPQDVMLKMLEITTPAMPVDKPRYLMGVGTPEDILESVTRGIDQFDCVMPTRAGRHGLAYTRYGKVNLKNARHADDPRPLDETSDCPAARDYSRAYLHHLVKAGEGLAAMLLTWNNLAYYQHLMQGMRDAIEAGTFQDFRAAVKADWVRGDIAPLG

SEQ ID NO: 59224 - protein, 385 aa, Polynucleobacter aenigmaticus
  misc_feature (1)..(385): tr|A0A254Q7K2|A0A254Q7K2_9BURK Queuine tRNA-ribosyltran sferase OS=Polynucleobacter aenigmaticus OX=1743164 GN= tgt PE=3 SV=1
MTKPVHFNILARDSASPARLGQLDLPHGSVQTPIFMPVGTYGTVKAMTPRDLNEAKAQIILGNTFHLWLRPGLNVIKKHGGLHRFMGWDKPILTDSGGFQVFSLGALRKISEEGVTFASPINGDKLFMSPEVSMEIQAVLNSDIAMQFDECTPYEVKGQATSEKTARASLEMSLRWGDRSLKRFRELETGNGLFGIVQGGMFENLREFSLDAVSQQGFDGIAIGGLSVGEPKPEFERILNFTAPKLPEHMPHYLMGVGTPEDLMLGVSLGIDMFDCVMPTRNARNGWLFTRFGDLKLRNAGYKEDDRPVDPTCACYTCQNFTRSYLNHLQKANEILGSQLNTIHNLSYYLQLMEEVRESLAKDRFSAYREEFHRNRQRGVEPGQD

SEQ ID NO: 59225 - protein, 385 aa, Polynucleobacter asymbioticus
  misc_feature (1)..(385): tr|A0A1J0DE70|A0A1J0DE70_9BURK Queuine tRNA-ribosyltran sferase OS=Polynucleobacter asymbioticus OX=576611 GN=t gt PE=3 SV=1
MTKPVHFNILARDSQSPARLGQLDLPHGSVQTPIFMPVGTYGTVKAMTPRDLHEAKAQIILGNTFHLWLRPGLDVIKKHGGLHRFMGWDKPILTDSGGFQVFSLGALRKISEEGVTFASPINGDKLFMSPEVSMEIQAVLNSDIAMQFDECTPYETKGQATSEKTARASLEMSLRWGDRSLKRFRELNTGNGLFGIVQGGMFEHLREFSLDAVSQQGFDGIAIGGLSVGEPKPEFERILNFTAPKLPEHMPHYLMGVGTPEDLILGVSLGIDMFDCVMPTRNARNGWLFTRFGDLKLRNSGYKDDDRPVDPTCACYTCQNFTRSYLNHLQKANEILGSQLNTIHNLSYYLQLMTEVREALSKDRFSAYREEFKANRQRGVEPGQD

SEQ ID NO: 59226 - protein, 393 aa, Polynucleobacter asymbioticus
  misc_feature (1)..(393): tr|A4SZT8|A4SZT8_POLAQ Queuine tRNA-ribosyltransferase OS=Polynucleobacter asymbioticus (strain DSM 18221 / CI P 109841 / QLW-P1DMWA-1) OX=312153 GN=tgt PE=3 SV=1
MSTREYKAMTKPVHFNILARDSQSPARLGQLDLPHGSVQTPIFMPVGTYGTVKAMTPRDLNEAKAQIILGNTFHLWLRPGLDVIKKHGGLHRFMGWDKPILTDSGGFQVFSLGALRKISEEGVTFASPINGDKLFMSPEVSMEIQAVLNSDIAMQFDECTPYETKGQATSEKTARASLEMSLRWGDRSLKRFRELNTGNGLFGIVQGGMFEHLREFSLDAVSQQGFDGIAIGGLSVGEPKPEFERILNFTAPKLPEHMPHYLMGVGTPEDLILGVSLGIDMFDCVMPTRNARNGWLFTRFGDLKLRNSGYKDDDRPVDPTCACYTCQNFTRSYLNHLQKANEILGSQLNTIHNLSYYLQLMTEVREALSKDRFSAYREEFKANRQRGVEPGQD

SEQ ID NO: 59227 - protein, 385 aa, Polynucleobacter campilacus
  misc_feature (1)..(385): tr|A0A254PT18|A0A254PT18_9BURK Queuine tRNA-ribosyltran sferase OS=Polynucleobacter campilacus OX=1743163 GN=tg t PE=3 SV=1
MTKPVHFNILARDSQSPARLGQLDLPHGSVQTPIFMPVGTYGTVKAMTPRDLNEAKAQIILGNTFHLWLRPGLEVIKKHGGLHRFMAWDKPILTDSGGFQVFSLGALRKISEEGVTFSSPINGDKLFMSPEVSMEIQAVLNSDIAMQFDECTPYEIKGQPTSEKTARASLEMSLRWGDRSLKRFRELNTGNGLFGIVQGGMFENLREFSLDAVSQQGFDGIAIGGLSVGEPKPEFERILHFTAPKLPEHMPHYLMGVGTPEDLMLGVSLGIDMFDCVMPTRNARNGWLFTRFGDLKLRNSGYKDDDRPLDPTCVCYTCQNFTRSYLNHLQKANEILGSQLNTIHNLSYYLQLMTEVREALSKDRFSAYREEFHQNRQRGVEPGQD

SEQ ID NO: 59228 - protein, 384 aa, Polynucleobacter cosmopolitanus
  misc_feature (1)..(384): tr|A0A229FUH3|A0A229FUH3_9BURK Queuine tRNA-ribosyltran sferase OS=Polynucleobacter cosmopolitanus OX=351345 GN =tgt PE=3 SV=1
MNSFNFKLLKKDPRTHARRGELTLTHGKVQTPIFMPVGTYGTVKGMTPRDLEEAAAQIVLGNTFHLWLRPGLDVIGKHHGLHDFMGWKKPILTDSGGFQVFSLGALRKITEEGVAFASPVNGDKLFMSPEISMDIQAVLNSDIAMQFDECTPYETNGITTDEKTAKNSLELSLRWGERSIRRFRELNTGNALFGIVQGGMFEHLRDVSLDGVANQDFDGIAIGGLSVGEPKPEFERILSHIGPKLPENKPHYLMGVGTPEDLVLGVSQGIDMFDCVMPTRNARNGWLFTRFGDLKLRNAAFKDDTRPLDASCGCYTCRNFSRAYLHHLQKTNEILGAQLNTIHNIHYYINLMSEIRQSLDEDLFPEFIKEFHKNRALGVLETTG

SEQ ID NO: 59229 - protein, 385 aa, Polynucleobacter duraquae
  misc_feature (1)..(385): tr|A0A0E3ZMS1|A0A0E3ZMS1_9BURK Queuine tRNA-ribosyltran sferase OS=Polynucleobacter duraquae OX=1835254 GN=tgt PE=3 SV=1
MTKPVHFNILARDSASPARLGQLDLPHGSVQTPIFMPVGTYGTVKAMTPRDLHEAKAQIILGNTFHLWLRPGLDVVKKHGGLHRFMGWDKPILTDSGGFQVFSLGALRKISEEGVTFASPINGDKLFMSPEVSMEIQAVLNSDIAMQFDECTPYEVKGQATSEKTARASLEMSLRWGDRSLKRFRELETGNGLFGIVQGGMFENLREFSLDAVSQQGFDGIAIGGLSVGEPKPEFERILNFTAPKLPEHMPHYLMGVGTPEDLMLGVSLGIDMFDCVMPTRNARNGWLFTRFGDLKLRNSGYKDDDRPVDPTCSCYTCKNFTRSYLNHLQKANEILGSQLNTIHNLSYYLQLMEEVRESLAKDRFSAYREEFHRNRQRGVEPGQD

SEQ ID NO: 59230 - protein, 385 aa, Polynucleobacter hirudinilacicola
  misc_feature (1)..(385): tr|A0A210RWJ2|A0A210RWJ2_9BURK Queuine tRNA-ribosyltran sferase OS=Polynucleobacter hirudinilacicola OX=1743166 GN=tgt PE=3 SV=1
MTKPVHFNILARDSQSPARLGQLDLPHGSVQTPIFMPVGTYGTVKAMTPRDLNEAKAQIILGNTFHLWLRPGLDVIKKHGGLHRFMAWDKPILTDSGGFQVFSLGALRKISEEGVTFASPINGDKLFMSPEVSMEIQAVLNSDIAMQFDECTPYEIKGQPTSEKTARASLEMSLRWGDRSLKRFRELNTGNGLFGIVQGGMFENLREFSLDAVSQQGFDGIAIGGLSVGEPKPEFERILNFTASKLPEHMPHYLMGVGTPEDLMLGVSLGIDMFDCVMPTRNARNGWLFTRFGDLKLRNSGYKDDDRPLDPTCTCYTCQNFTRSYLNHLQKANEILGSQLNTIHNLSYYLQLMTEVREALSKDRFSAYREEFHQNRQRGVEPGQD

SEQ ID NO: 59231 - protein, 385 aa, Polynucleobacter meluiroseus
  misc_feature (1)..(385): tr|A0A240DYE6|A0A240DYE6_9BURK Queuine tRNA-ribosyltran sferase OS=Polynucleobacter meluiroseus OX=1938814 GN=t gt PE=3 SV=1
MTKPVHFNILARDPASPARLGQLDLPHGSVQTPIFMPVGTYGTVKAMTPRDLKEAKAQIILGNTFHLWLRPGLDVIKKHGGLHRFMAWDKPILTDSGGFQVFSLGALRKISEEGVTFASPINGDKLFMSPEVSMEIQAVLNSDIAMQFDECTPYEIKGQATSEKTARDSLEMSLRWGDRSLKRFRELETGNGLFGIVQGGMFENLREFSLEAVSQQGFDGIAIGGLSVGEPKPEFERILNFTAPKLPELMPHYLMGVGTPEDLMLGVSLGIDMFDCVMPTRNARNGWLFTRFGDLKLRNSGYKDDDRPVDPTCACYTCQNFTRSYLNHLQKANEILGSQLNTIHNLSYYLQLMEEVRESLKLGRFSNYREEFHNNRQRGVEPGQD

SEQ ID NO: 59232 - protein, 385 aa, Polynucleobacter necessarius
  misc_feature (1)..(385): tr|B1XRV9|B1XRV9_POLNS Queuine tRNA-ribosyltransferase OS=Polynucleobacter necessarius subsp. necessarius (str ain STIR1) OX=452638 GN=tgt PE=3 SV=1
MTKPVYFNILARDSQSPARLGQLDLPHGSVQTPIFMPVGTYGTVKAMTPRDLHEAKAQIILGNTFHLWLRPGLDVIKKHGGLHRFMGWDKPILTDSGGFQVFSLGALRKISEEGVTFASPINGDKLFMSPEVSMEIQAVLNSDIAMQFDECTPYEIKGQPTSEKTARTSLEMSLRWGDRSLKRFRELETGNGLFGIVQGGMFENLREFSLDAVSQQGFDGIAIGGLSVGEPKPEFECILNFTAPKLPEHMPHYLMGVGTPEDLILGVSLGIDMFDCVMPTRNARNGWLFTRFGDLKLRNSGYKDDDRPVDPTCACYTCQNFTRSYLNHLQKANEILGSQLNTIHNLSYYLQLMTEVREALSKDRFSAYREEFHSNRQRGVEPGQD

SEQ ID NO: 59233 - protein, 385 aa, Polynucleobacter paneuropaeus
  misc_feature (1)..(385): tr|A0A2Z4JP35|A0A2Z4JP35_9BURK Queuine tRNA-ribosyltran sferase OS=Polynucleobacter paneuropaeus OX=2527775 GN= tgt PE=3 SV=1
MTKSIQFNISAHDSSSLARVGQLDLPHGSVQTPIFMPVGTYGTVKAMTPRDLEEAHAQIILGNTFHLWLRPGLEVVKKHGGLHRFMAWDKPILTDSGGFQVFSLGALRKISEEGVTFASPINGDKLFMSPEVSMEIQAVLNSDIAMQFDECTPYESHGKATTEKTAQQSLELSLRWGERSIKRFRELETDNGLFGIVQGGMFENLRELSLAGVSEQGFDGIAIGGLSVGEPKPEFERILNFTAPKLPAHLPHYLMGVGTPEDLILAVSLGIDMFDCVMPTRNARNGWLFTRFGDLKLRNSGYKDDDRPLDPSCACYTCKHFTRSYLNHLQKANEILGSQLNTIHNLSYYLQLMTEVREAISQARFQAYREEFHRNRQRGVEPGQD

SEQ ID NO: 59234 - protein, 385 aa, Polynucleobacter paneuropaeus
  misc_feature (1)..(385): tr|A0A2Z4JUL6|A0A2Z4JUL6_9BURK Queuine tRNA-ribosyltran sferase OS=Polynucleobacter paneuropaeus OX=2527775 GN= tgt PE=3 SV=1
MTKSIQFNISAHDSSSLARVGQLDLPHGSVQTPIFMPVGTYGTVKAMTPRDLEEAHAQIILGNTFHLWLRPGLEVVKKHGGLHRFMAWDKPILTDSGGFQVFSLGALRKISEEGVTFASPINGDKLFMSPEVSMEIQAVLNSDIAMQFDECTPYESHGKATTEKTAQQSLELSLRWGERSIQRFRELETGNGLFGIVQGGMFENLRELSLAGVSEQGFDGIAIGGLSVGEPKPEFERILNFTAPKLPAHLPHYLMGVGTPEDLILAVSLGIDMFDCVMPTRNARNGWLFTRFGDLKLRNSGYKDDDRPLDPSCACYTCKHFTRSYLNHLQKANEILGSQLNTIHNLSYYLQLMTEVREAISQARFQAYREEFHRNRQRGVEPGQD

SEQ ID NO: 59235 - protein, 385 aa, Polynucleobacter sp.
  misc_feature (1)..(385): tr|A0A258X861|A0A258X861_9BURK Queuine tRNA-ribosyltran sferase OS=Polynucleobacter sp. 16-46-70 OX=1970421 GN= tgt PE=3 SV=1
MTKPVHFNILARDSQSPARLGQLDLPHGSVQTPIFMPVGTYGTVKAMTPRDLNEAKAQIILGNTFHLWLRPGLDVIKKHGGLHRFMGWDKPILTDSGGFQVFSLGALRKISEEGVTFASPINGDKLFMSPEVSMEIQAVLNSDIAMQFDECTPYEVKGQPTSEKTARASLEMSLRWGDRSLKRFRELETGNGLFGIVQGGMFENLREFSLEAVRQQGFDGIAIGGLSVGEPKPEFERILNFTAPKLPEHMPHYLMGVGTPEDLMLGVSLGIDMFDCVMPTRNARNGWLFTRFGDLKLRNSGYKDDDRPLDPTCACYTCQNFTRSYLNHLQKANEILGSQLNTIHNLSYYLQLMEEVREALSKDRFSAYREQFHRDRQRGVEPGQD

SEQ ID NO: 59236 - protein, 385 aa, Polynucleobacter sp.
  misc_feature (1)..(385): tr|A0A1G3CT79|A0A1G3CT79_9BURK Queuine tRNA-ribosyltran sferase OS=Polynucleobacter sp. GWA2_45_21 OX=1801989 G N=tgt PE=3 SV=1
MTKPVHFNILARDSASPARLGQLDLPHGSVQTPIFMPVGTYGTVKAMTPRDLNEAKAQIILGNTFHLWLRPGLDVIKKHGGLHRFMGWDKPILTDSGGFQVFSLGALRKISEEGVTFASPINGDKLFMSPEVSMEIQAVLNSDIAMQFDECTPYEVKGQATSEKTARASLEMSLRWGDRSLKRFRELETGNGLFGIVQGGMFENLREFSLDAVSQQGFDGIAIGGLSVGEPKPEFERILNFTAPKLPEHMPHYLMGVGTPEDLMLGVSLGIDMFDCVMPTRNARNGWLFTRFGDLKLRNSGYKDDDRPVDPTCGCYTCKNFTRSYLNHLQKANEILGSQLNTIHNLSYYLQLMEEVRDSLAKDRFSAYREEFHRNRQRGVEPGQD

SEQ ID NO: 59237 - protein, 385 aa, Polynucleobacter sphagniphilus
  misc_feature (1)..(385): tr|A0A1R0HDM3|A0A1R0HDM3_9BURK Queuine tRNA-ribosyltran sferase OS=Polynucleobacter sphagniphilus OX=1743169 GN =tgt PE=3 SV=1
MSKPVNFSILARDSQSPARLGQLDLPHGSVQTPIFMPVGTYGTVKAMTPRDLEEAKAQIILGNTFHLWLRPGLDVIKKHGGLHRFMGWNKPILTDSGGFQVFSLGALRKISEEGVTFASPINGDKLFMSPEVSMEIQAVLNSDIAMQFDECTPYEVKGQATTEKTARQSLEMSLRWGDRSLKRFRELNTGNGLFGIVQGGMFENLREFSSDAVSQQGFDGIAIGGLSVGEPKPEFERILNFTAPKLPEHMPHYLMGVGTPEDLILGVSLGIDMFDCVMPTRNARNGWLFTRFGDLKLRNAGYKEDDRPLDPTCACYTCQHFTRSYLNHLQKANEILGSQLNTIHNLSYYLQLMTEVREALSLGRFSAYREEFHRNRQRGVEPGQD

SEQ ID NO: 59238 - protein, 384 aa, Polynucleobacter victoriensis
  misc_feature (1)..(384): tr|A0A212TGB1|A0A212TGB1_9BURK Queuine tRNA-ribosyltran sferase OS=Polynucleobacter victoriensis OX=2049319 GN= tgt PE=3 SV=1
MKPLNFKLIKKDSRTHARRGEVSLPHGKVQTPIFMPVGTYGTVKGMTPRDLEEAQAQIILGNTFHLWLRPGLEVINQHHGLHDFMGWKKPILTDSGGFQVFSLGALRKITEEGVAFASPVNGDKLFMSPEISMEIQAELNSDIAMQFDECTPYETNGIPTDEKTVKNSLELSLRWGERSIKRFRDLDTGNALFGIVQGGMFEHLRDVSLDGVSQQDFDGIAIGGLSVGEPKPEFERILSHIGPKLPENKPHYLMGVGTPEDLVLGVSQGIDMFDCVMPTRNARNGWLFTRFGDLKLRNASFKTDTRPLDPTCSCYTCRNFSRSYLHHLQKANEILGSQLNTIHNIHYYLNLMSEIRDALDQDQFPEFIKEFHQNRAIGVLETTG

SEQ ID NO: 59239 - protein, 385 aa, Polynucleobacter wuianus
  misc_feature (1)..(385): tr|A0A191UHI1|A0A191UHI1_9BURK Queuine tRNA-ribosyltran sferase OS=Polynucleobacter wuianus OX=1743168 GN=tgt P E=3 SV=1
MTKPVHFNILARDSQSPARLGQLDLPHGSVQTPIFMPVGTYGTVKAMTPRDLNEAKAQIILGNTFHLWLRPGLDVIKKHGGLHRFMGWDKPILTDSGGFQVFSLGALRKISEEGVTFASPINGDKLFMSPEVSMEIQAVLNSDIAMQFDECTPYEIKGQPTSEKTARASLEMSLRWGDRSLKRFRELNTGNGLFGIVQGGMFENLREFSLDAVSQQGFDGIAIGGLSVGEPKPEFERILNFTAPKLPEHMPHYLMGVGTPEDLILGVSLGIDMFDCVMPTRNARNGWLFTRFGDLKLRNSGYKDDDRPLDPTCACYTCQNFTRSYLNHLQKANEILGSQLNTIHNLSYYLQLMTEVREALSKDRFSAYREEFHANRQRGVEPGQD

SEQ ID NO: 59240 - protein, 376 aa, Pontibaca methylaminivorans
  misc_feature (1)..(376): tr|A0A1R3WDI1|A0A1R3WDI1_9RHOB Queuine tRNA-ribosyltran sferase OS=Pontibaca methylaminivorans OX=515897 GN=tgt PE=3 SV=1
MGAGITFALQASDEKARAGMITTPRGVIRTPAFMPVGTAATVKAMLPESVAATGADILLGNTYHLMLRPGAERIAALGGLHRFMNWDRPILTDSGGFQVMSLAGLRKLTEEGVRFRSHVDGSRHMLTPERSMMIQRLLGSDIVMCFDECPALPASEAEVAGSMRRSMRWAARSREAFGDRPGHALFGIQQGGISRELREESAQALRAIGFDGYAIGGLAVGEGQEAMFSVLDHAPDMLPAEKPRYLMGVGKPEDIVGAVARGVDMMDCVLPSRSGRTGQVFTRLGALNIKNARHAEDPRPLDDTCTCPACRSYSRAYLHHVFRSGEIVSAMLLTWHNLHYYQQIMAGMRAAIAEGGFAAWSAEFHAARTRGDIEPI

SEQ ID NO: 59241 - protein, 379 aa, Pontibacillus chungwhensis
  misc_feature (1)..(379): tr|A0A0A2UUL1|A0A0A2UUL1_9BACI Queuine tRNA-ribosyltran sferase OS=Pontibacillus chungwhensis BH030062 OX=13855 13 GN=tgt PE=3 SV=1
MMPIRYEHIKTCKQTGARLGRVHTPHGSFETPMFMPVGTLATVKTMAPEELKQMGAEIILSNTYHLWLRPGEDIVEEAGGLHKFMNWDGSILTDSGGFQVFSLSKLRDIKEEGVHFRNHISGEKLFLSPEKAMHIENALGADIMMAFDECPPYPASHEYMKKSVERTSRWAERCLEAHKRPHDQGLFGIVQGGEYEDLRRQSINDLVSMDFPGYAVGGLSVGEPKDVMNRVLDFTTPYLPTDKPRYLMGVGSPDSLIDGAMRGIDMFDCVLPTRIARNGTCMTSQGRLVVRNAKFARDFGPIDPECDCHTCRNYSRAYIRHLIKCNETFGFRLTTYHNLYFLLKLMKQVREAIREDRLGDFREEFFEQYGFNKPDAKNF

SEQ ID NO: 59242 - protein, 379 aa, Pontibacillus halophilus
  misc_feature (1)..(379): tr|A0A0A5GQL9|A0A0A5GQL9_9BACI Queuine tRNA-ribosyltran sferase OS=Pontibacillus halophilus JSM 076056 = DSM 19 796 OX=1385510 GN=tgt PE=3 SV=1
MSAITYEFIKEDKQTGARLGRVHTPHGSFDTPTFMPVGTLATVKTMAPEELKQMGANMILSNTYHLWLRPGEDIVEEAGGLHKFMNWDGSILTDSGGFQVFSLSNLRDIQEEGVHFRSHISGEKLFLSPEKAMQIQNSLGADIMMAFDECPPYPASYDYIKKSVERTSRWAERCLTAHKRPHDQGLFGIVQGGEYEDLRRQSAQDLISLDFPGYAIGGLSVGEPKDVMNRVLDFTTPLLPKDKPRYLMGVGSPDSLIDGAIRGVDMFDCVLPTRIARNGTCMTSEGRLVVRNAKFARDFRPIDENCDCYTCRNYSRAYIRHLVKANETFGFRLTTYHNLYFLLKLMENVRQAIREDRLGDFREEFFEQYGFNKPGAKNF

SEQ ID NO: 59243 - protein, 379 aa, Pontibacillus litoralis
  misc_feature (1)..(379): tr|A0A0A5G7B2|A0A0A5G7B2_9BACI Queuine tRNA-ribosyltran sferase OS=Pontibacillus litoralis JSM 072002 OX=138551 2 GN=tgt PE=3 SV=1
MMAIKYELIKTDKQTGARLGRVHTPHGSFDTPTFMPVGTLATVKTMAPEELKEMGANIILSNTYHLWLRPGEDIVEEAGGLHSFMNWDGSILTDSGGFQVFSLSKLRDIQEEGVHFRNHISGEKLFLSPEKAMHIQNSLGSDIMMAFDECPPYPASYDYMKSSVERTSRWAERCLEAHKRPHDQGLFGIIQGGEYEELRRQSARDLVSLDFPGYAIGGLSVGEPKDVMNRVLDFTTPLMPENKPRYLMGVGSPDSLIDGAIRGVDMFDCVLPTRIARNGTCMTSKGRLVVRNAKYARDFGPIDDACTCHTCRNYSRAYIRHLIKANETFGFRLTTYHNLHFLLKLMEQVREAIRQDRLGDFREAFFEQYGFNKPNAKNF

SEQ ID NO: 59244 - protein, 378 aa, Pontibacillus marinus
  misc_feature (1)..(378): tr|A0A0A5FU86|A0A0A5FU86_9BACI Queuine tRNA-ribosyltran sferase OS=Pontibacillus marinus BH030004 = DSM 16465 O X=1385511 GN=tgt PE=3 SV=1
MPIKYELIKTCKQTGARLGRVHTPHGSFETPMFMPVGTLATVKTMAPEELKEMGADIILANTYHLWLRPGEDIVEEAGGLHKFMNWDGSILTDSGGFQVFSLSDLRDIKEEGVHFRNHISGEKLFLSPEKAMQIQNSLGPDIMMAFDECPPYPASHEYMKSSVERTTRWAERCLEAHKRPNEQGLFGIVQGGEYEDLRRQSARDLVSMDFPGYAVGGLSVGEPKDVMNRALEFTTPLLPDHKPRYLMGVGSPDSLIDGALRGIDMFDCVLPTRIARNGTCMTSEGRLVVRNAKYSRDFRPIDEACDCHTCRNYSRAYIRHLIKCNETFGFRLTTYHNLYFLLNLMKQVRQAILDDRLGDFREEFFEQYGFNKPDAKNF

SEQ ID NO: 59245 - protein, 379 aa, Pontibacillus yanchengensis
  misc_feature (1)..(379): tr|A0A0A2TDL8|A0A0A2TDL8_9BACI Queuine tRNA-ribosyltran sferase OS=Pontibacillus yanchengensis Y32 OX=1385514 G N=tgt PE=3 SV=1
MPAIRYELIKTCKQTGARLGRVHTPHGSFETPMFMPVGTLATVKTMAPEELKQMGADIILSNTYHLWLRPGEDIVEEAGGLHKFMNWDGSILTDSGGFQVFSLSDLRDIKEEGVHFRNHISGEKLFLSPEKAMHIQNSLGADIMMAFDECPPYPASHEYMKSSVERTSRWAERCLEAHQRPHDQGLFGIIQGGEYEDLRRQSAKDLISLDFPGYAIGGLSVGEPKDVMNRVLDFTTPLLPNDKARYLMGVGSPDSLIDGSIRGVDMFDCVLPTRIARNGTCMTSQGRLVVRNAKFARDFRPIDENCDCHTCRNYSRAYIRHLVKANETFGFRLTTYHNLYFLLKLMEQVRQAIREDRLGDFREEFFEQYGLNKPNAKNF

SEQ ID NO: 59246 - protein, 376 aa, Pontibacter actiniarum
  misc_feature (1)..(376): tr|A0A1X9YMF8|A0A1X9YMF8_9BACT Queuine tRNA-ribosyltran sferase OS=Pontibacter actiniarum OX=323450 GN=tgt PE=3 SV=1
MQFNLVATDAQSKARAGVVQTDHGAIETPIFMPVGTAGTVKAVHQRELKEDVKAEIILGNTYHLYLRPGLEVLEKAGGLHKFNGWDRPILTDSGGYQVFSLAGTRKIKEEGVKFKSHIDGSTLNFTPENVMDTQRIIGADIIMAFDECTPYPCDYGYARNSMERTHRWLQRCVDRFDSTEPKYGYSQTLFPIVQGSTYKDLRVQSAETIASFGREGNAIGGLSVGEPAEMMYEMTDLVCDILPKDKPRYLMGVGTPANILENIALGVDMFDCVLPTRNARNGMLFTTQGIINIRNKKWADDFSPIDAELGGYVSTFYSKAYLRHLIHSTEYLAGQIASVHNLTFFLWLVKQARQQILNGTFRDWKDVMVKKLMTRL

SEQ ID NO: 59247 - protein, 396 aa, Pontibacter akesuensis
  misc_feature (1)..(396): tr|A0A1I7J518|A0A1I7J518_9BACT Queuine tRNA-ribosyltran sferase OS=Pontibacter akesuensis OX=388950 GN=tgt PE=3 SV=1
MGRLALRIAFARQGASTDTTMQFNLVATDAQSKARAGVIQTDHGTIETPIFMPVGTAGTVKAVHQRELKEDIKAEIILGNTYHLYLRPGLDVLEQAGGLHKFNGWDRPLLTDSGGYQVFSLAGTRKIKEEGVKFRSHIDGSSLDFTPENVMDTQRIIGADIIMAFDECTPYPCDYGYARNSMERTHRWLQRCVDRFDSTEPKYGYSQTLFPIVQGSTYKDLRVQSADTIASFGREGNAIGGLSVGEPAEMMYEMTDLVCDILPKDKPRYLMGVGTPANILENIALGVDMFDCVLPTRNARNGMLFTTQGIINIRNKKWADDFSPIDAELGGYVSTFYSKAYLRHLIHSTEYLAGQIASIQNLTFYLWLVKQARQRIIDGTFRDWKDVMVKKLMTRL

SEQ ID NO: 59248 - protein, 376 aa, Pontibacter chinhatensis
  misc_feature (1)..(376): tr|A0A1I2YUL9|A0A1I2YUL9_9BACT Queuine tRNA-ribosyltran sferase OS=Pontibacter chinhatensis OX=1436961 GN=tgt P E=3 SV=1
MQFNLVATDPQSKARAGVVQTDHGAIETPIFMPVGTAGSVKAVHQRELKEDIKAEIILGNTYHLYLRPGLEVLEKAGGLHKFNGWDRPLLTDSGGYQVFSLAGTRKIKEEGVKFKSHIDGSTLNFTPENVMDTQRTIGADIIMAFDECTPYPCDYTYAKQSMERTHRWLQRCVDRFDSTEPKYGYSQTLFPIVQGSTYKDLRIQSAETIASFGREGNAIGGLSVGEPAEMMYEMTEVVCDILPKDKPRYLMGVGTPANILENIALGVDMFDCVLPTRNARNGMLFTTQGIINIKNKKWAEDFSPIDAELGGYVSTFYTKAYLRHLIHSTEYLAGQIASVHNLTFFLWLVKQARQQILNGTFRDWKDLMVKKLMTRL

SEQ ID NO: 59249 - protein, 376 aa, Pontibacter diazotrophicus
  misc_feature (1)..(376): tr|A0A3D8L8X3|A0A3D8L8X3_9BACT Queuine tRNA-ribosyltran sferase OS=Pontibacter diazotrophicus OX=1400979 GN=tgt PE=3 SV=1
MQFDLIAKDAQSKARAGVVQTDHGAIETPIFMPVGTAGTVKAVHQRELKEDVKAEIILGNTYHLYLRPGLNVLEQAGGLHKFNGWDRPILTDSGGYQVFSLAGTRKIKEEGVKFRSHIDGSPLDFTPENVMDTQRIIGADIIMAFDECTPYPCDYTYAKNSMERTHRWLQRCVDRFDSTEPKYGYSQTLFPIVQGSTYKDLRVKSAETIASFGREGNAIGGLSVGEPAEMMYEMTELVCDILPADKPRYLMGVGTPANILENIALGVDMFDCVLPTRNARNGMLFTTQGIVNIRNERWANDHSPIDAELGVYASSFYSKAYLRHLVRANEMLGAQISSIHNLTFYLWLVKQARQQIINGTFRDWKDLMVKKLMTRL

SEQ ID NO: 59250 - protein, 376 aa, Pontibacter indicus
  misc_feature (1)..(376): tr|A0A1R3XL63|A0A1R3XL63_9BACT Queuine tRNA-ribosyltran sferase OS=Pontibacter indicus OX=1317125 GN=tgt PE=3 S V=1
MQFSLVAKDIQSKARAGVVQTAHGAIETPIFMPVGTAGTVKAVHQRELKDDIKAEIILGNTYHLYLRPGLNILEQAGGLHKFNGWDRPILTDSGGYQVFSLAGTRKIKEEGVKFKSHIDGSTLNFTPENVMDTQRTIGADIIMAFDECTPYPCDYTYAKQSMERTHRWLQRCVDRFDSTEPKYGYDQTLFPIVQGSTYKDLRVQSAETIASFGREGNAIGGLSVGEPAEMMYEMTEVVCDILPADKPRYLMGVGTPANILENIALGVDMFDCVLPTRNARNGMLFTTQGIVNIRNQKWATDHSPIDAELGGYVSTFYSKAYLRHLIHSGEYLAGQIASVHNLTFYLWLVKQARQHIIAGTFRDWKDVMVKKLMTRL

SEQ ID NO: 59251 - protein, 376 aa, Pontibacter korlensis
  misc_feature (1)..(376): tr|A0A0E3UWK0|A0A0E3UWK0_9BACT Queuine tRNA-ribosyltran sferase OS=Pontibacter korlensis OX=400092 GN=tgt PE=3 SV=1
MQFNLVATDPQSKARAGVVQTDHGAIETPIFMPVGTAGTVKAVHQRELKEDIKAEIILGNTYHLYLRPGLDILEQAGGLHKFNGWDRPILTDSGGYQVFSLAGTRKIKEEGVKFKSHIDGSTLNFTPENVMDTQRTIGADIIMAFDECTPYPCDYTYAKQSMERTHRWLQRCVDRFDSTEPKYGYNQTLFPIVQGSTYKDLRIQSAETIASFGREGNAIGGLSVGEPAEMMYEMTEVVCDILPKDKPRYLMGVGTPANILENIALGVDMFDCVLPTRNARNGMLFTTQGIVNIKNKKWADDFSPIDAELGGYVSTFYTKAYLRHLIHSTEYLAGQIASVHNLTFFLWLVKQARQQILNGTFRDWKDMMVKKLMTRL

SEQ ID NO: 59252 - protein, 376 aa, Pontibacter lucknowensis
  misc_feature (1)..(376): tr|A0A1N6T5A3|A0A1N6T5A3_9BACT Queuine tRNA-ribosyltran sferase OS=Pontibacter lucknowensis OX=1077936 GN=tgt P E=3 SV=1
MEFSLVAKDIQSKARAGVVQTAHGAIETPIFMPVGTAGTVKAVHQRELKEDIKAEIILGNTYHLYLRPGLNILEQAGGLHKFNGWDRPILTDSGGYQVFSLAGTRKIKEEGVKFKSHIDGSALDFTPENVMDTQRTIGADIIMAFDECTPYPCDYTYAKNSMERTHRWLQRCVDRFDSTEPKYGYDQTLFPIVQGSTYKDLRVQSAETIASFGREGNAIGGLSVGEPAEMMYEMTEIVCDILPADKPRYLMGVGTPANILENIALGVDMFDCVLPTRNARNGMLFTTQGIINIRNQKWSTDHSPIDAELGGYVSTFYSKAYLRHLVHSGEYLAGQIASVHNLTFYLWLVKQARQHIIDGTFRDWKDVMVKKLMTRL

SEQ ID NO: 59253 - protein, 376 aa, Pontibacter mucosus
  misc_feature (1)..(376): tr|A0A2T5YJB4|A0A2T5YJB4_9BACT Queuine tRNA-ribosyltran sferase OS=Pontibacter mucosus OX=1649266 GN=tgt PE=3 S V=1
MQFNLVATDPQSKARAGVVQTDHGAIETPIFMPVGTAGSVKAVHQRELKEDIKAEIILGNTYHLYLRPGLEVLEKAGGLHKFNGWDRPLLTDSGGYQVFSLAGTRKIKEEGVKFKSHIDGSTLNFTPENVMDTQRTIGADIIMAFDECTPYPCDYTYAKQSMERTHRWLQRCVDRFDSTEPKYGYSQTLFPIVQGSTYKDLRMQSAETIASFGREGNAIGGLSVGEPAEMMYEMTEVVCDILPKDKPRYLMGVGTPANILENIALGVDMFDCVLPTRNARNGMLFTTQGIINIKNKKWAEDFSPIDAELGGYVSTFYTKAYLRHLIHSTEYLAGQIASVHNLTFFLWLVKQARQQILNGTFRDWKDLMVKKLMTRL

SEQ ID NO: 59254 - protein, 376 aa, Pontibacter ramchanderi
  misc_feature (1)..(376): tr|A0A2N3UAK4|A0A2N3UAK4_9BACT Queuine tRNA-ribosyltran sferase OS=Pontibacter ramchanderi OX=1179743 GN=tgt PE =3 SV=1
MQFSLVAKDIQSKARAGVVQTAHGAIETPIFMPVGTAGTVKAVHQRELKEDIKAEIILGNTYHLYLRPGLNILEQAGGLHKFNGWDRPILTDSGGYQVFSLAGTRKIKEEGVKFKSHIDGSTLNFTPENVMDTQRTIGADIIMAFDECTPYPCDYTYAKNSMERTHRWLQRCVDRFDSTEPKYGYDQTLFPIVQGSTYKDLRVQSAETIASFGREGNAIGGLSVGEPAEMMYEMTEIVCDILPADKPRYLMGVGTPANILENIALGVDMFDCVLPTRNARNGMLFTTQGVINIRNQKWATDHSPIDAELGGYVSTFYSKAYLRHLIHSGEYLAGQIASVHNLTFYLWLVKQARQHIIAGTFRDWKDVMVKKLMVRL

SEQ ID NO: 59255 - protein, 376 aa, Pontibacter sp.
  misc_feature (1)..(376): tr|A0A364RJG0|A0A364RJG0_9BACT Queuine tRNA-ribosyltran sferase OS=Pontibacter sp. 2b14 OX=2080288 GN=tgt PE=3 SV=1
MQFTLTAKDTQSKARAGVVQTAHGAIETPIFMPVGTAGTVKAVHQRELKEDVKAEIILGNTYHLYLRPGLGVLESAGGLHKFNGWDRPILTDSGGYQVFSLAGTRKIKEEGVKFKSHIDGSTLNFTPENVMDTQRTIGADIIMAFDECTPYPCDHTYAKYSMERTHRWLQRCVDRFDSTEPKYGFDQTLFPIVQGSTYKDLRIQSAETIAGFGREGNAIGGLSVGEPAEMMYEMTELVCDILPADKPRYLMGVGTPANILENIALGVDMFDCVLPTRNARNGMLFTTQGIINIKNQRWADDHTPIDAELGGYASTFYSKAYLRHLIHSKEYLGGQIASIHNLTFYLWLVKQARQQIIAGTFRDWKDMMVKKLMTRL

SEQ ID NO: 59256 - protein, 376 aa, Pontibacter sp.
  misc_feature (1)..(376): tr|A0A5C8K5J4|A0A5C8K5J4_9BACT Queuine tRNA-ribosyltran sferase OS=Pontibacter sp. GY10130 OX=2603253 GN=tgt PE =3 SV=1
MQFTLVANDTQSKARAGVVQTDHGTIETPIFMPVGTAGTVKAVHQRELTDDIKAKIILGNTYHLYLRPGLDVLERAGGLHKFNGWNGPILTDSGGYQVFSLAGTRKIKEEGVKFKSHIDGSTLNFTPENVMDTQRTIGADIIMAFDECTPYPCDYTYAKNSMDRTHRWLQRCVDRFDSTEPKYGYNQTLFPIVQGSTYKDLRVKSAETIASFGRAGNAIGGLSVGEPAEMMYEMTELVCDILPADKPRYLMGVGTPANILENIALGVDMFDCVLPTRNARNGMLFTTQGIVNIRNKKWADDFSPIDAELGGYVSTFYSKAYLRHLVHSTEMLGAQISSVHNLTFYLWLVKQAREQILKGTFRDWKDLMVKKLMTRL

SEQ ID NO: 59257 - protein, 376 aa, Pontibacter ummariensis
  misc_feature (1)..(376): tr|A0A239EEA5|A0A239EEA5_9BACT Queuine tRNA-ribosyltran sferase OS=Pontibacter ummariensis OX=1610492 GN=tgt PE =3 SV=1
MQFSLVAKDKQSKARAGVVQTDHGAIETPIFMPVGTAGTVKAVHQQELKEDVKAEIILGNTYHLYLRPGLDVLEKAGGLHKFNGWDRPILTDSGGYQVFSLAGTRKIKEEGVKFKSHIDGSPLDFTPENVMDTQRTIGADIIMAFDECTPYPCDYTYAKNSMERTHRWLQRCVDRFDSTEPKYGYNQTLFPIVQGSTYKDLRVQSAETIASFGREGNAIGGLSVGEPAEVMYEMTELVCDILPTDKPRYLMGVGTPANILENIALGVDMFDCVLPTRNARNGMLFTTQGIVNIRNKKWADDFSPIDAELGGYVSTFYTKAYLRHLIHSGEYLAGQIASVHNLTFYLWLVKQARQQILNGTFREWKDVMVKKLMTRL

SEQ ID NO: 59258 - protein, 376 aa, Pontibacter virosus
  misc_feature (1)..(376): tr|A0A2U1AZG7|A0A2U1AZG7_9BACT Queuine tRNA-ribosyltran sferase OS=Pontibacter virosus OX=1765052 GN=tgt PE=3 S V=1
MQFSLVAKDIQSKARAGVVETAHGAIETPIFMPVGTAGTVKAVHQRELKDDIKAEIILGNTYHLYLRPGLNILEQAGGLHKFNGWDRPILTDSGGYQVFSLAGTRKIKEEGVKFKSHIDGSALDFTPENVMDTQRTIGADIIMAFDECTPYPCDYTYAKNSMERTHRWLQRCVDRFDSTEPKYGYDQTLFPIVQGSTYKDLRVQSAETIASFGREGNAIGGLSVGEPAEMMYEMTEVVCDILPADKPRYLMGVGTPANILENIALGVDMFDCVLPTRNARNGMLFTTQGIVNIRNLKWATDHSPIDAELGGYVSTFYSKAYLRHLVHSGEYLAGQIASVHNLTFYLWLVKQARQHIIAGTFRDWKDVMVKKLMVRL

SEQ ID NO: 59259 - protein, 370 aa, Ponticaulis sp.
  misc_feature (1)..(370): tr|A0A2D7J2I2|A0A2D7J2I2_9RHOB Queuine tRNA-ribosyltran sferase OS=Ponticaulis sp. OX=2020902 GN=tgt PE=3 SV=1
MTDFPFEILGRENRARTGVLKTSRGDIRTPAFMPVGTVGTVKALYSEQVADAGADIVLGNTYHLMLRPGSERVHRLGGLHKFMRWEKPILTDSGGFQVWSLAGLRKMKEEGVSFKSHIDGSTHFLSPERSIEIQADHLGADISMQLDECTAYPVSHEEAKSSMEMSIRWGARSKAAFGERDTQNLFGIVQGSDFEDLRRQSAEQLQEIGFGGYAIGGLAVGEGHERMVEVIDFTEPHLPQHRPRYLMGVGKPIDILEAVAHGVDMFDCVLPTRSGRHGQAWTWDGPINLKNAKFAEDDTPIDETSSCPATRDYSKAYLNHLFKSGEYLAAMVLSWHNTAFFQELMSEIRVSIAEGRFETFRAELKSRWAK

SEQ ID NO: 59260 - protein, 369 aa, Ponticaulis sp.; identical to SEQ ID NO: 56177
  misc_feature (1)..(369): tr|A0A2D7KDC0|A0A2D7KDC0_9RHOB Queuine tRNA-ribosyltran sferase OS=Ponticaulis sp. OX=2020902 GN=tgt PE=3 SV=1

SEQ ID NO: 59261 - protein, 419 aa, Ponticoccus gilvus
  misc_feature (1)..(419): tr|A0A4R6LUS4|A0A4R6LUS4_9ACTN Queuine tRNA-ribosyltran sferase OS=Ponticoccus gilvus OX=519423 GN=tgt PE=3 SV= 1
MSAGDYPPGVPFSFEVRDRLPDRQGRTGIIHTPHGEIQTPAFIAVGTQATVKAVLPEAMRDLGAQAVLANAYHLYLQPGADIVDEAGGVGAFMNWPGPTFTDSGGFQVMSLGVGFKKVLSMDSSRVSDDDVIAEGKERLAHVDDDGVTFKSHLNGDRHRFTPEISMRVQHQLGADIIFAFDELTTLMNTRAYQEESLERTRLWAERCLAAHRELTAERADKPYQALFGVLQGAQYEDLRRKAARDLGAMEVAGQRFDGFGIGGALEKENLGTIVDWVSSELPEDRPRHLLGISEPDDFFAAIAAGADTFDCVQPSRVARNAALYTADGRFNVNTAANRRNFNPIDESCDCYTCAHYTRAYLHHLFKAREMVASTLATIHNERFTVRLVDDIRASIGTGEFDAFKDEFLGRFYRGAGSKA

SEQ ID NO: 59262 - protein, 373 aa, Ponticoccus marisrubri
  misc_feature (1)..(373): tr|A0A0W7WER8|A0A0W7WER8_9RHOB Queuine tRNA-ribosyltran sferase OS=Ponticoccus marisrubri OX=1685382 GN=tgt PE= 3 SV=1
MTSFDLTARDGRARLGVIRTPRGEIRTPAFMPVGTAATVKGMLPESVAATGADILLGNTYHLMLRPGAERIDRLGGLHRFMNWDRPILTDSGGFQVMSLSDLRKLTEDGVEFRSHIDGSRHMLSPERSMEIQRLLGSDIVMAFDECPALPADRERIAASMQLSMRWAARSREAFGDRPGHMLFGIMQGGLERDLREESAAALRDIGFDGYAVGGLAVGEGQAAMFDCLDYAPGFLPEDRPRYLMGVGKPDDIVGAVVRGIDMMDCVLPSRSGRTGQAWTRRGQVNIKNARHADDPRPLDEACSCPACQGYSRAYLHHVFRAGEMIAGMLLTWHNLHYYQELMAGLRAAIAEGRMAAFEADFHAAREEGDIPPL

SEQ ID NO: 59263 - protein, 343 aa, Pontivivens insulae
  misc_feature (1)..(343): tr|A0A2R8A9S0|A0A2R8A9S0_9RHOB Queuine tRNA-ribosyltran sferase OS=Pontivivens insulae OX=1639689 GN=tgt PE=3 S V=1
MPVGTAATVKAMLPENVRATGADILLGNTYHLMLRPTAERIAKLGGLHKFMNWDRPILTDSGGFQVMSLAQLRKLTEEGVTFKSHIDGSRHMLSPERSMEIQKLLGSDIVMCFDECPALPADRKRIEQSMELSMRWAQRSRDAFGDRPGHALFGIQQGGLEEDMRARSADALRAIEFDGYAVGGLAVGEGQEAMFACLDYAPEQLPQDKPRYLMGVGKPDDIVGAVQRGIDMFDCVLPSRSGRTGQAQTRMGQVNLRNARHADDPRPLDPECTCPCCTQYSRAYLHHVHKAQEMIAGMLLTWHNLHYYQELMQGLRDAIAERALDEFVAVFHARREQGDLERL

SEQ ID NO: 59264 - protein, 378 aa, Porphyrobacter dokdonensis
  misc_feature (1)..(378): tr|A0A1A7BJG0|A0A1A7BJG0_9SPHN Queuine tRNA-ribosyltran sferase OS=Porphyrobacter dokdonensis DSW-74 OX=1300349 GN=tgt PE=3 SV=1
MIAPRFSFTLQATDGKARTGAIAMQRGEIRTPAFMPVGTAATVKAMKPEAVRQTGADIILGNTYHLMLRPGAERVARLGGLHKFMNWPRPILTDSGGYQVMSLSDLRKLTEQGVEFRSHLDGSKHMLTPERSMQIQRLLGSDIVMAFDECPRADRPRDEIAASMELSMRWARRSREGFDAGEEHAARAALFGIQQGALHEDLRRVSAEKLTEIGFDGYAVGGLAVGEGQEAMFGVLDYAPDMLPADRPRYLMGVGKPDDLVGAVERGIDMFDCVLPTRSGRNGQAFTWNGPLNLRNARFAEDTGPLDERCRCPVCTTYSRAYIHHLVKSGEMLGAMLVTEHNLSFYQALMHGMRDAIAEGRFASFAAAFRRDYLGSSD

SEQ ID NO: 59265 - protein, 374 aa, Porphyrobacter mercurialis
  misc_feature (1)..(374): tr|A0A0B2BWX4|A0A0B2BWX4_9SPHN Queuine tRNA-ribosyltran sferase OS=Porphyrobacter mercurialis OX=1572751 GN=tgt PE=3 SV=1
MTRFAFNVHATDGRARTGTITMRRGEIRTPAFMPVGTAATVKAMKPESVRAIGADIILGNTYHLMLRPGAERVARLGGLHRFMHWDRPILTDSGGYQVMSLAALRKLTEEGVTFRSHLDGSRHLISPERSMEIQRLLGSDIVMCFDECPRADRPLAEIEESMALSMRWARRSREAFDSGGEHAAGAALFGIQQGALDERLRARSAEALREIGFDGYAIGGLAVGEGQEAMFATLDFAPEQLPQDAPRYLMGVGKPDDLVGAVERGVDMFDCVLPTRSGRNGQAFTWTGPLNMRNAVHAEDTGPLDPRCSCDTCTHYSRAYLHHLHRSGEILGAMLLTEHNLAFYQQLMQAMRDAIGARQFAGFAADFRRDYLRK

SEQ ID NO: 59266 - protein, 378 aa, Porphyrobacter neustonensis
  misc_feature (1)..(378): tr|A0A192D6K8|A0A192D6K8_9SPHN Queuine tRNA-ribosyltran sferase OS=Porphyrobacter neustonensis OX=1112 GN=tgt P E=3 SV=1
MTLPRFSFTLHATSGKARTGVIQMQRGEIRTPAFMPVGTAATVKAMKPEAVRQTGADIILGNTYHLMLRPGAERVARLGGLHKFMNWDRPILTDSGGYQVMSLSELRKLTEQGVEFRSHIDGSKHMISPERSMEIQRLLGSDIVMAFDECPRADRPRDDIAASMELSMRWARRSREGFDSGAEHAARAALFGIQQGALHEDLRRISADKLTDIGFDGYAVGGLAVGEGQEAMFGVLDYAPDMLPADRPRYLMGVGKPDDLVGAVERGIDMFDCVLPTRSGRNGQAFTWNGPLNLRNARFAEDTGPLDDRCTCPVCTTYSRAYIHHLVKSGEMLGAMLVTEHNLSFYQALMAGMRTAIAAGTFAEFAATFRRDYLGSSA

SEQ ID NO: 59267 - protein, 378 aa, Porphyrobacter sanguineus
  misc_feature (1)..(378): tr|A0A1M7RSF2|A0A1M7RSF2_9SPHN Queuine tRNA-ribosyltran sferase OS=Porphyrobacter sanguineus OX=198312 GN=tgt P E=3 SV=1
MIAPRFSFTLHAVDGKARTGTIAMQRGEIRTPAFMPVGTAATVKAMKPESVRATGADIILGNTYHLMLRPGAERVARLGGLHDFMNWPRPILTDSGGYQVMSLSELRKLTEQGVEFRSHLDGSKHMLTPERSMEIQRLLGSDIVMAFDECPRADRPKDEIAASMELSMRWAKRSREGFDSGEEHAMRAALFGIQQGALHEDLRRISADALTDIGFDGYAVGGLAVGEGQEAMFGVLDYAPDMLPADRPRYLMGVGKPDDLVGAVERGIDMFDCVLPTRSGRNGQAFTWDGPLNLRNARFAEDTGPLDSRCTCPVCTTYSRAYIHHLVKSGEMLGAMLLTEHNLCFYQALMAAMRDAIAAGGFASFARTFRRDYLRQGA

SEQ ID NO: 59268 - protein, 377 aa, Porphyrobacter sp.
  misc_feature (1)..(377): tr|A0A0N1LAA8|A0A0N1LAA8_9SPHN Queuine tRNA-ribosyltran sferase OS=Porphyrobacter sp. AAP60 OX=1523423 GN=tgt P E=3 SV=1
MAPRFSFTLHATDGKARTGAIAMQCGEIRTPAFMPVGTAATVKAMKPEAVRQTGADIILGNTYHLMLRPGAERVARLGGLHKFMNWQRPILTDSGGYQVMSLSELRKLTEQGVEFRSHLDGSRHMLTPERSMEIQRLLGSDIVMAFDECPRADRSRDEIAASMELSMRWAKRSREGFDSGEDHAARAALFGIQQGALHEDLRRISADALTDIGFDGYAVGGLAVGEGQEAMFGVLDYAPDMLPVDRPRYLMGVGKPDDLVGAVERGIDMFDCVLPTRSGRNGQAFTWNGPLNLRNARFAEDTGPLDERCACPVCTTYSRAYIHHLVKSGEMLGAMLVTEHNLSFYQALMQGMRDAIAGGRFNDFAATFRRDYLGSSV

SEQ ID NO: 59269 - protein, 378 aa, Porphyrobacter sp.
  misc_feature (1)..(378): tr|A0A2L0GL12|A0A2L0GL12_9SPHN Queuine tRNA-ribosyltran sferase OS=Porphyrobacter sp. HT-58-2 OX=2023229 GN=tgt PE=3 SV=1
MTSPRFAFTLHATDGKARTGTIQMQRGEIRTPAFMPVGTAATVKAMKPEAVRQTGADIILGNTYHLMLRPGAERVARLGGLHRFMNWQRPILTDSGGYQVMSLSELRKLTEQGVEFRSHLDGSKHMLTPERSMEIQRLLGSDIVMAFDECPRADRPRDEIAASMELSMRWARRSREGFDAGEEHAARAALFGIQQGALHEDLRRISADKLVDVGFDGYAVGGLAVGEGQEAMFGVLDYAPDMLPADRPRYLMGVGKPDDLVGAVERGIDMFDCVLPTRSGRNGQAFTWNGPLNLRNARFAEDTGPLDERCTCPVCTTYSRAYIHHLVKSGEMLGAMLVTEHNLSFYQALMQGMRTAIAAGTFADFAATFRRDYLGSSD

SEQ ID NO: 59270 - protein, 376 aa, Porphyromonadaceae bacterium
  misc_feature (1)..(376): tr|A0A1I7GF67|A0A1I7GF67_9PORP Queuine tRNA-ribosyltran sferase OS=Porphyromonadaceae bacterium KHP3R9 OX=18553 98 GN=tgt PE=3 SV=1
MKFELQHTDPRSNARAGVITTDHGQIETPVFMPVGTIGSVKAVQMTELKEDIKAQIILGNTYHLYLRPGLKVLEGAGGLHRFNSWNRPILTDSGGFQVFSLAGNRKLTEEGAEFRSHIDGSKHFFTPEKVMDIQRTIGADIIMAFDECTPGDADYAYAKKSLDLTERWLKRCIDRFKETECPYGYRQTLFPIVQGCVFPDLRRRAAENVASLEADGNAIGGLAVGEPTEKMYEMVELVNEILPKDKPRYLMGVGTPANLLEAVERGVDMFDCIMPTRNGRNGQIFTKNGILNMRNERWKEDFSPIEEEGASFVDTLYSKAYLRHLINTNEILGLQIASVHNLAFYTWLMREARKHIIEGDFSSWKRIMVERTMQRL

SEQ ID NO: 59271 - protein, 376 aa, Porphyromonadaceae bacterium
  misc_feature (1)..(376): tr|A0A354X377|A0A354X377_9PORP Queuine tRNA-ribosyltran sferase OS=Porphyromonadaceae bacterium OX=2049046 GN=t gt PE=3 SV=1
MDFKLQHTDLQSKARAGIITTDHGVIETPIFMPVGTAGSVKAVHATELEDDIEAQIILGNTYHLYLRPGLDTLQQAGGLHRFNSWRKPILTDSGGFQVFSLAENRKLSEEGAEFRSHIDGSKHFFTPEKVIDIQRIIGADIMMAFDECTPGDAPYDYAKQSLELTERWLDRCLTRFRETECPHGYRQTLFPIVQGCVYPDLRKQAAENVASKGADGNAIGGLSVGESTEEMYEMIDIVNEILPEDKPRYLMGVGTPANMLEAIDRGVDMFDCIMPTRNGRNGQLFTKNGIMNMRNQKWKNDFSPIEEDGASFVDTRYSKAYLRHLFNTGEILALQIASIHNLAFYLWLVKEARRQILQNNFPAWKASMIDTIMRRL

SEQ ID NO: 59272 - protein, 376 aa, Porphyromonas asaccharolytica
  misc_feature (1)..(376): tr|F4KLG7|F4KLG7_PORAD Queuine tRNA-ribosyltransferase OS=Porphyromonas asaccharolytica (strain ATCC 25260 / D SM 20707 / BCRC 10618 / JCM 6326 / LMG 13178 / VPI 4198 ) OX=879243 GN=tgt PE=3 SV=1
MQFTIDHTCPHSDARTGVIKTDHGDIQTPVFMPVGTAGAIKAVTMEQMEQETDARIILGNTYHLYLRPGIEILKEVGGLHRFGTWSKPILTDSGGYQVFSLAAMRRITPEGVTFASHIDGSKHLFTPERVMEIERAIGADIMMAFDECCPGDASYAYAKQSLDTTEQWLDRCIKHLEHTPPLYGYEQALFPIVQGCVYPDLRRRAAEHIASLGAPGNAIGGLAVGEPTDKMYEMIELTNSILPKDKPRYLMGVGTPANILEGIARGVDMFDCIMPTRNARNGQLFTWQGTINIRNAKWRTCHEPIDPEGTASTDHRYTRAYLYHLFKAQEITGLTLASIHNIAFYLDLVNQAHDHIVAGDYTDWMRSVLPALTRRL

SEQ ID NO: 59273 - protein, 376 aa, Porphyromonas cangingivalis
  misc_feature (1)..(376): tr|A0A099WSD2|A0A099WSD2_PORCN Queuine tRNA-ribosyltran sferase OS=Porphyromonas cangingivalis OX=36874 GN=tgt PE=3 SV=1
MKFDIEATDSRSSARAGVLHTDHGDIHTPIFMPVGTVGSVKAVHMHEVKDDIGAEIILGNTYHLYLRPGVDVLKSAGGLHRFNSWNRPILTDSGGFQVFSLTHRRKMSEEGVVFRSHIDGSKHLFSPERVMDIERAIGADIMMAFDECTPGDADYRYAKESLALTERWLDRCFKRFNETEPLYGHSQSLFPIVQGCVYPDLRRQAAEKVAEYGADGNAIGGLSVGEPTEAMYDMIEVVNEVLPKDKPRYLMGVGTPANILEGIERGVDMFDCIMPTRNGRNGQLFTWQGTMNMRNAKWANDHSPLDPQGTSFVDHTYSRAYVRHLMVSQEILALQIASIHNLAFYLDLVRTARQHIIQGDFTQWKASVLPALSQRL

SEQ ID NO: 59274 - protein, 377 aa, Porphyromonas catoniae
  misc_feature (1)..(377): tr|L1NFQ4|L1NFQ4_9PORP Queuine tRNA-ribosyltransferase OS=Porphyromonas catoniae F0037 OX=1127696 GN=tgt PE=3 SV=1
MLKFDIHKTCSESAARAGRIETDHGEILTPIFMPVGTVGSVKAVHMTELRDDIRAQIILGNTYHLYLRPGLDILREAGGLHKFNSWDGSILTDSGGYQVFSLAHRRKITEEGVTFQSHIDGSRHLFTPERVMDIERTIGADIIMAFDECCPGDADIHYAKKSLALTEGWLRRCVNRIKETEPLYGYHQSLFPIVQGCVYPELRTRAAEFVSSLEAEGNAIGGLAVGEPTEKMYEMVELTNSILPKDKPRYLMGVGTPINLLENIARGVDMFDCIMPTRNGRNGQLFTSRGTINIRNAKWAREFSPIDPEGYSFVDSQYSLAYLHHLIRADELLGLQIASIHNLAFYLRLVREAREHILAGDFVAWKTKMVRQMDNRL

SEQ ID NO: 59275 - protein, 377 aa, Porphyromonas catoniae; identical to SEQ ID NO: 59274
  misc_feature (1)..(377): tr|Z4WQ99|Z4WQ99_9PORP Queuine tRNA-ribosyltransferase OS=Porphyromonas catoniae ATCC 51270 OX=887901 GN=tgt P E=3 SV=1

SEQ ID NO: 59276 - protein, 375 aa, Porphyromonas circumdentaria
  misc_feature (1)..(375): tr|A0A1T4LDE7|A0A1T4LDE7_9PORP Queuine tRNA-ribosyltran sferase OS=Porphyromonas circumdentaria OX=29524 GN=tgt PE=3 SV=1
MKYEILSQDPLSSARTGIITTDHGTVETPIFMPVGTAGAVKALTMEQVEATQAQIILGNTYHLYLRPGLDILHQAGGLHKFGTWKKPILTDSGGFQVYSLAHRRKITEEGVLFASHIDGSRHLFTPERVMEIERIIGADIIMAFDECCPGDASYKYALNSLNITERWLKRCWDYFSQSKPLYGYHQSLFPIVQGCVYPELRRRAAENIASLGADGNAIGGLAVGEPTEKMYEMIEVTNEILPKNKPRYLMGVGTPANLLEAIERGVDMFDCIMPTRNGRNGQLFTRNGVINIKNAKWKDCFEPIDAGGASPIDERYTLAYLHHLFKAEELTGLTLASIHNVSFYLWLMEEARKAIREERFTQWKASILPQLQKRL

SEQ ID NO: 59277 - protein, 376 aa, Porphyromonas crevioricanis
  misc_feature (1)..(376): tr|T1CQX3|T1CQX3_9PORP Queuine tRNA-ribosyltransferase OS=Porphyromonas crevioricanis JCM 15906 OX=1305617 GN= tgt PE=3 SV=1
MKYSLLHTCSTTQARVGLIRTDHGDIPTPIFMPVGTVGSVKAVEMSNLEDDIDAKIILGNTYHLYLRPGLDILQSAGGLHRFGTWSRPILSDSGGFQVFSLAENRKISEEGVWFRSHIDGSKHLFSPERVMDIERVIGADIIMAFDECCPGDADYGYARHSLDLTERWLKRCVDRIRDTEPLYGYSQSLFPIVQGCVYPDLRKRAAENVAAIEADGNAIGGLAVGEPTEKMYEMIELTNEILPKNKPRYLMGVGTPANILEGIARGVDMFDCIMPSRDGRNAKLFTWQGIINMKNAKWAKDFSPIDPEGTSYVDQRYSRAYLHHLFRVGEILALEVASRHNLAFYLELVRQARAHIVAGDYGSWYPMMAEQVSRRL

SEQ ID NO: 59278 - protein, 376 aa, Porphyromonas crevioricanis; identical to SEQ ID NO: 59277
  misc_feature (1)..(376): tr|A0A0A2G283|A0A0A2G283_9PORP Queuine tRNA-ribosyltran sferase OS=Porphyromonas crevioricanis OX=393921 GN=tgt PE=3 SV=1

SEQ ID NO: 59279 - protein, 375 aa, Porphyromonas endodontalis
  misc_feature (1)..(375): tr|C3J8U8|C3J8U8_POREA Queuine tRNA-ribosyltransferase OS=Porphyromonas endodontalis (strain ATCC 35406 / BCRC 14492 / JCM 8526 / NCTC 13058 / HG 370) OX=553175 GN=t gt PE=3 SV=1
MKYEVLRNDPKSAARLGRITTDHGVIETPIFMPVGTAGAVKALTMEQMETTGAQIILGNTYHLYLRPGLEVLRSAGGLHKFGTWQKPILTDSGGFQVFSLAHRRKITEEGVTFASHIDGSKHLFSPERVMDIERTIGADIIMAFDECCPGDAPYEYARQSLDITERWLERCRKRLAETEPLYGYQQSLFPIVQGCVYPDLRRRAAENITALGADGNAIGGLAVGEPTEKMYEMIELTNSILPLDKPRYLMGVGTPANLLEGIERGVDMFDCIMPTRNGRNGMLFTRHGTINIKNAKWRKCFEPIDHGGAHPMDERYTLAYLHHLFKAEELTGLTLASLHNVAFYLWLVGEARKALEEDRFTEWKAGILPELTRRL

SEQ ID NO: 59280 - protein, 376 aa, Porphyromonas gingivalis
  misc_feature (1)..(376): tr|A0A2D2NBG4|A0A2D2NBG4_PORGN Queuine tRNA-ribosyltran sferase OS=Porphyromonas gingivalis OX=837 GN=tgt PE=3 SV=1
MTFDLQYTCADCEARVGLLTTDHGPIETPIFMPVGTVGSVKAVHMHELEEDIRAQIILGNTYHLYLRPGLDVLKRAGGLHKFNSWERPLLTDSGGFQVFSLAENRKITEEGATFRSHIDGSKHLFSPERVMDIQRVIGADIIMAFDECCPGDADREYARRSMLLTGRWLERCLRRMRETEPLYGYEQQLFPIVQGCVYPDLRRRSAEMVAAVDAAGNAIGGLAVGEPTEKMYEMIELTNEILPKDRPRYLMGVGTPINILEAIDRGVDMFDCIMPTRNGRNGQLFTWHGTINIRNAKWADDYSPLDPDGTSYVDSRYSKAYLHHLIHTQEILGLQIASIHNLAFYLELVRQARKHIQIGDYRTWKTAMIRQLDNRL

SEQ ID NO: 59281 - protein, 376 aa, Porphyromonas gingivalis
  misc_feature (1)..(376): tr|A0A1R4DXN2|A0A1R4DXN2_PORGN Queuine tRNA-ribosyltran sferase OS=Porphyromonas gingivalis OX=837 GN=tgt PE=3 SV=1
MTFDLQYTCADCEARAGLLTTDHGPIETPIFMPVGTVGSVKAVHMHELEEDIRAQIILGNTYHLYLRPGLDVLKRAGGLHKFNSWERPLLTDSGGFQVFSLAENRKITEEGATFRSHIDGSKHLFSPERVMDIQRVIGADIIMAFDECCPGDADREYARRSMLLTGRWLERCLRRMRETEPLYGYEQQLFPIVQGCVYPDLRRRSAEMVAAVEAAGNAIGGLAVGEPTEKMYEMIELTNEILPKDRPRYLMGVGTPINILEAIDRGVDMFDCIMPTRNGRNGQLFTWHGTINIRNAKWADDYSPLDPDGTSYVDSRYSKAYLHHLIHTQEILGLQIASIHNLAFYLELVRQARKHIQIGDYRTWKTAMIRQLDNRL

SEQ ID NO: 59282 - protein, 375 aa, Porphyromonas gingivicanis
  misc_feature (1)..(375): tr|A0A0A2G6J0|A0A0A2G6J0_9PORP Queuine tRNA-ribosyltran sferase OS=Porphyromonas gingivicanis OX=266762 GN=tgt PE=3 SV=1
MKYEILAKDPLSSARTGLITTEHGTIETPIFMPVGTAGAVKALTMEQVEATQAQIILGNTYHLYLRPGLDILRQAGGLHQFGTWKKPILTDSGGFQVYSLAHRRKITEEGVTFASHIDGSRHLFTPERVMEIERIIGADIVMAFDECCPGDASYQYALNSLNITERWLNRCWEAFSHSEPLYGYQQSLFPIVQGCVYPDLRRRAAENIACLGADGNAIGGLAVGEPTEKMYEMIEVTNEILPEDKPRYLMGVGTPVNLLEAIERGVDMFDCIMPTRNGRNGQLFTRNGIINIKNAKWKDCFEPIELGGASSIDERYTLAYLHHLFKAEEITGLTLASIHNVSFYIKLMAEAREAIKKGQFTQWKTSMIPQLQKRL

SEQ ID NO: 59283 - protein, 376 aa, Porphyromonas gulae
  misc_feature (1)..(376): tr|A0A099WSF3|A0A099WSF3_9PORP Queuine tRNA-ribosyltran sferase OS=Porphyromonas gulae OX=111105 GN=tgt PE=3 SV =1
MTFDLQYTCADCEARAGLLTTDHGAIETPIFMPVGTVGSVKAVHMHELEEDIRAQIILGNTYHLYLRPGLDVLRRAGGLHKFNSWERPLLTDSGGFQVFSLAENRKITEEGATFRSHIDGSKHLFSPERVMDIQRVIGADIIMAFDECCPGDADREYARRSMLLTGRWLERCLRRMRETEPLYGYEQQLFPIVQGCVYPDLRRQSAEMVAAVGAAGNAIGGLAVGEPTEKMYEMIELTNGILPKDRPRYLMGVGTPINILEAIDRGVDMFDCIMPTRNGRNGQLFTWQGTINIRNAKWADDYSPLDPDGTSYVDSRYSKAYLHHLIHAQEILGLQIASIHNLAFYLELVRQARKHIQIGDYRTWKTAMVRQLDNRL

SEQ ID NO: 59284 - protein, 376 aa, Porphyromonas gulae
  misc_feature (1)..(376): tr|A0A0A2F8D4|A0A0A2F8D4_9PORP Queuine tRNA-ribosyltran sferase OS=Porphyromonas gulae OX=111105 GN=tgt PE=3 SV =1
MTFDLQYTCADCEARAGLLTTDHGTIETPIFMPVGTVGSVKAVHMHELEEDIRAQIILGNTYHLYLRPGLDVLRRAGGLHKFNSWERPLLTDSGGFQVFSLAENRKITEEGATFRSHIDGSKHLFSPERVMDIQRVIGADIIMAFDECCPGDADREYARRSMLLTGRWLERCLRRMRETEPLYGYEQQLFPIVQGCVYPDLRRQSAEMVAAVGAAGNAIGGLAVGEPTEKMYEMIELTNGILPKDRPRYLMGVGTPINILEAIDRGVDMFDCIMPTRNGRNGQLFTWQGTINIRNAKWADDYSPLDPDGTSYVDSRYSKAYLHHLIHTQEILGLQIASIHNLAFYLELVRQARKHIQIGDYRTWKTAMVRQLDNRL

SEQ ID NO: 59285 - protein, 376 aa, Porphyromonas levii
  misc_feature (1)..(376): tr|A0A4Y8WNJ5|A0A4Y8WNJ5_9PORP Queuine tRNA-ribosyltran sferase OS=Porphyromonas levii OX=28114 GN=tgt PE=3 SV= 1
MRFEIEHSDARSSARAGVLHTPHGEVHTPIFMPVGTVGTVKAVHAHELREDIKAEIILGNTYHLYLRPGTEIIKGAGGIQKFNSWNGPMLTDSGGFQVFSLAHRRKITEEGAEFQSHIDGSRHLFTPERVMDIQREIGADIIMAFDECPPGDCDRQYARTSLDLTMRWLKRCQNRLAETEPLYGYPQSLFPIVQGAGFADLRREAAERVAELGADGNAIGGLSVGEPTEVMYEMIEVVNEVLPKDKPRYLMGVGTPANILEGIERGVDMFDCIMPTRNGRNGQLFTWQGTMNMRNEKWKDDHTPLDPEGTSFVDHAYTKAYLRHLIRSEEILGLQIASIHNLAFYLELVRQARQHIIAGDYTEWKAGVLPQLQQRR

SEQ ID NO: 59286 - protein, 376 aa, Porphyromonas loveana
  misc_feature (1)..(376): tr|A0A2U1F7F7|A0A2U1F7F7_9PORP Queuine tRNA-ribosyltran sferase OS=Porphyromonas loveana OX=1884669 GN=tgt PE=3 SV=1
MTFDLQYTCADCEARAGVLTTDHGAIETPIFMPVGTVGSVKAVHMHELEEDIRAQIILGNTYHLYLRPGLDVLRRAGGLHRFNSWERPLLTDSGGFQVFSLAENRKITEEGVTFRSHIDGSKHLFSPESVMDIQRVIGADIIMAFDECCPGDADHDYARRSMLLTGRWLERCLKRMAETEPLYGHEQQLFPIVQGCVYPDLRRRSAEMVAAVGAAGNAIGGLAVGEPTDKMYEMIELTNTILPKDRPRYLMGVGTPINILEAIARGVDMFDCIMPTRNGRNGQLFTWHGTINIRNAKWADDYSPLDPEGTSYVDSRYSKAYLHHLIHTQELLGLQIASIHNLAFYLDLVRQAREHIRQGDYRSWKTAMVRQLDNRL

SEQ ID NO: 59287 - protein, 376 aa, Porphyromonas macacae
  misc_feature (1)..(376): tr|A0A379E975|A0A379E975_9PORP Queuine tRNA-ribosyltran sferase OS=Porphyromonas macacae OX=28115 GN=tgt PE=3 S V=1
MDFKIKTECRSTNARTGLITTDHGQIETPIFMPVGTVGSVKAVHMRELRDDIKAQIILGNTYHLYLRPGLDILKQAGGLHKFGGWTKPILTDSGGYQVFSLTDRRKITEEGVTFRSHIDGSKHLFTPERVMDVERVIGADIIMAFDECCPGDADYSYAAKSLKLTESWLDRCVKRIKETEPLYGYGQSLFPIVQGCVYPDLRKRAAENVASIGADGNAIGGLAVGEPTEKMYEMVELTNEILPKDKPRYLMGVGTPVNLLEGIARGVDMFDCIMPTRNGRNGQLFTRNGTINIKNTKWAKELTPIDPEGATWVDREYTLGYLHHLIKTQEILGLQIASIHNLGFYLSLMQEAREHIAAGTFGPWKDEMIYRLDKRL

SEQ ID NO: 59288 - protein, 376 aa, Porphyromonas macacae
  misc_feature (1)..(376): tr|A0A0A2E823|A0A0A2E823_9PORP Queuine tRNA-ribosyltran sferase OS=Porphyromonas macacae OX=28115 GN=tgt PE=3 S V=1
MDFKIKTECRSTNARTGLITTDHGQIETPIFMPVGTVGSVKAVHMRELRDDIKAQIILGNTYHLYLRPGLDILKQAGGLHKFGGWTKPILTDSGGYQVFSLTDRRKITEEGVTFRSHIDGSKHLFTPERVMDIERVIGADIIMAFDECCPGDADYSYAAKSLKLTESWLDRCVKRIKETEPLYGYGQSLFPIVQGCVYPDLRKRAAENVASIGADGNAIGGLAVGEPTEKMYEMVELTNEILPKDKPRYLMGVGTPVNLLEGIARGVDMFDCIMPTRNGRNGQLFTRNGTINIKNTKWAKELTPIDPEGATWVDREYTLGYLHHLIKTQEILGLQIASIHNLGFYLSLMQEAREHIAAGTFGPWKDEMIYRLDKRL

SEQ ID NO: 59289 - protein, 377 aa, Porphyromonas somerae
  misc_feature (1)..(377): tr|A0A134BAV8|A0A134BAV8_9PORP Queuine tRNA-ribosyltran sferase OS=Porphyromonas somerae OX=322095 GN=tgt PE=3 SV=1
MLKFDIHKTCTKTAARAGRIETDHGEILTPIFMPVGTVGSVKAVHMPELSDDIHAQIILGNTYHLYLRPGLDTLYKAGGLHKFNSWSGSILTDSGGYQVFSLAHRRKITEEGVTFRSHIDGSKHLFTPERVMDIERIIGADIIMAFDECCPGDADFHYAKKSLALTEDWLRRCVKRVNETDPHYGYHQSLFPIVQGCVYPELRTRAAEFVASLGAEGNAIGGLAVGEPTEKMYEMVELTNSILPKDKPRYLMGVGTPINLLENIARGVDMFDCIMPTRNGRNGQLFTSYGTINIRNAKWAQEFSPIDPEGTSFVDKQYSLAYLHHLIRADEILGLQIASIHNLAFYLRLVREAREHILAGDFSEWKDKMVRQLNNRL

SEQ ID NO: 59290 - protein, 377 aa, Porphyromonas sp.
  misc_feature (1)..(377): tr|A0A0A2DXR0|A0A0A2DXR0_9PORP Queuine tRNA-ribosyltran sferase OS=Porphyromonas sp. COT-239 OH1446 OX=1515613 GN=tgt PE=3 SV=1
MLTFKVQHNCMGTSARAGEITTDHGVIQTPIFMPVGTVGSVKAVHMTELREDIGAQIILGNTYHLYLRPGLEILREAGGLHRFNSWDGPILTDSGGYQVFSLAENRKITEEGVTFRSHIDGSKHLFSPERVMDIERVIGADIIMAFDECCPGDAPYEYAARSLALTERWLDRCISRVRETEPLYGYHQSLFPIVQGCVYPDLRARAAEHVASLGAEGNAIGGLAVGEPTEKMYEMVELTNSILPQDKPRYLMGVGTPINLLENIARGVDMFDCIMPTRNGRNGQLFTSRGTINIRNAKWAREFSPIDPEGTSFVDQQYTLAYLHHLIRADEILGLQIASIHNLAFYLRLVREAREHIISGDFASWKEQMVRSMSHRL

SEQ ID NO: 59291 - protein, 376 aa, Porphyromonas sp.; identical to SEQ ID NO: 58644
  misc_feature (1)..(376): tr|A0A073IC67|A0A073IC67_9PORP Queuine tRNA-ribosyltran sferase OS=Porphyromonas sp. 31_2 OX=658663 GN=tgt PE=3 SV=1

SEQ ID NO: 59292 - protein, 376 aa, Porphyromonas uenonis
  misc_feature (1)..(376): tr|C2M9H9|C2M9H9_9PORP Queuine tRNA-ribosyltransferase OS=Porphyromonas uenonis 60-3 OX=596327 GN=tgt PE=3 SV= 1
MQFTIDHTCPHSDARTGVIKTAHGDIQTPVFMPVGTAGAIKAVTMEQMEQETDARIILGNTYHLYLRPGIEILKEVGGLHRFGTWSKPILTDSGGYQVFSLAAMRRITPEGVTFASHIDGSKHLFTPERVMEIERAIGADIMMAFDECCPGDASYAYAKQSLDTTEQWLDRCLKHLEQTPPLYGYEQALFPIVQGCVYPDLRRRAAEHIASLGAPGNAIGGLAVGEPTDKMYEMIELTNSILPKDKPRYLMGVGTPANILEGIARGVDMFDCIMPTRNARNGQLFTWQGTINIRNAKWRTCHEPIDPEGTASTDHRYTRAYLYHLFKAQEITGLTLASIHNIAFYLDLVNQAHDHIIAGDYPDWMRSVLPALARRL

SEQ ID NO: 59293 - protein, 373 aa, Porticoccaceae bacterium
  misc_feature (1)..(373): tr|A0A351NXY7|A0A351NXY7_9GAMM Queuine tRNA-ribosyltran sferase OS=Porticoccaceae bacterium OX=2026782 GN=tgt P E=3 SV=1
MKFNLLATDGKARRGEMSFPRGTVQTPAFMPVGTYGTVKGMLPKDITEIGAEMILGNTFHLMLRPGTEVIKAHGDLHDFIQWQGPILTDSGGFQVFSLGDMRKITEKGVKFKSPIDGSPVFIDPETSMQVQRDLGSDVVMIFDECTPYPATEKEAEVSMQLSLRWAQRSKDAHRGNPSALFGIVQGGMYESLRNVSLAGLVDIDFDGYAIGGLSVGEPKDDMIRILDHLADNMPADKPRYLMGVGKPADLVEGVRRGIDMFDCVMPTRNARNGHLFTSTGVIKIRNAKHRHDTSPLDSECDCYTCLNFSRGYLHHLEKCGEMLSAQLNTIHNLRFYQNLMAGLREAIAIGRLDEFADEFYRKQSIADGRGLNT

SEQ ID NO: 59294 - protein, 369 aa, Porticoccaceae bacterium
  misc_feature (1)..(369): tr|A0A2D4QRC6|A0A2D4QRC6_9GAMM Queuine tRNA-ribosyltran sferase OS=Porticoccaceae bacterium OX=2026782 GN=tgt P E=3 SV=1
MEFSVIATDGPARLGKLQFPRGAVQTPAFMPVGTYGTVKGMPPKNIAEVGAEIILGNAFHLMLRPGVEVIKSHGGLHQFMNWPGPILTDSGGFQVFSLGAMRNISEDGVKFRSPIDGSEIFIKPEISTEIQRDLDSDIVMIFDDCTPYKASKREVAESMRLSLTWAELCKIAHGNSSAALFGIVQGGMHENLRDESLSELSKIEFDGYAIGGLSVGEPKADMFRILNHVGKQMPANKPRYLMGVGKPGDLVQAVLKGIDMFDCVMPTRNARNGHLFTHDGVIKIRNARYRFDMSPLDNECDCYTCTNFSRSYLHHLDKCGEILGAQLNTIHNLRYYQKLMSDIRKAIELGKLEAFAANFFSEENEFKTS

SEQ ID NO: 59295 - protein, 369 aa, Porticoccus sp.
  misc_feature (1)..(369): tr|A0A2G2QRW7|A0A2G2QRW7_9GAMM Queuine tRNA-ribosyltran sferase OS=Porticoccus sp. OX=2024853 GN=tgt PE=3 SV=1
MSFEVACRDGEARRGRMTFPRGTVETPAFMPVGTCGTVKGMLPRDVAATGAQILLGNTFHLMLRPGTDVVMEHGGLHEFMHWPGPILTDSGGFQVFSLGAISKISEQGVAFRSPIDGSDVFLDPETSIRVQQQLGADVVMIFDECTPYPATEQQARASMELSQRWAKRSKDAHGDNPSALFGIVQGGMYEDLRDASLAGLESIGFDGYAIGGLSVGEPKEDMLRILDYLPPKMPQDRPRYLMGVGKPQDILEAVRRGIDMFDCVMPTRNARNGHLFTSAGVVKIRNAVHRHDTRPLDANCDCYTCQNFSRAYLHHLEKCGEILGAQLNTLHNLRYYQTLMTHIRQAITDGDLDEFAVRFYAQQGLELPA

SEQ ID NO: 59296 - protein, 257 aa, Porticoccus sp.
  misc_feature (1)..(257): tr|A0A2D5QFY9|A0A2D5QFY9_9GAMM Queuine tRNA-ribosyltran sferase (Fragment) OS=Porticoccus sp. OX=2024853 GN=CMK 44_04595 PE=3 SV=1
MRFELDIQDGSARTGSLKFPRGIVDTPTFMPVGTSGTVKAILPKDLQETGAQIILGNTFHLMLRPGTDVIKSHGGLHNFMHWEGPILTDSGGFQVYSLGTIRKISEKGVSFRSPIDGSHIFLDPETSIQVQEDLGADIVMIFDDCTPYPASKRDAHESMQLSLRWAKRSKVQHGVSNSALFGIIQGGMYEELREISLKSLEKIGFDGYAIGGLSVGEPKEDMLRILKSTTPKMPEDKPRYLMGVGKPWAILEAVKSG

SEQ ID NO: 59297 - protein, 376 aa, Poseidonocella pacifica
  misc_feature (1)..(376): tr|A0A1I0VQC2|A0A1I0VQC2_9RHOB Queuine tRNA-ribosyltran sferase OS=Poseidonocella pacifica OX=871651 GN=tgt PE= 3 SV=1
MAQGCTFERTGQDGKARTGVISTPRGDIRTPAFMPVGTTATVKAMMPESVRATGADILLGNTYHLMLRPGAERIHRLGGLHRFMNWDRPILTDSGGFQVMSLAELRKLTEKGVTFRSHIDGSRHELTPESSMEVQRLLGSDIVMAFDECPALPADRDRIASSMQLSMRWAARSREAFGDRPGHMLFGIQQGGLEQDFREESAKALREIGFDGYAVGGLAVGEGQEAMFSTLDFAPDMLPEDKPRYLMGVGKPDDIVGAVKRGIDMMDCVLPSRSGRTGQVFTRHGVVNIKNARHSDDPRPLDEACGCPACRGYSRAYLHHVFRAGEMISGMLLTWHNLHYFQDLMAGMRAAIADGRFAQFEAEFHSQRADGDIPQL

SEQ ID NO: 59298 - protein, 376 aa, Poseidonocella sedimentorum
  misc_feature (1)..(376): tr|A0A1I6EHN7|A0A1I6EHN7_9RHOB Queuine tRNA-ribosyltran sferase OS=Poseidonocella sedimentorum OX=871652 GN=tgt PE=3 SV=1
MADGCTFERTAQDGKARLGRITTPRGEIRTPAFMPVGTAATVKAMLPESVRATGADILLGNTYHLMLRPGAERIHNLGGLHRFMNWDRPILTDSGGFQVMSLAELRKLTETGVTFRSHIDGSKHELTPESSMEIQRLLGSDIVMAFDECPALPADRDRIAESMRLSMRWADRSREAFGDRPGHMLFGIQQGGLEQDFREESAEALRGIGFDGYAVGGLAVGEGQEAMFATLDFAPDMLPEDKPRYLMGVGKPDDIVGAVKRGIDMMDCVLPSRSGRTGQAWTRRGQVNIKNARHADDPRPLDESCSCPACSGYSRAYLHHVFRSGEMISGMLLTWHNLHYFQELMGEMRAAIAAGQFEAFEARFHAARAEGDIPQL

SEQ ID NO: 59299 - protein, 379 aa, Pradoshia eiseniae
  misc_feature (1)..(379): tr|A0A2S7N312|A0A2S7N312_9BACI Queuine tRNA-ribosyltran sferase OS=Pradoshia eiseniae OX=2064768 GN=tgt PE=3 SV =1
MTAIRYELIKTCKQTGARLGRVHTPHGSFDTPAFMPVGTLATVKTMSPEELKEMGANIILGNTYHLWLRPGTEVIKAAGGLHKFMNWDRAILTDSGGFQVFSLSEFRKIEEEGVHFRNHLNGDKLFLSPEKAMEIQNILGSDIMMAFDECPPYPAEYDYMKKSVERTSRWAERCLKAHARPQDQGLFGIVQGGEYEDLRRQSAEDLVSLDFPGYAVGGLSVGEPKDVMNRTLEFTTPYLPTDKPRYLMGVGSPDSLIDGAIRGIDMFDCVLPTRIARNGTLMTSEGRLVVKNAKYALDFGPLDPNCDCHVCQNYSRAYIRHLIRCDETFGIRLTSYHNLYFLLKLMEQVRQAIMEDRLGDFREEFFEKYGFNKPNAKNF

SEQ ID NO: 59300 - protein, 379 aa, Pradoshia sp.
  misc_feature (1)..(379): tr|A0A5J6XPQ1|A0A5J6XPQ1_9BACI tRNA guanosine(34) trans glycosylase Tgt OS=Pradoshia sp. D12 OX=2651284 GN=tgt PE=4 SV=1
MTAIRYELIKTCKQTGARLGRVHTPHGTFETPAFMPVGTLATVKTMSPEELKQMGANIILGNTYHLWLRPGTEVIKAAGGLHKFMNWDRAILTDSGGFQVFSLSQFRKIEEEGVHFRNHLNGDKLFLSPEKAMEIQNILGSDIMMAFDECPPYPATHEYMKKSVERTSRWAERCLNAHERPNDQGLFGIVQGGEYEDLRRQSASDLVSLDFPGYAIGGLSVGEPKDVMNRALEFTTPLLPSNKPRYLMGVGSPDSLIDGAIRGVDMFDCVLPTRIARNGTLMTSEGRLVVKNAKYSMDFGPLDPNCDCHVCKAYSRAYIRHLIRCDETFGIRLTSYHNLYFLLNLMEQVRQAIREDRLGDFREEFFENYGFNKPNAKNF

SEQ ID NO: 59301 - protein, 374 aa, Pragia fontium
  misc_feature (1)..(374): tr|A0A0G3CLA4|A0A0G3CLA4_9GAMM Queuine tRNA-ribosyltran sferase OS=Pragia fontium OX=82985 GN=tgt PE=3 SV=1
MKFELQTKDGRARRGRLIFERGVVETPAFMPVGTYGTVKGMTPEEVKDTGAQIILGNTFHLWLRPGQEIMRQHGDLHDFMNWHGPILTDSGGFQVFSLGDIRKITEEGVNFRNPINGDAIFLSPEKSMEIQYDLGSDIVMIFDECTPYPADWDYAKRSMEMSLRWAKRSRDRFDELNNNNALFGIIQGSVYPDLRDISVKGLVEIGFDGYAVGGLAVGEPKEDMHRILEHVCPQIPEDKPRYLMGVGKPEDLVEGVRRGIDMFDCVMPTRNARNGHLFVTDGVVKIRNAKYKDDTAALDEHCDCYTCRNYSRAYLHHLDRCNEILGARLNTIHNLRYYQRLMAGLREAIEQGTLEQFVSDFYGRIGKTIPPLAN

SEQ ID NO: 59302 - protein, 374 aa, Pragia sp.
  misc_feature (1)..(374): tr|A0A411WHD9|A0A411WHD9_9GAMM Queuine tRNA-ribosyltran sferase OS=Pragia sp. CF-458 OX=2498113 GN=tgt PE=3 SV= 1
MKFELQTKDGRARRGRLVFERGTVETPAFMPVGTYGTVKGMTPEEVKDTGAQIILGNTFHLWLRPGQEIMRKHGDLHDFMQWHGPILTDSGGFQVFSLGDIRKITEEGVNFRNPINGDSIFLSPEKSMEIQYDLGSDIVMIFDECTPYPADWDYAKRSMEMSLRWAKRSRQRFDELNNKNALFGIIQGSVYEDLRDVSVKGLVEIGFDGYAVGGLAVGEPKEDMHRILEHVCPQIPEDKPRYLMGVGKPEDLVEGVRRGIDMFDCVMPTRNARNGHLFVTDGVVKIRNAKHKDDTATLDEHCDCYTCRHYSRAYLHHLDRCNEILGARLNTIHNLRYYQRLMAGLREAIEQGTLERFVTDFYERIGKAVPPLVK

SEQ ID NO: 59303 - protein, 375 aa, Prevotella aff.
  misc_feature (1)..(375): tr|A0A1I0M2T6|A0A1I0M2T6_9BACT Queuine tRNA-ribosyltran sferase OS=Prevotella aff. ruminicola Tc2-24 OX=81582 G N=tgt PE=3 SV=1
MTFEVQYRDNASDARAGLIQTAHGPIQTPIFMPVGTAGTVKGVHFSELRDQVKAQIILGNTYHLYLRPGLDILKKAGGLHQFNTWDRPILTDSGGFQVFSLTGIRKLREEGCEFRSHIDGSKHFFTPENVMDTERAIGADIMMAFDECPPGQSDYQYAKNSLHLTQRWLERCVKRFRETEPLYGYEQSLFPIVQGCTYKDLRREAAKHVADIGADGNAIGGLAVGEPTEVMYEMIEVVNEILPKDKPRYLMGVGTPQNILEGIERGVDMFDCVMPTRNGRNAMLFTYEGTMNMRNKKWEDDFSPIDPEGCEIDRIHTKAYLHHLFKAQELLAMQIASIHNLAFYLRLVTDARQHIIAGDFVQWKRSVIEQLGKRR

SEQ ID NO: 59304 - protein, 375 aa, Prevotella amnii
  misc_feature (1)..(375): tr|A0A096AX22|A0A096AX22_9BACT Queuine tRNA-ribosyltran sferase OS=Prevotella amnii DNF00058 OX=1401066 GN=tgt PE=3 SV=1
MKFELQHTDPASDARTGIITTDHGEIKTPIFMPVGTVGSVKGVHFEELRKQVKAQIILGNTYHLYLRPGLEILKAAGGLHKFNGWERPILTDSGGFQVFSLTGIRKLSEEGCEFRSHIDGSKHIFTPESVMNTERVIGADIIMAFDECPPGKSSYEYAKKSLGLTQRWLDRCIKQLEKTSPLYGYNQSLFPIVQGCTYKDLRSEAAKFVADKGADGNAIGGLAVGEPTEVMYEMIEVVNNILPKDKPRYLMGVGTPQNILEAIERGVDMFDCVMPTRNGRNSMLFTYNGTMNMRNKKWEADFSPIDIDGCDIDIITTKAYLHHLFKAGELLAMQIASIHNLAFYLRLVSDARKHIEKGDFTMWKSSVIEQLGRRI

SEQ ID NO: 59305 - protein, 375 aa, Prevotella amnii; identical to SEQ ID NO: 59304
  misc_feature (1)..(375): tr|A0A134B2G1|A0A134B2G1_9BACT Queuine tRNA-ribosyltran sferase OS=Prevotella amnii OX=419005 GN=tgt PE=3 SV=1

SEQ ID NO: 59306 - protein, 375 aa, Prevotella baroniae
  misc_feature (1)..(375): tr|U2NR06|U2NR06_9BACT Queuine tRNA-ribosyltransferase OS=Prevotella baroniae F0067 OX=1115809 GN=tgt PE=3 SV= 1
MKFELQHTDNASDARTGLITTDHGQIKTPVFMPVGTCGTVKGVHFSELRQQVEAQIILGNTYHLYLRPGLEVLRKAGGLHRFNSWDRPILTDSGGFQVFSLSGIRKLKEEGCEFRSHIDGSKHFFTPENVMDTERVIGADIMMAFDECPPGQSDYGYAKNSLKLTQRWLDRCIKRCAETEPLYGYHQSLFPIVQGCTYKDLRQEAAKFVADKGADGNAIGGLAVGEPTEVMYDMIEVVNGILPKDKPRYLMGVGTPQNILEAIERGVDMFDCVMPTRNGRNAMLFTYNGTMNMRNKKWEEDFSPIDPDGCDIDLVHTKAYLHHLFKAQEYLALQIASIHNLAFYLRLVTDARQHIEAGDFVQWKASIIDQLGQRI

SEQ ID NO: 59307 - protein, 388 aa, Prevotella bergensis
  misc_feature (1)..(388): tr|D1PYZ9|D1PYZ9_9BACT Queuine tRNA-ribosyltransferase OS=Prevotella bergensis DSM 17361 OX=585502 GN=tgt PE=3 SV=1
MPKRRIKKTRGLPMTFELQHTDPCSNARTGLIMTDHGPIKTPIFMPVGTCASVKGVHFEELRHQVNAQIILGNTYHLYLRPGLDILEKAGGLHGFNGWERPILTDSGGFQVFSLTGIRKLREEGCEFRSHIDGSKHFFTPENVMDTQRVIGADIMMAFDECPPGQSDYSYAKNSLALTERWLNRCIKRFNETEPRYGYQQSLFPIVQGCTYKDLRQEAAKFVADKGADGNAIGGLAVGEPTEVMYEMIEVVNDILPKDKPRYLMGVGTPQNILEAIERGVDMFDCVMPTRNGRNAMLFTYNGTMNMRNKKWEADFSPIDAEGCYIDRIHTKAYLHHLFKAGELLAMQIASIHNLAFYLRLVTDARQHIEQGDFVQWKRSIIDQLGQRI

SEQ ID NO: 59308 - protein, 375 aa, Prevotella bivia
  misc_feature (1)..(375): tr|A0A096AC86|A0A096AC86_9BACT Queuine tRNA-ribosyltran sferase OS=Prevotella bivia DNF00320 OX=1401068 GN=tgt PE=3 SV=1
MKFELQHTDAASNARAGIITTDHGQIKTPIFMPVGTVGSVKGVHFEELRKQVKAQIILGNTYHLYLRPGLDILKSAGGLHKFNGWERPILTDSGGFQVFSLTGIRKLSEEGCEFRSHIDGSKHFFTPEGVMDTERIIGADIIMAFDECPPGKSSYEYAKNSLGLTQRWLDRCIKRLDETAPLYGYSQSLFPIVQGCTYKDLRQEAAKFVADKGADGNAIGGLAVGEPTEVMYEMIEVVNEILPKGKPRYLMGVGTPQNILEAIERGVDMFDCVMPTRNGRNAMLFTYNGTMNMRNKKWEADFSPIDPDGCDIDVITTKAYLHHLFKAGELLAMQIASIHNLAFYLRLVTDARQHIEAGDFVQWKTSIIEQLGRRI

SEQ ID NO: 59309 - protein, 375 aa, Prevotella bivia
  misc_feature (1)..(375): tr|A0A137SZQ7|A0A137SZQ7_9BACT Queuine tRNA-ribosyltran sferase OS=Prevotella bivia OX=28125 GN=tgt PE=3 SV=1
MKFELQHTDAASNARAGIITTDHGQIKTPIFMPVGTVGSVKGVHFEELRKQVKAQIILGNTYHLYLRPGLDILKSAGGLHKFNGWERPILTDSGGFQVFSLTGIRKLSEEGCEFRSHIDGSKHFFTPESVMDTERIIGADIIMAFDECPPGKSSYEYAKNSLGLTQRWLDRCIKRLDETAPLYGYSQSLFPIVQGCTYKDLRQEAAKFVADKGADGNAIGGLAVGEPTEVMYEMIEVVNEILPKDKPRYLMGVGTPQNILEAIERGVDMFDCVMPTRNGRNAMLFTYNGTMNMRNKKWEADFSPVDPDGCDIDVITTKAYLHHLFKAGELLAMQIASIHNLAFYLRLVTDARQHIEAGDFVQWKTSIIEQLGRRI

SEQ ID NO: 59310 - protein, 375 aa, Prevotella bryantii
  misc_feature (1)..(375): tr|D8DY54|D8DY54_PREBR Queuine tRNA-ribosyltransferase OS=Prevotella bryantii B14 OX=752555 GN=tgt PE=3 SV=1
MKFELQHTDSASDARTGIITTDHGQIKTPIFMPVGTVGTVKGVHFNELKEQVKAQIILGNTYHLYLRPGLDVLRKAGGLHKFNGWDRPILTDSGGFQVFSLTGIRKLSEEGCEFRSHIDGSKHFFTPENVMDTERIIGADIMMAFDECPPGKSDYQYAKKSLEMTQRWLDRCIKRFNETEPLYGYNQSLFPIVQGCTYKDLRQEAAKYIADKGADGNAIGGLAVGEPTEIMYEMIEVVNEILPKDKPRYLMGVGTPQNLLEGIERGVDMFDCVMPTRNGRNAMLFTYNGTMNMRNKKWEDDFSPVDPDGCEIDRITTKAYLHHLFKAQELLAMQIASIHNLSFYLRLVTDARHHIEQGDFVTWKRSIIDQLGRRI

SEQ ID NO: 59311 - protein, 375 aa, Prevotella bryantii; identical to SEQ ID NO: 59310
  misc_feature (1)..(375): tr|A0A255SKX3|A0A255SKX3_PREBR Queuine tRNA-ribosyltran sferase OS=Prevotella bryantii OX=77095 GN=tgt PE=3 SV= 1

SEQ ID NO: 59312 - protein, 375 aa, Prevotella buccae
  misc_feature (1)..(375): tr|D3I0X9|D3I0X9_9BACT Queuine tRNA-ribosyltransferase OS=Prevotella buccae D17 OX=575611 GN=tgt PE=3 SV=1
MTFELQHTDPSSDARAGIITTDHGPIKTPIFMPVGTCGSVKGVHFSELREQVKAQIILGNTYHLYLRPGLDVLRKAGGLHGFNGWERPILTDSGGFQVFSLTGIRKLREEGCEFRSHIDGSKHFFTPENVMDTERVIGADIMMAFDECPPGQSDYRYAKESLALTQRWLDRCIKRFNETEPLYGHRQSLFPIVQGCTYKDLREEAAKFVADKGADGNAIGGLAVGEPTEVMYEMIEVVNGILPKDKPRYLMGVGTPQNILEAIERGVDMFDCVMPTRNGRNAMLFTYEGTMNMRNKKWEDDFSPVDPDGCDIDRITTKAYLHHLFKAQELLAMQIASIHNLAFYLRLVGDARRHIEQGDFARWKAGIISQLGRRV

SEQ ID NO: 59313 - protein, 375 aa, Prevotella buccae; identical to SEQ ID NO: 59312
  misc_feature (1)..(375): tr|E6KA94|E6KA94_9BACT Queuine tRNA-ribosyltransferase OS=Prevotella buccae ATCC 33574 OX=873513 GN=tgt PE=3 S V=1

SEQ ID NO: 59314 - protein, 375 aa, Prevotella buccalis
  misc_feature (1)..(375): tr|A0A2N6QR73|A0A2N6QR73_9BACT Queuine tRNA-ribosyltran sferase OS=Prevotella buccalis OX=28127 GN=tgt PE=3 SV= 1
MTFELQHTDPSSDARAGLITTAHGQIKTPIFMPVGTAGTVKAVHFSELKEQINAQIILGNTYHLYLRPGLDILKAAGGLHKFNGWDRPILTDSGGFQVFSLTGIRKLREEGCEFRSHIDGSKHFFSPESVMDTERIIGADIMMAFDECPPGDCDYQYAKTSLAMTHRWLDRCIKRFNETQPLYGYDQCLFPIVQGAAYKDLREESAKYIADKGADGNAIGGLAVGEPTEVMYEMIEVVNAILPKDKPRYLMGVGTPQNILEGIERGVDMFDCVMPTRNGRNAMLFTYEGTMNMRNKKWENDFTPIDPNGCDTDQLCTKAYLHHLFKAKEYLALQIASIHNLAFYLRLVTDARQHIQQGDFSTWKRGIIEQLGRRI

SEQ ID NO: 59315 - protein, 375 aa, Prevotella buccalis
  misc_feature (1)..(375): tr|A0A095ZPK4|A0A095ZPK4_9BACT Queuine tRNA-ribosyltran sferase OS=Prevotella buccalis DNF00853 OX=1401074 GN=t gt PE=3 SV=1
MTFELQHTDPSSDARAGLITTAHGQIKTPIFMPVGTAGTVKAVHFRELKEQINAQIILGNTYHLYLRPGLDILKAAGGLHKFNGWDRPILTDSGGFQVFSLTGIRKLREEGCEFRSHIDGSKHFFSPESVMDTERIIGADIMMAFDECPPGDCDYQYAKTSLAMTHRWLDRCVKRFNETQPLYGYDQCLFPIVQGAAYKDLREESAKYIADKGADGNAIGGLAVGEPTEVMYEMIEVVNAILPKDKPRYLMGVGTPQNILEGIERGVDMFDCVMPTRNGRNAMLFTYEGTMNMRNKKWENDFTPIDPNGCDTDQLCTKAYLHHLFKAQEYLALQIASIHNLAFYLRLVTDARQHIQQGDFSTWKRGIIEQLGRRI

SEQ ID NO: 59316 - protein, 375 aa, Prevotella colorans
  misc_feature (1)..(375): tr|A0A2U0ULM5|A0A2U0ULM5_9BACT Queuine tRNA-ribosyltran sferase OS=Prevotella colorans OX=1703337 GN=tgt PE=3 S V=1
MRFELQYTDPNSDARTGLIKTDHGCVKTPIFMPVGTCGCVKAVHFSELREQVNAQIILGNTYHLYLRPGLDILRKAGGLHGFNGWERPILTDSGGFQVFSLTGIRKLREEGCEFRSHIDGSKHFFTPENVMDTERVIGADIMMAFDECPPGQSDYAYAKKSLALTERWLDRCIKRFNETEALYGYSQSLFPIVQGCTYKDLRQEAAKYVADKGADGNAIGGLAVGEPTEVMYEMIEVVNEILPKDKPRYLMGVGTPSNILEAIERGVDMFDCVMPTRNGRNAMLFTYDGTMNLRNKKWENDFTPIDANGCDVDRVYTKAYLHHLFKAGEFLAMQIASIHNLAFYLRLVTDARRHIEQGDFVQWKKSVVDQLGKRV

SEQ ID NO: 59317 - protein, 375 aa, Prevotella copri
  misc_feature (1)..(375): tr|D1PGS5|D1PGS5_9BACT Queuine tRNA-ribosyltransferase OS=Prevotella copri DSM 18205 OX=537011 GN=tgt PE=3 SV= 1
MKFELQVTDKASDARTGIITTDHGQIKTPIFMPVGTVGSVKGVHFEELKKQVMAQIILGNTYHLYLRPGLDVIRAAGGLHKFNGWDRPILTDSGGFQVFSLTGIRKLKEEGCEFRSHIDGSKHFFTPENVMDTERIIGADIMMAFDECPPGQSDYQYAKNSLMLTQRWLDRCIKRFNETEPLYGYQQSLFPIVQGCTFPDLRREAAKYIADKGADGNAIGGLAVGEPTEVMYEMIEVVNEILPKDKPRYLMGVGTPQNILEAIERGVDMFDCVMPTRNGRNAMLFTYQGTMNMRNKKWEKDFSPVDPDGCDIDLVTTKAYLHHLFKAQELLAMQIASIHNLSFYLRLVTDARHHIEQGDFVAWKNSIIDQLGRRI

SEQ ID NO: 59318 - protein, 375 aa, Prevotella copri; identical to SEQ ID NO: 59317
  misc_feature (1)..(375): tr|A0A3E4SCM6|A0A3E4SCM6_9BACT Queuine tRNA-ribosyltran sferase OS=Prevotella copri OX=165179 GN=tgt PE=3 SV=1

SEQ ID NO: 59319 - protein, 375 aa, Prevotella corporis
  misc_feature (1)..(375): tr|A0A133QD76|A0A133QD76_9BACT Queuine tRNA-ribosyltran sferase OS=Prevotella corporis OX=28128 GN=tgt PE=3 SV= 1
MKFELQHTDSCSDARTGIITTEHGQIKTPIFMPVGTAGTVKGVHFSELVNQVKAQIILGNTYHLYLRPGLEILKQAGGLHKFNGWNKPILTDSGGFQVFSLTGIRKLSEEGCEFRSHIDGSKHFFTPESVMDTERIIGADIMMAFDECPPGNSNYDYAKQSLMLTQRWLDRCIKRFNETEPLYGYKQSLFPIVQGCTYKDLRTEAAQFVADKGADGNAIGGLAVGEPTEVMYEMIEVVNGILPKDKPRYLMGVGTPQNILEGIERGVDMFDCVMPSRNGRNAMLFTYDGTMNMRNKKWEMDFSPIDPNGCKIDRITTKAYLHHLFKAGELLAMQIASIHNLSFYLRLVNDAQKHIEQDDFTNWKSSVIEQLGRRI

SEQ ID NO: 59320 - protein, 375 aa, Prevotella dentalis
  misc_feature (1)..(375): tr|F9D1C5|F9D1C5_PREDD Queuine tRNA-ribosyltransferase OS=Prevotella dentalis (strain ATCC 49559 / DSM 3688 / JCM 13448 / NCTC 12043 / ES 2772) OX=908937 GN=tgt PE=3 SV=1
MTFELQHTDKGSDARTGLITTAHGQIKTPIFMPVGTCGSVKGVHFSELREQVKAQIILGNTYHLYLRPGLEVLRAAGGLHGFNGWERPILTDSGGFQVFSLTGIRKLREEGCEFRSHIDGSKHIFTPENVMDTERVIGADIMMALDECPPGQSDYAYAKRSLAMTQRWLDRCIRRFDETEPLYGYQQNLFPIVQGCTFKDLRREAAKFVADKGAEGNAIGGLAVGEPTEVMYEMIEVVNEILPKDKPRYLMGVGTPQNILEAIERGVDMFDCVMPTRNGRNAMLFTYEGTMNMRNKKWEMDFSPIDSDGCDTDRIYTKAYLHHLFKAQELLAMQIASIHNLAFYLRLVGDARQHIEQGDFVQWKASVVDRLGQRI

SEQ ID NO: 59321 - protein, 375 aa, Prevotella denticola
  misc_feature (1)..(375): tr|A0A095ZW72|A0A095ZW72_9BACT Queuine tRNA-ribosyltran sferase OS=Prevotella denticola DNF00960 OX=1401077 GN= tgt PE=3 SV=1
MTFELQHTDNASDARTGVITTDHGQIRTPIFMPVGTVGSVKGVHFEELRRQVKAQIILGNTYHLYLRPGLDILRAAGGLHGFNGWDRPILTDSGGFQVFSLTGIRKLTEEGCEFRSHIDGSRHIFTPENVMDTERVIGADIMMALDECPPGRSDYAYAKKSLGLTQRWLDRCIRRFNETEPLYGYKQSLFPIVQGCTYKDLRCEAAKFVADKGADGNAIGGLAVGEPTEVMYEMIEVVNEILPKDKPRYLMGVGTPQNILEAIERGVDMFDCVMPTRNGRNAMLFTYDGTMNMKNKKWEDDFSPIDPEGCDVDLITSKAYLHHLFKAGELLAMQIASIHNLAFYLRLVTDARTHIEQGDFVQWKASVIEQLGRRI

SEQ ID NO: 59322 - protein, 375 aa, Prevotella denticola; identical to SEQ ID NO: 59321
  misc_feature (1)..(375): tr|F2KTM0|F2KTM0_PREDF Queuine tRNA-ribosyltransferase OS=Prevotella denticola (strain F0289) OX=767031 GN=tgt PE=3 SV=1

SEQ ID NO: 59323 - protein, 375 aa, Prevotella disiens
  misc_feature (1)..(375): tr|A0A3E4QJV3|A0A3E4QJV3_9BACT Queuine tRNA-ribosyltran sferase OS=Prevotella disiens OX=28130 GN=tgt PE=3 SV=1
MTFELQCTDNASDARTGIITTDHGQIKTPIFMPVGTAGTVKGVHFSELVEQVKAQIILGNTYHLYLRPGLEVLKAAGGLHKFNGWNRPILTDSGGFQVFSLTGIRKLSEEGCQFRSHIDGSKHIFTPENVMDTQRVIGADIIMAFDECPPGNSDYEYSKRSLGLTQRWLDRCIKRFNETEPLYGYKQSLFPIVQGCTYKDLRTEAAKFVADKGADGNAIGGLAVGEPTEVMYEMIEHVNAILPKDKPRYLMGVGTPQNILEGIERGVDMFDCVMPTRNGRNAMLFTYEGTMNMRNKKWEKDFSPVDADGCDIDVITSKAYLHHLFKAGELLAMQIASIHNIAFYLRLVTDARKHIEQGDFVTWKASIIEKLGRRL

SEQ ID NO: 59324 - protein, 375 aa, Prevotella disiens
  misc_feature (1)..(375): tr|U2JFZ2|U2JFZ2_9BACT Queuine tRNA-ribosyltransferase OS=Prevotella disiens JCM 6334 = ATCC 29426 OX=1235811 GN=tgt PE=3 SV=1
MTFELQCTDNASDARTGIITTDHGQIKTPIFMPVGTAGTVKGVHFSELVEQVKAQIILGNTYHLYLRPGLEVLKAAGGLHKFNGWNRPILTDSGGFQVFSLTGIRKLSEEGCQFRSHIDGSKHIFTPENVMDTQRVIGADIIMAFDECPPGNSDYEYSKRSLGLTQRWLDRCIKRFNETEPLYGYKQSLFPIVQGCTYKDLRTEAAKFVADKGADGNAIGGLAVGEPTEVMYEMIEHVNAILPKDKPRYLMGVGTPQNILEGIERGVDMFDCVMPTRNGRNAMLFTYEGTMNMRNKKWEKDFSPVDADGCDIDVITSKAYLHHLFKAGELLAMQIASIHNIAFYLRLVTDARKHIKQGDFVTWKASIIEKLGRRL

SEQ ID NO: 59325 - protein, 375 aa, Prevotella enoeca
  misc_feature (1)..(375): tr|A0A0S2KL69|A0A0S2KL69_9BACT Queuine tRNA-ribosyltran sferase OS=Prevotella enoeca OX=76123 GN=tgt PE=3 SV=1
MTFELQHTDNASEARTGLITTDHGVIKTPIFMPVGTCGSVKAVHFRELEEQVKAQIILGNTYHLYLRPGLDVLRAAGGLHKFNGWSHPILTDSGGYQVFSLTGIRKLREEGCEFRSHIDGSKHIFTPENVIDTERVIGADIIMALDECPPGQSDYQYAKKSLGLTQRWLDRCIRRFNETEPLYGYKQALFPIVQGCTFKDLRQEAAKFVADKGAEGNAIGGLAVGEPTEVMYEMIEVVNEILPKDKPRYLMGVGTPQNILEAIERGVDMFDCVMPTRNGRNAMLFTYDGTMNMRNKKWETDFTPIDPDGCETDRLYTKAYLHHLFKAQELLAMQIASIHNLAFYLRLVTDARQHIEQGDFVAWKRSVIDLLGRRI

SEQ ID NO: 59326 - protein, 375 aa, Prevotella fusca
  misc_feature (1)..(375): tr|A0A0K1NIT6|A0A0K1NIT6_9BACT Queuine tRNA-ribosyltran sferase OS=Prevotella fusca JCM 17724 OX=1236517 GN=tgt PE=3 SV=1
MTFELQHTDNASDARTGIITTDHGQIKTPIFMPVGTVGSVKGVHFEELRKQVKAQIILGNTYHLYLRPGLEVLKAAGGLHGFNGWERPILTDSGGFQVFSLTGIRKLSEEGCEFRSHIDGSKHIFTPENVMDTERIIGADIMMALDECPPGKSDYEYAKKSLRMTQRWLDRCIKRFNETEPLYGYNQSLFPIVQGCTYKDLRREAAKFVADKGADGNAIGGLAVGEPTEIMYEMIEVVNEILPKDKPRYLMGVGTPQNILEAIERGVDMFDCVMPTRNGRNAMLFTYNGTMNMKNKKWENDFSPIDPDGCDVDLITSKAYLHHLFKAGELLAMQIASIHNLAFYLRLVTDARAHIEQGDFVQWKASVIEQLGRRI

SEQ ID NO: 59327 - protein, 375 aa, Prevotella histicola
  misc_feature (1)..(375): tr|G6AE68|G6AE68_9BACT Queuine tRNA-ribosyltransferase OS=Prevotella histicola F0411 OX=857291 GN=tgt PE=3 SV= 1
MTFELQHTDNASDARTGIITTAHGQIKTPIFMPVGTVGSVKGVHFDELYKQVKAQIILGNTYHLYLRPGLEVLKAAGGLHGFNGWKRPILTDSGGFQVFSLTGIRKLSEEGCEFRSHIDGSKHIFTPESVMDTERIIGADIMMALDECPPGKSDYEYAKKSLGMTQRWLNRCIKRFNETEPLYGYSQSLFPIVQGCTYKDLRREAAKFVADKGADGNAIGGLAVGEPTEIMYEMIEVVNDILPKDKPRYLMGVGTPQNLLEAIERGVDMFDCVMPTRNGRNAMLFTYQGTMNMRNKKWEMDFSPVDSEGCEIDQITSKAYLHHLFKAGELLAMQIASIHNLSFYLRLVTDARSHIEQGDFVQWKASIIEQLGRRI

SEQ ID NO: 59328 - protein, 375 aa, Prevotella histicola; identical to SEQ ID NO: 59327
  misc_feature (1)..(375): tr|A0A096ATJ3|A0A096ATJ3_9BACT Queuine tRNA-ribosyltran sferase OS=Prevotella histicola JCM 15637 = DNF00424 OX =1236504 GN=tgt PE=3 SV=1

SEQ ID NO: 59329 - protein, 375 aa, Prevotella intermedia
  misc_feature (1)..(375): tr|A0A1P8JER7|A0A1P8JER7_PREIN Queuine tRNA-ribosyltran sferase OS=Prevotella intermedia ATCC 25611 = DSM 20706 OX=1122984 GN=tgt PE=3 SV=1
MTFELQCTDNASNARTGLITTDHGQIKTPIFMPVGTAGTVKGVHFSELVEQVKAQIILGNTYHLYLRPGLEVLKAAGGLHKFNGWNRPILTDSGGFQVFSLTGIRKLSEEGCQFRSHIDGSKHIFTPENVMDTQRIIGADIIMAFDECPPGNSDYAYSKRSLGLTQRWLDRCIKRFNETEPLYGYKQSLFPIVQGCTYKDLRTEAAKFVADKGADGNAIGGLAVGEPTEVMYEMIEVVNDILPKDKPRYLMGVGTPQNILEGIERGVDMFDCVMPTRNGRNAMLFTYEGTMNMRNKKWENDFSSVDADGCDIDVITSKAYLHHLFKAGELLAMQIASIHNIAFYLRLVTDARAHIEKGDFTQWKSSIIEKLGRRL

SEQ ID NO: 59330 - protein, 375 aa, Prevotella intermedia
  misc_feature (1)..(375): tr|A0A0D9NFU1|A0A0D9NFU1_PREIN Queuine tRNA-ribosyltran sferase OS=Prevotella intermedia ZT OX=1347790 GN=tgt P E=3 SV=1
MTFELQCTDNASNARTGLITTDHGQIKTPIFMPVGTAGTVKGVHFSELVEQVKAQIILGNTYHLYLRPGLEVLKAAGGLHKFNGWNRPILTDSGGFQVFSLTGIRKLSEEGCQFRSHIDGSKHIFTPENVMDTQRIIGADIIMAFDECPPGNSDYAYSKRSLGLTQRWLDRCIKRFNETEPLYGYKQSLFPIVQGCTYKDLRTEAAKFVADKGADGNAIGGLAVGEPTEVMYEMIEVVNDILPKDKPRYLMGVGTPQNILEGIERGVDMFDCVMPTRNGRNAMLFTYEGTMNMRNKKWENDFSPVDANGCDIDVITSKAYLHHLFKAGELLAMQIASIHNIAFYLRLVTDARAHIEKGDFTQWKSSIIEKLGRRL

SEQ ID NO: 59331 - protein, 375 aa, Prevotella jejuni
  misc_feature (1)..(375): tr|A0A2K9H7Q7|A0A2K9H7Q7_9BACT Queuine tRNA-ribosyltran sferase OS=Prevotella jejuni OX=1177574 GN=tgt PE=3 SV= 1
MTFELQHTDNASDARTGIITTDHGQIKTPIFMPVGTVGSVKGVHFEELRKQVKAQIILGNTYHLYLRPGLDIIKAAGGLHGFNGWDRPILTDSGGFQVFSLTGIRKLSEEGCEFRSHIDGSKHIFTPENVMDTERIIGADIMMAFDECPPGQSDYQYAKKSLQLTQRWLDRCIKRFNETEPLYGHNQSLFPIVQGCTYKDLRREAAKFVADKGADGNAIGGLAVGEPTEVMYEMIEVVNEILPKDKPRYLMGVGTPQNILEAIERGVDMFDCVMPTRNGRNAMLFTYNGTMNMKNKKWENDFSPIDPDGCDIDIITSKAYLHHLFKAGELLAMQIASIHNLAFYLRLVTDARTHIEQGDFVQWKASVIEQLGRRI

SEQ ID NO: 59332 - protein, 375 aa, Prevotella loescheii
  misc_feature (1)..(375): tr|A0A069QIU1|A0A069QIU1_PRELO Queuine tRNA-ribosyltran sferase OS=Prevotella loescheii DSM 19665 = JCM 12249 = ATCC 15930 OX=1122985 GN=tgt PE=3 SV=1
MKFELQHTDTASDARTGIITTDHGQIKTPVFMPVGTCGSVKGVHFSELRQQVKAQIILGNTYHLYLRPGLDVLKKAGGLHKFNTWDRPILTDSGGFQVFSLTGIRRLTENGCEFRSHIDGSKHVFTPESVMDTERIIGADIMMAFDECPPGNSDYAYAKKSLGLTQRWLDRCFKRFSETEPLYGYLQSLFPIVQGCTYKDLRQEAAKHVADKDADGNAIGGLAVGEPTEVMYEMIEVVNEILPKDKPRYLMGVGTPQNILEAIERGVDMFDCVMPTRNGRNAMLFTYQGTMNMRNKKWEDDFSPIDPDGCEIDRIHSKAYLHHLFKAQELLAMQIASIHNLAFYLRLTADARLHIEQGDFVQWKASVIDNLNRRV

SEQ ID NO: 59333 - protein, 375 aa, Prevotella maculosa
  misc_feature (1)..(375): tr|H1HPB0|H1HPB0_9BACT Queuine tRNA-ribosyltransferase OS=Prevotella maculosa OT 289 OX=999422 GN=tgt PE=3 SV= 1
MTFEVQHTDNASDARTGLITTDHGKIKTPIFMPVGTAGTVKGVHFSELREQVNAQIILGNTYHLYLRPGLDILRRAGGLHGFNGWERPILTDSGGFQVFSLTGIRKLTEEGCTFQSHIDGSRHIFTPENVMDTERVIGADIMMALDECPPGQSDYQYAQKSLALTQRWLDRCIKRFNETEPLYGYHQSLFPIVQGCTYKDLRREAAKFVADKEADGNAIGGLAVGEPTEVMYEMIEVVNEILPKDKPRYLMGVGTPQNILEAIERGVDMFDCVMPTRNGRNALLFTYNGTMNMRNKKWENDFTPIDSEGCDVDKVYSKAYLHHLFKAKELLAMQIGSIHNLAFYLRLVTDARQHIEQGDFVTWKKSVIERLGQRL

SEQ ID NO: 59334 - protein, 375 aa, Prevotella marshii
  misc_feature (1)..(375): tr|E0NRQ0|E0NRQ0_9BACT Queuine tRNA-ribosyltransferase OS=Prevotella marshii DSM 16973 = JCM 13450 OX=862515 G N=tgt PE=3 SV=1
MKFELQHTDNASDARTGLITTAHGQIKTPIFMPVGTCGSVKGVHIAELEEQVKAQIILGNTYHLYLRPGLDILKAAGGLHRFNAWNHPILTDSGGFQVFSLTGIRKLREEGCEFRSHIDGSKHFFTPENVMDTERIIGADIMMALDECPPGKSDYAYARKSLALTQRWLDRCIARFNATEPLYGYSQSLFPIVQGCTYKDLRREAAKFVADKGADGNAIGGLAVGEPTETMYEMIEVVNEILPKDKPRYLMGVGTPQNILEAIERGVDMFDCVMPTRNGRNAMLFTYEGTMNMKNKKWESDFSPIDPEGCHVDRVHTKAYLHHLFKAQELLAMQIASIHNLSFYLRLVTDAREHIEQGDFVKWKASIIHQLGRRI

SEQ ID NO: 59335 - protein, 375 aa, Prevotella melaninogenica
  misc_feature (1)..(375): tr|A0A096CGX4|A0A096CGX4_9BACT Queuine tRNA-ribosyltran sferase OS=Prevotella melaninogenica DNF00666 OX=140107 3 GN=tgt PE=3 SV=1
MTFELQHTDNASDARTGIITTDHGQIKTPIFMPVGTVGSVKGVHFEELRKQVKAQIILGNTYHLYLRPGLDIIKAAGGLHGFNGWDRPILTDSGGFQVFSLTGIRKLSEEGCEFRSHIDGSKHIFTPENVMDTERIIGADIMMAFDECPPGQSDYQYAKKSLEMTQRWLDRCIKRFNETEPLYGHNQSLFPIVQGCTYKDLRCEAARFVADKGADGNAIGGLAVGEPTEVMYEMIEVVNEILPKDKPRYLMGVGTPQNILEAIERGVDMFDCVMPTRNGRNAMLFTYNGTMNMKNKKWENDFSPIDPDGCDIDVITSKAYLHHLFKAGELLAMQIASIHNLAFYLRLVTDARTHIEQGDFVQWKTSVIEQLGRRI

SEQ ID NO: 59336 - protein, 375 aa, Prevotella melaninogenica
  misc_feature (1)..(375): tr|D3I793|D3I793_9BACT Queuine tRNA-ribosyltransferase OS=Prevotella melaninogenica D18 OX=575612 GN=tgt PE=3 SV=1
MTFELQHTDNASDARTGIITTDHGQIKTPIFMPVGTVGSVKGVHFEELRKQVKAQIILGNTYHLYLRPGLDIIKAAGGLHGFNGWDRPILTDSGGFQVFSLTGIRKLSEEGCEFRSHTDGSKHIFTPENVMDTERIIGADIMMAFDECPPGQSDYQYAKKSLEMTQRWLDRCIKRFNETEPLYGHNQSLFPIVQGCTYKDLRCEAAKFVADKGADGNAIGGLAVGEPTEVMYEMIEVVNEILPKDKPRYLMGVGTPQNILEAIERGVDMFDCVMPTRNGRNAMLFTYNGTMNMKNKKWENDFSPIDSDGCDIDVITSKAYLHHLFKAGELLAMQIASIHNLAFYLRLVTDARTHIEQGDFVQWKASVIEQLGRRI

SEQ ID NO: 59337 - protein, 375 aa, Prevotella micans
  misc_feature (1)..(375): tr|H1Q222|H1Q222_9BACT Queuine tRNA-ribosyltransferase OS=Prevotella micans F0438 OX=883158 GN=tgt PE=3 SV=1
MTFELQFADSASNARTGLIKTDHGQIETPIFMPVGTAGAVKGVHFAELIEQVKAQIILGNTYHLYLRPGIETLKKAGGLHNFNGWQRPILTDSGGFQVFSLTGIRKLSEEGCEFRSHIDGSKHFFTPENVMDTQRIIGADIMMAFDECPPGKSDYEYAKKSLALTQRWLDRCLKRFRETEPLYGHKQSLFPIVQGCTYKDLRVEAAKFVADKEADGNAIGGLAVGEPTEVMYEMIEVVNDILPKDKPRYLMGVGTPQNLLEAIARGVDMFDCVMPTRNGRNAMLFNSEGTMNMRNKKWENDFSPLDPEGCTIDRITTKAYLHHLFKAGELLAMQIASIHNLAFYLRLVKEARSHIAQGDFTVWKSQAVEKLGRRI

SEQ ID NO: 59338 - protein, 375 aa, Prevotella multiformis
  misc_feature (1)..(375): tr|F0F5T3|F0F5T3_9BACT Queuine tRNA-ribosyltransferase OS=Prevotella multiformis DSM 16608 OX=888743 GN=tgt PE =3 SV=1
MTFELQHTDTASEARTGVITTDHGQIRTPVFMPVGTVGSVKGVHFEELRRQVKAQIILGNTYHLYLRPGLDILRAAGGLHGFNGWERPILTDSGGFQVFSLTGIRKLTEEGCEFRSHIDGSRHIFTPENVMDTERVIGADIMMALDECPPGKSDYAYAKKSLGLTQRWLDRCIRRFNETEPLYGYKQSLFPIVQGCTYKDLRREAARFVADKGADGNAIGGLAVGEPTEVMYEMIEVVNEILPKDKPRYLMGVGTPQNILEAIERGVDMFDCVMPTRNGRNAMLFTYDGTMNMKNKKWEDDFSPIDPGGCDVDLVTSKAYLHHLFKAGELLAMQIASIHNLAFYLRLVTDARTHIEQGDFVQWKASVIDQLGRRI

SEQ ID NO: 59339 - protein, 375 aa, Prevotella multisaccharivorax
  misc_feature (1)..(375): tr|F8N5B5|F8N5B5_9BACT Queuine tRNA-ribosyltransferase OS=Prevotella multisaccharivorax DSM 17128 OX=688246 GN =tgt PE=3 SV=1
MDFQLQYTDKASDARAGVITTGHGKIETPIFMPVGTAGAVKAVHFSELRQQVKAQIILGNTYHLYLRPGLEVLRAAGGLHEFNGWERPILTDSGGFQVFSLSGIRKLTEEGCEFRSHIDGSKHIFTPENVMDTERIIGADIMMALDECPPGLSDYAYAKKSLAMTQRWLDRCINRFNETEPLYGYHQSLFPIVQGCTYKDLRQEAAKYVADKGAEGNAIGGLAVGEPTEVMYEMIEVVNGILPKDKPRYLMGVGTPQNILEGIERGVDMFDCVMPTRNGRNAMLFTYEGTMNMRNKKWEMDFSPLDPNGCETDRVTTKAYLHHLFKAQELLAMQIASIHNLAFYLRLVTDARQHILAGDFVQWKNSIVGQLGQRR

SEQ ID NO: 59340 - protein, 375 aa, Prevotella nigrescens
  misc_feature (1)..(375): tr|A0A246ENH2|A0A246ENH2_9BACT Queuine tRNA-ribosyltran sferase OS=Prevotella nigrescens OX=28133 GN=tgt PE=3 S V=1
MTFELQCTDRASEARTGLITTDHGQIKTPIFMPVGTAGTVKGVHFSELVEQVKAQIILGNTYHLYLRPGLEVLKAAGGLHKFNGWNRPILTDSGGFQVFSLTGIRKLSEEGCQFRSHIDGSKHIFTPENVMDTQRIIGADIIMAFDECPPGNSDYAYSKKSLGLTQRWLDRCIRRFNETEPLYGYKQSLFPIVQGCTYKDLRTEAAKFVADKGADGNAIGGLAVGEPTEVMYEMIEIVNEILPKDKPRYLMGVGTPQNILEGIERGIDMFDCVMPTRNGRNAMLFTYEGTMNMRNKKWETDFSPVDSNGCDIDIVTSKAYLHHLFKAGELLAMQIASIHNLAFYLRLVTDARTHIEKGDFTQWKSSIIDKLGRRL

SEQ ID NO: 59341 - protein, 375 aa, Prevotella nigrescens
  misc_feature (1)..(375): tr|V8CRJ7|V8CRJ7_9BACT Queuine tRNA-ribosyltransferase OS=Prevotella nigrescens CC14M OX=1073366 GN=tgt PE=3 S V=1
MTFELQCTDRASEARTGLITTDHGQIKTPIFMPVGTAGTVKGVHFSELVEQVKAQIILGNTYHLYLRPGLEVLKAAGGLHKFNGWNRPILTDSGGFQVFSLTGIRKLSEEGCQFRSHIDGSKHIFTPENVMDTQRIIGADIIMAFDECPPGNSDYAYSKKSLGLTQRWLDRCIRRFNETEPLYGYKQSLFPIVQGCTYKDLRTEAAKFVADKGADGNAIGGLAVGEPTEVMYEMIEIVNEILPKDKPRYLMGVGTPQNILEGIERGIDMFDCVMPTRNGRNAMLFTYEGTMNMRNKKWETDFSPVDSNGCDIDIVTSKAYLHHLFKAGELLAMQIASIHNLAFYLRLVTDARAHIEKGDFTQWKSSIIDKLGRRL

SEQ ID NO: 59342 - protein, 375 aa, Prevotella oralis
  misc_feature (1)..(375): tr|E7RSW3|E7RSW3_9BACT Queuine tRNA-ribosyltransferase OS=Prevotella oralis ATCC 33269 OX=873533 GN=tgt PE=3 S V=1
MTFELQHTDSASDARTGIITTAHGQIKTPIFMPVGTAGTVKGVHFSELREQVKAQIILGNTYHLYLRPGLDILKAAGGLHGFNGWERPILTDSGGFQVFSLTGIRKLCEEGCEFRSHIDGSKHIFTPENVMDTERIIGADIMMALDECPPGQSDYAYAKRSLGLTQRWLDRCIKRFNETEPLYGYNQSLFPIVQGCTYKDLRREAAKFVADKDADGNAIGGLAVGEPTEVMYEMIEVVNDILPKQKPRYLMGVGTPQNILEAIERGVDMFDCVMPTRNGRNAMLFTYNGTMNMKNKKWEYDFSPIDETGCDVDRVYTKAYLHHLFKAQELLAMQIASIHNLAFYLRLVSDARQHIEQGDFVRWKAGVIEQLGKRI

SEQ ID NO: 59343 - protein, 375 aa, Prevotella oralis
  misc_feature (1)..(375): tr|V8C1K2|V8C1K2_9BACT Queuine tRNA-ribosyltransferase OS=Prevotella oralis CC98A OX=1073367 GN=tgt PE=3 SV=1
MTFELQHTDSASDARTGIITTAHGQIKTPIFMPVGTAGTVKGVHFSELREQVKAQIILGNTYHLYLRPGLDILKAAGGLHGFNGWERPILTDSGGFQVFSLTGIRKLREEGCEFRSHIDGSKHIFTPENVMDTERIIGADIMMALDECPPGQSDYAYAKRSLGLTQRWLDRCIKRFNETEPLYGYNQSLFPIVQGCTYKDLRREAAKFVADKDADGNAIGGLAVGEPTEVMYEMIEVVNDILPKQKPRYLMGVGTPQNILEAIERGVDMFDCVMPTRNGRNAMLFTYNGTMNMKNKKWEYDFSPIDETGCDVDRVYTKAYLHHLFKAQELLAMQIASIHNLAFYLRLVSDARQHIEQGDFVRWKADVIEQLGKRI

SEQ ID NO: 59344 - protein, 375 aa, Prevotella oris
  misc_feature (1)..(375): tr|D7NA30|D7NA30_9BACT Queuine tRNA-ribosyltransferase OS=Prevotella oris C735 OX=563008 GN=tgt PE=3 SV=1
MTFEVQHTDNASDARTGVITTDHGQIKTPIFMPVGTAGTVKGVHFSELREQVNAQIILGNTYHLYLRPGLDILRQAGGLHGFNGWERPILTDSGGFQVFSLTGIRKLTEEGCTFQSHIDGSKHIFTPENVMDTERIIGADIMMAFDECPPGKSDYQYAKKSLGMTQRWLDRCIKRFNETKPLYGYNQSLFPIVQGCTYKDLRQEAAKFVADKGADGNAIGGLAVGEPTEVMYEMIEVVNEILPKDRPRYLMGVGTPQNILEAIERGVDMFDCVMPTRNGRNALLFTYNGTMNMRNKKWENDFTPIDPEGCDVDRIYTKAYLHHLFKAKELLAMQIGSIHNLAFYLRLVTDARQHIEQGDFVTWKKSVIDQLGQRL

SEQ ID NO: 59345 - protein, 375 aa, Prevotella oris
  misc_feature (1)..(375): tr|A0A448L7C0|A0A448L7C0_9BACT Queuine tRNA-ribosyltran sferase OS=Prevotella oris OX=28135 GN=tgt PE=3 SV=1
MTFEVQHTDNASDARTGIITTDHGQIKTPIFMPVGTAGTVKGVHFSELREQVNAQIILGNTYHLYLRPGLDILRQAGGLHGFNGWERPILTDSGGFQVFSLTGIRKLTEEGCTFQSHIDGSKHIFTPENVMDTERIIGADIMMAFDECPPGKSDYQYAKKSLSMTQRWLDRCIKRFNETKPLYGYNQSLFPIVQGCTYKDLRQEAAKFVADKGADGNAIGGLAVGEPTEVMYEMIEVVNEILPKDRPRYLMGVGTPQNILEAIERGVDMFDCVMPTRNGRNALLFTYNGTMNMRNKKWENDFTPIAPEGCDVDRVYTKAYLHHLFKAKELLAMQIGSIHNLAFYLRLVTDARQHIEQGDFVTWKKSVIDQLGQRL

SEQ ID NO: 59346 - protein, 375 aa, Prevotella oulorum
  misc_feature (1)..(375): tr|G1W9B6|G1W9B6_9BACT Queuine tRNA-ribosyltransferase OS=Prevotella oulorum F0390 OX=702438 GN=tgt PE=3 SV=1
MTFDVQYSDSSSNARAGVITTDHGQILTPIFMPVGTAGTVKGVHFSELIEQVKAQIILGNTYHLYLRPGLDILQKAGGLHGFNGWQYPILTDSGGFQVFSLTGIRKLTEEGCVFQSHIDGSKHFFTPENVMDTERIIGADIMMAFDECPPGKSDYHYAKKSLQLTQRWLDRCLKRFQETQPLYGHQQSLFPIVQGCTYKDLRQEAAKFIADKGADGNAIGGLAVGEPTEVMYEMIEVVNDILPKDKPRYLMGVGTPQNILEAIERGVDMFDCVMPTRNGRNALLFTYEGTMNMRNKKWEEDFLPLDANGCDIDKCTSKAYLHHLFKAKELLAMQIGSIHNLAFYLRLVTDARQHIQQGDFINWKKSVIERLGQRL

SEQ ID NO: 59347 - protein, 375 aa, Prevotella oulorum
  misc_feature (1)..(375): tr|A0A1T4KX15|A0A1T4KX15_9BACT Queuine tRNA-ribosyltran sferase OS=Prevotella oulorum OX=28136 GN=tgt PE=3 SV=1
MTFDVQYSDSSSNARAGVITTDHGQILTPIFMPVGTAGTVKGVHFSELIEQVKAQIILGNTYHLYLRPGLNILQKAGGLHGFNGWQHPILTDSGGFQVFSLTGIRKLTEEGCVFQSHIDGSKHFFTPENVMDTERIIGADIMMAFDECPPGKSDYHYAKKSLQLTQRWLDRCLKRFQETQPLYGHRQSLFPIVQGCTYKDLRQEAAKFIADKGADGNAIGGLAVGEPTEVMYEMIEVVNDILPKDKPRYLMGVGTPQNILEAIERGVDMFDCVMPTRNGRNALLFTYEGTMNMRNKKWEDDFSPLDANGCDIDKCTSKAYLHHLFKAKELLAMQIGSIHNLAFYLRLVTDARQHIQQGNFISWKKSVIERLGQRL

SEQ ID NO: 59348 - protein, 375 aa, Prevotella pallens
  misc_feature (1)..(375): tr|A0A379F1H7|A0A379F1H7_9BACT Queuine tRNA-ribosyltran sferase OS=Prevotella pallens OX=60133 GN=tgt PE=3 SV=1
MTFELQCTDRASEARVGLITTDHGQIKTPIFMPVGTAGTVKGVHFSELIEQVKAQIILGNTYHLYLRPGLEILKAAGGLHKFNGWNRPILTDSGGFQVFSLTSIRKLSEEGCQFRSHIDGSKHIFTPENVMDTQRIIGADIIMAFDECPPGNSDYAYSKQSLGLTQRWLDRCIKRFNETEPLYGYKQSLFPIVQGCTYKDLRTEAAKFVADKGADGNAIGGLAVGEPTEVMYEMIEVVNEILPKDKPRYLMGVGTPQNILEGIERGVDMFDCVMPTRNGRNAMLFTYEGTMNMRNKKWENDFSPVDSNGCDIDIITSKAYLHHLFKAGELLAMQIASIHNIAFYLRLVTDARTHIEKGDFTQWKSSIMDKLGRRL

SEQ ID NO: 59349 - protein, 375 aa, Prevotella pallens
  misc_feature (1)..(375): tr|F9DHQ8|F9DHQ8_9BACT Queuine tRNA-ribosyltransferase OS=Prevotella pallens ATCC 700821 OX=997353 GN=tgt PE=3 SV=1
MTFELQCTDKASEARAGLITTDHGQIKTPIFMPVGTAGTVKGVHFSELIEQVKAQIILGNTYHLYLRPGLEILKAAGGLHKFNGWNRPILTDSGGFQVFSLTGIRKLSEEGCQFRSHIDGSKHIFTPENVMDTQRIIGADIIMAFDECPPGNSDYAYSKQSLGLTQRWLDRCIKRFNETEPLYGYKQSLFPIVQGCTYKDLRTEAAKFVADKGADGNAIGGLAVGEPTEVMYEMIEVVNEILPKDKPRYLMGVGTPQNILEGIERGVDMFDCVMPTRNGRNAMLFTYEGTMNMRNKKWENDFSPVDSNGCDIDIITSKAYLHHLFKAGELLAMQIASIHNIAFYLRLVTDARTHIEKGDFTQWKSSIMDKLGRRL

SEQ ID NO: 59350 - protein, 375 aa, Prevotella pleuritidis
  misc_feature (1)..(375): tr|U2KK72|U2KK72_9BACT Queuine tRNA-ribosyltransferase OS=Prevotella pleuritidis F0068 OX=1081904 GN=tgt PE=3 SV=1
MTFELQHTDDASEARTGLITTDHGIIKTPIFMPVGTCGSVKAVHLRELEEQVKAQIILGNTYHLYLRPGLDVLRAAGGLHKFNGWAHPMLTDSGGFQVFSLTGIRKLREEGCEFRSHIDGSKHFFTPENVMDTERVIGADIIMALDECPPGQSDYQYAKKSLALTQRWLDRCIRRFNETEPLYGYKQALFPIVQGCTFKDLRQEAAKFVADKGAEGNAIGGLAVGEPTEVMYEMIEIVNEILPKDKPRYLMGVGTPQNILEAIERGVDMFDCVMPTRNGRNAMLFTYNGTMNMRNKKWETDFTPIDPDGCETDRLYTKAYLHHLFKAQELLAMQIASIHNLAFYLRLAADARQHIEQGGFVIWKRSIINQLGRRV

SEQ ID NO: 59351 - protein, 380 aa, Prevotella ruminicola
  misc_feature (1)..(380): tr|D5EZA5|D5EZA5_PRER2 Queuine tRNA-ribosyltransferase OS=Prevotella ruminicola (strain ATCC 19189 / JCM 8958 / 23) OX=264731 GN=tgt PE=3 SV=1
MKFEVQHTDAASDARAGLITTDHGQIQTPIFMPVGTVGSVKGVHFSELREQVKAQIILGNTYHLYLRPGLDILRQAGGLHKFNTWDRPILTDSGGFQVFSLTGIRKLREEGCEFRSHIDGSKHIFTPENVMDTERVIGADIMMAFDECPPGQSDYKYAENSLRLTQRWLERCVKRFNETEPLYGYNQTLFPIVQGCTYKDLRQDAAKHVCDVLAKLNDGGGASIGGLAVGEPTEVMYEMIEVVNEILPKDRPRYLMGVGTPQNILEGIERGVDMFDCVMPTRNGRNAMLFTYEGTMNMRNKKWENDFSPIDPDGCEIDRIHSKAYLHHLFKAQELLAMQIASIHNLAFYLRLVGDARQHIIAGDFVQWKRSVIDQLGRRR

SEQ ID NO: 59352 - protein, 380 aa, Prevotella ruminicola
  misc_feature (1)..(380): tr|A0A1M6UYU2|A0A1M6UYU2_PRERU Queuine tRNA-ribosyltran sferase OS=Prevotella ruminicola OX=839 GN=tgt PE=3 SV= 1
MTFEVQHTDAASDARAGLITTDHGQIQTPIFMPVGTVGSVKGVHFSELREQVKAQIILGNTYHLYLRPGLDILRQAGGLHKFNTWDRPILTDSGGFQVFSLTGIRKLREEGCEFQSHIDGSRHIFTPENVMDTERVIGADIMMAFDECPPGQSDYKYAENSLRLTQRWLERCVKRFNETEPLYGYNQTLFPIVQGCTYKDLRQDAAKHVCDVLGKLNDGGGASIGGLAVGEPTEVMYEMIEVVNEILPKDRPRYLMGVGTPQNILEAIERGVDMFDCVMPTRNGRNAMLFTYEGTMNMRNKKWENDFSPIDPDGCDIDRIHSKAYLHHLFKAQELLAMQIASIHNLAFYLRLVGDARQHIIAGDFVQWKRSVIDQLGRRR

SEQ ID NO: 59353 - protein, 375 aa, Prevotella saccharolytica
  misc_feature (1)..(375): tr|L1N0N5|L1N0N5_9BACT Queuine tRNA-ribosyltransferase OS=Prevotella saccharolytica F0055 OX=1127699 GN=tgt PE =3 SV=1
MKFELQHTDSASDARTGIITTDHGQIKTPIFMPVGTCGTVKGVHFEELRKQVKAQIILGNTYHLYLRPGLDVLRKAGGLHQFNTWDRPILTDSGGFQVFSLTGIRKLTEAGCEFRSHIDGSKHIFTPENVMDTERVIGADIMMAFDECPPGNSDYNYAKKSLGLTQRWLDRCIKRFNETEPLYGYQQSLFPIVQGCTYKDLRREAAKFVADKGADGNAIGGLAVGEPTEVMYEMIEVVNEILPKDKPRYLMGVGTPQNILEAIERGVDMFDCVMPTRNGRNAMLFTYNGTMNMRNKKWEDDFSPIDADGCDIDRLHTKAYLHHLFKAQELLAMQIASIHNLAFYLRLVTDARRHIEQGDFVQWKAGVIDNLSRRV

SEQ ID NO: 59354 - protein, 375 aa, Prevotella salivae
  misc_feature (1)..(375): tr|U2MHJ8|U2MHJ8_9BACT Queuine tRNA-ribosyltransferase OS=Prevotella salivae F0493 OX=1395125 GN=tgt PE=3 SV=1
MTFEVQHTDNASDARAGLITTDHGTIKTPIFMPVGTAGTVKGVHFSELHEQVKAQIILGNTYHLYLRPGLDILRQAGGLHGFNGWELPILTDSGGFQVFSLTGIRKLTEEGCTFQSHIDGSKHMFTPENVMDTERIIGADIMMAFDECPPGKSDYQYAKKSLAMTQRWLDRCIKRFNETEPLYGYNQSLFPIVQGCTYKDLRQEAAKYIADKGADGNAIGGLAVGEPTEVMYEMIEVVNEILPKEKPRYLMGVGTPQNILEAIERGVDMFDCVMPTRNGRNALLFTYDGTMNMRNKKWENDFTPIDAAGCDVDKRYTKAYLHHLFKAKELLAMQIGSIHNLAFYLRLVTDARHHIEQGDFVSWKKSVIDRLGQRL

SEQ ID NO: 59355 - protein, 375 aa, Prevotella salivae; identical to SEQ ID NO: 59354
  misc_feature (1)..(375): tr|E6MMM2|E6MMM2_9BACT Queuine tRNA-ribosyltransferase OS=Prevotella salivae DSM 15606 OX=888832 GN=tgt PE=3 S V=1

SEQ ID NO: 59356 - protein, 375 aa, Prevotella scopos
  misc_feature (1)..(375): tr|A0A1B1I898|A0A1B1I898_9BACT Queuine tRNA-ribosyltran sferase OS=Prevotella scopos JCM 17725 OX=1236518 GN=tg t PE=3 SV=1
MTFELQHTDKASDARTGIITTDHGQIKTPIFMPVGTVGSVKGVHFEELRKQVKAQIILGNTYHLYLRPGLDIIKATGGLHAFNGWDRPILTDSGGFQVFSLTGIRKLSEEGCEFRSHIDGSKHIFTPENVMDTERIIGADIMMAFDECPPGQSDYQYAKKSLEMTQRWLDRCIKRFNETEPLYGYNQSLFPIVQGCTYKDLRREASKFVADKGADGNAIGGLAVGEPTEVMYEMIEVVNEILPKDKPRYLMGVGTPQNILEAIERGVDMFDCVMPTRNGRNAMLFTYNGTMNMKNKKWENDFSPIDLDGCDIDVITSKAYLHHLFKAGELLAMQIASIHNLAFYLRLVTDARTHIEQGDFVQWKASVIEQLGRRI

SEQ ID NO: 59357 - protein, 375 aa, Prevotella shahii
  misc_feature (1)..(375): tr|A0A318IDR1|A0A318IDR1_9BACT Queuine tRNA-ribosyltran sferase OS=Prevotella shahii DSM 15611 = JCM 12083 OX=1 122991 GN=tgt PE=3 SV=1
MKFELQHTDSASDARTGIITTDHGQIKTPVFMPVGTCGTVKGVHFSELRQQVKAQIILGNTYHLYLRPGLDVLKNAGGLHKFNTWDKPILTDSGGFQVFSLTGIRRLTENGCEFRSHIDGSKHIFTPESVMDTERIIGADIMMAFDECPPGNSDYAYAKKSLGLTQRWLDRCFKRFNETEPLYGYQQSLFPIVQGCTFKDLRQEAAKHVADKGADGNAIGGLAVGEPTEVMYEMIEVVNEILPKDKPRYLMGVGTPQNILEGIERGVDMFDCVMPTRNGRNAMLFTYQGTMNMRNKKWENDFSPIDPDGCEIDRIHSKAYLHHLFKAQELLAMQIASIHNLAFYLRLTADARHHIEQGDFVQWKASVIDNLNRRV

SEQ ID NO: 59358 - protein, 375 aa, Prevotella sp.
  misc_feature (1)..(375): tr|C9Q0R6|C9Q0R6_9BACT Queuine tRNA-ribosyltransferase OS=Prevotella sp. oral taxon 472 str. F0295 OX=619693 G N=tgt PE=3 SV=1
MKFELQHTDTASDARTGIITTDHGQIKTPVFMPVGTCGSVKGVHFSELRQQVKAQIILGNTYHLYLRPGLDVLKKAGGLHKFNTWDRPILTDSGGFQVFSLTGIRRLTENGCEFRSHIDGSKHVFTPESVMDTERIIGADIMMAFDECPPGDSDYAYAKKSLGLTQRWLDRCFKRFNETEPLYGYQQSLFPIVQGCTYKDLRQEAAKHVADKGADGNAIGGLAVGEPTEVMYEMIEVVNEILPKDKPRYLMGVGTPQNILEAIERGVDMFDCVMPTRNGRNAMLFTYQGTMNMRNKKWEDDFSPIDPDGCEIDRIHSKAYLHHLFKAQELLAMQIASIHNLAFYLRLTADARLHIEQGDFVQWKASVIDNLNRRV

SEQ ID NO: 59359 - protein, 376 aa, Prevotella sp.
  misc_feature (1)..(376): tr|R7HM25|R7HM25_9BACT Queuine tRNA-ribosyltransferase OS=Prevotella sp. CAG:279 OX=1262924 GN=tgt PE=3 SV=1
MDFELQKEDLNSNARAGLITTAHGTIETPIFMPVGTVGSVKAVHFHELENDIKAQIILGNTYHLYLRPGMDIIEKAGGLHKFNGWKRPILTDSGGFQVFSLSANRKLKEEGAYFRSHIDGSKHLFTPEGVVDIQRSIGSDIMMALDECPPGDSDYQYAKKSLALTLRWLRRGWDHYKATDGKYGYSQAYFPIVQGCVYKDLRQESAKFVADLGADGNAIGGLAVGEPTEKMYEMIEIVNEILPKDKPRYLMGVGTPANILEAIERGVDMMDCVMPTRNGRNGMLFTKNGIMNMRNKKWADDFSPIEIDGASEVDRMYSRAYLRHLFVSQEILAMQIASIHNLAFYLWLVGEARSHILAGDFKAWKDETVVRVMQRL

SEQ ID NO: 59360 - protein, 375 aa, Prevotella stercorea
  misc_feature (1)..(375): tr|A0A3C0CFD8|A0A3C0CFD8_9BACT Queuine tRNA-ribosyltran sferase OS=Prevotella stercorea OX=363265 GN=tgt PE=3 S V=1
MTFELQHTDPCSDARTGIITTDHGQIKTPIFMPVGTVGSVKGVHFNELREQVKAQIILGNTYHLYLRPGLDTLQKAGGLHKFNTWDRPILTDSGGFQVFSLTGIRKLREEGCEFRSHIDGSKHIFTPENVMDTERIIGADIMMAFDECPPGESDYEYAKKSLGLTQRWLDRCFKRFNETEPLYGYNQSLFPIVQGCKYKDLRREAAKHVADKGADGNAIGGLAVGEPTEVMYEMIEVVNEILPKDKPRYLMGVGTPQNILEAIERGVDMFDCVMPTRNGRNAMLFTYEGTINIRNKKWEQDFSPIDPDGCDIDRIHSKAYLHHLFKAQELLAMQIASIHNLAFYLRLVTDARKHIEQGDFVQWKASVIDNLGRRI

SEQ ID NO: 59361 - protein, 375 aa, Prevotella stercorea; identical to SEQ ID NO: 59360
  misc_feature (1)..(375): tr|R7GUJ4|R7GUJ4_9BACT Queuine tRNA-ribosyltransferase OS=Prevotella stercorea CAG:629 OX=1263103 GN=tgt PE=3 SV=1

SEQ ID NO: 59362 - protein, 375 aa, Prevotella timonensis
  misc_feature (1)..(375): tr|A0A2K0XMI6|A0A2K0XMI6_9BACT Queuine tRNA-ribosyltran sferase OS=Prevotella timonensis OX=386414 GN=tgt PE=3 SV=1
MTFELQHTDPNSSARTGLITTAHGQIKTPIFMPVGTVGTVKAVHFSELKQQVKAQIILGNTYHLYLRPGLEILKAAGGLHQFNGWDRPILTDSGGFQVFSLTGIRKLTEEGCEFRSHIDGSKHFFTPENVMDTERIIGADIMMALDECPPGDCDYQYAKQSLGMTHRWLDRCIKRFKETEPLYGYDQCLFPIVQGAAYKDLRQESAKYIADQGADGNAIGGLAVGEPTEVMYEMIEVVNDILPKDKPRYLMGVGTPQNILEGIERGVDMFDCVMPTRNGRNAMLFTYEGTMNMKNKKWENDFTPIDSSGCDIDMVCTKAYLHHLFKAKEYLALQIASIHNLAFYLRLVTDARQHIEQGDFVSWKRSIIEQLGRRI

SEQ ID NO: 59363 - protein, 375 aa, Prevotella timonensis
  misc_feature (1)..(375): tr|A0A098YS44|A0A098YS44_9BACT Queuine tRNA-ribosyltran sferase OS=Prevotella timonensis S9-PR14 OX=1401062 GN= tgt PE=3 SV=1
MTFELQHTDPNSSARTGLITTAHGQIKTPIFMPVGTVGTVKAVHFSELKQQVKAQIILGNTYHLYLRPGLEILKAAGGLHQFNGWDRPILTDSGGFQVFSLTGIRKLTEEGCEFRSHIDGSKHFFTPENVMDTERIIGADIMMALDECPPGDCDYQYAKQSLGMTHRWLDRCIKRFKETEPLYGYDQCLFPIVQGAAYKDLRQESAKYIADKGADGNAIGGLAVGEPTEVMYEMIEVVNDILPKDKPRYLMGVGTPQNILEGIERGVDMFDCVMPTRNGRNAMLFTYEGTMNMKNKKWENDFTPIDSSGCDIDMVCTKAYLHHLFKAKEYLALQIASIHNLAFYLRLVTDARQHIEQGDFVSWKRSIIEQLGRRI

SEQ ID NO: 59364 - protein, 375 aa, Prevotella veroralis
  misc_feature (1)..(375): tr|C9MPV6|C9MPV6_9BACT Queuine tRNA-ribosyltransferase OS=Prevotella veroralis F0319 OX=649761 GN=tgt PE=3 SV= 1
MTFELQHTDNASDARTGLITTAHGQIKTPIFMPVGTVGSVKGVHFEELRRQVKAQIILGNTYHLYLRPGLDVLKAAGGLHGFNGWERPILTDSGGFQVFSLTGIRKLSEEGCEFRSHIDGSKHFFTPENVMDTERIIGADIMMALDECPPGQSDYEYAKKSLGMTQRWLTRCIKRFNETEPLYGYEQSLFPIVQGCTYKDLRQEAAKFVTDQGADGNAIGGLAVGEPTDVMYEMIEVVNEILPKDKPRYLMGVGTPQNILEAIERGVDMFDCVMPTRNGRNAMLFTYNGTMNMRNKKWEKDFSPVDHDGCDIDQITSKAYLHHLFKAGELLAMQIASIHNLAFYLRLVTDARTHIEQGDFVQWKASVIEQLGRRI

SEQ ID NO: 59365 - protein, 380 aa, Prevotellaceae bacterium
  misc_feature (1)..(380): tr|A0A239R1M0|A0A239R1M0_9BACT Queuine tRNA-ribosyltran sferase OS=Prevotellaceae bacterium MN60 OX=1945887 GN= tgt PE=3 SV=1
MKFEVQHNDPYSSARTGLITTDHGQIKTPIFMPVGTVGSVKGVHFAELREQVKAQIILGNTYHLYLRPGLDILRKAGGLHKFNTWDRPILTDSGGFQVFSLTGIRKLKEEGCEFRSHIDGSKHIFTPENVMDTERVIGADIMMAFDECPPGESDYQYAKNSLKLTQRWLERCVKRFNETEPLYGYNQTLFPIVQGCTYKDLRQDAAKHVVDTLGKLNDGGGASIGGLAVGEPTEVMYEMIEVVNDILPKDRPRYLMGVGTPQNILEAIERGVDMFDCVMPTRNGRNAMLFTYEGTMNMRNKKWENDFSPIDPDGCEIDRIHTKAYLHHLFKAQELLAMQIASIHNLAFYLRLVTDARMHIEQGDFTQWKRGVIDNLGRRR

SEQ ID NO: 59366 - protein, 380 aa, Prevotellaceae bacterium
  misc_feature (1)..(380): tr|A0A1K1PE74|A0A1K1PE74_9BACT Queuine tRNA-ribosyltran sferase OS=Prevotellaceae bacterium HUN156 OX=1520830 G N=tgt PE=3 SV=1
MKFEVQHNDPYSSARTGLITTDHGQIKTPIFMPVGTVGSVKGVHFAELREQVKAQIILGNTYHLYLRPGLDILRKAGGLHKFNTWDRPILTDSGGFQVFSLTGIRKLKEEGCEFRSHIDGSKHIFTPENVMDTERVIGADIMMAFDECPPGESDYQYAKNSLKLTQRWLERCVKRFNETEPLYGYNQTLFPIVQGCTYKDLRQDAAKHVVDTLGKLNDGGGASIGGLAVGEPTEVMYEMIEVVNDILPKDRPRYLMGVGTPQNILEAIERGVDMFDCVMPTRNGRNAMLFTYEGTMNMRNKKWEDDFSPIDPDGCEIDRIHTKAYLHHLFKAQELLAMQIASIHNLAFYLRLVTDARMHIEQGDFTQWKRSVIDNLGRRR

SEQ ID NO: 59367 - protein, 386 aa, Pricia antarctica
  misc_feature (1)..(386): tr|A0A1G7I4E0|A0A1G7I4E0_9FLAO Queuine tRNA-ribosyltran sferase OS=Pricia antarctica OX=641691 GN=tgt PE=3 SV=1
MITFAPIIRSLKFTLHHTDVHSKARAGSMVTDHGTIETPIFMPVGTVASVKSVHQRELKEDINPDIILGNTYHLFLRPKTDILKQAGGLHKFMGWDRNILTDSGGYQVYSLSNNRKIKEEGVKFKSHIDGSTHMFTPERVMEIQRTIGADIIMAFDECTPYPCDYKYAQRSMHMTHRWLERCITHLEKTPFEYGYSQTFFPIVQGSTYTDLRKQSAEYIAGVGAEGNAIGGLSVGEPAEEMYAMAEVVCDILPEDKPRYLMGVGTPINILENIALGVDMFDCVMPTRNARNGMLFTAHGTINIKNKKWEDDFSPVDEMGLTFVDTEYSKAYLRHLFAANEYLGKQIATIHNLGFYLWLVREARKHILAGDFLQWKAVMVKQMDKRL

SEQ ID NO: 59368 - protein, 381 aa, Primorskyibacter insulae
  misc_feature (1)..(381): tr|A0A2R8AWR1|A0A2R8AWR1_9RHOB Queuine tRNA-ribosyltran sferase OS=Primorskyibacter insulae OX=1695997 GN=tgt P E=3 SV=1
MGQIGGMTQTSFTLHATDGKARTGVINTPRGDIRTPAFMPVGTAATVKAMMPESVRATGADILLGNTYHLMLRPTAERVDRLGGLHKFMNWDRPILTDSGGFQVMSLAGLRKLTEKGVTFKSHIDGSKHELTPERSMEIQRLLGSDIVMCFDECPALPADRDRIAESMRLSMRWAQRSRDAFGDRPGHMLFGIQQGGLEQDFREESAKALREIGFDGYAIGGLAVGEGQDAMFSVLDFAPDQLPQDKPRYLMGVGKPDDIVGAVKRGIDMMDCVLPSRSGRTGQAWTRRGQVNIKNARHQDDPRPLDEQCTCPACTNYSRAYLHHVYRSQEMISGMLLTWHNLHYFQEIMQGMRDAIAAGTFAEWEADFHALRAEGDIAPV

SEQ ID NO: 59369 - protein, 375 aa, Primorskyibacter sedentarius
  misc_feature (1)..(375): tr|A0A4R3JDT9|A0A4R3JDT9_9RHOB Queuine tRNA-ribosyltran sferase OS=Primorskyibacter sedentarius OX=745311 GN=tg t PE=3 SV=1
MTRFSFSLDATDGAARTGVISTPRGDIRTPAFMPVGTAATVKAMMPESVRATGADILLGNTYHLMLRPGAERIAGLGGLHRFMNWDRPILTDSGGFQVMSLAELRKLTEKGVTFRSHIDGSKHELTPERSMEIQKLLGSDIVMCFDECPALPADDARVAESMRLSMRWAERSKQAFGDRPGHALFGIMQGGVTQHLREESAEALKAIGFDGYAVGGLAVGEGQEAMFGVLDYAPGMLPQDKPRYLMGVGKPDDIVGAVKRGIDMMDCVLPSRSGRTGQAWTRRGQVNIKNARHADDPRPLDEHCSCPACRGYSRAYLHHVFRAQEMISGMLLTWHNLHYYQEIMQGMRDAIAEGRFADWEAEFHRQREMGDIEKL

SEQ ID NO: 59370 - protein, 375 aa, Primorskyibacter sp.
  misc_feature (1)..(375): tr|A0A4R6A9H1|A0A4R6A9H1_9RHOB Queuine tRNA-ribosyltran sferase OS=Primorskyibacter sp. SS33 OX=2547833 GN=tgt PE=3 SV=1
MPRFGFTLHATDGTARTGTIATPRGEIRTPAFMPVGTAATVKGMLPESVRATGADILLGNTYHLMLRPGAERIERLGGLHRFMNWERPILTDSGGFQVMSLADLRKLTEEGVTFRSHIDGSRHTLTPERSMEIQRALGSDIVMAFDECPALPADRDRIAGSMRLSMRWARRSRDAFGDRPGHALFGIVQGGLERDLRTDSAEALREIGFDGYAIGGLAVGEGQAAMFDCLDYAPGLLPQDRPRYLMGVGKPDDIVGAVARGVDMMDCVLPSRSGRTGQAWTRRGQVNIKNARHADDPRPLDEDCTCPACRGYSRAYLHHVFRAGEMISGMLLTWHNLHYYQQIMAGMREAIAAGRFDEWQAAFHALRAEGDIDPV

SEQ ID NO: 59371 - protein, 372 aa, Prochlorococcus marinus
  misc_feature (1)..(372): sp|Q7VDR5|TGT_PROMA Queuine tRNA-ribosyltransferase OS= Prochlorococcus marinus (strain SARG / CCMP1375 / SS120 ) OX=167539 GN=tgt PE=3 SV=1
MFDFKVLSRSTNTAGRVGRLSTPHGILSTPQFMPVGTLGTVKGITATQLKDTNAQMILANTFHLHLQPGEAIIKESGGLHSFMSWDQPILTDSGGYQVFSLGKLNKIDDFGVSFKSPRDGSHIELTPEKAIQIQMDLGADVVMAFDQCPPYPASKVEVEEACKRTHLWLERCVATHSKEDQALFGIVQGGCFLDLREESARRVASFHLPGIAIGGVSVGEPSDQIHKIVRHVAPLLPNEVPRYLMGIGTIREMAVAVANGVDFFDCVLPTRLGRHGTALVRDERWNLRNACFRNDYQPLDTTCVCETCTNYNRAYLHHLIRNDELLGLTLLSLHNLSHLIRFSRAMAVAIEDDCFSEDFAPWQKSSIAHYTW

SEQ ID NO: 59372 - protein, 372 aa, Prochlorococcus marinus
  misc_feature (1)..(372): sp|A2CCL1|TGT_PROM3 Queuine tRNA-ribosyltransferase OS= Prochlorococcus marinus (strain MIT 9303) OX=59922 GN=t gt PE=3 SV=1
MFDFQINAHCSHTRARVGCFRTPHGSVNTPRFMPVGTLATVKGITATQLADTGAQMVLANTYHLHLQPGEGIVADAGGLHRFMGWDRPLLTDSGGFQIFSLADLNRIDDHGVVFRNPRNGSQIELTPERAIEIQMALGADVAMAFDQCPPYPASESDVEAACKRTHAWLERCSNTHQLTNQALFGIVQGGCFPHLREQSAQIVASFDLPGIAIGGVSVGEPVEDIHRIVRQVSPLLPQDRPRYLMGIGTLREIAIAVASGIDLFDCVLPTRLGRHGTALVAGERWNLRNARFREDHTPLDQSCTCTACRHHSRAYLHHLIRNEELLGLTLLSLHNLTQLIRFTSAISQAIQDDCFSEDFAPWQPDSAAHHTW

SEQ ID NO: 59373 - protein, 372 aa, Prochlorococcus sp.
  misc_feature (1)..(372): tr|A0A0A2CJM7|A0A0A2CJM7_9PROC Queuine tRNA-ribosyltran sferase OS=Prochlorococcus sp. MIT 0701 OX=1499502 GN=t gt PE=3 SV=1
MFDFQINAHCSHTRARVGCFRTPHGSVNTPRFMPVGTLATVKGITATQLADTGAQMVLANTYHLHLQPGEGIVADAGGLHRFMGWDRPLLTDSGGFQIFSLADLNRIDDHGVVFRNPRNGSQIELTPERAIEIQMALGADVAMAFDQCPPYPASESDVEAACKRTHAWLERCSNTHQHTSQALFGIVQGGCFPHLREQSAHIVASFDLPGIAIGGVSVGEPVEDIHRIVRQVSPLLPQDRPRYLMGIGTLREIAIAVASGIDLFDCVLPTRLGRHGTALVAGERWNLRNARFREDHTPLDQSCACTACRHHSRAYLHHLIRNEELLGLTLLSLHNLTQLIRFTSAISQAIQDDCFSEDFAPWQPDSAAHHTW

SEQ ID NO: 59374 - protein, 372 aa, Prochlorococcus sp.
  misc_feature (1)..(372): tr|A0A520Q277|A0A520Q277_9PROC Queuine tRNA-ribosyltran sferase OS=Prochlorococcus sp. MED-G132 OX=2518985 GN=t gt PE=3 SV=1
MFDFQINAQCSHTRARVGCFRTPHGSVNTPRFMPVGTLATVKGITATQLADTGAQMVLANTYHLHLQPGEGIVADAGGLHRFMGWDRPLLTDSGGFQIFSLADLNRIDDHGVVFRNPRNGSQIELTPERAIEIQMALGADVAMAFDQCPPYPASESDVEAACKRTHAWLERCSNTHQLTNQALFGIVQGGCFPHLREQSAQIVASFDLPGIAIGGVSVGEPVEDIHRIVRQVSPLLPQDRPRYLMGIGTLREIAIAVASGIDLFDCVLPTRLGRHGTALVAGERWNLRNARFREDHTPLDQSCTCTACRHHSRAYLHHLIRNEELLGLTLLSLHNLTQLIRFTSAISQAIQDDCFSEDFAPWQPDSAAHHTW

SEQ ID NO: 59375 - protein, 386 aa, Prochlorothrix hollandica
  misc_feature (1)..(386): tr|A0A0M2PS54|A0A0M2PS54_PROHO Queuine tRNA-ribosyltran sferase OS=Prochlorothrix hollandica PCC 9006 = CALU 10 27 OX=317619 GN=tgt PE=3 SV=1
MPLLNFQFHCQAQCSHSHARAGQWTTPHGVVETPRFMPVGTTATVKGVTPAQLVDTGAQMVLANTYHLHLQPGESIVAKAGGLHSFMQWSGPLLTDSGGFQVFSLSGLRKIQEDGVTFRSPRDGRTIHLTPEKSIEIQNQLGADVIMAFDECPPYPATREEVTAATDRTYRWLQRCIAAHQRSDQALFGIVQGGTFLDLRAKTAQSLVELDLPGYAIGGVSVGEPAAFIQAIVAATAPLLPVDKPRYLMGVGTYREMAQAIAAGIDLFDCVIPTRLARHGAVLSQGHRWNIKNAQYREDFTPLDDTCPCYTCQTFSRAYLNHLVRSREVLAYTLLSIHNITELVRFTQRIRASILDDRFTEEFAPYLQPDPLPSEEPFVSSLLQQS

SEQ ID NO: 59376 - protein, 376 aa, Prolinoborus fasciculus
  misc_feature (1)..(376): tr|A0A2U3MG05|A0A2U3MG05_9NEIS Queuine tRNA-ribosyltran sferase OS=Prolinoborus fasciculus OX=1056810 GN=tgt PE =3 SV=1
MKFEKLGQSGRARRGRLTLEHGVVETPMFMPVGTYGTVKGLLPRDIKEIKSQVILGNTFHLYLRPGLDVIREHGGLHEFMKWNSPILTDSGGFQVFSLGAMRKIKEEGVTFRSPIDGSKVFLSPEISMDIQHTLNSDIVMIFDECTPYPATHEEAQKSLQLSLRWAKRCKTQHHDVLKNRNALFGIIQGGMYEDLRDESLKGLLEIDFDGYAIGGLSVGEPKEEMIKVLDYLPEKMPADKPRYLMGVGKPEDIVEAVRRGVDMFDCVMPTRNARNGHYFVTDGLVRIRNAKYRHDQSPLDPHCDCYTCTNFTRAYLFHLEKCGEMLGSMLGTIHNLRYYLRLTEAMRDALDNGTFDEFVHDFYARRGLEVPPCPQD

SEQ ID NO: 59377 - protein, 376 aa, Prolixibacter denitrificans
  misc_feature (1)..(376): tr|A0A2P8CKF3|A0A2P8CKF3_9BACT Queuine tRNA-ribosyltran sferase OS=Prolixibacter denitrificans OX=1541063 GN=tg t PE=3 SV=1
MKFELQYTLQGTKARAGKLYTAHGEIETPIFMPVGTVGSVKGVHFRDLKDDVNAQIILGNTYHLYLRPGMDTIEKAGGLHKFNGWDGPILTDSGGFQVFSLGDIRKLSEEGAKFQSHIDGSRHMFTPENVVDIQRTIGADIIMAFDECPPGDSDFDYAKKSLELTQRWLERCVKRFDETEPKYGYDQTLFPIVQGGIYPELRKKAAEHVISFERDGYAIGGLSVGEKEEDMYSTIEVVNEILPKDKPRYLMGVGTPVNILEAIDRGVDMFDCVMPTRNGRNGMLFTSEGIINIKNKKWENDFSPVDPNGTSFVDHHYTRAYLRHLFQAKEMLGAQIGSLHNLAFYLWLVGEAREQIKAGTFKQWKNVMVEKVSRRL

SEQ ID NO: 59378 - protein, 375 aa, Prolixibacteraceae bacterium
  misc_feature (1)..(375): tr|A0A399SVT8|A0A399SVT8_9BACT Queuine tRNA-ribosyltran sferase OS=Prolixibacteraceae bacterium XSD2 OX=2305463 GN=tgt PE=3 SV=1
MNFLLEKTTDNSRARAGVITTDHGKIETPIFMPVGTAGSVKGIHTRDIRDDIKAEIILGNTYHLYLRPGIDVIEKAGGLHKFNGWDRPILTDSGGFQVFSLGDLRKLTEEGARFQSHIDGSYHQFTPESVMDIQRSIGADIMMAFDECTPGDADYDYAKKSMELTRRWLDRCFKRFNSTEPKYGYSQSLFPIVQGATYADLRRQSVAHVRNFDANGYAIGGLSVGETEEEMYEMTEVVTADLPQDKPRYLMGVGTPVNILEGIHRGVDMFDCVMPTRNGRNGMLFTSEGIINIRNQKWENDHSPIDPNGTSFVDQYSKAYLRHLVISKEMLGAQIASQHNLAFYLWLVKTAREKILGGDFVSWKNEMVLKLKHRL

SEQ ID NO: 59379 - protein, 376 aa, Prolixibacteraceae bacterium
  misc_feature (1)..(376): tr|A0A3D5Z045|A0A3D5Z045_9BACT Queuine tRNA-ribosyltran sferase OS=Prolixibacteraceae bacterium OX=2053594 GN=t gt PE=3 SV=1
MHFELKHTAAGTKARAGFITTDHGNIETPIFMPVGTAGSVKGIHKRDLKEDIKAQIILGNTYHLYLRPGLEIIEQAGGLHKFNGWDGPILTDSGGYQVFSLGDIRKLSEEGAKFQSHIDGSSHLFTPEKVMDIQRTIGADIMMAFDECTPGDADYEYARKSMEMTQRWLDRCFNQFEKTSPKYGHSQSLFPIVQGAVYPDLREIAARNVLQYKSDGYAIGGLSVGESEKDMYAMIEVVNEILPENKPRYLMGVGTPVNILEGIDRGIDMFDCVMPTRNGRNGMLFTQKGIMNMRNKKWADDFSPVDPDGTSFVDHHYSRAFLRHLVISGEMLGAEIASQHNLAFYLWLVKEARRQILANTFPEWKAKMVQQLSVRL

SEQ ID NO: 59380 - protein, 417 aa, Propionibacteriaceae bacterium
  misc_feature (1)..(417): tr|A0A255E2S7|A0A255E2S7_9ACTN Queuine tRNA-ribosyltran sferase OS=Propionibacteriaceae bacterium NML 160184 OX =2016506 GN=tgt PE=3 SV=1
MNPFGFEVDARLPDSPGRAGVISTPHGPVATPAFIPVGTKATVKAVLPDSVAGLGGQAVLANAYHLYLQPGSDIVDEAGGLAAFMNWRGPTFTDSGGFQVMSLGAGFKKVLAMNTAGLANDDVIAEGKERRALVDDDGVTFKSHLDGTQHRFTPEVSMKVQHELGADIIFAFDELTTLMNTRRYQEEALDRTTRWALRCLSAHAALTDQRQHRPYQALFGVIQGAQYEDLRRQACRDLALMEDPDSGQRFDGFGVGGALEKENLGTIVGWCSEELDRHDGDRPRPRHLLGISEPEDVFAAVEAGADTFDCVQPSRVARNAAVYTDRGRFNVNTAAHRRAFAPIDEDCDCYTCQHYTRAYLHHLFKAKEMLASTLATIHNERWTVRLVDRIRAALRAGDFHDFRDEFLAGWTPPNRSN

SEQ ID NO: 59381 - protein, 419 aa, Propionibacteriaceae bacterium
  misc_feature (1)..(419): tr|A0A255FW80|A0A255FW80_9ACTN Queuine tRNA-ribosyltran sferase OS=Propionibacteriaceae bacterium NML 030167 OX =2016500 GN=tgt PE=3 SV=1
MSAGDYPPGVPFSFEVRDRLPDRQGRTGIIHTPHGEIQTPAFIAVGTQATVKAVLPEAMRDLGAQAVLANAYHLYLQPGADIVDEAGGVGAFMNWPGPTFTDSGGFQVMSLGVGFKKVLSMDSSRVSDDDVIAEGKERLAHVDDDGVTFKSHLNGDRHRFTPEISMRVQNQLGADIIFAFDELTTLMNTRAYQEESLERTRLWAERCLAAHRELTAERADKPYQALFGVLQGAQYEDLRRKAARDLGSMEVSGQRFDGFGIGGALEKENLGTIVDWVSSELPEDRPRHLLGISEPDDFFAAIAAGADTFDCVQPSRVARNAALYTADGRFNVNTAANRRNFNPIDESCDCYTCAHYTRAYLHHLFKAREMVASTLATIHNERFTVRLVDDIRASIGAGEFDAFKTEFLGRFYRGAGSKA

SEQ ID NO: 59382 - protein, 418 aa, Propionibacterium acidifaciens
  misc_feature (1)..(418): tr|U2QB70|U2QB70_9ACTN Queuine tRNA-ribosyltransferase OS=Propionibacterium acidifaciens F0233 OX=553198 GN=tg t PE=3 SV=1
MTSQDDFGFTPGARLPNGLGRTGTITTPHGTVRTPAFVVVGTKAAVKAMLPEQVAAAGGQAVLANAFHLYLQPGPGIVDAAGGLGRFMGWPGPTLTDSGGFQVMSLGSGFRKTLAMDTTGLQDDDVIAAGHERRARVDDDGVDFKSPLDGSPHRFTPEVSMGVQHRLGADIMFAFDELTTLFNTRGYQVEALERTRRWARRCLDEHARLTGARRHRPYQALFGIIQGAQYEDLRRRACRELSAMRSSDGGLPFDGYGIGGAIEKARLGEIVGWCADELPDDRPRHLLGISEPDDLFAACAAGADTFDCVNPSRVARNAAIYTADGRYNVTTAANRRAFVPLEDGCDCYTCTHCTRAYLHHLFKAHEINGKVLATVHNERFTVRLVDRIRRSMADGDFEDFRAEWLGRYNANGGRAASP

SEQ ID NO: 59383 - protein, 418 aa, Propionibacterium acidifaciens; identical to SEQ ID NO: 59382
  misc_feature (1)..(418): tr|A0A3G5HU12|A0A3G5HU12_9ACTN Queuine tRNA-ribosyltran sferase OS=Propionibacterium acidifaciens OX=556499 GN= tgt PE=3 SV=1

SEQ ID NO: 59384 - protein, 416 aa, Propionibacterium australiense
  misc_feature (1)..(416): tr|A0A383S9J4|A0A383S9J4_9ACTN Queuine tRNA-ribosyltran sferase OS=Propionibacterium australiense OX=119981 GN= tgt PE=3 SV=1
MAFFDHFGFTVRTTLSNGRGRTGVITTPHGTIRTPAFVVVGTKAAVKAMLPDQVAAVGGQAVLANAFHLYLQPGADIVDEAGGLGSFMAWTGPTFTDSGGFQVMSLGSGFKKTLAMDVSGLQNDDVIAEGHERQAHVDDDGVNFKSPLDGSRHRFTPEVSMRVQHGLGADIMFAFDELTTLFNTRGYQVEALERTRRWAQRCLDEHVRLTGSRRHRPYQALFGVIQGAQYEDLRRKACRDLSTMRSADGDRPFDGYGIGGAMEKARLGEIVGWCADELPDDRPRHLLGISEPEDLFAACAAGADTFDCVNPSRVARNAAIYTADGRYNVTTAANRRAFVPLEDGCDCYTCTHCTRAYLHHLFKAREIDGKVLATIHNERFTVRLVDQIRQSMEDGSFEDFRAEWLGRYDATGRRTR

SEQ ID NO: 59385 - protein, 431 aa, Propionibacterium cyclohexanicum
  misc_feature (1)..(431): tr|A0A1H9Q733|A0A1H9Q733_9ACTN Queuine tRNA-ribosyltran sferase OS=Propionibacterium cyclohexanicum OX=64702 GN =tgt PE=3 SV=1
MPGASPSEFSFRVDHELPNGLGRTGILATPHGTIETPAFVVVGTKAAVKAMLPEQVRQAQGQAVLANAFHLYLQPGPDLVDAAGGLGRFMNWPGPTFTDSGGFQVMSLGVGFKKVLAMDVTGLQDDDIIAPGTTRNARVDDDGVTFKSPLDGSKHRFTPEVSMSVQHRLGADIMFAFDELTTLMNTRSYQEESVARTQRWALRCLDEHVRLTDERVGKPYQALFGVVQGAQFEDLRRLACRGLVAARAGVSGHEDQGFDGYGIGGAIEKRRLGEIVSWCASELPRDKPRHLLGISEPDDLFAACAAGADTFDCVNPSRVARNAAIYTADGRFNVTTAANRWAFTPLEEGCDCYTCQHYTRAYLHHLFRAKEIAAKMLATIHNERFTIRLVDDIRHAMRQGDFEAFRTEFLGRFYAGRPEQARREAAGTDRS

SEQ ID NO: 59386 - protein, 422 aa, Propionibacterium freudenreichii
  misc_feature (1)..(422): tr|D7GCZ4|D7GCZ4_PROFC Queuine tRNA-ribosyltransferase OS=Propionibacterium freudenreichii subsp. shermanii (s train ATCC 9614 / DSM 4902 / CIP 103027 / NCIMB 8099 / CIRM-BIA1) OX=754252 GN=tgt PE=3 SV=1
MCAAKSCDFSFSVDHVLPNGLGRSGTITTPHGPISTPAFVVVGTKATVKTVTPEQMDQAGAQAVLANAFHLYLQPGPDIVDEAGGLGRFMNWPGPSFTDSGGFQVMSLGVGFKKVLAMDVTGMQNDDVIAEGKQRDAQVDEDGVTFKSPLDGSTHRFTAEVSMGVQHQLGADIMFAFDELTTLMNTRGYQEDSVRRTQRWAQRCVDEHFRLTDARSGHPYQALFGVVQGAQYEDLRREACRGLRQTRAQVPGHEHEGFDGYGIGGAIEKQHLGDIVGWCAEELPDDKPRHLLGISEPDDLFAACAAGADTFDCVNPSRTARNGAIYTARGRYNVTTAANRRAFVALEEGCDCYTCTHYTRAYLHHMFKAHEFLGKTLATIHNERFTIRLVDSIRHAVRGGEFDALRTEFLGSFYGGATPGRA

SEQ ID NO: 59387 - protein, 422 aa, Propionibacterium freudenreichii; identical to SEQ ID NO: 59386
  misc_feature (1)..(422): tr|A0A0A8PT59|A0A0A8PT59_9ACTN Queuine tRNA-ribosyltran sferase OS=Propionibacterium freudenreichii OX=1744 GN= tgt PE=3 SV=1

SEQ ID NO: 59388 - protein, 520 aa, [Propionibacterium] humerusii
  misc_feature (1)..(520): tr|E4HM87|E4HM87_9ACTN Queuine tRNA-ribosyltransferase OS=[Propionibacterium] humerusii HL044PA1 OX=765109 GN= tgt PE=3 SV=1
MPVKAMVRANTFLQSAQVWPFMRGWTIGARRIAAKDIRSATVPNAPIRGMRVAAKAPPNCTERMAMNTKIAPRINATITTWLPSSLPGWACEPEVTTRFGHPARMATMPFDFEVTSRLDDACGRTGIIHTPHGSIETPAFVVVGTKATVKSLLPESVAQLGAQAVLANAYHLFLRPGPELVDEAGGLGRFMNWSGPTFTDSGGFQVLSLGAGFKKTLAMDVSQLTQADVIAADADRKAMVDDDGVTFRNPLNGDSHRFTPEVSMGIQHHLGADVMMAFDELTILMNTRAYQEEALERTRRWAERCLAEHRRLTEVRPEKPYQALYGVIQGAQYEDLRRKACRDLAAMDVDGQRFDGFGLGGAIEKVNLGRIVTWCAEELPEDRPRHLLGISEPDDLFAACRAGADTFDCVNPSRVARNAAIYTVDGRYNVDTARFRRDFGPLEDGCDCYTCTHYSRAYIHHLFKAKEMLANTLATIHNERWTVRLVDQIRVAMRSGDLDAFEVEFMGRWNANGGRLARVG

SEQ ID NO: 59389 - protein, 413 aa, [Propionibacterium] humerusii
  misc_feature (1)..(413): tr|F3P043|F3P043_9ACTN Queuine tRNA-ribosyltransferase OS=[Propionibacterium] humerusii P08 OX=999892 GN=tgt P E=3 SV=1
MPFDFEVTSRLDDACGRTGIIHTPHGSIETPAFVVVGTKATVKSLLPESVAQLGAQAVLANAYHLFLRPGPELVDEAGGLGRFMNWSGPTFTDSGGFQVLSLGAGFKKTLAMDVSQLTQADVIAADADRKAMVDDDGVTFRNPLNGDSHRFTPEVSMGIQHHLGADVMMAFDELTILMNTRAYQEEALERTRRWAERCLAEHRRLTEVRPEKPYQALYGVIQGAQYEDLRRKACRDLAAMDVDGQRFDGFGLGGAIEKVNLGRIVTWCAEELPEDRPRHLLGISEPDDLFAACRAGADTFDCVNPSRVARNAAIYTVDGRYNVDTARFRRDFGPLEDGCDCYTCTHYSRAYIHHLFKAKEMLANTLATIHNERWTVRLVDQIRVAMRSGDLDAFEVEFMGRWNANGGRLARVG

SEQ ID NO: 59390 - protein, 430 aa, [Propionibacterium] namnetense
  misc_feature (1)..(430): tr|F9NTU1|F9NTU1_9ACTN Queuine tRNA-ribosyltransferase OS=[Propionibacterium] namnetense SK182B-JCVI OX=105100 6 GN=tgt PE=3 SV=1
MQTGVNDAIRTSCKNDPMTFGFEVTCRLDDACGRTGIIHTPHGSIETPAFVVVGTKATVKSVLPESVAQLGAQAVLANAYHLFLQPGPELVDEAGGLGRFMNWSGPTFTDSGGFQVLSLGAGFKKTLAMDVSQLTEADVIAADADRKAMVDDDGVTFRSPLNGDLHRFTPEVSMGIQHHLGADIMFAFDELTTLMNTRGYQEEALERTRRWAERCLAEHHRLTEVRPEKPYQALFGVIQGAQYEDLRRRACRDLAGMEVDGQRFDGFGLGGAIEKVNLGRIVTWCAEELPEDRPRHLLGISEPDDLFAACRAGADTFDCVNPSRVARNAAIYTVDGRYNVDTARFRRDFGPLEDGCDCYTCTHYSRAYIHHLFKAKEMLANTLATIHNERWTVRLVDQIRGAMRSGDLDAFEAEFMGRWNANGGRLTRAD

SEQ ID NO: 59391 - protein, 415 aa, Propionibacterium sp.
  misc_feature (1)..(415): tr|A0A375HY40|A0A375HY40_9ACTN Queuine tRNA-ribosyltran sferase OS=Propionibacterium sp. JV5 OX=1962131 GN=tgt PE=3 SV=1
MAFSDDFGFTVRTRLPNGRGRTGVITTPHGTIRTPAFVVVGTKAAVKAMLPDQVAAVGGQAVLANAFHLYLQPGADIVDEAGGLGSFMGWTGPTFTDSGGFQVMSLGSGFKKTLAMDVTGLQNDDVIAEGHERQAHVDEDGVNFKSPLDGSRHRFTPEVSMRVQHGLGADIMFAFDELTTLFNTREYQVEALERTRRWAQRCLDEHVRLTGSRRHRPYQALFGVIQGAQYEDLRRRACRDLSAMRSADGDRPFDGYGIGGAIEKARLGEIVGWCADELPEDRPRHLLGISEPEDLFAACAAGADTFDCVNPSRVARNAAIYTADGRYNVTTAANRRAFVPLEEGCDCYTCTHCTRAYLHHLFKAREIDGKVLATIHNERFTVRLVDQIRRSMEDGSFEDFRAEWLGRYRSAASTR

SEQ ID NO: 59392 - protein, 413 aa, Propionibacterium sp.
  misc_feature (1)..(413): tr|U7IV04|U7IV04_9ACTN Queuine tRNA-ribosyltransferase OS=Propionibacterium sp. KPL2000 OX=1203629 GN=tgt PE=3 SV=1
MSFGFEVTSRLDDACGRTGIIHTPHGSVETPAFVVVGTKATVKSLLPESVAQLGAQAVLANAYHLFLQPGPDLVDEAGGLGRFMNWTGPTFTDSGGFQVLSLGAGFKKTLAMDVSQLTEDDVIAADADRKAMVDDDGVTFRSPLNGDLHRFTPEVSMGIQHCLGADIMFAFDELTTLMNTRSYQEEALERTRRWAERCLAEHRRLTEARVGKPYQALFGVVQGAQYEDLRRKACRDLSQMEIDGQRFDGFGLGGAIEKVNLGRIVTWCAEELPEDRPRHLLGISEPDDLFAACRAGVDTFDCVNPSRVARNAAIYTVDGRYNVNTARFRRDFGPLEEGCDCYTCTHYSRAYLHHLFKAREMLANTLATIHNERWTVRLVEQIRAAMRHGELDALETDFMGRWNINGGRLVKAN

SEQ ID NO: 59393 - protein, 413 aa, Propioniciclava sinopodophylli
  misc_feature (1)..(413): tr|A0A4Q9KE80|A0A4Q9KE80_9ACTN Queuine tRNA-ribosyltran sferase OS=Propioniciclava sinopodophylli OX=1837344 GN =tgt PE=3 SV=1
MSGPDADAPFGLTPGTVLPNGRGRTGVITTPHGEIATPAFIAVGTKATVKAVTPEAVAGLGAQAVLANAYHLYLQPGSDLIDAAGGLGRFMNWPGPTFTDSGGFQVMSLGVGFRKVLAMDAAGVADDDVIAEGKERLAHVDEDGVTFKSHLNGDLHRFTPEVSMRVQHEIGADIMFAFDELTTLKNTRGYQEESVERTHRWAARCLAAHRALTDERVGKPYQALFGVVQGAQYEDLRRKAASGLAALEVDGQRFDGFGIGGALEKENLGTIVGWVADELPFDKPRHLLGISEPDDLFAAIENGADTFDCVNPSRVARNSAVYTADGRYNLLTAANRRHLGPIEDDCDCYTCAHYSRAYLHHLFKAKEMLSATLATIHNERFTVRLVDHIRASIEQGRFDAFRAAFLGRFYARR

SEQ ID NO: 59394 - protein, 435 aa, Propioniciclava tarda
  misc_feature (1)..(435): tr|A0A4Q9KML3|A0A4Q9KML3_9ACTN Queuine tRNA-ribosyltran sferase OS=Propioniciclava tarda OX=433330 GN=tgt PE=3 SV=1
MGCCARRPPGSSRWPSCRPSVPAESDAARPFGFSVASTLPDALGRTGVITTPHGEIKTPAFIVVGTKATVKAVVPEAVAAVGGQAVLANAYHLYLQPGSDIVDAGGGLGAFMNWPGPTFTDSGGFQVMSQGVGFKKVLAMDTAGLAASDIVAPNKERMAHVDDDGVTFKSFLNGSLHRFTPEVSMRVQHELGADIMFAFDELTTLADSRAYQEASVERTHRWAARCLAAHGELTRDRVGKPYQALFGVVQGAQYEDLRRRAASGLAALEVDGRRFDGFGLGGAIEKENLGRIVGWCCEELPADKPRHLLGISEPDDFFAAIEAGADTFDCVNPSRVARNGAIYTADGRYNVNTAANRRAFAPLEAGCDCYTCAHYTRAYLHHLFKAKEMLASTLATIHNERFTVRLVDDIRASIESGSFEAFRDEFLGRFYAGRR

SEQ ID NO: 59395 - protein, 408 aa, Propionicimonas paludicola
  misc_feature (1)..(408): tr|A0A2A9CRB5|A0A2A9CRB5_9ACTN Queuine tRNA-ribosyltran sferase OS=Propionicimonas paludicola OX=185243 GN=tgt PE=3 SV=1
MADFGFTVGTVLDNGLGRTGVINTPHGPIKTPAFIAVGTKATVKAVLPESVSELGAQAVLANAYHLYLQPGSDLVDEAGGLAAFMNWPGPTFTDSGGFQVMSLGVGFKKVLAMDATGLANDDVIAEGKNRLAHVDDDGVTFTSHLNGDRHRFTPEVSMQIQHQLGADIMFAFDECTTLLNTRGYQERSLARTQAWAVRCLDEHARLTAERVGKPYQALFGVVQGAQYEDLRRKAARDLAELETSGQSFDGFGIGGALEKENLGTIVGWVCSELPVDKPRHLLGISEPDDFFAAIEAGADTFDCVMPSRVARNAAIYTLDGRFNVNTAANRRNFAPLDAECDCYTCANYSRAYLHHLFKAKEMLASTLATIHNERFTVRLVDDIRASIEEGRFAEFKAAFLGRFYSSAR

SEQ ID NO: 59396 - protein, 426 aa, Propioniferax innocua
  misc_feature (1)..(426): tr|A0A542ZRD2|A0A542ZRD2_9ACTN Queuine tRNA-ribosyltran sferase OS=Propioniferax innocua OX=1753 GN=tgt PE=3 SV =1
MSDDAQSRGFGFSIGARLSETSSLTDAGGRTGVIETPHGTIRTPAFIAVGTKATVKTVTPEQVAEVGAQAVLANAYHLYLQPGSDLIDEAGGLGAFMHWDGPTFTDSGGFQVMSLGVGFKKIIQMEAGQGPDDEAMAADRERLAVVDDDGVTFKSHLDGTKHRFTPEVSMRVQHQIGADIMFAFDELTTLMNTRGYQEKSLERTRLWAERCLAEHRRLTEERSHRPYQALFGVLQGAQYEDLRRKAARDLGSMEIDGQMFDGFGIGGALEKHNLGTIVDWVCSELPEDKPRHLLGISEPEDFFAAIEAGADTFDCVQPSRVARNAAIYHPDGRFNINTAPNRRNFEPIDPGCSCYTCRNYSRAYLHHLFKAKEMLGFTLATIHNEHFTIDLVDRIRASIENGDFAEFRDEFLGRFHARRAGVSSDA

SEQ ID NO: 59397 - protein, 420 aa, Propionimicrobium lymphophilum
  misc_feature (1)..(420): tr|S2WGZ9|S2WGZ9_9ACTN Queuine tRNA-ribosyltransferase OS=Propionimicrobium lymphophilum ACS-093-V-SCH5 OX=883 161 GN=tgt PE=3 SV=1
MTSFEASSKPASQEDFGFEVTATLSNGLGRTGLISTPHGKIETPAFIVVGTKATVKSVLPETVRDLGAQAVLANAFHLYLQPGPDLVDEAGGLGKFMNWQGPTFTDSGGFQVLSLGAGFKKVLAMDVTGMQNDEVIAEGKERKAHVDEDGVNFKSPLDGSMHRFTPEVSMCVQHKLGADIMFAFDELTTLLNTREYQVESIARTQRWAQRCLAEHKRLTLERKGKPYQALFGVVQGAQYEDLRRKASRDLAATESDGWTFDGFGLGGALEKHNLAKIVTWMAQELPDNKPRHLLGISEPDDLFAACEVGADTFDCVNPSRVARNAAIYTADGRYNITNSRFRRDFSPLEEGCDCYTCANYSRAYVRHLFKAKEMLANTLATIHNERFTVRLVDQIRSSIRNGDFYEFKGEMLGRFYQKKS

SEQ ID NO: 59398 - protein, 370 aa, Propionispira arboris
  misc_feature (1)..(370): tr|A0A1H6W725|A0A1H6W725_9FIRM Queuine tRNA-ribosyltran sferase OS=Propionispira arboris OX=84035 GN=tgt PE=3 S V=1
MTAIKYELIKECSKTGARAGKIHTPHGSFDTPMFMPVGTQASVKSVSPEELKDMGAGVILSNTYHLFLRPGEDLVKEAGGLHKFMNWDQAILTDSGGFQVFSLGDLRKITEDGVTFRSHIDGSKKFLSPEVATKIQMDLGADIIMAFDECVPYPADHDYTKQSTQRTTRWAKRCKDTLTRTDQGLFGIVQGGMYKDLRTMSVNDLKEMDFPGYAIGGLSVGEPKDLMYEILEHTVCQLPKDKPRYLMGVGTPDCLVEGVQRGIDMFDCVFPTRVARNGTAMTWMGRLVIKNAEYTRDFRPIDEHCGCYACRNYSRAYIRHLVRVNEIFGLRLMTIHNLYFLLDFMRKMRESIMEDHFVEFQNKFLANYSH

SEQ ID NO: 59399 - protein, 369 aa, Propionispora hippei
  misc_feature (1)..(369): tr|A0A1M6AHK9|A0A1M6AHK9_9FIRM Queuine tRNA-ribosyltran sferase OS=Propionispora hippei DSM 15287 OX=1123003 GN =tgt PE=3 SV=1
MAVQYELIKRCSKTGARAGRLHTPHGTFDTPIFMPVGTQATVKAMSPHELKEMGAGIILSNTYHLYLRPGHELVAEAGGLHKFMNWDGGILTDSGGFQVFSLGPLRKITEEGVTFRSHIDGSKQFLSPERATEVQMALGADIIMAFDECVPYPADHDYARKSTERTTRWAERCKGAHTRADQALFGIVQGGMYKDLRSMSVRDLVSLDFPGYAIGGLSVGEPKDLMYEMLEHTVPLLPVNKPRYLMGVGTPDCLVEGVLHGIDMFDCVFPTRVARNGTVMTHQGRLVVKNAEYTRDFRPIDSDCGCYTCRNFSRAYIRHLLKTEEIFGLRLTTIHNLYFLIHFMKKMRQAIIEDRFLEFRAEFWSQYQK

SEQ ID NO: 59400 - protein, 369 aa, Propionispora sp.
  misc_feature (1)..(369): tr|A0A0K8J8Y7|A0A0K8J8Y7_9FIRM Queuine tRNA-ribosyltran sferase OS=Propionispora sp. 2/2-37 OX=1677858 GN=tgt P E=3 SV=1
MAVRYELIKQCSQTGARAGRLHTPHGTFDTPIFMPVGTQATVKAMSPHELKAMGAGIILSNTYHLYLRPGHELVAEAGGLHAFMQWDGGILTDSGGFQVFSLGPLRKITEEGVTFRSHLDGSKHFLSPERATEVQMSLGADIIMAFDECVPYPAEHDYAKASTERTTRWAERCKAVHARDKQALFGIVQGGMFKDLRSMSARDLVELDFPGYAIGGLSVGEPKELMYEMLEHTVPLLPITKPRYLMGVGTPDCLVEGVLHGIDMFDCVFPTRVARNGTVMTSQGRLVVKNAEFARDFRPIDSQCGCYACRNFSRAYIRHLLKTEEIFGLRLTTTHNLYFLIHFMKDMRQAIIEDRFLEFRVAFWSHYQR

SEQ ID NO: 59401 - protein, 369 aa, Propionispora vibrioides
  misc_feature (1)..(369): tr|A0A1H8NXG3|A0A1H8NXG3_9FIRM Queuine tRNA-ribosyltran sferase OS=Propionispora vibrioides OX=112903 GN=tgt PE =3 SV=1
MAVQYELIKRCSKTGARAGRLHTPHGTFDTPIFMPVGTQATVKAMSPHELKEMGAGIILSNTYHLYLRPGHELVAEAGGLHKFMNWDGGILTDSGGFQVFSLGPLRKITEEGVTFRSHIDGSKQFLSPERATEVQMALGADIIMAFDECVPYPADHDYARKSTERTTRWAERCKGAHTRADQALFGIVQGGMYKDLRSMSVRDLVSLDFPGYAIGGLSVGESKDLMYEMLEHTVPLLPVNKPRYLMGVGTPDCLVEGVLHGIDMFDCVFPTRVARNGTVMTHQGRLVVKNAEYTRDFRPIDSDCGCYTCRNFSRAYIRHLLKTEEIFGLRLTTIHNLYFLIHFMKKMRQAIIDDRFLEFRAEFWSQYQK

SEQ ID NO: 59402 - protein, 369 aa, Propionivibrio dicarboxylicus
  misc_feature (1)..(369): tr|A0A1G8BQQ1|A0A1G8BQQ1_9RHOO Queuine tRNA-ribosyltran sferase OS=Propionivibrio dicarboxylicus OX=83767 GN=tg t PE=3 SV=1
MKFELITTDGGARRGRLTLAHGCVETPVFMPVGTYGTVKAMTPRDLDEIGAQICLGNTFHLWLRPGLDVIGKHGGLHRLMGWDKPILTDSGGFQVFSLGALRKITEEGVKFSSPIDGRKLFLTPEESMRIQHTLNSDIVMIFDECTPFPATHVQAADSMRMSLRWAKRSYDEHQRLGNANALFGIVQGGMYEDLRDESLAGLDTIGFDGMAIGGLSVGEPKEEMARILAHTAPRLPTHKPRYLMGVGTPEDLVNGVQAGIDMFDCVMPTRNARNGHLFTRFGDVRIKNAQYKDDLRPLDASCDCYTCRNFSRAYLHHLFRVGEILGAQLNTIHNLRYYQTLMRELREAIAAGTLAETVARFHAGRAGQE

SEQ ID NO: 59403 - protein, 379 aa, Prosthecobacter debontii
  misc_feature (1)..(379): tr|A0A1T4X4H4|A0A1T4X4H4_9BACT Queuine tRNA-ribosyltran sferase OS=Prosthecobacter debontii OX=48467 GN=tgt PE= 3 SV=1
MFELLATDPSSSARRGRLTTPHGVIETPIFMPVGTQATVKAVHPQELRSLDAQIILGNTYHLWVRPGTEIIGAAGGLHKFMNWDRPILTDSGGFQVFSLAKLRKLKEEGCYFNNHVDGTPMFLGPETAMEIQATLGSDIAMLFDECTPWPCKHEDARSSMELTLRWARRCRDWIDKHQPQTGGGAQLHFGIVQGSTFEDLRQRCAREMVAMGFSGYAIGGLSVGEPEEDMMRIAEWTCPLLPQNQARYAMGLGTPPQIVELIARGIDMFDCVLPTRLARNGTAYTHDGPMNLRNNKFAKDFRPLSEDTHPLCQGFSRAYIRHLINTQEVLGLRLISLHNLHFYLSLASRARLAIEQGCFAEFRAEVVARYQNRPETSDT

SEQ ID NO: 59404 - protein, 571 aa, Prosthecobacter debontii
  misc_feature (1)..(571): tr|A0A1T4XTC1|A0A1T4XTC1_9BACT Queuine tRNA-ribosyltran sferase OS=Prosthecobacter debontii OX=48467 GN=tgt PE= 3 SV=1
MSPSRLDFRLEARASGSRARAATFRTLHTTVRTPLFMPVGTQATVKAQLPESLHESGSQILLANTYHLLLRPGPEVFQKMGGIHPFMQWPGSVLTDSGGYQIFSLPHSRSMREEGAVFQSYVDGRRILLSPELSIETQMAIGSDIMMVLDQCIPSTADEKAARAALQITQRWAVRSLAARKDSPQSMFGIVQGALYPHLRQESAEGLMQLPFDGFAIGGLAVGEAKQEREDTCEVTAALLPEDRPRYLMGVGTPLDVLEAVHRGVDMFDCIIPTQVAKHGTAFTSRGMVQIRRTVHKFSDRPLDPACTCSACQKYSRAYLHHLVKTQEPLGWQLMGQHNIHFYHQLMREIRQSILEDCFLKLYEEKRQILQAEDLDFPVTQERPPVISPDHGHRIGDYELQLDPGKPARIVHVTSGKTVPTEADIHQWPQAAQLALHLRLPADQSPEEATPLIIWDLDLGAADSALAAILVYEEESSKGPVRPMHLVSLTEDVSALRLALSHKRYFAYLRHGAADTVLRRGHWKSRYREGLSWTLLQGPLAAIQAQAPGPAEMILGLPETISEPISTTASA

SEQ ID NO: 59405 - protein, 571 aa, Prosthecobacter fusiformis
  misc_feature (1)..(571): tr|A0A4R7RR84|A0A4R7RR84_9BACT Queuine tRNA-ribosyltran sferase OS=Prosthecobacter fusiformis OX=48464 GN=tgt P E=3 SV=1
MSPSRLDFQLEAQATGSRARAATFRTLHSTVRTPLFMPVGTQATVKAQLPETLHESGSQILLANTYHLLLRPGPEVFKRMGGIHQFMQWPGSVLTDSGGYQIFSLPHSRSMTEAGAVFQSYVDGQRILLSPELSIQTQMAIGSDIMMVLDQCIPSTADEAAARAALQVTQRWAVRSLAAREDSPQSMFAIVQGALYPHLRRESAEGLMQLPFDGFAIGGLAVGEEKAEREDTCEMTACLLPQDRPRYLMGVGTPLDVLEAVHRGVDMFDCIIPTQVAKRGSLFTSRGIVQLRRSVYKFSEERLDPDCTCPVCAKYTRAYLHHLTKTQEPLGWQLMGQHNIHFYHQLMREIRQSILEDRFLKLYHEKRQILQVEDVDHPITTVKPPVISPDHAQRMGDYELELRAGEAARIFHIGTGQTVNTDVTAAAWTEDAHLATHLRLPAGESAEESMPLIVWDIGLGAGAAAIAAILTYEMEADKGPVRPMHIVSLTNDLSPLRLALSHKRHFPYLRHGAADTLLHRNAWTSRYKTGLTWTLLQGPLDKTIPQAPSPPEATFHQVLPGMEIPIGTPER

SEQ ID NO: 59406 - protein, 379 aa, Prosthecobacter fusiformis
  misc_feature (1)..(379): tr|A0A4R7SRZ0|A0A4R7SRZ0_9BACT Queuine tRNA-ribosyltran sferase OS=Prosthecobacter fusiformis OX=48464 GN=tgt P E=3 SV=1
MFELLATDPSSSARRGRLTTPHGVIETPIFMPVGTQATVKAVHPDELRSLNAQIILGNTYHLWVRPGTEIIGAAGGLHKFMNWDRPILTDSGGYQVFSLAKLRKLKEEGCYFNNHVDGTPMFLGPETAMEIQATLGSDIAMLFDECTPWPCEHAPAKESLELTLRWARRCRDWIDKHQPQTGGGAQLHFGIVQGSTYEDLRQHSARELVAMDFSGYAIGGLSVGEPEEDMMRIAEWTCPLLPEHKARYAMGLGTPPQMVELIARGIDMFDCVLPTRLARNGTAYTHEGTLNLRNNKFAKDFRPLAEDTHPLCQGFSRAYIRHLINTQEVLGLRLISLHNLHFYLSLASRARSAIEQGCFADFRAEVVARYQTRPETLDS

SEQ ID NO: 59407 - protein, 379 aa, Prosthecochloris aestuarii
  misc_feature (1)..(379): tr|B4S8Z5|B4S8Z5_PROA2 Queuine tRNA-ribosyltransferase OS=Prosthecochloris aestuarii (strain DSM 271 / SK 413) OX=290512 GN=tgt PE=3 SV=1
MNFSVTHKDSRTAARAATMTTDHGEIPTPVFMPVGTRASVKSVEPHELKDQQVHIILANTYHLYLKPGNGILEKAGGIHSFMGWDQPLLTDSGGYQVYSLSDLRTITEEGVRFKSHLDGSTLYFTPENVIETQRIIGSDIMMPLDECPPWPAEKHYVEQSAAMTVRWAERARTHLEATTPLYGHSQALFGITQGGTYAHLRKEMTGQLVDLDFDGYSIGGMAVGEPAEEMYRMLELSHTLLPEHKPRYLMGVGTPENILNAIERGVDMFDCVIPTREARNGRVYTRNGYINLRSARYSDDFTPIDEGFDNHVCRHYTRAYIRHLLHVGEILGLKLCTLHNISFFMWLTRSAREQILQGSFSEWKEHFLRQFNAGQQSRT

SEQ ID NO: 59408 - protein, 377 aa, Prosthecochloris marina
  misc_feature (1)..(377): tr|A0A317T9F1|A0A317T9F1_9CHLB Queuine tRNA-ribosyltran sferase OS=Prosthecochloris marina OX=2017681 GN=tgt PE =3 SV=1
MNFSVIHKDSRTAARSGLLRTDHGEIPTPVFMPVGTKASVKSVEPEELTAQQTHIILANTYHLYLRPGNGIVGKAGGVHRFMNWHKPLLTDSGGYQVYSLSELRTIDEEGVRFKSHIDGSMLYFTPENVIDTQRIIGSDIMMPLDECPPWPAEKTYVQESGDMTVRWAERAKKHFESTQPHYNHSQALFGITQGGTYADLRTQVSKELVDLDFDGYSIGGLAVGEPAEEMYRILELSHTVLPENKPRYLMGVGTPENILNAIERGVDMFDCVIPTREARNGRVYTRNGHINLRSARFAEDFTPIDEGFDNHVCRNYSRAYIRHLLNVGEILGLKLCTLHNISFFMWLTRTAREQIIRGSFREWKDSFLQTFNAGKQS

SEQ ID NO: 59409 - protein, 397 aa, Prosthecochloris sp.
  misc_feature (1)..(397): tr|A0A1B1Q129|A0A1B1Q129_9CHLB Queuine tRNA-ribosyltran sferase OS=Prosthecochloris sp. CIB 2401 OX=1868325 GN= tgt PE=3 SV=1
MLVYSAKDYSIHAPGLDIDIMKFRVSHKDNRTAARTGILETDHGTVPTPVFMPVGTRASVKSVEASELKAEQVHIILANTYHLYLKPGNDIMRAAGGIHSFMQWNQPLLTDSGGYQVYSLSELRSISEEGVRFKSHLDGSKLFFTPENVIDTQRIIGSDIMMPLDECPPWPAEKSYVETSGAMTVRWAERARSHLEKTAPLYGHSQALFGITQGGTYADVREWTTRELVDLDFDGYSIGGMAVGEPAEEMYRMLELSHTLLPEHKPRYLMGVGTPENILNAIERGVDMFDCVIPTREARNGRVYTRNGYINLRSAKFARDFRPIDEGFPNHVCRTYSRAYIRHLLNVGEILGLKLCTMHNISFYMWLTRTAREHIEQDTFSEWKLEFLETFNAGQPA

SEQ ID NO: 59410 - protein, 380 aa, Prosthecochloris sp.
  misc_feature (1)..(380): tr|A0A1W6HR26|A0A1W6HR26_9CHLB Queuine tRNA-ribosyltran sferase OS=Prosthecochloris sp. HL-130-GSB OX=1974213 G N=tgt PE=3 SV=1
MNFTLSHKDSRTSARAGILVTDHGTIPTPVFMPVGTRASVKSVEPDELRELQVHIILANTYHLYLKPGNSIMKDAGGIHSFMNWDHPLLTDSGGYQVYSLSELRTITEEGVRFKSHLDGSRLHFTPENVIDTQRIIGSDIMMPLDECPPWPAEKEYVKKSSEMTVRWAERARSYFEKTSPLYHHTQALFGITQGGTYADLRKTTTKALVDMDFDGYSIGGMAVGEPAEEMYRILELSDTLLPEHKPRYLMGVGTPENILNAIERGIDMFDCVIPTREARNGRVYTRTGHINLRSARYANDFSPIDEGFDNHVCRNYSKAYIRHLLNVGEILGLKLCTLHNISFFMWLTRTAREQILNGTFEEWKKAFLAEFNGPKQSGAE

SEQ ID NO: 59411 - protein, 377 aa, Prosthecochloris vibrioformis
  misc_feature (1)..(377): tr|A0A5C4S2G5|A0A5C4S2G5_PROVB Queuine tRNA-ribosyltran sferase OS=Prosthecochloris vibrioformis OX=1098 GN=tgt PE=3 SV=1
MKFRVSHKDNRTAARTGILETDHGTVPTPVFMPVGTRASVKSVEASELKAEQVHIILANTYHLYLKPGNDIMQAAGGIHNFMQWDQPLLTDSGGYQVYSLSELRSISEEGVRFKSHLDGSKLFFTPENVVDTQRIIGSDIMMPLDECPPWPAEKSYVETSGAMTVRWAERARSHLEKTAPLYGHSQALFGITQGGTYADVREWTTRELVDLDFDGYSIGGMAVGEPAEEMYRMLELSHTLLPEHKPRYLMGVGTPENILNAIERGVDMFDCVIPTREARNGRVYTRNGYINLRSAKFARDFRPIDEGFPNHVCRTYSRAYIRHLLNVGEILGLKLCTMHNISFYMWLTRTAREHIEQDTFSEWKLEFLETFNAGQPA

SEQ ID NO: 59412 - protein, 384 aa, Prosthecomicrobium hirschii
  misc_feature (1)..(384): tr|A0A0P6VVY1|A0A0P6VVY1_9RHIZ Queuine tRNA-ribosyltran sferase OS=Prosthecomicrobium hirschii OX=665126 GN=tgt PE=3 SV=1
MTAPTEPAAVPAFGFRLIATDGMARRGEVTTAHGAIRTPAFMPVGTQATVKTMYPEQVRALGADILLGNTYHLMLRPTAERVDRLGGLHRFMNWPHPILTDSGGFQVMSLAKLRKLNEQAVTFQSHIDGSRHVLSPERSLEIQGLLGSDIQMQLDECVALPAERAEIERAMRLSLRWAERSKAAFFGKPGHGLFAIVQGGDDEALRVESARALTAIGFHGYAVGGLAVGEPQDVMLRILSATTPELPADRPRYLMGVGTPDDIVESVGRGIDMFDCVMPTRAGRHGQAFTRRGKVNLRNARHADDPRPIDEESTCPAARDYSRAYLHHLVKAEEALGAMLLTWINLSYYQDLMAGLRAAIEAGRFQDHKAAVKDGWARGDLPAL

SEQ ID NO: 59413 - protein, 372 aa, Proteiniborus ethanoligenes; identical to SEQ ID NO: 55764
  misc_feature (1)..(372): tr|A0A1H3QSC1|A0A1H3QSC1_9FIRM Queuine tRNA-ribosyltran sferase OS=Proteiniborus ethanoligenes OX=415015 GN=tgt PE=3 SV=1

SEQ ID NO: 59414 - protein, 372 aa, Proteiniborus sp.
  misc_feature (1)..(372): tr|A0A1M4M7C2|A0A1M4M7C2_9FIRM Queuine tRNA-ribosyltran sferase OS=Proteiniborus sp. DW1 OX=1889883 GN=tgt PE=3 SV=1
MVFRYELIKEARDSKARLGKIYTPHGVIETPIFMPVGTRATVKAMTPEELKELGAQIILSNTYHLYLRPGHKLIEEAGGLHKFMNWDRPILTDSGGFQVFSLGDLRKITEEGVEFRSHIDGSKHFISPEKSIEIQNSLGSDIIMAFDECAPYPSDWDYVKKSLERTTRWARRCKEANKNPDTQALFGIVQGGMYKDLREQSAKEIIDLDFPGYAIGGLSVGEPSELMCEMLDFTVPLLPKEKPRYLMGVGSPDYLFEAVIRGIDMADCVLPTRIARNGTVLTSHGKVVIRNAKYSRDFSRLDPECDCYTCQNYSKAYIRHLFNVDEILGARLATIHNLYFLIKLMENIREAIREDRLLQYKDEFYNKYGYTK

SEQ ID NO: 59415 - protein, 381 aa, Proteiniclasticum ruminis
  misc_feature (1)..(381): tr|A0A1G8GCT2|A0A1G8GCT2_9CLOT Queuine tRNA-ribosyltran sferase OS=Proteiniclasticum ruminis OX=398199 GN=tgt P E=3 SV=1
MYTLLKTEKRARRGRFETPHGTIETPVFMNVGTLAVIKGAVSSMDLKEIGCQVELSNTYHLHLRPGDKLVRKMGGIHKFMNWDRPILTDSGGFQVFSLAKIRKIKEEGVTFNSHIDGSSIFMGPEESMRIQSNLASTIAMAFDECIELPAEREYVEKSVERTTRWLVRCKNELDRLNEKEDTINKKQMLFGINQGGTYEDIRIAHAKEISKMDLDGYAIGGLAVGETHEEMYRILDVVVPHLPQDKPIYLMGVGTPENILESVERGVDFFDCVLPARNGRHGHVFTSRGKINLNNKRFEMDEKPIDEGCECPACKHYTRSYIRHLFKAKEMLALRLCVLHNLYFYNKLMEDIRKALDEDRFHEFKENKLSEWSRGQEPVEN

SEQ ID NO: 59416 - protein, 381 aa, Proteiniclasticum ruminis
  misc_feature (1)..(381): tr|A0A1I4YK42|A0A1I4YK42_9CLOT Queuine tRNA-ribosyltran sferase OS=Proteiniclasticum ruminis OX=398199 GN=tgt P E=3 SV=1
MYTLLKTEKRARRGRFETPHGTIETPVFMNVGTLAVIKGAVSSMDLKEIGCQVELSNTYHLHLRPGDKLVRKMGGIHKFMNWDRPILTDSGGFQVFSLAKIRKIKEDGVTFNSHIDGSSIFMGPEESMRIQSNLASTIAMAFDECIELPAERQYVEKSVERTTRWLVRSKNELDRLNAKEDTINKKQMLFGINQGGTYEDIRIAHAKEISKMDLDGYAIGGLAVGETHEEMYRILDVVVPHLPQDKPIYLMGVGTPENILESVERGVDFFDCVLPARNGRHGHVFTSRGKINLNNKRFEMDEKPIDEGCECPACKHYTRSYIRHLFKAKEMLALRLCVLHNLYFYNKLMEDIRKALDEDRFHEFKENKLSEWSRGQEPVEK

SEQ ID NO: 59417 - protein, 381 aa, Proteiniclasticum sp.
  misc_feature (1)..(381): tr|A0A358S4V8|A0A358S4V8_9CLOT Queuine tRNA-ribosyltran sferase OS=Proteiniclasticum sp. OX=2053595 GN=tgt PE=3 SV=1
MYTLLKTEKRARRGRFETPHGTIETPVFMNVGTLAVIKGAVSSMDLKEIGCQVELSNTYHLHLRPGDKLVRKMGGIHKFMNWDRPILTDSGGFQVFSLAKIRKIKEEGVTFNSHIDGSSIFMGPEESMRIQSNLASTIAMAFDECIELPAERQYVEKSVERTTRWLVRSKNELDRLNAKEDTINKKQMLFGINQGGTYEDIRIAHAKEISKMDLDGYAIGGLAVGETHEEMYRILDVVVPHLPQDKPIYLMGVGTPENILESVERGVDFFDCVLPARNGRHGHVFTSRGKINLNNKRFEMDEKPIDEGCECPACKHYTRSYIRHLFKAKEMLALRLCVLHNLYFYNKLMEDIRKALDEDRFHEFKENKLSEWSRGQEPVEK

SEQ ID NO: 59418 - protein, 376 aa, Proteiniphilum acetatigenes
  misc_feature (1)..(376): tr|A0A117LZN3|A0A117LZN3_9BACT Queuine tRNA-ribosyltran sferase OS=Proteiniphilum acetatigenes OX=294710 GN=tgt PE=3 SV=1
MDFQLIHTDPKSDARAGVITTDHGKVETPVFMPVGTAGSVKAVHISELKEDIKAEIILGNTYHLYLRPGLEIIGAAGGLHRFNGWNRPMLTDSGGYQVFSLTGNRKLTEEGALFQSHIDGSRHFFTPEKVIDIQRIIGADIIMAFDECTPGDADYGYAKKSLELTERWLDRCITRMRETECPYGHSQTLFPIVQGCVYRNLRRRAAEKIASLGADGNAIGGLAVGEPTEKMYEMVELVNGILPKDKPRYLMGVGKPENILEAIERGVDMFDCIMPTRNGRNGQIFTKEGIMNMRNERWKNDFTPLEEDGESFVDRLYSKAYLRHLINTNEILGLQIASIHNLAFYVWLTREARKHIIAGDFTEWKPRMIEKVTRRL

SEQ ID NO: 59419 - protein, 345 aa, Proteiniphilum saccharofermentans
  misc_feature (1)..(345): tr|A0A1R3T4G5|A0A1R3T4G5_9BACT Queuine tRNA-ribosyltran sferase OS=Proteiniphilum saccharofermentans OX=1642647 GN=tgt PE=3 SV=1
MPVGTVGSVKAVHVSELKEDIGAQIILGNTYHLYLRPGLDILQQAGGLHRFNSWNKPMLTDSGGFQVFSLTENRKLSEEGAEFQSHIDGSRHFFTPEKAVDIQRIIGADIMMAFDECTPGDADYDYAKKSLDLTERWLDRCLARFRETECPYGHRQALFPIVQGCVYPDLRRRAAENVAAKGADGNAIGGLAVGEPTEKMYEMVELVNEILPKDKPRYLMGVGKPENILEAIERGVDMFDCIMPTRNGRNGQIFTKQGVMNMRNERWKNDFSPIEEDGASFVDTLYSKAYLRHLINVNEILGLQIASIHNLAFYIWLVQEARKHIIAGDFSEWKPMILQNVTRRL

SEQ ID NO: 59420 - protein, 376 aa, Proteiniphilum sp.
  misc_feature (1)..(376): tr|A0A3M8EDP7|A0A3M8EDP7_9BACT Queuine tRNA-ribosyltran sferase OS=Proteiniphilum sp. X52 OX=2382159 GN=tgt PE= 3 SV=1
MDFRLLHTDPKSNARAGILSTDHGEVETPVFMPVGTIGSVKAVHVTELKQDIGAQIILGNTYHLYLRPGLDTLQQAGGLHRFNSWNKPMLTDSGGFQVFSLTENRKLSEEGAEFQSHIDGSRHFFTPEKVIDIQRIIGADIIMAFDECTPGDADYDYAKKSLDLTERWLDRCLARFGETECPYGHRQTLFPIVQGCVYPDLRRRAAENVAAKEADGNAIGGLAVGEPTEKMYEMVELVNEILPKDKPRYLMGVGKPENILEAIERGVDMFDCIMPTRNGRNGQIFTKQGVMNMRNERWKNDFSPIEDDGASFVDTLYSKAYLRHLINVNEILGLQIASIHNLAFYIWLAQEARKHIIAGDFSEWKPMMLENVTRRL

SEQ ID NO: 59421 - protein, 377 aa, Proteobacteria bacterium; identical to SEQ ID NO: 58796
  misc_feature (1)..(377): tr|R6ANZ7|R6ANZ7_9PROT Queuine tRNA-ribosyltransferase OS=Proteobacteria bacterium CAG:139 OX=1262986 GN=tgt P E=3 SV=1

SEQ ID NO: 59422 - protein, 373 aa, Proteobacteria bacterium
  misc_feature (1)..(373): tr|A0A2G6J7A6|A0A2G6J7A6_9PROT Queuine tRNA-ribosyltran sferase OS=Proteobacteria bacterium OX=1977087 GN=tgt P E=3 SV=1
MHDGRLQFSIEARDGEARAARVSLPRGSYETPIFMPVGTYATVKAITPEELETLGAQVILSNAYHLFLRPGHERVRRLGGLQRFMGWERLILTDSGGYQLFSLRQQMTIDEDGVRFRSPIDGSPRRLGPERAMAVEAALGSDIAMAFDHCAPSDASKDAIVAALERTTRWARRCVGEPRPDHQARFGIVQGALDLELRERHVAELTPLGFDGYALGGLSVGEAPPEMHRVVRAVAPRMPADRPRYLMGVGRPEDLIVAIGAGIDMFDCVMPTRHARNGQLFTATGRIVITNAEHRDADAPIDDDCSCAVCRRFSRAYLRHLYTAKEILYSRLATYHNLHAFISLVRRAREAIREGRYAAFAAAELAARGEGSR

SEQ ID NO: 59423 - protein, 380 aa, Proteus hauseri
  misc_feature (1)..(380): tr|A0A410XAV5|A0A410XAV5_PROHU Queuine tRNA-ribosyltran sferase OS=Proteus hauseri OX=183417 GN=tgt PE=3 SV=1
MKYELQTTNGNARRGRLIFDRGVVETPAFMPVGTYGTVKGMTPEEVQATGAQILLGNTFHLWLRPGQEIMKLHGDLHDFMQWKGPILTDSGGFQVFSLGAMRKIKEEGVHFRNPINGEKIFLSPEKSMEIQYDLGSDIVMIFDECTPYPSDWDYAKNSMEMSLRWAKRSRQRFDELNNKNSLFGIIQGGVYEDLRDISVKGLVEIGFDGYAVGGLAVGEPKEDMHRILEHVCPQIPADKPRYLMGVGKPEDLVEGVRRGIDMFDCVMPTRNARNGHLFVTDGVVKIRNAKHRSDTSTLDEHCDCYTCKNYSRAYLHHLDRCNEILGARLNTIHNLRYYQRLMAEIRQSIEDGRFEEFVHEFYERIGKPVPPLNSSTSKCD

SEQ ID NO: 59424 - protein, 380 aa, Proteus mirabilis
  misc_feature (1)..(380): sp|B4EU13|TGT_PROMH Queuine tRNA-ribosyltransferase OS= Proteus mirabilis (strain HI4320) OX=529507 GN=tgt PE=3 SV=1
MKYELDKTDGHARRGRLKFERGVVETPAFMPVGTYGTVKGMTPEEVEATGAQILLGNTFHLWLRPGQEIMKLHGDLHDFMQWKGPILTDSGGFQVFSLGAMRKIKEEGVHFRNPINGEKIFLSPEKSMEIQYDLGSDIVMIFDECTPYPSDWDYAKNSMEMSLRWAKRSRQRFDELNNKNALFGIIQGGVYEDLRDISVKGLVEIGFDGYAVGGLAVGEPKEDMHRILEHVCPQIPADKPRYLMGVGKPEDLVEGVRRGIDMFDCVMPTRNARNGHLFVTNGVIKIRNAKHRSDTSTLDEHCDCYTCKNYSRAYLHHLDRCNEILGARLNTIHNLRYYQRLMAEIRQAIDESRFEDFVHEFYERIGKPVPPLNSSASKCD

SEQ ID NO: 59425 - protein, 380 aa, Proteus mirabilis; identical to SEQ ID NO: 59424
  misc_feature (1)..(380): tr|A0A1Z1T052|A0A1Z1T052_PROMI Queuine tRNA-ribosyltran sferase OS=Proteus mirabilis OX=584 GN=tgt PE=3 SV=1

SEQ ID NO: 59426 - protein, 380 aa, Proteus penneri
  misc_feature (1)..(380): tr|A0A379EIZ8|A0A379EIZ8_9GAMM Queuine tRNA-ribosyltran sferase OS=Proteus penneri OX=102862 GN=tgt PE=3 SV=1
MKYELDKTDGNARRGRLIFERGVVETPAFMPVGTYGTVKGMTPEEVKATGAQILLGNTFHLWLRPGQEIMKLHGDLHDFMQWQGPILTDSGGFQVFSLGAMRKIKEEGVHFRNPINGEKIFLSPEKSMEIQYDLGSDIVMIFDECTPYPSDWDYAKNSMEMSLRWAKRSRARFDELNNKNSLFGIIQGGVYEDLRDISVKGLVEIGFDGYAVGGLAVGEPKEDMHRILEHVCPQIPANKPRYLMGVGKPEDLVEGVRRGIDMFDCVMPTRNARNGHLFVTDGVIKIRNAKHRSDTSTLDEHCDCYTCKNYSRAYLHHLDRCNEILGARLNTIHNLRYYQRLMAEIRQSIEDSRFEEFVHEFYERIGKPVPPLNGSATKCE

SEQ ID NO: 59427 - protein, 343 aa, Proteus penneri
  misc_feature (1)..(343): tr|C0AYU5|C0AYU5_9GAMM Queuine tRNA-ribosyltransferase OS=Proteus penneri ATCC 35198 OX=471881 GN=tgt PE=3 SV= 1
MKYELDKTDGNARRGRLIFERGVVETPAFMPVGTYGTVKGMTPEEVKATGAQILLGNTFHLWLRPGQEIMKLHGDLHDFMQWQGPILTDSGGFQVFSLGAMRKIKEEGVHFRNPINGEKIFLSPEKSMEIQYDLGSDIVMIFDECTPYPSDWDYAKNSMEMSLRWAKRSRARFDELNNKNSLFGIIQGGVYEDLRDISVKGLVEIGFDGYAVGGLAVGEPKEDMHRILEHVCPQIPANKPRYLMGVGKPEDLVEGVRRGIDMFDCVMPTRNARNGHLFVTDGVIKIRNAKHRSDTSTLDEHCDCYTCKNYSRAYLHHLDRCNENFRCKAEHYPQLALLSTLDG

SEQ ID NO: 59428 - protein, 375 aa, Proteus sp.; identical to SEQ ID NO: 56353
  misc_feature (1)..(375): tr|A0A1F2HDG7|A0A1F2HDG7_9GAMM Queuine tRNA-ribosyltran sferase OS=Proteus sp. HMSC10D02 OX=1581079 GN=tgt PE=3 SV=1

SEQ ID NO: 59429 - protein, 380 aa, Proteus vulgaris; identical to SEQ ID NO: 59426
  misc_feature (1)..(380): tr|A0A0G4Q896|A0A0G4Q896_PROVU Queuine tRNA-ribosyltran sferase OS=Proteus vulgaris OX=585 GN=tgt PE=3 SV=1

SEQ ID NO: 59430 - protein, 380 aa, Proteus vulgaris
  misc_feature (1)..(380): tr|A0A379F6T4|A0A379F6T4_PROVU Queuine tRNA-ribosyltran sferase OS=Proteus vulgaris OX=585 GN=tgt PE=3 SV=1
MKYELDKIDGNARRGRLIFERGVVETPAFMPVGTYGTVKGMTPEEVKATGAQILLGNTFHLWLRPGQEIMKLHGDLHDFMQWQGPILTDSGGFQVFSLGAMRKIKEEGVHFRNPINGEKIFLSPEKSMEIQYDLGSDIVMIFDECTPYPSDWDYAKNSMEMSLRWAKRSRERFDELNNKNSLFGIIQGGVYEDLRDISVKGLVEIGFDGYAVGGLAVGEPKEDMHRILEHVCPQIPADKPRYLMGVGKPEDLVEGVRRGIDMFDCVMPTRNARNGHLFVTDGVIKIRNAKHRSDTSTLDEHCDCYTCKNYSRAYLHHLDRCNEILGARLNTIHNLRYYQRLMAEIRQSIEDSRFEEFVHEFYERIGKPVPPLNGSASKCD

SEQ ID NO: 59431 - protein, 376 aa, Protochlamydia amoebophila
  misc_feature (1)..(376): tr|A0A2P9H9M8|A0A2P9H9M8_PARUW Queuine tRNA-ribosyltran sferase OS=Protochlamydia amoebophila (strain UWE25) OX =264201 GN=tgt PE=3 SV=1
MTYFKFELIHRSKKSRARVGRIHTPHGIIDTPNFVAVGTNGTVKALNNTMLHDIGLQLMFCNTYHMMLQPGTDIVRQAGGLHSFIQRKLPIITDSGGFQVFSLAYGSVADELKSRGTKKQGGCVLKITEEGVLFRSYRDGSKVLLTPESSIKAQKDLGADIIIPFDELPPYHIARDALKKSLDRTHRWEKRSLEAHLKNPQEQAMYAVVHGGIDPDLRKESCAILTELPFDGFAVGGSMGKTKDEMHTLLSLTLPLLPEDKPNHLLGIGDLPSIERSVPLGIDTFDSSYPTRAARHGILLTKQGPLNITKSEYATNFNSIEKGCLCPACHHFSLAYIHHLFKARELTCMSLATVHNLYFMVQLMEKYRKQIQEDLI

SEQ ID NO: 59432 - protein, 387 aa, Protochlamydia amoebophila
  misc_feature (1)..(387): sp|Q6MD31|TGT_PARUW Queuine tRNA-ribosyltransferase OS= Protochlamydia amoebophila (strain UWE25) OX=264201 GN= tgt PE=3 SV=1
MFYSFCKVGQYMTYFKFELIHRSKKSRARVGRIHTPHGIIDTPNFVAVGTNGTVKALNNTMLHDIGLQLMFCNTYHMMLQPGTDIVRQAGGLHSFIQRKLPIITDSGGFQVFSLAYGSVADELKSRGTKKQGGCVLKITEEGVLFRSYRDGSKVLLTPESSIKAQKDLGADIIIPFDELPPYHIARDALKKSLDRTHRWEKRSLEAHLKNPQEQAMYAVVHGGIDPDLRKESCAILTELPFDGFAVGGSMGKTKDEMHTLLSLTLPLLPEDKPNHLLGIGDLPSIERSVPLGIDTFDSSYPTRAARHGILLTKQGPLNITKSEYATNFNSIEKGCLCPACHHFSLAYIHHLFKARELTCMSLATVHNLYFMVQLMEKYRKQIQEDLI

SEQ ID NO: 59433 - protein, 375 aa, Providencia alcalifaciens
  misc_feature (1)..(375): tr|A0A4R3NJK1|A0A4R3NJK1_9GAMM Queuine tRNA-ribosyltran sferase OS=Providencia alcalifaciens OX=126385 GN=tgt P E=3 SV=1
MKYELQTTDGNARRGRLIFERGVVETPAFMPVGTYGTVKGMTPEEVKETGAQILLGNTFHLWLRPGQEIMKLHGDLHDFMQWQGPILTDSGGFQVFSLGAMRKIKEEGVHFRNPINGEKVFLSPEKSMEIQYDLGSDIVMIFDECTPYPADWDYAKTSMEMSLRWAARSRQRFDELNNKNALFGIIQGSVYEDLRDISVKGLVEIGFDGYAVGGLAVGEPKEDMHRILEHVCPQIPAEKPRYLMGVGKPEDLVEGVRRGIDMFDCVMPTRNARNGHLFVTNGVVKIRNAKYKSDTSPLDAECDCYTCRHYSRAYLHHLDRCNEILGARLNTIHNLRYYQRLMAGIRQAIEAGNFEQFAADFYQKIGKAQPSLNRE

SEQ ID NO: 59434 - protein, 375 aa, Providencia alcalifaciens
  misc_feature (1)..(375): tr|B6XA47|B6XA47_9GAMM Queuine tRNA-ribosyltransferase OS=Providencia alcalifaciens DSM 30120 OX=520999 GN=tgt PE=3 SV=1
MKYELQTTDGNARRGRLIFERGVVETPAFMPVGTYGTVKGMTPEEVKETGAQILLGNTFHLWLRPGQEIMKLHGDLHDFMQWQGPILTDSGGFQVFSLGAMRKIKEEGVHFRNPINGEKVFLSPEKSMEIQYDLGSDIVMIFDECTPYPADWDYAKTSMEMSLRWAARSRQRFDELNNKNALFGIIQGSVYEDLRDISVKGLVEIGFDGYAVGGLAVGEPKEDMHRILEHVCPQIPAEKPRYLMGVGKPEDLVEGVRRGIDMFDCVMPTRNARNGHLFVTNGVVKIRNAKYKSDTSSLDEECDCYTCRHYSRAYLHHLDRCNEILGARLNTIHNLRYYQRLMAGIRQAIEAGNFEQFAADFYQKIGKPQPSLNRA

SEQ ID NO: 59435 - protein, 375 aa, Providencia burhodogranariea
  misc_feature (1)..(375): tr|K8W1I5|K8W1I5_9GAMM Queuine tRNA-ribosyltransferase OS=Providencia burhodogranariea DSM 19968 OX=1141662 GN =tgt PE=3 SV=1
MKYELQTTDGKARRGRLVFERGVVETPAFMPVGTYGTVKGMTPEEVKETGAQILLGNTFHLWLRPGQEIMKLHGDLHDFMQWHGPILTDSGGFQVFSLGAMRKIKEEGVHFRNPINGEKVFLSPEKSMEIQNDLGSDIVMIFDECTPYPADWDYAKTSMEMSLRWAQRSRQRFDELNNKNALFGIIQGSVYEDLRDISVKGLVEIGFDGYAVGGLAVGEPKPDMHRILEHVCPQIPADKPRYLMGVGKPEDLVEGVRRGIDMFDCVMPTRNARNGHLFVTNGVVKIRNAKYKSDTSTLDPECDCYTCRHYSRAYLHHLDRCNEILGARLNTIHNLRYYQRLMAGIRQAIEEGNFEEFAQDFYQKIGKTQPSLNME

SEQ ID NO: 59436 - protein, 375 aa, Providencia heimbachae
  misc_feature (1)..(375): tr|A0A4D7J1Y9|A0A4D7J1Y9_9GAMM Queuine tRNA-ribosyltran sferase OS=Providencia heimbachae OX=333962 GN=tgt PE=3 SV=1
MKYELQTTDGNARRGRLVFERGVVETPAFMPVGTYGTVKGMTPEEVKETGAQILLGNTFHLWLRPGQDVIKLHGDLHDFMQWQGPILTDSGGFQVFSLGAMRKIKEEGVHFRNPINGEKVFLSPEKSMEIQNDLGSDIVMIFDECTPYPADWDYAKTSMEMSLRWAVRSRQRFDELNNKNALFGIIQGSVYEDLRDISVKGLVEIGFDGYAVGGLAVGEPKEDMHRILEHVCPQIPADKPRYLMGVGKPEDLVEGVRRGIDMFDCVMPTRNARNGHLFVTNGIVKIRNAKYKSDTSTLDADCDCYTCRHYSLAYLHHLDKCNEILGARLNTIHNLRYYQRLMAGIRQAIEDGNFEEFATDFYQKIGKPQPSLNRE

SEQ ID NO: 59437 - protein, 375 aa, Providencia heimbachae; identical to SEQ ID NO: 59436
  misc_feature (1)..(375): tr|A0A1B7JQ01|A0A1B7JQ01_9GAMM Queuine tRNA-ribosyltran sferase OS=Providencia heimbachae ATCC 35613 OX=1354272 GN=tgt PE=3 SV=1

SEQ ID NO: 59438 - protein, 375 aa, Providencia rettgeri
  misc_feature (1)..(375): tr|A0A1J0E3A5|A0A1J0E3A5_PRORE Queuine tRNA-ribosyltran sferase OS=Providencia rettgeri OX=587 GN=tgt PE=3 SV=1
MKYELQMTSGNARRGRLVFERGVVETPAFMPVGTYGTVKGMTPEEVKETGAQILLGNTFHLWLRPGQEVMKLHGDLHDFMQWQGPILTDSGGFQVFSLGAMRKIKEEGVHFRNPINGEKIFLSPEKSMEIQYDLGSDIVMIFDECTPYPADWDYAKTSMEMSLRWAARSRQRFDELNNKNALFGIIQGSVYEDLRDISVKGLVEIGFDGYAVGGLAVGEPKEDMHRILEHVCPQIPADKPRYLMGVGKPEDLVEGVRRGIDMFDCVMPTRNARNGHLFVTHGVVKIRNAKYKSDTSTLDADCDCYTCRHYSRAYLHHLDRCNEILGARLNTIHNLRYYQRLMAGIRQAIENGKFEEFAKDFYQKIGKPEPSLNIE

SEQ ID NO: 59439 - protein, 375 aa, Providencia rettgeri
  misc_feature (1)..(375): tr|A0A1B8SNJ5|A0A1B8SNJ5_PRORE Queuine tRNA-ribosyltran sferase OS=Providencia rettgeri OX=587 GN=tgt PE=3 SV=1
MKYELQTTDGNARRGRLVFERGVVETPAFMPVGTYGTVKGMTPEEVKETGAQILLGNTFHLWLRPGQEIMKLHGDLHDFMQWQGPILTDSGGFQVFSLGAMRKIKEEGVHFRNPINGEKVFLSPEKSMEIQYDLGSDIVMIFDECTPYPADWDYAKTSMEMSLRWAARSRQRFDELNNKNALFGIIQGSVYEDLRDISVKGLVEIGFDGYAVGGLAVGEPKEDMHRILEHVCPQIPAEKPRYLMGVGKPEDLVEGVRRGIDMFDCVMPTRNARNGHLFVTNGVVKIRNAKYKSDTSTLDAECDCYTCRHYSRAYLHHLDRCNEILGARLNTIHNLRYYQRLMAGIRQAIENGNFEEFAKDFYQKIGKPEPSLNIE

SEQ ID NO: 59440 - protein, 375 aa, Providencia rustigianii
  misc_feature (1)..(375): tr|D1P6C2|D1P6C2_9GAMM Queuine tRNA-ribosyltransferase OS=Providencia rustigianii DSM 4541 OX=500637 GN=tgt PE =3 SV=1
MKYELQTTDGNARRGRLIFERGVVETPAFMPVGTYGTVKGMTPEEVKETGAQILLGNTFHLWLRPGQEIMKLHGDLHDFMQWQGPILTDSGGFQVFSLGAMRKIKEEGVHFRNPINGEKIFLSPEKSMEIQYDLGSDIVMIFDECTPYPADWDYAKTSMEMSLRWAARSRQRFDELNNKNALFGIIQGSVYEDLRDISVKGLVEIGFDGYAVGGLAVGEPKEDMHRILEHVCPQIPAEKPRYLMGVGKPEDLVEGVRRGIDMFDCVMPTRNARNGHLFVTNGVVKIRNAKYKSDTSTLDADCDCYTCRHYSRAYLHHLDRCNEILGARLNTIHNLRYYQRLMAGIREAIEAGNFEQFASDFYEKIGKPQPSLNRE

SEQ ID NO: 59441 - protein, 375 aa, Providencia rustigianii; identical to SEQ ID NO: 59440
  misc_feature (1)..(375): tr|A0A379G0L2|A0A379G0L2_9GAMM Queuine tRNA-ribosyltran sferase OS=Providencia rustigianii OX=158850 GN=tgt PE= 3 SV=1

SEQ ID NO: 59442 - protein, 375 aa, Providencia sneebia
  misc_feature (1)..(375): tr|K8W164|K8W164_9GAMM Queuine tRNA-ribosyltransferase OS=Providencia sneebia DSM 19967 OX=1141660 GN=tgt PE=3 SV=1
MKYELQTTDGNARRGRLVFERGVVETPAFMPVGTYGTVKGMTPEEVKETGAQILLGNTFHLWLRPGQEIMKLHGDLHDFMQWQGPILTDSGGFQVFSLGAMRKIKEEGVHFRNPINGEKIFLSPEKSMEIQYDLGSDIVMIFDECTPYPADWDYAKTSMEMSLRWAARSRQRFDELNNKNALFGIIQGSIYEDLRDISVKGLVDIGFDGYAVGGLAVGEPKEDMHRILEHVCPQIPADKPRYLMGVGKPEDLVEGVRRGIDMFDCVMPTRNARNGHLFVTHGVVKIRNAKYKSDTSTLDPECDCYTCRHYSRAYLHHLDRCNEILGARLNTIHNLRYYQRLMAGIRQAIEEGNFEEFAKDFYQKIGKSQPSLNKE

SEQ ID NO: 59443 - protein, 375 aa, Providencia sp.
  misc_feature (1)..(375): tr|A0A345LX58|A0A345LX58_9GAMM Queuine tRNA-ribosyltran sferase OS=Providencia sp. WCHPHu000369 OX=2027290 GN=t gt PE=3 SV=1
MKYELQTTDGNARRGRLVFERGVVETPAFMPVGTYGTVKGMTPEEVKETGAQILLGNTFHLWLRPGQEIMKLHGDLHDFMQWQGPILTDSGGFQVFSLGAMRKIKEEGVHFRNPINGEKVFLSPEKSMEIQYDLGSDIVMIFDECTPYPADWDYAKTSMEMSLRWAARSRQRFDELNNKNALFGIIQGSVYEDLRDISVKGLVEIGFDGYAVGGLAVGEPKEDMHRILEHVCPQIPAEKPRYLMGVGKPEDLVEGVRRGIDMFDCVMPTRNARNGHLFVTNGVVKIRNAKYKSDTSTLDADCDCYTCRHYSRAYLHHLDRCNEILGARLNTIHNLRYYQRLMAGIRQAIENGNFEEFAKDFYQKIGKPEPSLNIE

SEQ ID NO: 59444 - protein, 375 aa, Providencia sp.
  misc_feature (1)..(375): tr|A0A4S2YKE9|A0A4S2YKE9_9GAMM Queuine tRNA-ribosyltran sferase OS=Providencia sp. MGF014 OX=2565573 GN=tgt PE= 3 SV=1
MKYELQTTDGNARRGRLVFERGVVETPAFMPVGTYGTVKGMTPEEVKETGAQILLGNTFHLWLRPGQEIMKLHGDLHDFMQWQGPILTDSGGFQVFSLGAMRKIKEEGVHFRNPINGEKVFLSPEKSMEIQYDLGSDIVMIFDECTPYPADWDYAKTSMEMSLRWAARSRQRFDELNNKNALFGIIQGSVYEDLRDISVKGLVEIGFDGYAVGGLAVGEPKEDMHRILEHVCPQIPADKPRYLMGVGKPEDLVEGVRRGIDMFDCVMPTRNARNGHLFVTNGVVKIRNAKYKSDTSTLDADCDCYTCRHYSRAYLHHLDRCNEILGARLNTIHNLRYYQRLMAGIRQAIENGNFEEFAKDFYQKIGKPEPSLNIE

SEQ ID NO: 59445 - protein, 375 aa, Providencia stuartii
  misc_feature (1)..(375): tr|A0A140NK59|A0A140NK59_PROSM Queuine tRNA-ribosyltran sferase OS=Providencia stuartii (strain MRSN 2154) OX=1 157951 GN=tgt PE=3 SV=1
MKYELQTTDGNARRGRLIFERGVVETPAFMPVGTYGTVKGMTPEEVKETGAQILLGNTFHLWLRPGQEIMKLHGDLHDFMQWQGPILTDSGGFQVFSLGAMRKIKEEGVHFRNPINGEKIFLSPEKSMEIQYDLGSDIVMIFDECTPYPADWDYAKTSMEMSLRWAARSRQRFDELNNKNALFGIIQGSVYEDLRDISVKGLVEIGFDGYAVGGLAVGEPKEDMHRILEHVCPQIPADKPRYLMGVGKPEDLVEGVRRGIDMFDCVMPTRNARNGHLFVTNGVVKIRNAKYKSDTSTLDPECDCYTCRHYSRAYLHHLDRCNEILGARLNTIHNLRYYQRLMAGIRQAIEDGNFEEFAKDFYQKIGKSQPSLNME

SEQ ID NO: 59446 - protein, 375 aa, Providencia stuartii; identical to SEQ ID NO: 59445
  misc_feature (1)..(375): tr|B2Q6X3|B2Q6X3_PROST Queuine tRNA-ribosyltransferase OS=Providencia stuartii ATCC 25827 OX=471874 GN=tgt PE= 3 SV=1

SEQ ID NO: 59447 - protein, 376 aa, Unknown
  misc_feature (1)..(376): tr|A0A368DZY8|A0A368DZY8_9PROT Queuine tRNA-ribosyltran sferase OS=PS1 clade bacterium OX=2175152 GN=tgt PE=3 S V=1
MDFKLHSKDGKARQGSVITPRGEIRTPAFMPVGTAGTVKAMYMDQVKDLGADIVLGNTYHLMLRPGAEEVAALGGLHSFMKWDGPILTDSGGFQVMSLSKLRKMSEEGVNFQSHIDGKSYMLTPERSIEIQTLLGANIRMILDECTPFPATEKQARDSMALSTRWAERSKKAFEHYDKGEGDALFGIVQGGVYESLRQESVSNLLDIGFDGYAVGGLAVGEGQEEMLKVLDFTVPALPENKPRYLMGVGTPEDLVLAVSRGIDMFDCVMPTRAGRHGLAYTRKGKVNLKNARHANDHRPLDEESDCPAASQYSRAYLHHLVRCGEYLAAMLLTWNNLHYYQSLMQEMRQNIEAGSFDAFVAAFYKDQNEGDLPPID

SEQ ID NO: 59448 - protein, 370 aa, Unknown
  misc_feature (1)..(370): tr|A0A368DNI2|A0A368DNI2_9PROT Queuine tRNA-ribosyltran sferase OS=PS1 clade bacterium OX=2175152 GN=tgt PE=3 S V=1
MTFEIKKTDGKARNCILNLPNGFVETPVFMPVGTQGTVKAMFTEKLDEIGFKIILANTYHMFLRPGCEVLDNFGGLNNFMQWDKPLLTDSGGFQIMSLSKLTKIENDGVYFKSHIDGKRFFLTPKLSMDIQNSIGSDIQMVLDQCVEYNTDEEKIKNAMSLSLKWAELSKKSFSKKNKRKLFGIVQGGINPDLRKHSAEETIKIGFDGYAIGGLAVGEGHKLMVQTLDNTIPFLPKNKPRYLMGVGTPLDLVESVRRGVDMFDCVMPTRAGRHGLAYTCNGNINIRNSKYSNDNKPIDPYSKCPITSKYSRAYLHHLFKAKELLGSMILTYINLRYYDDLMIKLRKAIRDQKYDEIANQIYEKWDKKENI

SEQ ID NO: 59449 - protein, 392 aa, Pseudacidovorax intermedius
  misc_feature (1)..(392): tr|A0A147GX04|A0A147GX04_9BURK Queuine tRNA-ribosyltran sferase OS=Pseudacidovorax intermedius OX=433924 GN=tgt PE=3 SV=1
MTALQFDLLATDPDSHARRGTLTLNHGVVQTPIFMPVGTYGTVKGVMPRSLEEMGAQIILGNTFHLWMRPGLDVMGAFGGLHAFEQWNKPILTDSGGFQVWSLGAMRKISEEGVKFASPVNGDKLLLTPEVSMQIQTVLNSDIVMQFDECTPYETQGRITNEAEARRSMELSLRWARRCQAEFARLQNPNALFGIVQGGMFEHLREESLAALVEMDFPGYAVGGVSVGEPKEDMRRITAHTPHRLPAHKPRYLMGVGTPEDLVEGVAQGVDMFDCVMPTRNARNGTIFTRYGDLKLRNARHRNDPQPLDPSCTCHACAGTAGVSWADGGRGGFSRAYLHHLDRCGEMLGPMLTTIHNLHYYLNLMREIREALDAGRFGEFRRQFASDRARGV

SEQ ID NO: 59450 - protein, 392 aa, Pseudacidovorax intermedius
  misc_feature (1)..(392): tr|A0A370FLB9|A0A370FLB9_9BURK Queuine tRNA-ribosyltran sferase OS=Pseudacidovorax intermedius OX=433924 GN=tgt PE=3 SV=1
MTALQFDLLATDPDSHARRGTLTLNHGVVQTPIFMPVGTYGTVKGVMPRSLEEMGAQIILGNTFHLWMRPGLDVMGAFGGLHAFEQWNRPILTDSGGFQVWSLGAMRKISEEGVKFASPVNGDKLLLTPEVSMQIQTVLNSDIVMQFDECTPYETQGRITTEAEARRSMELSLRWAKRCQAEFARLQNPNALFGIVQGGMFEHLREESLAALVEMDFPGYAVGGVSVGEPKEDMRRITAHTPHRLPAHKPRYLMGVGTPEDLVEGVAQGVDMFDCVMPTRNARNGTIFTRYGDLKLRNARHRNDPQPLDPSCTCHACAGTAGVPWADGGRGGFSRAYLHHLDRCGEMLGPMLATIHNLHYYLNLMREIREALDAGRFGEFRRQFASDRARGV

SEQ ID NO: 59451 - protein, 392 aa, Pseudacidovorax sp.
  misc_feature (1)..(392): tr|A0A1N6VJD2|A0A1N6VJD2_9BURK Queuine tRNA-ribosyltran sferase OS=Pseudacidovorax sp. RU35E OX=1907403 GN=tgt PE=3 SV=1
MTALQFDLLATDPDSHARRGTLTLNHGVVQTPIFMPVGTYGTVKGVMPRSLEEMGAQIILGNTFHLWMRPGLDVMGAFGGLHAFEQWHKPILTDSGGFQVWSLGAMRKISEEGVKFASPVNGDKLLLTPEVSMQIQTVLNSDIVMQFDECTPYETQGRITTEAEARRSMELSLRWAKRCQAEFARLQNPNALFGIVQGGMFEHLREESLAALVEMDFPGYAVGGVSVGEPKEDMRRITAHTPHRLPAHKPRYLMGVGTPEDLVEGVAQGVDMFDCVMPTRNARNGTIFTRYGDLKLRNARHRNDPQPLDPSCTCHACAGTAGESWADGGRGGFSRAYLHHLDRCGEMLGPMLTTIHNLHYYLNLMREIREALDAGRFGEFRRQFASDRARGV

SEQ ID NO: 59452 - protein, 376 aa, Pseudaestuariivita atlantica
  misc_feature (1)..(376): tr|A0A0L1JNI0|A0A0L1JNI0_9RHOB Queuine tRNA-ribosyltran sferase OS=Pseudaestuariivita atlantica OX=1317121 GN=t gt PE=3 SV=1
MGRTFDFTLTATDGRARTGVIDTPRGAIRTPAFMPVGTAATVKAMLPESVAATGADILLGNTYHLMLRPTAERIARLGGLHGFMNWDRPILTDSGGFQVMSLAELRKLTEEGVTFRSHIDGSRHMLTPERSMEIQRLLGSDIVMCFDECPALPADRDRIADSMELSMRWAARSKAAFGDRPGHALFGIQQGGLEEDLRKASAEALVDIGFDGYAVGGLAVGEGQEAMFACLDYAPEQLPQDKPRYLMGVGKPDDIVGAVKRGIDMMDCVLPSRSGRTGQAWTRRGQVNIKNARHADDPRPLDEACACPACRSYSRAYLHHVFRAGEMISGMLLTWHNLHYYQDLMGRMRDAISSGEFNAFEREFHAEREAGDIPPL

SEQ ID NO: 59453 - protein, 376 aa, Pseudaminobacter manganicus
  misc_feature (1)..(376): tr|A0A1V8RJA5|A0A1V8RJA5_9RHIZ Queuine tRNA-ribosyltran sferase OS=Pseudaminobacter manganicus OX=1873176 GN=tg t PE=3 SV=1
MNSEFAFHLIATDGIARRGEIAMPRGTIRTPAFMPVGTGGTVKAMYLDQVRALGADIILGNTYHLMLRPGAERMARLGGLHEFARWPYPILTDSGGFQVMSLSKLRKLTEHGVTFRSHIDGAAYEMTPERSIEIQGLLDSDIQMQLDECTALPAPHKEVERAMELSLRWAERCKAAFGVQPGKAIFGIVQGGDVADLRVKSAQALSAMDLKGYAVGGLAVGEPQAVMLEMLEITCPELPANKPRYLMGVGTPDDILKSVARGIDMFDCVMPTRAGRHGLAYTRRGKVNLRNARHADDPRPLDEQSDCPAARDYSRAYLHHLVRSQEALGAMLLTWNNLAYYQSLMQDIRDSIEKGEFTTRAAGISENWARGDIAAL

SEQ ID NO: 59454 - protein, 376 aa, Pseudaminobacter salicylatoxidans
  misc_feature (1)..(376): tr|A0A316CU76|A0A316CU76_PSESE Queuine tRNA-ribosyltran sferase OS=Pseudaminobacter salicylatoxidans OX=93369 G N=tgt PE=3 SV=1
MSTEFTFKVLATDGKARRGEITMPRGTIRTPAFMPVGTGGTVKTMYMDQVRDLGADIILGNTYHLMLRPGAERVARLGGLHEFARWPHPILTDSGGFQVMSLSKLRKITEKGVTFRSHIDGAPYEMSPERSIEIQGLLDSDIQMQLDECTALPAKEREIERAMELSLRWADRCKTAFGDQPGKAMFGIVQGGDNARLRERSAQSLASLGLKGYAVGGLAVGEPQDVMLDMLDVTCPELPADKPRYLMGVGTPDDIVKSVARGIDMFDCVMPTRAGRHGLAYTRRGKVNLRNARHADDHRPLDEESDCPAARDYSRAYLHHLVRSQEALGAMLLTWNNLSYYQSLMQGLRDAIEQGRYAEHVAEVSEGWARGDIPAL

SEQ ID NO: 59455 - protein, 376 aa, Pseudaminobacter sp.
  misc_feature (1)..(376): tr|A0A432V6U9|A0A432V6U9_9RHIZ Queuine tRNA-ribosyltran sferase OS=Pseudaminobacter sp. CB3 OX=1851146 GN=tgt P E=3 SV=1
MTQEFSFRLIATDGKARRGEISMPRGTVRTPAFMPVGTGGTVKAMYMDQVRDLGSDIILGNTYHLMLRPGAERVARLGGLHEFARWPYPILTDSGGFQVMSLSKLRKLTEKGVTFRSHIDGVPYEMTPERSIEIQGLLDSDIQMQLDECIALPAKESDVERAMELSLRWAERCKAAFGTQQGKAMFGIVQGGDVALLRERSAQVLSGLDLKGYAVGGLAVGEPQPVMLDMLDVTCPQLPGDKPRYLMGVGTPDDILKSVARGIDMFDCVMPTRAGRHGLAYTRRGKINLRNARHAEDHRPLDEESDCPASRDYSRAYLHHLVKSQESLGAMLLTWNNLAYYQRLMADIRGAVEAGTFGERAALITEGWARGDIPTL

SEQ ID NO: 59456 - protein, 345 aa, Pseudanabaena biceps
  misc_feature (1)..(345): tr|L8N1U5|L8N1U5_9CYAN Queuine tRNA-ribosyltransferase OS=Pseudanabaena biceps PCC 7429 OX=927668 GN=tgt PE=3 SV=1
MPVGTLANVKTVTPAQLKECKAEMILANTYHLHLQPGEDIVAEAGGLHKFMNWDGPILTDSGGFQVFSLSEIRSISENGVQFRSPRDGNTINLTPEKSIQIQNQLGADVIMAFDECAPYPATYEAVKLAGQRTTRWLERCIKAHDRKDDQALFGIVQGGVFLDLRQQSARELIEFDLPGYAIGGVSVGEPPELIEKIVKATTPLLPADKPRYLMGVGTYKEMAQAVAAGIDLFDCVIPTRFARHSVALVRGERWNLKNQKFKRDFTPIDRECNCYACQNFSRAYISHLVRSQEILGYTLLSIHNITELIRFTQQMRQAIIENCFVEKFGHYLVEDSPAHADKVGH

SEQ ID NO: 59457 - protein, 378 aa, Pseudanabaena frigida
  misc_feature (1)..(378): tr|A0A2W4WKC4|A0A2W4WKC4_9CYAN Queuine tRNA-ribosyltran sferase OS=Pseudanabaena frigida OX=945775 GN=tgt PE=3 SV=1
MNNFTFKLECKCCHTDARVGQFNTPHGVVHTPRFMPVGTLANVKTVTPAQLQDCKAEMVLANTYHLHLQPGEDIVAEAGGLHKFMNWDGPILTDSGGFQVFSLSEIRSISEEGVKFRSPREGNMIDLTPEKSIQIQNQLGADVIMAFDECAPYPATYDAVKLAGQRTTRWLERCIKAHDRQDVQALFGIVQGGVYLDLRQQSARELIQFDLPGYAIGGVSVGEPPELIEKIVKATTPLLPKNKPRYLMGVGTYKEMAQAVASGIDLFDCVIPTRLARHSVGLVKGDRWNLKNQKFKRDFTPLDRDCPCYACQNFSRAYISHLVRSQEILGYTLLSIHNITELIRFTQQMRQAIIENRFVEEFGHYLTKSPSLIEGHHQ

SEQ ID NO: 59458 - protein, 378 aa, Pseudanabaena sp.
  misc_feature (1)..(378): tr|A0A256BKR8|A0A256BKR8_9CYAN Queuine tRNA-ribosyltran sferase OS=Pseudanabaena sp. SR411 OX=1980935 GN=tgt PE =3 SV=1
MNNFTFKLECQCDLTDARVGQFHTPHGVVHTPRFMPVGTLANVKTVTPAQLKDCKAEMVLANTYHLHLQPGEDIVSEAGGLHKFMNWDGPILTDSGGFQVFSLSEIRSISEEGVQFRSPRDGNMINLTPEKSIQIQNQLGADVIMAFDECAPYPSTYEAIKLAGQRTTRWLERCIKAHDRKNDQALFGIVQGGVYLDLRQQSARELIEFDLPGYAIGGVSVGEPPELIEKIVRATTPLLPTDKPRYLMGVGTYKEMAQAVAAGIDLFDCVIPTRFARHSVALVKGERWNLKNQKFKRDFTPIDSDCDCYACQNFSRAYISHLVRSQEILGYTLLSIHNITELIRFTQQMRQAIIDNQFVEKFGHYLSKSSSFAEERHP

SEQ ID NO: 59459 - protein, 382 aa, Pseudanabaena sp.
  misc_feature (1)..(382): tr|K9SHT2|K9SHT2_9CYAN tRNA-guanine transglycosylase, v arious specificities OS=Pseudanabaena sp. PCC 7367 OX=8 2654 GN=Pse7367_1026 PE=4 SV=1
MDEATSTITTSQNTLKLPHGELQLPAFLPDATVGVVRSLDAQDLEQCGIQALVMNAFHLMQRPGSSTVSALGGIHRMSGWQRPIFTDSGGFQAYSLIRANSKYGSISDRGLIFYPEGSQRKLKLTPEKTIQLQMGYGADLLFCLDDCTNAEDSLDVQEVSVKRTIAWAKRCKAEFVRLLEQKKIDLNSSDRPLLFAVLQGGGSFELRRECAEALLEIGFDGYGFGGWPLDQHGNLLTDILAFCRSLIPKQFPMHALGIGHPQNVLAVARMGYELFDCVMPTRDARHGRLYAFTRELDDLPEAMDSSWFSYVYAQDKKHIKANQAIAPFCDASCCQRYSLGYLHHLFNINDTLYYRLATIHNLRFMARLMELLRKNLRRDQNI

SEQ ID NO: 59460 - protein, 378 aa, Pseudarcicella hirudinis
  misc_feature (1)..(378): tr|A0A1I5VVC1|A0A1I5VVC1_9BACT Queuine tRNA-ribosyltran sferase OS=Pseudarcicella hirudinis OX=1079859 GN=tgt P E=3 SV=1
MTFDIKTTDPNSNARAGVIQTDHGQILTPIFMPVGTAGSVKAVHQRELKEDINAQIILGNTYHLYLRPGLDIIEKAGGLHKFNGWDKPILTDSGGYQVYSLSGTGRKIKEEGVTFKSHIDGSKHIFTPEKVMDIQRTIGADIIMAFDECTPYPCEYEYARESMEMTHRWLKRCCEHFDATEPKYGYSQTLFPIVQGSVYKDLRKKSAEAIAEFGREGNAIGGLSVGEPAEMMYEMTELVTDILPKDKPRYLMGVGTPANILESIALGIDMFDCVMPTRNARNGMLFTTQGVINIRNEKWKDDFSVLDPGLPESYVSSFYTKAYLRHLVKSDEMLGAMIASVHNLTFYLWLVSQARERILNGTFKSWKDRMVVQLMEKL

SEQ ID NO: 59461 - protein, 377 aa, Pseudarcicella sp.
  misc_feature (1)..(377): tr|A0A2S2DRH8|A0A2S2DRH8_9BACT Queuine tRNA-ribosyltran sferase OS=Pseudarcicella sp. HME7025 OX=2183547 GN=tgt PE=3 SV=1
MKFEIQSTDVHSKARAGSLSTDHGTIQTPIFMPVGTAGTVKGVHISELTDPIKAQIILGNTYHLYLRPGLEVIEAAGGLHKFNSWNGPILTDSGGYQVYSLAGTGRKIVEEGVKFKSHIDGSTHFFSPESVMDIQRTIGADIMMAFDECTPYPCTYEYARKSMEMTHRWLDRCINRFEATEPKYGHNQALFPIVQGSVYKDLRKISAEYIAEKGAFGNAIGGLSVGEPVEDMYEMADEVTDILPKDKPRYLMGVGTPANILEGIALGIDMFDCVMPTRNARNGMIFTTQGIINIKNEKWKSDFSVIDPAFADTVHGQYSKAYVRHLIRCEEMLGAMIASVCNLRFYLWLVGEARKEILQGSFTSWKNRMIPQLMQRL

SEQ ID NO: 59462 - protein, 434 aa, Pseudarthrobacter chlorophenolicus
  misc_feature (1)..(434): tr|B8HC14|B8HC14_PSECP Queuine tRNA-ribosyltransferase OS=Pseudarthrobacter chlorophenolicus (strain ATCC 7007 00 / DSM 12829 / CIP 107037 / JCM 12360 / KCTC 9906 / N CIMB 13794 / A6) OX=452863 GN=tgt PE=3 SV=1
MPANPAPATTSDPALPAEQSAFSFTVGTRLGESCPPSAAQVSENGGEFLGRTGTITTPHGEIRTPAFIAVGTKATVKAVLPESMADLGAQALLANAYHLYLQPGADILDEAGGLGSFMNWAGPTFTDSGGFQVMSLGSGFKKVIDMKSVDASGPDDAVAPGKERLAHIDDDGVWFKSHLNGDRHRFSPEISMQVQHQIGADIMFAFDELTTLQNSRGYQEESLERTRLWAERCIAEHFRLTGERMGKPYQALFGVIQGAQYEDLRRKACRDLGAMPFDGFGIGGALEKENLGTIVRWCNEELPEDKPRHLLGISEPDDIFTAIENGADTFDCVSPTRVARNSAFYHPTGRYNLSGAKYKRDFGPLQDGCDCYTCQNYSRAYIHHLFKAKEMVSATLISIHNERFVVKMVDDARLAIEAGTFFDFKAETLANYYS

SEQ ID NO: 59463 - protein, 434 aa, Pseudarthrobacter equi
  misc_feature (1)..(434): tr|A0A1H1VHW7|A0A1H1VHW7_9MICC Queuine tRNA-ribosyltran sferase OS=Pseudarthrobacter equi OX=728066 GN=tgt PE=3 SV=1
MPANPAPATTPDPALPAEQSAFSFTVGTRLSESCPPSAAHVSENGGEFLGRTGTITTPHGEIRTPAFIAVGTKATVKAVLPESMADLGAQALLANAYHLYLQPGADILDEAGGLGSFMNWAGPTFTDSGGFQVMSLGSGFKKVIDMKSVDASGPDDAVAPGKERLAHIDDDGVWFKSHLNGDRHRFSPEISMQVQHQIGADIMFAFDELTTLQNSRGYQEESLERTRLWAERCIAEHFRLTGERVGKPYQALFGVIQGAQYEDLRRKACRDLGAMPFDGFGIGGALEKENLGTIVRWCNEELPENKPRHLLGISEPDDIFTAIENGADTFDCVSPTRVARNSAFYHPTGRYNLSGARYKRDFGPLQDGCDCYTCQNYSRAYIHHLFKAKEMVSATLISIHNERFVVKMVDDARLAIESGTFFDFKAETLANYYS

SEQ ID NO: 59464 - protein, 434 aa, Pseudarthrobacter phenanthrenivorans
  misc_feature (1)..(434): tr|F0MBE8|F0MBE8_PSEPM Queuine tRNA-ribosyltransferase OS=Pseudarthrobacter phenanthrenivorans (strain DSM 186 06 / JCM 16027 / LMG 23796 / Sphe3) OX=930171 GN=tgt PE =3 SV=1
MPANPAPALPADPSARADQSQFSFTVGTRLAESCPPSSTQTAENGGRFLGRTGTMSTPHGDIRTPAFIAVGTKATVKSVLPESMAELGAQALLANAYHLYLQPGADILDEAGGLGAFMNWPGPTFTDSGGFQVMSLGSGFKKVIDMKSVDASGPDDAVAPGKERLAHIDDDGVWFKSHLNGDRHRFSPEISMQVQHQIGADIMFAFDELTTLQNSRRYQEESLERTRLWALRCLEEHFRLTSSRVGKPYQALFGVIQGAQYEDLRRKACRDLGAMPFDGYGIGGALEKENLGTIVRWCNEELPEDKPRHLLGISEPDDIFTAIENGADTFDCVSPTRVARNSAFYTPQGRFNLSGAKYKRDFGPLQDGCDCYACANYSRAYIHHLFKAKEMLSATLISIHNERFVVKMVDDARLAIEDGTFFDFKAETLGQYYS

SEQ ID NO: 59465 - protein, 428 aa, Pseudarthrobacter phenanthrenivorans
  misc_feature (1)..(428): tr|A0A0B4D8X2|A0A0B4D8X2_9MICC Queuine tRNA-ribosyltran sferase OS=Pseudarthrobacter phenanthrenivorans OX=3615 75 GN=tgt PE=3 SV=1
MPANPAFALPDTRSQFSFTVGTRLAESNPPTDAQVAGNGGGFLGRTGTITTPHGDIQTPAFIAVGTKATVKAVLPESMADLGAQALLANAYHLYLQPGPDILDEAGGLGRFMNWPGPTFTDSGGFQVMSLGSGFKKVIDMKSVDASGPDDAVAPGKERLAHIDDDGVWFKSHLNGDRHRFSPEISMQVQHRIGADIMFAFDELTTLQNSRRYQEESLERTRLWAERCIAEHFRLSGERAAKPYQALFGVIQGAQYEDLRRKACRDLGAMPFDGFGIGGALEKENLGTIVRWCNEELPEDKPRHLLGISEPDDIFTAIENGADTFDCVSPTRVARNSAFYTPYGRFNLSGAKYKRDFGPLQDGCDCYACTNYSRAYIHHLFKAKEMLSATLISIHNERFVVKMVDDARLAIESGTFFDFKAETLGRYYS

SEQ ID NO: 59466 - protein, 449 aa, Pseudarthrobacter siccitolerans
  misc_feature (1)..(449): tr|A0A024H769|A0A024H769_9MICC Queuine tRNA-ribosyltran sferase OS=Pseudarthrobacter siccitolerans OX=861266 GN =tgt PE=3 SV=1
MPANPASASSPSAPAAAPAVETALHGALSRQSEFGFRVGSRLAEACPASAAQVADNGGEFLGRTGTITTPHGEIRTPAFIAVGTKATVKAVLPESMADLGAQALLANAYHLYLQPGADILDEAGGLGAFMNWTGPTFTDSGGFQVMSLGSGFKKVIDMKTVSSADAAVPDDAVAPGKERLAHIDDDGVWFKSHLNGDKHRFSPEISMQVQHRIGADIMFAFDELTTLQNSRGYQEESLERTRLWAERCITEHFRLTGSRAGKPYQALFGVIQGAQYEDLRRKACRDLGAMPFDGFGIGGALEKENLGTIVRWCNEELPEDKPRHLLGISEPDDIFTAIENGADTFDCVSPTRVARNSAFYTPQGRFNLSGAKYKRDFGPLQDGCDCYTCTHYSRAYIHHLFKAKEMLSATLISIHNERFVVKMVDDARLAIEAGTFFEFKAETLGQYYS

SEQ ID NO: 59467 - protein, 431 aa, Pseudarthrobacter sp.
  misc_feature (1)..(431): tr|A0A365D0B0|A0A365D0B0_9MICC Queuine tRNA-ribosyltran sferase OS=Pseudarthrobacter sp. AG30 OX=2249742 GN=tgt PE=3 SV=1
MPANPAFALPETQSQFSFTVGTRLADSCPPSAAQERENGGEFLGRTGTITTPHGEIQTPAFIAVGTKATVKAVLPESMADLGAQALLANAYHLYLQPGPDILDEAGGLGAFMNWSGPTFTDSGGFQVMSLGSGFKKVIDMKTVAAAGAPGPDDAVAPGKERLAHIDDDGVWFKSHLNGDRHRFSPEISMQVQHQIGADIMFAFDELTTLQNSRRYQEESLERTRLWAVRCIEEHFRLTEDRAGKPYQALFGVIQGAQYEDLRRKACRDLGAMPFDGFGIGGALEKENLGTIVRWCNEELPEDKPRHLLGISEPDDIFTAIENGADTFDCVSPTRVARNSAFYTPYGRFNLSGAKYKRDFGPLQEGCDCYACANYSRAYIHHLFKAKEMVSATLISIHNERFVVKMVDDARLAIESGTFFDFKAETLGRYYS

SEQ ID NO: 59468 - protein, 451 aa, Pseudarthrobacter sp.
  misc_feature (1)..(451): tr|A0A3P5WF80|A0A3P5WF80_9MICC Queuine tRNA-ribosyltran sferase OS=Pseudarthrobacter sp. T11b OX=2483813 GN=tgt PE=3 SV=1
MPANPAPDQSPATPVSDRHPGGALSAAPASTFTARQAEFGFQIGTRLAESCAPTAAHVAQNGGDFLGRTGVISTPHGEIRTPAFIAVGTKATVKAVLPESMADLGAQALLANAYHLYLQPGADILDEAGGLGSFMNWPGPTFTDSGGFQVMSLGSGFKKVIDMKSVDTSGPDDSVAPGKERLAHIDDDGVWFKSHLNGDKHRFSPEISMQVQHQIGADIMFAFDELTTLQNSRGYQEESLERTRLWALRCIAEHANLTEARATKPYQALFGVIQGAQYEDLRRQACLDLGAMPFDGFGIGGALEKENLGTIVRWCNEELPENKPRHLLGISEPDDIFTAIENGADTFDCVSPTRVARNSAFYTPQGRFNLSGAKYKRDFGPLQDGCDCYTCTNYSRAYIHHLFKAKEMLSATLISIHNERFVVKMVDDARLAIEAGTFFDFKAETLGQYYA

SEQ ID NO: 59469 - protein, 448 aa, Pseudarthrobacter sulfonivorans
  misc_feature (1)..(448): tr|A0A0U3NVW3|A0A0U3NVW3_9MICC Queuine tRNA-ribosyltran sferase OS=Pseudarthrobacter sulfonivorans OX=121292 GN =tgt PE=3 SV=1
MPANPASAPFVSVSAASADPVAAAAGSAAAADQSQFSFAVGTRLADSCAPSSAQVSASGGEFLGRTGTITTPHGKIRTPAFIAVGTKATVKSVLPESMADLGAQALLANAYHLYLQPGADILDEAGGLGAFMNWSGPTFTDSGGFQVMSLGSGFKKVIDMKSVDTSGPDDAVAPGKERLAHIDDDGVWFKSHLNGDRHRFSPEISMQVQHQIGADIIFAFDELTTLQNSRGYQEESLERTRLWALRCLEEHFRLTAERVGKPYQALFGVIQGAQYEDLRRKACRDLGAMDFDGYGIGGALEKENLGTIVRWCNEELPEDKPRHLLGISEPDDIFTAIENGADTFDCVSPTRVARNSAFYTPAGRFNLSGAKYKRDFGPLQDGCDCYACANYSRAYIHHLFKAKEMLSATLISIHNERFVVKMVDDARLAIEAGTFFEFKAETLAQYYR

SEQ ID NO: 59470 - protein, 375 aa, Pseudescherichia vulneris
  misc_feature (1)..(375): tr|A0A090VTP3|A0A090VTP3_PSEVU Queuine tRNA-ribosyltran sferase OS=Pseudescherichia vulneris NBRC 102420 OX=111 5515 GN=tgt PE=3 SV=1
MKFELDTTDGRARRGRLVFARGVVETPAFMPVGTYGTVKGMTPEEVEATGAQILLGNTFHLWLRPGQEIMKLHGDLHDFMQWKGPILTDSGGFQVFSLGDIRKITEAGVHFRNPINGDPIFLDPEKSMEIQYDLGSDIVMIFDECTPYPADWDYAKRSMEMSLRWAQRSRDRFDSLGNKNALFGIIQGSVYEDLRDISVKGLVEIGFDGYAVGGLAVGEPKEDMHRILEHVCPQIPADKPRYLMGVGKPEDLVEGVRRGIDMFDCVMPTRNARNGHLFVTNGVVKIRNAKYKSDTGPLDEECDCYTCRNYSLAYLHHLDRCNEILGARLNTIHNLRHYQRLMAGLRKAIEEGKLESFVTDFYERQGRPVPPLNVD

SEQ ID NO: 59471 - protein, 371 aa, Pseudidiomarina sp.
  misc_feature (1)..(371): tr|A0A443YYA9|A0A443YYA9_9GAMM Queuine tRNA-ribosyltran sferase OS=Pseudidiomarina sp. R04H25 OX=2487740 GN=tgt PE=3 SV=1
MKFELLKTSGKARRGRMTFARGVVDTPAFMPVGTAGTVKGMTPEEVKATGAQICLGNTFHLMLRPGTAIIKQHGDLHDFMNWDKPILTDSGGFQVFSLGELRKITEEGVTFRSPINGEKILLTPEKSMEVQRDLGSDIVMIFDECTPYPATQAEARSSMELSLRWAERSKTAHGDNPSALFGIIQGGMYEELRSISLEGLTDIGFDGYAIGGLSVGEPKEDMMRILDHIAPEMPIDKPRYLMGVGKPEDLVEAVRRGVDMFDCVMPTRNARNGHLFISTGVVKIRNAVHRTDTGPLDPECDCYTCKNYSRAYLHHLDRSNEMLGGRLNTIHNLHFYQKVMQDLRDAIEQDRLEEHVAEFYAKRNLDVPALK

SEQ ID NO: 59472 - protein, 374 aa, Pseudoalteromonadaceae bacterium
  misc_feature (1)..(374): tr|A0A2D7MZU6|A0A2D7MZU6_9GAMM Queuine tRNA-ribosyltran sferase OS=Pseudoalteromonadaceae bacterium OX=2026783 GN=tgt PE=3 SV=1
MKFELDRTDGKARRGRLIFDRGVIETPAFMPVGTYGTVKGMTPDEVKATGAQICLGNTFHLMLRPGTEIIKQHGDLHDFMNWDFPILTDSGGFQVFSLGAMRKITEEGVLFQSPVNGDQIMMSPEKSMEVQRDLGSDIVMIFDECTPYPATEKEAKDSMELSLRWAKRSKEGHGDNPSALFGIIQGGMYPELRAQSQKGLEEIGFDGYALGGLSVGEPKNEMMNILDHCAYKMPEDKPRYLMGVGKPEDLVESVRRGIDMFDCVMPTRNARNGHLFITTGTIKIRNAVHKTDTGPLDPECDCHTCKNYSRAYLHHLDKCNEILGARLNTIHNLRYYQRVMEGLRNAISEGKLEEFVSDFYARRGQDVPELADIN

SEQ ID NO: 59473 - protein, 375 aa, Pseudoalteromonadaceae bacterium
  misc_feature (1)..(375): tr|A0A2D6VNH6|A0A2D6VNH6_9GAMM Queuine tRNA-ribosyltran sferase OS=Pseudoalteromonadaceae bacterium OX=2026783 GN=tgt PE=3 SV=1
MKFELDRTDGKARRGRLIFERGVVETPAFMPVGTYGTVKGMTPDEVKDTGAQICLGNTFHLMLRPGTEIIKQHGDLHDFMNWDRPILTDSGGFQVFSLGAMRKITEEGVMFSSPVNGEKIMLSPEKAMQVQRDLGSDIVMIFDECTPYPATEKEAKDSMELSLRWAKRSKEGHGDNPAALFGIIQGGMYPELRAQSQKGLEEIGFDGYALGGLSVGEPKNEMINILDHCAYKMPEDKPRYLMGVGKPEDLVEAVRRGIDMFDCVMPTRNARNGHLFVTGGIVKIRNAVHKTDTGPLDPECDCHTCKNYSRAYLHHLDKCNEILGARLNTIHNLRYYQRVMEGLRNAISNGKLDEFVADFYARRGQEVPELADTSD

SEQ ID NO: 59474 - protein, 374 aa, Pseudoalteromonas agarivorans; identical to SEQ ID NO: 59472
  misc_feature (1)..(374): tr|A0A290RW87|A0A290RW87_9GAMM Queuine tRNA-ribosyltran sferase OS=Pseudoalteromonas agarivorans DSM 14585 OX=1 312369 GN=tgt PE=3 SV=1

SEQ ID NO: 59475 - protein, 374 aa, Pseudoalteromonas agarivorans; identical to SEQ ID NO: 59472
  misc_feature (1)..(374): tr|N6W674|N6W674_9GAMM Queuine tRNA-ribosyltransferase OS=Pseudoalteromonas agarivorans S816 OX=1307437 GN=tgt PE=3 SV=1

SEQ ID NO: 59476 - protein, 375 aa, Pseudoalteromonas aliena
  misc_feature (1)..(375): tr|A0A1Q2GYH9|A0A1Q2GYH9_9GAMM Queuine tRNA-ribosyltran sferase OS=Pseudoalteromonas aliena OX=247523 GN=tgt PE =3 SV=1
MKFELDRTDGKARRGRLIFDRGVIETPAFMPVGTYGTVKGMTPDEVKATGAQICLGNTFHLMLRPGTEIIKQHGDLHDFMNWDFPILTDSGGFQVFSLGAMRKITEEGVLFSSPVNGEKIMMSPEKSMEVQRDLGSDIVMIFDECTPYPATEKEAKDSMELSLRWAKRSKEGHGDNPSALFGIIQGGMYPELRAQSQAGLEEIGFDGYALGGLSVGEPKNEMMNILDHCAFKMPEDKPRYLMGVGKPEDLVESVRRGIDMFDCVMPTRNARNGHLFITTGVVKIRNAVHKTDTGPLDPECDCHTCGNYSRAYLHHLDKCNEILGARLNTIHNLRYYQRVMEGLRNAISEGKLEEFVQDFYARRGQEVPELADIKN

SEQ ID NO: 59477 - protein, 374 aa, Pseudoalteromonas amylolytica
  misc_feature (1)..(374): tr|A0A1S1MW09|A0A1S1MW09_9GAMM Queuine tRNA-ribosyltran sferase OS=Pseudoalteromonas amylolytica OX=1859457 GN= tgt PE=3 SV=1
MKFELDRTDGKARRGRLIFERGVVETPAFMPVGTYGTVKGMTPDELKGTGAQICLGNTFHLMLRPGTEIIKQHGDLHDFMNWDKPILTDSGGFQVFSLGAMRKITEEGVLFKSPVNGEKIMLSPEKAMQVQCDLGSDIVMIFDECTPYPATEKEARDSMELSLRWAKRSKEGHGDNPAALFGIIQGGMYPELRAESQKGLEEIGFDGYALGGLSVGEPKEDMIRILDHCAYKMPEDKPRYLMGVGKPEDLVEAVRRGIDMFDCVMPTRNARNGHLFITGGVVKIRNAVHKTDTGPLDPECDCHTCENYSRAYLHHLDKCNEILGARLNTIHNLRYYQRVMEGLRNAISEGQLDAFVQDFYARRGQEVPPLAETK

SEQ ID NO: 59478 - protein, 375 aa, Pseudoalteromonas arctica
  misc_feature (1)..(375): tr|A0A290S8Q2|A0A290S8Q2_9GAMM Queuine tRNA-ribosyltran sferase OS=Pseudoalteromonas arctica A 37-1-2 OX=111731 3 GN=tgt PE=3 SV=1
MKFELDCTDGKARRGRLIFDRGVIETPAFMPVGTYGTVKGMTPDEVKATGAQICLGNTFHLMLRPGTEIIKQHGDLHDFMNWDFPILTDSGGFQVFSLGAMRKITEEGVLFQSPVNGDEIMMSPEKSMEVQRDLGSDIVMIFDECTPYPATEKEAKDSMELSLRWAKRSKEGHGDNPSALFGIIQGGMYPELRAQSQAGLEEIGFDGYALGGLSVGEPKNEMMNILDHCAFKMPEDKPRYLMGVGKPEDLVESVRRGIDMFDCVMPTRNARNGHLFITTGVVKIRNAVHKTDTGPLDPECDCHTCGNYSRAYLHHLDKCNEILGARLNTIHNLRYYQRVMEGLRNAISEGKLEEFVQDFYARRGQDVPELVDIKN

SEQ ID NO: 59479 - protein, 370 aa, Pseudoalteromonas atlantica
  misc_feature (1)..(370): sp|Q15WI4|TGT_PSEA6 Queuine tRNA-ribosyltransferase OS= Pseudoalteromonas atlantica (strain T6c / ATCC BAA-1087 ) OX=342610 GN=tgt PE=3 SV=1
MQFELDNTDGKARRGRLKFDRGIVETPAFMPVGTYGTVKGMTPEELDETGAHICLGNTFHLMLRPGTEIIKQHGDLHDFMHWQKPILTDSGGFQVFSLGDLRKITEEGVTFRSPINGEKILLTPEKSMQVQRDLGSDIVMIFDECTPHPATESEARQSMELSLRWAKRSKAEHGDNPSALFGIIQGGMYEGLRDVSLKGLEDIGFDGYAIGGLSVGEPKEDMIRILDHTTDKIPAHKPRYLMGVGKPEDLVEGVRRGVDMFDCVMPTRNARNGHLFVTSGIVKIRNAAHKTDTSPLDDKCDCYTCKNYSRSYLHHLDKCNEILGARLNTIHNLRYYQRVMQGLRDAIAEQKLDEFVADFYAQKDMPVPAL

SEQ ID NO: 59480 - protein, 374 aa, Pseudoalteromonas atlantica; identical to SEQ ID NO: 59472
  misc_feature (1)..(374): tr|A0A510ZJL0|A0A510ZJL0_PSEAF Queuine tRNA-ribosyltran sferase OS=Pseudoalteromonas atlantica OX=288 GN=tgt PE =3 SV=1

SEQ ID NO: 59481 - protein, 374 aa, Pseudoalteromonas byunsanensis
  misc_feature (1)..(374): tr|A0A1S1N9D5|A0A1S1N9D5_9GAMM Queuine tRNA-ribosyltran sferase OS=Pseudoalteromonas byunsanensis OX=327939 GN= tgt PE=3 SV=1
MKFELDRTDGKARRGRLIFERGVVETPAFMPVGTYGTVKGMTPDELKGTGAQICLGNTFHLMLRPGTEIIKQHGDLHDFMNWDKPILTDSGGFQVFSLGAMRKITEEGVLFKSPVNGEKIMLSPEKAMQVQCDLGSDIVMIFDECTPYPATEKEARDSMELSLRWAKRSKEGHGDNPAALFGIIQGGMYPELRAESQKGLEEIGFDGYALGGLSVGEPKEDMIRILDHCAYKMPEDKPRYLMGVGKPEDLVEAVRRGIDMFDCVMPTRNARNGHLFITGGVVKIRNAVHKTDTGPLDPECDCHTCENYSRAYLHHLDKCNEILGARLNTIHNLRYYQRVMEGLRNAISEGQLDAFVQDFYARRGQDVPPLAETK

SEQ ID NO: 59482 - protein, 375 aa, Pseudoalteromonas carrageenovora
  misc_feature (1)..(375): tr|A0A2K4XCW7|A0A2K4XCW7_PSEVC Queuine tRNA-ribosyltran sferase OS=Pseudoalteromonas carrageenovora IAM 12662 O X=1314868 GN=tgt PE=3 SV=1
MKFELDRTDGKARRGRLIFDRGVIETPAFMPVGTYGTVKGMTPDEVKATGAQICLGNTFHLMLRPGTEIIKQHGDLHDFMNWDFPILTDSGGFQVFSLGAMRKITEEGVLFQSPVNGDEIMMSPEKSMEVQRDLGSDIVMIFDECTPYPATEKEAKDSMELSLRWAKRSKEGHGDNPSALFGIIQGGMYPELRAQSQAGLEEIGFDGYALGGLSVGEPKNEMMNILDHCAYKMPEDKPRYLMGVGKPEDLVESVRRGIDMFDCVMPTRNARNGHLFITTGIVKIRNAVHKTDTGPLDPECDCHTCTNYSRAYLHHLDKCNEILGARLNTIHNLRYYQRVMEGLRNAISEGKLEEFVQDFYARRGQEVPELVETTN

SEQ ID NO: 59483 - protein, 375 aa, Pseudoalteromonas citrea
  misc_feature (1)..(375): tr|U1JBL2|U1JBL2_9GAMM Queuine tRNA-ribosyltransferase OS=Pseudoalteromonas citrea DSM 8771 OX=1117314 GN=tgt PE=3 SV=1
MKFELDRTDGKARRGRLIFDRGVVETPAFMPVGTYGTVKGMTPDELKGTGAEICLGNTFHLMLRPGTEIIKQHGDLHDFMNWDKPILTDSGGFQVFSLGAMRKISEEGVLFQSPVNGEKIMLSPEKAMQVQCDLGSDIVMIFDECTPYPATEKEARDSMELSLRWAKRSKEGHGDNPSALFGIIQGGMYPELRAVSQKGLEEIGFDGYALGGLSVGEPKEDMIRILDHCAYKMPEDKPRYLMGVGKPEDLVEAVRRGIDMFDCVMPTRNARNGHLFITGGVVKIRNAVHKTDTGPLDPECDCHTCTGYSRAYLHHLDKCNEILGARLNTIHNLRYYQRVMEGLRNAIGEGKLDEFVADFYARRDLPVPPLADTTS

SEQ ID NO: 59484 - protein, 379 aa, Pseudoalteromonas denitrificans
  misc_feature (1)..(379): tr|A0A1I1DVX7|A0A1I1DVX7_9GAMM Queuine tRNA-ribosyltran sferase OS=Pseudoalteromonas denitrificans DSM 6059 OX= 1123010 GN=tgt PE=3 SV=1
MKFELDCTDGKARRGRLIFERGVVETPAFMPVGTYGTVKGMTPDEVKETGAHICLGNTFHLMLRPGTEIIKQHGDLHDFMNWDKPILTDSGGFQVFSLGKMRKITEEGVMFSSPVNGDKIMLTPEKSMQVQRDLGSDIVMIFDECTPYPATEKEAKDSMMLSQRWAKRSKAEHINVEEGKKPSALFGIIQGGMYPELRAQSQKGLEEIGFDGYALGGLSVGEPKEDMINILDECAYKMPETKPRYLMGVGKPEDLVESVRRGIDMFDCVMPTRNARNGFLFITDGIVKIRNAVHKTDTGPVDSECDCHTCKNYSRAYLHHLDKCNEILGSRLNTIHNLRYYQRLMQGLRDAIGEGKLTEFVENFYAIRGLEVPELKENN

SEQ ID NO: 59485 - protein, 375 aa, Pseudoalteromonas distincta
  misc_feature (1)..(375): tr|F3BE13|F3BE13_9GAMM Queuine tRNA-ribosyltransferase OS=Pseudoalteromonas distincta OX=77608 GN=tgt PE=3 SV= 1
MKFELDCTDGKARRGRLIFDRGVIETPAFMPVGTYGTVKGMTPDEVKATGAQICLGNTFHLMLRPGTEIIKQHGDLHDFMNWDFPILTDSGGFQVFSLGAMRKITEEGVLFQSPVNGDEIMMSPEKSMEVQRDLGSDIVMIFDECTPYPATEKEAKDSMELSLRWAKRSKEGHGDNPSALFGIIQGGMYPELRAQSQAGLEEIGFDGYALGGLSVGEPKNEMMNILDHCAFKMPEDKPRYLMGVGKPEDLVESVRRGIDMFDCVMPTRNARNGHLFITTGVVKIRNAVHKTDTGPLDPECDCHTCKNYSRAYLHHLDKCNEILGARLNTIHNLRYYQRVMEGLRNAISEGKLEEFVQDFYARRGQDVPELADIKN

SEQ ID NO: 59486 - protein, 375 aa, Pseudoalteromonas elyakovii; identical to SEQ ID NO: 59485
  misc_feature (1)..(375): tr|A0A558I1E7|A0A558I1E7_9GAMM Queuine tRNA-ribosyltran sferase OS=Pseudoalteromonas elyakovii OX=81037 GN=tgt PE=3 SV=1

SEQ ID NO: 59487 - protein, 374 aa, Pseudoalteromonas espejiana
  misc_feature (1)..(374): tr|A0A510XX53|A0A510XX53_9GAMM Queuine tRNA-ribosyltran sferase OS=Pseudoalteromonas espejiana OX=28107 GN=tgt PE=3 SV=1
MKFELDRTDGKARRGRLIFDRGVIETPAFMPVGTYGTVKGMTPDEVKATGAQICLGNTFHLMLRPGTEIIKQHGDLHDFMNWDFPILTDSGGFQVFSLGAMRKITEEGVLFQSPVNGDQIMMSPEKSMEVQRDLGSDIVMIFDECTPYPATEKEAKDSMELSLRWAKRSKEGHGDNPSALFGIIQGGMYPELRAQSQKGLEEIGFDGYALGGLSVGEPKNEMMNILDHCAFKMPEDKPRYLMGVGKPEDLVESVRRGIDMFDCVMPTRNARNGHLFITTGTIKIRNAVHKTDTGPLDPECDCHTCKNYSRAYLHHLDKCNEILGARLNTIHNLRYYQRVMEGLRNAISEGKLEEFVSDFYARRGQDVPELADIN

SEQ ID NO: 59488 - protein, 375 aa, Pseudoalteromonas fuliginea
  misc_feature (1)..(375): tr|A0A063KN96|A0A063KN96_9GAMM Queuine tRNA-ribosyltran sferase OS=Pseudoalteromonas fuliginea OX=1872678 GN=tg t PE=3 SV=1
MKFELDRTDGKARRGRLIFDRGVIETPAFMPVGTYGTVKGMTPDEVKATGAQICLGNTFHLMLRPGTEIIKQHGDLHDFMNWDFPILTDSGGFQVFSLGAMRKITEEGVLFQSPVNGDEIMMSPEKSMEVQRDLGSDIVMIFDECTPYPATEKEAKDSMELSLRWAKRSKEGHGDNPSALFGIIQGGMYPELRAQSQAGLEDIGFDGYALGGLSVGEPKNEMMNILDHCAFKMPEDKPRYLMGVGKPEDLVESVRRGIDMFDCVMPTRNARNGHLFITTGVVKIRNAVHKTDTGPLDPECDCHTCGNYSRAYLHHLDKCNEILGARLNTIHNLRYYQRVMEGLRNAISEGKLEEFVKDFYARRGQDVPELADIKN

SEQ ID NO: 59489 - protein, 375 aa, Pseudoalteromonas fuliginea
  misc_feature (1)..(375): tr|A0A5B0UHT4|A0A5B0UHT4_9GAMM Queuine tRNA-ribosyltran sferase OS=Pseudoalteromonas fuliginea OX=1872678 GN=tg t PE=3 SV=1
MKFELDRTDGKARRGRLIFDRGVIETPAFMPVGTYGTVKGMTPDEVKATGAQICLGNTFHLMLRPGTEIIKQHGDLHDFMNWDFPILTDSGGFQVFSLGAMRKITEEGVLFQSPVNGDEIMMSPEKSMEVQRDLGSDIVMIFDECTPYPATEKEAKDSMELSLRWAKRSKEGHGDNPSALFGIIQGGMYPELRAQSQAGLEDIGFDGYALGGLSVGEPKNEMMNILDHCAFKMPEDKPRYLMGVGKPEDLVESVRRGIDMFDCVMPTRNARNGHLFITTGVVKIRNAVHKTDTGPLDPECDCHTCKNYSRAYLHHLDKCNEILGARLNTIHNLRYYQRVMEGLRNAISEGKLEEFVQDFYARRGQDVPELADIKN

SEQ ID NO: 59490 - protein, 375 aa, Pseudoalteromonas haloplanktis
  misc_feature (1)..(375): sp|Q3ILB8|TGT_PSEHT Queuine tRNA-ribosyltransferase OS= Pseudoalteromonas haloplanktis (strain TAC 125) OX=3264 42 GN=tgt PE=3 SV=1
MKFELDTTDGKARRGRLIFDRGVIETPAFMPVGTYGTVKGMTPDEVKATGAQVCLGNTFHLMLRPGTEIIKQHGGLHKFMNWDFPILTDSGGFQVFSLGAMRKITEEGVLFSSPVNGEKIMMTPESSMQVQRDLGSDIVMIFDECTPYPATEKEAKDSMELSLRWAKRSKEGHGDNPSALFGIIQGGMYPELRAQSQAGLEEIGFDGYALGGLSVGEPKNEMINILDHCAYKMPADKPRYLMGVGKPEDLVESVRRGIDMFDCVMPTRNARNGHLFITTGVVKIRNAVHKTDTGPLDPECDCHTCGNYSRAYLHHLDKCNEILGARLNTIHNLRYYQRVMEGLRNAISAGKLDEFVQDFYARRGQDVPELADITN

SEQ ID NO: 59491 - protein, 375 aa, Pseudoalteromonas issachenkonii
  misc_feature (1)..(375): tr|A0A290SGK8|A0A290SGK8_9GAMM Queuine tRNA-ribosyltran sferase OS=Pseudoalteromonas issachenkonii OX=152297 GN =tgt PE=3 SV=1
MKFELDCTDGKARRGRLIFDRGVIETPAFMPVGTYGTVKGMTPDEVKATGAQICLGNTFHLMLRPGTEIIKQHGDLHDFMNWDFPILTDSGGFQVFSLGAMRKITEEGVMFQSPVNGDQIMMSPEKSMEVQRDLGSDIVMIFDECTPYPATEKEAKDSMELSLRWAKRSKEGHGDNPSALFGIIQGGMYPELRAQSQAGLEEIGFDGYALGGLSVGEPKHEMINILDHCAYKMPENKPRYLMGVGKPEDLVESVRRGIDMFDCVMPTRNARNGHLFITTGIIKIRNAVHKTDTGPLDPECDCHTCKNYSRAYLHHLDKCNEILGARLNTIHNLRYYQRVMEGLRNAISEGQLETFVHDFYARRGQEVPELADTTN

SEQ ID NO: 59492 - protein, 375 aa, Pseudoalteromonas lipolytica
  misc_feature (1)..(375): tr|A0A1I7ARY1|A0A1I7ARY1_9GAMM Queuine tRNA-ribosyltran sferase OS=Pseudoalteromonas lipolytica OX=570156 GN=tg t PE=3 SV=1
MKFELDRTDGKARRGRLIFERGVVETPAFMPVGTYGTVKGMTPDEVKDTGAQICLGNTFHLMLRPGTEIIKQHGDLHDFMNWDRPILTDSGGFQVFSLGAMRKITEEGVMFSSPVNGEKIMLSPEKAMQVQRDLGSDIVMIFDECTPYPATEKEAKDSMELSLRWAKRSKEGHGDNPAALFGIIQGGMYPELRAQSQKGLEDIGFDGYALGGLSVGEPKNEMINILDHCAYKMPADKPRYLMGVGKPEDLVEAVRRGIDMFDCVMPTRNARNGHLFVTGGIVKIRNAVHKTDTGPLDPECDCHTCKNYSRAYLHHLDKCNEILGARLNTIHNLRYYQRVMEGLRNAISHGKLDEFVADFYARRGQEVPELADTSD

SEQ ID NO: 59493 - protein, 375 aa, Pseudoalteromonas lipolytica; identical to SEQ ID NO: 59492
  misc_feature (1)..(375): tr|Z5XLK1|Z5XLK1_9GAMM Queuine tRNA-ribosyltransferase OS=Pseudoalteromonas lipolytica SCSIO 04301 OX=1452721 GN=tgt PE=3 SV=1

SEQ ID NO: 59494 - protein, 376 aa, Pseudoalteromonas luteoviolacea
  misc_feature (1)..(376): tr|A0A166XJ20|A0A166XJ20_9GAMM Queuine tRNA-ribosyltran sferase OS=Pseudoalteromonas luteoviolacea DSM 6061 OX= 1365250 GN=tgt PE=3 SV=1
MKFELDCTHGKARRGRLVFERGVVETPAFMPVGTYGTVKGMTPDELNETGAHICLGNTFHLMLRPGTEIIKQHGDLHDFMNWDKPILTDSGGFQVFSLGAMRKISEEGVLFKSPVNGEKIMLSPEKAMEVQRDLGSDIVMIFDECTPYPATEKEAKDSMELSLRWAKRSKEAHGDNPSALFGIIQGGMYPELRAESQKGLEDIGFDGYALGGLSVGEPKEEMVKILDHCAYKMPEQKPRYLMGVGKPEDLVEAVRRGIDMFDCVMPTRNARNGHLFVTDGVIKIRNAVHKTDTSPLDAECDCHTCKNYSRAYLHHLDKCNEILGARLNTIHNLRYYQRLMEGMRNALSEGTFDEFVADFYERRGLPVPPLADVEAE

SEQ ID NO: 59495 - protein, 376 aa, Pseudoalteromonas luteoviolacea
  misc_feature (1)..(376): tr|A0A0C1MLT0|A0A0C1MLT0_9GAMM Queuine tRNA-ribosyltran sferase OS=Pseudoalteromonas luteoviolacea OX=43657 GN= tgt PE=3 SV=1
MKFELDCTHGKARRGRLVFDRGVVETPAFMPVGTYGTVKGMTPDELKDTGAHICLGNTFHLMLRPGTEIIKQHGDLHDFMNWDKPILTDSGGFQVFSLGAMRKISEEGVLFKSPVNGEKIMLSPEKAMEVQRDLGSDIVMIFDECTPYPATEKEAKDSMELSLRWAKRSKEAHGDNPSALFGIIQGGMYPELRAESQKGLEDIGFDGYALGGLSVGEPKEEMVKILDHCAYKMPEQKPRYLMGVGKPEDLVEAVRRGIDMFDCVMPTRNARNGHLFVTDGVIKIRNAVHKTDTSPLDAECDCHTCKNYSRAYLHHLDKCNEILGARLNTIHNLRYYQRLMEGMRNALSEGTFDEFVADFYERRGLPVPPLADVEAE

SEQ ID NO: 59496 - protein, 375 aa, Pseudoalteromonas marina; identical to SEQ ID NO: 51559
  misc_feature (1)..(375): tr|U1JPP2|U1JPP2_9GAMM Queuine tRNA-ribosyltransferase OS=Pseudoalteromonas marina DSM 17587 OX=1117316 GN=tgt PE=3 SV=1

SEQ ID NO: 59497 - protein, 375 aa, Pseudoalteromonas neustonica
  misc_feature (1)..(375): tr|A0A558IPG8|A0A558IPG8_9GAMM Queuine tRNA-ribosyltran sferase OS=Pseudoalteromonas neustonica OX=1840331 GN=t gt PE=3 SV=1
MKFELDRTDGKARRGRLIFDRGVVETPAFMPVGTYGTVKGMTPDEVKDTGAHICLGNTFHLMLRPGTEIIKQHGGLHGFMNWDKPILTDSGGFQVFSLGAMRKITEEGVLFSSPVNGEKIMLSPEKAMQVQRDLGSDIVMIFDECTPYPATEKEAKDSMELSLRWAKRSKEGHGDNPSALFGIIQGGMYPELRAQSQQGLEEIGFDGYALGGLSVGEPKNEMINILDHCAYKMPENKPRYLMGVGKPEDLVEAVRRGIDMFDCVMPTRNARNGHLFITGGIVKIRNAVHKTDTGPLDPECDCHTCKNYSRAYLHHLDKCNEILGARLNTIHNLRYYQRVMEGLRNAIGDGKLDEFVNDFYARRGQEVPELADTTN

SEQ ID NO: 59498 - protein, 375 aa, Pseudoalteromonas nigrifaciens
  misc_feature (1)..(375): tr|A0A379HEB7|A0A379HEB7_9GAMM Queuine tRNA-ribosyltran sferase OS=Pseudoalteromonas nigrifaciens OX=28109 GN=t gt PE=3 SV=1
MKFELDTTDGKARRGRLIFDRGVIETPAFMPVGTYGTVKGMTPDEVKATGAQVCLGNTFHLMLRPGTEIIKQHGGLHKFMNWDFPILTDSGGFQVFSLGAMRKITEEGVLFSSPVNGEKIMMTPESSMQVQRDLGSDIVMIFDECTPYPATEKEAKDSMELSLRWAKRSKEGHGDNPSALFGIIQGGMYPELRAQSQAGLEEIGFDGYALGGLSVGEPKNEMINILDHCAYKMPADKPRYLMGVGKPEDLVESVRRGIDMFDCVMPTRNARNGHLFITTGVVKIRNAVHKTDTGPLDPECDCHTCGNYSRAYLHHLDKCNEILGARLNTIHNLRYYQRVMEGLRNAISAGKLDEFVQNFYARRGQDVPELADITN

SEQ ID NO: 59499 - protein, 379 aa, Pseudoalteromonas peptidolytica
  misc_feature (1)..(379): tr|A0A510U771|A0A510U771_9GAMM Queuine tRNA-ribosyltran sferase OS=Pseudoalteromonas peptidolytica OX=61150 GN= tgt PE=3 SV=1
MKFELDRKQGKARRGRLIFDRGVVETPAFMPVGTYGTVKGMTPDELKETGAHICLGNTFHLMLRPGTEIIKQHGDLHDFMNWDKPILTDSGGFQVFSLGAMRKISEEGVLFKSPVNGEKIMLSPEKAMEVQRDLGSDIVMIFDECTPYPATEKEAKDSMELSLRWAKRSKEAHGDNPSALFGIIQGGMYPELRAESQKGLEEIGFDGYALGGLSVGEPKEDMINILDQCAYKMPEQKPRYLMGVGKPEDLVEAVRRGIDMFDCVMPTRNARNGHLFVTGGVVKIRNAAHKTDTSPLDAECDCHTCQNYSRAYLHHLDKCNEILGARLNTIHNLRYYQRLMEGMRNALSEGTFDEFVEDFYARRGIPVPELADVGLTENN

SEQ ID NO: 59500 - protein, 374 aa, Pseudoalteromonas phenolica
  misc_feature (1)..(374): tr|A0A0S2JXZ5|A0A0S2JXZ5_9GAMM Queuine tRNA-ribosyltran sferase OS=Pseudoalteromonas phenolica OX=161398 GN=tgt PE=3 SV=1
MKFELDRTDGKARRGRLIFDRGVVETPAFMPVGTYGTVKGMTPDELKDTGAHICLGNTFHLMLRPGTEIIKQHGDLHDFMNWDKPILTDSGGFQVFSLGAMRKISEEGVMFKSPVNGEKIMLSPEKAMQVQRDLGSDIVMIFDECTPYPATEKEARDSMELSLRWAKRSKEGHGDNPSALFGIIQGGMYPELRAESQKGLEEIGFDGYALGGLSVGEPKEDMINILDHCAYKMPEDKPRYLMGVGKPEDLVEAVRRGIDMFDCVMPTRNARNGHLFISTGVIKIRNAVHKTDTGPLDPECDCHTCKNYSRAYLHHLDKCNEILGARLNTIHNLRFYQRVMEGLRNAIAEGKLDEFVEDFYAKRGLPVPPLAETE

SEQ ID NO: 59501 - protein, 375 aa, Pseudoalteromonas piratica
  misc_feature (1)..(375): tr|A0A0A7EI61|A0A0A7EI61_9GAMM Queuine tRNA-ribosyltran sferase OS=Pseudoalteromonas piratica OX=1348114 GN=tgt PE=3 SV=1
MKFELDNTDGKARRGRLIFDRGVVETPAFMPVGTYGTVKGMTPEELKGTGAEICLGNTFHLMLRPGTEIIKQHGDLHDFMGWDKPILTDSGGFQVFSLGEMRKISEEGVMFRSPVNGEKIMLSPEKAMQVQRDLGSDIVMIFDECTPYPATEKEARDSMELSLRWAKRSKEGHGDNPSALFGIIQGGMYPELREISQKGLEEIGFDGYALGGLSVGEPKEEMIKILDHCAYKMPEDKPRYLMGVGKPEDLVEAVRRGIDMFDCVMPTRNARNGHLFITTGVIKIRNAVHKTDTGPLDPECDCHTCQNFSRAYLHHLDKCNEILGARLNTIHNLRYYQRVMEGLRNAIAENKLDEFVADFYARRDLPVPELKQIED

SEQ ID NO: 59502 - protein, 379 aa, Pseudoalteromonas piscicida
  misc_feature (1)..(379): tr|A0A3B6XYY9|A0A3B6XYY9_PSEO7 Queuine tRNA-ribosyltran sferase OS=Pseudoalteromonas piscicida OX=43662 GN=tgt PE=3 SV=1
MKFELDRKQGKARRGRLIFERGVVETPAFMPVGTYGTVKGMTPDELKETGAHICLGNTFHLMLRPGTEIIKQHGDLHDFMNWDKPILTDSGGFQVFSLGAMRKISEEGVLFKSPVNGEKIMLSPEKAMEVQRDLGSDIVMIFDECTPYPATEKEAKDSMELSLRWAKRSKDAHGDNPSALFGIIQGGMYPELRAESQKGLEEIGFDGYALGGLSVGEPKEDMINILDQCAYKMPENKPRYLMGVGKPEDLVEAVRRGIDMFDCVMPTRNARNGHLFVTGGVVKIRNAAHKTDTSPLDAECDCHTCKNYSRAYLHHLDKCNEILGARLNTIHNLRYYQRLMEGMRNALSEGTFDEFVEDFYARRGIPVPELADVGLTENN

SEQ ID NO: 59503 - protein, 379 aa, Pseudoalteromonas piscicida
  misc_feature (1)..(379): tr|A0A0F4P7D3|A0A0F4P7D3_PSEO7 Queuine tRNA-ribosyltran sferase OS=Pseudoalteromonas piscicida OX=43662 GN=tgt PE=3 SV=1
MKFELDSKQGKARRGRLIFDRGVVETPAFMPVGTYGTVKGMTPDELKETGAHICLGNTFHLMLRPGTEIIKQHGDLHDFMNWDKPILTDSGGFQVFSLGAMRKISEEGVLFKSPVNGEKIMLSPEKAMEVQRDLGSDIVMIFDECTPYPATEKEAKDSMELSLRWAKRSKDAHADNPSALFGIIQGGMYPELRAESQKGLEEIGFDGYALGGLSVGEPKEDMINILDQCAYKMPENKPRYLMGVGKPEDLVEAVRRGIDMFDCVMPTRNARNGHLFVTGGVVKIRNAAHKTDTSPLDAECDCHTCKNYSRAYLHHLDKCNEILGARLNTIHNLRYYQRLMEGMRNALSEGKFDEFVEDFYARRGIAVPELADVGLTENN

SEQ ID NO: 59504 - protein, 375 aa, Pseudoalteromonas porphyrae
  misc_feature (1)..(375): tr|A0A0N1EX95|A0A0N1EX95_9GAMM Queuine tRNA-ribosyltran sferase OS=Pseudoalteromonas porphyrae OX=187330 GN=tgt PE=3 SV=1
MKFELDRTDGKARRGRLIFDRGVVETPAFMPVGTYGTVKGMTPDEVKDTGAHICLGNTFHLMLRPGTEIIKQHGGLHGFMNWDKPILTDSGGFQVFSLGAMRKISEEGVLFSSPVNGEKIMLSPEKAMQVQRDLGSDIVMIFDECTPYPATEKEAKDSMELSLRWAKRSKEGHSDNPSALFGIIQGGMYPELRAQSQAGLEEIGFDGYALGGLSVGEPKADMINILDHCAYKMPENKPRYLMGVGKPEDLVEAVRRGIDMFDCVMPTRNARNGHLFITGGIVKIRNAVHKTDTGPLDPECDCHTCKNYSRAYLHHLDKCNEILGARLNTIHNLRYYQRVMEGLRNAISEGKLDEFVNDFYARRGQEVPELADTEN

SEQ ID NO: 59505 - protein, 375 aa, Pseudoalteromonas profundi; identical to SEQ ID NO: 59473
  misc_feature (1)..(375): tr|A0A3A3EQU2|A0A3A3EQU2_9GAMM Queuine tRNA-ribosyltran sferase OS=Pseudoalteromonas profundi OX=1774956 GN=tgt PE=3 SV=1

SEQ ID NO: 59506 - protein, 374 aa, Pseudoalteromonas rubra
  misc_feature (1)..(374): tr|A0A0F4QV54|A0A0F4QV54_9GAMM Queuine tRNA-ribosyltran sferase OS=Pseudoalteromonas rubra OX=43658 GN=tgt PE=3 SV=1
MKFELDCTQGKARRGRLIFDRGVVETPAFMPVGTYGTVKGMTPDELKDTGAHICLGNTFHLMLRPGTEIIKQHGDLHDFMNWDKPILTDSGGFQVFSLGAMRKISEEGVLFQSPVNGERIMLSPEKAMEVQRDLGSDIVMIFDECTPYPATEKEARDSMELSLRWAKRSKEAHGDNPSALFGIIQGGMYPELRAESQAGLEDIGFDGYALGGLSVGEPKEDMINILDHCAYKMPEQKPRYLMGVGKPEDLVEAVRRGIDMFDCVMPTRNARNGHLFITGGVIKIRNAVHKTDTGPLDPECDCHTCKNYSRAYLHHLDKCNEILGARLNTIHNLRYYQRLMEGMREAIAAGTFDQFVADFYARRDRPVPPLADTE

SEQ ID NO: 59507 - protein, 374 aa, Pseudoalteromonas rubra; identical to SEQ ID NO: 59506
  misc_feature (1)..(374): tr|U1KGX1|U1KGX1_9GAMM Queuine tRNA-ribosyltransferase OS=Pseudoalteromonas rubra DSM 6842 OX=1117318 GN=tgt P E=3 SV=1

SEQ ID NO: 59508 - protein, 374 aa, Pseudoalteromonas ruthenica
  misc_feature (1)..(374): tr|A0A0F4Q3D0|A0A0F4Q3D0_9GAMM Queuine tRNA-ribosyltran sferase OS=Pseudoalteromonas ruthenica OX=151081 GN=tgt PE=3 SV=1
MKFELDTTDGKARRGRLIFERGVVETPAFMPVGTYGTVKGMTPDELKDTGAHICLGNTFHLMLRPGTEIIKQHGDLHDFMAWDKPILTDSGGFQVFSLGAMRKITEEGVMFRSPVNGEKIMLSPEKAMQVQCDLGSDIVMIFDECTPYPATEKQAKDSMELSLRWAKRSKQAHGDNPSALFGIIQGGMYPELRAQSQAGLEEIDFDGYALGGLSVGEPKEDMINILDHCAYKMPEQKPRYLMGVGKPEDIVEAVRRGIDMFDCVMPTRNARNGHLFVTGGVVKIRNAVHKTDTAPLDSECDCHTCKNYSRAYLHHLDKCNEILGARLNTIHNLRYYQRLMEGLREAIASGKLDAFVADFYARRNTAVPELAETE

SEQ ID NO: 59509 - protein, 374 aa, Pseudoalteromonas sp.
  misc_feature (1)..(374): tr|A0A4Q6YEY8|A0A4Q6YEY8_9GAMM Queuine tRNA-ribosyltran sferase OS=Pseudoalteromonas sp. CO325X OX=1777262 GN=t gt PE=3 SV=1
MKFELDTTDGKARRGRLIFERGVVETPAFMPVGTYGTVKGMTPDELKDTGAHICLGNTFHLMLRPGTEIIKQHGDLHDFMAWDKPILTDSGGFQVFSLGAMRKITEEGVMFRSPVNGEKIMLSPEKAMQVQCDLGSDIVMIFDECTPYPATEKQAKDSMELSLRWAKRSKQAHGDNPSALFGIIQGGMYPELRAQSQAGLEEIEFDGYALGGLSVGEPKEDMINILDHCAYKMPEQKPRYLMGVGKPEDIVEAVRRGIDMFDCVMPTRNARNGHLFVTGGVVKIRNAVHKTDTAPLDSECDCHTCKNYSRAYLHHLDKCNEILGARLNTIHNLRYYQRLMEGLREAIASGKLDAFVADFYARRNTAVPELAETE

SEQ ID NO: 59510 - protein, 375 aa, Pseudoalteromonas sp.; identical to SEQ ID NO: 59473
  misc_feature (1)..(375): tr|A0A4V3P909|A0A4V3P909_9GAMM Queuine tRNA-ribosyltran sferase OS=Pseudoalteromonas sp. MEBiC 03607 OX=2563601 GN=tgt PE=3 SV=1

SEQ ID NO: 59511 - protein, 375 aa, Pseudoalteromonas spongiae
  misc_feature (1)..(375): tr|A0A290T6P4|A0A290T6P4_9GAMM Queuine tRNA-ribosyltran sferase OS=Pseudoalteromonas spongiae UST010723-006 OX= 1117319 GN=tgt PE=3 SV=1
MKFELDNTDGKARRGRLIFERGVVETPAFMPVGTYGTVKGMTPEELKGTGAEICLGNTFHLMLRPGTEIIKQHGDLHDFMGWDKPILTDSGGFQVFSLGEMRKISEEGVMFRSPVNGEKIMLSPEKAMQVQRDLGSDIVMIFDECTPYPATEKEARDSMELSLRWAKRSKEGHGDNPSALFGIIQGGMYPELREISQKGLEEIGFDGYALGGLSVGEPKEDMINILDHCAYKMPEDKPRYLMGVGKPEDLVEAVRRGIDMFDCVMPTRNARNGHLFITGGVIKIRNAVHKTDTGPLDPECDCHTCENFSRAYLHHLDKCNEILGARLNTIHNLRYYQRVMEGLRNAIAENKLEEFVADFYARRGMPVPELKQIED

SEQ ID NO: 59512 - protein, 375 aa, Pseudoalteromonas tetraodonis
  misc_feature (1)..(375): tr|A0A1E3WV34|A0A1E3WV34_9GAMM Queuine tRNA-ribosyltran sferase OS=Pseudoalteromonas tetraodonis OX=43659 GN=tg t PE=3 SV=1
MKFELDCTDGKARRGRLIFDRGVIETPAFMPVGTYGTVKGMTPDEVKATGAQICLGNTFHLMLRPGTEIIKQHGDLHDFMNWDFPILTDSGGFQVFSLGAMRKITEEGVMFQSPVNGDQIMMSPEKSMEVQRDLGSDIVMIFDECTPYPATEKEAKDSMELSLRWAKRSKEGHGDNPSALFGIIQGGMYPELRAQSQAGLEEIGFDGYALGGLSVGEPKHEMINILDHCAYKMPENKPRYLMGVGKPEDLVESVRRGIDMFDCVMPTRNARNGHLFITTGIIKIRNAVHKTDTGPLDPECDCHTCKNYSRAYLHHLDKCNEILGARLNTIHNLRYYQRVMEGLRNAISEGQLEAFVHDFYARRGQEVPELADTTN

SEQ ID NO: 59513 - protein, 375 aa, Pseudoalteromonas tetraodonis
  misc_feature (1)..(375): tr|A0A290TIR6|A0A290TIR6_9GAMM Queuine tRNA-ribosyltran sferase OS=Pseudoalteromonas tetraodonis OX=43659 GN=tg t PE=3 SV=1
MKFELDCTDGKARRGRLIFDRGVIETPAFMPVGTYGTVKGMTPDEVKATGAQICLGNTFHLMLRPGTEIIKQHGDLHDFMNWDFPILTDSGGFQVFSLGAMRKITEEGVMFQSPVNGDQIMMSPEKSMEVQRDLGSDIVMIFDECTPYPATEKEAKDSMELSLRWAKRSKEGHGDNPSALFGIIQGGMYPELRAQSQAGLEEIGFDGYALGGLSVGEPKHEMINILDHCAYKMPENKPRYLMGVGKPEDLVESVRRGIDMFDCVMPTRNARNGHLFITTGIIKIRNAVHKTDTGPLDPECDCHTCNNYSRAYLHHLDKCNEILGARLNTIHNLRYYQRVMEGLRNAISEGQLETFVHDFYARRGQEVPELADTTN

SEQ ID NO: 59514 - protein, 375 aa, Pseudoalteromonas translucida; identical to SEQ ID NO: 59490
  misc_feature (1)..(375): tr|A0A0U2V1D5|A0A0U2V1D5_9GAMM Queuine tRNA-ribosyltran sferase OS=Pseudoalteromonas translucida KMM 520 OX=131 5283 GN=tgt PE=3 SV=1

SEQ ID NO: 59515 - protein, 373 aa, Pseudoalteromonas tunicata
  misc_feature (1)..(373): tr|A4C7I7|A4C7I7_9GAMM Queuine tRNA-ribosyltransferase OS=Pseudoalteromonas tunicata D2 OX=87626 GN=tgt PE=3 S V=1
MKFELDCTDGKARRGRLIFDRGVVETPAFMPVGTYGTVKGMTPEEVKETGAHICLGNTFHLMLRPGTEIVKMHGDLHDFMHWDKPILTDSGGFQVFSLGDLRKITEEGVLFRSPVNGEKIMLSPEKSMEVQRDLGSDIVMIFDECTPYPATEKEAKDSMELSLRWAKRSKDAHAENPAALFGIIQGGMYPELRAISQQGLEDIGFDGYALGGLSVGEPKEDMVNILDHCAYKMPENKPRYLMGVGKPEDIVEAVRRGIDMFDCVMPTRNARNGHLFVTEGVIKIRNAAHKTDPGPLDPHCDCQTCKNYSRAYLHHLDKCNEILGARLNTIHNLRYYQRLMEGLRNAIALGELDTFVVDFYAKIGKPVPELKQV

SEQ ID NO: 59516 - protein, 373 aa, Pseudoalteromonas ulvae
  misc_feature (1)..(373): tr|A0A244CNJ7|A0A244CNJ7_9GAMM Queuine tRNA-ribosyltran sferase OS=Pseudoalteromonas ulvae OX=107327 GN=tgt PE= 3 SV=1
MKFELDCTDGKARRGRLIFDRGVVETPAFMPVGTYGTVKGMTPDEVKETGAHICLGNTFHLMLRPGTDIIKQHGDLHEFMNWDKPILTDSGGFQVFSLGDLRKITEEGVLFRSPVNGEKIMLSPEKSMEVQRDLGSDIVMIFDECTPYPATEKEAKDSMELSLRWAKRSKEAHGDNPSALFGIIQGGMYPELRAVSQQGLEDIGFDGYALGGLSVGEPKEDMVNILDHCAYKMPENKPRYLMGVGKPEDIVEAVRRGIDMFDCVMPTRNARNGHLFVTNGVIKIRNAVHKTDPGPLDAECDCHTCKNYSRAYLHHLDKCNEILGARLNTIHNLRYYQRIMQGLRDAIAAGELDAFVTDFYEKIGKPVPELKQV

SEQ ID NO: 59517 - protein, 373 aa, Pseudoarcobacter caeni
  misc_feature (1)..(373): tr|A0A363CZ37|A0A363CZ37_9PROT Queuine tRNA-ribosyltran sferase OS=Pseudoarcobacter caeni OX=1912877 GN=tgt PE= 3 SV=1
MEFTIDATSNKARACTIKTAHSTIQTPVFMPVGTQGTVKALDANDMLELGAKIILGNTYHLYLRPGSKIVKKFGGLHGFSKFPNSFLTDSGGFQAFSLSSNSKPDENGIMFKSHIDGSRHYFTPKSVLDTQYDLNSDIMMILDDLVALPNTQERIAKSIERTTKWAKEAIEYHMEQKANGIGVHQNIFAIIQGGTDKNFRKQSAEQLCALTDFDGFAIGGLSVGEPNADMYETVEWTTQFMPQDKPRYLMGVGTPEDLIENIERGVDMFDCVMPTRNARNGTLFTTFGRLNIKKADYKEDMTPIDEACDCYTCKNFSKAYLNHLYRAKEITYFRLGSIHNIHYYLSLMKEARTAILNDNWDEFKKDFYAKRSK

SEQ ID NO: 59518 - protein, 379 aa, Pseudobacter ginsenosidimutans
  misc_feature (1)..(379): tr|A0A4Q7MSG7|A0A4Q7MSG7_9BACT Queuine tRNA-ribosyltran sferase OS=Pseudobacter ginsenosidimutans OX=661488 GN= tgt PE=3 SV=1
MASLQFQLQATDGHSAARAGKITTDHGEILTPIFMPVGTAGSVKAVSQQQLKNDVQAQIILGNTYHLYLRPGLETLEKAGGLHKFNGWNRPILTDSGGYQVFSLASSRKITEEGVVFQSHIDGSKHLFTPENVMDIQRSIGGDIIMAFDECPPYPSEYKYAEKSMHLTHRWLDRCFERFNGTPDRYGYTQNLFPIVQGSTYADLRKASCEYAASKNAAGNAIGGLSVGEPDHMMYEFTQLCCENLPAEKPRYLMGVGTPWNILECIALGVDMFDCVMPTRNGRNAMLFTSKGVINIDNKKWEHDYSPLDDGIDSDISNYYSKAYLRHLMKAKEILGLTIASVHNLAFYLWLVGEARKHILAGDFISWKNEQAAILQQRL

SEQ ID NO: 59519 - protein, 673 aa, Pseudobacteriovorax antillogorgiicola
  misc_feature (1)..(673): tr|A0A1Y6CK14|A0A1Y6CK14_9PROT Queuine tRNA-ribosyltran sferase OS=Pseudobacteriovorax antillogorgiicola OX=151 3793 GN=tgt PE=3 SV=1
MTRLSFHLDGEAPGSQARATSFKTLHTQVETPLFMPVGTQATVKGLRVEDLEKTGANILLANTYHLLLRPGPEVFEKLGGIHRMMNWSGSVLTDSGGFQIFSLPNARTMTEEGARFKSYVDGRSILLTPEKSITTQKSIGSDIMMVLDQCVPSTSEHKFAKDAMELTHRWAKRSLAARGNSPQSMFGIIQGACFEDLRKQSADFICDLPFDGFAIGGLAVGESKQEREDFTELTTQWMPKDRPRYLMGVGTPIDLLEAVHRGVDMFDCIIPTAYAQQSFAFTTKGQLRLERQVYKFQDEALDPACDCYTCKNYSRAYIHHLFKARENLGAQLLSIHNLRFYDRLTKAMRAKILDGSFLSFYQEQRELLVRRDQEHPSQPPKPKRRTKTPPQELGTFVIHHSKYGFSSIKEKVSGEIMHSVNHPDEEAKALYVDQVDWQEKLQGDFQEPLRVWDVGLGAAHNAMALIQFYEKQNDGNLRPIEIYSFESDLDALRLALRNHHLFTHLRHGAPHHLLKTKSWQRDPIKWFLREGDFLDQINESPVPDIIFYDPFSSATNHELWTLDCFNKVKNALGEKYCEMITYSASTSVRAGLLGAGFFVGKGVATGPKSDTTIAYNGLVETTKANLLDRKWLERWSRSHKPFPLGICSAMKQDFLDTIPKHPQFLSHLNERQQ

SEQ ID NO: 59520 - protein, 364 aa, Pseudobacteriovorax antillogorgiicola
  misc_feature (1)..(364): tr|A0A1Y6CPG5|A0A1Y6CPG5_9PROT Queuine tRNA-ribosyltran sferase OS=Pseudobacteriovorax antillogorgiicola OX=151 3793 GN=tgt PE=3 SV=1
MFKVHKTDGRARLGQMTLAHGVVNTPIFMPVGTVGSVKSLVPEDLKTLGAEIILGNTYHLYLRPGLDVIRHFNGLHKFIQWDKPILTDSGGFQIFSLGQLRKITEEGCVFQSHIDGKKINLTPELAVEIQETIGADIHMVLDECTPYPATPEEAKHSMERSLRWAKRCREVKSRDELWQFGIVQGGMYHDLRKQSLEGLGELGFEGFSIGGLSVGEPKPAMRETTDFCCEHLPEDKPRYLMGVGTPLDIIESVNYGVDMFDCVMPTRNGRNGTLFTSLGKVNIKNQKHQFDESPLDPECSCYTCQNFSRSYLRHLFIAKEITALRLLTLHNLTYYLHLIHDIRDAIREDRFQDLLKHHQQLWDK

SEQ ID NO: 59521 - protein, 376 aa, Pseudobacteroides cellulosolvens
  misc_feature (1)..(376): tr|A0A0L6JHW3|A0A0L6JHW3_9FIRM Queuine tRNA-ribosyltran sferase OS=Pseudobacteroides cellulosolvens ATCC 35603 = DSM 2933 OX=398512 GN=tgt PE=3 SV=1
MSAVRYELIKKCGQTGARLGKVHTPHGSFDTPAFMPVGTQATVKGMSPEELKGINAQIILSNTYHLYMRPGEDIVKEAGGLHSFMNWNRPILTDSGGFQVFSLSDLRDIKEEGVTFKSHIDGSKHFITPEKAIEIQNDLGADIIMAFDECIPYPCEFEYAKKSLERTTRWAKRCKEAHKNTEKQALFGIVQGGIYKELREQSAKELLELDFPGYAIGGLSVGEPAQDMYDMLECTVPLLPEDKPRYLMGVGSPDYLIEGALRGIDMFDCVLPTRIGRNGTVLTSQGKMIIRDAKYARDFTPMDPECDCYACQNFSRAYIRHLLKAGEVLGIRLTTWHNLRFLLKLMENVRKAIMDDRLQDFRNEFFEAFGYNKITK

SEQ ID NO: 59522 - protein, 378 aa, Pseudobutyrivibrio ruminis
  misc_feature (1)..(378): tr|A0A1H7G632|A0A1H7G632_9FIRM Queuine tRNA-ribosyltran sferase OS=Pseudobutyrivibrio ruminis OX=46206 GN=tgt P E=3 SV=1
MKYELLKTEGRAKRGRFHTVHGVIETPVFMNVGTVAAIKGAVSTDDLRDIKCQVELSNTYHLHVRTGDKLIKELGGLHKFMAWDRPILTDSGGFQVFSLAGIRKIKEEGVTFNSHIDGRKIFMGPEESMQIQSNLGSTIAMAFDECPPALAERKYVEDSVARTTRWLHRCKEEMARLNSLPDTINKEQLLFGINQGAIYNDIRIEHAKAISELDLPGYAVGGLAVGESHEQMYDVLDHVVPYLPQNKPTYLMGVGTPANILEAVDRGVDFFDCVYPSRNGRHGHVYTNHGKLNLFNQKFEKDMRPIEEGCGCPACKTYSRAYIRHLLKAKEMLGMRLCVLHNLYFYNTMMEEIRNALDAGEFATYKKNKLASMEAGEQ

SEQ ID NO: 59523 - protein, 378 aa, Pseudobutyrivibrio ruminis
  misc_feature (1)..(378): tr|A0A285RCP2|A0A285RCP2_9FIRM Queuine tRNA-ribosyltran sferase OS=Pseudobutyrivibrio ruminis DSM 9787 OX=11230 11 GN=tgt PE=3 SV=1
MKYELLKTEGRAKRGRFHTAHGVIETPVFMNVGTVAAIKGAVSTDDLRDIKCQVELSNTYHLHVRTGDKLIKELGGLHKFMAWDRPILTDSGGFQVFSLAGIRKIKEEGVTFNSHIDGRKIFMGPEESMQIQSNLGSTIAMAFDECPPALAERKYVEDSVARTTRWLHRCKEEMARLNSLPDTINKEQLLFGINQGAIYNDIRIEHAKAISELDLPGYAVGGLAVGESHEQMYDVLDHVVPYLPQNKPTYLMGVGTPANILEAVDRGVDFFDCVYPSRNGRHGHVYTNHGKLNLFNQKFEKDMRPIEEGCGCPACKTYSRAYIRHLLKAKEMLGMRLCVLHNLYFYNTMMEEIRNALDAGEFATYKKNKLASMEAGEQ

SEQ ID NO: 59524 - protein, 378 aa, Pseudobutyrivibrio sp.; identical to SEQ ID NO: 59522
  misc_feature (1)..(378): tr|A0A1I5DAZ5|A0A1I5DAZ5_9FIRM Queuine tRNA-ribosyltran sferase OS=Pseudobutyrivibrio sp. JW11 OX=1855302 GN=tg t PE=3 SV=1

SEQ ID NO: 59525 - protein, 377 aa, Pseudobutyrivibrio sp.
  misc_feature (1)..(377): tr|A0A1H3VV10|A0A1H3VV10_9FIRM Queuine tRNA-ribosyltran sferase OS=Pseudobutyrivibrio sp. ACV-2 OX=1520801 GN=t gt PE=3 SV=1
MKYELLKTEGKAKRGRFHTVHGTIETPVFMNVGTVAAIKGAVSTDDLREIKCQVELSNTYHLHVRTGDKLIKELGGLHKFMAWDRPILTDSGGFQVFSLAGIRKIKEEGVTFNSHIDGRKIFMGPEESMQIQSNLGSTIAMAFDECPPALAERKYVEDSVARTTRWLYRCKEEMDRLNSLPDTINKEQLLFGINQGAVYNDIRIEHAKRISELDLPGYAVGGLAVGESHEQMYDVLDHVVPYLPQNKPTYLMGVGTPANILEAVERGVDFFDCVYPSRNGRHGHVYTNHGKLNLFNQKFEKDMRPIEEGCGCPTCRTYSRAYVRHLLKAKEMLGMRLCVLHNLYFYNTMMEEIRNSLDAGEFASYKARKLATMEAGE

SEQ ID NO: 59526 - protein, 378 aa, Pseudobutyrivibrio xylanivorans
  misc_feature (1)..(378): tr|A0A1M6BIV5|A0A1M6BIV5_PSEXY Queuine tRNA-ribosyltran sferase OS=Pseudobutyrivibrio xylanivorans DSM 14809 OX =1123012 GN=tgt PE=3 SV=1
MKYELLKTEGRAKRGRFHTVHGVIETPVFMNVGTVAAIKGAVSTDDLREIKCQVELSNTYHLHVRTGDKLIKELGGLHKFMNWDRPILTDSGGFQVFSLAGIRKIKEEGVTFNSHIDGRKIFMGPEESMQIQSNLGSTIAMAFDECPPALAERKYVEDSVARTTRWLYRCKEEMARLNSLEKTINKEQLLFGINQGAVFNDIRIEHAKIISELDLPGYAVGGLAVGESHEQMYDVLDHVVPYLPQNKPTYLMGVGTPANILEAVDRGVDFFDCVYPSRNGRHGHVYTNHGKLNLFNQKFEKDMRPIEEGCGCPTCRSYSRAYVRHLLKAKEMLGMRLCVLHNLYFYNTMMEEIRDALDAGEFAAYKKRKLDSMAQGQD

SEQ ID NO: 59527 - protein, 378 aa, Pseudobutyrivibrio xylanivorans
  misc_feature (1)..(378): tr|A0A1G5RVE7|A0A1G5RVE7_PSEXY Queuine tRNA-ribosyltran sferase OS=Pseudobutyrivibrio xylanivorans OX=185007 GN =tgt PE=3 SV=1
MKYELLKTEGRAKRGRFHTVHGVIETPVFMNVGTVAAIKGAVSTDDLREIKCQVELSNTYHLHVRTGDKLIKELGGLHKFMNWDRPILTDSGGFQVFSLAGIRKIKEEGVTFNSHIDGRKIFMGPEESMQIQSNLGSTIAMAFDECPPALAERKYVEDSVARTTRWLYRCKEEMARLNSLENTINKEQLLFGINQGAVFNDIRIEHAKIISELDLPGYAVGGLAVGESHEQMYDVLDHVVPYLPQNKPTYLMGVGTPANILEAVDRGVDFFDCVYPSRNGRHGHVYTNHGKLNLFNQKFEKDMRPIEEGCGCPTCRSYSRAYVRHLLKAKEMLGMRLCVLHNLYFYNTMMEEIRDALDAGEFAAYKKRKLDSMAQGQD

SEQ ID NO: 59528 - protein, 378 aa, Pseudochrobactrum asaccharolyticum
  misc_feature (1)..(378): tr|A0A366EB58|A0A366EB58_9RHIZ Queuine tRNA-ribosyltran sferase OS=Pseudochrobactrum asaccharolyticum OX=354351 GN=tgt PE=3 SV=1
MTSENFEFKVLATDGKARRGEITMPRGTIRTPAFMPVGTAGTVKAMYMDQVKDLGADIILGNTYHLMLRPGAERVARLGGLHEFGGWQGPILTDSGGFQVMSLAQLRKLTEQGVTFRSHIDGRAYEMSPERSIEIQGLLDSDIQMQLDECTALPASFNVMQKAMELSLRWAERCKVAFGDQPGKAMFGIVQGGDNVQLREQSAQALKDMDLKGYAVGGLAVGEPQQVMLDMLDVTCPILPHEKPRYLMGVGTPDDMLKSVARGIDMFDCVMPTRAGRHGLAFTRRGKVNLRNARHAEDHRPLDEMSACPASSQYSRAYLHHLVKSNEALGGMLLTWNNLHYYQYLMQGIRDAIEAGRFNDFFEETTAEWAKGDIAPLG

SEQ ID NO: 59529 - protein, 375 aa, Pseudocitrobacter faecalis
  misc_feature (1)..(375): tr|A0A366F516|A0A366F516_9ENTR Queuine tRNA-ribosyltran sferase OS=Pseudocitrobacter faecalis OX=1398493 GN=tgt PE=3 SV=1
MKFELDTTDGRARRGRLVFDRGVVETPAFMPVGTYGTVKGMTPEEVEATGAQIILGNTFHLWLRPGQEIMKLHGDLHDFMQWKGPILTDSGGFQVFSLGDIRKITEQGVHFRNPINGDPIFLDPEKSMEIQYDLGSDIVMIFDECTPYPADWDYAKRSMEMSLRWAKRSRERFDSLGNKNALFGIIQGSVYEDLRDISVKGLVDIGFDGYAVGGLAVGEPKADMHRILEHVCPQIPADKPRYLMGVGKPEDLVEGVRRGIDMFDCVMPTRNARNGHLFVTDGVVKIRNAKHKSDTSPLDAECDCYTCRNYSRAYLHHLDRCNEILGARLNTIHNLRYYQRLMAGLRKAIEEGKLESFVTDFYQRQGREVPALNVD

SEQ ID NO: 59530 - protein, 375 aa, Pseudocitrobacter sp.
  misc_feature (1)..(375): tr|A0A5B0KGH0|A0A5B0KGH0_9ENTR Queuine tRNA-ribosyltran sferase OS=Pseudocitrobacter sp. 73 OX=2605731 GN=tgt P E=3 SV=1
MKFELDTTDGRARRGRLVFDRGVVETPAFMPVGTYGTVKGMTPEEVEATGAQIILGNTFHLWLRPGQEIMKLHGDLHDFMQWKGPILTDSGGFQVFSLGDIRKITEQGVHFRNPINGDPIFLDPEKSMEIQYDLGSDIVMIFDECTPYPADWDYAKRSMEMSLRWARRSRERFDGLGNKNALFGIIQGSVYEDLRDISVKGLVDIGFDGYAVGGLAVGEPKADMHRILEHVCPQIPADKPRYLMGVGKPEDLVEGVRRGIDMFDCVMPTRNARNGHLFVTDGVVKIRNAKHKSDTSPLDAECDCYTCRNYSRAYLHHLDRCNEILGARLNTIHNLRYYQRLMAGLRKAIEEGKLESFVTDFYQRQGREVPALNVD

SEQ ID NO: 59531 - protein, 375 aa, Pseudoclostridium thermosuccinogenes
  misc_feature (1)..(375): tr|A0A2K2F2P2|A0A2K2F2P2_9FIRM Queuine tRNA-ribosyltran sferase OS=Pseudoclostridium thermosuccinogenes OX=8403 2 GN=tgt PE=3 SV=1
MAAIRYELIKKCKQTGARLGRVHTPHGSFDTPVFMPVGTQATVKGMSPDELKEIDAKIILSNTYHLYLRPGQEIIREAGGLHSFMNWDRPILTDSGGFQVFSLGSFRKIEEDGVTFKSHIDGSRHFISPEKAVEIQNDLGSDIIMCFDECTPYPAEYDYAKKSLERTTRWAKRCKEAHKNTERQALFGIVQGGVYKDLREQSAKELVALDFPGYSIGGLSVGEPAELMYEMLECTVPLLPEDKPRYLMGVGSPDYLVEGAIRGIDMFDCVLPTRIGRNGTVMTSRGRIIVRDAKYARDFSPIDPECDCYACRNFTRAYIRHLLKVDEVLGIRLTTWHNLRFLINLMKKVRQAIMEDRLGDFRDEFFENYGYSKKA

SEQ ID NO: 59532 - protein, 372 aa, Pseudodesulfovibrio aespoeensis
  misc_feature (1)..(372): tr|E6VVX8|E6VVX8_PSEA9 Queuine tRNA-ribosyltransferase OS=Pseudodesulfovibrio aespoeensis (strain ATCC 700646 / DSM 10631 / Aspo-2) OX=643562 GN=tgt PE=3 SV=1
MSIPGQFTVHTTDGQARRATLTTAHGEIQTPIFMPVGTQGTVKSLSPLDLEEMDAQIILGNTYHLYLRPGDELVARRGGLHAFANWKRPILTDSGGFQVFSLQSIRKLSEEGVEFRSYIDGSKHFFSPEKAIDIQKNLGSDIMMVLDECVGFGADRQYTEKSLEMTTRWAQRCRDHHPRGTNGQIMFGIVQGGFFKDLRERSLEQLRSIDFEGLAIGGLSVGESTEEMYDILHHITPIMPADKPRYLMGVGTPLDLLEGVSAGVDMFDCVLPSRNARNGTLYTSKGKVNIKRAEFAEDDTPLDPECGCYTCRNFTKAYLRHLYMAKELLSYRLNTYHNLHFYLDLMQQVRAAIENGTFTDLKQRYQAAYATE

SEQ ID NO: 59533 - protein, 372 aa, Pseudodesulfovibrio hydrargyri
  misc_feature (1)..(372): tr|A0A1J5NEM9|A0A1J5NEM9_9DELT Queuine tRNA-ribosyltran sferase OS=Pseudodesulfovibrio hydrargyri OX=2125990 GN =tgt PE=3 SV=1
MTRPGDFTIHATDNLARRATLGTAHGDIQTPIFMPVGTQGTVKSLTPLDLEEMEAQIILGNTYHLYLRPGDDLVARRGGLHKFAGWKRPILTDSGGFQVFSLEGIRKLSEEGVEFRSYIDGSKHFFSPEKAIDIQRNLGSDIMMVLDECVGYGNDRAYTEKSLEMTTRWARRCRDHYPKGSGGQLMFGIVQGGFYKDLRDRSLEQLREIDFEGFAIGGLSVGESTEEMYDILHHIAPKLPHEKPRYLMGVGTPLDILEGVSAGVDMFDCVLPSRNARNGTLFTSTGKINIKRAEYAEDDSPLDPNCGCYTCRNFTKAYLRHLYMAKELLSYRLNTYHNLYFYLDLMKQIRKAIEEGSFRELKGRYEAAYGQR

SEQ ID NO: 59534 - protein, 372 aa, Pseudodesulfovibrio indicus
  misc_feature (1)..(372): tr|A0A126QPG6|A0A126QPG6_9DELT Queuine tRNA-ribosyltran sferase OS=Pseudodesulfovibrio indicus OX=1716143 GN=tg t PE=3 SV=1
MSKPGDFTIHATDNLARRATLTTAHGEIQTPIFMPVGTQGTVKSLTPLDLEEMEAQIILGNTYHLYLRPGDDLVARRGGLHKFANWKRPILTDSGGFQVFSLEGIRKLSEEGVEFRSYIDGSKHFFSPEKAIDIQKNLGSDIMMVLDECVGYGNDRAYTEKSLEMTTRWAQRCRDHYPKGSGDQLMFGIVQGGFHKDLRDRSLEQLREIDFEGFAIGGLSVGESTEEMYDILHHIAPKLPSNKPRYLMGVGTPLDILEGVSAGVDMFDCVLPSRNARNGTLFTSLGKVNIKRAEYAEDDSPLDPNCGCYTCRNFTKAYLRHLYMAKELLSYRLNTYHNLYYYLDLMKQVRQAIENGTFRELKAKVEAAYGPK

SEQ ID NO: 59535 - protein, 370 aa, Pseudodesulfovibrio piezophilus
  misc_feature (1)..(370): tr|M1WNA7|M1WNA7_PSEP2 Queuine tRNA-ribosyltransferase OS=Pseudodesulfovibrio piezophilus (strain DSM 21447 / JCM 15486 / C1TLV30) OX=1322246 GN=tgt PE=3 SV=1
MNQPGNFIIHATDGNARRATLTTAHGEIQTPIFMPVGTQGTVKSLTPLDLEEMDAQIILGNTYHLYLRPGDDLVARRGGLHEFSNWKRPILTDSGGFQVFSLQEIRKLSEEGVEFRSYIDGSKHFFSPEKAIDIQKNLGSDIMMVLDECVGYGEDKKYTNKSLEMTTRWAQRCRDHYPKGSGDQLMFGIVQGGFFKDLREKSLAQLREIDFEGFAIGGLSVGESTEEMYDILHHIAPMMPETKPRYLMGVGTPLDLLEGVSAGVDMFDCVLPSRNARNGTLFTSMGKINIKRAQFAEDDSPLDPNCNCYTCRNFTKAYLRHLYQAKELLSYRLNTYHNLYFYLDLMKQVRASIEEGTFATLKAHYEEIYA

SEQ ID NO: 59536 - protein, 372 aa, Pseudodesulfovibrio profundus
  misc_feature (1)..(372): tr|A0A2C8F3Z3|A0A2C8F3Z3_9DELT Queuine tRNA-ribosyltran sferase OS=Pseudodesulfovibrio profundus OX=57320 GN=tg t PE=3 SV=1
MSTPGDFKVHATDGEARRATLSTAHGEIQTPIFMPVGTQGTVKSLTPLDLEEMDAQIILGNTYHLYLRPGDDLVARRGGLHKFANWKRPILTDSGGFQVFSLQEIRKLTEEGVEFRSYIDGSKHFFSPEKAIDIQKNLGSDIMMVLDECVGYGEDKDYTNKSLEMTTRWAKRCREHYPKGSGDQLMFGIVQGGFFKDLREKSLEQLRKIDFEGFAIGGLSVGESTEEMYDILHHIAPLMPKEKPRYLMGVGTPLDILEGVASGVDMFDCVLPSRNARNGTLFTSQGKVNIKRAEYAEDDSPLDPECGCYTCRNFTKAYLRHLYQAKELLSYRLNTYHNLYFYLDMMKQVRAAIENGTFQELKQRYEAAYAPK

SEQ ID NO: 59537 - protein, 372 aa, Pseudodesulfovibrio sp.
  misc_feature (1)..(372): tr|A0A443YNN6|A0A443YNN6_9DELT Queuine tRNA-ribosyltran sferase OS=Pseudodesulfovibrio sp. S3 OX=2283629 GN=tgt PE=3 SV=1
MTKPGDFTIHATDNLARRATLSTAHGDIQTPIFMPVGTQGTVKSLTPLDLEEMNAQIILGNTYHLYLRPGDDLVARRGGLHKFSNWKRPILTDSGGFQVFSLQGIRKLSEEGVEFRSYIDGSKHFFSPEKAIDIQRNLGSDIMMVLDECVGYGNDREYTKKSLEMTTRWAQRCRAHYPKGAGDQLMFGIVQGGFHKDLRDKSLEQLREIDFEGFAIGGLSVGESTEEMYDILHHIAPKMPNDKPRYLMGVGTPLDLLEGVSAGVDMFDCVLPSRNARNGTLFTSMGKVNIKRAEYAEDDSSLDPNCNCYTCRNFSKAYLRHLYQAKELLSYRLNTYHNLYFYLDLMKQIRQAIEDGTFKALKAHYEAVYSSK

SEQ ID NO: 59538 - protein, 379 aa, Pseudoflavitalea sp.
  misc_feature (1)..(379): tr|A0A3B7MU11|A0A3B7MU11_9BACT Queuine tRNA-ribosyltran sferase OS=Pseudoflavitalea sp. 5GH32-13 OX=2315862 GN= tgt PE=3 SV=1
MAVLQFELEVTDQVSKARAGTITTDHGQIQTPIFMPVGTAGSVKAVSQQQLKEDVQAQIILGNTYHLYLRPGLDVLEQAGGLHRFNAWDRPILTDSGGYQVFSLASSRKITEEGVLFQSHIDGSRHLFTPENVMDIQRTIGADIIMAFDECPPYPSEYAYAKKSMELTHRWLDRCFTQFNNTPDKYGYTQNLFPIIQGSTFADLRKASSEYIASKNAAGNAIGGLSVGEPDNMMYEYTELCCDLLPVHKPRYLMGVGTPWNILECIALGVDMFDCVMPTRNGRNAMLFTSKGVINIDNKKWEKDNSPLDDGIDCTVSNLYSKAYLRHLMKAKEILGLTIASVHNLAFYLWLVKEARKHIQAGDFLSWKNEQVQILQQRL

SEQ ID NO: 59539 - protein, 379 aa, Pseudoflavonifractor capillosus
  misc_feature (1)..(379): tr|A6NV28|A6NV28_9FIRM Queuine tRNA-ribosyltransferase OS=Pseudoflavonifractor capillosus ATCC 29799 OX=411467 GN=tgt PE=3 SV=1
MFEVVKTEGRARRGVFTCAHGTVQTPVFMNVGTQGAIKGAVSAHDLKDVGCQIELSNTYHLHLRPGDGVVKEMGGLHKFMDWNGPILTDSGGFQVFSLSGLRKITEEGVTFASHIDGRRVFMGPEESMRIQSNLGSDIAMAFDECVANPSTREYVKPSCERTLRWLARCKEEHDRLNSLPDTVNPHQMLFGINQGGIYPDLRVWHMKETAKIDCDGYAIGGLAVGEPTQTMYDIIDAVEPHMPKDKPRYLMGVGTPSNIIEAVARGVDFFDCVMPARNARHGKLYTWEGTLNIKNEKYKTDPTPIDPTCTCPACQSFSRAYLRHLFAAGEMLAMRLAVLHNLHFYNELMVRIRAALDEGTFEEFRRTYSGKLDVPIGNS

SEQ ID NO: 59540 - protein, 380 aa, Pseudoflavonifractor sp.
  misc_feature (1)..(380): tr|A0A1Y4L644|A0A1Y4L644_9FIRM Queuine tRNA-ribosyltran sferase OS=Pseudoflavonifractor sp. An184 OX=1965576 GN =tgt PE=3 SV=1
MFQVVKTEGRARRGVFTCPHGTVQTPVFMNVGTQGAIKGAVSALDLKEIGCQVELSNTYHLHLRPGDGVVKEMGGLHKFMGWDGPMLTDSGGFQVFSLSGLRKITEEGVTFASHIDGRRIFMGPEESMRIQSNLGSDIAMAFDECIENPAPREYVQQSVERTYRWLERCVAEHQRLNRQPDCVNPGQMLFGINQGGTYPDIRQWHMDQIAQLPCDGFAIGGLAVGESTQTMYDIIDAVEPRMPGDKPRYLMGVGTPSNIIEAVARGVDFFDCVMPARNARHGKLYTWRGTINIKNEKYKLDPLPIDPECRCPACRSFSRAYLRHLVTAGEMLAMRLAVLHNLHFYNELMVRIRRALDEGTFEEFRKKYSGMLDRKIEDNQ

SEQ ID NO: 59541 - protein, 377 aa, Pseudoflavonifractor sp.
  misc_feature (1)..(377): tr|A0A1Y3YW52|A0A1Y3YW52_9FIRM Queuine tRNA-ribosyltran sferase OS=Pseudoflavonifractor sp. An44 OX=1965635 GN= tgt PE=3 SV=1
MFELLKTEGKARRGQFTTPHGTVQTPVFMNVGTQGAIKGGLSAFDLKDIGCQVELSNTYHLHLRPGDDVVRQMGGLHKFMRWDGPMLTDSGGFQVFSLSGLRKITEEGVTFASHLDGRKIFMGPEESMRIQSNLGSDIAMAFDECVENPATYEYAKASCERTLRWLKRCKDEHDKLNGQPDCVNPGQMLFGINQGATFPDLRIWHMQETAKVECDGYAIGGLAVGEPTQVMYDIIDAVEPYMPQDKPRYLMGVGTPSNIIEAVARGVDFFDCVMPARNARHAKLFTWSGWMNMKNERYKTDELPIDPECDCPVCRNFSRAYVRHLFTAGEMLGLRLAVMHNLYFYNKLMERIRQALDEGTFQQFRAEYSEKLAQRMP

SEQ ID NO: 59542 - protein, 370 aa, Pseudofulvimonas gallinarii
  misc_feature (1)..(370): tr|A0A4R3LNZ6|A0A4R3LNZ6_9GAMM Queuine tRNA-ribosyltran sferase OS=Pseudofulvimonas gallinarii OX=634155 GN=tgt PE=3 SV=1
MDFELIANDGASRRGRLHLPHGTVETPAFMPVGTYGSVKAVTPGQVRDLGAQIVLGNTFHLFLRPGLEVIEAHGGLHGFMRWPGPILTDSGGFQVWSLAQRRKISEEGVKFASPVDGSPVFLSPEESMRIQRVLNSDIVMIFDECTPYPATEPQARASMELSLRWAERSRRAHEGNHNALFGIVQGGMYGALRRRSAEGLRAIGFDGYAIGGLSVGEPADEREHVLDETVPHLPADRPRYLMGVGRPEDIVEAVRRGVDMFDCVMPTRNARNGHLFTADGDLRIRNARYATDTRPIEEGCDCQACAGDFSRAYLRHLDRCSEMLGPTLATIHNLRYYQRLMAEIRDAVAAGRFADWAAAFHQRRRRGVPE

SEQ ID NO: 59543 - protein, 403 aa, Pseudoglutamicibacter albus
  misc_feature (1)..(403): tr|A0A2I1JBX3|A0A2I1JBX3_9MICC Queuine tRNA-ribosyltran sferase OS=Pseudoglutamicibacter albus OX=98671 GN=tgt PE=3 SV=1
MDNGRGRTGVIRTPHGDIKTPAFVTVGTKATVKAVLPRDVAELGAQAVLSNAYHLYLQPGHEVVDAAGGLGKFMGWDGPTFTDSGGFQVMSLGSGFKKVIDMGADGAPVGGGADDAVAPGHERMANVDDDGVWFTSHINGDKHRFTPEISMQVQHGLGADIMFAFDELTTLHNSRQYQIESLERTRRWAERCILEHFRLTDERDHRPYQALFGVIQGAQYEDLRRQACQDLAGMPFDGFGIGGALEKENLGTIVGWCAEELPENKPRHLLGISEPDDVLWAIENGADTFDCVSPTRVARNSAFYTDYGRYNLSNRRFREDFRPLQPGCDCATCATYSRAYIHHLYKAKEMLSHTLISIHNLAFTVRLVDRAREAIENGTYEDYKHTVLSNYYGGSGSPDGPES

SEQ ID NO: 59544 - protein, 403 aa, Pseudoglutamicibacter cumminsii
  misc_feature (1)..(403): tr|A0A2U3ATB4|A0A2U3ATB4_9MICC Queuine tRNA-ribosyltran sferase OS=Pseudoglutamicibacter cumminsii OX=156979 GN =tgt PE=3 SV=1
MDNGRGRTGVIRTPHGDIKTPAFVTVGTKATVKAVLPRDVAELGAQAVLSNAYHLYLQPGHEVVDAAGGLGKFMGWDGPTFTDSGGFQVMSLGSGFKKVIDMGADGAPVGGGADDAVAPGHERMANVDDDGVWFTSHINGDKHRFTPEISMQVQHGLGADIMFAFDELTTLHNSRQYQIESLERTRRWAERCILEHFRLTDERGHRPYQALFGVIQGAQYEDLRRQACQDLGAMPFDGFGIGGALEKENLGTIVGWCAEELPENKPRHLLGISEPDDVLWAIENGADTFDCVSPTRVARNSAFYTDYGRYNLSNRRFREDFRPLQPGCDCATCSTYSRAYIHHLYKAKEMLSHTLISIHNLTFTVRLVDRAREAIENGTYEDYKHTVLSNYYGGSGSPDGPES

SEQ ID NO: 59545 - protein, 378 aa, Pseudogracilibacillus auburnensis
  misc_feature (1)..(378): tr|A0A2V3W0C9|A0A2V3W0C9_9BACI Queuine tRNA-ribosyltran sferase OS=Pseudogracilibacillus auburnensis OX=1494959 GN=tgt PE=3 SV=1
MAITYELIKTCKQTGARLGKVHTPHGSFDTPMFMPVGTLATVKTMSPEELIQMDAQIILSNTYHLWLRPGEDIVKEAGGLHRFMNWDRPILTDSGGFQVFSLSKIRDITEEGVHFRHHLSGEKLFFSPEKAMQVQNDLGPDIMMVLDECPPYPATYDYMEQSINRTTRWAERCLQAHKRKEDQALFGIIQGGEYEDLRKQSAKDLISLDFPGYAIGGLSVGEPKEIMNEMLEVTTPLMPSNKPRYLMGVGSPDSLIDGAIRGIDMFDCVLPTRIARNGTCMTSSGRLVVRNAKYARDFSPIDQNCECYTCQNYTRAYIRHLINTNEILGFRLTTYHNLYFLLKLMKQVRTAISEDRLGDFKEVFFEQYGFNEHKPKNF

SEQ ID NO: 59546 - protein, 371 aa, Pseudogulbenkiania ferrooxidans; identical to SEQ ID NO: 53761
  misc_feature (1)..(371): tr|U1AVU8|U1AVU8_9NEIS Queuine tRNA-ribosyltransferase OS=Pseudogulbenkiania ferrooxidans EGD-HP2 OX=1388764 G N=tgt PE=3 SV=1

SEQ ID NO: 59547 - protein, 371 aa, Pseudogulbenkiania ferrooxidans
  misc_feature (1)..(371): tr|B9Z6Y3|B9Z6Y3_9NEIS Queuine tRNA-ribosyltransferase OS=Pseudogulbenkiania ferrooxidans 2002 OX=279714 GN=tg t PE=3 SV=1
MLKFTVHKTSGGARRGTLELNHGTVETPVFQPVGTYGSVKAMSPVELNDIGAQIILGNTFHLWLRPGLEVIQQFGGLHDFIGWNKPILTDSGGFQVFSLGALNKITEEGVTFQSPVNGDKLFLSPEKSMEIQKVLNSDIVMIFDECTPGQVDHNTAAKSMRMSLRWAERSRRAFDDLKNPNALFGIVQGNLYTDLRRESLEGLMEIGFDGYAIGGLSVGEPKPEMYRMLAEMKDMLPADKPHYLMGVGTPEDLVHGVANGVDMFDCVMPTRNARNGWLFTQWGDVKIKNARYKDDKKPLDETCGCYACRNFSRAYLHHLHRVGEILGARLNTIHNLYYYQQLMAEMRQAIEEDRFPAFQVDFAQRRARGAD

SEQ ID NO: 59548 - protein, 371 aa, Pseudogulbenkiania sp.
  misc_feature (1)..(371): tr|G2J1E5|G2J1E5_PSEUL Queuine tRNA-ribosyltransferase OS=Pseudogulbenkiania sp. (strain NH8B) OX=748280 GN=tg t PE=3 SV=1
MLKFTVHKTSGGARRGTLELNHGTVETPVFQPVGTYGSVKAMSPVELGDIGAQIILGNTFHLWLRPGLEVIAQFGGLHDFIGWDKPILTDSGGFQVFSLGALNKITEEGVTFQSPVNGDKLFLSPEKSMEIQKVLNSDIVMIFDECTPGQVDHNTAAKSMRMSLRWAERSRRAFDDLKNPNALFGIVQGNLYTDLRRESLEGLMEIGFDGYAIGGLSVGEPKPEMYRMLAEMKDMLPADKPHYLMGVGTPEDLVHGVANGVDMFDCVMPTRNARNGWLFTQWGDVKIKNARYKGDKKPLDETCGCYACRNFSRAYLHHLHRVGEILGARLNTIHNLYYYQQLMAEMRQAIEEDRFPAFQVDFAQRRARGAD

SEQ ID NO: 59549 - protein, 371 aa, Pseudohaliea rubra
  misc_feature (1)..(371): tr|A0A095VQD9|A0A095VQD9_9GAMM Queuine tRNA-ribosyltran sferase OS=Pseudohaliea rubra DSM 19751 OX=1265313 GN=t gt PE=3 SV=1
MREACHLRFERLGSDGAARRGRLHFPRGTVETPAFMPVGTYGTVKGMLPRDVAATGAEIILGNTFHLWLRPGTEIIAAHGDLHDFMGWEGPILTDSGGFQVFSLGAMRKITEAGVSFRSPVNGDKVFLDPETSMAVQRALGSDVVMIFDDCTPYPAARDEAAASMQLSLRWAKRSRDAHGDSPAALFGIVQGGMYPDLRRESLAGLEAIGFDGYAIGGLSVGEPKDEMLAVLSDLAPALPAETPRYLMGVGTPGDLIEGVRRGIDMFDCVMPTRNARNGNLFTSVGQVKLRNARHRADTGPLDPNCDCYTCANFSRAYLHHLERCNELLGSQLNTLHNIHYYQRHMQGIRAAIERGELDAFAHAYYAAQEE

SEQ ID NO: 59550 - protein, 377 aa, Pseudohoeflea suaedae
  misc_feature (1)..(377): tr|A0A4R5PRK3|A0A4R5PRK3_9RHIZ Queuine tRNA-ribosyltran sferase OS=Pseudohoeflea suaedae OX=877384 GN=tgt PE=3 SV=1
MSASEFGFKVTATDGAARRGTVSMPRGEIRTPAFMPVGTGGTVKAMYMEQVRDLGADIILGNTYHLMLRPGAERVAKLGGLHSFARWERPILTDSGGFQVMSLAGLRKVTEQGVTFQSHIDGRKYDMSPERSIEIQGLLDSDIQMQLDECVRLPASAEEIERAMEMSVRWADRCKTAFGDQPGKAMFGIVQGGDSPALRERSARALVDLDLKGYAVGGLAVGEPQEVMLDMLEVTCPLLPDNKPRYLMGVGTPDDILKSVARGIDMFDCVMPTRAGRHGLAFTRFGKINLKNARHADDPRPLDPDSNCPAARDYSRAYLHHLVRSNEILGMMLLTWVNLAYYQDLMAGVRGAIEAGNYADFCAETQAGWEKGDIAPV

SEQ ID NO: 59551 - protein, 372 aa, Pseudohongiella acticola
  misc_feature (1)..(372): tr|A0A1E8CIQ1|A0A1E8CIQ1_9GAMM Queuine tRNA-ribosyltran sferase OS=Pseudohongiella acticola OX=1524254 GN=tgt P E=3 SV=1
MKFELKTTDGAARRGTLTFPRGEVQTPAFMPVGTYGTVKGLTPEQIKGTGAEIILGNTFHLMLRPGTDIIRQHGDLHDFMGWDKPILTDSGGFQVFSLGDMRKISEEGVNFRSPVDGAKVFLGPESAIQVQQDLGADIIMIFDECTPYPATETEARDSMQLSLRWAVRCKEAHGDHRAALFGIIQGGMYPNLRQESLDGLVALDFPGYAIGGLSVGESKEEMISVLDYVGHRMPAHKPRYLMGVGTPTDIVDAVARGIDMFDCVMPTRNARNGYLFTSQGLLKLRNARFKTDTRPLDPACACYTCQHFSRAYLHHLDKCKEMLGAQLNTIHNLHYYQDLMQGLRQALEQGRFTAFTEAFYRDQRVLETQPDA

SEQ ID NO: 59552 - protein, 285 aa, Pseudohongiella sp.
  misc_feature (1)..(285): tr|A0A355V8Q2|A0A355V8Q2_9GAMM Queuine tRNA-ribosyltran sferase (Fragment) OS=Pseudohongiella sp. OX=1979412 GN =DD407_10320 PE=3 SV=1
TDSGGFQVFSLGEMRKITEEGVTFRSPVDGAKVFLGPESAIQVQHELGSDIIMIFDECTPYPATEQEAEASMQLSLRWAQRCKVAHGDHPSALFGIVQGGMYEHLRQQSLDALVAMDFDGYAIGGLSVGEPKDEMIKVLDYVGHRLPEHKPRYLMGVGTPADLVEGVRRGIDMFDCVMPTRNARNAHLFTSQGLLKLRNARFKDDVRPLDPNCDCYTCQNFSRAYLHHLDKCKEMLGAQLNTIHNLHYYQHLMQGLRQALEQGRFTAFAEEFYQNQARLQDEPEA

SEQ ID NO: 59553 - protein, 94 aa, Pseudohongiella sp.
  misc_feature (1)..(94): tr|A0A355V8P5|A0A355V8P5_9GAMM tRNA guanosine(34) trans glycosylase Tgt (Fragment) OS=Pseudohongiella sp. OX=19 79412 GN=tgt PE=4 SV=1
MEFKVHHTDGHARRGTLSFPRGDVQTPAFMPVGTYGTVKGMTPQQILDTGAEIILGNTFHLMLRPGTGIIRKHGDLHDFGGWQKPILTDSGGFQ

SEQ ID NO: 59554 - protein, 372 aa, Pseudohongiella spirulinae
  misc_feature (1)..(372): tr|A0A0S2KBY6|A0A0S2KBY6_9GAMM Queuine tRNA-ribosyltran sferase OS=Pseudohongiella spirulinae OX=1249552 GN=tgt PE=3 SV=1
MEFTVHATEGHARRATLSFPRGDVQTPAFMPVGTYGTVKGMTPQQIHDIGAEIILGNTFHLMLRPGTEIIRKHGDLHDFMGWDKPILTDSGGFQVFSLGEMRKITEEGVTFRSPVDGAKVFLGPESAIQVQHELGSDIIMIFDECTPYPATEQEAESSMQLSLRWAERCKTAHGDHPSALFGIIQGGMYENLRQQSLDALRDMDFDGYAIGGLSVGEPKDEMIKVLDYVGHQMPADKPRYLMGVGTPSDIVEAVRRGIDMFDCVMPTRNARNAHLFTSQGLLKLRNARFKDDTRPLDPACGCYTCQHFSRAYLHHLDKCKEMLGAQLNTIHNLHYYQSLMQGLRQALEQGRFTAFVEAFYQGQAVLEQQPDA

SEQ ID NO: 59555 - protein, 378 aa, Pseudolabrys sp.
  misc_feature (1)..(378): tr|A0A0Q7U100|A0A0Q7U100_9RHIZ Queuine tRNA-ribosyltran sferase OS=Pseudolabrys sp. Root1462 OX=1736466 GN=tgt PE=3 SV=1
MSEPFSFTLRNTDGMARRGEIVTPHGRIDTPVFMPVGTAATVKGLHPEDVADTGAQILLGNTYHLMLRPGAERIAALGGLHRFMNWDKPILTDSGGFQVMSLATLRKLTEQGVTFRSHIDGTKHELTPERSIEIQALLGTDVTMQLDECLKLPASREEIERAMRLSLRWAERSKRAFEARAREGYALFGIVQGGDDIPLRQDSARALTEIGFHGYAVGGLAVGEPQDVMLKVVEETTPVLPVDRPRYLMGVGTPHDILEAVARGIDMFDCVMPTRNGRHGMAFTRFGQINLSNARHADDPRPLDEESPHPAARTYSRAYLHHLTKANEMLGQVLLSTINIAYYQALTAGMRTAIEQGRFEAFRMATIEGWKRGDLPPI

SEQ ID NO: 59556 - protein, 378 aa, Pseudolabrys sp.
  misc_feature (1)..(378): tr|A0A371B0M8|A0A371B0M8_9RHIZ Queuine tRNA-ribosyltran sferase OS=Pseudolabrys sp. GY_H OX=2292256 GN=tgt PE=3 SV=1
MTQSFSFTLHKTDGMARRGTVVTPHGPVETPAFMPVGTQATVKGLYPEAVEGTGAQILLGNTYHLMLRPGAERVAALGGLHKFMNWPHAILTDSGGFQVMSLATLRKLTEQGVTFRSHIDGSKHELTPERSIEIQALLGTDITMQLDECLKLPASREEIERAMQLSIRWGERSKRAFEARARDGYALFGIVQGGDDVPLRQQSAKALTDIGFHGYAIGGLAVGEPQEVMLKVVEETTPALPAAAPRYLMGVGTPHDLIEAVARGVDMFDCVMPTRNGRHGMAFTRFGQINLSNARHADDPRPLDEDSPHPLARVYSRAYLHHLTKANEMLGQVMLSTINIAYYQALTAGMRAAIEAGRFADYRETVLEGWRKGDLPPL

SEQ ID NO: 59557 - protein, 384 aa, Pseudolabrys taiwanensis
  misc_feature (1)..(384): tr|A0A345ZT09|A0A345ZT09_9RHIZ Queuine tRNA-ribosyltran sferase OS=Pseudolabrys taiwanensis OX=331696 GN=tgt PE =3 SV=1
MTEKMMTDPFTFTLKTTDGMARRGQFVAPHGVVQTPAFMPVGTAGTVKGLHPEDVADTGAEIVLGNTYHLMLRPGPERVAALGGLHKFMNWQKPILTDSGGFQVMSLATLRKLTEKAVTFRSHIDGTMFELSPERSIEIQALLGADISMQLDECLKLPAAREEIQRAMALSLRWAERSRRAFEARNATGYALFGIVQGGDDIPLRQESARELIDIGFEGYAIGGLAVGEPQAVMLKVVEETTPVLPAERPRYLMGVGTPHDLLEAVKRGVDMFDCVMPTRNGRHGMAFTRFGSINLSNARHADDPRPLDEASPHPAARTYSRAYLHHLIKANEILGQVLLSTINIAYYQALMAGMRAAIEEGRFADFYAGTMAGWKGGDIPPLS

SEQ ID NO: 59558 - protein, 377 aa, Pseudomonadaceae bacterium
  misc_feature (1)..(377): tr|A0A3T0SIW9|A0A3T0SIW9_9GAMM Queuine tRNA-ribosyltran sferase OS=Pseudomonadaceae bacterium SI-3 OX=2079806 G N=tgt PE=3 SV=1
MSRTCHMSFELLATEGRARRGRLTFPRGSVETPAFMPVGTYGTVKGMLPRDIEGIGAQIILGNTFHLWLRPGTEVIKAHGDLHDFMQWQGPILTDSGGFQVFSLGAMRKIKEEGVYFASPVDGAKVFMGPEESMQVQRDLGSDIVMIFDECTPYPADEDVARRSMELSLRWAKRSKDAHGDSPAALFGIVQGGMHESLRKRSLEGLCEIGFDGLAIGGLSVGEPKEEMIRVLDFLPPLMPADKPRYLMGVGKPEDLVEGVRRGVDMFDCVMPTRNARNGHLFTDVGVVKIRNASHRYDDSPLDAGCDCYTCKHFSRAYLHHLDKCGEMLGSMLNTIHNLRHYQRLMAGLRDAIQQGTLAAFVDAFYAKRGLPTPPLA

SEQ ID NO: 59559 - protein, 380 aa, Pseudomonadaceae bacterium
  misc_feature (1)..(380): tr|A0A2D5CGS2|A0A2D5CGS2_9GAMM Queuine tRNA-ribosyltran sferase OS=Pseudomonadaceae bacterium OX=1914538 GN=tgt PE=3 SV=1
MTRTCRMSFELLATEGKARRGRLTFPRGVVETPAFMPVGTYGTVKGMLPRDIEAIGAQMILGNTFHLWLRPGTEVIKKHGDLHDFMQWKGPILTDSGGFQVFSLGAMRKIKEEGVTFASPVDGAKVFMGPEESMQVQRDLGSDIVMIFDECTPYPAEFDVAKRSMELSLRWAKRSKEAHGDNTAALFGIVQGGMHEELRMRSLEGLNEIGFDGLAIGGLSVGEPKEEMIRVLDYLPDVMPADKPRYLMGVGKPEDLVEGVRRGVDMFDCVMPTRNARNGHLFVDTGVLKIRNAVHKHDDSPLDSSCDCYTCKNFSRAYLHHLDKCGEMLGSMLNTIHNLRHYQRLMAGLREAIQQSTLAAFVDDFYARRGLPTPPLDTNN

SEQ ID NO: 59560 - protein, 373 aa, Pseudomonadales bacterium
  misc_feature (1)..(373): tr|A0A2E3CV42|A0A2E3CV42_9GAMM Queuine tRNA-ribosyltran sferase OS=Pseudomonadales bacterium OX=1891229 GN=tgt PE=3 SV=1
MKFELTGTDAGARRGRLIFDRGVVETPAFMPVGTYGSVKAMLPRDIEAIGAHIILGNTFHLMLRPGTEIIKQHGDLHDFMQWQGPILTDSGGFQVFSLGKMRKISEEGVKFQSPVDGSPVVVTPEISMQVQRDLGSDIVMIFDECPPYPATEKEARDSMELSLRWAKRSKDAHEGNPSALFGIVQGGMYEHLRRESLAGLMEIGFDGYAIGGLSVGEPKEEMMSVLNYLQPHMPKDRPRYLMGVGKPEDIVEAVRRGVDMFDCVMPTRNARNGHLFTSKGVIKIRNAAHKTDTGPLEEGCDCYTCQNFSRAYLHHLDRCKEILGAQLNTIHNLRYYQRLMLGLRTAIETGTFERFVTDFYQLRGETVPPLESN

SEQ ID NO: 59561 - protein, 375 aa, Pseudomonadales bacterium
  misc_feature (1)..(375): tr|A0A2D9PXK0|A0A2D9PXK0_9GAMM Queuine tRNA-ribosyltran sferase OS=Pseudomonadales bacterium OX=1891229 GN=tgt PE=3 SV=1
MSHMSFELLATDGRARRGRLTFPRGVVETPAFMPVGTYGTVKGMLPRDIEAIGAQIILGNTFHLWLRPGTEVIRRHGDLHDFMQWQGPILTDSGGFQVFSLGAMRKIKEEGVYFSSPVDGAKVFMGPEESMQVQRALGSDIVMIFDECTPYPADLDTARRSMELSLRWAKRSKQAHGDNPSALFGIIQGGMHEELRLRSLEGLSEIGFDGLAIGGLSVGEPKEEMIRVLDFLPGHMPPEKPRYLMGVGKPEDLVEGVRRGVDMFDCVMPSRNARNGHLFTEAGVIKIRNAVHRHDESPLDPACDCYTCQHFSRAYLHHLDKCGEMLGSMLNTIHNLRHYQRLMAGLRGAIQQGTLTAFVENFYAKLGRPVPPLEP

SEQ ID NO: 59562 - protein, 377 aa, Pseudomonas abietaniphila
  misc_feature (1)..(377): tr|A0A1G8B9H3|A0A1G8B9H3_9PSED Queuine tRNA-ribosyltran sferase OS=Pseudomonas abietaniphila OX=89065 GN=tgt PE =3 SV=1
MSRTCRMSFELLATDGKARRGRLTFPRGVVETPAFMPVGTYGTVKGMLPRDIEATGAQIILGNTFHLWLRPGTEVIKGHGDLHDFMQWKGPILTDSGGFQVFSLGAMRKIKEEGVTFASPVDGAKVFMGPEESMQVQRDLGSDIVMIFDECTPYPADEDVARTSMELSLRWAKRSKVAHGENTAALFGIVQGGMHENLRMRSLEGLNELDFDGLAIGGLSVGEPKHEMIKVLDYLPGRMPAEKPRYLMGVGKPEDLVEGVRRGVDMFDCVMPTRNARNGHLFIDTGVLKIRNAFHRHDESPLDPTCDCYTCKNFSRAYLHHLDKCGEMLGSMLNTIHNLRHYQLLMAGLREAIQQGTLAAFVDTFYAKRGLPVPPLD

SEQ ID NO: 59563 - protein, 375 aa, Pseudomonas abyssi
  misc_feature (1)..(375): tr|A0A2A3MKN8|A0A2A3MKN8_9PSED Queuine tRNA-ribosyltran sferase OS=Pseudomonas abyssi OX=170540 GN=tgt PE=3 SV= 1
MSHMSFELLATDGKARRGRLTFPRGVVETPAFMPVGTYGTVKGMLPRDIEAIGAQIILGNTFHLWLRPGTEVISKHGDLHDFMQWQGPILTDSGGFQVFSLGAMRKIKEEGVYFSSPVDGAKVFMGPEESMQVQRALGSDIVMIFDECTPYPADVDTARRSMELSLRWAKRSKQAHGDNPSALFGIIQGGMHEELRLRSLEGLSEIGFDGLAIGGLSVGEPKEEMIRVLDFLPGHMPPEKPRYLMGVGKPEDLVEGVRRGVDMFDCVMPSRNARNGHLFTEAGVIKIRNAVHRHDESPLDPACDCYTCQHFSRAYLHHLDKCGEMLGSMLNTIHNLRHYQRLMAGLRGAIQQGTLSAFVDNFYAKLGRPVPPLEP

SEQ ID NO: 59564 - protein, 403 aa, Pseudomonas acidophila
  misc_feature (1)..(403): tr|A0A2A4EXP4|A0A2A4EXP4_9PSED Queuine tRNA-ribosyltran sferase OS=Pseudomonas acidophila OX=1912599 GN=tgt PE= 3 SV=1
MTDDRATPTAGDTHTPPQGGLAFELLTTDGAARRGRLTLNHGVVETPIFMPVGTYGTVKAIQPRELEEIHAQIILGNTFHLWLRPGLETIAAHGGLHGFMGWKRPILTDSGGFQVFSLGDLRKITEDGVTFASPINGDKLFLSPEVSMQVQKVLNSDVVMQFDECTPYATNGVPTSHQDAADSMRMSMRWAQRSIDEFRRLDNPNALFGIVQGGMFEDLRDESLAGLAEMDFHGLAIGGLSVGEPKEDMMRVLNHIGPKLPAHKPHYLMGVGTPEDLVAGVAAGVDMFDCVMPTRNARNGWLFTRFGDIKIRNATHRNSLRPLDEQCGCYTCRNFSRGYLHHLHRVGEILGAQLNTIHNLHYYLELMGEIRNAIETHTFDAFRIAFRENRARGVEEATAAAAS

SEQ ID NO: 59565 - protein, 372 aa, Pseudomonas aeruginosa
  misc_feature (1)..(372): sp|Q9HXH9|TGT_PSEAE Queuine tRNA-ribosyltransferase OS= Pseudomonas aeruginosa (strain ATCC 15692 / DSM 22644 / CIP 104116 / JCM 14847 / LMG 12228 / 1C / PRS 101 / PA O1) OX=208964 GN=tgt PE=3 SV=1
MNFELLATDGKARRGRLTFPRGVVETPAFMPVGTYGTVKGMLPRDIEDIGAQIILGNTFHLWLRPGTEVIQRHGDLHDFMQWKGPILTDSGGFQVFSLGAMRKIKEEGVTFASPVDGAKVFMGPEESMAVQRALGSDIVMIFDECTPYPADHDVAKRSMELSLRWAKRSKIAHGDSPSALFGIVQGGMHEDLRLRSLDGLQEIGFDGLAIGGLSVGEPKEEMIRVLDFLPPQMPADKPRYLMGVGKPEDLVEGVRRGVDMFDCVMPTRNARNGHLFVDSGVIKIRNSVHKHDDSTLDPTCDCYTCKHFSRAYLHHLDKCGEMLGSMLNTIHNLRHYQRVMAGLREAIQQGTLAAFVDAFYAKRGLPTPPLDA

SEQ ID NO: 59566 - protein, 375 aa, Pseudomonas aeruginosa
  misc_feature (1)..(375): tr|A0A1C7BIW0|A0A1C7BIW0_PSEAI Queuine tRNA-ribosyltran sferase OS=Pseudomonas aeruginosa BL04 OX=1402545 GN=tg t PE=3 SV=1
MSFMNFELLATDGKARRGRLTFPRGVVETPAFMPVGTYGTVKGMLPRDIEDIGAQIILGNTFHLWLRPGTEVIQRHGDLHDFMQWKGPILTDSGGFQVFSLGAMRKIKEEGVTFASPVDGAKVFMGPEESMAVQRALGSDIVMIFDECTPYPADHDVAKRSMELSLRWAKRSKIAHGDSPSALFGIVQGGMHEDLRLRSLDGLQEIGFDGLAIGGLSVGEPKEEMIRVLDFLPPQMPADKPRYLMGVGKPEDLVEGVRRGVDMFDCVMPTRNARNGHLFVDSGVIKIRNSVHKHDDSTLDPTCDCYTCKHFSRAYLHHLDKCGEMLGSMLNTIHNLRHYQRVMAGLREAIQQGTLAAFVDAFYAKRGLPTPPLDA

SEQ ID NO: 59567 - protein, 375 aa, Pseudomonas aestusnigri
  misc_feature (1)..(375): tr|A0A1H5Y9A6|A0A1H5Y9A6_9PSED Queuine tRNA-ribosyltran sferase OS=Pseudomonas aestusnigri OX=857252 GN=tgt PE= 3 SV=1
MSHMSFELLATDGRARRGRLTFPRGVVETPAFMPVGTYGTVKGMLPRDIEAIGAQIILGNTFHLWLRPGTEVIRKHGDLHDFMQWQGPILTDSGGFQVFSLGAMRKIKEEGVYFSSPVDGAKVFMGPEESMQVQRALGSDIVMIFDECTPYPADLDTARRSMELSLRWAKRSKQAHGDNPSALFGIIQGGMHEELRLRSLEGLSEIGFDGLAIGGLSVGEPKEEMIRVLDFLPGHMPPEKPRYLMGVGKPEDLVEGVRRGVDMFDCVMPSRNARNGHLFTEAGVIKIRNAVHRHDESPLDPACDCYTCQHFSRAYLHHLDKCGEMLGSMLNTIHNLRHYQRLMAGLRGAIQQGTLTAFVENFYAKLGRPVPPLEP

SEQ ID NO: 59568 - protein, 377 aa, Pseudomonas agarici
  misc_feature (1)..(377): tr|A0A0X1T4B4|A0A0X1T4B4_PSEAA Queuine tRNA-ribosyltran sferase OS=Pseudomonas agarici OX=46677 GN=tgt PE=3 SV= 1
MSRTSRMSFELLATDGKARRGRLTFPRGTVETPAFMPVGTYGTVKGMLPRDIVATGAEIILGNTFHLWLRPGTEVIKAHGDLHDFMQWNGPILTDSGGFQVFSLGAMRKIKEEGVTFASPVDGAKVFMGPEESMQVQRDLGSDIVMIFDECTPYPADEDVARTSMELSLRWAQRSKNAHGDNSAALFGIVQGGMHQNLRMRSLEGLDKIGFDGLAIGGLSVGEPKHEMIKVLDYLPGQMPADKPRYLMGVGKPEDLVEGVRRGVDMFDCVMPTRNARNGHLFVDTGVLKIRNAFHRHDDSPLDPTCDCYTCQNFSRAYLHHLDKCGEMLGSMLNTLHNLRHYQRLMAGLREAIQQGTLAAFIDAFYAKRGLCVPPLD

SEQ ID NO: 59569 - protein, 375 aa, Pseudomonas alcaligenes
  misc_feature (1)..(375): tr|A0A1N6QYG2|A0A1N6QYG2_PSEAC Queuine tRNA-ribosyltran sferase OS=Pseudomonas alcaligenes OX=43263 GN=tgt PE=3 SV=1
MSHMSFELLATDGRARRGRLSFPRGVVETPAFMPVGTYGTVKGMLPRDIEGIGAQIILGNTFHLWLRPGTEVIKRHGDLHDFMQWQGPILTDSGGFQVFSLGAMRKIKEEGVYFSSPVDGAKVFMGPEESMQVQRDLGSDIVMIFDECTPYPADFDTAKRSMELSLRWAKRSKNAHEGNPSALFGIVQGGMHEELRLRSLEGLMEIGFDGLAIGGLSVGEPKEEMIRVLDFLPPHLPTDKPRYLMGVGKPEDLVEGVRRGVDMFDCVMPTRNARNGHLFIDTGVIKIRNAVHKHDDSPLDPACDCYTCKHFSRAYLHHLDKCGEMLGSMLNTIHNLRHYQRLMAGLREAIQQGTLAAFVDAFYARRGLPTPPLEP

SEQ ID NO: 59570 - protein, 372 aa, Pseudomonas alcaligenes
  misc_feature (1)..(372): tr|A0A5C7WCJ7|A0A5C7WCJ7_PSEAC Queuine tRNA-ribosyltran sferase OS=Pseudomonas alcaligenes OX=43263 GN=tgt PE=3 SV=1
MSFELLATDGRARRGRLTFPRGVVETPAFMPVGTYGTVKGMLPRDIEGIGAQIILGNTFHLWLRPGTEVIKRHGDLHDFMQWQGPILTDSGGFQVFSLGAMRKIKEEGVYFSSPVDGAKVFMGPEESMQVQRDLGSDIVMIFDECTPYPADFDTAKRSMELSLRWAKRSKNAHEGNPSALFGIVQGGMHEELRLRSLEGLMEIGFDGLAIGGLSVGEPKEEMIRVLDFLPPHLPTDKPRYLMGVGKPEDLVEGVRRGVDMFDCVMPTRNARNGHLFIDTGVIKIRNAVHKHDDAPLDPACDCYTCQHFSRAYLHHLDKCGEMLGSMLNTIHNLRHYQRLMAGLREAIQQGTLAAFVDAFYARRGLPTPPLEP

SEQ ID NO: 59571 - protein, 377 aa, Pseudomonas alcaliphila
  misc_feature (1)..(377): tr|A0A1G7PHX4|A0A1G7PHX4_9PSED Queuine tRNA-ribosyltran sferase OS=Pseudomonas alcaliphila OX=101564 GN=tgt PE= 3 SV=1
MSRTCRMSFELLATDGKARRGRLTFPRGVVETPAFMPVGTYGTVKGMLPRDVEAIGAQIILGNTFHLWLRPGMEVIKKHGDLHDFMQWQGPILTDSGGFQVFSLGAMRKIKEEGVYFASPVDGAKVFMGPEESMQVQRDLGSDIVMIFDECTPYPAEFDVAKRSMELSLRWAKRSKTAHGESTAALFGIVQGGMHEELRMRSLEGLCEIGFDGLAIGGLSVGEPKEEMIRVLDFLPPHMPADKPRYLMGVGKPEDLVEGVRRGVDMFDCVMPTRNARNGHLFVDTGVVKIRNAVHKHDDSPLDPTCDCYTCKHFSRAYLHHLDKCGEMLGSMLNTIHNLRHYQRVMAGLREAIGQGTLAAFVETFYAKRGLPVPPLD

SEQ ID NO: 59572 - protein, 377 aa, Pseudomonas alcaliphila
  misc_feature (1)..(377): tr|A0A1L7G3B2|A0A1L7G3B2_9PSED Queuine tRNA-ribosyltran sferase OS=Pseudomonas alcaliphila JAB1 OX=741155 GN=tg t PE=3 SV=1
MSRTCRMSFELLATDGKARRGRLTFPRGVVETPAFMPVGTYGTVKGMLPRDVEDIGAQIILGNTFHLWLRPGMEVIKKHGDLHDFMQWQGPILTDSGGFQVFSLGAMRKIKEEGVYFASPVDGAKVFMGPEESMQVQRDLGSDIVMIFDECTPYPAEFDVAKRSMELSLRWAKRSKTAHGESSAALFGIVQGGMHEELRMRSLEGLCEIGFDGLAIGGLSVGEPKEEMIRVLDFLPPHMPADKPRYLMGVGKPEDLVEGVRRGVDMFDCVMPTRNARNGHLFVDTGVVKIRNAVHKHDDSPLDPSCDCYTCKHFSRAYLHHLDKCGEMLGSMLNTIHNLRHYQRVMAGLREAIGQGTLAAFVETFYAKRGLPVPPLD

SEQ ID NO: 59573 - protein, 377 aa, Pseudomonas alkylphenolica
  misc_feature (1)..(377): tr|A0A443ZXT2|A0A443ZXT2_9PSED Queuine tRNA-ribosyltran sferase OS=Pseudomonas alkylphenolica OX=237609 GN=tgt PE=3 SV=1
MSRTCRMSFELLATDGKARRGRLTFPRGVVETPAFMPVGTYGTVKGMLPRDIEAIGAQMILGNTFHLWLRPGTEVIKAHGDLHDFMKWQGPILTDSGGFQVFSLGAMRKIKEEGVTFASPVDGSKVFMGPEESMQVQRDLGSDVVMIFDECTPYPADEDVARISMELSLRWAQRSKNAHGDNTAALFGIVQGGMHENLRMRSLEGLDKIGFDGLAIGGLSVGEPKHEMIKVLDYLPGQMPADKPRYLMGVGKPEDLVEGVRRGVDMFDCVMPTRNARNGHLFVDTGVLKIRNAFHRHDDSPLDPTCDCYTCQNFSRAYLHHLDKCGEMLGSMLNTIHNLRHYQRLMAGLREAIQQGTLAVFVDAFYAKRGLPVPPLD

SEQ ID NO: 59574 - protein, 377 aa, Pseudomonas alkylphenolica
  misc_feature (1)..(377): tr|A0A077FE20|A0A077FE20_9PSED Queuine tRNA-ribosyltran sferase OS=Pseudomonas alkylphenolica OX=237609 GN=tgt PE=3 SV=1
MSRTCRMSFELLATDGKARRGRLTFPRGVVETPAFMPVGTYGTVKGMLPRDIEAIGAQMILGNTFHLWLRPGTEVIKAHGDLHDFMKWQGPILTDSGGFQVFSLGAMRKIKEEGVTFASPVDGSKVFMGPEESMQVQRDLGSDVVMIFDECTPYPADEDVARISMELSLRWAQRSKNAHGDNTAALFGIVQGGMHQDLRMRSLEGLDKIGFDGLAIGGLSVGEPKHEMIKVLDYLPGQMPADKPRYLMGVGKPEDLVEGVRRGVDMFDCVMPTRNARNGHLFIDTGVLKIRNAFHRHDDSPLDPTCDCYTCQNFSRAYLHHLDKCGEMLGSMLNTIHNLRHYQRLMAGLREAIQQGTLAAFVDAFYAKRGLPVPPLD

SEQ ID NO: 59575 - protein, 384 aa, Pseudomonas amygdali
  misc_feature (1)..(384): tr|A0A3M6GJT8|A0A3M6GJT8_PSEAJ Queuine tRNA-ribosyltran sferase OS=Pseudomonas amygdali pv. tabaci OX=322 GN=tg t PE=3 SV=1
MGTRGSRMSRTCRMSFELLATDGKARRGRLTFPRGVVETPAFMPVGTYGTVKGMLPRDIEATGAQMILGNTFHLWLRPGTEVIKGHGDLHDFMQWKGPILTDSGGFQVFSLGAMRKIKEEGVTFASPVDGAKVFMGPEESMQVQRDLGSDVVMIFDECTPYPADEDVARVSMELSLRWAKRSKVAHGENTAALFGIVQGGMHENLRKRSLEGLDEIGFDGLAIGGLSVGEPKHEMIKVLDYLPGLMPADKPRYLMGVGKPEDLVEGVRRGVDMFDCVMPTRNARNGHLFTDAGVLKIRNAFHRHDNSPLDPTCDCYTCKNFSRAYLHHLDKCGEMLGSMLNTIHNLRHYQLLMAGLREAIQQGTLAAFVDAFYAKRGLPTPPLG

SEQ ID NO: 59576 - protein, 377 aa, Pseudomonas amygdali
  misc_feature (1)..(377): tr|A0A0P9WKF9|A0A0P9WKF9_PSEA0 Queuine tRNA-ribosyltran sferase OS=Pseudomonas amygdali pv. hibisci OX=251723 G N=tgt PE=3 SV=1
MSRTCRMSFELLATDGKARRGRLTFPRGVVETPAFMPVGTYGTVKGMLPRDIEATGAQMILGNTFHLWLRPGTEVIKGHGDLHDFMQWKGPILTDSGGFQVFSLGAMRKIKEEGVTFASPVDGAKVFMGPEESMQVQRDLGSDVVMIFDECTPYPADEDVARVSMELSLRWAKRSKVAHGENTAALFGIVQGGMHENLRKRSLEGLDEIGFDGLAIGGLSVGEPKHEMIKVLDYLPGLMPADKPRYLMGVGKPEDLVEGVRRGVDMFDCVMPTRNARNGHLFTDTGVLKIRNAFHRHDNSPLDPTCDCYTCKNFSRAYLHHLDKCGEMLGSMLNTIHNLRHYQLLMAGLREAIQQGTLAAFVDAFYAKRGLPTPPLG

SEQ ID NO: 59577 - protein, 377 aa, Pseudomonas anguilliseptica
  misc_feature (1)..(377): tr|A0A1H4P4Z9|A0A1H4P4Z9_PSEAG Queuine tRNA-ribosyltran sferase OS=Pseudomonas anguilliseptica OX=53406 GN=tgt PE=3 SV=1
MTRTCRMSFELLATEGKARRGRLTFPRGVVETPAFMPVGTYGTVKGMLPRDIEAIGAQIILGNTFHLWLRPGTEVIKKHGDLHDFMQWQGPILTDSGGFQVFSLGAMRKIKEEGVYFASPVDGAKVFMGPEESMQVQCDLGSDIVMIFDECTPYPAEFDVAKRSMELSLRWAKRSKEAHGESTAALFGIVQGGMHEELRKVSLDGLEQIGFDGYAIGGLSVGEPKEEMIKVLDYLPPQLPADKPRYLMGVGKPEDLVEGVRRGVDMFDCVMPTRNARNGHLFVDTGVLKIRNAFHKHDESPLDPTCDCYTCKHFSRAYLHHLDKCGEMLGSMLNTIHNLRHYQVLMAGLREAIQQGTLAAFVDAFYAKRGLPTPPLD

SEQ ID NO: 59578 - protein, 374 aa, Pseudomonas antarctica
  misc_feature (1)..(374): tr|A0A172Z6N2|A0A172Z6N2_9PSED Queuine tRNA-ribosyltran sferase OS=Pseudomonas antarctica OX=219572 GN=tgt PE=3 SV=1
MSRMSFELLATDGKARRGRLTFPRGTVETPAFMPVGTYGTVKGMLPRDIVATGAEIILGNTFHLWLRPGTEVIKKHGDLHDFMKWQGPILTDSGGFQVFSLGAMRKIKEEGVTFASPVDGSKVFMGPEESMQVQRDLGSDIVMIFDECTPYPADEDVARISMELSLRWAQRSKNAHGDNTAALFGIVQGGMHESLRKRSLEGLDKIGFDGLAIGGLSVGEPKHEMIKVLDYLPGLMPADKPRYLMGVGKPEDLVEGVRRGVDMFDCVMPTRNARNGHLFIDTGVLKIRNAFHRHDDSPLDPTCDCYTCQNFSRAYLHHLDKCGEMLGSMLNTIHNLRHYQVLMAGLREAIQQGTLAAFVDAFYAKRGLPVPPLD

SEQ ID NO: 59579 - protein, 377 aa, Pseudomonas argentinensis
  misc_feature (1)..(377): tr|A0A1I3HC29|A0A1I3HC29_9PSED Queuine tRNA-ribosyltran sferase OS=Pseudomonas argentinensis OX=289370 GN=tgt P E=3 SV=1
MTRTCRMSFELLATDGKARRGRLTFPRGVVETPAFMPVGTYGTVKGMLPRDIEAIGAQIILGNTFHLWLRPGTEVIKRHGDLHDFMQWQGPILTDSGGFQVFSLGAMRKIKEEGVTFASPVDGSKVFMGPEESMQVQRDLGSDIVMIFDECTPYPAEFDVAKTSMELSLRWAKRSKVAHGDSSAALFGIVQGGMHESLRMRSLKGLSELEFDGLAIGGLSVGEPKEEMIKVLDYLPGQMPSDKPRYLMGVGKPEDLVEGVRRGVDMFDCVMPTRNARNGHLFVDTGVLKIRNAFHRHDDSPLDPTCDCYTCKHFSRAYLHHLDKCGEMLGSMLNTIHNLRHYQRLMAGLREAIQQGTLAAFVDAFYARRGLPTPPLD

SEQ ID NO: 59580 - protein, 377 aa, Pseudomonas arsenicoxydans
  misc_feature (1)..(377): tr|A0A502HU96|A0A502HU96_9PSED Queuine tRNA-ribosyltran sferase OS=Pseudomonas arsenicoxydans OX=702115 GN=tgt PE=3 SV=1
MSRQSRMSFELLATDGKARRGRLTFPRGTVETPAFMPVGTYGTVKGMLPRDITATGAEIILGNTFHLWLRPGTEVIKKHGDLHDFMQWKGPILTDSGGFQVFSLGAMRKIKEEGVTFASPVDGAKVFMGPEESMQVQRDLGSDIVMIFDECTPYPADEDVARISMELSLRWAKRSKEAHGDNTAALFGIVQGGMHQDLRMRSLEGLDQIGFDGLAIGGLSVGEPKHEMIKVLDYLPGQMPADKPRYLMGVGKPEDLVEGVRRGVDMFDCVMPTRNARNGHLFIDTGVLKIRNAFHRHDDSPLDPTCDCYTCQNFSRAYLHHLDKCGEMLGSMLNTIHNLRHYQVLMAGLREAIQQGTLAAFVDAFYAKRGLPVPPLD

SEQ ID NO: 59581 - protein, 377 aa, Pseudomonas arsenicoxydans
  misc_feature (1)..(377): tr|A0A1H0H8F2|A0A1H0H8F2_9PSED Queuine tRNA-ribosyltran sferase OS=Pseudomonas arsenicoxydans OX=702115 GN=tgt PE=3 SV=1
MSRQSRMSFELLATDGKARRGRLTFPRGTVETPAFMPVGTYGTVKGMLPRDIVATGAEIILGNTFHLWLRPGTEVIKKHGDLHDFMQWKGPILTDSGGFQVFSLGAMRKIKEEGVTFASPVDGAKVFMGPEESMQVQRDLGSDIVMIFDECTPYPADEDVARVSMELSLRWAKRSKEAHGDNTAALFGIVQGGMHQDLRMRSLEGLDNIGFDGLAIGGLSVGEPKHEMIKVLDYLPGQMPADKPRYLMGVGKPEDLVEGVRRGVDMFDCVMPTRNARNGHLFIDTGVLKIRNAFHRHDDSPLDPTCDCYTCQNFSRAYLHHLDKCGEMLGSMLNTIHNLRHYQVLMAGLREAIQQGTLAAFVDAFYAKRGLPVPPLD

SEQ ID NO: 59582 - protein, 377 aa, Pseudomonas asplenii
  misc_feature (1)..(377): tr|A0A3S3ELA7|A0A3S3ELA7_9PSED Queuine tRNA-ribosyltran sferase OS=Pseudomonas asplenii OX=53407 GN=tgt PE=3 SV =1
MSRNCRMSFELLATDGKARRGRLTFPRGTVETPAFMPVGTYGTVKGMLPRDIVATGAEIILGNTFHLWLRPGTEVIKAHGDLHDFMQWKGPILTDSGGFQVFSLGAMRKIKEEGVTFASPVDGAKVFMGPEESMQVQRDLGSDIVMIFDECTPYPADEDVARVSMELSLRWAQRSKNAHGENTAALFGIVQGGMHESLRKRSLEGLDQIGFDGLAIGGLSVGEPKHEMIKVLDYLPGLMPADKPRYLMGVGKPEDLVEGVRRGVDMFDCVMPTRNARNGHLFIDTGVLKIRNAFHRHDESPLDPTCDCYTCQNFSRAYLHHLDKCGEMLGSMLNTIHNLRHYQRLMAGLREAIQQGTLAAFVDAFYAKRGLPVPPLD

SEQ ID NO: 59583 - protein, 377 aa, Pseudomonas asplenii
  misc_feature (1)..(377): tr|A0A1H1P1B5|A0A1H1P1B5_9PSED Queuine tRNA-ribosyltran sferase OS=Pseudomonas asplenii OX=53407 GN=tgt PE=3 SV =1
MSRTCRMSFELLATDGKARRGRLTFPRGTVETPAFMPVGTYGTVKGMLPRDIVATGAEIILGNTFHLWLRPGTEVIKEHGDLHDFMQWKGPILTDSGGFQVFSLGAMRKIKEEGVTFASPVDGAKVFMGPEESMQVQRDLGSDIVMIFDECTPYPADEDVARVSMELSLRWAQRSKNAHGDNTAALFGIVQGGMHENLRMRSLEGLDKIGFDGLAIGGLSVGEPKHEMIKVLDYLPGRMPADKPRYLMGVGKPEDLVEGVRRGVDMFDCVMPTRNARNGHLFIDTGVLKIRNAFHRHDDSPLDPTCDCYTCQNFSRAYLHHLDKCGEMLGSMLNTIHNLRHYQRLMAGLREAIQQGTLAAFVDAFYAKRGLPVPPLD

SEQ ID NO: 59584 - protein, 377 aa, Pseudomonas asturiensis
  misc_feature (1)..(377): tr|A0A1M7LNZ4|A0A1M7LNZ4_9PSED Queuine tRNA-ribosyltran sferase OS=Pseudomonas asturiensis OX=1190415 GN=tgt PE =3 SV=1
MSRTCRMSFELLATDGKARRGRLTFPRGVVETPAFMPVGTYGTVKGMLPRDIEATGAQIILGNTFHLWLRPGTEVIKGHGDLHDFMQWQGPILTDSGGFQVFSLGAMRKIKEEGVTFASPVDGAKVFMGPEESMQVQRDLGSDIVMIFDECTPYPADEDVARISMELSLRWAKRSKIAHGENTAALFGIVQGGMHENLRMRSLEGLDQIGFDGLAIGGLSVGEPKHEMIKVLDYLPGQMPADKPRYLMGVGKPEDLVEGVRRGIDMFDCVMPTRNARNGHLFIDTGVLKIRNAFHRHDNSPLDPTCDCYTCKNFSRAYLHHLDKCNEMLGSMLNTIHNLRHYQLLMAGLREAIQQGTLAAFVDAFYAKRGLPTPPLG

SEQ ID NO: 59585 - protein, 377 aa, Pseudomonas avellanae
  misc_feature (1)..(377): tr|A0A2S3TK94|A0A2S3TK94_9PSED Queuine tRNA-ribosyltran sferase OS=Pseudomonas avellanae OX=46257 GN=tgt PE=3 S V=1
MSRTCRMSFELLATDGKARRGRLTFPRGVVETPAFMPVGTYGTVKGMLPRDIEATGAQMILGNTFHLWLRPGTEVIKGHGDLHDFMQWKGPILTDSGGFQVFSLGAMRKIKEEGVTFASPVDGAKVFMGPEESMQVQRDLGSDVVMIFDECTPYPADEDVARVSMELSLRWAKRSKVAHGENTAALFGIVQGGMHENLRKRSLEGLDEIGFDGLAIGGLSVGEPKHEMIKVLDYLPGLMPADKPRYLMGVGKPEDLVEGVRRGVDMFDCVMPTRNARNGHLFIDTGVLKIRNAFHRHDNTPLDPTCDCYTCKNFSRAYLHHLDKCGEMLGSMLNTIHNLRHYQLLMAGLREAIQQGTLAAFVDAFYAKRGLPTPPLG

SEQ ID NO: 59586 - protein, 371 aa, Pseudomonas avellanae
  misc_feature (1)..(371): tr|A0A261WKP7|A0A261WKP7_9PSED Queuine tRNA-ribosyltran sferase OS=Pseudomonas avellanae OX=46257 GN=tgt PE=3 S V=1
MSFELLATDGKARRGRLTFPRGVVETPAFMPVGTYGTVKGMLPRDIEATGAQMILGNTFHLWLRPGTEVIKGHGDLHDFMQWKGPILTDSGGFQVFSLGAMRKIKEEGVTFASPVDGAKVFMGPEESMQVQRDLGSDVVMIFDECTPYPADEDVARVSMELSLRWAKRSKVAHGENTAALFGIVQGGMHENLRKRSLEGLDEIGFDGLAIGGLSVGEPKHEMIKVLDYLPGLMPADKPRYLMGVGKPEDLVEGVRRGVDMFDCVMPTRNARNGHLFIDTGVLKIRNAFHRHDNTPLDTTCDCYTCKNFSRAYLHHLDKCGEMLGSMLNTIHNLRHYQLLMAGLREAIQQGTLAAFVDAFYAKRGLPTPPLG

SEQ ID NO: 59587 - protein, 374 aa, Pseudomonas azotoformans
  misc_feature (1)..(374): tr|A0A4Q0HSM7|A0A4Q0HSM7_PSEAZ Queuine tRNA-ribosyltran sferase OS=Pseudomonas azotoformans OX=47878 GN=tgt PE= 3 SV=1
MSRMSFELLATDGKARRGRLTFPRGTVETPAFMPVGTYGTVKGMLPRDIVATGAEIILGNTFHLWLRPGTEVIKKHGDLHDFMKWQGPILTDSGGFQVFSLGAMRKIKEEGVTFASPVDGAKVFMGPEESMQVQRDLGSDIVMIFDECTPYPADEDVARISMELSLRWAQRSKNAHGDNTAALFGIVQGGMHESLRKRSLEGLDKIGFDGLAIGGLSVGEPKHEMIKVLDYLPGLMPADKPRYLMGVGKPEDLVEGVRRGVDMFDCVMPTRNARNGHLFIDTGVLKIRNAFHRHDDSPLDPTCDCYTCQNFSRAYLHHLDKCGEMLGSMLNTIHNLRHYQVLMAGLREAIQQGTLAAFVDAFYAKRGLPVPPLD

SEQ ID NO: 59588 - protein, 374 aa, Pseudomonas azotoformans
  misc_feature (1)..(374): tr|A0A127HRA2|A0A127HRA2_PSEAZ Queuine tRNA-ribosyltran sferase OS=Pseudomonas azotoformans OX=47878 GN=tgt PE= 3 SV=1
MSRMSFELLATDGKARRGRLTFPRGTVETPAFMPVGTYGTVKGMLPRDIVATGAEIILGNTFHLWLRPGTEVIKKHGDLHDFMKWQGPILTDSGGFQVFSLGAMRKIKEEGVTFASPVDGSKVFMGPEESMQVQRDLGSDIVMIFDECTPYPADEDVARISMELSLRWAQRSKNAHGDNTAALFGIVQGGMHESLRKRSLEGLHKIGFDGLAIGGLSVGEPKHEMIKVLDYLPGLMPADKPRYLMGVGKPEDLVEGVRRGVDMFDCVMPTRNARNGHLFIDTGVLKIRNAFHRHDDSPLDPTCDCYTCQNFSRAYLHHLDKCGEMLGSMLNTIHNLRHYQVLMAGLREAIQQGTLAAFVDAFYAKRGLPVPPLD

SEQ ID NO: 59589 - protein, 377 aa, Pseudomonas baetica
  misc_feature (1)..(377): tr|A0A2N0DHW5|A0A2N0DHW5_9PSED Queuine tRNA-ribosyltran sferase OS=Pseudomonas baetica OX=674054 GN=tgt PE=3 SV =1
MSRECRMSFELLATDGKARRGRLTFPRGTVETPAFMPVGTYGTVKGMLPRDIVATGAEIILGNTFHLWLRPGTEVIKAHGDLHDFMQWKGPILTDSGGFQVFSLGAMRKIKEGGVTFASPVDGSKVFMGPEESMQVQRDLGSDIVMIFDECTPYPADEDVARVSMELSLRWAQRSKNAHGENTAALFGIVQGGMHQDLRMRSLEGLDKIGFDGLAIGGLSVGEPKHEMIKVLDYLPGMMPADKPRYLMGVGKPEDLVEGVRRGVDMFDCVMPTRNARNGHLFIDTGVLKIRNAFHRHDDSPLDPTCDCYTCQNFSRAYLHHLDKCGEMLGSMLNTIHNLRHYQVLMAGLREAIQQGTLAAFVDAFYAKRGLPVPPLD

SEQ ID NO: 59590 - protein, 377 aa, Pseudomonas balearica
  misc_feature (1)..(377): tr|A0A1G9SWF6|A0A1G9SWF6_9PSED Queuine tRNA-ribosyltran sferase OS=Pseudomonas balearica DSM 6083 OX=1123016 GN =tgt PE=3 SV=1
MSRTCRMTFELLATEGKARRGRLRFPRGVVETPAFMPVGTYGTVKGMLPRDVEGIGAQIILGNTFHLWLRPGMDVIREHGSLHGFMQWNGPILTDSGGFQVFSLGAMRKIKEEGVYFASPVDGAKVFMGPEESMQVQRDLGSDIVMIFDECTPYPADEETARRSMELSLRWAKRSKVAHGDSSAALFGIVQGGMHESLRMRSLEGLCEIGFDGLAIGGLSVGEPKEEMIRVLDFLPPQMPADKPRYLMGVGKPEDLVEGVRRGVDMFDCVMPTRNARNGHLFTENGVVKIRNSVHKHDNSPLDAECDCYTCKHFSRAYLHHLDKCGEMLGSMLNTIHNLRHYQRLMAGLRGAIEEGTLAAFVDAFYARRGLPTPPLA

SEQ ID NO: 59591 - protein, 371 aa, Pseudomonas batumici
  misc_feature (1)..(371): tr|A0A0C2E796|A0A0C2E796_9PSED Queuine tRNA-ribosyltran sferase OS=Pseudomonas batumici OX=226910 GN=tgt PE=3 S V=1
MSFELLATDGKARRGRLTFPRGTVETPAFMPVGTYGTVKGMLPRDIVATGAEIILGNTFHLWLRPGTEVIKEHGDLHDFMQWKGPILTDSGGFQVFSLGAMRKIKEEGVTFASPVDGAKVFMGPEESMQVQRDLGSDIVMIFDECTPYPADEDVARVSMELSLRWAQRSKNAHGDNTAALFGIVQGGMHENLRKRSLEGLDKIGFDGLAIGGLSVGEPKHEMIKVLDYLPGLMPADKPRYLMGVGKPEDLVEGVRRGVDMFDCVMPTRNARNGHLFIDTGVLKIRNAFHRHDESPLDPTCDCYTCQNFSRAYLHHLDKCGEMLGSMLNTIHNLRHYQRLMAGLREAIQQGTLAAFVDAFYAKRGLPVPPLD

SEQ ID NO: 59592 - protein, 372 aa, Pseudomonas bauzanensis
  misc_feature (1)..(372): tr|A0A4U0YS09|A0A4U0YS09_9PSED tRNA guanosine(34) trans glycosylase Tgt OS=Pseudomonas bauzanensis OX=653930 GN =tgt PE=4 SV=1
MQFELLATDGKARRGRLTFPRGVVETPAFMPVGTYGTVKGMLPRDVEDIGAQIILGNTFHLWLRPGTEVIRKHGDLHDFMQWQGPILTDSGGFQVFSLGAMRKIKEEGVYFSSPVDGAKVFMGPEESMQVQRDLGSDIVMIFDECTPYPADVDTARRSMELSLRWAQRSKDAHEGNPSALFGIVQGGMHEELRARSLDGLCEIGFDGLAIGGLSVGEPKEDMIRILDYLPPLMPPEKPRYLMGVGKPEDLVEGVRRGVDMFDCVMPTRNARNGHLFTDTGVVKIRNAVHRHDDSPLDPGCDCYTCRHFTRAYLHHLDKCGEMLGSMLNTIHNLRHYQRVMHGLRGAIQQGTLTAFVDNFYARLGQPVPPLEA

SEQ ID NO: 59593 - protein, 375 aa, Pseudomonas bauzanensis
  misc_feature (1)..(375): tr|A0A1H9P998|A0A1H9P998_9PSED Queuine tRNA-ribosyltran sferase OS=Pseudomonas bauzanensis OX=653930 GN=tgt PE= 3 SV=1
MSHMQFELLATDGKARRGRLTFPRGVVETPAFMPVGTYGTVKGMLPRDVEDIGAQIILGNTFHLWLRPGTEVIRKHGDLHDFMQWQGPILTDSGGFQVFSLGAMRKIKEEGVYFSSPVDGAKVFMGPEESMQVQRDLGSDIVMIFDECTPYPADVDTARRSMELSLRWAQRSKDAHEGNPSALFGIVQGGMHEELRARSLDGLCEIGFDGLAIGGLSVGEPKEDMIRILDYLPPLMPPEKPRYLMGVGKPEDLVEGVRRGVDMFDCVMPTRNARNGHLFTDTGVVKIRNAVHRHDDSPLDPGCDCYTCRHFTRAYLHHLDKCGEMLGSMLNTIHNLRHYQRVMHGLRGAIQQGTLTAFVDNFYARLGQPVPPLEA

SEQ ID NO: 59594 - protein, 377 aa, Pseudomonas benzenivorans
  misc_feature (1)..(377): tr|A0A1G7XTF9|A0A1G7XTF9_9PSED Queuine tRNA-ribosyltran sferase OS=Pseudomonas benzenivorans OX=556533 GN=tgt P E=3 SV=1
MTRSCRMSFELLATDGKARRGRLTFPRGVVETPAFMPVGTYGTVKGMLPRDIEAIGAQIILGNTFHLWLRPGTEVIKRHGDLHDFMQWQGPILTDSGGFQVFSLGAMRKIKEEGVTFASPVDGAKVFMGPEESMQVQRDLGSDIVMIFDECTPYPAEFDVAKRSMELSLRWAQRSKDAHGENSAALFGIVQGGMHEELRLRSLEGLNEIGFDGLAIGGLSVGEPKEEMIRVLDYLPGQMPADKPRYLMGVGKPEDLVEGVRRGVDMFDCVMPTRNARNGHLFVETGVLKIRNSAHKQDDSPLDPTCDCYTCQHFSRAYLHHLDKCGEMLGSMLNTIHNLRHYQRLMAGLRGAIQQGTLAAFVDAFYARRGLQTPPLD

SEQ ID NO: 59595 - protein, 377 aa, Pseudomonas borbori
  misc_feature (1)..(377): tr|A0A1I5VK24|A0A1I5VK24_9PSED Queuine tRNA-ribosyltran sferase OS=Pseudomonas borbori OX=289003 GN=tgt PE=3 SV =1
MTRTCRMSFELLATDGKARRGRLTFPRGVVETPAFMPVGTYGTVKGMLPRDIEAIGAQMILGNTFHLWLRPGTEVIKRHGDLHDFMQWQGPILTDSGGFQVFSLGAMRKIKEEGVYFASPVDGAKVFMGPEESMQVQRDLGSDIVMIFDECTPYPAEFDVAKRSMELSLRWAKRSKEAHGDSTAALFGIVQGGMHEELRMRSLEGLNALDFDGLAIGGLSVGEPKEEMIRVLDYLPAQLPADKPRYLMGVGKPEDLVEGVRRGVDMFDCVMPTRNARNGHLFVESGVLKIRNALHRHDDSPLDASCDCYTCKHFSRAYLHHLDKCGEMLGSMLNTIHNLRHYQRLMAGLREAIQQGTLAAFVDAFYTRRGLPVPPLD

SEQ ID NO: 59596 - protein, 377 aa, Pseudomonas brassicacearum
  misc_feature (1)..(377): tr|A0A423HYN9|A0A423HYN9_9PSED Queuine tRNA-ribosyltran sferase OS=Pseudomonas brassicacearum OX=930166 GN=tgt PE=3 SV=1
MSRQSRMSFELLATDGKARRGRLTFPRGTVETPAFMPVGTYGTVKGMLPRDIVATGAEIILGNTFHLWLRPGTEVIKKHGDLHDFMQWKGPILTDSGGFQVFSLGAMRKIKEEGVTFASPVDGAKVFMGPEESMQVQRDLGSDIVMIFDECTPYPADEDVARVSMELSLRWAKRSKEAHGDNTAALFGIVQGGMHQDLRMRSLEGLDQIGFDGLAIGGLSVGEPKHEMIKVLDYLPGQMPADKPRYLMGVGKPEDLVEGVRRGVDMFDCVMPTRNARNGHLFIDTGVLKIRNAFHRHDDSPLDPTCDCYTCQNFSRAYLHHLDKCGEMLGSMLNTIHNLRHYQVLMAGLRESIQQGTLAAFVDAFYAKRGLPVPPLD

SEQ ID NO: 59597 - protein, 377 aa, Pseudomonas brassicacearum
  misc_feature (1)..(377): tr|A0A423J6D9|A0A423J6D9_9PSED Queuine tRNA-ribosyltran sferase OS=Pseudomonas brassicacearum OX=930166 GN=tgt PE=3 SV=1
MSRTSRMSFELLATDGKARRGRLTFPRGTVETPAFMPVGTYGTVKGMLPRDITATGAEIILGNTFHLWLRPGTEVIKKHGDLHDFMQWKGPILTDSGGFQVFSLGAMRKIKEEGVTFASPVDGAKVFMGPEESMQVQRDLGSDIVMIFDECTPYPADEDVARVSMELSLRWAKRSKEAHGDNTAALFGIVQGGMHQDLRMRSLEGLDNIGFDGLAIGGLSVGEPKHEMIKVLDYLPGQMPADKPRYLMGVGKPEDLVEGVRRGVDMFDCVMPTRNARNGHLFIDTGVLKIRNAFHRHDDSPLDPTCDCYTCQNFSRAYLHHLDKCGEMLGSMLNTIHNLRHYQVLMAGLREAIQQGTLAAFVDAFYAKRGLPVPPLD

SEQ ID NO: 59598 - protein, 374 aa, Pseudomonas brenneri
  misc_feature (1)..(374): tr|A0A5B2UJ60|A0A5B2UJ60_9PSED Queuine tRNA-ribosyltran sferase OS=Pseudomonas brenneri OX=129817 GN=tgt PE=3 S V=1
MSRMSFELLATDGKARRGRLTFPRGTVETPAFMPVGTYGTVKGMLPRDIVATGAEIILGNTFHLWLRPGTEVIKKHGDLHDFMKWQGPILTDSGGFQVFSLGAMRKIKEEGVTFASPVDGSKVFMGPEESMQVQRDLGSDIVMIFDECTPYPADEEVARISMELSLRWAQRSKNAHGDNTAALFGIVQGGMHESLRKRSLEGLDKIGFDGLAIGGLSVGEPKHEMIKVLDYLPGLMPSDKPRYLMGVGKPEDLVEGVRRGVDMFDCVMPTRNARNGHLFIDTGVLKIRNAFHRHDDSPLDPTCDCYTCQNFSRAYLHHLDKCGEMLGSMLNTIHNLRHYQVLMAGLREAIQQGTLAAFVDAFYAKRGLPVPPLD

SEQ ID NO: 59599 - protein, 374 aa, Pseudomonas brenneri
  misc_feature (1)..(374): tr|A0A176V4A5|A0A176V4A5_9PSED Queuine tRNA-ribosyltran sferase OS=Pseudomonas brenneri OX=129817 GN=tgt PE=3 S V=1
MSRMSFELLATDGKARRGRLTFPRGTVETPAFMPVGTYGTVKGMLPRDIVATGAEIILGNTFHLWLRPGTEVIKKHGDLHDFMKWQGPILTDSGGFQVFSLGAMRKIKEEGVTFASPVDGSKVFMGPEESMQVQRDLGSDIVMIFDECTPYPADEDVARISMELSLRWAQRSKNAHGDNTAALFGIVQGGMHESLRKRSLEGLDKIGFDGLAIGGLSVGEPKHEMIKVLEYLPGLMPSDKPRYLMGVGKPEDLVEGVRRGVDMFDCVMPTRNARNGHLFIDTGVLKIRNAFHRHDDSPLDPTCDCYTCQNFSRAYLHHLDKCGEMLGSMLNTIHNLRHYQVLMAGLREAIQQGTLAAFVDAFYAKRGLPVPPLD

SEQ ID NO: 59600 - protein, 374 aa, Pseudomonas canadensis; identical to SEQ ID NO: 59578
  misc_feature (1)..(374): tr|A0A423EVI0|A0A423EVI0_9PSED Queuine tRNA-ribosyltran sferase OS=Pseudomonas canadensis OX=915099 GN=tgt PE=3 SV=1

SEQ ID NO: 59601 - protein, 377 aa, Pseudomonas cannabina
  misc_feature (1)..(377): tr|A0A0P9P1E3|A0A0P9P1E3_PSECA Queuine tRNA-ribosyltran sferase OS=Pseudomonas cannabina OX=86840 GN=tgt PE=3 S V=1
MSRTCRMSFELLATDGKARRGRLTFPRGVVETPAFMPVGTYGTVKGMLPRDIEATGAQMILGNTFHLWLRPGTEVIKGHGDLHDFMQWKGPILTDSGGFQVFSLGAMRKIKEEGVTFASPVDGAKVFMGPEESMQVQRDLGSDVMMIFDECTPYPADEDVARVSMELSLRWAKRSKVAHGENTAALFGIVQGGMHENLRKRSLEGLDDIGFDGLAIGGLSVGEPKHEMIKVLDYLPGLMPADKPRYLMGVGKPEDLVEGVRRGVDMFDCVMPTRNARNGHLFIDTGVLKIRNAFHRHDNSPLDPSCDCYTCKNFSRAYLHHLDKCGEMLGSMLNTIHNLRHYQLLMTGLREAIQQGTLAAFVDAFYAKRGLPTPPLG

SEQ ID NO: 59602 - protein, 377 aa, Pseudomonas cannabina
  misc_feature (1)..(377): tr|A0A3M3PSF7|A0A3M3PSF7_PSECA Queuine tRNA-ribosyltran sferase OS=Pseudomonas cannabina OX=86840 GN=tgt PE=3 S V=1
MSRTCRMSFELLATDGKARRGRLTFPRGVVETPAFMPVGTYGTVKGMLPRDIEATGAQMILGNTFHLWLRPGTEVIKGHGDLHDFMQWKGPILTDSGGFQVFSLGAMRKIKEEGVTFASPVDGAKVFMGPEESMQVQRDLGSDVVMIFDECTPYPADEDVARVSMELSLRWAKRSKVAHGENTAALFGIVQGGMHENLRKRSLEGLDEIGFDGLAIGGLSVGEPKHEMIKVLDYLPGLMPADKPRYLMGVGKPEDLVEGVRRGVDMFDCVMPTRNARNGHLFIDTGVLKIRNAFHRHDNSPLDTSCDCYTCKNFSRAYLHHLDKCGEMLGSMLNTIHNLRHYQLLMAGLREAIQQGTLAAFVDAFYAKRGLPTPPLG

SEQ ID NO: 59603 - protein, 377 aa, Pseudomonas capeferrum
  misc_feature (1)..(377): tr|A0A084CBZ1|A0A084CBZ1_9PSED Queuine tRNA-ribosyltran sferase OS=Pseudomonas capeferrum OX=1495066 GN=tgt PE= 3 SV=1
MSRTCRMSFELLATDGKARRGRITFPRGTVETPAFMPVGTYGTVKGMLPRDIEAIGAEMILGNTFHLWLRPGTEVIKKHNGLHDFMQWKGPILTDSGGFQVFSLGAMRKIKEEGVTFASPVDGSKVFMGPEESMQVQRDLGSDVVMIFDECTPYPAEHDVARTSMELSLRWAQRSKNAHADNTAALFGIVQGGMYQDLRMRSLEGLENIGFDGLAIGGLSVGEPKHEMIKVLDYLPDQMPADKPRYLMGVGKPEDLVEGVRRGVDMFDCVMPTRNARNGHLFVDTGVIKIRNAFHRHDESPLDPTCDCYTCTNFSRAYLHHLDKCGEMLSSMLNTIHNLRHYQRLMAGLREAIQQGKLAAFVDAFYAKRGLPVPPLG

SEQ ID NO: 59604 - protein, 377 aa, Pseudomonas caricapapayae
  misc_feature (1)..(377): tr|A0A0N8QTW3|A0A0N8QTW3_9PSED Queuine tRNA-ribosyltran sferase OS=Pseudomonas caricapapayae OX=46678 GN=tgt PE =3 SV=1
MSRTCRMSFELLATDGKARRGRLTFPRGVVETPAFMPVGTYGTVKGMLPRDIEATGAQMILGNTFHLWLRPGTEVIKGHGDLHDFMQWQGPILTDSGGFQVFSLGAMRKIKEEGVTFASPVDGAKVFMGPEESMQVQRDLGSDVVMIFDECTPYPADEDVARISMELSLRWARRSKVAHGENTAALFGIVQGGMHENLRKRSLEGLDEIGFDGLAIGGLSVGEPKHEMIKVLDYLPGLMPADKPRYLMGVGKPEDLVEGVRRGVDMFDCVMPTRNARNGHLFTDTGVLKIRNAFHRHDNSPLDPTCDCYTCKNFSRAYLHHLDKCGEMLGSMLNTIHNLRHYQLLMAGLREAIQQGTLAAFVDAFYAKRGLPTPPLG

SEQ ID NO: 59605 - protein, 377 aa, Pseudomonas caspiana; identical to SEQ ID NO: 59597
  misc_feature (1)..(377): tr|A0A502JC05|A0A502JC05_9PSED Queuine tRNA-ribosyltran sferase OS=Pseudomonas caspiana OX=1451454 GN=tgt PE=3 SV=1

SEQ ID NO: 59606 - protein, 371 aa, Pseudomonas caspiana
  misc_feature (1)..(371): tr|A0A1Y3P6M6|A0A1Y3P6M6_9PSED Queuine tRNA-ribosyltran sferase OS=Pseudomonas caspiana OX=1451454 GN=tgt PE=3 SV=1
MSFELLATDGKARRGRLTFPRGVVETPAFMPVGTYGTVKGMLPRDIEATGAQIILGNTFHLWLRPGTEVIKAHGDLHDFMKWNGPILTDSGGFQVFSLGAMRKIKEEGVTFASPVDGAKVFMGPEESMQVQRDLGSDIVMIFDECTPYPADEDVARVSMELSLRWAKRSKVAHGESTAALFGIVQGGMHESLRKRSLEGLDQIGFDGLAIGGLSVGEPKHEMIKVLDYLPGLMPPEKPRYLMGVGKPEDLVEGVRRGIDMFDCVMPTRNARNGHLFIDTGVLKIRNAFHRHDDSPLDPTCDCYTCQNFSRAYLHHLDKCGEMLGSMLNTIHNLRHYQRLMAGLREAIQQGTLAAFVDAFYAKRGIPTPPMD

SEQ ID NO: 59607 - protein, 374 aa, Pseudomonas cedrina; identical to SEQ ID NO: 59587
  misc_feature (1)..(374): tr|A0A2S9D786|A0A2S9D786_PSECE Queuine tRNA-ribosyltran sferase OS=Pseudomonas cedrina OX=651740 GN=tgt PE=3 SV =1

SEQ ID NO: 59608 - protein, 374 aa, Pseudomonas cedrina
  misc_feature (1)..(374): tr|A0A1V2KJ63|A0A1V2KJ63_PSECE Queuine tRNA-ribosyltran sferase OS=Pseudomonas cedrina subsp. cedrina OX=76762 GN=tgt PE=3 SV=1
MSRMSFELLATDGKARRGRVTFPRGTVETPAFMPVGTYGTVKGMLPRDIVATGAEIILGNTFHLWLRPGTEVIKKHGDLHDFMKWQGPILTDSGGFQVFSLGAMRKIKEEGVTFASPVDGSKVFMGPEESMQVQRDLGSDIVMIFDECTPYPADEDVARISMELSLRWAQRSKNAHGDNTAALFGIVQGGMHESLRKRSLEGLDKIGFDGLAIGGLSVGEPKHEMIKVLDYLPGLMPADKPRYLMGVGKPEDLVEGVRRGVDMFDCVMPTRNARNGHLFIDTGVLKIRNAFHRHDDSPLDPTCDCYTCQNFSRAYLHHLDKCGEMLGSMLNTIHNLRHYQVLMAGLREAIQQGTLAAFVDAFYAKRGLPVPPLD

SEQ ID NO: 59609 - protein, 377 aa, Pseudomonas cerasi
  misc_feature (1)..(377): tr|A0A193SL95|A0A193SL95_9PSED Queuine tRNA-ribosyltran sferase OS=Pseudomonas cerasi OX=1583341 GN=tgt PE=3 SV =1
MSRTCRMSFELLATDGKARRGRLTFPRGVVETPAFMPVGTYGTVKGMLPRDIEATGAQMILGNTFHLWLRPGTEVIKGHGDLHDFMQWKGPILTDSGGFQVFSLGAMRKIKEEGVTFASPVDGAKVFMGPEESMQVQRDLGSDVVMIFDECTPYPADEDVARVSMELSLRWAKRSKIAHGENTAALFGIVQGGMHENLRKRSLEGLDEIGFDGLAIGGLSVGEPKHEMIKVLDYLPGLMPADKPRYLMGVGKPEDLVEGVRRGVDMFDCVMPTRNARNGHLFTDTGVLKIRNAFHRHDNSPLDPTCDCYTCKNFSRAYLHHLDKCGEMLGSMLNTIHNLRHYQLLMAGLREAIQQGTLAAFVDAFYAKRGLPTPPLG

SEQ ID NO: 59610 - protein, 377 aa, Pseudomonas chengduensis
  misc_feature (1)..(377): tr|A0A1G6KG37|A0A1G6KG37_9PSED Queuine tRNA-ribosyltran sferase OS=Pseudomonas chengduensis OX=489632 GN=tgt PE =3 SV=1
MSRTCRMSFELLATDGKARRGRLTFPRGVVETPAFMPVGTYGTVKGMLPRDVEDIGAQIILGNTFHLWLRPGMEVIKKHGDLHDFMQWQGPILTDSGGFQVFSLGAMRKIKEEGVYFASPVDGAKVFMGPEESMQVQRDLGSDIVMIFDECTPYPAEFDVAKRSMELSLRWAKRSKTAHGESSAALFGIVQGGMHEELRMRSLEGLCEIGFDGLAIGGLSVGEPKEEMIRVLDFLPPHMPADKPRYLMGVGKPEDLVEGVRRGVDMFDCVMPTRNARNGHLFVDTGVVKIRNAVHKHDDSPLDPTCDCYTCKHFSRAYLHHLDKCGEMLGSMLNTIHNLRHYQRVMAGLREAIGQGTLAAFVETFYAKRGLPVPPLD

SEQ ID NO: 59611 - protein, 371 aa, Pseudomonas chloritidismutans
  misc_feature (1)..(371): tr|V4QGJ1|V4QGJ1_PSECO Queuine tRNA-ribosyltransferase OS=Pseudomonas chloritidismutans AW-1 OX=1263865 GN=tgt PE=3 SV=1
MSFELLATDGKARRGRLTFPRGTVETPAFMPVGTYGTVKGMLPRDIEAIGAQIILGNTFHLWLRPGTEVIKRHGDLHDFMQWQGPILTDSGGFQVFSLGAMRKIKEEGVYFASPVDGAKVFMGPEESMQVQRDLGSDIVMIFDECTPYPADEDVARRSMELSLRWAKRSKVAHGDSPAALFGIVQGGMHESLRMRSLEGLCEIGFDGLAIGGLSVGEPKEEMIRVLDFLPPQMPADKPRYLMGVGKPEDLVEGVRRGVDMFDCVMPTRNARNGHLFVDSGVIKIRNAVHKHDDSPLDPSCDCYTCKHFSRAYLHHLDKCGEMLGSMLNTIHNLRHYQRVMAGLRDAIQQGTLAAFVDAFYAKRGLPTPPLA

SEQ ID NO: 59612 - protein, 377 aa, Pseudomonas chlororaphis
  misc_feature (1)..(377): tr|A0A1E1G2T7|A0A1E1G2T7_9PSED Queuine tRNA-ribosyltran sferase OS=Pseudomonas chlororaphis subsp. aurantiaca O X=86192 GN=tgt PE=3 SV=1
MSRTCRMSFELLATDGKARRGRLTFPRGTVETPAFMPVGTYGTVKGMLPRDIVATGAEIILGNTFHLWLRPGTEVIKKHGDLHDFMQWKGPILTDSGGFQVFSLGAMRKIKEEGVTFASPVDGAKVFMGPEESMQVQRDLGSDIVMIFDECTPYPADEDVARVSMELSLRWAQRSKNAHGDNTAALFGIVQGGMHQDLRMRSLEGLDKIGFDGLAIGGLSVGEPKHEMIKVLDYLPGQMPADKPRYLMGVGKPEDLVEGVRRGVDMFDCVMPTRNARNGHLFIDTGVLKIRNAFHRHDDSPLDPTCDCYTCQNFSRAYLHHLDKCGEMLGSMLNTIHNLRHYQRLMAGLREAIQQGTLAAFVDSFYAKRGLPVPPLE

SEQ ID NO: 59613 - protein, 377 aa, Pseudomonas chlororaphis
  misc_feature (1)..(377): tr|A0A423DLS5|A0A423DLS5_9PSED Queuine tRNA-ribosyltran sferase OS=Pseudomonas chlororaphis OX=587753 GN=tgt PE =3 SV=1
MSRTCRMSFELLATDGKARRGRLTFPRGTVETPAFMPVGTYGTVKGMLPRDIVATGAEIILGNTFHLWLRPGTEVIKKHGDLHDFMQWSGPILTDSGGFQVFSLGAMRKIKEEGVTFASPVDGAKVFMGPEESMQVQRDLGSDIVMIFDECTPYPADEDVARISMELSLRWAQRSKNAHGENTAALFGIVQGGMHQDLRMRSLEGLDKIGFDGLAIGGLSVGEPKHEMIKVLDYLPGQMPADKPRYLMGVGKPEDLVEGVRRGVDMFDCVMPTRNARNGHLFIDTGVLKIRNAFHRHDDSPLDPTCDCYTCQNFSRAYLHHLDKCGEMLGSMLNTIHNLRHYQRLMAGLREAIQQGTLAAFVDSFYAKRGLPVPPLD

SEQ ID NO: 59614 - protein, 377 aa, Pseudomonas cichorii
  misc_feature (1)..(377): tr|A0A3M3SP50|A0A3M3SP50_PSECI Queuine tRNA-ribosyltran sferase OS=Pseudomonas cichorii OX=36746 GN=tgt PE=3 SV =1
MSRTCRMSFELLATDGKARRGRLTFPRGVVETPAFMPVGTYGTVKGMLPRDIEATGAQIILGNTFHLWLRPGTEVIKGHGDLHDFMQWKGPILTDSGGFQVFSLGAMRKIKEEGVTFASPVDGAKVFMGPEESMQVQRDLGSDIVMIFDECTPYPADEDVARVSMELSLRWAKRSKVAHGESTAALFGIVQGGMHENLRMRSLEGLDQIGFDGLAIGGLSVGEPKHEMIKVLDYLPGQMPADKPRYLMGVGKPEDLVEGVRRGVDMFDCVMPTRNARNGHLFIDTGVLKIRNAFHRHDDSPLDPTCDCYTCKNFSRAYLHHLDKCGEMLGSMLNTIHNLRHYQLLMAGLREAIQQGTLAAFVDAFYAKRGLPTPPLG

SEQ ID NO: 59615 - protein, 377 aa, Pseudomonas cichorii
  misc_feature (1)..(377): tr|A0A3M4LID2|A0A3M4LID2_PSECI Queuine tRNA-ribosyltran sferase OS=Pseudomonas cichorii OX=36746 GN=tgt PE=3 SV =1
MSRTCRMSFELLATDGKARRGRLTFPRGVVETPAFMPVGTYGTVKGMLPRDIEATGAQIILGNTFHLWLRPGTEVIKGHGDLHDFMQWKGPILTDSGGFQVFSLGAMRKIKEEGVTFASPVDGSKVFMGPEESMQVQRDLGSDIVMIFDECTPYPADEDVARVSMELSLRWAKRSKVAHGESTAALFGIVQGGMHENLRMRSLEGLDQIGFDGLAIGGLSVGEPKHEMIKVLDYLPGQMPADKPRYLMGVGKPEDLVEGVRRGVDMFDCVMPTRNARNGHLFIDTGVLKIRNAFHRHDDSPLDPTCDCYTCQNFSRAYLHHLDKCGEMLGSMLNTIHNLRHYQLLMAGLREAIQQGTLAAFVDAFYAKRGLPTPPLG

SEQ ID NO: 59616 - protein, 375 aa, Pseudomonas citronellolis
  misc_feature (1)..(375): tr|A0A127MYW0|A0A127MYW0_9PSED Queuine tRNA-ribosyltran sferase OS=Pseudomonas citronellolis OX=53408 GN=tgt PE =3 SV=1
MSFMKFELLATDGKARRGRLSFPRGVVETPAFMPVGTYGTVKGMLPRDIEGIGAQIILGNTFHLWLRPGTEVIRKHGDLHDFMQWQGPILTDSGGFQVFSLGALRKIKEEGVYFASPVDGAKVFMGPEESMAVQRALGSDIVMIFDECTPYPAEFDVAKRSMELSLRWAKRSKIAHGDSPSALFGIVQGGMHEELRMRSLEGLQEIGFDGLAIGGLSVGEPKEEMIRVLDFLPPRMPADKPRYLMGVGKPEDLVEGVRRGVDMFDCVMPTRNARNGHLFVDTGVIKIRNAVHKHDESPLDPTCDCYTCKHFSRAYLYHLDKCGEMLGSMLNTIHNLRHYQRLMAGLREAIQQGTLAAFVDAFYAKRGLPTPPLGD

SEQ ID NO: 59617 - protein, 372 aa, Pseudomonas citronellolis
  misc_feature (1)..(372): tr|A0A4Z0ILH0|A0A4Z0ILH0_9PSED Queuine tRNA-ribosyltran sferase OS=Pseudomonas citronellolis OX=53408 GN=tgt PE =3 SV=1
MKFELLATDGKARRGRLSFPRGVVETPAFMPVGTYGTVKGMLPRDIEGIGAQIILGNTFHLWLRPGTEVIRKHGDLHDFMQWQGPILTDSGGFQVFSLGALRKIKEEGVYFASPVDGAKVFMGPEESMAVQRALGSDIVMIFDECTPYPAEFDVAKRSMELSLRWAKRSKIAHGDSPSALFGIVQGGMHEELRMRSLEGLQEIGFDGLAIGGLSVGEPKEEMIRVLDFLPPRMPADKPRYLMGVGKPEDLVEGVRRGVDMFDCVMPTRNARNGHLFVDTGVIKIRNAVHKHDESPLDPTCDCYTCKHFSRAYLYHLDKCGEMLGSMLNTIHNLRHYQRLMAGLREAIQQGTLAAFVDAFYAKRGLPTPPLGD

SEQ ID NO: 59618 - protein, 377 aa, Pseudomonas coleopterorum
  misc_feature (1)..(377): tr|A0A1H5EC28|A0A1H5EC28_9PSED Queuine tRNA-ribosyltran sferase OS=Pseudomonas coleopterorum OX=1605838 GN=tgt PE=3 SV=1
MSRTCRMSFELLATDGKARRGRLTFPRGVVETPAFMPVGTYGTVKGMLPRDIEAIGAQMILGNTFHLWLRPGTEVIKAHGDLHDFMQWKGPILTDSGGFQVFSLGAMRKIKEEGVYFASPVDGSKVFMGPEESMQVQRDLGSDVVMIFDECTPYPADEQTARTSMELSLRWAQRSKDAHADSTAALFGIVQGGMHENLRMRSLEGLDKIGFDGLAIGGLSVGEPKHEMIKVLDYLPGQMPADKPRYLMGVGKPEDLVEGVRRGVDMFDCVMPTRNARNGHLFIDTGVLKIRNAFHRHDDSPLDPTCDCYTCRNFSRAYLHHLDKCGEMLGSMLNTIHNLRHYQRLMAGLREAIQQGTLAAFVDAFYAKRGLPVPPLD

SEQ ID NO: 59619 - protein, 377 aa, Pseudomonas composti
  misc_feature (1)..(377): tr|A0A1I5LMU2|A0A1I5LMU2_9PSED Queuine tRNA-ribosyltran sferase OS=Pseudomonas composti OX=658457 GN=tgt PE=3 S V=1
MSRTCRMSFELLATDRKARRGRLTFPRGVVETPAFMPVGTYGTVKGMLPRDVEEIGAQIILGNTFHLWLRPGMEVIKRHGDLHDFMQWQGPILTDSGGFQVFSLGAMRKIKEEGVYFASPVDGAKVFMGPEESMQVQRDLGSDIVMIFDECTPYPAEFDVAKRSMELSLRWAKRSKTAHGESSAALFGIVQGGMHEELRMRSLEGLCEIGFDGLAIGGLSVGEPKEEMIRVLDFLPPHMPADKPRYLMGVGKPEDLVEGVRRGVDMFDCVMPTRNARNGHLFVDTGVVKIRNAVHKHDDSPLDPTCDCYTCKHFSRAYLHHLDKCGEMLGSMLNTIHNLRHYQRVMAGLREAIQQGTLAAFVETFYAKRGLPVPPLD

SEQ ID NO: 59620 - protein, 377 aa, Pseudomonas congelans
  misc_feature (1)..(377): tr|A0A0P9MEH4|A0A0P9MEH4_9PSED Queuine tRNA-ribosyltran sferase OS=Pseudomonas congelans OX=200452 GN=tgt PE=3 SV=1
MSRTCRMSFELLATDGKARRGRLTFPRGVVETPAFMPVGTYGTVKGMLPRDIEATGAQMILGNTFHLWLRPGTEVIKGHGDLHDFMQWQGPILTDSGGFQVFSLGAMRKIKEEGVTFASPVDGAKVFMGPEESMQVQRDLGSDVVMIFDECTPYPADEDVARVSMELSLRWAKRSKIAHGENTAALFGIVQGGMHENLRKRSLEGLDEIGFDGLAIGGLSVGEPKHEMIKVLDYLPGLMPADKPRYLMGVGKPEDLVEGVRRGVDMFDCVMPTRNARNGHLFTDTGVLKIRNAFHRHDNTPLDPTCDCYTCKNFSRAYLHHLDKCGEMLGSMLNTIHNLRHYQLLMAGLREAIQQGTLAAFVDAFYAKRGLPTPPLG

SEQ ID NO: 59621 - protein, 377 aa, Pseudomonas coronafaciens
  misc_feature (1)..(377): tr|A0A0P9XKB3|A0A0P9XKB3_9PSED Queuine tRNA-ribosyltran sferase OS=Pseudomonas coronafaciens pv. porri OX=83964 GN=tgt PE=3 SV=1
MSRTCRMSFELLATDGKARRGRLTFPRGVVETPAFMPVGTYGTVKGMLPRDIEATGAQMILGNTFHLWLRPGTEVIKGHGDLHDFMQWQGPILTDSGGFQVFSLGAMRKIKEEGVTFASPVDGAKVFMGPEESMQVQRDLGSDIVMIFDECTPYPADEDVARISMELSLRWAKRSKVAHGENTAALFGIVQGGMHENLRMRSLEGLDEIGFDGLAIGGLSVGEPKHEMIKVLDYLPGRMPADKPRYLMGVGKPEDLVEGVRRGVDMFDCVMPTRNARNGHLFIDTGVLKIRNAFHRHDNSPLDPSCDCYTCKNFSRAYLHHLDKCGEMLGSMLNTIHNLRHYQLLMAGLREAIQQGTLAAFVDAFYAKRGLPTPPLG

SEQ ID NO: 59622 - protein, 377 aa, Pseudomonas coronafaciens
  misc_feature (1)..(377): tr|A0A3M3LFS8|A0A3M3LFS8_9PSED Queuine tRNA-ribosyltran sferase OS=Pseudomonas coronafaciens pv. zizaniae OX=25 1700 GN=tgt PE=3 SV=1
MSRTCRMSFELLATDGKARRGRLTFPRGVVETPAFMPVGTYGTVKGMLPRDIEATGAQMILGNTFHLWLRPGTEVIKGHGDLHDFMQWQGPILTDSGGFQVFSLGAMRKIKEEGVTFASPVDGAKVFMGPEESMQVQRDLGSDIVMIFDECTPYPADEDVARISMELSLRWAKRSKVAHGENTAALFGIVQGGMHENLRMRSLEGLDEIGFDGLAIGGLSVGEPKHEMIKVLDYLPGQMPADKPRYLMGVGKPEDLVEGVRRGVDMFDCVMPTRNARNGHLFIDTGVLKIRNAFHRHDNSPLDPTCDCYTCKNFSRAYLHHLDKCGEMLGSMLNTIHNLRHYQLLMAGLREAIQQGTLAAFVDAFYAKRGLPTPPLG

SEQ ID NO: 59623 - protein, 377 aa, Pseudomonas corrugata
  misc_feature (1)..(377): tr|A0A3M3E927|A0A3M3E927_9PSED Queuine tRNA-ribosyltran sferase OS=Pseudomonas corrugata OX=47879 GN=tgt PE=3 S V=1
MSRTCRMSFELLATDGKARRGRLTFPRGTVETPAFMPVGTYGTVKGMLPRDIEAIGAEIILGNTFHLWLRPGMEVIKAHGDLHDFMQWKGPILTDSGGFQVFSLGAMRKIKEEGVTFASPVDGAKVFMGPEESMQVQRDLGSDIVMIFDECTPYPADEDVARVSMELSLRWAQRSKNAHGDNTAALFGIVQGGMHQDLRMRSLEGLDKIGFDGLAIGGLSVGEPKHEMIKVLDYLPGQMPADKPRYLMGVGKPEDLVEGVRRGVDMFDCVMPTRNARNGHLFIDTGVLKIRNAFHRHDSSPLDPTCDCYTCKNFSRAYLHHLDKCGEMLGSMLNTIHNLRHYQVLMAGLREAIQQGTLAAFVEAFYAKRGLPVPPLD

SEQ ID NO: 59624 - protein, 374 aa, Pseudomonas costantinii
  misc_feature (1)..(374): tr|A0A1S2UTV3|A0A1S2UTV3_9PSED Queuine tRNA-ribosyltran sferase OS=Pseudomonas costantinii OX=168469 GN=tgt PE= 3 SV=1
MSRMSFELLATDGKARRGRLTFPRGTVETPAFMPVGTYGTVKGMMPRDIVATGAEIILGNTFHLWLRPGTEVIKKHGDLHDFMKWQGPILTDSGGFQVFSLGAMRKIKEEGVTFASPVDGSKVFMGPEESMQVQRDLGSDIVMIFDECTPYPADEDVARISMELSLRWAQRSKNAHGDNTAALFGIVQGGMHESLRKRSLEGLDKIGFDGLAIGGLSVGEPKHEMIKVLDYLPGLMPADKPRYLMGVGKPEDLVEGVRRGVDMFDCVMPTRNARNGHLFIDTGVLKIRNAFHRHDDSPLDPTCDCYTCQNFSRAYLHHLDKCGEMLGSMLNTIHNLRHYQVLMAGLREAIQQGTLAAFVDAFYAKRGLPVPPLD

SEQ ID NO: 59625 - protein, 377 aa, Pseudomonas cremoricolorata
  misc_feature (1)..(377): tr|A0A089Y8B5|A0A089Y8B5_9PSED Queuine tRNA-ribosyltran sferase OS=Pseudomonas cremoricolorata OX=157783 GN=tgt PE=3 SV=1
MSRTCRMSFELLATDGKARRGRLTFPRGTVETPAFMPVGTYGTVKGMLPRDIEAIGAEIILGNTFHLWLRPGTEVIRKHNGLHDFMQWKGPILTDSGGFQVFSLGAMRKIKEEGVTFASPVDGSKVFMGPEESMQVQRDLGSDIVMIFDECTPYPAEHDVARTSMELSLRWAQRSKNAHGDNSAALFGIVQGGMHEDLRMRSLEGLDKIGFDGLAIGGLSVGEPKHEMIKVLDYLPGQMPADKPRYLMGVGKPEDLVEGVRRGVDMFDCVMPTRNARNGHLFVDTGVIKIRNAFHRHDESPLDPTCDCYTCSNFSRAYLHHLDKCGEMLSSMLNTIHNLRHYQRLMAGLREAIQQGKLAAFVDAFYAKRGLPVPPLD

SEQ ID NO: 59626 - protein, 377 aa, Pseudomonas cuatrocienegasensis
  misc_feature (1)..(377): tr|A0A1H9E6X0|A0A1H9E6X0_9PSED Queuine tRNA-ribosyltran sferase OS=Pseudomonas cuatrocienegasensis OX=543360 GN =tgt PE=3 SV=1
MTRTCRMSFELLATDGKARRGRVTFPRGVVETPAFMPVGTYGTVKGMLPRDIEATGAQIILGNTFHLWLRPGTEVIKKHGDLHDFMQWQGPILTDSGGFQVFSLGAMRKIKEEGVYFASPVDGAKVFMGPEESMQVQRDLGSDIVMIFDECTPYPAEFDVAKRSMELSLRWAKRSKEAHGDSTAALFGIVQGGMYEELRKVSLDGLEQIGFDGYAIGGLSVGEPKDEMIKVLDYLPAELPADKPRYLMGVGKPEDLVEGVRRGVDMFDCVMPTRNARNGHLFVETGVLKIRNAFHRHDDSPLDSTCDCYTCKHFSRAYLHHLDKCGEMLGSMLNTIHNLRHYQRLMAGLREAIQQGTLAAFVDAFYARRGLPVPPLD

SEQ ID NO: 59627 - protein, 377 aa, Pseudomonas daroniae
  misc_feature (1)..(377): tr|A0A4Q9QJI1|A0A4Q9QJI1_9PSED Queuine tRNA-ribosyltran sferase OS=Pseudomonas daroniae OX=2487519 GN=tgt PE=3 SV=1
MTRSCRMSFELLATDGKARRGRLTFPRGVVETPAFMPVGTYGTVKGMLPRDIEAIGAQIILGNTFHLWLRPGTEVIKRHGDLHDFMQWQGPILTDSGGFQVFSLGAMRKIKEEGVTFASPVDGSKVFMGPEESMQVQRDLGSDIVMIFDECTPYPAEFDVAKTSMELSLRWAKRSKVAHGDSTAALFGIVQGGMHESLRMRSLEGLSELDFDGLAIGGLSVGEPKEEMIKVLDYLPGQMPSDKPRYLMGVGKPEDLVEGVRRGVDMFDCVMPTRNARNGHLFIDTGVLKIRNAFHRHDDSPLDPTCDCYTCKHFSRAYLHHLDKCGEMLGSMLNTIHNLRHYQRLMAGLREAIQQGTLAAFVDAFYTRRGLPTPPLD

SEQ ID NO: 59628 - protein, 376 aa, Pseudomonas deceptionensis
  misc_feature (1)..(376): tr|A0A1H5KT24|A0A1H5KT24_PSEDM Queuine tRNA-ribosyltran sferase OS=Pseudomonas deceptionensis OX=882211 GN=tgt PE=3 SV=1
MSNCRMSFELLATDGKARRGRLTFPRGVVETPAFMPVGTYGTVKGMLPRDIVDTGAQMILGNTFHLWLRPGTEVIKKHGDLHDFMKWQGPILTDSGGFQVFSLGAMRKIKEEGVTFASPVDGAKVFMGPEESMQVQRDLGSDVVMIFDECTPYPADEDVARISMELSLRWAQRSKNAHGDNTAALFGIVQGGMHQNLRERSLEGLNKIGFDGLAIGGLSVGEPKHEMIKVLDYLPAMMPADKPRYLMGVGKPEDLVEGVRRGVDMFDCVMPTRNARNGHLFIDTGVIKIRNAFHRHDDSSLDPTCDCYTCQNFSRAYLHHLDKCGEMLGSMLNTIHNLRHYQVLMAGLREAIQQGTLATFVDAFYAKRGLPVPPLD

SEQ ID NO: 59629 - protein, 375 aa, Pseudomonas delhiensis
  misc_feature (1)..(375): tr|A0A239DSK1|A0A239DSK1_9PSED Queuine tRNA-ribosyltran sferase OS=Pseudomonas delhiensis OX=366289 GN=tgt PE=3 SV=1
MSFMKFELLATDGKARRGRLSFPRGVVETPAFMPVGTYGTVKGMLPRDIEGIGAQIILGNTFHLWLRPGTEVIRRHGDLHDFMQWQGPILTDSGGFQVFSLGALRKIKEEGVYFASPVDGAKVFMGPEESMAVQRALGSDIVMIFDECTPYPAEFDVAKRSMELSLRWAKRSKVAHGESPSALFGIVQGGMHEELRMRSLEGLQEIGFDGLAIGGLSVGEPKEEMIRVLDFLPPRMPADKPRYLMGVGKPEDLVEGVRRGVDMFDCVMPTRNARNGHLFVDTGVIKIRNAVHKHDESPLDPTCDCYTCKHFSRAYLYHLDKCGEMLGSMLNTIHNLRHYQRLMAGLREAIQQGTLAAFVDAFYAKRGLPTPPLGD

SEQ ID NO: 59630 - protein, 372 aa, Pseudomonas denitrificans
  misc_feature (1)..(372): tr|A0A5J6RCR0|A0A5J6RCR0_PSEDE tRNA guanosine(34) trans glycosylase Tgt OS=Pseudomonas denitrificans OX=43306 G N=tgt PE=4 SV=1
MKFELLATEGKARRGRLTFPRGVVETPAFMPVGTYGTVKGMLPHDIEGIGAQIILGNTFHLWLRPGTEVIQKHGDLHDFMQWKGPILTDSGGFQVFSLGALRKIKEEGVYFASPVDGAKVFMGPEESMAVQRALGSDIVMIFDECTPYPAEFDVAKRSMELSLRWAKRSKTAHGDSPSALFGIVQGGMHEELRMRSLEGLQEIGFDGLAIGGLSVGEPKEEMIRVLDFLPRHMPADKPRYLMGVGKPEDLVEGVRRGVDMFDCVMPTRNARNGHLFVDTGVIKIRNAVHKHDESPLDPTCDCYTCKHFSRAYLYHLDKCGEMLGSMLNTIHNLRHYQRLMAGLREAIQQGTLANFVDAFYAKRGLPVPPLAD

SEQ ID NO: 59631 - protein, 377 aa, Pseudomonas donghuensis
  misc_feature (1)..(377): tr|A0A2M9VPN0|A0A2M9VPN0_9PSED Queuine tRNA-ribosyltran sferase OS=Pseudomonas donghuensis OX=1163398 GN=tgt PE =3 SV=1
MSRTCRMSFELLATDGKARRGRLTFPRGVVETPAFMPVGTYGTVKGMLPRDIEAIGAHMILGNTFHLWLRPGTEVIKAHGDLHDFMKWQGPILTDSGGFQVFSLGAMRKIREEGVTFASPVDGSKVFMGPEESMQVQRDLGSDVVMIFDECTPYPADEDVARVSMELSLRWAQRSKNAHGDSTAALFGIVQGGMHENLRMRSLEGLEKIGFDGLAIGGLSVGEPKHEMIKVLDYLPGRMPADKPRYLMGVGKPEDLVEGVRRGVDMFDCVMPTRNARNGHLFVDTGVLKIRNAFHRHDDSPLDPTCDCYTCQNFSRAYLHHLDKCGEMLGSMLNTIHNLRHYQRLMAGLREAIQQGTLAAFVDAFYAKRGLPVPPLD

SEQ ID NO: 59632 - protein, 377 aa, Pseudomonas dryadis
  misc_feature (1)..(377): tr|A0A4Q9R3V7|A0A4Q9R3V7_9PSED Queuine tRNA-ribosyltran sferase OS=Pseudomonas dryadis OX=2487520 GN=tgt PE=3 S V=1
MTRSCRMSFELLASDGKARRGRLTFPRGVVETPAFMPVGTYGTVKGMLPRDIEAIGAQIILGNTFHLWLRPGTEVIKRHGDLHDFMQWQGPILTDSGGFQVFSLGAMRKIREEGVTFASPVDGAKVFMGPEESMQVQRDLGSDIVMIFDECTPYPAEFDVAKTSMELSLRWAKRSKEAHGDNSAALFGIVQGGMHESLRMRSLEGLSELDFDGLAIGGLSVGEPKEEMIRVLDYLPGQMPADKPRYLMGVGKPEDLVEGVRRGVDMFDCVMPTRNARNGHLFIDTGVLKIRNAFHRHDDSPLDPTCDCYTCKHFSRAYLHHLDKCGEMLGSMLNTIHNLRHYQRLMAGLREAIQQGTLAAFVDAFYTRRGLPTPPLD

SEQ ID NO: 59633 - protein, 375 aa, Pseudomonas duriflava
  misc_feature (1)..(375): tr|A0A562QQU6|A0A562QQU6_9PSED Queuine tRNA-ribosyltran sferase OS=Pseudomonas duriflava OX=459528 GN=tgt PE=3 SV=1
MSFMKFELLATEGRARRGRLSFPRGVVETPAFMPVGTYGTVKGMLPRDIEAIGAHIILGNTFHLWLRPGIEVIQKHGDLHDFMQWKGPILTDSGGFQVFSLGALRKIKEEGVYFASPVDGAKVFMGPEESMAVQRALGSDIVMIFDECTPYPADFETAKRSMELSLRWAKRSRIAHGDNPSALFGIVQGGMHEELRLRSLEGLDSIGFDGYAIGGLSVGEPKEEMIRVLDFLPPHLPADKPRYLMGVGKPEDLVEGVRRGVDMFDCVMPTRNARNGHLFIDTGVIKIRNAVHRHDDSPLDSTCDCYTCRNFSRAYLHHLDKCGEMLGSMLNTIHNLRHYQQVMSGLRDAIQQGKLADFVDSFYARRGLPTPPLAD

SEQ ID NO: 59634 - protein, 371 aa, Pseudomonas endophytica
  misc_feature (1)..(371): tr|A0A0Q0T4L6|A0A0Q0T4L6_9PSED Queuine tRNA-ribosyltran sferase OS=Pseudomonas endophytica OX=1563157 GN=tgt PE =3 SV=1
MSFELLATDGKARRGRLTFPRGVVETPAFMPVGTYGTVKGMLPRDIEAIGAQMILGNTFHLWLRPGTEVIKKHGDLHDFMKWQGPILTDSGGFQVFSLGAMRKIKEEGVTFASPVDGAKVFMGPEESMQVQRDLGSDVVMIFDECTPYPADEDVARVSMELSLRWAQRSKNAHGDNTAALFGIVQGGMHQNLRERSLEGLNKIGFDGLAIGGLSVGEPKHEMIKVLDYLPAMMPSDKPRYLMGVGKPEDLVEGVRRGVDMFDCVMPTRNARNGHLFIDTGVLKIRNAFHRHDDSPLDPTCDCYTCQNFSRAYLHHLDKCGEMLGSMLNTIHNLRHYQVLMAGLREAIQQGTLATFVDAFYAKRGLPVPPLD

SEQ ID NO: 59635 - protein, 377 aa, Pseudomonas entomophila
  misc_feature (1)..(377): tr|A0A3S8UPZ8|A0A3S8UPZ8_9PSED Queuine tRNA-ribosyltran sferase OS=Pseudomonas entomophila OX=312306 GN=tgt PE= 3 SV=1
MSRTCRMSFELLATDGKARRGRLTFPRGTVETPAFMPVGTYGTVKGMLPRDIEAIGAEIILGNTFHLWLRPGTEVIKKHNGLHDFMQWKGPILTDSGGFQVFSLGAMRKIKEEGVTFASPVDGSKVFMGPEESMQVQRDLGSDIVMIFDECTPYPAEHDVARTSMELSLRWAQRSKNAHADNTAALFGIVQGGMYQDLRMRSLEGLDNIGFDGLAIGGLSVGEPKHEMIKVLDYLPGQMPADKPRYLMGVGKPEDLVEGVRRGVDMFDCVMPTRNARNGHLFIDTGVIKIRNAFHRHDESPLDPTCDCYTCTNFSRAYLHHLDKCGEMLSSMLNTIHNLRHYQRLMAGLREAIQQGKLAAFVDAFYAKRGLPVPPLD

SEQ ID NO: 59636 - protein, 377 aa, Pseudomonas entomophila
  misc_feature (1)..(377): tr|Q1IEK1|Q1IEK1_PSEE4 Queuine tRNA-ribosyltransferase OS=Pseudomonas entomophila (strain L48) OX=384676 GN=tg t PE=3 SV=1
MSRTCRMSFELLATDGKARRGRLTFPRGTVETPAFMPVGTYGTVKGMLPRDIEAIGAEIILGNTFHLWLRPGTEVIKKHNGLHDFMQWKGPILTDSGGFQVFSLGAMRKIKEEGVTFASPVDGSKVFMGPEESMQVQRDLGSDIVMIFDECTPYPAEHDVARTSMELSLRWAQRSKNAHGDNTAALFGIVQGGMYEDLRMRSLEALVNIDFDGLAIGGLSVGEPKHEMIKVLDYLPAQMPADKPRYLMGVGKPEDLVEGVRRGVDMFDCVMPTRNARNGHLFVDTGVIKIRNAFHRHDDSPLDPTCDCYTCTNFSRAYLHHLDKCGEMLSSMLNTIHNLRHYQRLMAGLREAIQQGKLAAFVDAFYAKRGLPVPPLD

SEQ ID NO: 59637 - protein, 374 aa, Pseudomonas extremaustralis
  misc_feature (1)..(374): tr|A0A5C5QGJ6|A0A5C5QGJ6_9PSED Queuine tRNA-ribosyltran sferase OS=Pseudomonas extremaustralis OX=359110 GN=tgt PE=3 SV=1
MSRMSFELLATDGKARRGRLTFPRGTVETPAFMPVGTYGTVKGMLPRDIVATGAEIILGNTFHLWLRPGTEVIKKHGDLHDFMKWQGPILTDSGGFQVFSLGAMRKIKEEGVTFASPVDGSKVFMGPEESMQVQRDLGSDIVMIFDECTPYPADEDVARVSMELSLRWAQRSKNAHGDNTAALFGIVQGGMHESLRKRSLEGLDKIGFDGLAIGGLSVGEPKHEMIKVLDYLPGLMPADKPRYLMGVGKPEDLVEGVRRGVDMFDCVMPTRNARNGHLFIDTGVLKIRNAFHRHDDSPLDPTCDCYTCQNFSRAYLHHLDKCGEMLGSMLNTIHNLRHYQVLMAGLREAIQQGTLAAFVDAFYAKRGLPVPPLD

SEQ ID NO: 59638 - protein, 374 aa, Pseudomonas extremorientalis
  misc_feature (1)..(374): tr|A0A1H0QGM2|A0A1H0QGM2_9PSED Queuine tRNA-ribosyltran sferase OS=Pseudomonas extremorientalis OX=169669 GN=tg t PE=3 SV=1
MSRMSFELLATDGKARRGRLTFPRGTVETPAFMPVGTYGTVKGMLPRDIVATGAEIILGNTFHLWLRPGTEVIKKHGDLHDFMKWQGPILTDSGGFQVFSLGAMRKIKEEGVTFASPVDGSKVFMGPEESMQVQRDLGSDIVMIFDECTPYPADEDVARISMELSLRWAQRSKNAHGDNTAALFGIVQGGMHESLRKRSLEGLDKIGFDGLAIGGLSVGEPKHEMIKVLDYLPSLMPADKPRYLMGVGKPEDLVEGVRRGVDMFDCVMPTRNARNGHLFIDTGVLKIRNAFHRHDDSPLDPTCDCYTCLNFSRAYLHHLDKCGEMLGSMLNTIHNLRHYQVLMAGLREAIQQGTLAAFVDAFYAKRGLPVPPLD

SEQ ID NO: 59639 - protein, 377 aa, Pseudomonas ficuserectae
  misc_feature (1)..(377): tr|A0A0P9RQB2|A0A0P9RQB2_9PSED Queuine tRNA-ribosyltran sferase OS=Pseudomonas ficuserectae OX=53410 GN=tgt PE= 3 SV=1
MSRTCRMSFELLATDGKARRGRLTFPRGVVETPAFMPVGTYGTVKGMLPRDIEATGAQMILGNTFHLWLRPGTEVIKGHGDLHDFMQWKGPILTDSGGFQVFSLGAMRKIKEEGVTFASPVDGAKVFMGPEESMQVQRDLGSDVVMIFDECTRYPADEDVARVSMELSLRWAKRSKVAHGENTAALFGIVQGGMHENLRKRSLEGLDEIGFDGLAIGGLSVGEPKHEMIKVLDYLPGLMPADKPRYLMGVGKPEDLVEGVRRGVDMFDCVMPTRNARNGHLFTDTGVLKIRNAFHRHDNSPLDPTCDCYTCKNFSRAYLHHLDKCGEMLGSMLNTIHNLRHYQLLMAGLREAIQQGTLAAFVDAFYAKRGLPTPPLG

SEQ ID NO: 59640 - protein, 434 aa, Pseudomonas ficuserectae
  misc_feature (1)..(434): tr|A0A3M5CX00|A0A3M5CX00_9PSED Queuine tRNA-ribosyltran sferase OS=Pseudomonas ficuserectae OX=53410 GN=tgt PE= 3 SV=1
MHAVDAGFGVRRLSRDDGGLRCGHRARLPLLQLRRCDVHHPQSRADGPTGIGTRGSRMSRTCRMSFELLATDGKARRGRLTFPRGVVETPAFMPVGTYGTVKGMLPRDIEATGAQMILGNTFHLWLRPGTEVIKGHGDLHDFMQWKGPILTDSGGFQVFSLGAMRKIKEEGVTFASPVDGAKVFMGPEESMQVQRDLGSDVVMIFDECTRYPADEDVARVSMELSLRWAKRSKVAHGENTAALFGIVQGGMHENLRKRSLEGLDEIGFDGLAIGGLSVGEPKHEMIKVLDYLPGLMPADKPRYLMGVGKPEDLVEGVRRGVDMFDCVMPTRNARNGHLFTDTGVLKIRNAFHRHDNSPLDPTCDCYTCKNFSRAYLHHLDKCGEMLGSMLNTIHNLRHYQLLMAGLREAIQQGTLAAFVDAFYAKRGLPTPPLG

SEQ ID NO: 59641 - protein, 378 aa, Pseudomonas flavescens
  misc_feature (1)..(378): tr|A0A1G8KUZ3|A0A1G8KUZ3_9PSED Queuine tRNA-ribosyltran sferase OS=Pseudomonas flavescens OX=29435 GN=tgt PE=3 SV=1
MTRSCRMSFELLATDGKARRGRLTFPRGVVETPAFMPVGTYGTVKGMLPRDIEAIGAQIILGNTFHLWLRPGTEVIKRHGDLHDFMQWQGPILTDSGGFQVFSLGAMRKIKEEGVTFASPVDGAKVFMGPEESMQVQRDLGSDIVMIFDECTPYPAEFDVAKTSMELSLRWAKRSKVAHGDSTAALFGIVQGGMHESLRMRSLEGLSELDFDGLAIGGLSVGEPKEEMIKVLDYLPVQMPSDKPRYLMGVGKPEDLVEGVRRGVDMFDCVMPTRNARNGHLFIDTGVLKIRNAFHRHDDSPLDPTCDCYTCKHFSRAYLHHLDKCGEMLGSMLNTIHNLRHYQRLMAGLREAIQQGTLAAFVDAFYARRGLPTPPLDC

SEQ ID NO: 59642 - protein, 377 aa, Pseudomonas flexibilis
  misc_feature (1)..(377): tr|A0A1N6NP46|A0A1N6NP46_9PSED Queuine tRNA-ribosyltran sferase OS=Pseudomonas flexibilis OX=706570 GN=tgt PE=3 SV=1
MTRTCHMNFDVLATEGKARRGRLTFPRGTVETPAFMPVGTYGTVKGMLPRDIEAIGAQIILGNTFHLWLRPGTEVIKAHGDLHNFMQWQGPILTDSGGFQVFSLGEMRKIKEEGVYFSSPVDGAKVFMGPEESMQVQRDLGSDIVMIFDECTPYPADHDTARRSMELSLRWAKRSKVAHGDNPSALFGIVQGGMHEDLRLRSLEGLMEIGFDGLAIGGLSVGEPKEEMIRVLDFLPPHMPADKPRYLMGVGKPEDLVEGVRRGVDMFDCVMPTRNARNGHLFVTGGIVKIRNAVHRHDDSPLDPGCDCYTCKHFSRAYLHHLDKCGEMLGSMLNTIHNLRYYQRLMAGLRDAIQQGTLAAFVDAFYARRGLPTPPLD

SEQ ID NO: 59643 - protein, 377 aa, Pseudomonas flexibilis
  misc_feature (1)..(377): tr|A0A0B3BRZ1|A0A0B3BRZ1_9PSED Queuine tRNA-ribosyltran sferase OS=Pseudomonas flexibilis OX=706570 GN=tgt PE=3 SV=1
MTRTCHMNFDVLATEGKARRGRLTFPRGTVETPAFMPVGTYGTVKGMLPRDIEAIGAQIILGNTFHLWLRPGTEVIKAHGDLHNFMQWQGPILTDSGGFQVFSLGEMRKIKEEGVYFSSPVDGAKVFMGPEESMQVQRDLGSDIVMIFDECTPYPADHDTARRSMELSLRWAKRSKMAHGDNPSALFGIVQGGMHEDLRLRSLEGLMEIGFDGLAIGGLSVGEPKEEMIRVLDFLPPHMPADKPRYLMGVGKPEDLVEGVRRGVDMFDCVMPTRNARNGHLFVTGGIVKIRNAVHRHDDSPLDPGCDCYTCKHFSRAYLHHLDKCGEMLGSMLNTIHNLRYYQRLMAGLRDAIQQGTLAAFVDAFYARRGLPAPPLD

SEQ ID NO: 59644 - protein, 371 aa, Pseudomonas floridensis
  misc_feature (1)..(371): tr|A0A1X0N6D7|A0A1X0N6D7_9PSED Queuine tRNA-ribosyltran sferase OS=Pseudomonas floridensis OX=1958950 GN=tgt PE =3 SV=1
MSFELLATDGKARRGRLTFPRGVVETPAFMPVGTYGTVKGMLPRDIEATGAQIILGNTFHLWLRPGTEVIKGHGDLHDFMQWQGPILTDSGGFQVFSLGAMRKIKEEGVTFASPVDGAKVFMGPEESMQVQRDLGSDIVMIFDECTPYPADEDVARISMELSLRWAKRSKVAHGENTAALFGIVQGGMHESLRMRSLEGLDQIGFDGLAIGGLSVGEPKHEMIKVLDYLPGQMPADKPRYLMGVGKPEDLVEGVRRGVDMFDCVMPTRNARNGHLFIDTGVLKIRNAFHRHDDSPLDPTCDCYTCKHFSRAYLHHLDKCGEMLGSMLNTIHNLRHYQLLMAGLREAIQQGTLAAFVDAFYAKRGLPTPPLG

SEQ ID NO: 59645 - protein, 374 aa, Pseudomonas fluorescens
  misc_feature (1)..(374): tr|A0A2N1E8D5|A0A2N1E8D5_PSEFL Queuine tRNA-ribosyltran sferase OS=Pseudomonas fluorescens OX=294 GN=tgt PE=3 S V=1
MSRMSFELLATDGKARRGRLTFPRGTVETPAFMPVGTYGTVKGMLPRDIVATGAEIILGNTFHLWLRPGTEVIKKHGDLHDFMKWQGPILTDSGGFQVFSLGAMRKIKEEGVTFASPVDGSKVFMGPEESMQVQRDLGSDIVMIFDECTPYPADEDVARISMELSLRWAQRSKNAHGDNTAALFGIVQGGMHESLRKRSLEGLDKIGFDGLAIGGLSVGEPKHEMIKVLDYLPGLMPAEKPRYLMGVGKPEDLVEGVRRGVDMFDCVMPTRNARNGHLFIDTGVLKIRNAFHRHDDSPLDPTCDCYTCQNFSRAYLHHLDKCGEMLGSMLNTIHNLRHYQVLMAGLREAIQQGTLAAFVDAFYAKRGLPVPPLD

SEQ ID NO: 59646 - protein, 374 aa, Pseudomonas fluorescens; identical to SEQ ID NO: 59578
  misc_feature (1)..(374): tr|A0A0W0I537|A0A0W0I537_PSEFL Queuine tRNA-ribosyltran sferase OS=Pseudomonas fluorescens OX=294 GN=tgt PE=3 S V=1

SEQ ID NO: 59647 - protein, 375 aa, Pseudomonas formosensis
  misc_feature (1)..(375): tr|A0A1I6C7Q8|A0A1I6C7Q8_9PSED Queuine tRNA-ribosyltran sferase OS=Pseudomonas formosensis OX=1002526 GN=tgt PE =3 SV=1
MSHMQFEVFATDGKARRGRLTFPRGVVETPAFMPVGTYGTVKGMLPRDIKDIGAQIILGNTFHLWLRPGTEVIRKHGDLHDFMQWQGPILTDSGGFQVFSLGAMRKIREEGVYFSSPVDGAKVFMGPEESMQVQRELGSDIVMIFDECTPYPADHDTARRSMELSLRWAQRSKNAHEGNPSALFGIVQGGMHEDLRARSLDGLCEIGFDGLAIGGLSVGEPKEDMIRILDFLPPLMPPEKPRYLMGVGKPEDLVEGVRRGVDMFDCVMPTRNARNGHLFTDTGVVKIRNAVHRHDDSPLDPACDCYTCRHFTRSYLHHLDKCGEMLGSMLNTIHNLRHYQRLMDGLRGAIQQGTLTDFVDNFYARLGRPVPPLET

SEQ ID NO: 59648 - protein, 371 aa, Pseudomonas fragi
  misc_feature (1)..(371): tr|A0A267BY57|A0A267BY57_PSEFR Queuine tRNA-ribosyltran sferase OS=Pseudomonas fragi OX=296 GN=tgt PE=3 SV=1
MSFELLATDGKARRGRLTFPRGVVETPAFMPVGTYGTVKGMLPRDIEAIGAQMILGNTFHLWLRPGTEVIKKHGDLHDFMKWQGPILTDSGGFQVFSLGAMRKIKEEGVTFASPVDGAKVFMGPEESMQVQRDLGSDVVMIFDECTPYPADEDTARVSMELSLRWAQRSKNAHCDNTAALFGIVQGGMHQNLRERSLEGLNKIGFDGLAIGGLSVGEPKHEMIKVLDYLPAMMPADKPRYLMGVGKPEDLVEGVRRGVDMFDCVMPTRNARNGHLFIDTGVIKIRNAFHRHDDSPLDPTCDCYTCQNFSRAYLHHLDKCGEMLGSMLNTIHNLRHYQVLMAGLREAIQQGTLATFVDAFYAKRGLPVPPLD

SEQ ID NO: 59649 - protein, 371 aa, Pseudomonas fragi
  misc_feature (1)..(371): tr|A0A267CMT5|A0A267CMT5_PSEFR Queuine tRNA-ribosyltran sferase OS=Pseudomonas fragi OX=296 GN=tgt PE=3 SV=1
MSFELLATDGKARRGRLTFPRGVVETPAFMPVGTYGTVKGMLPRDIEAIGAQMILGNTFHLWLRPGTEVIKKHGDLHDFMKWQGPILTDSGGFQVFSLGAMRKIKEEGVTFASPVDGAKVFMGPEESMQVQRDLGSDVVMIFDECTPYPADEDTARVSMELSLRWAQRSKNAHGDNTAALFGIVQGGMHQNLRERSLEGLNKIGFDGLAIGGLSVGEPKHEMIKVLDYLPAMMPADKPRYLMGVGKPEDLVEGVRRGVDMFDCVMPTRNARNGHLFIDTGVIKIRNAFHRHDDSPLDPTCDCYTCQNFSRAYLHHLDKCGEMLGSMLNTIHNLRHYQVLMAGLREAIQQGTLATFVDAFYAKRGLPVPPLD

SEQ ID NO: 59650 - protein, 374 aa, Pseudomonas frederiksbergensis
  misc_feature (1)..(374): tr|A0A1H4VFT2|A0A1H4VFT2_9PSED Queuine tRNA-ribosyltran sferase OS=Pseudomonas frederiksbergensis OX=104087 GN= tgt PE=3 SV=1
MSRMSFELLATDGKARRGRLTFPRGTVETPAFMPVGTYGTVKGMLPRDITATGAEIILGNTFHLWLRPGTEVIKKHGDLHDFMQWKGPILTDSGGFQVFSLGAMRKIKEEGVTFASPVDGAKVFMGPEESMQVQRDLGSDIVMIFDECTPYPADEDVARVSMELSLRWAKRSKEAHGDNTAALFGIVQGGMHQDLRMRSLEGLDKIGFDGLAIGGLSVGEPKHEMIKVLDYLPGQMPADKPRYLMGVGKPEDLVEGVRRGVDMFDCVMPTRNARNGHLFIDTGVLKIRNAFHRHDDSPLDPTCDCYTCQNFSRAYLHHLDKCGEMLGSMLNTIHNLRHYQVLMAGLREAIQQGTLAAFVDAFYAKRGLPVPPLD

SEQ ID NO: 59651 - protein, 377 aa, Pseudomonas frederiksbergensis
  misc_feature (1)..(377): tr|A0A423J330|A0A423J330_9PSED Queuine tRNA-ribosyltran sferase OS=Pseudomonas frederiksbergensis OX=104087 GN= tgt PE=3 SV=1
MSRTSRMTFELLATDGKARRGRLTFPRGTVETPAFMPVGTYGTVKGMLPRDIVATGAEIILGNTFHLWLRPGTEVIKKHGDLHDFMQWKGPILTDSGGFQVFSLGAMRKIKEEGVTFASPVDGAKVFMGPEESMQVQRDLGSDIVMIFDECTPYPADEDVARVSMELSLRWAKRSKEAHGDNTAALFGIVQGGMHQDLRMRSLEGLDKIGFDGLAIGGLSVGEPKHEMIKVLDYLPGQMPADKPRYLMGVGKPEDLVEGVRRGVDMFDCVMPTRNARNGHLFIDTGVLKIRNAFHRHDDSPLDPTCDCYTCQNFSRAYLHHLDKCGEMLGSMLNTIHNLRHYQVLMAGLRESIQQGTLAAFVDAFYAKRGLPVPPLD

SEQ ID NO: 59652 - protein, 377 aa, Pseudomonas fulva
  misc_feature (1)..(377): tr|F6AB05|F6AB05_PSEF1 Queuine tRNA-ribosyltransferase OS=Pseudomonas fulva (strain 12-X) OX=743720 GN=tgt PE= 3 SV=1
MTRSCRMSFELLATDGKARRGRLTFPRGVVETPAFMPVGTYGTVKGMLPRDIEAIGAQIILGNTFHLWLRPGTEVIKRHGDLHDFMQWQGPILTDSGGFQVFSLGAMRKIKEEGVTFASPVDGSKVFMGPEESMQVQRDLGSDIVMIFDECTPYPAEFDVAKTSMELSLRWAKRSKIAHGESTAALFGIVQGGMHESLRMRSLEGLSELEFDGLAIGGLSVGEPKEEMIKVLDYLPGQMPSDKPRYLMGVGKPEDLVEGVRRGVDMFDCVMPTRNARNGHLFVDTGVLKIRNAFHRHDDSPLDPTCDCYTCKHFSRAYLHHLDKCGEMLGSMLNTIHNLRHYQRLMAGLREAIQQGTLAAFVDAFYARRGLPTPPLD

SEQ ID NO: 59653 - protein, 377 aa, Pseudomonas fulva
  misc_feature (1)..(377): tr|A0A2L1WHI0|A0A2L1WHI0_9PSED Queuine tRNA-ribosyltran sferase OS=Pseudomonas fulva OX=47880 GN=tgt PE=3 SV=1
MSRTCRMSFELLATDGKARRGRITFPRGTVETPAFMPVGTYGTVKGMLPRDIEAIGAEMILGNTFHLWLRPGTEVIKKHNGLHDFMQWKGPILTDSGGFQVFSLGAMRKIKEEGVTFASPVDGSKVFMGPEESMQVQRDLGSDVVMIFDECTPYPAEHDIARTSMELSLRWAQRSKNAHADNTAALFGIVQGGMYQDLRMRSLEGLENIGFDGLAIGGLSVGEPKHEMIKVLDYLPEQMPADKPRYLMGVGKPEDLVEGVRRGVDMFDCVMPTRNARNGHLFVDTGVIKIRNAFHRHDESPLDPTCDCYTCSNFSRAYLHHLDKCGEMLSSMLNTIHNLRHYQRLMAGLREAIQQGKLAAFVDAFYAKRGLVVPPLD

SEQ ID NO: 59654 - protein, 377 aa, Pseudomonas furukawaii
  misc_feature (1)..(377): tr|L8MC43|L8MC43_PSEFK Queuine tRNA-ribosyltransferase OS=Pseudomonas furukawaii OX=1149133 GN=tgt PE=3 SV=1
MSRTCRMNFELLATDGKARRGRLTFPRGVVETPAFMPVGTYGTVKGMLPRDIEGIGAQIILGNTFHLWLRPGMEVIKRHGDLHDFMQWQGPILTDSGGFQVFSLGAMRKIKEEGVTFASPVDGAKVFMGPEESMQVQRDLGSDIVMIFDECTPYPADFDTAKRSMELSLRWAKRSKAAHGENTAALFGIVQGGMHEELRMRSLEGLMEIDFDGLAIGGLSVGEPKEEMLRVLDFMPGRMPADKPRYLMGVGKPEDLVEGVRRGVDMFDCVMPTRNARNGHLFIETGVLKIRNSVHKHDESPLDPTCDCYTCKHFSRAYLHHLDKCGEMLGSMLNTIHNLRHYQRLMAGLREAIQQGKLAAFVDAFYARRGLPTPPLD

SEQ ID NO: 59655 - protein, 377 aa, Pseudomonas fuscovaginae; identical to SEQ ID NO: 59583
  misc_feature (1)..(377): tr|A0A1H6NG95|A0A1H6NG95_9PSED Queuine tRNA-ribosyltran sferase OS=Pseudomonas fuscovaginae OX=50340 GN=tgt PE= 3 SV=1

SEQ ID NO: 59656 - protein, 377 aa, Pseudomonas fuscovaginae
  misc_feature (1)..(377): tr|A0A0M9GK85|A0A0M9GK85_9PSED Queuine tRNA-ribosyltran sferase OS=Pseudomonas fuscovaginae OX=50340 GN=tgt PE= 3 SV=1
MSRTCRMSFELLATDGKARRGRLTFPRGTVETPAFMPVGTYGTVKGMLPRDIVATGAEIILGNTFHLWLRPGTEVIKAHGDLHDFMQWKGPILTDSGGFQVFSLGAMRKIKEEGVTFASPVDGAKVFMGPEESMQVQRDLGSDIVMIFDECTPYPADEDVARVSMELSLRWAQRSKNAHGDNTAALFGIVQGGMHENLRMRSLEGLEKIGFDGLAIGGLSVGEPKHEMIRVLDYLPGRMPADKPRYLMGVGKPEDLVEGVRRGVDMFDCVMPTRNARNGHLFVDTGVLKIRNAFHRHDDSPLDPTCDCYTCQNFSRAYLHHLDKCGEMLGSMLNTIHNLRHYQRLMAGLREAIQQGTLAAFVDAFYAKRGLPVPPLD

SEQ ID NO: 59657 - protein, 375 aa, Pseudomonas gallaeciensis; identical to SEQ ID NO: 59563
  misc_feature (1)..(375): tr|A0A395R7K1|A0A395R7K1_9PSED Queuine tRNA-ribosyltran sferase OS=Pseudomonas gallaeciensis OX=857227 GN=tgt P E=3 SV=1

SEQ ID NO: 59658 - protein, 376 aa, [Pseudomonas] geniculata
  misc_feature (1)..(376): tr|A0A0L8ABZ6|A0A0L8ABZ6_9GAMM Queuine tRNA-ribosyltran sferase OS=[Pseudomonas] geniculata N1 OX=1167641 GN=tg t PE=3 SV=1
MSRLQFQLQTRDGRARRGRLTFPRGTVETPAFMPVGTYGSVKGILPDQVRALGAEIILGNTFHLYLRPGLDIIADHGGLHGFCRWDGPILTDSGGFQVFSLAHRRKITEQGVTFASPTDGARVFLGPEESMKIQKVLDSDVVMIFDECTPYPATEDVARRSMELSLRWAQRSRNAHDELGNDAALFGIVQGGVHTDLRSRSAEALQAIGFDGYAIGGLAVGEPEHERNAMLDHLDPELPGDRPRYLMGVGRPEDLVEGVARGVDMFDCVMPTRNARNGHYFTSFGTVRIRNSQYARDMDPIEPGCGCVACTGGYTRSYLRHLDRCNEMLAPMLGTLHNLFYYEKLMADIRAAIEAGTFLAFRESFYAARGAVAPPL

SEQ ID NO: 59659 - protein, 374 aa, Pseudomonas gessardii
  misc_feature (1)..(374): tr|A0A1V2J244|A0A1V2J244_9PSED Queuine tRNA-ribosyltran sferase OS=Pseudomonas gessardii OX=78544 GN=tgt PE=3 S V=1
MSRMSFELLATDGKARRGRLTFPRGTVETPAFMPVGTYGTVKGMLPRDIVATGAEIILGNTFHLWLRPGTEVIKKHGDLHDFMKWQGPILTDSGGFQVFSLGAMRKIKEEGVTFASPVDGSKVFMGPEESMQVQRDLGSDIVMIFDECTPYPADEDVARISMELSLRWAQRSKNAHGDNTAALFGIVQGGMHESLRKRSLEGLDKIGFDGLAIGGLSVGEPKHEMIKVLDYLPGLMPSDKPRYLMGVGKPEDLVEGVRRGVDMFDCVMPTRNARNGHLFIDTGVLKIRNAFHRHDDSPLDPTCDCYTCQNFSRAYLHHLDKCGEMLGSMLNTIHNLRHYQVLMAGLREAIQQGTLAAFVDAFYAKRGLPVPPLD

SEQ ID NO: 59660 - protein, 377 aa, Pseudomonas gingeri
  misc_feature (1)..(377): tr|A0A2K1FHH7|A0A2K1FHH7_9PSED Queuine tRNA-ribosyltran sferase OS=Pseudomonas gingeri NCPPB 3146 = LMG 5327 OX =707248 GN=tgt PE=3 SV=1
MSRTSRMSFELLATDGKARRGRLTFPRGTVETPAFMPVGTYGTVKGMLPRDIVATGAEIILGNTFHLWLRPGTEVIKKHGDLHDFMQWKGPILTDSGGFQVFSLGAMRKIKEEGVTFASPVDGAKVFMGPEESMQVQRDLGSDIVMIFDECTPYPADEDVARVSMELSLRWAQRSKNAHGDNTAALFGIVQGGMHQNLRMRSLEGLDKIGFDGLAIGGLSVGEPKHEMIKVLDYLPGQMPADKPRYLMGVGKPEDLVEGVRRGVDMFDCVMPTRNARNGHLFVDTGVLKIRNAFHRHDDSPLDPTCDCYTCQNFSRAYLHHLDKCGEMLGSMLNTIHNLRHYQLLMAGLREAIQQGTLAAFVDAFYAKRGLPVPPLD

SEQ ID NO: 59661 - protein, 377 aa, Pseudomonas graminis
  misc_feature (1)..(377): tr|A0A4R7VBN0|A0A4R7VBN0_9PSED Queuine tRNA-ribosyltran sferase OS=Pseudomonas graminis OX=158627 GN=tgt PE=3 S V=1
MSRTCRMSFELLATDGKARRGRLTFPRGVVETPAFMPVGTYGTVKGMLPRDIEATGAQMILGNTFHLWLRPGTEVIKGHGDLHDFMQWKGPILTDSGGFQVFSLGAMRKIKEEGVTFASPVDGAKVFMGPEESMQVQRDLGSDVVMIFDECTPYPADEDVARTSMELSLRWAKRSKVAHGENTAALFGIVQGGMHENLRMRSLEGLNELDFDGLAIGGLSVGEPKDEMIKVLDYLPGRMPADKPRYLMGVGKPEDLVEGVRRGVDMFDCVMPTRNARNGHLFIDTGVLKIRNAFHRYDESPLDPTCDCYTCKNFSRAYLHHLDKCGEMLGSMLNTIHNLRHYQLLMAGLREAIQQGTLAAFVDTFYAKRGLVTPLLD

SEQ ID NO: 59662 - protein, 377 aa, Pseudomonas graminis
  misc_feature (1)..(377): tr|A0A1I0BL40|A0A1I0BL40_9PSED Queuine tRNA-ribosyltran sferase OS=Pseudomonas graminis OX=158627 GN=tgt PE=3 S V=1
MSRTCRMSFELLATDGKARRGRLTFPRGVVETPAFMPVGTYGTVKGMLPRDIEATGAQMILGNTFHLWLRPGTEVIKGHGDLHDFMQWKGPILTDSGGFQVFSLGAMRKIKEEGVTFASPVDGAKVFMGPEESMQVQRDLGSDVVMIFDECTPYPADEEVARTSMELSLRWAKRSKIAHGENTAALFGIVQGGMHENLRMRSLEGLNELDFDGLAIGGLSVGEPKDEMIKVLDYLPGRMPADKPRYLMGVGKPEDLVEGVRRGVDMFDCVMPTRNARNGHLFIDTGVLKIRNAFHRYDESPLDPTCDCYTCKNFSRAYLHHLDKCGEMLGSMLNTIHNLRHYQLLMAGLREAIQQGTLAAFVDTFYAKRGLATPLLA

SEQ ID NO: 59663 - protein, 374 aa, Pseudomonas grimontii; identical to SEQ ID NO: 59578
  misc_feature (1)..(374): tr|A0A1H1BU54|A0A1H1BU54_9PSED Queuine tRNA-ribosyltran sferase OS=Pseudomonas grimontii OX=129847 GN=tgt PE=3 SV=1

SEQ ID NO: 59664 - protein, 374 aa, Pseudomonas guangdongensis
  misc_feature (1)..(374): tr|A0A1H2GJZ0|A0A1H2GJZ0_9PSED Queuine tRNA-ribosyltran sferase OS=Pseudomonas guangdongensis OX=1245526 GN=tgt PE=3 SV=1
MSHMSFELLATDGKARRGRLTFPRGVVETPAFMPVGTYGTVKGMLPRDIEAIGAQIILGNTFHLWLRPGTEVIKKHGDLHDFMQWQGPILTDSGGFQVFSLGAMRKIKEEGVYFASPVDGAKVFMGPEESMQVQRELGSDIVMIFDECTPYPADFDTAKRSMELSLRWAKRSKIAHEGNPSALFGIVQGGMHEELRLRSLEGLLEIGFDGLAIGGLSVGEPKEDMIRILDFLPPQLPADKPRYLMGVGKPEDLVEGVRRGVDMFDCVMPTRNARNGHLFVDTGVIKIRNAVHKHDDSPLDPACDCYTCSHFSRAYLHHLDKCGEMLGSMLNTIHNLRHYQRLMAGLRDAIAQGTLAAFVDDFYARRGLPVPPLD

SEQ ID NO: 59665 - protein, 377 aa, Pseudomonas guariconensis
  misc_feature (1)..(377): tr|A0A1G6TS45|A0A1G6TS45_9PSED Queuine tRNA-ribosyltran sferase OS=Pseudomonas guariconensis OX=1288410 GN=tgt PE=3 SV=1
MSRTCRMSFELLATDGKARRGRLTFPRGTVETPAFMPVGTYGTVKGMLPRDIEAIGAEIILGNTFHLWLRPGTEVIKKHGSLHDFMQWKGPILTDSGGFQVFSLGAMRKIKEEGVTFASPVDGSKVFMGPEESMQVQRDLGSDIVMIFDECTPYPAEHDVARTSMELSLRWAQRSKNAHADNTAALFGIVQGGMYQDLRMRSLEALENIGFDGLAIGGLSVGEPKHEMIKVLDYLPGQMPADKPRYLMGVGKPEDLVEGVRRGVDMFDCVMPTRNARNGHLFVDTGVIKIRNAFHRHDDSPLDPTCDCYTCTNFSRAYLHHLDKCGEMLSSMLNTIHNLRHYQRLMAGLREAIQQGKLAAFVDAFYAKRGLPVPPLD

SEQ ID NO: 59666 - protein, 377 aa, Pseudomonas guguanensis
  misc_feature (1)..(377): tr|A0A1H0X3M8|A0A1H0X3M8_9PSED Queuine tRNA-ribosyltran sferase OS=Pseudomonas guguanensis OX=1198456 GN=tgt PE =3 SV=1
MSRTCRMSFELLATDGKARRGRLTFPRGVVETPAFMPVGTYGTVKGMLPRDVADIGAQIILGNTFHLWLRPGMEVIRKHGDLHDFMQWQGPILTDSGGFQVFSLGAMRKIKEEGVYFASPVDGAKVFMGPEESMQVQRDLGSDIVMIFDECTPYPAEFDVAKRSMELSLRWAKRSKTAHGESTAALFGIVQGGMHEELRMRSLEGLCEIGFDGLAIGGLSVGEPKEEMIRVLDFLPPQMPADKPRYLMGVGKPEDLVEGVRRGVDMFDCVMPTRNARNGHLFVDTGVVKIRNAVHKLDDSPLDPTCDCYTCKHFSRAYLHHLDKCGEMLGSMLNTIHNLRHYQRVMAGLREAIGQGTLAAFVEAFYAKRGLPVPPLD

SEQ ID NO: 59667 - protein, 377 aa, Pseudomonas guineae
  misc_feature (1)..(377): tr|A0A1I3DN45|A0A1I3DN45_9PSED Queuine tRNA-ribosyltran sferase OS=Pseudomonas guineae OX=425504 GN=tgt PE=3 SV =1
MTRTCRMSFELLATEGKARRGRLTFPRGVVETPAFMPVGTYGTVKGMMPDDVEAIGAQIILGNTFHLWLRPGTEVIKKHGDLHDFMQWQGPILTDSGGFQVFSLGAMRKIKEEGVYFASPVDGAKVFMGPEESMQVQRDLGSDIVMIFDECTPYPAEFDVAKQSMELSLRWAKRSKDAHGENTAALFGIVQGGMHEELRKVSLDGLEQIGFDGYAIGGLSVGEPKEEMIKVLDYLPAQLPADKPRYLMGVGKPEDLVEGVRRGVDMFDCVMPTRNARNGHLFVDTGVLKIRNAFHKQDNSPLDSTCDCYTCKHFSRAYLHHLDKCGEMLGSMLNTIHNLRHYQVLMAGLREAIQQGTLAAFVDAFYAKRGLPTPPLD

SEQ ID NO: 59668 - protein, 371 aa, Pseudomonas helleri
  misc_feature (1)..(371): tr|A0A0J6JCL0|A0A0J6JCL0_9PSED Queuine tRNA-ribosyltran sferase OS=Pseudomonas helleri OX=1608996 GN=tgt PE=3 S V=1
MSFELLATDGKARRGRLTFPRGVVETPAFMPVGTYGTVKGMLPRDIEAIGAQMILGNTFHLWLRPGTEVIKKHGDLHDFMKWQGPILTDSGGFQVFSLGAMRKIKEEGVTFASPVDGAKVFMGPEESMQVQRDLGSDVVMIFDECTPYPADEDVARVSMELSLRWAQRSKIAHGDNTAALFGIVQGGMHQNLRERSLEGLNKIGFDGLAIGGLSVGEPKHEMIKVLDYLPAMMPADKPRYLMGVGKPEDLVEGVRRGVDMFDCVMPTRNARNGHLFIDTGVLKIRNAFHRHDDSPLDPTCDCYTCQNFSRAYLHHLDKCGEMLGSMLNTIHNLRHYQVLMAGLREAIQQGTLATFVDAFYAKRGLPVPPLD

SEQ ID NO: 59669 - protein, 377 aa, Pseudomonas helmanticensis
  misc_feature (1)..(377): tr|A0A4R7UVW5|A0A4R7UVW5_9PSED Queuine tRNA-ribosyltran sferase OS=Pseudomonas helmanticensis OX=1471381 GN=tgt PE=3 SV=1
MSRECRMSFELLATDGKARRGRLTFPRGTVETPAFMPVGTYGTVKGMLPRDIVATGAEIILGNTFHLWLRPGTQVIKEHGDLHDFMQWKGPILTDSGGFQVFSLGAMRKIKEEGVTFASPVDGAKVFMGPEESMQVQRDLGSDIVMIFDECTPYPADEDVARVSMELSLRWAQRSKNAHGENTAALFGIVQGGMHQDLRMRSLEGLDKIGFDGLAIGGLSVGEPKHEMIKVLDYLPGMMPADKPRYLMGVGKPEDLVEGVRRGVDMFDCVMPTRNARNGHLFIDTGVLKIRNAFHRHDESPLDPTCDCYTCQNFSRAYLHHLDKCGEMLGSMLNTIHNLRHYQVLMAGLREAIQQGTLAAFVDAFYAKRGLPVPPLD

SEQ ID NO: 59670 - protein, 377 aa, Pseudomonas hunanensis
  misc_feature (1)..(377): tr|A0A2I0CCW3|A0A2I0CCW3_9PSED Queuine tRNA-ribosyltran sferase OS=Pseudomonas hunanensis OX=1247546 GN=tgt PE= 3 SV=1
MSRTCRMSFELLATDGKARRGRITFPRGTVETPAFMPVGTYGTVKGMLPRDIEAIGAEMILGNTFHLWLRPGTEVIKKHNGLHDFMQWKGPILTDSGGFQVFSLGAMRKIKEEGVTFASPVDGSKVFMGPEESMQVQRDLGSDVVMIFDECTPYPAEHDVARTSMELSLRWAQRSKNAHADNTAALFGIVQGGMYQDLRMRSLEGLENIGFDGLAIGGLSVGEPKHEMIKVLDYLPDQMPADKPRYLMGVGKPEDLVEGVRRGVDMFDCVMPTRNARNGHLFVDTGVIKIRNAFHRHDESPLDPTCDCYTCTNFSRAYLHHLDKCGEMLSSMLNTIHNLRHYQRLMAGLREAIQQGKLAAFVDAFYAKRGLPVPPLD

SEQ ID NO: 59671 - protein, 379 aa, Pseudomonas hussainii
  misc_feature (1)..(379): tr|A0A1H7GPU4|A0A1H7GPU4_9PSED Queuine tRNA-ribosyltran sferase OS=Pseudomonas hussainii OX=1429083 GN=tgt PE=3 SV=1
MSFMQFDLLATDGKARRGRLNFPRGAVETPAFMPVGTYGTVKGMLPRDIEAIGAHIILGNTFHLWLRPGTEVIREHGDLHDFTQWQGPILTDSGGFQVFSLGAMRKIKEEGVTFASPVDGSKVFMSPEVSMQVQRELGSDIVMIFDECTPYPATHEEAKRSMELSLRWAKRSKDAHGDNPSALFGIVQGGMYEDLRAQSLAGLEEIGFDGYAIGGLSVGEPKDEMIKVLNYLPAQLPADKPRYLMGVGKPEDIVEAVRRGVDMFDCVMPTRNARNGHLFTDTGVIKIRNAKHRHDTGPLDAACDCYTCKNFSRAYLHHLDKCGEMLGSMLNTIHNLRHYQRLMAGLREAIQQGRLSAFVADFYAQRGLPVPPLEEPASE

SEQ ID NO: 59672 - protein, 377 aa, Pseudomonas indica
  misc_feature (1)..(377): tr|A0A1G9JH29|A0A1G9JH29_9PSED Queuine tRNA-ribosyltran sferase OS=Pseudomonas indica OX=137658 GN=tgt PE=3 SV= 1
MSRTCHMSFELLATDGKARRGRLTFPRGVVETPAFMPVGTYGTVKGMLPRDIEAIGAQIILGNTFHLWLRPGTEVIKRHGDLHDFMQWKGPILTDSGGFQVFSLGALRKIKEEGVTFASPVDGSKVFMGPEESMQVQRDLGSDIVMIFDECTPYPADEDVARRSMELSLRWALRSKVAHGDNPAALFGIVQGGMHESLRMRSLEGLESIGFDGLAIGGLSVGEPKEEMIRVLDFLPPRMPVDKPRYLMGVGKPEDLVEGVRRGVDMFDCVMPTRNARNGHLFIETGVLKIRNSAHKHDESPLDPTCDCYTCQHFSRAYLHHLDKCGEMLGSMLNTIHNLRHYQRLMAGLREAIQQGTLAAFVDAFYARRGLPTPPLD

SEQ ID NO: 59673 - protein, 371 aa, Pseudomonas indoloxydans
  misc_feature (1)..(371): tr|A0A2T5PD20|A0A2T5PD20_9PSED Queuine tRNA-ribosyltran sferase OS=Pseudomonas indoloxydans OX=404407 GN=tgt PE =3 SV=1
MSFELLATDGKARRGRLTFPRGVVETPAFMPVGTYGTVKGMLPRDIEAIGAQIILGNTFHLWLRPGMEVIKKHGDLHDFMQWQGPILTDSGGFQVFSLGAMRKIKEEGVYFASPVDGTKVFMGPEESMQVQRDLGSDIVMIFDECTPYPAEFDVAKRSMELSLRWAKRSKTAHGESSAALFGIVQGGMHEELRMRSLEGLCEIGFDGLAIGGLSVGEPKEEMIRVLDFLPPHMPADKPRYLMGVGKPEDLVEGVRRGVDMFDCVMPTRNARNGHLFVDTGVVKIRNAVHKHDDSPLDPTCDCYTCKHFSRAYLHHLDKCGEMLGSMLNTIHNLRHYQRVMAGLREAIGQGTLAAFVETFYAKRGLPVPPLD

SEQ ID NO: 59674 - protein, 377 aa, Pseudomonas japonica
  misc_feature (1)..(377): tr|A0A239CZ03|A0A239CZ03_9PSED Queuine tRNA-ribosyltran sferase OS=Pseudomonas japonica OX=256466 GN=tgt PE=3 S V=1
MSRTCRMSFELLATDGKARRGRLTFPRGTVETPAFMPVGTYGTVKGMLPRDIEAIGAEIILGNTFHLWLRPGTEVIKAHGDLHDFMQWKGPILTDSGGFQVFSLGAMRKIKEEGVTFASPVDGSKVFMGPEESMQVQRDLGSDIVMIFDECTPYPADEDVARISMELSLRWAQRSKNAHGDSTAALFGIVQGGMHQDLRMRSLEGLDKIGFDGLAIGGLSVGEPKHEMIKVLDYLPGQMPADKPRYLMGVGKPEDLVEGVRRGVDMFDCVMPTRNARNGHLFIDTGVLKIRNAFHRHDDSPLDPTCDCYTCQNFSRAYLHHLDKCGEMLGAMLNTIHNLRHYQRLMAGLREAIQQGTLAAFVDAFYAKRGLPVPPLD

SEQ ID NO: 59675 - protein, 377 aa, Pseudomonas jessenii
  misc_feature (1)..(377): tr|A0A2V4LTF9|A0A2V4LTF9_9PSED Queuine tRNA-ribosyltran sferase OS=Pseudomonas jessenii OX=77298 GN=tgt PE=3 SV =1
MSRECRMSFELLATDGKARRGRLTFPRGTVETPAFMPVGTYGTVKGMLPRDIVATGAEIILGNTFHLWLRPGTQVIKEHGDLHDFMQWKGPILTDSGGFQVFSLGAMRKIKEEGVTFASPVDGAKVFMGPEESMQVQRDLGSDIVMIFDECTPYPADEDVARISMELSLRWAQRSKNAHGDNTAALFGIVQGGMHQDLRMRSLEGLDKIGFDGLAIGGLSVGEPKHEMIKVLDYLPGMMPADKPRYLMGVGKPEDLVEGVRRGVDMFDCVMPTRNARNGHLFIDTGVLKIRNAFHRHDESPLDPTCDCYTCQNFSRAYLHHLDKCGEMLGSMLNTIHNLRHYQVLMAGLREAIQQGTLAAFVDAFYAKRGLPVPPLD

SEQ ID NO: 59676 - protein, 377 aa, Pseudomonas jessenii
  misc_feature (1)..(377): tr|A0A5C4L011|A0A5C4L011_9PSED Queuine tRNA-ribosyltran sferase OS=Pseudomonas jessenii OX=77298 GN=tgt PE=3 SV =1
MSRECRMSFELLATDGKARRGRLTFPRGTVETPAFMPVGTYGTVKGMLPRDIVATGAEIILGNTFHLWLRPGTEVIKEHGDLHDFMQWKGPILTDSGGFQVFSLGAMRKIKEEGVTFASPVDGSKVFMGPEESMQVQRDLGSDIVMIFDECTPYPADEDVARVSMELSLRWAQRSKNAHGDNTAALFGIVQGGMHQDLRMRSLEGLDKIGFDGLAIGGLSVGEPKHEMIKVLDYLPGMMPADKPRYLMGVGKPEDLVEGVRRGVDMFDCVMPTRNARNGHLFIDTGVLKIRNAFHRHDDSPLDPTCDCYTCQNFSRAYLHHLDKCGEMLGSMLNTIHNLRHYQVLMAGLREAIQQGTLAAFVDAFYAKRGLPVPPLD

SEQ ID NO: 59677 - protein, 375 aa, Pseudomonas jinjuensis
  misc_feature (1)..(375): tr|A0A1H0QY04|A0A1H0QY04_9PSED Queuine tRNA-ribosyltran sferase OS=Pseudomonas jinjuensis OX=198616 GN=tgt PE=3 SV=1
MSFMNFELLATDGKARRGRLTFPRGVVETPAFMPVGTYGTVKGMLPRDIEGIGAQIILGNTFHLWLRPGTEVIGKHGDLHDFMQWKGPILTDSGGFQVFSLGALRKIKEEGVYFASPVDGAKVFMGPEESMAVQRALGSDIVMIFDECTPYPAEFDVAKRSMELSLRWAKRSKIAHGDSPSALFGIVQGGMHQELRMRSLEGLQEIGFDGLAIGGLSVGEPKEEMIRVLDFLPPHMPADKPRYLMGVGKPEDLVEGVRRGVDMFDCVMPTRNARNGHLFVDTGVIKIRNAVHKHDESPLDPTCDCYTCSNFSRAYLYHLDKCGEMLGSMLNTIHNLRHYQRLMAGLREAIQQGTFANFVDAFYARRGLPTPPLAE

SEQ ID NO: 59678 - protein, 374 aa, Pseudomonas kairouanensis; identical to SEQ ID NO: 59645
  misc_feature (1)..(374): tr|A0A4Z0AHL2|A0A4Z0AHL2_9PSED Queuine tRNA-ribosyltran sferase OS=Pseudomonas kairouanensis OX=2293832 GN=tgt PE=3 SV=1

SEQ ID NO: 59679 - protein, 377 aa, Pseudomonas kilonensis
  misc_feature (1)..(377): tr|A0A0F4XME8|A0A0F4XME8_9PSED Queuine tRNA-ribosyltran sferase OS=Pseudomonas kilonensis OX=132476 GN=tgt PE=3 SV=1
MSRTCRMSFELLATDGKARRGRLTFPRGTVETPAFMPVGTYGTVKGMLPRDIEAIGAEIILGNTFHLWLRPGMEVIKAHGDLHDFMQWKGPILTDSGGFQVFSLGAMRKIKEEGVTFASPVDGSKVFMGPEESMQVQRDLGSDIVMIFDECTPYPADEDVARVSMELSLRWAQRSKNAHGDNTAALFGIVQGGMHRDLRMRSLEGLDKIGFDGLAIGGLSVGEPKHEMIKVLDYLPGEMPADKPRYLMGVGKPEDLVEGVRRGVDMFDCVMPTRNARNGHLFIDTGVLKIRNAFHRHDNSPLDPTCDCYTCQNFSRAYLHHLDKCGEMLGSMLNTIHNLRHYQVLMAGLREAIQQGTLAAFVEAFYAKRGLPVPPLD

SEQ ID NO: 59680 - protein, 375 aa, Pseudomonas knackmussii
  misc_feature (1)..(375): tr|A0A024HCS3|A0A024HCS3_PSEKB Queuine tRNA-ribosyltran sferase OS=Pseudomonas knackmussii (strain DSM 6978 / L MG 23759 / B13) OX=1301098 GN=tgt PE=3 SV=1
MSFMKFELLATEGKARRGRLTFPRGVVETPAFMPVGTYGTVKGMLPRDIEAIGAQIILGNTFHLWLRPGTEVIQKHGDLHDFMQWKGPILTDSGGFQVFSLGALRKIKEEGVYFASPVDGAKVFMGPEESMAVQRALGSDIVMIFDECTPYPAEFDVAKRSMELSLRWAKRSKVAHGDSPSALFGIVQGGMHEELRMRSLEGLQEIGFDGLAIGGLSVGEPKEEMIRVLDFLPPQMPADKPRYLMGVGKPEDLVEGVRRGVDMFDCVMPTRNARNGHLFVDTGVIKIRNAVHKHDESPLDPTCDCYTCKHFSRAYLYHLDKCGEMLGSMLNTIHNLRHYQRLMAGLREAIQQGTLAAFVDAFYARRGLPTPPLGD

SEQ ID NO: 59681 - protein, 377 aa, Pseudomonas koreensis
  misc_feature (1)..(377): tr|A0A1V3T1G8|A0A1V3T1G8_9PSED Queuine tRNA-ribosyltran sferase OS=Pseudomonas koreensis OX=198620 GN=tgt PE=3 SV=1
MSRECRMSFELLATDGKARRGRLTFPRGTVETPAFMPVGTYGTVKGMLPRDIVATGAEIILGNTFHLWLRPGTQVIKEHGDLHDFMQWKGPILTDSGGFQVFSLGAMRKIKEEGVTFASPVDGAKVFMGPEESMQVQRDLGSDIVMIFDECTPYPADEDVARISMELSLRWAQRSKNAHGENTAALFGIVQGSMHQDLRMRSLEGLDKIGFDGLAIGGLSVGEPKHEMIKVLDYLPGMMPADKPRYLMGVGKPEDLVEGVRRGVDMFDCVMPTRNARNGHLFIDTGVLKIRNAFHRHDESPLDPTCDCYTCQNFSRAYLHHLDKCGEMLGSMLNTIHNLRHYQVLMAGLREAIQQGTLAAFVDAFYAKRGLPVPPLD

SEQ ID NO: 59682 - protein, 377 aa, Pseudomonas koreensis; identical to SEQ ID NO: 59675
  misc_feature (1)..(377): tr|A0A4U3ERY6|A0A4U3ERY6_9PSED Queuine tRNA-ribosyltran sferase OS=Pseudomonas koreensis OX=198620 GN=tgt PE=3 SV=1

SEQ ID NO: 59683 - protein, 377 aa, Pseudomonas kribbensis
  misc_feature (1)..(377): tr|A0A345RVJ7|A0A345RVJ7_9PSED Queuine tRNA-ribosyltran sferase OS=Pseudomonas kribbensis OX=1628086 GN=tgt PE= 3 SV=1
MSRECRMSFELLATDGKARRGRLTFPRGTVETPAFMPVGTYGTVKGMLPRDIEAIGAEIILGNTFHLWLRPGTEVIKAHGDLHDFMQWKGPILTDSGGFQVFSLGAMRKIKEEGVTFASPVDGSKVFMGPEESMQVQRDLGSDIVMIFDECTPYPADEDVARVSMELSLRWAQRSKNAHGDNTAALFGIVQGGMHQDLRMRSLEGLDKIGFDGLAIGGLSVGEPKHEMIKVLDYLPGMMPADKPRYLMGVGKPEDLVEGVRRGVDMFDCVMPTRNARNGHLFIDTGVLKIRNAFHRHDDSPLDPTCDCYTCQNFSRAYLHHLDKCGEMLGSMLNTIHNLRHYQVLMAGLREAIQQGTLAAFVDAFYAKRGLPVPPLD

SEQ ID NO: 59684 - protein, 377 aa, Pseudomonas kunmingensis
  misc_feature (1)..(377): tr|A0A1I3U0Y3|A0A1I3U0Y3_9PSED Queuine tRNA-ribosyltran sferase OS=Pseudomonas kunmingensis OX=1211807 GN=tgt P E=3 SV=1
MTRSCHMSFELLATDGKARRGRLTFPRGTVETPAFMPVGTYGTVKGMLPRDIEAIGAQIILGNTFHLWLRPGTEVIKRHGDLHDFMQWQGPILTDSGGFQVFSLGAMRKIKEEGVYFASPVDGAKVFMGPEESMQVQRDLGSDIVMIFDECTPYPADEDVARRSMELSLRWAKRSKVAHGDSPAALFGIVQGGMHESLRMRSLEGLCEIGFDGLAIGGLSVGEPKEEMIRVLDFLPPQMPADKPRYLMGVGKPEDLVEGVRRGVDMFDCVMPTRNARNGHLFVDGGVIKIRNAVHKHDDSPLDPSCDCYTCKHFSRAYLHHLDKCGEMLGSMLNTIHNLRHYQRVMAGLRDAIQQGTLAAFVDAFYAKRGLPTPPLA

SEQ ID NO: 59685 - protein, 371 aa, Pseudomonas kunmingensis
  misc_feature (1)..(371): tr|A0A2N8SCD0|A0A2N8SCD0_9PSED Queuine tRNA-ribosyltran sferase OS=Pseudomonas kunmingensis OX=1211807 GN=tgt P E=3 SV=1
MSFELLATDGKARRGRLTFPRGTVETPAFMPVGTYGTVKGMLPRDIEAIGAQIILGNTFHLWLRPGTEVIKRHGDLHDFMQWQGPILTDSGGFQVFSLGAMRKIKEEGVYFASPVDGAKVFMGPEESMQVQRDLGSDIVMIFDECTPYPADEDVARRSMELSLRWAKRSKVAHGDSPAALFGIVQGGMHESLRMRSLEGLCEIGFDGLAIGGLSVGEPKEEMIRVLDFLPPQMPADKPRYLMGVGKPEDLVEGVRRGVDMFDCVMPTRNARNGHLFVDGGVIKIRNAVHKHDDSPLDPSCDCYTCKHFSRAYLHHLDKCGEMLGSMLNTIHNLRHYQRVMAGLRDAIQQGTLAAFVDAFYAKRGLPTPPLA

SEQ ID NO: 59686 - protein, 371 aa, Pseudomonas kuykendallii
  misc_feature (1)..(371): tr|A0A2W5D0H6|A0A2W5D0H6_9PSED Queuine tRNA-ribosyltran sferase OS=Pseudomonas kuykendallii OX=1007099 GN=tgt P E=3 SV=1
MTFELLATEGRARRGRLTFPRGVVETPAFMPVGTYGTVKGMLPRDIEAIGAQIILGNTFHLWLRPGTEVVREHGDLHDFMQWKGPILTDSGGFQVFSLGAMRKIKEEGVYFASPVDGAKVFMGPEESMRVQRELGSDIVMIFDECTPYPADEEVARRSMELSLRWAERSKIAHADNPSALFGIVQGGMHENLRMRSLERLCEIGFDGLAIGGLSVGEPKEEMIRVLDFLPAQMPADKPRYLMGVGKPEDLVEGVRRGVDMFDCVMPTRNARNGHLFTAEGVVKIRNAGHRHDQSPLEADCDCYTCKHFSRAYLHHLDKCGEMLGSMLNTIHNLRHYQRLMAGLRGAIQQGTLAAFVDAFYARRGLPTPPLD

SEQ ID NO: 59687 - protein, 374 aa, Pseudomonas kuykendallii
  misc_feature (1)..(374): tr|A0A1H2XJL3|A0A1H2XJL3_9PSED Queuine tRNA-ribosyltran sferase OS=Pseudomonas kuykendallii OX=1007099 GN=tgt P E=3 SV=1
MSHMTFELLATEGRARRGRLTFPRGVVETPAFMPVGTYGTVKGMLPRDIEAIGAQIILGNTFHLWLRPGTEVIREHGDLHDFMQWKGPILTDSGGFQVFSLGAMRKIKEEGVYFASPVDGAKVFMGPEESMRVQRELGSDIVMIFDECTPYPADEDVARRSMELSLRWAERSKIAHADNPSALFGIVQGGMHENLRMRSLERLCEIGFDGLAIGGLSVGEPKEEMIRVLDFLPAQMPADKPRYLMGVGKPEDLVEGVRRGVDMFDCVMPTRNARNGHLFTADGVVKIRNAGHRHDQSPLEADCDCYTCKHFSRAYLHHLDKCGEMLGSMLNTIHNLRHYQRLMAGLRGAIQQGTLAAFVDAFYARRGLPTPPLD

SEQ ID NO: 59688 - protein, 374 aa, Pseudomonas lactis; identical to SEQ ID NO: 59587
  misc_feature (1)..(374): tr|A0A0R3CRW1|A0A0R3CRW1_9PSED Queuine tRNA-ribosyltran sferase OS=Pseudomonas lactis OX=1615674 GN=tgt PE=3 SV =1

SEQ ID NO: 59689 - protein, 374 aa, Pseudomonas lactis
  misc_feature (1)..(374): tr|I4K9X4|I4K9X4_9PSED Queuine tRNA-ribosyltransferase OS=Pseudomonas lactis OX=1615674 GN=tgt PE=3 SV=1
MSRMSFELLATDGKARRGRLTFPRGTVETPAFMPVGTYGTVKGMLPRDIVATGAEIILGNTFHLWLRPGTEVIKKHGDLHDFMKWQGPILTDSGGFQVFSLGAMRKIKEEGVTFASPVDGAKVFMGPEESMQVQRDLGSDIVMIFDECTPYPADEEVARISMELSLRWAQRSKNAHGDNTAALFGIVQGGMHESLRKRSLEGLDKIGFDGLAIGGLSVGEPKHEMIKVLDYLPGLMPADKPRYLMGVGKPEDLVEGVRRGVDMFDCVMPTRNARNGHLFIDTGVLKIRNAFHRHDDSPLDPTCDCYTCQNFSRAYLHHLDKCGEMLGSMLNTIHNLRHYQVLMAGLREAIQQGTLAAFVDAFYAKRGLPVPPLD

SEQ ID NO: 59690 - protein, 377 aa, Pseudomonas laurylsulfatiphila
  misc_feature (1)..(377): tr|A0A2S6FGY7|A0A2S6FGY7_9PSED Queuine tRNA-ribosyltran sferase OS=Pseudomonas laurylsulfatiphila OX=2011015 GN =tgt PE=3 SV=1
MSRTCRMSFELLATDGKARRGRLTFPRGTVETPAFMPVGTYGTVKGMLPRDIEATGAEIILGNTFHLWLRPGTEVIKKHGDLHDFMQWKGPILTDSGGFQVFSLGAMRKIKEEGVTFASPVDGAKVFMGPEESMQVQRDLGSDIVMIFDECTPYPADEDVARISMELSLRWAKRSKEAHGDNTAALFGIVQGGMHQDLRMRSLEGLDKIGFDGLAIGGLSVGEPKHEMIKVLDYLPGMMPADKPRYLMGVGKPEDLVEGVRRGVDMFDCVMPTRNARNGHLFIDTGVLKIRNAFHRHDDSPLDPTCDCYTCQNFSRAYLHHLDKCGEMLGSMLNTIHNLRHYQVLMAGLREAIQQGTLAAFVDAFYAKRGLPVPPLD

SEQ ID NO: 59691 - protein, 377 aa, Pseudomonas laurylsulfativorans
  misc_feature (1)..(377): tr|A0A2S3VS60|A0A2S3VS60_9PSED Queuine tRNA-ribosyltran sferase OS=Pseudomonas laurylsulfativorans OX=1943631 G N=tgt PE=3 SV=1
MSRTCRMSFELLATDGKARRGRLTFPRGTVETPAFMPVGTYGTVKGMLPRDIEATGAEIILGNTFHLWLRPGTEVIKKHGDLHDFMQWKGPILTDSGGFQVFSLGAMRKIKEEGVTFASPVDGAKVFMGPEESMQVQRDLGSDIVMIFDECTPYPADEDVARISMELSLRWAKRSKEAHGENTAALFGIVQGGMHQDLRMRSLEGLDKIGFDGLAIGGLSVGEPKHEMIKVLDYLPGMMPADKPRYLMGVGKPEDLVEGVRRGVDMFDCVMPTRNARNGHLFIDTGVLKIRNAFHRHDDSPLDPTCDCYTCQNFSRAYLHHLDKCGEMLGSMLNTIHNLRHYQVLMAGLREAIQQGTLAAFVDAFYAKRGLPVPPLD

SEQ ID NO: 59692 - protein, 374 aa, Pseudomonas libanensis; identical to SEQ ID NO: 59587
  misc_feature (1)..(374): tr|A0A0R2YB13|A0A0R2YB13_9PSED Queuine tRNA-ribosyltran sferase OS=Pseudomonas libanensis OX=75588 GN=tgt PE=3 SV=1

SEQ ID NO: 59693 - protein, 377 aa, Pseudomonas lini
  misc_feature (1)..(377): tr|A0A0J6HH24|A0A0J6HH24_9PSED Queuine tRNA-ribosyltran sferase OS=Pseudomonas lini OX=163011 GN=tgt PE=3 SV=1
MSRQSRMSFELLATDGKARRGRLTFPRGTVETPAFMPVGTYGTVKGMLPRDITATGAEIILGNTFHLWLRPGTEVIKKHGDLHDFMQWKGPILTDSGGFQVFSLGAMRKIKEEGVTFASPVDGAKVFMGPEESMQVQRDLGSDIVMIFDECTPYPADEDVARVSMELSLRWAQRSKNAHGDNTAALFGIVQGGMHQDLRMRSLEGLDKIGFDGLAIGGLSVGEPKHEMIKVLDYLPGQMPADKPRYLMGVGKPEDLVEGVRRGVDMFDCVMPTRNARNGHLFIDTGVLKIRNAFHRHDDSPLDPTCDCYTCQNFSRAYLHHLDKCGEMLGSMLNTIHNLRHYQVLMAGLREAIQQGTLAAFVDAFYAKRGLPVPPLD

SEQ ID NO: 59694 - protein, 377 aa, Pseudomonas lini
  misc_feature (1)..(377): tr|A0A423IUQ0|A0A423IUQ0_9PSED Queuine tRNA-ribosyltran sferase OS=Pseudomonas lini OX=163011 GN=tgt PE=3 SV=1
MSRTSRMSFELLATDGKARRGRLTFPRGTVETPAFMPVGTYGTVKGMLPRDIVATGAEIILGNTFHLWLRPGTEVIKKHGDLHDFMQWKGPILTDSGGFQVFSLGAMRKIKEEGVTFASPVDGAKVFMGPEESMQVQRDLGSDIVMIFDECTPYPADEDVARVSMELSLRWAKRSKEAHGDNTAALFGIVQGGMHQDLRMRSLEGLDKIGFDGLAIGGLSVGEPKHEMIKVLDYLPGQMPADKPRYLMGVGKPEDLVEGVRRGVDMFDCVMPTRNARNGHLFIDTGVLKIRNAFHRHDDSPLDPTCDCYTCQNFSRAYLHHLDKCGEMLGSMLNTIHNLRHYQVLMAGLRESIQQGTLAAFVDAFYAKRGLPVPPLD

SEQ ID NO: 59695 - protein, 374 aa, Pseudomonas linyingensis
  misc_feature (1)..(374): tr|A0A1H6S064|A0A1H6S064_9PSED Queuine tRNA-ribosyltran sferase OS=Pseudomonas linyingensis OX=915471 GN=tgt PE =3 SV=1
MSHMSFELLATDGKARRGRLTFPRGVVETPAFMPVGTYGTVKGMLPRDIEEIGAQIILGNTFHLWLRPGTEVIKKHGDLHDFMQWQGPILTDSGGFQVFSLGAMRKIKEEGVYFASPVDGAKVFMGPEESMQVQRDLGSDIVMIFDECTPYPADFDTARRSMELSQRWAKRSKVAHEGNPAALFGIVQGGMHEELRLRSLEGLLEIGFDGLAIGGLSVGEPKEDMIRILDFLPPHLPADKPRYLMGVGKPEDLVEGVRRGIDMFDCVMPTRNARNGHLFTDTGVIKIRNAVHKHDDSPLDPTCDCYTCRNFSRAYLHHLDKCGEMLGSMLNTIHNLRHYQRLMAGLRDAIGQGTLPAFVADFYARRGLPVPPLS

SEQ ID NO: 59696 - protein, 375 aa, Pseudomonas litoralis
  misc_feature (1)..(375): tr|A0A1H1UKJ5|A0A1H1UKJ5_9PSED Queuine tRNA-ribosyltran sferase OS=Pseudomonas litoralis OX=797277 GN=tgt PE=3 SV=1
MSHMNFELLATDGKARRGRLTFPRGVVETPAFMPVGTYGTVKGMLPRDVEDIGAQIILGNTFHLWLRPGTEVIRKHGDLHDFMQWQGPILTDSGGFQVFSLGAMRKIKEEGVYFSSPVDGAKVFMGPEESMQVQRDLGSDIVMIFDECTPYPADLDTARRSMELSLRWAQRSKAAHEGNPSALFGIVQGGMHEELRARSLDGLCEIGFDGLAIGGLSVGEPKEDMIRILDYLPPLMPPEKPRYLMGVGKPEDLVEGVRRGVDMFDCVMPTRNARNGHLFTDTGVVKIRNAVHRHDDSPLDPGCDCYTCRHFTRSYLHHLDKCGEMLGSMLNTIHNLRHYQRVMHGLRGAIQQGTLTAFVDNFYARLGQPVPPLEA

SEQ ID NO: 59697 - protein, 371 aa, Pseudomonas lundensis
  misc_feature (1)..(371): tr|A0A266NC00|A0A266NC00_9PSED Queuine tRNA-ribosyltran sferase OS=Pseudomonas lundensis OX=86185 GN=tgt PE=3 S V=1
MSFELLATDGKARRGRLTFPRGVVETPAFMPVGTYGTVKGMLPRDIEAIGAQMILGNTFHLWLRPGTEVIKKHGDLHDFMKWQGPILTDSGGFQVFSLGAMRKIKEEGVTFASPVDGAKVFMGPEESMQVQRDLGSDVVMIFDECTPYPADEDVARVSMELSLRWAQRSKNAHGDNTAALFGIVQGGMHQNLRERSLEGLNKIGFDGLAIGGLSVGEPKHEMIKVLDYLPAMMPADKPRYLMGVGKPEDLVEGVRRGVDMFDCVMPTRNARNGHLFIDTGVLKIRNAFHRHDDSPLDPTCDCYTCQNFSRAYLHHLDKCGEMLGSMLNTIHNLRHYQVLMAGLREAIQQGTLAAFVDAFYAKRGLPVPPLD

SEQ ID NO: 59698 - protein, 376 aa, Pseudomonas lundensis
  misc_feature (1)..(376): tr|A0A1D9IJD9|A0A1D9IJD9_9PSED Queuine tRNA-ribosyltran sferase OS=Pseudomonas lundensis OX=86185 GN=tgt PE=3 S V=1
MSNCRMSFELLATDGKARRGRLTFPRGVVETPAFMPVGTYGTVKGMLPRDIEAIGAQMILGNTFHLWLRPGTEVIKKHGDLHDFMKWQGPILTDSGGFQVFSLGAMRKIKEEGVTFASPVDGAKVFMGPEESMQVQRDLGSDVVMIFDECTPYPADEDVARVSMELSLRWAQRSKNAHGDNTAALFGIVQGGMHQNLRERSLEGLNKIGFDGLAIGGLSVGEPKHEMIKVLDYLPAMMPADKPRYLMGVGKPEDLVEGVRRGVDMFDCVMPTRNARNGHLFIDTGVLKIRNAFHRHDDSPLDPTCDCYTCQNFSRAYLHHLDKCGEMLGSMLNTIHNLRHYQVLMAGLREAIQQGTLAAFVDAFYAKRGLPVPPLD

SEQ ID NO: 59699 - protein, 374 aa, Pseudomonas lurida; identical to SEQ ID NO: 59578
  misc_feature (1)..(374): tr|A0A2A9DHT6|A0A2A9DHT6_9PSED Queuine tRNA-ribosyltran sferase OS=Pseudomonas lurida OX=244566 GN=tgt PE=3 SV= 1

SEQ ID NO: 59700 - protein, 371 aa, Pseudomonas lutea
  misc_feature (1)..(371): tr|A0A098T2V3|A0A098T2V3_9PSED Queuine tRNA-ribosyltran sferase OS=Pseudomonas lutea OX=243924 GN=tgt PE=3 SV=1
MSFELLATDGKARRGRLTFPRGVVETPAFMPVGTYGTVKGMLPRDIEATGAQMILGNTFHLWLRPGTEVIKGHGDLHDFMQWKGPILTDSGGFQVFSLGAMRKIKEEGVTFASPVDGAKVFMGPEESMQVQRDLGSDIVMIFDECTPYPADEDVARTSMELSLRWAKRSKVAHGESTAALFGIVQGGMHENLRMRSLEGLSELDFDGLAIGGLSVGEPKDEMIKVLDYLPGRMPADKPRYLMGVGKPEDLVEGVRRGVDMFDCVMPTRNARNGHLFIDTGVLKIRNAFHRYDESPLDPTCDCYTCKNFSRAYLHHLDKCGEMLGSMLNTIHNLRHYQLLMAGLREAIQQGTLAAFVDTFYAKRGLATPLLD

SEQ ID NO: 59701 - protein, 375 aa, Pseudomonas luteola
  misc_feature (1)..(375): tr|A0A2X2CAF7|A0A2X2CAF7_PSELU Queuine tRNA-ribosyltran sferase OS=Pseudomonas luteola OX=47886 GN=tgt PE=3 SV= 1
MSFMKFELLATEGRARRGRLSFPRGVVETPAFMPVGTYGTVKGMLPRDIEAIGAHIILGNTFHLWLRPGVEVIGRHGDLHDFMQWKGPILTDSGGFQVFSLGALRKIKEEGVYFASPVDGAKVFMGPEESMAVQRALGSDIVMIFDECTPYPADFDTAKRSMELSLRWAKRSRIAHGDSPSALFGIVQGGMHEELRLRSLEGLENIGFDGYAIGGLSVGEPKEEMIRVLDFLPPHLPADKPRYLMGVGKPEDLVEGVRRGVDMFDCVMPTRNARNGHLFIDTGVLKIRNAVHRHDDSPLDPTCDCYTCRNFSRAYLHHLDKCGEMLGSMLNTIHNLRHYQRLMSGLRDAIQQGKLADFVDSFYARRGLPTPPLAD

SEQ ID NO: 59702 - protein, 372 aa, Pseudomonas luteola
  misc_feature (1)..(372): tr|A0A3R8XSI4|A0A3R8XSI4_PSELU Queuine tRNA-ribosyltran sferase OS=Pseudomonas luteola OX=47886 GN=tgt PE=3 SV= 1
MKFELLATEGRARRGRLSFPRGVVETPAFMPVGTYGTVKGMLPRDIEAIGAHIILGNTFHLWLRPGVEVIGRHGDLHDFMQWKGPILTDSGGFQVFSLGALRKIKEEGVYFASPVDGAKVFMGPEESMAVQRALGSDIVMIFDECTPYPADFDTAKRSMELSLRWAKRSRIAHGDSPSALFGIVQGGMHEELRLRSLEGLENIGFDGYAIGGLSVGEPKEEMIRVLDFLPPHLPADKPRYLMGVGKPEDLVEGVRRGVDMFDCVMPTRNARNGHLFIDTGVLKIRNAVHRHDDSSLDPTCDCYTCRNFSRAYLHHLDKCGEMLGSMLNTIHNLRHYQRLMSGLRDAIQQGKLADFVDSFYARRGLPTPPLAD

SEQ ID NO: 59703 - protein, 374 aa, Pseudomonas mandelii
  misc_feature (1)..(374): tr|A0A4V3FYK5|A0A4V3FYK5_9PSED Queuine tRNA-ribosyltran sferase OS=Pseudomonas mandelii OX=75612 GN=tgt PE=3 SV =1
MSRMSFELLATDGKARRGRLTFPRGTVETPAFMPVGTYGTVKGMLPRDITATGAEIILGNTFHLWLRPGTEVIKKHGDLHDFMQWKGPILTDSGGFQVFSLGAMRKIKEEGVTFASPVDGAKVFMGPEESMQVQRDLGSDIVMIFDECTPYPADEDVARISMELSLRWAKRSKEAHGDNTAALFGIVQGGMHQDLRMRSLEGLDKIGFDGLAIGGLSVGEPKHEMIKVLDYLPGLMPADKPRYLMGVGKPEDLVEGVRRGVDMFDCVMPTRNARNGHLFIDTGVLKIRNAFHRHDDSPLDPTCDCYTCQNFSRAYLHHLDKCGEMLGSMLNTIHNLRHYQVLMAGLREAIQQGTLAAFVDAFYAKRGLPVPPLD

SEQ ID NO: 59704 - protein, 377 aa, Pseudomonas mandelii
  misc_feature (1)..(377): tr|A0A255WUG5|A0A255WUG5_9PSED Queuine tRNA-ribosyltran sferase OS=Pseudomonas mandelii OX=75612 GN=tgt PE=3 SV =1
MSRQSRMSFELLATDGKARRGRLTFPRGTVETPAFMPVGTYGTVKGMLPRDITATGAEIILGNTFHLWLRPGTEVIKKHGDLHDFMKWQGPILTDSGGFQVFSLGAMRKIKEEGVTFASPVDGSKVFMGPEESMQVQRDLGSDIVMIFDECTPYPADEDVARISMELSLRWAQRSKEAHGDNTAALFGIVQGGMHQDLRMRSLEGLDQIGFDGLAIGGLSVGEPKHEMIKVLDYLPGLMPADKPRYLMGVGKPEDLVEGVRRGVDMFDCVMPTRNARNGHLFIDTGVLKIRNAFHRHDDSPLDPTCDCYTCQNFSRAYLHHLDKCGEMLGSMLNTIHNLRHYQVLMAGLREAIQQGTLAAFVDAFYAKRGLPVPPLD

SEQ ID NO: 59705 - protein, 374 aa, Pseudomonas marginalis; identical to SEQ ID NO: 59578
  misc_feature (1)..(374): tr|A0A3M3WKM5|A0A3M3WKM5_PSEMA Queuine tRNA-ribosyltran sferase OS=Pseudomonas marginalis pv. marginalis OX=974 73 GN=tgt PE=3 SV=1

SEQ ID NO: 59706 - protein, 377 aa, Pseudomonas marginalis
  misc_feature (1)..(377): tr|A0A0W0LSX1|A0A0W0LSX1_PSEMA Queuine tRNA-ribosyltran sferase OS=Pseudomonas marginalis ICMP 11289 OX=1198318 GN=tgt PE=3 SV=1
MSRTCRMSFELLATDGKARRGRLTFPRGVVETPAFMPVGTYGTVKGMLPRDIEATGAQIILGNTFHLWLRPGTEVIKGHGDLHDFMQWQGPILTDSGGFQVFSLGAMRKIKEEGVTFASPVDGAKVFMGPEESMQVQRDLGSDIVMIFDECTPYPADEDVARISMELSLRWAKRSKIAHGENTAALFGIVQGGMHENLRMRSLEGLDQIGFDGLAIGGLSVGEPKHEMIKVLDYLPGQMPADKPRYLMGVGKPEDLVEGVRRGVDMFDCVMPTRNARNGHLFIDTGVLKIRNAFHRHDNSPLDPTCDCYTCKNFSRAYLHHLDKCNEMLGSMLNTIHNLRHYQLLMAGLREAIQQGTLAAFVDAFYAKRGIPTPPLG

SEQ ID NO: 59707 - protein, 380 aa, Pseudomonas marincola; identical to SEQ ID NO: 59559
  misc_feature (1)..(380): tr|A0A1I7DCF9|A0A1I7DCF9_9PSED Queuine tRNA-ribosyltran sferase OS=Pseudomonas marincola OX=437900 GN=tgt PE=3 SV=1

SEQ ID NO: 59708 - protein, 377 aa, Pseudomonas mediterranea
  misc_feature (1)..(377): tr|A0A0A4GLL8|A0A0A4GLL8_9PSED Queuine tRNA-ribosyltran sferase OS=Pseudomonas mediterranea CFBP 5447 OX=134805 8 GN=tgt PE=3 SV=1
MSRTCRMSFELLATDGKARRGRLTFPRGTVETPAFMPVGTYGTVKGMLPRDIEAIGAEIILGNTFHLWLRPGMEVIKAHGDLHDFMQWKGPILTDSGGFQVFSLGAMRKIKEEGVTFASPVDGSKVFMGPEESMQVQRDLGSDIVMIFDECTPYPADEDVARVSMELSLRWAQRSKNAHGDNTAALFGIVQGGMHQDLRMRSLEGLDKIGFDGLAIGGLSVGEPKHEMIKVLDYLPGQMPADKPRYLMGVGKPEDLVEGVRRGVDMFDCVMPTRNARNGHLFIDTGVLKIRNAFHRHDDSPLDPTCDCYTCKNFSRAYLHHLDKCGEMLGSMLNTIHNLRHYQVLMAGLREAIQQGTLAAFVEAFYAKRGLPVPPLD

SEQ ID NO: 59709 - protein, 377 aa, Pseudomonas meliae
  misc_feature (1)..(377): tr|A0A0P9UGL8|A0A0P9UGL8_9PSED Queuine tRNA-ribosyltran sferase OS=Pseudomonas meliae OX=86176 GN=tgt PE=3 SV=1
MSRTCRMSFELLATDGKARRGRLTFPRGVVETPAFMPVGTYGTVKGMLPRDIEATGAQMILGNTFHLWLRPGTEVIKGHGDLHDFMQWKGPILTDSGGFQVFSLGAMRKIKEEGVTFASPVDGAKVFMGPEESMQVQRDLGSDVVMIFDECTPYPADEDVARVSMELSLRWAKRSKVAHGENTAALFGIVQGGMHENLRKRSLEGLDEIGFDGLAIGGLSVGEPKHEMIKVLDYLPGLMPADKPRYLMGVGKPEDLVEGVRRGVDMFDCVMPTRNARNGHLFTDTGVLKIRNAFHRHDNSPLDPTCDCYTCKNFSRAYLHHLDKCGEMLGSMLNTIHNLRHYQLLMAGLREAIQQGTLTAFVDAFYAKRGLPTPPLG

SEQ ID NO: 59710 - protein, 377 aa, Pseudomonas mendocina
  misc_feature (1)..(377): tr|A4XY52|A4XY52_PSEMY Queuine tRNA-ribosyltransferase OS=Pseudomonas mendocina (strain ymp) OX=399739 GN=tgt PE=3 SV=1
MSRTCRMSFELLATDGKARRGRLTFPRGVVETPAFMPVGTYGTVKGMLPRDVEDIGAQIILGNTFHLWLRPGMEVIKKHGDLHDFMQWQGPILTDSGGFQVFSLGAMRKIKEEGVYFASPVDGAKVFMGPEESMQVQRDLGSDIVMIFDECTPYPAEFDVAKRSMELSLRWAKRSKTAHGESTAALFGIVQGGMHEELRMRSLEGLCEIGFDGLAIGGLSVGEPKEEMIRVLDFLPPHMPADKPRYLMGVGKPEDLVEGVRRGVDMFDCVMPTRNARNGHLFVDTGVVKIRNAVHKHDDSPLDPTCDCYTCKHFSRAYLHHLDKCGEMLGSMLNTIHNLRHYQRVMAGLREAIGQGTLAAFVETFYAKRGLPVPPLD

SEQ ID NO: 59711 - protein, 371 aa, Pseudomonas mendocina
  misc_feature (1)..(371): tr|A0A291KCQ1|A0A291KCQ1_PSEME Queuine tRNA-ribosyltran sferase OS=Pseudomonas mendocina OX=300 GN=tgt PE=3 SV= 1
MSFELLATDGKARRGRLTFPRGVVETPAFMPVGTYGTVKGMLPRDVEDIGAQIILGNTFHLWLRPGMEVIKKHGDLHDFMQWQGPILTDSGGFQVFSLGAMRKIKEEGVYFASPVDGAKVFMGPEESMQVQRDLGSDIVMIFDECTPYPAEFDVAKRSMELSLRWAKRSKTAHGESTAALFGIVQGGMHEELRMRSLEGLCEIGFDGLAIGGLSVGEPKEEMIRVLDFLPPHMPADKPRYLMGVGKPEDLVEGVRRGVDMFDCVMPTRNARNGHLFVDTGVVKIRNAVHKHDDSPLDPTCDCYTCKHFSRAYLHHLDKCGEMLGSMLNTIHNLRHYQRVMAGLREAIGQGTLAAFVETFYAKRGLPVPPLD

SEQ ID NO: 59712 - protein, 398 aa, [Pseudomonas] mesoacidophila
  misc_feature (1)..(398): tr|A0A2A4F9C5|A0A2A4F9C5_9BURK Queuine tRNA-ribosyltran sferase OS=[Pseudomonas] mesoacidophila OX=265293 GN=tg t PE=3 SV=1
MTEGPSHDHDMHAGHAHARPDNGLKFDLLTTDGHARRGRVTLNHGVVETPIFMPVGTYGTVKAIQPRELHEIKAQIILGNTFHLWLRPGLDTIDAHGGLHGFMGWNKPILTDSGGFQVFSLGDLRKITEDGVTFASPINGDKLFLSPEVSMQIQKVLNSDIVMQFDECTPYATNGVPTTHKEAADSMRMSLRWAKRSLDEFNRLGNPNALFGIVQGGMFEDLRDESLAGLAELDFHGLAIGGLSVGEPKEDMMRVLRHVGPKLPAHKPHYLMGVGTPEDLVDGVANGIDMFDCVMPTRNARNGWLFTRFGDVKIRNATHKNSLKPLDPSCACYTCQNFSRGYLHHLHRVGEILGAQLNTIHNLHYYLQLMSEIREAIETHTFDAFRQRFAEDRARGVD

SEQ ID NO: 59713 - protein, 377 aa, Pseudomonas migulae
  misc_feature (1)..(377): tr|A0A1H5G356|A0A1H5G356_9PSED Queuine tRNA-ribosyltran sferase OS=Pseudomonas migulae OX=78543 GN=tgt PE=3 SV= 1
MSRQSRMSFELLATDGKARRGRLTFPRGTVETPAFMPVGTYGTVKGMLPRDIVATGAEIILGNTFHLWLRPGTEVIKKHGDLHDFMQWKGPILTDSGGFQVFSLGAMRKIKEEGVTFASPVDGAKVFMGPEESMQVQRDLGSDIVMIFDECTPYPADEDVARVSMELSLRWAKRSKEAHGDNTAALFGIVQGGMHQDLRMRSLEGLDQIGFDGLAIGGLSVGEPKHEMIKVLDYLPGQMPADKPRYLMGVGKPEDLVEGVRRGVDMFDCVMPTRNARNGHLFIDTGVLKIRNAFHRHDDSPLDPTCDCYTCQNFSRAYLHHLDKCGEMLGSMLNTIHNLRHYQVLMAGLREAIQQGTLAAFVDAFYAKRGLPVPPLD

SEQ ID NO: 59714 - protein, 377 aa, Pseudomonas mohnii
  misc_feature (1)..(377): tr|A0A1H4Y4L7|A0A1H4Y4L7_9PSED Queuine tRNA-ribosyltran sferase OS=Pseudomonas mohnii OX=395600 GN=tgt PE=3 SV= 1
MSRTCRMSFELLATDGKARRGRLTFPRGTVETPAFMPVGTYGTVKGMLPRDIEAIGAEIILGNTFHLWLRPGTEVIKKHGDLHDFMQWKGPILTDSGGFQVFSLGAMRKIKEEGVTFASPVDGAKVFMGPEESMQVQRDLGSDIVMIFDECTPYPADEDVARISMELSLRWAKRSKEAHGDNTAALFGIVQGGMHQDLRMRSLEGLDKIGFDGLAIGGLSVGEPKHEMIKVLDYLPGMMPADKPRYLMGVGKPEDLVEGVRRGVDMFDCVMPTRNARNGHLFIDTGVLKIRNAFHRHDDSPLDPTCDCYTCQNFSRAYLHHLDKCGEMLGSMLNTIHNLRHYQVLMAGLREAIQQGTLAAFVDAFYAKRGLPVPPLD

SEQ ID NO: 59715 - protein, 371 aa, Pseudomonas monteilii
  misc_feature (1)..(371): tr|V9UWD3|V9UWD3_9PSED Queuine tRNA-ribosyltransferase OS=Pseudomonas monteilii SB3101 OX=1435058 GN=tgt PE=3 SV=1
MSFELLATDGKARRGRITFPRGTVETPAFMPVGTYGTVKGMLPRDIEAIGAEMILGNTFHLWLRPGTEVIKKHNGLHDFMQWKGPILTDSGGFQVFSLGAMRKIKEEGVTFASPVDGAKVFMGPEESMQVQRDLGSDVVMIFDECTPYPAEHDVARASMELSLRWAQRSKNAHADNTAALFGIVQGGMYQDMRMRSLEGLENIGFDGLAIGGLSVGEPKHEMIKVLDYLPGQMPADKPRYLMGVGKPEDLVEGVRRGVDMFDCVMPTRNARNGHLFVDTGVIKIRNAFHRHDDSPLDPTCDCYTCTNFSRAYLHHLDKCGEMLSSMLNTIHNLRHYQRLMAGLREAIQQGKLAAFVDAFYAKRGLPVPPLD

SEQ ID NO: 59716 - protein, 377 aa, Pseudomonas monteilii
  misc_feature (1)..(377): tr|A0A0X8BU88|A0A0X8BU88_9PSED Queuine tRNA-ribosyltran sferase OS=Pseudomonas monteilii OX=76759 GN=tgt PE=3 S V=1
MSRTCRMSFELLATDGKARRGRLTFPRGTVETPAFMPVGTYGTVKGMLPRDIEAIGAEIILGNTFHLWLRPGTEVIKKHGGLHDFMQWKGPILTDSGGFQVFSLGAMRKIKEEGVTFASPVDGSKVFMGPEESMQVQRDLDSDIVMIFDECTPYPAEPDVARTSMELSLRWAQRSKNAHGDNTAALFGIVQGGMHEDLRMRSLEGLDKIGFDGLAIGGLSVGEPKHEMIKVLDYLPGQMPADKPRYLMGVGKPEDLVEGVRRGVDMFDCVMPTRNARNGHLFIDTGVIKIRNAFHRHDDSPLDPTCDCYTCTHFSRAYLHHLDKCGEMLSSMLNTIHNLRHYQRLMAGLREAIQQGKLAAFVDAFYAKRGLPVPPLA

SEQ ID NO: 59717 - protein, 377 aa, Pseudomonas moorei; identical to SEQ ID NO: 59714
  misc_feature (1)..(377): tr|A0A4Q7H6C6|A0A4Q7H6C6_9PSED Queuine tRNA-ribosyltran sferase OS=Pseudomonas moorei OX=395599 GN=tgt PE=3 SV= 1

SEQ ID NO: 59718 - protein, 377 aa, Pseudomonas moorei
  misc_feature (1)..(377): tr|A0A1H0Y3J8|A0A1H0Y3J8_9PSED Queuine tRNA-ribosyltran sferase OS=Pseudomonas moorei OX=395599 GN=tgt PE=3 SV= 1
MSRTCRMSFELLATDGKARRGRLTFPRGTVETPAFMPVGTYGTVKGMLPRDIEAIGAEIILGNTFHLWLRPGTEVIKKHGDLHDFMQWKGPILTDSGGFQVFSLGAMRKIKEEGVTFASPVDGAKVFMGPEESMQVQRDLGSDIVMIFDECTPYPADEDVARVSMELSLRWAKRSKEAHGDNTAALFGIVQGGMHQDLRMRSLEGLDKIGFDGLAIGGLSVGEPKHEMIKVLDYLPGMMPADKPRYLMGVGKPEDLVEGVRRGVDMFDCVMPTRNARNGHLFIDTGVLKIRNAFHRHDDSPLDPTCDCYTCQNFSRAYLHHLDKCGEMLGSMLNTIHNLRHYQVLMAGLREAIQQGTLAAFVDAFYAKRGLPVPPLD

SEQ ID NO: 59719 - protein, 377 aa, Pseudomonas moraviensis
  misc_feature (1)..(377): tr|V8R211|V8R211_9PSED Queuine tRNA-ribosyltransferase OS=Pseudomonas moraviensis R28-S OX=1395516 GN=tgt PE=3 SV=1
MSRECRMSFELLATDGKARRGRLTFPRGTVETPAFMPVGTYGTVKGMLPRDIVATGAEIILGNTFHLWLRPGTQVIKEHGDLHDFMQWKGPILTDSGGFQVFSLGAMRKIKEEGVTFASPVDGAKVFMGPEESMQVQRDLGSDIVMIFDECTPYPADEDVARVSMELSLRWAQRSKNAHGDNTAALFGIVQGGMHENLRMRSLEGLDKIGFDGLAIGGLSVGEPKHEMIKVLDYLPGQMPADKPRYLMGVGKPEDLVEGVRRGVDMFDCVMPTRNARNGHLFIDTGVLKIRNAFHRHDESPLDPTCDCYTCQNFSRAYLHHLDKCGEMLGSMLNTIHNLRHYQVLMAGLREAIQQGTLAAFVDAFYAKRGLPVPPLD

SEQ ID NO: 59720 - protein, 377 aa, Pseudomonas moraviensis; identical to SEQ ID NO: 59719
  misc_feature (1)..(377): tr|A0A1H2JSH7|A0A1H2JSH7_9PSED Queuine tRNA-ribosyltran sferase OS=Pseudomonas moraviensis OX=321662 GN=tgt PE= 3 SV=1

SEQ ID NO: 59721 - protein, 377 aa, Pseudomonas mosselii
  misc_feature (1)..(377): tr|A0A1X1NZL5|A0A1X1NZL5_9PSED Queuine tRNA-ribosyltran sferase OS=Pseudomonas mosselii OX=78327 GN=tgt PE=3 SV =1
MSRTCRMSFELLATDGKARRGRLTFPRGTVETPAFMPVGTYGTVKGMLPRDIEAIGAEIILGNTFHLWLRPGTEVIKKHNGLHDFMQWKGPILTDSGGFQVFSLGAMRKIKEEGVTFASPVDGSKVFMGPEESMQVQRDLGSDIVMIFDECTPYPAEHDVARTSMELSLRWAQRSKNAHGDNTAALFGIVQGGMYQDLRMRSLEALVNLDFDGLAIGGLSVGEPKHEMIKVLDYLPAQMPADKPRYLMGVGKPEDLVEGVRRGVDMFDCVMPTRNARNGHLFVDTGVIKIRNAFHRHDESPLDPTCDCYTCTNFSRAYLHHLDKCGEMLSSMLNTIHNLRHYQRLMAGLREAIQQGKLAAFVDAFYAKRGLPVPPLD

SEQ ID NO: 59722 - protein, 377 aa, Pseudomonas mosselii
  misc_feature (1)..(377): tr|A0A290GZC0|A0A290GZC0_9PSED Queuine tRNA-ribosyltran sferase OS=Pseudomonas mosselii OX=78327 GN=tgt PE=3 SV =1
MSRTCRMSFELLATDGKARRGRLTFPRGTVETPAFMPVGTYGTVKGMLPRDIEAIGAEIILGNTFHLWLRPGTEVIKKHNGLHDFMQWKGPILTDSGGFQVFSLGAMRKIKEEGVTFASPVDGSKVFMGPEESMQVQRDLGSDIVMIFDECTPYPAEHDVARTSMELSLRWAQRSKNAHGDNTAALFGIVQGGMYQDLRMRSLEALVNIDFDGLAIGGLSVGEPKHEMIKVLDYLPAQMPADKPRYLMGVGKPEDLVEGVRRGVDMFDCVMPTRNARNGHLFVDTGVIKIRNAFHRHDESPLDPTCDCYTCTNFSRAYLHHLDKCGEMLSSMLNTIHNLRHYQRLMAGLREAIQQGKLAAFVDAFYAKRGLPVPPLD

SEQ ID NO: 59723 - protein, 374 aa, Pseudomonas mucidolens
  misc_feature (1)..(374): tr|A0A1H2NEN8|A0A1H2NEN8_9PSED Queuine tRNA-ribosyltran sferase OS=Pseudomonas mucidolens OX=46679 GN=tgt PE=3 SV=1
MSRMSFELLATDGKARRGRLTFPRGTVETPAFMPVGTYGTVKGMLPRDIVATGAEMILGNTFHLWLRPGTEVIKKHGDLHDFMKWQGPILTDSGGFQVFSLGAMRKIKEEGVTFASPVDGSKVFMGPEESMQVQRDLGSDIVMIFDECTPYPADEEVARVSMELSLRWAQRSKNAHGDNTAALFGIVQGGMHENLRKRSLEGLDKIGFDGLAIGGLSVGEPKHEMIKVLDYLPGLMPADKPRYLMGVGKPEDLVEGVRRGVDMFDCVMPTRNARNGHLFIDTGVLKIRNAFHRHDDSPLDPTCDCYTCQNFSRAYLHHLDKCGEMLGSMLNTIHNLRHYQVLMAGLREAIQQGTLAAFVDAFYAKRGLPVPPLD

SEQ ID NO: 59724 - protein, 374 aa, Pseudomonas nabeulensis; identical to SEQ ID NO: 59578
  misc_feature (1)..(374): tr|A0A4Z0AW70|A0A4Z0AW70_9PSED Queuine tRNA-ribosyltran sferase OS=Pseudomonas nabeulensis OX=2293833 GN=tgt PE =3 SV=1

SEQ ID NO: 59725 - protein, 375 aa, Pseudomonas nitroreducens
  misc_feature (1)..(375): tr|A0A239C6K5|A0A239C6K5_9PSED Queuine tRNA-ribosyltran sferase OS=Pseudomonas nitroreducens OX=46680 GN=tgt PE =3 SV=1
MSFMKFELLATEGKARRGRLTFPRGVVETPAFMPVGTYGTVKGMLPHDIEGIGAQIILGNTFHLWLRPGTEVIQKHGDLHDFMQWKGPILTDSGGFQVFSLGALRKIKEEGVYFASPVDGAKVFMGPEESMAVQRALGSDIVMIFDECTPYPAEFDVAKRSMELSLRWAKRSKAAHGDSPSALFGIVQGGMHEELRMRSLEGLQEIGFDGLAIGGLSVGEPKEEMIRVLDFLPRHMPADKPRYLMGVGKPEDLVEGVRRGVDMFDCVMPTRNARNGHLFVDTGVIKIRNAVHKHDESPLDPTCDCYTCKHFSRAYLYHLDKCGEMLGSMLNTIHNLRHYQRLMAGLREAIQQGTLANFVDAFYAKRGLPVPPLAD

SEQ ID NO: 59726 - protein, 372 aa, Pseudomonas nitroreducens
  misc_feature (1)..(372): tr|A0A2D0ADJ8|A0A2D0ADJ8_9PSED Queuine tRNA-ribosyltran sferase OS=Pseudomonas nitroreducens OX=46680 GN=tgt PE =3 SV=1
MTFELLATEGRARRGRLTFPRGVVETPAFMPVGTYGTVKGMLPHDIEGIGAQIILGNTFHLWLRPGTEVIQKHGDLHDFMQWKGPILTDSGGFQVFSLGALRKIKEEGVYFASPVDGAKVFMGPEESMAVQRALGSDIVMIFDECTPYPAEFDVAKRSMELSLRWAKRSKIAHGDSPSALFGIVQGGMHEELRMRSLEGLQEIGFDGLAIGGLSVGEPKEEMIRVLDFLPQQMPADKPRYLMGVGKPEDLVEGVRRGVDMFDCVMPTRNARNGHLFVDTGVIKIRNAVHKHDESPLDPTCDCYTCKHFSRAYLYHLDKCGEMLGSMLNTIHNLRHYQRLMAGLREAIQQGTLANFVDAFYAKRGLPVPPLAD

SEQ ID NO: 59727 - protein, 376 aa, Pseudomonas oceani
  misc_feature (1)..(376): tr|A0A2P4ETF4|A0A2P4ETF4_9PSED Queuine tRNA-ribosyltran sferase OS=Pseudomonas oceani OX=1708783 GN=tgt PE=3 SV =1
MSHMFFELLATDGKARRGRLTFPRGVVETPAFMPVGTYGTVKGMLPRDIEAIGAQIILGNTFHLWLRPGTEVISKHGDLHDFMQWQGPILTDSGGFQVFSLGAMRKIKEEGVYFSSPVDGAKVFMGPEESMQVQRALGSDIVMIFDECTPYPADLDTARRSMELSLRWAKRSKQAHGDNPAALFGIIQGGMHEELRLRSLEGLSEIGFDGLAIGGLSVGEPKEEMIRVLDFLPGHMPPEKPRYLMGVGKPEDLVEGVRRGVDMFDCVMPSRNARNGHLFTETGVIKIRNAVHRHDESPLDPACDCYTCQHFSRAYLHHLDKCGEMLGSMLNTIHNLRHYQRLMAGLRGAIQQGTLTAFVENFYAKLDRPVPPLEAS

SEQ ID NO: 59728 - protein, 377 aa, Pseudomonas oleovorans
  misc_feature (1)..(377): tr|A0A379JWD4|A0A379JWD4_PSEOL Queuine tRNA-ribosyltran sferase OS=Pseudomonas oleovorans OX=301 GN=tgt PE=3 SV =1
MSRTCRMSFELLATDGKARRGRLTFPRGVVETPAFMPVGTYGTVKGMLPRDIEAIGAQIILGNTFHLWLRPGMEVIKKHGDLHDFMQWQGPILTDSGGFQVFSLGAMRKIKEEGVYFASPVDGTKVFMGPEESMQVQRDLGSDIVMIFDECTPYPAEFDVAKRSMELSLRWAKRSKTAHGESSAALFGIVQGGMHEELRMRSLEGLCEIGFDGLAIGGLSVGEPKEEMIRVLDFLPPHMPADKPRYLMGVGKPEDLVEGVRRGVDMFDCVMPTRNARNGHLFVDTGVVKIRNAVHKHDDSPLDPTCDCYTCKHFSRAYLHHLDKCGEMLGSMLNTIHNLRHYQRVMAGLREAIGQGTLAAFVETFYAKRGLPVPPLD

SEQ ID NO: 59729 - protein, 371 aa, Pseudomonas oleovorans
  misc_feature (1)..(371): tr|A0A2W5X9R7|A0A2W5X9R7_PSEOL Queuine tRNA-ribosyltran sferase OS=Pseudomonas oleovorans OX=301 GN=tgt PE=3 SV =1
MSFELLATDGKARRGRLTFPRGVVETPAFMPVGTYGTVKGMLPRDIEAIGAQIILGNTFHLWLRPGMEVIKKHGDLHDFMQWQGPILTDSGGFQVFSLGAMRKIKEEGVYFASPVDGAKVFMGPEESMQVQRDLGSDIVMIFDECTPYPAEFDVAKRSMELSLRWAKRSKTAHGESSAALFGIVQGGMHEELRIRSLEGLCEIGFDGLAIGGLSVGEPKEEMIRVLDFLPPHMPADKPRYLMGVGKPEDLVEGVRRGVDMFDCVMPTRNARNGHLFVDTGVVKIRNAVHKHDDSPLDPSCDCYTCKHFSRAYLHHLDKCGEMLGSMLNTIHNLRHYQRVMAGLREAIGQGTLAAFVETFYAKRGLPVPPLD

SEQ ID NO: 59730 - protein, 374 aa, Pseudomonas orientalis; identical to SEQ ID NO: 59608
  misc_feature (1)..(374): tr|A0A3G7WPM0|A0A3G7WPM0_9PSED Queuine tRNA-ribosyltran sferase OS=Pseudomonas orientalis OX=76758 GN=tgt PE=3 SV=1

SEQ ID NO: 59731 - protein, 374 aa, Pseudomonas orientalis; identical to SEQ ID NO: 59645
  misc_feature (1)..(374): tr|A0A2L0S182|A0A2L0S182_9PSED Queuine tRNA-ribosyltran sferase OS=Pseudomonas orientalis OX=76758 GN=tgt PE=3 SV=1

SEQ ID NO: 59732 - protein, 374 aa, Pseudomonas oryzae
  misc_feature (1)..(374): tr|A0A1H1L788|A0A1H1L788_9PSED Queuine tRNA-ribosyltran sferase OS=Pseudomonas oryzae OX=1392877 GN=tgt PE=3 SV =1
MSHMSFELLVTDGKARRGRLTFPRGVVETPAFMPVGTYGTVKGMLPRDVEAIGAQIILGNTFHLWLRPGTEVIKKHGDLHDFMQWHGPILTDSGGFQVFSLGAMRKIKEEGVYFSSPVDGAKVFMGPEESMQVQRDLGSDIVMIFDECTPYPADVDTARRSMELSLRWAKRSKIAHEGNPAALFGIVQGGMHEDLRLRSLEGLLEIGFDGLAIGGLSVGEPKEDMIRILDFLPPQLPADKPRYLMGVGKPEDLVEGVRRGVDMFDCVMPTRNARNGHLFTETGVIKIRNAVHKHDDAPLDPACDCYTCRNFSRAYLHHLDKCGEMLGSMLNTIHNLRHYQRLMAGLRGAIAQGTLAAFVADFYARRGLPVPPLD

SEQ ID NO: 59733 - protein, 372 aa, Pseudomonas oryzihabitans
  misc_feature (1)..(372): tr|A0A0U4VUH6|A0A0U4VUH6_9PSED Queuine tRNA-ribosyltran sferase OS=Pseudomonas oryzihabitans OX=47885 GN=tgt PE =3 SV=1
MKFELLATEGKARRGRLTFPRGVVETPAFMPVGTYGTVKGMFPDSVADIGAQIILGNTFHLWLRPGTEVIQRHGDLHDFMQWQGPILTDSGGFQVFSLGALRKIKEEGVYFASPVDGAKVFMGPEESMAVQRALGSDIVMIFDECTPYPADFDTARRSMELSLRWAKRSREAHGDNPSALFGIVQGGMHEELRLRSLDGLEQIGFDGYAIGGLSVGEPKEEMIRVLDFLPPHLPADKPRYLMGVGKPEDLVEGVRRGVDMFDCVMPTRNARNGHLFIDTGVLKLRNAVHRHDETSLDPACDCYTCKHFSRAYLHHLDKCGEMLGSMLNTIHNLRYYQRVMAGLRQAIQEGKLADFVDAFYARRGLPTPPLDS

SEQ ID NO: 59734 - protein, 372 aa, Pseudomonas oryzihabitans
  misc_feature (1)..(372): tr|A0A178LFH0|A0A178LFH0_9PSED Queuine tRNA-ribosyltran sferase OS=Pseudomonas oryzihabitans OX=47885 GN=tgt PE =3 SV=1
MNFELLATEGKARRGRLTFPRGVVETPAFMPVGTYGTVKGMLPDSVADIGAQIILGNTFHLWLRPGTEVIQRHGDLHDFMQWQGPILTDSGGFQVFSLGALRKIKEEGVYFASPVDGAKVFMGPEESMAVQRALGSDIVMIFDECTPYPADFDTARRSMELSLRWAKRSREAHGDNPSALFGIVQGGMHEELRLRSLEGLEGIGFDGYAIGGLSVGEPKEEMIRVLDFLPPHLPADKPRYLMGVGKPEDLVEGVRRGVDMFDCVMPTRNARNGHLFIDTGVLKLRNAVHRHDETPLDPTCDCYTCKHFSRAYLHHLDKCGEMLGSMLNTIHNLRYYQRVMAGLRQAIQEGKLADFVDAFYARRGLPTPPLDR

SEQ ID NO: 59735 - protein, 377 aa, Pseudomonas otitidis
  misc_feature (1)..(377): tr|A0A1I0UG76|A0A1I0UG76_9PSED Queuine tRNA-ribosyltran sferase OS=Pseudomonas otitidis OX=319939 GN=tgt PE=3 S V=1
MTRTCRMSFELLATEGKARRGRLTFPRGVVETPAFMPVGTYGTVKGMLPRDIEGIGAQIILGNTFHLWLRPGTEVIKRHGDLHDFMQWQGPILTDSGGFQVFSLGAMRKIKEEGVTFASPVDGAKVFMGPEESMQVQRDLGSDIVMIFDECTPYPADFDTAKRSMELSLRWAKRSKAAHGENTAALFGIVQGGMHEELRLRSLEGLLEIGFDGLAIGGLSVGEPKEEMIRVLDFLPPHLPADKPRYLMGVGKPEDLVEGVRRGVDMFDCVMPTRNARNGHLFIDTGVLKIRNAVHRHDDSPLEPGCDCYTCKHFSRAYLHHLDKCGEMLGSMLNTIHNLRHYQRLMAGLREAIQQGKLADFVDAFYARRGLPTPPLD

SEQ ID NO: 59736 - protein, 375 aa, Pseudomonas pachastrellae; identical to SEQ ID NO: 59563
  misc_feature (1)..(375): tr|A0A1S8DG82|A0A1S8DG82_9PSED Queuine tRNA-ribosyltran sferase OS=Pseudomonas pachastrellae OX=254161 GN=tgt P E=3 SV=1

SEQ ID NO: 59737 - protein, 374 aa, Pseudomonas palleroniana
  misc_feature (1)..(374): tr|A0A2L1JAU6|A0A2L1JAU6_9PSED Queuine tRNA-ribosyltran sferase OS=Pseudomonas palleroniana OX=191390 GN=tgt PE =3 SV=1
MSRMSFELLATDGKARRGRLTFPRGTVETPAFMPVGTYGTVKGMLPRDIVATGAEIILGNTFHLWLRPGTEVIKKHGDLHDFMKWQGPILTDSGGFQVFSLGAMRKIKEEGVTFASPVDGSKVFMGPEESMQVQRDLGSDIVMIFDECTPYPADEDVARVSMELSLRWAQRSKNAHGDNTAALFGIVQGGMHENLRKRSLEGLDKIGFDGLAIGGLSVGEPKHEMIKVLDYLPGLMPADKPRYLMGVGKPEDLVEGVRRGVDMFDCVMPTRNARNGHLFIDTGVLKIRNAFHRHDDSPLDPTCDCYTCQNFSRAYLHHLDKCGEMLGSMLNTIHNLRHYQVLMAGLREAIQQGTLAAFVDAFYAKRGLPVPPLD

SEQ ID NO: 59738 - protein, 374 aa, Pseudomonas palleroniana
  misc_feature (1)..(374): tr|A0A1H5M4L2|A0A1H5M4L2_9PSED Queuine tRNA-ribosyltran sferase OS=Pseudomonas palleroniana OX=191390 GN=tgt PE =3 SV=1
MSRMSFELLATDGKARRGRLTFPLGTVETPAFMPVGTYGTVKGMLPRDIVATGAEIILGNTFHLWLRPGTEVIKKHGDLHDFMKWQGPILTDSGGFQVFSLGAMRKIKEEGVTFASPVDGSKVFMGPEESMQVQRDLGSDIVMIFDECTPYPADEDVARVSMELSLRWAQRSKNAHGDNTAALFGIVQGGMHENLRKRSLEGLDKIGFDGLAIGGLSVGEPKHEMIKVLDYLPGLMPTDKPRYLMGVGKPEDLVEGVRRGVDMFDCVMPTRNARNGHLFIDTGVLKIRNAFHRHDDSPLDPTCDCYTCQNFSRAYLHHLDKCGEMLGSMLNTIHNLRHYQVLMAGLREAIQQGTLAAFVDAFYAKRGLPVPPLD

SEQ ID NO: 59739 - protein, 374 aa, Pseudomonas panacis; identical to SEQ ID NO: 59637
  misc_feature (1)..(374): tr|A0A1H4IKX7|A0A1H4IKX7_PSEPA Queuine tRNA-ribosyltran sferase OS=Pseudomonas panacis OX=307251 GN=tgt PE=3 SV =1

SEQ ID NO: 59740 - protein, 375 aa, Pseudomonas panipatensis
  misc_feature (1)..(375): tr|A0A1G8DVW2|A0A1G8DVW2_9PSED Queuine tRNA-ribosyltran sferase OS=Pseudomonas panipatensis OX=428992 GN=tgt PE =3 SV=1
MSFMKFELLATDGKARRGRLSFPRGVVETPAFMPVGTYGTVKGMLPRDIEGIGAQIILGNTFHLWLRPGTEVIQKHGDLHDFMQWKGPILTDSGGFQVFSLGALRKIKEEGVYFASPVDGAKVFMGPEESMAVQRALGSDIVMIFDECTPYPAEFDVAKRSMELSLRWAKRSKIAHGDSPSALFGIVQGGMHEELRLRSLEGLQEIGFDGLAIGGLSVGEPKEEMIRVLDFLPPHMPADKPRYLMGVGKPEDLVEGVRRGVDMFDCVMPTRNARNGHLFVDSGVIKIRNAVHKHDESPLDPTCDCYTCKNFSRAYLYHLDKCGEMLGSMLNTIHNLRHYQRLMAGLREAIQQGTLAAFVDAFYARRGLPTPPLGD

SEQ ID NO: 59741 - protein, 377 aa, Pseudomonas parafulva
  misc_feature (1)..(377): tr|A0A497UEV5|A0A497UEV5_9PSED Queuine tRNA-ribosyltran sferase OS=Pseudomonas parafulva OX=157782 GN=tgt PE=3 SV=1
MSRECRMSFELLAIDGKARRGRLTFPRGTVETPAFMPVGTYGTVKGMLPRDIVATGAEIILGNTFHLWLRPGTEVIKEHGDLHDFMQWKGPILTDSGGFQVFSLGAMRKIKEEGVTFASPVDGSKVFMGPEESMQVQRDLGSDIVMIFDECTPYPADEDVARVSMELSLRWAQRSKNAHGDNTAALFGIVQGGMHQDLRMRSLEGLDKIGFDGLAIGGLSVGEPKHEMIKVLDYLPGMMPADKPRYLMGVGKPEDLVEGVRRGVDMFDCVMPTRNARNGHLFIDTGVLKIRNAFHRHDDSPLDPTCDCYTCQNFSRAYLHHLDKCGEMLGSMLNTIHNLRHYQVLMAGLREAIQQGTLAAFVDAFYAKRGLPVPPLD

SEQ ID NO: 59742 - protein, 377 aa, Pseudomonas parafulva
  misc_feature (1)..(377): tr|A0A0A7JL59|A0A0A7JL59_9PSED Queuine tRNA-ribosyltran sferase OS=Pseudomonas parafulva OX=157782 GN=tgt PE=3 SV=1
MSRTCRMSFELLATDGKARRGRLTFPRGTVETPAFMPVGTYGTVKGMLPRDIEAIGAEIILGNTFHLWLRPGTEVIKKHNGLHDFMQWKGPILTDSGGFQVFSLGAMRKIKEEGVTFASPVDGSKVFMGPEESMQVQRDLGSDIVMIFDECTPYPAEHDVARTSMELSLRWAQRSKNAHGDNTAALFGIVQGGMYQDLRMRSLEALVNIDFDGLAIGGLSVGEPKHEMIKVLDYLPAQMPADKPRYLMGVGKPEDLVEGVRRGVDMFDCVMPTRNARNGHLFVDTGVIKIRNAFHRHDDSPLDPTCDCYTCSNFSRAYLHHLDKCGEMLSSMLNTIHNLRHYQRLMAGLREAIQQGKLAAFVDAFYAKRGLPVPPLD

SEQ ID NO: 59743 - protein, 374 aa, Pseudomonas paralactis; identical to SEQ ID NO: 59587
  misc_feature (1)..(374): tr|A0A0R3AHH9|A0A0R3AHH9_9PSED Queuine tRNA-ribosyltran sferase OS=Pseudomonas paralactis OX=1615673 GN=tgt PE= 3 SV=1

SEQ ID NO: 59744 - protein, 372 aa, Pseudomonas pelagia
  misc_feature (1)..(372): tr|A0A2A4AZ14|A0A2A4AZ14_9PSED Queuine tRNA-ribosyltran sferase OS=Pseudomonas pelagia OX=553151 GN=tgt PE=3 SV =1
MSFELLATDGKARRGRLTFPRGVVETPAFMPVGTYGTVKGMLPRDVEAIGAQIVLGNTFHLWLRPGTEVIKAHGDLHDFMQWQGPILTDSGGFQVFSLGAMRKIKEEGVYFSSPVDGAKVFMGPEESMQVQRDLGSDIVMIFDECTPYPADEDTARKSMELSLRWAKRSKDAHGDNPSALFGIVQGGMHENLRLRSLEGLNEIGFDGLAIGGLSVGEPKEEMIKVLDYLPGHMPADKPRYLMGVGKPQDLVEGVRRGVDMFDCVMPTRNARNGYLFVDSGVIKIRNAVHRHDTSTLDPTCDCYTCLNFSRAYLHHLDKCDEMLGSMLNTIHNLRYYQRVMAGLRGAIQTGTLSAFVDDFYARIGLPVPELEV

SEQ ID NO: 59745 - protein, 377 aa, Pseudomonas peli
  misc_feature (1)..(377): tr|A0A1G4Q168|A0A1G4Q168_9PSED Queuine tRNA-ribosyltran sferase OS=Pseudomonas peli OX=592361 GN=tgt PE=3 SV=1
MTRTCRMSFELLATEGKARRGRLTFPRGVVETPAFMPVGTYGTVKGMLPRDIEAIGAQIILGNTFHLWLRPGTEVIKKHGDLHDFMQWQGPILTDSGGFQVFSLGAMRKIKEEGVYFASPVDGAKVFMGPEESMQVQRDLGSDIVMIFDECTPYPAAFDVAKRSMELSLRWAKRSKEAHGDSTSALFGIVQGGMHEELRKVSLDGLEQIGFDGYAIGGLSVGEPKDEMIKVLDYLPPQLPADKPRYLMGVGKPEDLVEGVRRGVDMFDCVMPTRNARNGHLFVDTGVLKIRNAFHKHDDSPLDPTCDCYTCKHFSRAYLHHLDKCGEMLGSMLNTIHNLRHYQVLMAGLREAIQQGTLAAFVDAFYAKRGLPTPPLD

SEQ ID NO: 59746 - protein, 371 aa, Pseudomonas plecoglossicida
  misc_feature (1)..(371): tr|A0A0B5KIV1|A0A0B5KIV1_9PSED Queuine tRNA-ribosyltran sferase OS=Pseudomonas plecoglossicida OX=70775 GN=tgt PE=3 SV=1
MSFELLATDGKARRGRITFPRGTVETPAFMPVGTYGTVKGMLPRDIEAIGAEMILGNTFHLWLRPGTEVIKKHNGLHDFMQWKGPILTDSGGFQVFSLGAMRKIKEEGVTFASPVDGAKVFMGPEESMQVQRDLGSDVVMIFDECTPYPAEHDVARASMELSLRWAQRSKNAHADNTAALFGIVQGGMYQDLRMRSLEGLENIGFDGLAIGGLSVGEPKHEMIKVLDYLPGQMPADKPRYLMGVGKPEDLVEGVRRGVDMFDCVMPTRNARNGHLFVDTGVIKIRNAFHRHDDSPLDPTCDCYTCTNFSRAYLHHLDKCGEMLSSMLNTIHNLRHYQRLMAGLREAIQQGKLAAFVDAFYAKRGLPVPPLD

SEQ ID NO: 59747 - protein, 377 aa, Pseudomonas plecoglossicida
  misc_feature (1)..(377): tr|A0A2A3MA74|A0A2A3MA74_9PSED Queuine tRNA-ribosyltran sferase OS=Pseudomonas plecoglossicida OX=70775 GN=tgt PE=3 SV=1
MSRTCRMSFELLATDGKARRGRITFPRGTVETPAFMPVGTYGTVKGMLPRDIEAIGAEMILGNTFHLWLRPGTEVIKKHNGLHDFMQWKGPILTDSGGFQVFSLGAMRKIKEEGVTFASPVDGAKVFMGPEESMQVQRDLGSDVVMIFDECTPYPAEHDVARASMELSLRWAQRSKNAHADNTAALFGIVQGGMYQDLRMRSLEGLENIGFDGLAIGGLSVGEPKHEMIKVLDYLPGQMPADKPRYLMGVGKPEDLVEGVRRGVDMFDCVMPTRNARNGHLFVDTGVIKIRNAFHRHDDSPLDPTCDCYTCTNFSRAYLHHLDKCGEMLSSMLNTIHNLRHYQRLMAGLREAIQQGKLAAFVDAFYAKRGLPVPPLD

SEQ ID NO: 59748 - protein, 374 aa, Pseudomonas poae; identical to SEQ ID NO: 59645
  misc_feature (1)..(374): tr|A0A3S9JTH2|A0A3S9JTH2_9PSED Queuine tRNA-ribosyltran sferase OS=Pseudomonas poae OX=200451 GN=tgt PE=3 SV=1

SEQ ID NO: 59749 - protein, 374 aa, Pseudomonas poae; identical to SEQ ID NO: 59578
  misc_feature (1)..(374): tr|A0A2A9H378|A0A2A9H378_9PSED Queuine tRNA-ribosyltran sferase OS=Pseudomonas poae OX=200451 GN=tgt PE=3 SV=1

SEQ ID NO: 59750 - protein, 374 aa, Pseudomonas pohangensis
  misc_feature (1)..(374): tr|A0A1H2GMP5|A0A1H2GMP5_9PSED Queuine tRNA-ribosyltran sferase OS=Pseudomonas pohangensis OX=364197 GN=tgt PE= 3 SV=1
MSFMNFELLATDGKARRGRLSFPRGVVETPAFMPVGTYGTVKGMLPRDIEAIGAQIILGNTFHLWLRPGTEVIRQHGDLHDFMQWKGPILTDSGGFQVFSLGAMRKIKEAGVTFASPVDGAKVFMGPEESMAVQRALGSDIVMIFDECTPYPADLETARRSMELSLRWARRSKIAHGDNPSALFGIVQGGMHEELRLRSLEGLNEIGFDGLAIGGLSVGEPKEEMIKVLDYLPGHLPADKPRYLMGVGKPEDLVEGVRRGIDMFDCVMPTRNARNGHLFVESGVLKIRNAAHKKDESPLDSGCDCYTCQNFSRAYLHHLDKCGEMLGSMLNTIHNLRHYQRLMAGLREAIQQGTLASFVDAFYAKRGLPTPPIQ

SEQ ID NO: 59751 - protein, 377 aa, Pseudomonas prosekii
  misc_feature (1)..(377): tr|A0A1H1ZGS0|A0A1H1ZGS0_9PSED Queuine tRNA-ribosyltran sferase OS=Pseudomonas prosekii OX=1148509 GN=tgt PE=3 SV=1
MSRQSRMSFELLATDGKARRGRLTFPRGTVETPAFMPVGTYGTVKGMLPRDITATGAEIILGNTFHLWLRPGTEVIKKHGDLHDFMQWKGPILTDSGGFQVFSLGAMRKIKEEGVTFASPVDGAKVFMGPEESMQVQRDLGSDIVMIFDECTPYPADEDVARISMELSLRWAQRSKNAHGDNTAALFGIVQGGMHQDLRMRSLEGLDKIGFDGLAIGGLSVGEPKHEMIKVLDYLPGQMPADKPRYLMGVGKPEDLVEGVRRGVDMFDCVMPTRNARNGHLFIDTGVLKIRNAFHRHDDSPLDPTCDCYTCQNFSRAYLHHLDKCGEMLGSMLNTIHNLRHYQVLMAGLREAIQQGTLAAFVDAFYAKRGLPVPPLD

SEQ ID NO: 59752 - protein, 377 aa, Pseudomonas protegens
  misc_feature (1)..(377): tr|A0A2C9ET93|A0A2C9ET93_PSEPH Queuine tRNA-ribosyltran sferase OS=Pseudomonas protegens (strain DSM 19095 / LM G 27888 / CHA0) OX=1124983 GN=tgt PE=3 SV=1
MSRTCRMSFELLATDGKARRGRLTFPRGTVETPAFMPVGTYGTVKGMLPRDIVATGAEIILGNTFHLWLRPGTEVIKAHGDLHDFMQWKGPILTDSGGFQVFSLGAMRKIKEEGVTFASPVDGAKVFMGPEESMQVQRDLGSDIVMIFDECTPYPADEDVARISMELSLRWAQRSKNAHGDNTAALFGIVQGGMHQDLRMRSLEGLDKIGFDGLAIGGLSVGEPKHEMIKVLDYLPGQMPADKPRYLMGVGKPEDLVEGVRRGVDMFDCVMPTRNARNGHLFIDTGVLKIRNAFHRHDDSPLDPTCDCYTCQNFSRAYLHHLDKCGEMLGSMLNTIHNLRHYQRLMAGLREAIQQGTLAAFVDSFYAKRGLPVPPLE

SEQ ID NO: 59753 - protein, 377 aa, Pseudomonas protegens; identical to SEQ ID NO: 59752
  misc_feature (1)..(377): tr|A0A2T6GIE2|A0A2T6GIE2_9PSED Queuine tRNA-ribosyltran sferase OS=Pseudomonas protegens OX=380021 GN=tgt PE=3 SV=1

SEQ ID NO: 59754 - protein, 377 aa, Pseudomonas pseudoalcaligenes
  misc_feature (1)..(377): tr|W6R0R5|W6R0R5_PSEP5 Queuine tRNA-ribosyltransferase OS=Pseudomonas pseudoalcaligenes (strain CECT 5344) OX= 1182590 GN=tgt PE=3 SV=1
MSRTCRMSFELLATDGKARRGRLTFPRGVVETPAFMPVGTYGTVKGMLPRDIEAIGAQIILGNTFHLWLRPGMEVIKKHGDLHDFMQWQGPILTDSGGFQVFSLGAMRKIKEEGVYFASPVDGTKVFMGPEESMQVQRDLGSDIVMIFDECTPYPAEFDVAKRSMELSLRWAKRSKTAHGESSAALFGIVQGGMHEELRMRSLEGLCEIGFDGLAIGGLSVGEPKEEMIRVLDFLPPHMPADKPRYLMGVGKPEDLVEGVRRGVDMFDCVMPTRNARNGHLFVDTGVVKIRNAVHKHDDSSLDPTCDCYTCKHFSRAYLHHLDKCGEMLGSMLNTIHNLRHYQRVMAGLREAIGQGTLAAFVETFYAKRGLPVPPLD

SEQ ID NO: 59755 - protein, 376 aa, Pseudomonas psychrophila
  misc_feature (1)..(376): tr|A0A3N1ZLQ3|A0A3N1ZLQ3_9PSED Queuine tRNA-ribosyltran sferase OS=Pseudomonas psychrophila OX=122355 GN=tgt PE =3 SV=1
MSNCRMSFELLATDGKARRGRLTFPRGVVETPAFMPVGTYGTVKGMLPRDIEAIGAQMILGNTFHLWLRPGTEVIKKHGDLHDFMKWQGPILTDSGGFQVFSLGAMRKIKEEGVTFASPVDGAKVFMGPEESMQVQRDLGSDVVMIFDECTPYPADEDVARVSMELSLRWAQRSKNAHGDNTAALFGIVQGGMHQNLRERSLEGLNKIGFDGLAIGGLSVGEPKHEMIKVLDYLPAMMPADKPRYLMGVGKPEDLVEGVRRGVDMFDCVMPTRNARNGHLFIDTGVLKIRNAFHRHDDSPLDPTCDCYTCQNFSRAYLHHLDKCGEMLGSMLNTIHNLRHYQVLMAGLREAIQQGTLATFVDAFYAKRGLPVPPLD

SEQ ID NO: 59756 - protein, 371 aa, Pseudomonas psychrophila
  misc_feature (1)..(371): tr|S6I4H2|S6I4H2_9PSED Queuine tRNA-ribosyltransferase OS=Pseudomonas psychrophila OX=122355 GN=tgt PE=3 SV=1
MSFELLATDGKARRGRLTFPRGVVETPAFMPVGTYGTVKGMLPRDIVDTGAQMILGNTFHLWLRPGTEVIKKHGDLHDFMKWQGPILTDSGGFQVFSLGAMRKIKEEGVTFASPVDGAKVFMGPEESMQVQRDLGSDVVMIFDECTPYPADEEVARVSMELSLRWAQRSKNAHGDNTAALFGIVQGGMHQNLRERSLEGLNKIGFDGLAIGGLSVGEPKHEMIKVLDYLPAMMPADKPRYLMGVGKPEDLVEGVRRGVDMFDCVMPTRNARNGHLFIDTGVIKIRNAFHRHDDSSLDPTCDCYTCQNFSRAYLHHLDKCGEMLGSMLNTIHNLRHYQVLMAGLREAIQQGTLATFVDAFYAKRGLPVPPLD

SEQ ID NO: 59757 - protein, 375 aa, Pseudomonas psychrotolerans
  misc_feature (1)..(375): tr|A0A1G5N6G7|A0A1G5N6G7_9PSED Queuine tRNA-ribosyltran sferase OS=Pseudomonas psychrotolerans OX=237610 GN=tgt PE=3 SV=1
MSFMNFELLATEGKARRGRLTFPRGVVETPAFMPVGTYGTVKGMLPDSVADIGAQIILGNTFHLWLRPGTEVIQRHGDLHDFMQWQGPILTDSGGFQVFSLGALRKIKEEGVYFASPVDGAKVFMGPEESMAVQRALGSDIVMIFDECTPYPADFDTARRSMELSLRWAKRSREAHGDNPSALFGIVQGGMHEELRLRSLEGLEGIGFDGYAIGGLSVGEPKEEMIRVLDFLPPHLPADKPRYLMGVGKPEDLVEGVRRGVDMFDCVMPTRNARNGHLFIDTGVLKLRNAVHRHDETPLDPTCDCYTCKHFSRAYLHHLDKCGEMLGSMLNTIHNLRYYQRVMAGLRQAIQEGKLADFVDAFYARRGLPTPPLDS

SEQ ID NO: 59758 - protein, 372 aa, Pseudomonas psychrotolerans
  misc_feature (1)..(372): tr|A0A147GY05|A0A147GY05_9PSED Queuine tRNA-ribosyltran sferase OS=Pseudomonas psychrotolerans OX=237610 GN=tgt PE=3 SV=1
MNFELLATEGKARRGRLTFPRGVVETPAFMPVGTYGTVKGMLPDSVADIGAQIILGNTFHLWLRPGTEVIQRHGDLHDFMQWQGPILTDSGGFQVFSLGALRKIKEEGVYFASPVDGAKVFMGPEESMAVQRALGSDIVMIFDECTPYPADFDTARRSMELSLRWAKRSREAHGDNPSALFGIVQGGMHEELRLRSLEGLEGIGFDGYAIGGLSVGEPKEEMIRVLDFLPPHLPADKPRYLMGVGKPEDLVEGVRRGVDMFDCVMPTRNARNGHLFIDTGVLKIRNAVHRHDESPLDPTCDCYTCKHFSRAYLHHLDKCGEMLGSMLNTIHNLRYYQRVMAGLRQAIQEGKLADFVDAFYARRGLPTPPLGS

SEQ ID NO: 59759 - protein, 377 aa, Pseudomonas punonensis
  misc_feature (1)..(377): tr|A0A1M6WX21|A0A1M6WX21_9PSED Queuine tRNA-ribosyltran sferase OS=Pseudomonas punonensis OX=1220495 GN=tgt PE= 3 SV=1
MTRSCRMSFELLATDGKARRGRLTFPRGVVETPAFMPVGTYGTVKGMLPRDIEAIGAQIILGNTFHLWLRPGTEVIKRHGDLHDFMQWQGPILTDSGGFQVFSLGAMRKIKEEGVTFASPVDGSKVFMGPEESMQVQRDLGSDIVMIFDECTPYPAEFDVAKTSMELSLRWAKRSKVAHGESTAALFGIVQGGMHESLRMRSLEGLNELEFDGLAIGGLSVGEPKEEMIKVLDYLPGQMPSDKPRYLMGVGKPEDLVEGVRRGVDMFDCVMPTRNARNGHLFIDTGVLKIRNAFHRHDDSPLDPTCDCYTCKHFSRAYLHHLDKCGEMLGSMLNTIHNLRHYQRLMAGLREAIQQGTLASFVDAFYARRGLPTPPLD

SEQ ID NO: 59760 - protein, 371 aa, Pseudomonas putida
  misc_feature (1)..(371): sp|Q88PL7|TGT_PSEPK Queuine tRNA-ribosyltransferase OS= Pseudomonas putida (strain ATCC 47054 / DSM 6125 / NCIM B 11950 / KT2440) OX=160488 GN=tgt PE=3 SV=1
MSFELLATDGKARRGRITFPRGTVETPAFMPVGTYGTVKGMLPRDIEAIGAEMILGNTFHLWLRPGTEVIKKHNGLHDFMQWKGPILTDSGGFQVFSLGAMRKIKEEGVTFASPVDGSKVFMGPEESMQVQRDLGSDVVMIFDECTPYPAEHDVARTSMELSLRWAQRSKNAHADNTAALFGIVQGGMYQDLRMRSLEGLENIGFDGLAIGGLSVGEPKHEMIKVLDYLPDQMPADKPRYLMGVGKPEDLVEGVRRGVDMFDCVMPTRNARNGHLFVDTGVIKIRNAFHRHDESPLDPTCDCYTCTNFSRAYLHHLDKCGEMLSSMLNTIHNLRHYQRLMAGLREAIQQGKLAAFVDAFYAKRGLPVPPLD

SEQ ID NO: 59761 - protein, 377 aa, Pseudomonas putida
  misc_feature (1)..(377): tr|A0A0P7C819|A0A0P7C819_PSEPU Queuine tRNA-ribosyltran sferase OS=Pseudomonas putida OX=303 GN=tgt PE=3 SV=1
MSRTCRMSFELLATDGKARRGRITFPRGTVETPAFMPVGTYGTVKGMLPRDIEAIGAEMILGNTFHLWLRPGTEVIKKHNGLHDFMQWKGPILTDSGGFQVFSLGAMRKIKEEGVTFASPVDGSKVFMGPEESMQVQRDLGSDVVMIFDECTPYPAEHDVARTSMELSLRWAQRSKNAHADNTAALFGIVQGGMYQDLRMRSLEGLENIGFDGLAIGGLSVGEPKHEMIKVLDYLPGQMPADKPRYLMGVGKPEDLVEGVRRGVDMFDCVMPTRNARNGHLFVDTGVIKIRNAFHRHDESPLDPTCDCYTCTNFSRAYLHHLDKCGEMLSSMLNTIHNLRHYQRLMAGLREAIQQGKLAAFVDAFYAKRGLPVPPLD

SEQ ID NO: 59762 - protein, 377 aa, Pseudomonas reidholzensis
  misc_feature (1)..(377): tr|A0A383S1J9|A0A383S1J9_9PSED Queuine tRNA-ribosyltran sferase OS=Pseudomonas reidholzensis OX=1785162 GN=tgt PE=3 SV=1
MSRTCRMSFELLATDGKARRGRLTFPRGTVETPAFMPVGTYGTVKGMLPRDIEATGAEIILGNTFHLWLRPGTEVIKKHNGLHDFMQWKGPILTDSGGFQVFSLGAMRKIKEEGVTFASPVDGSKVFMGPEESMQVQRDLGSDIVMIFDECTPYPAEHDVARTSMELSLRWAQRSKNAHGDNTAALFGIVQGGMYQDLRQRSLEALVNIDFDGLAIGGLSVGEPKHEMIKVLDYLPDMMPADKPRYLMGVGKPEDLVEGVRRGVDMFDCVMPTRNARNGHLFIDTGVIKIRNAFHRHDDSPLDPTCDCYTCTNFSRAYLHHLDKCGEMLSSMLNTIHNLRHYQRLMAGLREAIQQGKLAAFVDAFYAKRGLPVPPLD

SEQ ID NO: 59763 - protein, 377 aa, Pseudomonas reinekei; identical to SEQ ID NO: 59690
  misc_feature (1)..(377): tr|A0A1H0LNI0|A0A1H0LNI0_9PSED Queuine tRNA-ribosyltran sferase OS=Pseudomonas reinekei OX=395598 GN=tgt PE=3 S V=1

SEQ ID NO: 59764 - protein, 377 aa, Pseudomonas resinovorans
  misc_feature (1)..(377): tr|S6AD03|S6AD03_PSERE Queuine tRNA-ribosyltransferase OS=Pseudomonas resinovorans NBRC 106553 OX=1245471 GN=t gt PE=3 SV=1
MTRTCRMNFELLATDGKARRGRLTFPRGVVETPAFMPVGTYGTVKGMLPRDIEAIGAQIILGNTFHLWLRPGMEVIKRHGDLHDFMQWQGPILTDSGGFQVFSLGAMRKIKEEGVTFASPVDGAKVFMGPEESMQVQRDLGSDIVMIFDECTPYPADVDTAKRSMELSLRWAKRSKVAHGESSAALFGIVQGGMHEDLRMRSLEGLSEIGFDGLAIGGLSVGEPKEEMIRVLDYLPGQMPADKPRYLMGVGKPEDLVEGVRRGVDMFDCVMPTRNARNGHLFIETGVLKIRNAVHRHDDSPLDASCDCYTCKHFSRAYLHHLDKCGEMLGSMLNTIHNLRHYQRLMAGLREAIQQGKLAVFVDAFYAKRGLPTPPLG

SEQ ID NO: 59765 - protein, 377 aa, Pseudomonas rhizosphaerae
  misc_feature (1)..(377): tr|A0A089YLS2|A0A089YLS2_9PSED Queuine tRNA-ribosyltran sferase OS=Pseudomonas rhizosphaerae OX=216142 GN=tgt P E=3 SV=1
MSRTCRMSFELLATDGKARRGRLTFPRGVVETPAFMPVGTYGTVKGMLPRDIEAIGAQMILGNTFHLWLRPGTEVIKAHGDLHDFMQWKGPILTDSGGFQVFSLGAMRKIKEEGVYFASPVDGSKVFMGPEESMQVQRDLGSDVVMIFDECTPYPADEQTARTSMELSLRWAQRSKDAHAESTAALFGIVQGGMHENLRMRSLEGLDKIGFDGLAIGGLSVGEPKHEMIKVLDYLPGQMPADKPRYLMGVGKPEDLVEGVRRGVDMFDCVMPTRNARNGHLFIDTGVLKIRNAFHRHDDSPLDPTCDCYTCRNFSRAYLHHLDKCGEMLGSMLNTIHNLRHYQLLMAGLREAIQQGTLAAFVDAFYAKRGLPVPPLD

SEQ ID NO: 59766 - protein, 374 aa, Pseudomonas rhodesiae; identical to SEQ ID NO: 59637
  misc_feature (1)..(374): tr|A0A5C5NTN3|A0A5C5NTN3_9PSED Queuine tRNA-ribosyltran sferase OS=Pseudomonas rhodesiae OX=76760 GN=tgt PE=3 S V=1

SEQ ID NO: 59767 - protein, 375 aa, Pseudomonas sabulinigri
  misc_feature (1)..(375): tr|A0A1H1RCD1|A0A1H1RCD1_9PSED Queuine tRNA-ribosyltran sferase OS=Pseudomonas sabulinigri OX=472181 GN=tgt PE= 3 SV=1
MSHMSFELLATDGKARRGRLSFPRGVVETPAFMPVGTYGTVKGMLPRDVEAIGAQIILGNTFHLWLRPGTKVIQQHGDLHDFMQWKGPILTDSGGFQVFSLGAMRKIKEEGVYFSSPVDGAKVFMGPEESMQVQRELGSDIVMIFDECTPYPADEDTARRSMELSLRWAKRSKAAHEGNPSALFGIVQGGMHENLRLRSLEGLCEIGFDGLAIGGLSVGEPKDEMMRVLDFLPGHMPPEKPRYLMGVGKPEDLVEGVRRGVDMFDCVMPTRNARNGHLFTEAGVIKIRNAVHRHDQSPLDPACDCYTCQNFSRAYLHHLDKCGEMLGSMLNTIHNLRHYQRLMAGLRSAIQQGTLTDFVDDFYAKLGLPVPPLQA

SEQ ID NO: 59768 - protein, 374 aa, Pseudomonas sagittaria
  misc_feature (1)..(374): tr|A0A1I5NZT4|A0A1I5NZT4_9PSED Queuine tRNA-ribosyltran sferase OS=Pseudomonas sagittaria OX=1135990 GN=tgt PE= 3 SV=1
MSHMSFELLATDGKARRGRLTFPRGVVETPAFMPVGTYGTVKGMLPRDIEAIGAQIILGNTFHLWLRPGTEVIKRHGDLHDFMQWQGPILTDSGGFQVFSLGAMRKIKEEGVYFASPVDGAKVFMGPEESMQVQRDLGSDIVMIFDECTPYPADFDTAKRSMELSQRWAKRSKVAHEGNPAALFGIVQGGMHEELRLRSLEGLLEIGFDGLAIGGLSVGEPKEDMIRILDFLPPHLPADKPRYLMGVGKPEDLVEGVRRGIDMFDCVMPTRNARNGHLFTDSGVIKIRNAVHKHDDSSLDPTCDCYTCRNFSRAYLHHLDKCGEMLGSMLNTIHNLRHYQRLMAGLRDAIGQGTLPAFVADFYARRGLPVPPLN

SEQ ID NO: 59769 - protein, 375 aa, Pseudomonas salegens
  misc_feature (1)..(375): tr|A0A1H2GVR6|A0A1H2GVR6_9PSED Queuine tRNA-ribosyltran sferase OS=Pseudomonas salegens OX=1434072 GN=tgt PE=3 SV=1
MSDMQFELLATDGKARRGRLTFPRGTVETPAFMPVGTYGTVKGMLPRDVAAIGADIILGNTFHLWLRPGTQVIQEHGDLHDFMQWQGPILTDSGGFQVFSLGAMRKIKEEGVYFSSPVDGAKVFMGPEESMQVQRELGSDIVMIFDECTPYPAEHDVAARSMELSLRWAQRSKNAHEGNPSALFGIVQGGMYQDLRLRSLEGLDKIGFDGLAIGGLSVGEPKEEMIKVLDYLPGQMPADKPRYLMGVGKPQDLVEGVRRGVDMFDCVMPTRNARNGHLFIDSGVIKIRNAVHRHDQNPLDAACDCYTCQHFSRAYLHHLDKCGEMLGSMLNTIHNLRHYQRLMAGLRGAIQQGTLSDFVDDFYARLGLPVPPLAT

SEQ ID NO: 59770 - protein, 374 aa, Pseudomonas salomonii
  misc_feature (1)..(374): tr|A0A3M4Q7T1|A0A3M4Q7T1_9PSED Queuine tRNA-ribosyltran sferase OS=Pseudomonas salomonii OX=191391 GN=tgt PE=3 SV=1
MSRMSFELLATDGKARRGRLTFPRGTVETPAFMPVGTYGTVKGMLPRDIVATGAEIILGNTFHLWLRPGTEVIKKHGDLHDFMKWQGPILTDSGGFQVFSLGAMRKIKEEGVTFASPVDGSKVFMGPEESMQVQRDLGSDIVMIFDECTPYPADEDVARISMELSLRWAQRSKNAHGDNTAALFGIVQGGMHESLRKRSLEGLDKIGFDGLAIGGLSVGEPKHEMIKVLDYLPGLMPADKPRYLMGVGKPEDLVEGVRRGVDMFDCVMPTRNARNGHLFIDTGVLKIRNAFHRHDDSSLDPTCDCYTCQNFSRAYLHHLDKCGEMLGSMLNTIHNLRHYQVLMAGLREAIQQGTLAAFVDAFYAKRGLPVPPLD

SEQ ID NO: 59771 - protein, 374 aa, Pseudomonas salomonii; identical to SEQ ID NO: 59578
  misc_feature (1)..(374): tr|A0A1H3T988|A0A1H3T988_9PSED Queuine tRNA-ribosyltran sferase OS=Pseudomonas salomonii OX=191391 GN=tgt PE=3 SV=1

SEQ ID NO: 59772 - protein, 377 aa, Pseudomonas saponiphila; identical to SEQ ID NO: 59752
  misc_feature (1)..(377): tr|A0A1H4K6K7|A0A1H4K6K7_9PSED Queuine tRNA-ribosyltran sferase OS=Pseudomonas saponiphila OX=556534 GN=tgt PE= 3 SV=1

SEQ ID NO: 59773 - protein, 375 aa, Pseudomonas saudimassiliensis
  misc_feature (1)..(375): tr|A0A078MED5|A0A078MED5_9PSED Queuine tRNA-ribosyltran sferase OS=Pseudomonas saudimassiliensis OX=1461581 GN= tgt PE=3 SV=1
MSHMQFEISATDGKARRGRLTFPRGVVETPAFMPVGTYGTVKGMLPRDVKDIGAQIILGNTFHLWLRPGTEVIRKHGDLHDFMQWQGPILTDSGGFQVFSLGAMRKIKEEGVYFSSPVDGAKVFMGPEESMQVQRDLGSDIVMIFDECTPYPADLDTARRSMELSLRWAKRSKVAHEGNPSALFGIVQGGMHEDLRARSLEGLCEIGFDGLAIGGLSVGEPKEDMIRILDYLPPLMPPEKPRYLMGVGKPEDLVEGVRRGVDMFDCVMPTRNARNGHLFTDTGVVKIRNAVHRHDDSPLDPGCDCYTCQHFTRSYLHHLDKCGEMLGSMLNTIHNLRHYQRVMHGLRGAIQQGTLTAFVDNFYARLGQPVPPLEA

SEQ ID NO: 59774 - protein, 377 aa, Pseudomonas saudiphocaensis
  misc_feature (1)..(377): tr|A0A078LUN3|A0A078LUN3_9PSED Queuine tRNA-ribosyltran sferase OS=Pseudomonas saudiphocaensis OX=1499686 GN=tg t PE=3 SV=1
MSRTCHMSFELLATDGRARRGRLTFPRGTVETPAFMPVGTYGTVKGMLPRDVEEIGAEIILGNTFHLWLRPGTEVIKAHGDLHDFMQWKGPILTDSGGFQVFSLGAMRKIKEEGVYFASPVDGAKVFMGPEESMQVQRDLGSDIVMIFDECTPYPADEDVARRSMELSLRWAKRSKEAHGDSSAALFGIVQGGMHESLRMRSLEGLCEIGFDGLAIGGLSVGEPKEEMIRVLDFLPERMPADKPRYLMGVGKPEDLVEGVRRGVDMFDCVMPTRNARNGHLFTDAGVVKIRNAVHRHDDSPLEAGCDCYTCKHFSRGYLHHLDKCGEMLGSMLNTIHNLRHYQRLMAGLRQAIQQGTLATFVDAFYAKRGLPTPPLA

SEQ ID NO: 59775 - protein, 377 aa, Pseudomonas savastanoi; identical to SEQ ID NO: 59609
  misc_feature (1)..(377): tr|A0A0N8SX62|A0A0N8SX62_PSESS Queuine tRNA-ribosyltran sferase OS=Pseudomonas savastanoi pv. savastanoi OX=360 920 GN=tgt PE=3 SV=1

SEQ ID NO: 59776 - protein, 377 aa, Pseudomonas savastanoi
  misc_feature (1)..(377): tr|A0A3M4RHR5|A0A3M4RHR5_PSESG Queuine tRNA-ribosyltran sferase OS=Pseudomonas savastanoi pv. glycinea OX=318 G N=tgt PE=3 SV=1
MSRTSRMSFELLATDGKARRGRLTFPRGVVETPAFMPVGTYGTVKGMLPRDIEATGAQIILGNTFHLWLRPGTEVIKAHGDLHDFMQWKGPILTDSGGFQVFSLGAMRKIKEEGVTFASPVDGAKVFMGPEESMQVQRDLGSDIVMIFDECTPYPADEDVARVSMELSLRWAKRSKVAHGESTAALFGIVQGGMHESLRKRSLEGLDQIGFDGLAIGGLSVGEPKHEMIKVLDYLPGLMPPEKPRYLMGVGKPEDLVEGVRRGIDMFDCVMPTRNARNGHLFIDIGVLKIRNAFHRHDDSPLDPTCDCYTCQNFSRAYLHHLDKCGEMLGSMLNTIHNLRHYQRLMAGLREAIQQGTLAAFVDAFYAKRGIPTPPMD

SEQ ID NO: 59777 - protein, 377 aa, Pseudomonas segetis
  misc_feature (1)..(377): tr|A0A238ZFZ8|A0A238ZFZ8_9PSED Queuine tRNA-ribosyltran sferase OS=Pseudomonas segetis OX=298908 GN=tgt PE=3 SV =1
MTRTCRMSFELLATDGKARRGRLTFPRGVVETPAFMPVGTYGTVKGMLPRDIEAIGAQMILGNTFHLWLRPGTEVIKEHGDLHDFMQWKGPILTDSGGFQVFSLGAMRKIKEEGVTFASPVDGAKVFMGPEESMQVQRDLGSDVVMIFDECTPYPAEFDVAKTSMELSLRWAKRSKAAHGDNTAALFGIVQGGMYQELRQRSLEGLNEIGFDGLAIGGLSVGEPKEEMIKVLDYLPGLMPAEKPRYLMGVGKPEDLVEGVRRGVDMFDCVMPTRNARNGHLFVDTGVLKIRNAAHRHDDSPLDANCDCYTCQNFSRAYLHHLDKCGEMLGSMLNTIHNLRHYQRLMAGLRGAIQQGTLAAFVDSFYSQRGLPTPPLD

SEQ ID NO: 59778 - protein, 377 aa, Pseudomonas seleniipraecipitans
  misc_feature (1)..(377): tr|A0A1G7JA34|A0A1G7JA34_9PSED Queuine tRNA-ribosyltran sferase OS=Pseudomonas seleniipraecipitans OX=640205 GN =tgt PE=3 SV=1
MTRSCRMSFELLATDGKARRGRLTFPRGVVETPAFMPVGTYGTVKGMLPRDIEAIGAQIILGNTFHLWLRPGTEVIKRHGDLHDFMQWQGPILTDSGGFQVFSLGAMRKIKEEGVTFASPVDGSKVFMGPEESMQVQRDLGSDIVMIFDECTPYPAEFDVAKTSMELSLRWAKRSKVAHGESTAALFGIVQGGMHESLRMRSLEGLSELEFDGLAIGGLSVGEPKEEMIKVLDYLPEQMPSEKPRYLMGVGKPEDLVEGVRRGVDMFDCVMPTRNARNGHLFIDTGVLKIRNAFHRHDDSPLDPTCDCYTCKHFSRAYLHHLDKCGEMLGSMLNTIHNLRHYQRLMAGLREAIQQGTLAAFVDAFYARRGLPTPPLN

SEQ ID NO: 59779 - protein, 377 aa, Pseudomonas sihuiensis
  misc_feature (1)..(377): tr|A0A1H2M3M7|A0A1H2M3M7_9PSED Queuine tRNA-ribosyltran sferase OS=Pseudomonas sihuiensis OX=1274359 GN=tgt PE= 3 SV=1
MSRTCRMSFELLATDGKARRGRLTFPRGVVETPAFMPVGTYGTVKGMLPRDIEAIGAQIILGNTFHLWLRPGMEVIKKHGDLHDFMQWQGPILTDSGGFQVFSLGAMRKIKEEGVYFASPVDGAKVFMGPEESMQVQRDLGSDIVMIFDECTPYPAEFDVAKRSMELSLRWAKRSKTAHGESTAALFGIVQGGMHEELRMRSLEGLCEIGFDGLAIGGLSVGEPKEEMIRVLDFLPPHMPADKPRYLMGVGKPEDLVEGVRRGVDMFDCVMPTRNARNGHLFVDTGVVKIRNAVHKHDDSSLDPTCDCYTCKHFSRAYLHHLDKCGEMLGSMLNTIHNLRHYQRVMAGLREAIGQGTLAAFVETFYAKRGLPVPPLD

SEQ ID NO: 59780 - protein, 374 aa, Pseudomonas silesiensis
  misc_feature (1)..(374): tr|A0A191YYZ4|A0A191YYZ4_9PSED Queuine tRNA-ribosyltran sferase OS=Pseudomonas silesiensis OX=1853130 GN=tgt PE =3 SV=1
MSRMSFELLATDGKARRGRLTFPRGTVETPAFMPVGTYGTVKGMLPRDITATGAEIILGNTFHLWLRPGTEVIKKHGDLHDFMQWKGPILTDSGGFQVFSLGAMRKIKEEGVTFASPVDGAKVFMGPEESMQVQRDLGSDIVMIFDECTPYPADEDVARVSMELSLRWAKRSKEAHGDNTAALFGIVQGGMHQDLRMRSLEGLDQIGFDGLAIGGLSVGEPKHEMIKVLDYLPGQMPADKPRYLMGVGKPEDLVEGVRRGVDMFDCVMPTRNARNGHLFIDTGVLKIRNAFHRHDDSPLDPTCDCYTCQNFSRAYLHHLDKCGEMLGSMLNTIHNLRHYQVLMAGLREAIQQGTLAAFVDAFYAKRGLPVPPLD

SEQ ID NO: 59781 - protein, 374 aa, Pseudomonas simiae; identical to SEQ ID NO: 59578
  misc_feature (1)..(374): tr|A0A1N7UKM4|A0A1N7UKM4_9PSED Queuine tRNA-ribosyltran sferase OS=Pseudomonas simiae OX=321846 GN=tgt PE=3 SV= 1

SEQ ID NO: 59782 - protein, 377 aa, Pseudomonas soli; identical to SEQ ID NO: 59722
  misc_feature (1)..(377): tr|A0A1H9NHX0|A0A1H9NHX0_9PSED Queuine tRNA-ribosyltran sferase OS=Pseudomonas soli OX=1306993 GN=tgt PE=3 SV=1

SEQ ID NO: 59783 - protein, 371 aa, Pseudomonas songnenensis
  misc_feature (1)..(371): tr|A0A482U809|A0A482U809_9PSED Queuine tRNA-ribosyltran sferase OS=Pseudomonas songnenensis OX=1176259 GN=tgt P E=3 SV=1
MSFELLATDGKARRGRLTFPRGTVETPAFMPVGTYGTVKGMLPRDIEAIGAQIILGNTFHLWLRPGTEVIKRHGDLHDFMQWQGPILTDSGGFQVFSLGAMRKIKEEGVYFASPVDGAKVFMGPEESMQVQRDLGSDIVMIFDECTPYPADEDVARRSMELSLRWAKRSKIAHGDSSAALFGIVQGGMHESLRLRSLEGLCEIGFDGLAIGGLSVGEPKEEMIRVLDFLPPHMPAEKPRYLMGVGKPVDLVEGVRRGVDMFDCVMPTRNARNGHLFTDTGVIKIRNAVHKHDDSPLDPSCDCYTCKHFSRAYLHHLDKCGEMLGSMLNTIHNLRHYQRVMAGLRDAIQQGTLAAFVDAFYAKRGLPTPPLA

SEQ ID NO: 59784 - protein, 375 aa, Pseudomonas sp.
  misc_feature (1)..(375): tr|A0A1S1GEX9|A0A1S1GEX9_9PSED Queuine tRNA-ribosyltran sferase OS=Pseudomonas sp. HMSC75E02 OX=1608908 GN=tgt PE=3 SV=1
MSFMKFELLATDGKARRGRLSFPRGVVETPAFMPVGTYGTVKGMLPRDIEGIGAQIILGNTFHLWLRPGTEVIRKHGDLHDFMQWQGPILTDSGGFQVFSLGALRKIKEEGVYFASPVDGAKVFMGPEESMAVQRALGSDIVMIFDECTPYPAEFDVAKRSMELSLRWAKRSKIAHGDSPSALFGIVQGGMHEELRMRSLEGLQEIGFDGLAIGGLSVGEPKEEMIRVLDFLPPRMPADKPRYLMGVGKPEDLVEGVRRGVDMFDCVMPTRNARNGHLFVDTGVIKIRNAVHKHDESPLDSTCDCYTCKHFSRAYLYHLDKCGEMLGSMLNTIHNLRHYQRLMAGLREAIQQGTLAAFVDAFYAKRGLPTPPLGD

SEQ ID NO: 59785 - protein, 371 aa, Pseudomonas sp.
  misc_feature (1)..(371): tr|S2FVU1|S2FVU1_9PSED Queuine tRNA-ribosyltransferase OS=Pseudomonas sp. G5(2012) OX=1268068 GN=tgt PE=3 SV=1
MSFELLATDGKARRGRLTFPRGTVETPAFMPVGTYGTVKGMLPRDIEATGAEIILGNTFHLWLRPGMEVIKKHGDLHDFMQWKGPILTDSGGFQVFSLGAMRKIKEEGVTFASPVDGAKVFMGPEESMQVQRDLGSDIVMIFDECTPYPADEDVARVSMELSLRWAQRSKNAHADNTAALFGIVQGGMHQDLRMRSLEGLDKIGFDGLAIGGLSVGEPKHEMIKVLDYLPGQMPADKPRYLMGVGKPEDLVEGVRRGVDMFDCVMPTRNARNGHLFIDTGVIKIRNAFHRHDDSPLDPTCDCYTCQNFSRAYLHHLDKCGEMLGSMLNTIHNLRHYQVLMAGLREAIQQGTLAAFVDAFYAKRGLPVPPLD

SEQ ID NO: 59786 - protein, 377 aa, Pseudomonas straminea
  misc_feature (1)..(377): tr|A0A1I1VB44|A0A1I1VB44_PSEOC Queuine tRNA-ribosyltran sferase OS=Pseudomonas straminea OX=47882 GN=tgt PE=3 S V=1
MTRSCRMSFELLATDGKARRGRLTFPRGVVETPAFMPVGTYGTVKGMLPRDIEAIGAQIILGNTFHLWLRPGTEVIKRHGDLHDFMQWQGPILTDSGGFQVFSLGAMRKIKEEGVTFASPVDGSKVFMGPEESMQVQRDLGSDIVMIFDECTPYPAEFDVAKTSMELSLRWAKRSKIAHGESTAALFGIVQGGMHESLRMRSLEGLSELEFDGLAIGGLSVGEPKEEMIKVLDYLPGQMPGDKPRYLMGVGKPEDLVEGVRRGVDMFDCVMPTRNARNGHLFVDTGVLKIRNAFHRHDDSPLDPTCDCYTCKHFSRAYLHHLDKCGEMLGSMLNTIHNLRHYQRLMAGLREAIQQGTLAAFVDAFYARRGLPTPPLD

SEQ ID NO: 59787 - protein, 371 aa, Pseudomonas stutzeri
  misc_feature (1)..(371): tr|I4JLV7|I4JLV7_PSEST Queuine tRNA-ribosyltransferase OS=Pseudomonas stutzeri TS44 OX=477228 GN=tgt PE=3 SV=1
MSFELLATDGKARRGRLTFPRGTVETPAFMPVGTYGTVKGMLPRDIEGIGAQIILGNTFHLWLRPGTEVIRQHGDLHDFMQWQGPILTDSGGFQVFSLGAMRKIKEEGVYFASPVDGAKVFMGPEESMQVQRELGSDIVMIFDECTPYPADEETARRSMELSLRWAKRSKTAHGDSSAALFGIVQGGMHEALRMRSLEGLCEIGFDGLAIGGLSVGEPKEEMIRVLDFLPPRMPADKPRYLMGVGKPEDLVEGVRRGVDMFDCVMPTRNARNGHLFTDTGVIKIRNAIHRHDNSPLDAGCDCYTCQHFSRAYLHHLDKCGEMLGSMLNTIHNLRHYQRLMAGLRDAIQQGTLAAFVDAFYARRGMPTPPVA

SEQ ID NO: 59788 - protein, 371 aa, Pseudomonas stutzeri
  misc_feature (1)..(371): tr|M2VQS1|M2VQS1_PSEST Queuine tRNA-ribosyltransferase OS=Pseudomonas stutzeri NF13 OX=1212548 GN=tgt PE=3 SV= 1
MSFELLATDGKARRGRLTFPRGTVETPAFMPVGTYGTVKGMLPRDIEAIGAQIILGNTFHLWLRPGMEVIKRHGDLHDFMQWQGPILTDSGGFQVFSLGAMRKIKEEGVYFASPVDGAKVFMGPEESMQVQRDLGSDIVMIFDECTPYPADEDVARRSMELSLRWAKRSKVAHGDSPAALFGIVQGGMHESLRMRSLEGLCEIGFDGLAIGGLSVGEPKEEMIRVLDFLPPQMPADKPRYLMGVGKPEDLVEGVRRGVDMFDCVMPTRNARNGHLFVDSGVIKIRNAVHKHDDSPLDPSCDCYTCKHFSRAYLHHLDKCGEMLGSMLNTIHNLRHYQRVMAGLRDAIQQGTLAAFVDAFYAKRGLPTPPLA

SEQ ID NO: 59789 - protein, 374 aa, Pseudomonas synxantha; identical to SEQ ID NO: 59587
  misc_feature (1)..(374): tr|I4L9D1|I4L9D1_9PSED Queuine tRNA-ribosyltransferase OS=Pseudomonas synxantha BG33R OX=96901 GN=tgt PE=3 SV= 1

SEQ ID NO: 59790 - protein, 374 aa, Pseudomonas synxantha; identical to SEQ ID NO: 59587
  misc_feature (1)..(374): tr|A0A3F3J8A8|A0A3F3J8A8_9PSED Queuine tRNA-ribosyltran sferase OS=Pseudomonas synxantha OX=47883 GN=tgt PE=3 S V=1

SEQ ID NO: 59791 - protein, 371 aa, Pseudomonas syringae
  misc_feature (1)..(371): sp|Q887B0|TGT_PSESM Queuine tRNA-ribosyltransferase OS= Pseudomonas syringae pv. tomato (strain ATCC BAA-871 / DC3000) OX=223283 GN=tgt PE=3 SV=1
MSFELLATDGKARRGRLTFPRGVVETPAFMPVGTYGTVKGMLPRDIEATGAQMILGNTFHLWLRPGTEVIKGHGDLHDFMQWKGPILTDSGGFQVFSLGAMRKIKEEGVTFASPVDGAKVFMGPEESMQVQRDLGSDVVMIFDECTPYPADEDVARVSMELSLRWAKRSKVAHGENTAALFGIVQGGMHENLRKRSLEGLDEIGFDGLAIGGLSVGEPKHEMIKVLDYLPGLMPADKPRYLMGVGKPEDLVEGVRRGVDMFDCVMPTRNARNGHLFIDTGVLKIRNAFHRHDNTPLDPTCDCYTCKNFSRAYLHHLDKCGEMLGSMLNTIHNLRHYQLLMAGLREAIQQGTLAAFVDAFYAKRGLPTPPLG

SEQ ID NO: 59792 - protein, 377 aa, Pseudomonas syringae
  misc_feature (1)..(377): tr|A0A0Q0C540|A0A0Q0C540_PSEAP Queuine tRNA-ribosyltran sferase OS=Pseudomonas syringae pv. aptata OX=83167 GN= tgt PE=3 SV=1
MSRTCRMSFELLATDGKARRGRLTFPRGVVETPAFMPVGTYGTVKGMLPRDIEATGAQMILGNTFHLWLRPGTEVIKGHGDLHDFMQWKGPILTDSGGFQVFSLGAMRKIKEEGVTFASPVDGAKVFMGPEESMQVQRDLGSDVVMIFDECTPYPADEDVARVSMELSLRWAKRSKIAHGENTAALFGIVQGGMHENLRKRSLEGLDEIGFDGLAIGGLSVGEPKHEMIKVLDYLPGLMPADKPRYLMGVGKPEDLVEGVRRGVDMFDCVMPTRNARNGHLFTDTGVLKIRNAFHRHDNSPLDPTCDCYTCQNFSRAYLHHLDKCGEMLGSMLNTIHNLRHYQLLMAGLREAIQQGTLAAFVDAFYAKRGLPTPPLG

SEQ ID NO: 59793 - protein, 377 aa, Pseudomonas taeanensis
  misc_feature (1)..(377): tr|A0A0A1YIM3|A0A0A1YIM3_9PSED Queuine tRNA-ribosyltran sferase OS=Pseudomonas taeanensis MS-3 OX=1395571 GN=tg t PE=3 SV=1
MTRTCRMSFELLATDGKARRGRLTFPRGVVETPAFMPVGTYGTVKGMLPRDIEAIGAQMILGNTFHLWLRPGTEVIKRHGDLHDFMQWQGPILTDSGGFQVFSLGAMRKIKEEGVTFASPVDGSKVFMGPEESMQVQRDLGSDIVMIFDECTPYPAEFDVAKRSMELSLRWAKRSKDAHGENTAALFGIVQGGMHEELRMRSLEGLNEIGFDGLAIGGLSVGEPKEEMLRVLGYLPELMPADKPRYLMGVGKPEDLVEGVRRGVDMFDCVMPTRNARNGHLFVETGVLKIRNSVHKHDNSTLDPECDCYTCKHFSRAYLHHLDKCGEMLGSMLNTIHNLRHYQRLMAGLREAIQQSTLAAFVDAFYARRGLPTPPLD

SEQ ID NO: 59794 - protein, 371 aa, Pseudomonas taetrolens
  misc_feature (1)..(371): tr|A0A0J6JSI0|A0A0J6JSI0_PSETA Queuine tRNA-ribosyltran sferase OS=Pseudomonas taetrolens OX=47884 GN=tgt PE=3 SV=1
MSFELLATDGKARRGRLTFPRGVVETPAFMPVGTYGTVKGMLPRDIEAIGAQMILGNTFHLWLRPGTEVIKKHGDLHDFMKWQGPILTDSGGFQVFSLGAMRKIKEEGVTFASPVDGAKVFMGPEESMQVQRDLGSDVVMIFDECTPYPADEDVARVSMELSLRWAQRSKNAHGDNTAALFGIVQGGMHQNLRERSLEGLNKIGFDGLAIGGLSVGEPKHEMIKVLDYLPGMMPADKPRYLMGVGKPEDLVEGVRRGVDMFDCVMPTRNARNGHLFIDTGVLKIRNAFHRHDDSPLDPTCDCYTCQNFSRAYLHHLDKCGEMLGSMLNTIHNLRHYQVLMAGLRESIQQGTLATFVDAFYAKRGLPVPPLD

SEQ ID NO: 59795 - protein, 371 aa, Pseudomonas taiwanensis; identical to SEQ ID NO: 59746
  misc_feature (1)..(371): tr|V7D6L5|V7D6L5_9PSED Queuine tRNA-ribosyltransferase OS=Pseudomonas taiwanensis SJ9 OX=1388762 GN=tgt PE=3 S V=1

SEQ ID NO: 59796 - protein, 377 aa, Pseudomonas thivervalensis
  misc_feature (1)..(377): tr|A0A176NJJ7|A0A176NJJ7_9PSED Queuine tRNA-ribosyltran sferase OS=Pseudomonas thivervalensis OX=86265 GN=tgt P E=3 SV=1
MSRTCRMSFELLATDGKARRGRLTFPRGTVETPAFMPVGTYGTVKGMLPRDIEAIGAEIILGNTFHLWLRPGMEVIKAHGDLHDFMQWKGPILTDSGGFQVFSLGAMRKIKEEGVTFASPVDGSKVFMGPEESMQVQRDLGSDIVMIFDECTPYPADEDVARVSMELSLRWAQRSKNAHGENTAALFGIVQGGMHRDLRMRSLEGLDKIGFDGLAIGGLSVGEPKHEMIKVLDYLPGEMPADKPRYLMGVGKPEDLVEGVRRGVDMFDCVMPTRNARNGHLFIDTGVLKIRNAFHRHDDSPLDPTCDCYTCQNFSRAYLHHLDKCGEMLGSMLNTIHNLRHYQVLMAGLREAIQQGTLAAFVEAFYAKRGLPVPPLD

SEQ ID NO: 59797 - protein, 374 aa, Pseudomonas tolaasii; identical to SEQ ID NO: 59578
  misc_feature (1)..(374): tr|A0A2N0E0B9|A0A2N0E0B9_PSETO Queuine tRNA-ribosyltran sferase OS=Pseudomonas tolaasii NCPPB 2192 OX=564423 GN =tgt PE=3 SV=1

SEQ ID NO: 59798 - protein, 377 aa, Pseudomonas toyotomiensis; identical to SEQ ID NO: 59610
  misc_feature (1)..(377): tr|A0A1I5XBG9|A0A1I5XBG9_9PSED Queuine tRNA-ribosyltran sferase OS=Pseudomonas toyotomiensis OX=554344 GN=tgt P E=3 SV=1

SEQ ID NO: 59799 - protein, 371 aa, Pseudomonas toyotomiensis
  misc_feature (1)..(371): tr|A0A2G5FKR7|A0A2G5FKR7_9PSED Queuine tRNA-ribosyltran sferase OS=Pseudomonas toyotomiensis OX=554344 GN=tgt P E=3 SV=1
MSFELLATDGKARRGRLTFPRGVVETPAFMPVGTYGTVKGMLPRDVEDIGAQIILGNTFHLWLRPGMEVIKKHGDLHDFMQWQGPILTDSGGFQVFSLGAMRKIKEEGVYFASPVDGAKVFMGPEESMQVQRDLGSDIVMIFDECTPYPAEFDVAKRSMELSLRWAKRSKTAHGESSAALFGIVQGGMHEELRMRSLEGLCEIGFDGLAIGGLSVGEPKEEMIRVLDFLPPHMPADKPRYLMGVGKPEDLVEGVRRGVDMFDCVMPTRNARNGHLFVDTGVVKIRNAVHKHDDSPLDPTCDCYTCKHFSRAYLHHLDKCGEMLGSMLNTIHNLRHYQRVMAGLREAIGQGTLAAFVETFYAKRGLPVPPLD

SEQ ID NO: 59800 - protein, 377 aa, Pseudomonas tremae
  misc_feature (1)..(377): tr|A0A0Q0D5G1|A0A0Q0D5G1_9PSED Queuine tRNA-ribosyltran sferase OS=Pseudomonas tremae OX=200454 GN=tgt PE=3 SV= 1
MSRTCRMSFELLATDGKARRGRLTFPRGVVETPAFMPVGTYGTVKGMLPRDIEATGAQMILGNTFHLWLRPGTEVIKGHGDLHDFMQWQGPILTDSGGFQVFSLGAMRKIKEEGVTFASPVDGAKVFMGPEESMQVQRDLGSDIVMIFDECTPYPADEDVARISMELSLRWAKRSKVAHGENTAALFGIVQGGMHENLRMRSLEGLDEIGFDGLAIGGLSVGEPKHEMIKVLDYLPGQMPADKPRYLMGVGKPEDLVEGVRRGVDMFDCVMPTRNARNGHLFIDTGVLKIRNAFHRHDNSPLDPSCDCYTCKNFSRAYLHHLDKCGEMLGSMLNTIHNLRHYQLLMAGLREAIQQGTLAAFVDAFYAKRGLPTPPLG

SEQ ID NO: 59801 - protein, 371 aa, Pseudomonas trivialis
  misc_feature (1)..(371): tr|A0A0H5B012|A0A0H5B012_9PSED Queuine tRNA-ribosyltran sferase OS=Pseudomonas trivialis OX=200450 GN=tgt PE=3 SV=1
MSFELLATDGKARRGRLTFPRGTVETPAFMPVGTYGTVKGMMPRDIVATGAEIILGNTFHLWLRPGTEVIKKHGDLHDFMKWQGPILTDSGGFQVFSLGAMRKIKEEGVTFASPVDGSKVFMGPEESMQVQRDLGSDIVMIFDECTPYPADEDVARISMELSLRWAQRSKNAHGDNTAALFGIVQGGMHESLRKRSLEGLDKIGFDGLAIGGLSVGEPKHEMIKVLDYLPGLMPADKPRYLMGVGKPEDLVEGVRRGVDMFDCVMPTRNARNGHLFIDTGVLKIRNAFHRHDDSPLDPTCDCYTCQNFSRAYLHHLDKCGEMLGSMLNTIHNLRHYQVLMAGLREAIQQGTLAAFVDAFYAKRGLPVPPLD

SEQ ID NO: 59802 - protein, 371 aa, Pseudomonas trivialis
  misc_feature (1)..(371): tr|A0A0R2ZTU0|A0A0R2ZTU0_9PSED Queuine tRNA-ribosyltran sferase OS=Pseudomonas trivialis OX=200450 GN=tgt PE=3 SV=1
MSFELLATDGKARRGRLTFPRGTVETPAFMPVGTYGTVKGMLPRDIVATGAEIILGNTFHLWLRPGTEVIKKHGDLHDFMKWQGPILTDSGGFQVFSLGAMRKIKEEGVTFASPVDGAKVFMGPEESMQVQRDLGSDIVMIFDECTPYPADEDVARISMELSLRWAQRSKNAHGDNTAALFGIVQGGMHESLRKRSLEGLDKIGFDGLAIGGLSVGEPKHEMIKVLDYLPGLMPAEKPRYLMGVGKPEDLVEGVRRGVDMFDCVMPTRNARNGHLFIDTGVLKIRNAFHRHDESPLDPTCDCYTCQNFSRAYLHHLDKCGEMLGSMLNTIHNLRHYQVLMAGLREAIQQGTLAAFVDAFYAKRGLPVPPLD

SEQ ID NO: 59803 - protein, 377 aa, Pseudomonas umsongensis
  misc_feature (1)..(377): tr|A0A1H1PW34|A0A1H1PW34_9PSED Queuine tRNA-ribosyltran sferase OS=Pseudomonas umsongensis OX=198618 GN=tgt PE= 3 SV=1
MSRQCRMSFELLATDGKARRGRLTFPRGTVETPAFMPVGTYGTVKGMLPRDIEATGAEIILGNTFHLWLRPGMEVIKKHGDLHDFMQWKGPILTDSGGFQVFSLGAMRKIKEEGVTFASPVDGAKVFMGPEESMQVQRDLGSDIVMIFDECTPYPADEDVARVSMELSLRWAQRSKNAHADNTAALFGIVQGGMHQDLRMRSLEGLDKIGFDGLAIGGLSVGEPKHEMIKVLDYLPGQMPADKPRYLMGVGKPEDLVEGVRRGVDMFDCVMPTRNARNGHLFIDTGVIKIRNAFHRHDDSPLDPTCDCYTCQNFSRAYLHHLDKCGEMLGSMLNTIHNLRHYQVLMAGLREAIQQGTLAAFVDAFYAKRGLPVPPLD

SEQ ID NO: 59804 - protein, 377 aa, Pseudomonas vancouverensis
  misc_feature (1)..(377): tr|A0A1H2P861|A0A1H2P861_9PSED Queuine tRNA-ribosyltran sferase OS=Pseudomonas vancouverensis OX=95300 GN=tgt P E=3 SV=1
MSRQCRMSFELLATDGKARRGRLTFPRGTVETPAFMPVGTYGTVKGMLPRDIEATGAEIILGNTFHLWLRPGTEVIKKHGDLHDFMQWKGPILTDSGGFQVFSLGAMRKIKEEGVTFASPVDGAKVFMGPEESMQVQRDLGSDIVMIFDECTPYPADEDVARISMELSLRWAQRSKNAHGDNTAALFGIVQGGMHQDLRMRSLEGLDKIGFDGLAIGGLSVGEPKHEMIKVLDYLPGMMPADKPRYLMGVGKPEDLVEGVRRGVDMFDCVMPTRNARNGHLFIDTGVLKIRNAFHRHDDSPLDPTCDCYTCQNFSRAYLHHLDKCGEMLGSMLNTIHNLRHYQVLMAGLREAIQQGTLAAFVDAFYAKRGLPVPPLD

SEQ ID NO: 59805 - protein, 374 aa, Pseudomonas veronii; identical to SEQ ID NO: 59637
  misc_feature (1)..(374): tr|A0A1D3K380|A0A1D3K380_9PSED Queuine tRNA-ribosyltran sferase OS=Pseudomonas veronii 1YdBTEX2 OX=1295141 GN=t gt PE=3 SV=1

SEQ ID NO: 59806 - protein, 374 aa, Pseudomonas veronii; identical to SEQ ID NO: 59637
  misc_feature (1)..(374): tr|A0A3S0P557|A0A3S0P557_9PSED Queuine tRNA-ribosyltran sferase OS=Pseudomonas veronii OX=76761 GN=tgt PE=3 SV= 1

SEQ ID NO: 59807 - protein, 371 aa, Pseudomonas versuta
  misc_feature (1)..(371): tr|A0A0M4QK82|A0A0M4QK82_9PSED Queuine tRNA-ribosyltran sferase OS=Pseudomonas versuta OX=1788301 GN=tgt PE=3 S V=1
MSFELLATDGKARRGRLTFPRGVVETPAFMPVGTYGTVKGMLPRDIVDTGAQMILGNTFHLWLRPGTEVIKKHGDLHDFMKWQGPILTDSGGFQVFSLGAMRKIKEEGVTFASPVDGAKVFMGPEESMQVQRDLGSDVVMIFDECTPYPADEDVARVSMELSLRWAQRSKNAHGDNTAALFGIVQGGMHQNLRERSLEGLNKIGFDGLAIGGLSVGEPKHEMIKVLDYLPAMMPADKPRYLMGVGKPEDLVEGVRRGVDMFDCVMPTRNARNGHLFIDTGVIKIRNAFHRHDDSPLDPTCDCYTCQNFSRAYLHHLDKCGEMLGSMLNTIHNLRHYQVLMAGLRESIQQGTLATFVDAFYAKRGLPVPPLD

SEQ ID NO: 59808 - protein, 376 aa, Pseudomonas versuta
  misc_feature (1)..(376): tr|A0A1Q4KQE6|A0A1Q4KQE6_9PSED Queuine tRNA-ribosyltran sferase OS=Pseudomonas versuta OX=1788301 GN=tgt PE=3 S V=1
MSNCRMSFELLATDGKARRGRLTFPRGVVETPAFMPVGTYGTVKGMLPRDIVDTGAQMILGNTFHLWLRPGTEVIKKHGDLHDFMKWQGPILTDSGGFQVFSLGAMRKIKEEGVTFASPVDGAKVFMGPEESMQVQRDLGSDVVMIFDECTPYPADEDVARVSMELSLRWAQRSKNAHGDNTAALFGIVQGGMHQNLRERSLEGLNKIGFDGLAIGGLSVGEPKHEMIKVLDYLPAMMPADKPRYLMGVGKPEDLVEGVRRGVDMFDCVMPTRNARNGHLFIDTGVIKIRNAFHRHDDSPLDPTCDCYTCQNFSRAYLHHLDKCGEMLGSMLNTIHNLRHYQVLMAGLRESIQQGTLATFVDAFYAKRGLPVPPLD

SEQ ID NO: 59809 - protein, 377 aa, Pseudomonas viridiflava
  misc_feature (1)..(377): tr|A0A3M5P9E6|A0A3M5P9E6_PSEVI Queuine tRNA-ribosyltran sferase OS=Pseudomonas viridiflava OX=33069 GN=tgt PE=3 SV=1
MSRTCRMSFELLATDGKARRGRLTFPRGVVETPAFMPVGTYGTVKGMLPRDIEATGAQIILGNTFHLWLRPGTEVIKGHGDLHDFMQWQGPILTDSGGFQVFSLGAMRKIKEEGVTFASPVDGAKVFMGPEESMQVQRDLGSDIVMIFDECTPYPADEDVARISMELSLRWAKRSKIAHGENTAALFGIVQGGMHESLRMRSLEGLDQIGFDGLAIGGLSVGEPKHEMIKVLDYLPGQMPADKPRYLMGVGKPEDLVEGVRRGVDMFDCVMPTRNARNGHLFIDTGVLKIRNAFHRHDNSPLDPTCDCYTCKNFSRAYLHHLDKCNEMLGSMLNTIHNLRHYQVLMAGLREAIQQGTLAAFVDAFYAKRGLPTPPLG

SEQ ID NO: 59810 - protein, 377 aa, Pseudomonas viridiflava
  misc_feature (1)..(377): tr|Q3T863|Q3T863_PSEVI Queuine tRNA-ribosyltransferase OS=Pseudomonas viridiflava OX=33069 GN=tgt PE=3 SV=1
MSRTCRMSFELLATDGKARRGRLTFPRGVVETPAFMPVGTYGTVKGMLPRDIEATGAQIILGNTFHLWLRPGTEVIKGHGDLHDFMQWQGPILTDSGGFQVFSLGAMRKIKEEGVTFASPVDGAKVFMGPEESMQVQRDLGSDIVMIFDECTPYPADEDVARISMELSLRWAKRSKIAHGENTAALFGIVQGGMHESLRMRSLEGLDQIGFDGLAIGGLSVGEPKHEMIKVLDYLPGQMPADKPRYLMGVGKPEDLVEGVRRGVDMFDCVMPTRNARNGHLFIDTGVLKIRNAFHRHDNSPLDPTCDCYTCKNFSRAYLHHLDKCNEMLGSMLNTIHNLRHYQLLMAGLREAIQQGTLAAFVDAFYAKRGIPTPPLG

SEQ ID NO: 59811 - protein, 377 aa, Pseudomonas vranovensis
  misc_feature (1)..(377): tr|A0A423E0C2|A0A423E0C2_9PSED Queuine tRNA-ribosyltran sferase OS=Pseudomonas vranovensis OX=321661 GN=tgt PE= 3 SV=1
MIRTCRMSFELLATDGKARRGRLTFPRGVVETPAFMPVGTYGTVKGMLPRDIEAIGAHMILGNTFHLWLRPGTEVIKAHGDLHDFMKWQGPILTDSGGFQVFSLGAMRKIREEGVTFASPVDGSKVFMGPEESMQVQRDLGSDVVMIFDECTPYPADEDVARVSMELSLRWAQRSKNAHGDSTAALFGIVQGGMHENLRMRSLEGLEKIGFDGLAIGGLSVGEPKHEMIKVLDYLPGRMPADKPRYLMGVGKPEDLVEGVRRGVDMFDCVMPTRNARNGHLFVDTGVLKIRNAFHRHDDSPLDATCDCYTCQNFSRAYLHHLDKCGEMLGSMLNTIHNLRHYQRLMAGLREAIQQGTLAAFVDAFYAKRGLPVPPLD

SEQ ID NO: 59812 - protein, 377 aa, Pseudomonas wadenswilerensis
  misc_feature (1)..(377): tr|A0A380T6L3|A0A380T6L3_9PSED Queuine tRNA-ribosyltran sferase OS=Pseudomonas wadenswilerensis OX=1785161 GN=t gt PE=3 SV=1
MSRTCRMSFELLATDGKARRGRLTFPRGVVETPAFMPVGTYGTVKGMLPRDIEAIGAHMILGNTFHLWLRPGTEVIKAHGDLHDFMKWQGPILTDSGGFQVFSLGAMRKIREEGVTFASPVDGSKVFMGPEESMQVQRDLGSDVVMIFDECTPYPADEDVARVSMELSLRWAQRSKNAHGDSTAALFGIVQGGMHENLRMRSLEGLEKIGFDGLAIGGLSVGEPKHEMIKVLDYLPGRMPADKPRYLMGVGKPEDLVEGVRRGVDMFDCVMPTRNARNGHLFVDTGVLKIRNAFHRHDDSPLDATCDCYTCQNFSRAYLHHLDKCGEMLGSMLNTIHNLRHYQRLMAGLREAIQQGTLAAFVDAFYAKRGLPVPPLD

SEQ ID NO: 59813 - protein, 376 aa, Pseudomonas weihenstephanensis
  misc_feature (1)..(376): tr|A0A0J6ITR2|A0A0J6ITR2_9PSED Queuine tRNA-ribosyltran sferase OS=Pseudomonas weihenstephanensis OX=1608994 GN =tgt PE=3 SV=1
MSNCRMSFELLATDGKARRGRLTFPRGVVETPAFMPVGTYGTVKGMLPRDIVDTGAQMILGNTFHLWLRPGTEVIKKHGDLHDFMKWQGPILTDSGGFQVFSLGAMRKIKEEGVTFASPVDGAKVFMGPEESMQVQRDLGSDVVMIFDECTPYPADEDVARVSMELSLRWAQRSKNAHGDNTAALFGIVQGGMHQNLRERSLEGLNKIGFDGLAIGGLSVGEPKHEMIKVLDYLPAMMPADKPRYLMGVGKPEDLVEGVRRGVDMFDCVMPTRNARNGHLFIDTGVIKIRNAFHRHDDSPLDPTCDCYTCQNFSRAYLHHLDKCGEMLGSMLNTIHNLRHYQVLMAGLREAIQQGTLAAFVDAFYAKRGLPVPPLD

SEQ ID NO: 59814 - protein, 377 aa, Pseudomonas xanthomarina
  misc_feature (1)..(377): tr|A0A1C2DQL2|A0A1C2DQL2_9PSED Queuine tRNA-ribosyltran sferase OS=Pseudomonas xanthomarina OX=271420 GN=tgt PE =3 SV=1
MSRTCHMSFELLATDGRARRGRLTFPRGTVETPAFMPVGTYGTVKGMLPRDVEEIGAEIILGNTFHLWLRPGTEVIKAHGDLHDFMQWKGPILTDSGGFQVFSLGAMRKIKEEGVYFASPVDGAKVFMGPEESMQVQRDLGSDIVMIFDECTPYPADEEVARRSMELSLRWAKRSKEAHGDSVAALFGIVQGGMHESLRMRSLEGLCEIDFDGLAIGGLSVGEPKEEMIRVLDFLPSRMPADKPRYLMGVGKPEDLVEGVRRGVDMFDCVMPTRNARNGHLFTDAGVVKIRNAVHRHDDSPLEPGCDCYTCKHFSRAYLHHLDKCGEMLGSMLNTIHNLRHYQRLMAGLRQAIQQGTLAAFVDAFYAKRGLPTPPLA

SEQ ID NO: 59815 - protein, 371 aa, Pseudomonas xanthomarina; identical to SEQ ID NO: 59611
  misc_feature (1)..(371): tr|A0A3R8VC50|A0A3R8VC50_9PSED Queuine tRNA-ribosyltran sferase OS=Pseudomonas xanthomarina OX=271420 GN=tgt PE =3 SV=1

SEQ ID NO: 59816 - protein, 375 aa, Pseudomonas xinjiangensis
  misc_feature (1)..(375): tr|A0A1H1LIR5|A0A1H1LIR5_9PSED Queuine tRNA-ribosyltran sferase OS=Pseudomonas xinjiangensis OX=487184 GN=tgt P E=3 SV=1
MSHMQFELLATDGRARRGRLTFPRGVVETPAFMPVGTYGTVKGMLPRDVEAIGAQIILGNTFHLWLRPGTEVIRAHGDLHDFMQWKGPILTDSGGFQVFSLGKLRKIKEEGVTFASPVDGAKVFMGPEESMQVQRDLGSDIVMIFDECTPYPADVDTARRSMELSLRWAKRSKIAHGGNPSALFGIVQGGMHEDLRLRSLEGLNEIGFDGLAIGGLSVGEPKEEMLRVLDFLPPHMPADKPRYLMGVGKPEDLVEGVRRGVDMFDCVMPTRNARNGHLFTDSGVVKIRNATHRHDTSPLDANCDCYTCQNFSRAYLHHLDKCGEMLGSMLNTIHNLRHYQRLMAGLRGAIQQGTLSAFVEDFYARLGLPVPPLEA

SEQ ID NO: 59817 - protein, 374 aa, Pseudomonas yamanorum
  misc_feature (1)..(374): tr|A0A143GNF6|A0A143GNF6_9PSED Queuine tRNA-ribosyltran sferase OS=Pseudomonas yamanorum OX=515393 GN=tgt PE=3 SV=1
MSRMSFELLATDGKARRGRLTFPRGTVETPAFMPVGTYGTVKGMLPRDIVATGAEIILGNTFHLWLRPGTEVIKKHGDLHDFMKWQGPILTDSGGFQVFSLGAMRKIKEEGVTFASPVDGAKVFMGPEESMQVQRDLGSDIVMIFDECTPYPADEDVARISMELSLRWAQRSKNAHGDNTAALFGIVQGGMHESLRKRSLEGLDKIGFDGLAIGGLSVGEPKHEMIKVLDYLPGLMPADKPRYLMGVGKPEDLVEGVRRGVDMFDCVMPTRNARNGHLFIDTGVLKIRNAFHRHDESPLDPTCDCYTCQNFSRAYLHHLDKCGEMLGSMLNTIHNLRHYQVLMAGLREAIQQGTLAAFVDAFYAKRGLPVPPLD

SEQ ID NO: 59818 - protein, 375 aa, Pseudomonas yangmingensis
  misc_feature (1)..(375): tr|A0A1I4R7M5|A0A1I4R7M5_9PSED Queuine tRNA-ribosyltran sferase OS=Pseudomonas yangmingensis OX=1720063 GN=tgt PE=3 SV=1
MSHMHFELLATDGKARRGRLTFPRGVVETPAFMPVGTYGTVKGMLPRDIEAIGAQIILGNTFHLWLRPGTEVIRQHGDLHDFMQWQGPILTDSGGFQVFSLGAMRKIKEEGVYFSSPVNGAKVFMGPEESMQVQRELGSDIVMIFDECTPYPADHDTARRSMELSLRWAQRSKNAHEGNPSALFGIVQGGMYEDLRLRSLEGLEQIGFDGLAIGGLSVGEPKEEMIRVLDFLPPQMPADKPRYLMGVGKPEDLVEGVRRGVDMFDCVMPTRNARNGHLFVDSGVLKIRNAVHRHDQSPLDAGCDCYTCQHFSRAYLHHLDKCGEMLGSMLNTIHNLRHYQRLMAGLREAVHQGKLDHFVEAFYARLGRPVPPLET

SEQ ID NO: 59819 - protein, 375 aa, Pseudomonas zeshuii; identical to SEQ ID NO: 59701
  misc_feature (1)..(375): tr|A0A1M6ASM4|A0A1M6ASM4_9PSED Queuine tRNA-ribosyltran sferase OS=Pseudomonas zeshuii OX=1076620 GN=tgt PE=3 S V=1

SEQ ID NO: 59820 - protein, 377 aa, Pseudomonas zhaodongensis
  misc_feature (1)..(377): tr|A0A3M2HS04|A0A3M2HS04_9PSED Queuine tRNA-ribosyltran sferase OS=Pseudomonas zhaodongensis OX=1176257 GN=tgt PE=3 SV=1
MSRTCRMSFELLATEGRARRGRLTFPRGTVETPAFMPVGTYGTVKGMLPRDIEAIGAQIILGNTFHLWLRPGTEVIKAHGDLHDFMQWQGPILTDSGGFQVFSLGAMRKIKEEGVYFASPVDGAKVFMGPEESMQVQRDLGSDIVMIFDECTPYPADEDVARRSMELSLRWAKRSKNAHGDSSAALFGIVQGGMHESLRMRSLEGLCEIGFDGLAIGGLSVGEPKEEMIRVLDFLPLQMPADKPRYLMGVGKPEDLVEGVRRGVDMFDCVMPTRNARNGHLFTDTGVIKIRNAIHRHDNSPLDAACDCYTCKHFSRGYLHHLDKCGEMLGSMLNTIHNLRHYQRLMAGLRDAIQQGTLAAFVDAFYAKRGLPTPPLA

SEQ ID NO: 59821 - protein, 377 aa, Pseudomonas zhaodongensis; identical to SEQ ID NO: 59558
  misc_feature (1)..(377): tr|A0A365PZX3|A0A365PZX3_9PSED Queuine tRNA-ribosyltran sferase OS=Pseudomonas zhaodongensis OX=1176257 GN=tgt PE=3 SV=1

SEQ ID NO: 59822 - protein, 376 aa, Pseudooceanicola antarcticus
  misc_feature (1)..(376): tr|A0A285J2I9|A0A285J2I9_9RHOB Queuine tRNA-ribosyltran sferase OS=Pseudooceanicola antarcticus OX=1247613 GN=t gt PE=3 SV=1
MSTRFSFSLAATDGCARTGTISTPRGEIRTPAFMPVGTAATVKAMMPESVAATGADILLGNTYHLMLRPTAERVARLGGLHKFMNWDKPILTDSGGFQVMSLAELRKLTEEGVSFRSHIDGSKHMLTPERSMEIQKLLGSDIVMCFDECPALPADHDRIAQSMRLSMRWAQRSRDAFGDRPGHALFGIQQGGDIEELRGESAEALKGIEFDGYAIGGLAVGEGQEIMFQVLDYAPGMLPEDKPRYLMGVGKPDDIVGAVKRGVDMMDCVLPSRSGRTGQAWTRRGQVNIKNARHADDPRPLDEHCTCPACRSYSRAYLHHVYRAGEMISGMLLTWHNLHYFQELMAGMRAAIAEQRFDAWEAEFHATRALGDIEPL

SEQ ID NO: 59823 - protein, 376 aa, Pseudooceanicola atlanticus
  misc_feature (1)..(376): tr|A0A0A0EBS6|A0A0A0EBS6_9RHOB Queuine tRNA-ribosyltran sferase OS=Pseudooceanicola atlanticus OX=1461694 GN=tg t PE=3 SV=1
MTTRFAFEKLAQDGKARLGRITTPRGDIRTPAFMPVGTAATVKAMMPESVAQTGADILLGNTYHLMLRPTAERIDRLGGLHTFMNWSKPILTDSGGFQVMSLAGLRKLTEDGVRFKSHIDGSEHMLSPERSMEIQRLLGSDIVMCFDECPALPADRARIEESMRLSMRWAARSREAFGDRPGYALFGIQQGGLEEDLRGESAAALREIGFEGYAIGGLAVGEGQEAMFGCLDFAPDQLPEDKPRYLMGVGKPDDIVGAVKRGVDMMDCVLPSRSGRTGQAFTRHGVVNIKNARHADDPRPLDENCTCPACRNYSRAYLHHVFRSQEMISGMLLTWHNLQYFQDIMAGMRDAIGNGAFAAWEADFHAGRAEGDIPPL

SEQ ID NO: 59824 - protein, 426 aa, Pseudooceanicola batsensis
  misc_feature (1)..(426): tr|A3U2R6|A3U2R6_PSEBH Queuine tRNA-ribosyltransferase OS=Pseudooceanicola batsensis (strain ATCC BAA-863 / DS M 15984 / KCTC 12145 / HTCC2597) OX=252305 GN=tgt PE=3 SV=1
MGKAEGGGRRGDIATMASACDETVSPARRRGSLHKPAQLRHKAPLAQGDVMTTRFAFEKLGQDGKARLGRISTPRGEIRTPAFMPVGTAATVKAMMPESVAATGADILLGNTYHLMLRPSAERIDRLGGLHRFMNWERPILTDSGGFQVMSLASLRKLTEEGVRFKSHIDGSDHMLTPERSMEIQRLLGSDIVMCFDECPALPADRGRIEESMRLSMRWAARSREAFGDRPGHALFGIQQGGLEEDLRAESARALRDIGFEGYAIGGLAVGEGQEAMFACLDHAPDQLPEDRPRYLMGVGKPDDIVGAVKRGVDMMDCVLPSRSGRTGQAFTRHGVVNIKNARHADDPRPLDEGCSCPACRSYSRAYLHHVFRSQEMISGMLLTWHNLQYYQDLMAGMRAAIAAGTFADWEAGFHAARAAGDIPPL

SEQ ID NO: 59825 - protein, 375 aa, Pseudooceanicola flagellatus
  misc_feature (1)..(375): tr|A0A1W2BMS2|A0A1W2BMS2_9RHOB Queuine tRNA-ribosyltran sferase OS=Pseudooceanicola flagellatus OX=1387277 GN=t gt PE=3 SV=1
MTRFSFSLTATDGAARTGVISTPRGDIRTPAFMPVGTAATVKAMMPDSVRATGADILLGNTYHLMLRPGAERIARLGGLHKFMNWDRPILTDSGGFQVMSLAELRKLTEKGVTFRSHIDGSKHELTPERSMEIQKLLGSDIVMCFDECPALPADDKRVAESMRLSMRWAQRSRDAFGDRPGHALFGIMQGGVTEHLRAESAEALTVIGFDGYAVGGLAVGEGQEAMFGVLDYAPAMLPTDKPRYLMGVGKPDDIVGAVKRGIDMMDCVLPSRSGRTGQAWTRRGQVNIKNARHADDPRPLDEDCSCPTCQGYSRAYLHHVFRAQEMISGMLLTWHNLHYYQEIMQGMRDAIAQGRFADWEVDFHRQREMGDIEKL

SEQ ID NO: 59826 - protein, 377 aa, Pseudooceanicola lipolyticus
  misc_feature (1)..(377): tr|A0A2M8IY36|A0A2M8IY36_9RHOB Queuine tRNA-ribosyltran sferase OS=Pseudooceanicola lipolyticus OX=2029104 GN=t gt PE=3 SV=1
MSARFSFQLAATDGAARTGVISTPRGEIRTPAFMPVGTAATVKAMLPESVAATGADILLGNTYHLMLRPTAERIDRLGGLHRFMNWDKPILTDSGGFQVMSLAALRKLTEEGVSFKSHIDGSKHMLTPERSMEIQRLLGSDIVMCFDECPALPATQDRVAESMRLSMRWAARSKDAFGDRPGHALFGIQQGGVTQELRAESAEKLREIGFDGYAVGGLAVGEGQEAMFGVLDYAPDMLPADRPRYLMGVGKPDDIVGAVKRGIDMMDCVLPSRSGRTGQVFTRRGVLNIKNARHQDDPRPLDEDCSCPACRSYSRAYLHHVFRSQEIISSMLLTWHNLHYYQELMAGMRAAIAEGRFAAWEADFHAGRAEGDLPQLS

SEQ ID NO: 59827 - protein, 376 aa, Pseudooceanicola marinus
  misc_feature (1)..(376): tr|A0A1X6ZCT2|A0A1X6ZCT2_9RHOB Queuine tRNA-ribosyltran sferase OS=Pseudooceanicola marinus OX=396013 GN=tgt PE =3 SV=1
MSTRFSFSLQATDGRARSGVISTPRGEIRTPAFMPVGTAATVKAMMPESVAATGADILLGNTYHLMLRPTAERIARLGGLHQFMNWQKPILTDSGGFQVMSLAELRKLTEEGVTFRSHVDGSKHKLTPERSMEIQKLLGSDIVMCFDECPALPADHTRIAESMRLSMRWAQRSRDAFGDRQGHALFGIQQGGDVEELRAESAEALKGIEFDGYAIGGLAVGEGQEIMFQVLDYAPGQLPVDKPRYLMGVGKPDDIVGAVKRGVDMMDCVLPSRSGRTGQAWTRRGQVNLKNARHADDPRPLDEQCTCPTCRHYSRAYLHHVYRAGEMISGMLLTWHNLHYFQELMQGMRDAIAAGRFDAWEEDFHATRDQGDIERL

SEQ ID NO: 59828 - protein, 391 aa, Pseudooceanicola nitratireducens
  misc_feature (1)..(391): tr|A0A1I1MB65|A0A1I1MB65_9RHOB Queuine tRNA-ribosyltran sferase OS=Pseudooceanicola nitratireducens OX=517719 G N=tgt PE=3 SV=1
MTRPLSSASGSDYEHPMTRFSFSLNATDGKARTGVISTPRGEIRTPAFMPVGTAATVKAMMPESVAATGADILLGNTYHLMLRPTAERIDALGGLHRFMNWDKPILTDSGGFQVMSLASLRKLTEDGVTFKSHIDGSKHMLSPERSMEIQRLLGSDIVMCFDECPALPADRRRIEESMRLSMRWAQRSRDAFGDRPGYALFGIQQGGLEEDLRAESAAELTKIGFEGYAIGGLAVGEGQEAMFGCLDYAPDQLPQDKPRYLMGVGKPDDIVGAVKRGVDMMDCVLPSRSGRTGQAFTRHGVVNIKNARHADDPRPLDEDCTCPACRNYSRAYLHHVYRAQEMISGMLLTWHNLHYYQEIMASMRGAIAEGRFDAWEAEFHAGRAEGDIPPL

SEQ ID NO: 59829 - protein, 375 aa, Pseudooceanicola sp.
  misc_feature (1)..(375): tr|A0A2E2PBT7|A0A2E2PBT7_9RHOB Queuine tRNA-ribosyltran sferase OS=Pseudooceanicola sp. OX=1914328 GN=tgt PE=3 SV=1
MTGFSFSLSATDGKARTGAITTPRGTIRTPAFMPVGTAATVKAMLPESVAATGADILLGNTYHLMLRPGAERVDRLGGLHEFMNWSKPILTDSGGFQVMSLAGLRKLTEEGVAFKSHIDGSRHMLTPERSMEIQRLLGSDIVMCFDECPALPAEEKAVAESMRLSMRWAQRSRDAFGDRAGHALFGIQQGGVTRDLRAESAEALQEIDFDGYAVGGLAVGEGQEIMFDVLDFAPDMLPVDKPRYLMGVGKPDDIVGAVKRGIDMMDCVLPSRSGRTGQVFTRRGVVNIKNARHADDPRPLDEGCSCPACRGYSRAYLHHVFRAQEMISGMLLTWHNLQYYQDLMAGMREAIAAGTFCDWENQFHADRALGDIEPV

SEQ ID NO: 59830 - protein, 376 aa, Pseudooctadecabacter jejudonensis
  misc_feature (1)..(376): tr|A0A1Y5R8F6|A0A1Y5R8F6_9RHOB Queuine tRNA-ribosyltran sferase OS=Pseudooctadecabacter jejudonensis OX=1391910 GN=tgt PE=3 SV=1
MKNTFSFELQKTDGAARTGVIRTPRGEVRTPAFMPVGTAATVKAMMPESVAETGADILLGNTYHLMLRPTAERIDRLGGLHRFMNWDRPILTDSGGFQVMSLSGLRKLTEDGVTFKSHIDGSKHVLSPETSMEIQRLLGSDIVMCFDECPALPADKSRIADSMRLSMRWADRSRAAFGDRPGHALFGIQQGGLEEDLRAESAEALQQIGFEGYAVGGLAVGEGQEAMFGCLDFAPGQLPVDKPRYLMGVGKPDDIVGAVKRGIDMMDCVLPSRSGRTGQVFTRHGVVNIKNARHADDPRPLDDTCRCPACRNYSRAYLHHVFRSQEMISGMLLTWHNLTYFQDIMQGMRAAIAAGTFDAWEADFHAGRAAGDIEPL

SEQ ID NO: 59831 - protein, 376 aa, Pseudopedobacter saltans
  misc_feature (1)..(376): tr|F0S8R6|F0S8R6_PSESL Queuine tRNA-ribosyltransferase OS=Pseudopedobacter saltans (strain ATCC 51119 / DSM 12 145 / JCM 21818 / LMG 10337 / NBRC 100064 / NCIMB 13643 ) OX=762903 GN=tgt PE=3 SV=1
MKFKLSAQDKFSKARAGEIETDHGTIQTPIFMPVGTAGTVKAVHQRELRDDIKAQIILGNTYHLYLRPGLDVIKKAGGLHKFNGWEKPILTDSGGYQVYSLTEVRKIKEEGVTFKSHIDGSKHLFTPENVMDIQRTIGADIIMAFDECTPYPCDYNYARKSLDMTHRWLKRCIDRFDSTKPKYGYSQTLFPIVQGSVYKYLRKKSAEFIAEQNREGNAIGGLSVGEPAEEMYAMTEVVCEILPTEKPRYLMGVGTPINILENIALGIDMFDCVMPTRNARNGMLFTRNGIINIKNEKWKDDFSPIDPDSDLYSDLVYSKAYLRHLIHSKEILGAQIASLHNLHFYLWLVKEAREKIISGEFYEWKNKMVKVLGQRL

SEQ ID NO: 59832 - protein, 379 aa, Pseudopedobacter saltans
  misc_feature (1)..(379): tr|A0A2W5F2C4|A0A2W5F2C4_9SPHI Queuine tRNA-ribosyltran sferase OS=Pseudopedobacter saltans OX=151895 GN=tgt PE =3 SV=1
MASLTFELKGTDNKSKARAGIITTDHGQIETPIFMPVGTVGSVKGVSQQQLKNNVQAQIILGNTYHLYLRPGTEVLEAAGGLHKFNGWDRPILTDSGGYQVFSLAGTRKIKEEGVTFQSHIDGSRHLFSPEKVMDIQRSIGADIIMAFDECTPFGSDYNYTRKSMEMTHRWLDRCIKRLDETQPIYGHTQNLFPIVQGSVFPDLRKISCEYIASKNAVGNAIGGLSVGEPEDKMYEFTGLCCEILPLDKPRYLMGVGTPWNILEGIALGVDMFDCVMPTRNGRNGMLFTSEGVINIKNKKWEKDFSPIDAGFESEVSNFYTKAYLRHLFHAQELLGLEIASIHNLSFYLWLVKEARKHILEGDFESWKSQMVVKLRQRL

SEQ ID NO: 59833 - protein, 376 aa, Pseudopelagicola gijangensis
  misc_feature (1)..(376): tr|A0A1M6N9F4|A0A1M6N9F4_9RHOB Queuine tRNA-ribosyltran sferase OS=Pseudopelagicola gijangensis OX=1470563 GN=t gt PE=3 SV=1
MTSQFSFELQATDGKARKGVIKTPRGEIRTPAFMPVGTAATVKAMMPESVRATGADILLGNTYHLMLRPTAERIDRLGGLHKFMNWDRPILTDSGGFQVMSLAELRKLTEEGVAFKSHIDGSKHMLTPERSMEIQRLLGSDIVMCFDECPALPADRKRINESMQLSMRWAKRSREAFGDRPGHALFGIQQGGLEQDMRAESAEALKAIGFEGYAVGGLAVGEGQEAMFGVLDYAPDMLPMDRPRYLMGVGKPDDIVGAVARGIDMMDCVLPSRSGRTGQVFTRHGVVNIKNARHADDPRPLDEHCTCPACSNYSRAYLHHVFRANEMISGMLLTWHNLHYFQEIMQGMRDAIEGGTFEAWQVAFHEGRAQGDIEPF

SEQ ID NO: 59834 - protein, 401 aa, Pseudopropionibacterium propionicum
  misc_feature (1)..(401): tr|A0A3S5AI65|A0A3S5AI65_9ACTN Queuine tRNA-ribosyltran sferase OS=Pseudopropionibacterium propionicum OX=1750 GN=tgt PE=3 SV=1
MAVRSGGRARTGTIHTPHGDIRTPAFIPVGTKASVKAVLPEAMADLGAQALLANAYHLYLQPGSDLVDEAGGLGRFMNWPGPTFTDSGGFQVMSLGAGFKKVLAMDTKGIVGDDVIAEGKTRRAHVDEDGVTFFSHLNGSRLRFTPEVSMTIQHQLGADIMFAFDELTTLMNTRDYQEASVARTHRWAVRCLRAHATLTEERVGKPYQALFGVIQGAQYEDLRRRAAADLAALEVDGFRFDGFGLGGALEKENLGRIIGWMVDELPEDRPRHLLGISEPEDLFEAVAFGADTFDCVNPSRVARNAAIYTADGRYNVNTARNRRAFEPLEAGCDCYTCTHYTRAYLHHLFKAKEMLASTLATIHNERFTVRLVDEIRASLESGEFDLFRNEFMGRYNARKTQ

SEQ ID NO: 59835 - protein, 407 aa, Pseudopropionibacterium propionicum
  misc_feature (1)..(407): tr|A0A4V1GCE3|A0A4V1GCE3_9ACTN Queuine tRNA-ribosyltran sferase OS=Pseudopropionibacterium propionicum OX=1750 GN=tgt PE=3 SV=1
MSFGFEVAVRSGGRARTGTIHTPHGDIRTPAFIPVGTKASVKAVLPEAMADLGAQALLANAYHLYLQPGSDLVDEAGGLGRFMNWPGPTFTDSGGFQVMSLGAGFKKVLAMDTKGLVGDDVIAEGKTRRAHVDEDGVTFFSHLNGSRLRFTPEVSMTIQHQLGADIMFAFDELTTLMNTRDYQEASVARTHRWAVRCLRAHATLTEERVGKPYQALFGVIQGAQYEDLRRRAAADLAALEVDGFRFDGFGLGGALEKENLGRIIGWMVDELPEDRPRHLLGISEPEDLFEAVAFGADTFDCVNPSRVARNAAIYTADGRYNVNTARNRRAFEPLEAGCDCYTCTHYTRAYLHHLFKAKEMLASTLATIHNERFTVRLVDEIRASLESGEFDLFRNEFMGRYNARKTQ

SEQ ID NO: 59836 - protein, 376 aa, Pseudopuniceibacterium sediminis
  misc_feature (1)..(376): tr|A0A399J2V2|A0A399J2V2_9RHOB Queuine tRNA-ribosyltran sferase OS=Pseudopuniceibacterium sediminis OX=2211117 GN=tgt PE=3 SV=1
MSTPFSFTLAATDGRARTGTIDTPRGQIRTPAFMPVGTAATVKAMMPESVAATGADILLGNTYHLMLRPTAERIDRLGGLHSFMNWDKPILTDSGGFQVMSLASLRKLTEEGVTFSSHVDGSKHMISPERSMEIQKLLGSDIVMCFDECPALPAEDSVVAASMRMSMRWAQRSRDAFGDRPGHALFGIQQGGVNQDLRGESAEALTRIGFDGYAVGGLAVGEGQEAMFGVLDYAPDMLPTDKPRYLMGVGKPDDIVGAVARGIDMMDCVLPSRSGRTGQVFTRHGVVNIKNARHADDPRPLDEDCTCPACRNYSRAYLHHVFRSQEMISGMLLTWHNLHYYQDLMQGMREAIAAARFDDFVTVFHALRAEGDIERL

SEQ ID NO: 59837 - protein, 383 aa, Pseudoramibacter alactolyticus
  misc_feature (1)..(383): tr|E6ME01|E6ME01_9FIRM Queuine tRNA-ribosyltransferase OS=Pseudoramibacter alactolyticus ATCC 23263 OX=887929 GN=tgt PE=3 SV=1
MFRYELIKKDKYTGARLGRIITDHGEIETPIFMPVGTQATVKSMNNRELEDIGAQIILGNTYHLYLRPGEDIMAKAGGLHRFMHWDKPILTDSGGFQVFSLGPMRKITEEGVHFVSHLDGSRHFMTPEKSIHMQNVIGADIIMCFDECAPADADYAYTKKSTAMTTRWAARCQAAHKRPDAQALFGIVQGGMFDDLRAKSAADLVAMDFPGYAIGGLSVGESHDKMYHMLDVTTPLLPENKPRYLMGVGSVDALIEGVIRGIDMFDCVLQTRIARNGTAMTSEGKKVIRNAVYQADFSPLDPACDCYVCRNHTRAYLRHLIKCKEILGARLLTYHNLYFTLKLMEKIREAIRNDAVLELRDSVFCQYGIEKIGVYENAGKSIG

SEQ ID NO: 59838 - protein, 376 aa, Pseudorhizobium pelagicum
  misc_feature (1)..(376): tr|A0A081MI85|A0A081MI85_9RHIZ Queuine tRNA-ribosyltran sferase OS=Pseudorhizobium pelagicum OX=1509405 GN=tgt PE=3 SV=1
MTETFQFNLKATDGGARLGEVTMPRGTIRTPAFMPVGTVGTVKAMYLDQVRETGADIILGNTYHLMLRPGAERVARLGGLHELIRWKHPILTDSGGFQVMSLSGLRKLDEQGVTFKSHVDGSLHHMSPERSIEIQGLLGSDIQMQLDECVALPAEPKEIERAMELSLRWAERCRVAFGDQPGKAMFGIVQGGDQPDLRVRSAEGLKQLDLKGYAVGGLAVGEPQDVMLRMLETTLPVLPSEKPRYLMGVGTPDDMLKSVARGIDMFDCVMPTRSGRHGLAFTRRGKVNIRNARHAEDMRPLDEESSCPAARDYSRAYLHHLVRSDEALGGMLLSWNNLSYYQDLMKGIRLAIAEGRFADFYAETQETWARGDLAPL

SEQ ID NO: 59839 - protein, 410 aa, Pseudorhodobacter antarcticus
  misc_feature (1)..(410): tr|A0A1H8D558|A0A1H8D558_9RHOB Queuine tRNA-ribosyltran sferase OS=Pseudorhodobacter antarcticus OX=1077947 GN= tgt PE=3 SV=1
MRLVAHLYREAGRAGQEGLAFAGFLPKRRKKGRRMTTKFSFDVLARDGRARKGVISTPRGDIRTPAFMPVGTAATVKAMLPDSVRATGADILLGNTYHLMLRPTAERIAGLGGLHKFMNWDRPILTDSGGFQVMSLASLRKLTEEGVRFSSHIDGSKHMLSPERSMEIQKLLGSDIVMCFDECPALPATDAQVAASMALSMRWAQRSRDAFGDRPGHALFGIQQGGVTQHLREESAAALRAIGFDGYAVGGLAVGEGQEAMFGVLDYAPGMLPEDKPRYLMGVGKPDDIVGAVERGIDMMDCVLPSRSGRTGQGWTRHGQVNMRNARHKDDPRPLDAACTCPACRNYSRAYLHHVIKADEIIGSMLLTWHNLHYYQDLMEGMRVAIGAGALAAFVANFHAARAEGDIEPL

SEQ ID NO: 59840 - protein, 376 aa, Pseudorhodobacter sp.
  misc_feature (1)..(376): tr|A0A4P8EDZ2|A0A4P8EDZ2_9RHOB Queuine tRNA-ribosyltran sferase OS=Pseudorhodobacter sp. S12M18 OX=2500533 GN=t gt PE=3 SV=1
MTQRFSFEVEARDGRARKGVISTPRGEIRTPAFMPVGTAATVKAMMPESVCATGADILLGNTYHLMLRPTAERIAGLGGLHKFMNWDRPILTDSGGFQVMSLASLRKLTEEGVRFASHIDGSKHMLSPERSMEIQKLLGSDIVMCFDECPALPATDAEVAKSMALSMRWAQRSRDAFGDRPGHALFGIQQGGVTKDLRAESAEALRAIEFDGYAVGGLAVGEGQEAMFGVLDYAPDMLPEDKPRYLMGVGKPDDIVGAVERGIDMMDCVLPSRSGRTGQGWTRHGQVNMRNARHKDDPRPLDEACGCPACRNYSRAYLHHVIKADEIIGSMLLTWHNLHYYQDLMAGLRDAISTGALAGFVADFHAKRAGGDIEQL

SEQ ID NO: 59841 - protein, 376 aa, Pseudorhodobacter sp.
  misc_feature (1)..(376): tr|A0A2M8MV92|A0A2M8MV92_9RHOB Queuine tRNA-ribosyltran sferase OS=Pseudorhodobacter sp. MZDSW-24AT OX=2052957 GN=tgt PE=3 SV=1
MAQRFGFSLTATDKGARTGVIHTPRGEIRTPAFMPVGTAATVKAMLPESVRATGADILLGNTYHLMLRPTAERIAHLGGLHRFMNWERPILTDSGGFQVMSLASLRKLTEEGVRFSSHIDGSKHMLSPERSMEIQKLLGSDIVMCFDECPALPATEAEVAKSMALSMRWAQRSRDAFGDRPGHALFGIMQGGVTRDLREESAKALVDIGFDGYAVGGLAVGEGQEAMFGVLDYAPGFLPADKPRYLMGVGKPDDIVGAVERGIDMMDCVLPSRSGRTGQAWTRRGQVNIKNARHMDDPRPLDENCTCPACQNYSRAYLHHVFKAQEMISGMLLTWHNLHYYQELMQGLRAAIAAGQLSAFVADFHAQRAAGDIEPV

SEQ ID NO: 59842 - protein, 387 aa, Pseudorhodoferax soli
  misc_feature (1)..(387): tr|A0A368XU62|A0A368XU62_9BURK Queuine tRNA-ribosyltran sferase OS=Pseudorhodoferax soli OX=545864 GN=tgt PE=3 SV=1
MLQFDLLNTDPDSHARRGTLTLNHGVVQTPIFMPVGTYGTVKGVMPRSLEEMGAQIILGNTFHLWMRPGLDVVRHFGGLHRFEVWNKPILTDSGGFQVWSLGAMRKISEEGVKFASPVNGDKLFLTPEISMEIQTILNSDIVMQFDECTPYDTKGHITTEAEARTSMELSVRWARRCQAEFARLQNPNALFGIVQGGMFEHLREESLAQLVEMDFPGYAIGGVSVGEPKPEMLRIMAHTPHRLPAHKPRYLMGVGTPEDLVEGVAQGVDMFDCVMPTRNARNGTIFTRYGDLKIRNAKHRSDERPLDETCTCHACAGTSGVAKGAGGFSRAYLHHLDRCGEMLGPMLTTIHNLHYYLSLMAEIRAALEAGTFTEFRAQFARDRARGV

SEQ ID NO: 59843 - protein, 387 aa, Pseudorhodoferax sp.
  misc_feature (1)..(387): tr|A0A0Q4Y1M5|A0A0Q4Y1M5_9BURK Queuine tRNA-ribosyltran sferase OS=Pseudorhodoferax sp. Leaf267 OX=1736316 GN=t gt PE=3 SV=1
MLDFNLLATDPTSHARRGTLTLNHGVVQTPIFMPVGTYGTVKGVMPRSLEEMGAQIILGNTFHLWMRPGLDVIRQFGGLHRFEVWDKPILTDSGGFQVWSLGAMRKISEEGVKFASPVNGDKLFLTPEVSMQIQTDLNSDIVMQFDECTPYDTKGHITTEAEARSSMELSLRWAERCRAEFARLQNPNALFGIVQGGMFEHLRQESLDQLVAMDFPGYAIGGVSVGEPKDEMLRIMAHTPHRLPAHKPRYLMGVGTPEDLVEGVAQGVDMFDCVMPTRNARNGTIFTRYGDLKIRNAKHRSDERPLDTTCTCHACAGTSGVAMGSGGFSRAYLHHLDRCGEMLGPMLTSIHNLHYYLNLMREVREALDAGDFAGFRKRFAADRARGV

SEQ ID NO: 59844 - protein, 390 aa, Pseudorhodoferax sp.
  misc_feature (1)..(390): tr|A0A0S9NWV7|A0A0S9NWV7_9BURK Queuine tRNA-ribosyltran sferase OS=Pseudorhodoferax sp. Leaf274 OX=1736318 GN=t gt PE=3 SV=1
MLDFQLLATDPASHARRGTLTLNHGVVQTPIFMPVGTYGTVKGVMPRSLEEMGAQIILGNTFHLWMRPGLDVVRQFGGLHRFEAWNKPILTDSGGFQVWSLGAMRKISEEGVKFASPVNGDKLFLTPEVSMQVQTVLNSDIVMQFDECTPYDTKGHITTEAEARTSMELSVRWAKRCQAEFARLQNPNALFGIVQGGMFEHLREESLNALVEMDFPGYAIGGVSVGEPKPEMLRIMAHTPHRLPAHKPRYLMGVGTPEDLVEGVAQGVDMFDCVMPTRNARNGTIFTRYGDLKIRNAKHRSDERPLDETCTCHACAGTSGVASGAGGTGGFSRAYLHHLDRCGEMLGPMLTTIHNLHYYLNLMTEIRAALDAGRFTQFRAQFAQDRARGV

SEQ ID NO: 59845 - protein, 377 aa, Pseudorhodoplanes sinuspersici
  misc_feature (1)..(377): tr|A0A1W6ZW41|A0A1W6ZW41_9RHIZ Queuine tRNA-ribosyltran sferase OS=Pseudorhodoplanes sinuspersici OX=1235591 GN =tgt PE=3 SV=1
MSNPFSFHLIASDGTARAGEIETAHGRIATPAFMPVGTQATVKAMMPDDVARTGADILLGNTYHLMLRPGPERIAALGGLHQFMNWHKPILTDSGGFQVMSLSQLRKIDEKAVTFRSHLDGAMYELSPERAVEIQRLLGADISMQLDECIRLPAKRDEIDRAMQLSLRWAERCKRAFEGAKPGHALFGIVQGGDDPALRIASAKALVDMDFQGYAIGGLAVGEPQAVMLSMIDIVAPVLPADRPRYLMGVGTPDDLIEAIWRGIDMFDCVMPTRNGRHGVAFTRYGQINLKNARHADDPRPLDERSPYAPTRTYSRAYLHHLVKANETLGAMLLSQVNLAYYQALMLGAREAIAAGTFNDYRVSVKAGWEEGDIPPR

SEQ ID NO: 59846 - protein, 374 aa, Pseudoroseicyclus aestuarii
  misc_feature (1)..(374): tr|A0A318SZN3|A0A318SZN3_9RHOB Queuine tRNA-ribosyltran sferase OS=Pseudoroseicyclus aestuarii OX=1795041 GN=tg t PE=3 SV=1
MRFSFTLDATDGAARTGRIDTPRGAIRTPAFMPVGTAATVKAMLPEQVAETGADILLGNTYHLMLRPGAERVARLGGLHRFMNWDRPILTDSGGFQVMSLADLRKLTEEGVTFRSHVDGSKHVLTPERSMEIQRLLGSDIVMCFDECPALPATEERVAEAMRLSMRWAERSREAFGDRPGHALFGIQQGGVTRALREESAEALKSIGFEGYAIGGLAVGEGQEAMFGVLDYAPAMLPEDRPRYLMGVGKPDDILGAVKRGVDMMDCVLPTRSGRTGQAWTRRGQVNLRNARHAEDPRPLDEGCTCPACRGYSRAYLHHVVRAGEMIAGMLLTAHNLQYYQDLMAGMRGAIAEGRFAAFEADFHALRAEGDIERL

SEQ ID NO: 59847 - protein, 375 aa, Pseudoruegeria aquimaris
  misc_feature (1)..(375): tr|A0A1Y5RQR7|A0A1Y5RQR7_9RHOB Queuine tRNA-ribosyltran sferase OS=Pseudoruegeria aquimaris OX=393663 GN=tgt PE =3 SV=1
MTKFSFALHKTDGAARTGVISTPRGEIRTPAFMPVGTAATVKAMMPESVRATGADILLGNTYHLMLRPTAERIDRLGGLHRFMNWERPILTDSGGFQVMSLSDLRKLTEEGVTFRSHIDGSKHFLSPERSMEIQRLLGSDIVMCFDECPALPADRKRIAESMRLSMRWAQRSRDAFGDRPGHALFGIQQGGLERDLREESAEALKSIGFDGYAIGGLAVGEGQEAMFATLDFAPSQLPEDKPRYLMGVGKPDDIVGAVKRGVDMMDCVLPSRSGRTGQAWTRRGQVNIKNVRHQDDPRPLDADCSCPTCRNYSRAYLHHVYRAKEMISGMLLTWHNLHYFQELMQGMRDAIAAGEFARFEADFHALRAEGDIEPL

SEQ ID NO: 59848 - protein, 376 aa, Pseudoruegeria haliotis
  misc_feature (1)..(376): tr|A0A2T0RZC0|A0A2T0RZC0_9RHOB Queuine tRNA-ribosyltran sferase OS=Pseudoruegeria haliotis OX=1280846 GN=tgt PE =3 SV=1
MDKTFSFSLNATDGKARTGVISTPRGEIRTPAFMPVGTAATVKAMLPENVRATGADILLGNTYHLMLRPTAERIDRLGGLHDFMNWERPILTDSGGFQVMSLTALRKITEQGVRFKSHIDGSVHELSPERSMEIQRLLGSDIVMCFDECPALPADRDRIAESMRMSMRWAQRSRDAFGDRPGHALFGIQQGGLEEDLRGESAEALRGIGFDGYAIGGLAVGEGQKAMFETLDYAPDMLPTDKPRYLMGVGKPDDIVGAVKRGVDMMDCVLPSRSGRTGQVFTRRGVLNIKNARHQDDPRPIDEHCNCPACANYSRAYLHHVFRAQEIISSMLLTWHNLHYYQEIMQGMRDAIAAGRFAAWEADFHAERAAGDIEPV

SEQ ID NO: 59849 - protein, 376 aa, Pseudoruegeria lutimaris
  misc_feature (1)..(376): tr|A0A1G8U0I3|A0A1G8U0I3_9RHOB Queuine tRNA-ribosyltran sferase OS=Pseudoruegeria lutimaris OX=571298 GN=tgt PE =3 SV=1
MTQRFTFELQATDDRARTGVIRTPRGDIRTPAFMPVGTAATVKAMLPESVRATGADILLGNTYHLMLRPTAERIDRLGGLHRFMNWERPILTDSGGFQVMSLTDLRKLTEKGVEFRSHIDGSKHMLTPERSMEIQRLLGSDIVMCFDECPALPADRARIEESMRLSMRWAERSRDAFGDRPGHALFGIQQGGLEQDLRAESAEALRTIGFDGYAIGGLAVGEGQEAMFGVLDFAPEMLPRDKPRYLMGVGKPDDIVGAVKRGIDMMDCVLPSRSGRTGQVFTRRGVVNIKNARHQDDPRPLNEYCTCPACQKYSRAYLHHVFRAHEIISSMLMTWHNLHYYQELMQGMREAISAGRFADWEAGFHAERAQGDIEPL

SEQ ID NO: 59850 - protein, 376 aa, Pseudoruegeria sp.
  misc_feature (1)..(376): tr|A0A1X4J104|A0A1X4J104_9RHOB Queuine tRNA-ribosyltran sferase OS=Pseudoruegeria sp. SK021 OX=1933035 GN=tgt P E=3 SV=1
MTRNINFQLHATEGRARTGTLRTPRGDIRTPAFMPVGTAATVKAMLPGSVRATGADILLGNTYHLMLRPTAERINALGGLHRFMNWDRPILTDSGGFQVMSLADLRKLTEEGVTFRSHIDGSKHMLSPETSMQIQKLLGSDIVMCFDECPALPADRDRIAESMRLSMRWAQRSRDAFGDRPGHALFGIQQGGDIEDLRGESAEALRAIDFDGYAVGGLAVGEGQEIMFKVLDYAPGMLPEDKPRYLMGVGKPDDIVGAVARGIDMFDCVLPSRSGRTGQLFTRRGVVNIKNARHQNDPRPIDDQCTCPACTGYSRAYLHHVFRAQEIISSMLLTWHNLHYYQELMSDIRAAIAAGTFTEFQREFNALRAQGDLEPL

SEQ ID NO: 59851 - protein, 467 aa, Pseudoscardovia radai
  misc_feature (1)..(467): tr|A0A261EWK2|A0A261EWK2_9BIFI Queuine tRNA-ribosyltran sferase OS=Pseudoscardovia radai OX=987066 GN=tgt PE=3 SV=1
MSTAENNEPTTASTAANTAANTDSTAAQSSVFAHFRTPLGAEPGKPGDRGAFGFDIHTRIPDRHGRTGVIHTPHGDINTPAFVPVATQATMKGVLPEQMRELGAQCLLANAFHLFERPGEDVLDEAGGLARFMNWDGPTYTDSGGFQVLSLGAGFKKTLAMDVQGMKSDDVIAKGKERLAFVDEDGVTFKSPLNGAKKRFSAEISMSIQHKIGADIMFAFDELTTLMNTRKYQEKSVERTFRWAKRCVAEHERLTQARPGKPYQALFGVVQGANYEDLRHLAAREIASLDFDGFGIGGAIEKRILGDTCRWICDELPENKPRHVLGIAAIDDIFAAVENGGDTFDCVAPAREARNGAIYTRTGRWNIKRAALKHDFRPLDPTCDCYTCTHYTRAYLNHLVHTREMTASTLATIHNERFFVKLLGDIRDAIDGGYFPEFRDETLARFYGGADRVAPGTHANSGAADSR

SEQ ID NO: 59852 - protein, 450 aa, Pseudoscardovia suis
  misc_feature (1)..(450): tr|A0A261EXV9|A0A261EXV9_9BIFI Queuine tRNA-ribosyltran sferase OS=Pseudoscardovia suis OX=987063 GN=tgt PE=3 S V=1
MTDAIAGAAIAATAATWPATPLGAHPDKPGDRAAFGFTIGTRIPGRHGRTGVIHTPHGDIATPAFVPVATQATMKGVLPEQMRDLGAQCLLANAFHLFERPGEDVLDEAGGLGRFMNWGGPTYTDSGGFQVLSLGAGFKKTLAMDVQGMKSDDVIAKGKERLAFVDEDGVTFKSPLNGAKKRFSAEISMGIQHKIGADIMFAFDELTTLMNTRQYQEKSVERTFRWAKRCVAEHERLTQTRLGKPYQALFGVVQGANYEDLRHLAAREIASLDFDGFGIGGAIEKRILGDTCRWICDELPENKPRHVLGIAAIDDIFAAVENGGDTFDCVAPAREARNGAIYTRTGRWNIKRAALKHDFRPLDPTCDCYTCTHYTRAYLNHLVHTREMTASTLATIHNERFFVKLLGDIRDAIDGGYFPEFRDETLARFYGGSDRVAPGTHANSGAADSQ

SEQ ID NO: 59853 - protein, 376 aa, Pseudosphingobacterium domesticum
  misc_feature (1)..(376): tr|A0A1H7WZE3|A0A1H7WZE3_9SPHI Queuine tRNA-ribosyltran sferase OS=Pseudosphingobacterium domesticum OX=407022 GN=tgt PE=3 SV=1
MKFTLQSTDNLSKARAGEIETAHGTIQTPIFMPVGTAGSVKGVHQHELKKDIEAQIILGNTYHLYLRPGLDVIHAAGGLHKFNGWDKPILTDSGGYQVYSLTDVRKIKEEGVTFRSHIDGSKHLFTAENVMDTQRIIGADIIMAFDECTPYPCDYKYAKESLDMTHRWLKRCCERFDSTPSLYGYEQSLFPIVQGSVYKDLREKSAETIASFDRDGNAIGGLSVGEPAEEMYAMTEVVTNILPKNKPRYLMGVGTPINILENIALGIDMFDCVMPTRNGRNGMLFTRNGIINIKNKKWEADFSPIDADSDLHTDLFYTKAYLRHLIHSKELLGAQIATLHNLHFYLWLVKEARNKIIEGSFYEWKNKMVKQLGERL

SEQ ID NO: 59854 - protein, 375 aa, Pseudospirillum japonicum
  misc_feature (1)..(375): tr|A0A1H6SUM9|A0A1H6SUM9_9GAMM Queuine tRNA-ribosyltran sferase OS=Pseudospirillum japonicum OX=64971 GN=tgt PE =3 SV=1
MSSSFMRFECLTTEGKARRGRLHFPRGVVETPAFMPVGTYGTVKGVLPRDLHELGADIILGNTFHLMLRPGTEVIQAHGDLHDFMQWDKPILTDSGGFQVFSLGAMRKITEQGVTFRSPINGAKVFMGPEESMQVQRALGSDIVMIFDECTPYPATYEQARTSMELSLRWAARSKQAHADNPSALFGIIQGGMYEDLRYRSLEGLLNIGFDGLAIGGLSVGEPKTEMLKVLDYLPAAMPADKPRYLMGVGKPEDLVEGVRRGVDMFDCVMPTRNARNGHYFVTDGVIKIRNARYKTETAPLDEHCDCYTCQNFSRAYLHHLDKCGEMLGATLASIHNLRYYQRLMAGLRAALEAGTLSAFIEDFYARRGLAVPEC

SEQ ID NO: 59855 - protein, 396 aa, Pseudothermotoga hypogea
  misc_feature (1)..(396): tr|A0A0X1KNX5|A0A0X1KNX5_9THEM Queuine tRNA-ribosyltran sferase OS=Pseudothermotoga hypogea DSM 11164 = NBRC 10 6472 OX=1123384 GN=tgt PE=3 SV=1
MSDRPPSNARPSNFEIVCRTGCARLGRLKTLHGTFETPIFMPVGTNANVKLMRSDDLKRVGASIILSNAYHVAVRPGLEVIELHGGLHNFMAWDGGILTDSGGFQMFSLKNFRKVSDEGVTFVSPYDGSKLFLTPELSMDIQRTLGSDIVMVLDHCPPIDVGYTEALDATRRTHEWAERCLKRGVKEGQLLFAIAQGGAFEDLRRASARYLSEKDFDGFAVGGLSLGEPFEMTLRLAHATVSELPDDRPRYFMGGGSPRTIIELVAIGIDMFDSVYPTRLARHGAALTSEGRLNIKASRYRKDLSPIDHRCDCLVCRNYTRSYIHHLLNRGETLAGMLLTYHNLYYMFRFMERVRESILNGTLEEMRREVAEIYEERRGSPVDVLALDYNGARRHS

SEQ ID NO: 59856 - protein, 393 aa, Pseudothermotoga lettingae
  misc_feature (1)..(393): tr|A8F4C9|A8F4C9_PSELT Queuine tRNA-ribosyltransferase OS=Pseudothermotoga lettingae (strain ATCC BAA-301 / DS M 14385 / NBRC 107922 / TMO) OX=416591 GN=tgt PE=3 SV=1
MLQKEQRSCFEIVSKFGEARVGKLHTNHGDYETPVFMPVGTNANVKLTDTMRLKEIGAGIILGNSYHLAVRPGLDVIRLHGGLHQFMGWKGGILTDSGGFQVFSLRKLRDIGDDGVLITSPVDGSKMLLTPELSMEIQSTLNSDIVMVLDHCPGPEDSYTESMVSAKRTYNWAMRCLKHGVNEHQLLFAIAQGGVYEDLRKLSAEQLSQLPFDGFAIGGLSLGEPFEKTLYLTQITVSALPSENPRYFMGGGSPALIIQLVEMGVDMFDSVFPTRLARHGAALTWKGRLNIKSARFKRDLQPIEENCDCFVCQNYSKSYLHHLFDRKEVLGGILLTYHNLHFMMKFMNKIRNSIEDGTFKTLKREVLDVYGKGKKADLYVDAAISDNNNGRYN

SEQ ID NO: 59857 - protein, 396 aa, Pseudothermotoga sp.
  misc_feature (1)..(396): tr|A0A3D3V2Z0|A0A3D3V2Z0_9THEM Queuine tRNA-ribosyltran sferase OS=Pseudothermotoga sp. OX=2033661 GN=tgt PE=3 SV=1
MSDRLPSNARPSNFEIVCRTGCARLGRLKTLHGTFETPIFMPVGTNANVKLMRSDDLKRVGASIILSNAYHVAVRPGLEVIELHGGLHNFMAWDGGILTDSGGFQMFSLKNFREVSDEGVTFVSPYDGSKLFLTPELSMDIQRTLGSDIVMVLDHCPPIDADYAEALDATRRTNEWAERCLKRGVKEGQLLFAISQGGAFEDLRRASARHLSEKDFDGFAVGGLSLGEPFEMTLQLAHATVSELPDDRPRYFMGGGSPRTIIELVAIGIDMFDSVYPTRLARHGAALTSEGRLNIKASRYRRDLSPIDHRCDCLVCRNYTRSYIHHLLNRRETLAGMLLTYHNLYYMFRFMERVRESILNGTLEEMRREVAEIYEERRGNPVDVLALDYDGARRHS

SEQ ID NO: 59858 - protein, 386 aa, Pseudothermotoga thermarum
  misc_feature (1)..(386): tr|F7YY94|F7YY94_9THEM Queuine tRNA-ribosyltransferase OS=Pseudothermotoga thermarum DSM 5069 OX=688269 GN=tgt PE=3 SV=1
MESLGFEIVKECGSARVGKLKTAHGVYETPIFMPVGTNANVKLMRSEDLKEIGVGILLGNSYHLAVRPGLEVIELHGGLHQFMNWDGAILTDSGGFQVFSLKKLIKISDEGVLITSPVDGSKIFLTPELSMKIQRTLNSDIVMVLDHCPSPADGYKEVLEATKRTYRWALKCLKEGVQKHQLLFAIAQGGTYEDLRIESAKSLSELPFDGFAIGGLSLGEEYEKTLYMSEVSVSCLPKHKPRYFMGGGSPALIVRLVEIGVDMFDSVFPTRLARHGTALTWEGRLNVKASRYKMDKRPIDEKCSCKVCRNYTRSYIHHLIDREETLGGILLTYHNLYFMMDFMKRLRESILQGTFGSFKEEVLKAYEKDNVVCSDFADNVVDFGKS

SEQ ID NO: 59859 - protein, 393 aa, Pseudovibrio axinellae
  misc_feature (1)..(393): tr|A0A165YPQ3|A0A165YPQ3_9RHOB Queuine tRNA-ribosyltran sferase OS=Pseudovibrio axinellae OX=989403 GN=tgt PE=3 SV=1
MSEKTTEQAATTKPFSFKLLKTEGMARRGEITTPHGKVRTPAFMPVGTQATVKAMYPQQVRDLGADVVLGNTYHLMLRPTAERIAKLGGLHKFMGWDHTILTDSGGFQVMSLSGLRKMTEEGVTFSSHHDGSKHFMSPERSVEIQGLLGSDIQMQLDECIALPAERSEVERAMQLSLRWAERSRNQFESMGGPQKGQGLYGIVQGGDVPDLRIESAQRLGELPMEGYSVGGLAVGEPQAVMLKMLEITTPAMPNDKPRYLMGVGTPEDILESVARGIDQFDCVMPTRAGRHGLAYTRFGKVNLKNARHSEDPRPLDEESQCEAASKYSRAYLHHLVRVNEGLGAMLLTWNNLAYYQYLMQGIRDAIDEGRFEEFRQQTKEDWARGDLEPYVWS

SEQ ID NO: 59860 - protein, 393 aa, Pseudovibrio denitrificans
  misc_feature (1)..(393): tr|A0A1I6XD63|A0A1I6XD63_9RHOB Queuine tRNA-ribosyltran sferase OS=Pseudovibrio denitrificans OX=258256 GN=tgt PE=3 SV=1
MTETTIDTQQDAKPFSFKLLKTDGMARRGEITTPHGKVRTPAFMPVGTQATVKAMYPQQVRDLGADVVLGNTYHLMLRPTAERIAKLGGLHKFMGWDHTILTDSGGFQVMSLSGLRKMTEEGVTFSSHHDGSKHFMSPERSVEIQGLLGSDIQMQLDECIALPAERDEVERAMQLSLRWAERSRAQFEKMGGPQKGQGLYGIVQGGDVPDLRIKSAQALGELPMEGYSVGGLAVGEPQAVMLKMLEITTPAMPKDKPRYLMGVGTPEDILESVARGIDQFDCVMPTRAGRHGLAYTRFGKVNLKNARHSEDPRPLDELSNCEATSKYSRAYLHHLVRVNEGLAAMLLTWNNLAYYQYLMQGIRDAIDEGRFEEFRQKTKEDWARGDIEPYVWS

SEQ ID NO: 59861 - protein, 754 aa, Pseudovibrio sp.
  misc_feature (1)..(754): tr|G8PH34|G8PH34_PSEUV Multifunctional fusion protein O S=Pseudovibrio sp. (strain FO-BEG1) OX=911045 GN=tgt PE =3 SV=1
MLVDDFDFDLPPENIALRPAVPRDSSRLLVVRPDGEQLLTDDQVLSLPDLLEPGDALVFNDTKVIPAQLLGFRTRDGVTAKVGVTLHQRASAKEWRAFVRPAKKLKVGDTVRFAFDEESKDAAELSAVVTEKSESGDILFEFDRSAGDLDAAIAQVGHIPLPPYIAAKRAEDDQDRKDYQTIYAKHEGAVAAPTAGLHFTDRLFAALEERGVEKHFVTLHVGAGTFLPVKADKTEDHKMHFEYGEISEETVAALNAVRARGNKIVSVGTTSLRILESAVTDEGIINPISQSTDIFITPGYQFKAIDALMTNFHLPRSTLFMLVSALSGMEEMRAAYEHAISSGYRFYSYGDSSLLFKKALKMTETTIDTQQDAKPFSFKLLKTDGMARRGEITTPHGKVRTPAFMPVGTQATVKAMYPQQVRDLGADVVLGNTYHLMLRPTAERIAKLGGLHKFMGWDHTILTDSGGFQVMSLSGLRKMTEEGVTFSSHHDGSKHFMSPERSVEVQGLLGSDIQMQLDECIALPAERDEVERAMQLSLRWAERSRAQFEKMGGPQKGQGLYGIVQGGDVPDLRIESAQRLGELPMEGYSVGGLAVGEPQAVMLKMLEITTPAMPKDKPRYLMGVGTPEDILESVARGIDQFDCVMPTRAGRHGLAYTRFGKVNLKNARHAEDPRPLDELSNCEATSKYSRAYLHHLVRVNEGLAAMLLTWNNLAYYQYLMQGIRDAIDEGRFEEFRQKTKEDWARGDIEPYVWS

SEQ ID NO: 59862 - protein, 393 aa, Pseudovibrio sp.
  misc_feature (1)..(393): tr|A0A165U510|A0A165U510_9RHOB Queuine tRNA-ribosyltran sferase OS=Pseudovibrio sp. Ad26 OX=989410 GN=tgt PE=3 SV=1
MTETSRETQQDTKPFSFKLLKTDGMARRGEITTPHGKVRTPAFMPVGTQATVKAMYPQQVRDLGADVVLGNTYHLMLRPTAERIAKLGGLHKFMGWDHTILTDSGGFQVMSLSGLRKMTEEGVTFSSHHDGSKHFMSPERSVEIQGLLGSDIQMQLDECIALPAERAEVERAMQLSLRWAERSRAQFEKMGGPEKGQGLYGIVQGGDVPDLRVESAQRLGELPMEGYSVGGLAVGEPQAVMLKMLEITTPAMPKDKPRYLMGVGTPEDILESVARGIDQFDCVMPTRAGRHGLAYTRFGKVNLKNARHSEDPRPLDEQSNCEATSKYSRAYLHHLVRVNEGLAAMLLTWNNLAYYQYLMQGIRDAIDEGRFEEFRQQTKEDWARGDLEPYVWS

SEQ ID NO: 59863 - protein, 374 aa, Pseudoxanthobacter soli
  misc_feature (1)..(374): tr|A0A1M7ZLJ9|A0A1M7ZLJ9_9RHIZ Queuine tRNA-ribosyltran sferase OS=Pseudoxanthobacter soli DSM 19599 OX=1123029 GN=tgt PE=3 SV=1
MTPFRYEPLGQDDAARRGRLHTAHGTVETPAFMPVGTQATVKAMFPEDVAATGAEVVLGNTYHLMLRPTAERVSGLGGLHTFMRWNRTILTDSGGFQIMSLSGLRKLEEHGVAFQSHIDGSRHLLTPERSVEIQGLLGSDIQMQLDECVRLPAERKEVERGMRLSLRWAERSRAAFEAMDGPAKGQALFGIVQGGDDAGLRVESAAALSAMPFEGYSIGGLAVGEPQDVMLAMLDETLPVLPAEKPRYLMGVGTPHDIIEAVARGIDMFDCVMPTRAGRHGVAYTRFGKLNLKNARHADDPAPLDPESDCPAARDYSRAYLHHLVRCGEGLGAMLLTWNNIAYYQHLMKTLRTAIEQGRFAEVRAELGRLWAKG

SEQ ID NO: 59864 - protein, 375 aa, Pseudoxanthomonas composti
  misc_feature (1)..(375): tr|A0A4Q1JYQ3|A0A4Q1JYQ3_9GAMM Queuine tRNA-ribosyltran sferase OS=Pseudoxanthomonas composti OX=2137479 GN=tgt PE=3 SV=1
MSRMSFALHRTDGHARRGQLTFPRGSIQTPAFMPVGTYGSVKGILPEHIEELGAEIILGNTFHLYLRPGLEVIQAHGGLHGFARWNRPILTDSGGFQVFSLAHRRKISEQGVTFASPTDGARVFLGPEESMKIQHVLDSDIVMIFDECTPYPATEGVARASMELSLRWAKRSLEAHQALGNDAALFGIVQGGVHHDLRSRSADGLQALGFDGYAIGGLAVGEPEHERNAMLEHLHPQLPADRPRYLMGVGRPEDLVEAVARGVDMFDCVMPTRNARNGHYFTSFGTVRIRNARYERDLEVIEPGCGCYACRNGFTRSYLRHLDRCNEMLGPMLGTLHNLWYYQSLMAQIRQAIEEGRFSEFRASFHAARGSRPSA

SEQ ID NO: 59865 - protein, 391 aa, Pseudoxanthomonas dokdonensis
  misc_feature (1)..(391): tr|A0A0R0CGZ6|A0A0R0CGZ6_9GAMM Queuine tRNA-ribosyltran sferase OS=Pseudoxanthomonas dokdonensis OX=344882 GN=t gt PE=3 SV=1
MSRMNFQLLGNDGVARRGRLTFPRGTVETPAFMPVGTYGSVKGILPEHIEALGAEIILGNTFHLYLRPGLEVIEKHQGLHRFARWDKPILTDSGGFQVFSLAHSRKITEQGVTFASPVDGSKVFLGPEESMHIQKVLDSDIVMIFDECTPYPATEEVAGKSMELSLRWAERSKRAHEGNDAALFGIVQGGVHERLRERSAARLREIGFDGYAIGGLAVGEPEAERNRMLDHVHPLLPDDQPRYLMGVGRPEDLVEAVARGVDMFDCVMPTRNARNGHYFTSFGTVRIRNARYEQDLDPIEPGCGCYACSHGYTRAYLRHLDRCNEMLAPMLGTLHNLWYYQKLMADMRSAIEQGGFASFREHFYAARGAALPGQGMPVAPSAGTKPAPRGL

SEQ ID NO: 59866 - protein, 375 aa, Pseudoxanthomonas indica
  misc_feature (1)..(375): tr|A0A1T5JA67|A0A1T5JA67_9GAMM Queuine tRNA-ribosyltran sferase OS=Pseudoxanthomonas indica OX=428993 GN=tgt PE =3 SV=1
MSRLQFHLQTTDGQARRGRLEFPRGTVQTPAFMPVGTYGSVKGIFPDQVEALGAEIILGNTFHLYLRPGLEVIEQHGGLHGFARWNKPILTDSGGFQVFSLAHRRKLTEQGVTFASPVDGSKVFLGPEESMRIQKVLDSDIVMQLDECTPYPASEDVARKSMELSLRWAERSKRAHEGNDAALFGIVQGGVHEGLRARSAQGLQALGFDGYAIGGLAVGEPEAERNHTLDVTAPLLPADRPRYLMGVGRPEDLVEAVARGVDMFDCVMPTRNARNGHYFTSFGTVRIRNAKYEKDLQPIEPGCGCYACRNEFTRSYLRHLDRCNEMLAPMLGTMHNLWYYEKLMADIRQAIEQGDFKDFRAGFYAARGADAPALA

SEQ ID NO: 59867 - protein, 380 aa, Pseudoxanthomonas sp.
  misc_feature (1)..(380): tr|A0A4Q8L8F1|A0A4Q8L8F1_9GAMM Queuine tRNA-ribosyltran sferase OS=Pseudoxanthomonas sp. NML171200 OX=2480816 G N=tgt PE=3 SV=1
MSRMDFALKATDGNARRGQLSFPRGTVQTPAFMPVGTYGSVKGVFPEHIRDLGAEIILGNTFHLYLRPGLEVIGQHGGLHGFARWDRPILTDSGGFQVFSLAHRRKITEAGVTFASPTDGAKVFLGPEESMKIQRVLDSDIVMIFDECPPVNVDGKPVDKRVVHKSMELSLRWARRSREAHDALGNDAALFGIVQGGVHGDLRSQSAQGLQDIGFDGYAIGGLAVGETEDERNAMLDHLHPQLPGDKPRYLMGVGRPEDLVEGVARGVDMFDCVMPTRNARNGHYFTRFGTVRIRNSRYEHDLDVIEPGCGCYACRNGFTRSYLRHLDRCNEMLGPMLGTLHNLWYYQWLMAQMRQAIEQGRFQAFRADFYAQRGVAVPA

SEQ ID NO: 59868 - protein, 380 aa, Pseudoxanthomonas sp.
  misc_feature (1)..(380): tr|A0A4Q8LAL1|A0A4Q8LAL1_9GAMM Queuine tRNA-ribosyltran sferase OS=Pseudoxanthomonas sp. NML171202 OX=2480817 G N=tgt PE=3 SV=1
MSRMDFTLKATDGNARRGQLSFPRGTVQTPAFMPVGTYGSVKGVFPEHIKDLGAEIILGNTFHLYLRPGLEVIGQHGGLHGFARWDRPILTDSGGFQVFSLAHRRKITEAGVTFASPTDGAKVFLGPEESMKIQRVLDSDIVMIFDECPPVNVDGKPVDKRVVHKSMELSLRWARRSREAHDGLGNDAALFGIVQGGVHGDLRSQSAQGLQDIGFDGYAIGGLAVGETEDERNAMLDHLHPQLPGDKPRYLMGVGRPEDLVEGVARGVDMFDCVMPTRNARNGHYFTRFGTVRIRNSKYEHDLDVIEPGCGCYACRNGFTRSYLRHLDRCNEMLGPMLGTLHNLWYYQWLMARMRQAIEQGRFQAFRAAFYAERGMAVPG

SEQ ID NO: 59869 - protein, 377 aa, Pseudoxanthomonas spadix
  misc_feature (1)..(377): tr|G7URQ5|G7URQ5_PSEUP Queuine tRNA-ribosyltransferase OS=Pseudoxanthomonas spadix (strain BD-a59) OX=1045855 GN=tgt PE=3 SV=1
MTFALARADGRARRGQLHFPRGTIQTPAFMPVGTYGSVKGILPEHIAELGAEIILGNTFHLYLRPGLEVIRAHGGLHGFARWNKPILTDSGGFQVFSLAHRRKITEAGVTFASPTDGARVFLGPEESMQIQKTLDSDIVMIFDECPPVNVDGQPVDKDVVHKSMALSLRWAQRSRDAHDGLGNDAALFGIVQGGVHPDLRTQSSDGLQAIGFDGYAIGGLAVGETEAQRNAMLEHLDPQLPADRPRYLMGVGRPEDLVEGVARGVDMFDCVMPTRNARNGHFFTSTGTVRIRNARYEKDLDPIEPGCGCHACRNGFTRSYLRHLDRCNEMLAPMLGTLHNLWYYQQLMAGMRAAIEQGRFQAFRAEFYEARGMPVPA

SEQ ID NO: 59870 - protein, 380 aa, Pseudoxanthomonas spadix
  misc_feature (1)..(380): tr|A0A3M6Q1K0|A0A3M6Q1K0_9GAMM Queuine tRNA-ribosyltran sferase OS=Pseudoxanthomonas spadix OX=415229 GN=tgt PE =3 SV=1
MSRMTFALARADGRARRGQLHFPRGTIQTPAFMPVGTYGSVKGILPEHIAELGAEIILGNTFHLYLRPGLEVIQAHGGLHGFARWSKPILTDSGGFQVFSLAHRRKITEAGVTFASPTDGARVFLGPEESMQIQKTLDSDIVMIFDECPPVNVDGQPVDKDVVHKSMALSLRWAQRSRDAHDGLGNDAALFGIVQGGVHPDLRTQSSDGLQAIGFDGYAIGGLAVGETEAQRNAMLEHLDPQLPADRPRYLMGVGRPEDLVEGVARGVDMFDCVMPTRNARNGHFFTSTGTVRIRNARYEKDLDPIEPGCGCHACRNGFTRSYLRHLDRCNEMLAPMLGTLHNLWYYQQLMAGMRAAIEQGRFQAFRAEFYEARGMPVPA

SEQ ID NO: 59871 - protein, 372 aa, Pseudoxanthomonas suwonensis
  misc_feature (1)..(372): tr|E6WUL1|E6WUL1_PSEUU Queuine tRNA-ribosyltransferase OS=Pseudoxanthomonas suwonensis (strain 11-1) OX=743721 GN=tgt PE=3 SV=1
MSRLQFQLQTTDGAARRGRLAFPRGTVETPAFMPVGTYGSVKGILPDQVKALGAQIILGNTFHLYLRPGLDVIGDHGGLHGFARWDGPILTDSGGFQVFSLAHRRKITEQGVTFASPTDGARVFLGPEESMKIQKVLDSDIVMIFDECTPYPATEDVARRSMELSLRWARRSRDAHDGLGNDAALFGIVQGSVYHDLRSRSLDGLQQIGFDGYAIGGLAVGEPEHERNAMLEHLHPRLPADRPRYLMGVGRPEDLVEGVARGVDMFDCVMPTRNARNGHYFTSFGTVRIRNARYERDMDPIEPGCGCVACSGGYTRSYLRHLDRCNEMLGPMLGTLHNLWYYQKLMADMRAAIEQGRFEAFRREFYAARGAG

SEQ ID NO: 59872 - protein, 372 aa, Pseudoxanthomonas suwonensis
  misc_feature (1)..(372): tr|A0A2W4Y7I1|A0A2W4Y7I1_9GAMM Queuine tRNA-ribosyltran sferase OS=Pseudoxanthomonas suwonensis OX=314722 GN=tg t PE=3 SV=1
MSRMTFDLLATDGAARRGRIAFPRGSVETPTFMPVGTYGSVKGVLPGQLRELGAQMILGNTFHLYLRPGLEVIADHGGLHRFTGWSGPILTDSGGFQVFSLAHRRKITEDGVTFAAPTDGSKVFLGPEESMRIQKVLDSDVVMIFDECTPYPADHDTARKSMELSLRWAERSKRAHAGNDAALFGIVQGGVHRDLRSASADGLQRIGFDGYAIGGLAVGEPEAERNAMLEHTCPQLPADRPRYLMGVGRPEDLVEAVARGVDMFDCVMPTRNARNGHYFTRSGTVRIRNARYERDLDPIEPGCGCYTCRNGYSRAYLRHLDRCNEMLAPMLGTLHNLWHYQRLMAEMRQAIETGTFARFRESFYAARLSPAA

SEQ ID NO: 59873 - protein, 372 aa, Pseudoxanthomonas taiwanensis
  misc_feature (1)..(372): tr|A0A562E4D8|A0A562E4D8_9GAMM Queuine tRNA-ribosyltran sferase OS=Pseudoxanthomonas taiwanensis J19 OX=935569 GN=tgt PE=3 SV=1
MSRLQFQLQTTDGAARRGRLTFPRGTVETPAFMPVGTYGSVKGVLPGQIRDLGAQIILGNTFHLYLRPGLDVIADHGGLHGFARWDGPILTDSGGFQVFSLAHRRKITEQGVTFASPTDGARVFLGPEESMKIQKVLDSDIVMIFDECTPYPASEDVARRSMELSLRWARRSRDAHDGLGNDAALFGIVQGSVYHDLRSRSLDGLQAIGFDGYAIGGLAVGEPEAERNAMLEHLHPRLPADRPRYLMGVGRPEDLVEGVARGVDMFDCVMPTRNARNGHYFTSFGTVRIRNARYERDMDPIEPGCGCVACSGGYSRAYLRHLDRCNEMLGPILGTLHNLWYYQKLMADMRAAIEQGRFEAFRRDFYAARAGG

SEQ ID NO: 59874 - protein, 370 aa, Pseudoxanthomonas wuyuanensis
  misc_feature (1)..(370): tr|A0A286D717|A0A286D717_9GAMM Queuine tRNA-ribosyltran sferase OS=Pseudoxanthomonas wuyuanensis OX=1073196 GN= tgt PE=3 SV=1
MSRLQFQLHGTDGVARRGRLTFPRGTIETPAFMPVGTYGSVKGILPEHIKELGAEIILGNTFHLYLRPGLEVIEKHGGLHGFARWDKPILTDSGGFQVFSLAHRRKIGEQGVTFASPVDGSKVFLGPEESMHIQRVLDSDIVMIFDECTPYPATEEVARKSMELSLRWAERSKRAHEGNDAALFGIVQGGVHESLRERSAARLREIGFDGYAIGGLAVGEPEAERNRMLEHVHPLLPHDQPRYLMGVGRPEDLVEAVARGVDMFDCVMPTRNARNGHYFTSTGTVRIRNAKYELDLDPIEPGCGCYACRNGYSRAYLRHLDRCNEMLAPMLGTLHNLWYYQKLMADMRAAIEQRRFGQFRTAFYAARNSV

SEQ ID NO: 59875 - protein, 376 aa, Pseudozobellia sp.
  misc_feature (1)..(376): tr|A0A2E5BL97|A0A2E5BL97_9FLAO Queuine tRNA-ribosyltran sferase OS=Pseudozobellia sp. OX=2024854 GN=tgt PE=3 SV =1
MKFTLHHKDPQSKARAGTMVTDHGAIETPIFMPVGTVASVKSVHQRELKDDINPDIILGNNYHLFLRPKIDILKKAGGLHKFMGWDRNILTDSGGYQVYSLSGNRKIKEEGVKFKSHIDGSVHLFTPERVMEIQRVIGADIIMAFDECTPYPCDYKYAERSMHMTHRWLERCITHLKKTPFEYDYAQTFFPIVQGSTYLDLRKRSAEYIAGVEAEGNAIGGLSVGEPAEEMYAMTDVVCSILPEDKPRYLMGVGTPINILENIALGVDMFDCVMPTRNARNGMLFTAYGTINIKNKKWEDDFSPIDEMGITFVDKEYTKAYLRHLFAANEYLGKQIATIHNLGFYMWLVREARKHIIEGDFLDWKNRMVKQMDNRL

SEQ ID NO: 59876 - protein, 376 aa, Pseudozobellia sp.
  misc_feature (1)..(376): tr|A0A3B0C468|A0A3B0C468_9FLAO Queuine tRNA-ribosyltran sferase OS=Pseudozobellia sp. CCMM003 OX=2419782 GN=tgt PE=3 SV=1
MKFTLHDTDSQSKARAGTITTFHGVIETPIFMPVGTVASVKGVHQRELKQDIDPDIILGNTYHLFLRPKTHILREAGGLHKFMGWDRNILTDSGGYQVYSLSANRKIKEEGVKFKSHIDGSMHFFTPENVMEIQRTIGADIIMAFDECTPYPCEYTYAERSMKMTHRWLDRCLAHLEKTPVEYGFDQAFFPIVQGSTFKDLRKRSAEYIANVDAEGNAIGGLSVGEPAEEMYEMTEVVCAILPQDKPRYLMGVGTPINILENIALGIDMFDCVMPTRNARNGMLFTAHGTINIKNKKWENDFSPVDGMGITFVDLEYSKAYLRHLFAANEYLGKQIATIHNLGFYLWLVREARKHILKGDFMEWKNKMVKQMDKRL

SEQ ID NO: 59877 - protein, 386 aa, Pseudozobellia thermophila
  misc_feature (1)..(386): tr|A0A1M6I8B2|A0A1M6I8B2_9FLAO Queuine tRNA-ribosyltran sferase OS=Pseudozobellia thermophila OX=192903 GN=tgt PE=3 SV=1
MIIFAGIIFSLKFTLHHTDPKSKARAGTMVTDHGAIETPIFMPVGTVASVKSVHQRELKEDINPDIILGNTYHLFLRPKTDILKKAGGLHKFMGWDRNILTDSGGYQVYSLSGTRKIKEEGVKFKSHIDGSTHLFTPERVMEIQRVIGADIIMAFDECTPYPCEYKYAERSMHMTHRWLDRCIAHLEKTPYEYDYTQSFFPIVQGSTYTDLRKRSAEYIAGVGAEGNAIGGLSVGEPAEEMYAMTEVVCDILPEDKPRYLMGVGTPINILENIALGIDMFDCVMPTRNARNGMLFTAHGTINIKNKKWEDDFSPIDEMGITYVDVEYSKAYLRHLFVANEYLGKQIATIHNLGFYMWLVREARKHILAGDFVEWKDRMVKQMDKRL

SEQ ID NO: 59878 - protein, 387 aa, Psychrilyobacter sp.
  misc_feature (1)..(387): tr|A0A369XSW7|A0A369XSW7_9FUSO Queuine tRNA-ribosyltran sferase OS=Psychrilyobacter sp. S5 OX=2283384 GN=tgt PE =3 SV=1
MNKLPVNYELSHRDGKARAGVITTPHGDIKTPVFMPVGTQATVKTMNPEEVRELGADIILGNTYHLFLRPGDDVVAKFGGLHKFMNWSHPILTDSGGFQVFSLGAIRKIKEEGVYFRSHIDGSKRFISPEKSIDIQNNLGADIVMLFDECPPGQSSREYLIPSIERTTRWAKRCVTAHKRPDDQGLFAIVQGGIYEDLRDKSMNELMEMDESFSGYAIGGLAVGEPREDMYRILDYITPKLPEHKPRYLMGVGEPLDMLEAVEHGVDMMDCVQPSRIGRHGTTFTKYGRLVIKNAKYSLDPRPLDEDCDCYVCKNYTRGYIRHLFKANEMLGQKLATYHNLYFLIKMMNGARDAIIDKRFIAFKEEFIGNYTQGKDSEWIIPQRIED

SEQ ID NO: 59879 - protein, 379 aa, Psychrobacillus insolitus
  misc_feature (1)..(379): tr|A0A2W7MIV5|A0A2W7MIV5_9BACI Queuine tRNA-ribosyltran sferase OS=Psychrobacillus insolitus OX=1461 GN=tgt PE= 3 SV=1
MTAIKYELIKKDKQTGARLGVVHTPHGSFDTPAFMPVGTQATVKTMAPEEVKEMGAGIILSNTYHLWLRPGNDIIREAGGLHKFMNWDRAILTDSGGFQVFSLSDMRKIEEEGVHFRNHLNGDKLFLSPEKSMQIQNDLGSDIMMAFDECPPFPATYEYMKASVERTSRWAERCLTAHTNTDKQGLFGIIQGGEFEELRKQSAKDLISLDFPGYAIGGLSVGEPKDVMNRVLEFTAPLMPDNKPRYLMGVGSPDSLIDGAIRGIDMFDCVLPTRIARNGTFFTSKGRLVIKGAANARDFGPIDDKCDCYTCKNYSRAYIRHLFKAEETFGMRLASYHNLHFLMKLMEKIRQAIREDRLLDFKEEFFEEYGYNKPNAKNF

SEQ ID NO: 59880 - protein, 379 aa, Psychrobacillus lasiicapitis
  misc_feature (1)..(379): tr|A0A544T8K3|A0A544T8K3_9BACI Queuine tRNA-ribosyltran sferase OS=Psychrobacillus lasiicapitis OX=1636719 GN=t gt PE=3 SV=1
MSAITYELIKKDKQTGARLGIVHTPHGSFETPTFMPVGTQATVKTMAPEEIKEMKAGIILSNTYHLWLRPGHDIIREAGGLHKFMNWDRAILTDSGGFQVFSLSDMRKIEEEGVHFRNHLNGDKLFLSPEKSMEIQNALGSDIMMAFDECPPYPASFEYMKASVERTSRWAERCLTAHTNTDKQGLFGIIQGGEYEELRRQSAQDVISMDFPGYAIGGLSVGEPKDVMNRVLDFTTPLMPDNKPRYLMGVGSPDSLIDGSIRGVDMFDCVLPTRIARNGTFMTSKGRLVIKGAAFARDFGPIDEKCDCYTCKNYSRAYIRHLFKADETFGLRLASYHNLHFLMKLMENVRQAIREDRLLDFKEEFFEEYGYNKPNAKNF

SEQ ID NO: 59881 - protein, 379 aa, Psychrobacillus psychrodurans; identical to SEQ ID NO: 58571
  misc_feature (1)..(379): tr|A0A1I4WXH7|A0A1I4WXH7_9BACI Queuine tRNA-ribosyltran sferase OS=Psychrobacillus psychrodurans OX=126157 GN=t gt PE=3 SV=1

SEQ ID NO: 59882 - protein, 379 aa, Psychrobacillus psychrotolerans
  misc_feature (1)..(379): tr|A0A1I5YXH6|A0A1I5YXH6_9BACI Queuine tRNA-ribosyltran sferase OS=Psychrobacillus psychrotolerans OX=126156 GN =tgt PE=3 SV=1
MTAVTYELIKKDKQTGARLGVVHTPHGSFETPAFMPVGTQATVKTMAPEEIKEMNAGIILSNTYHLWLRPGNEIIREAGGLHKFMNWDRAILTDSGGFQVFSLSDMRKIEEEGVHFRNHLNGDKLFLSPEKSMEIQNDLGSDIMMAFDECPPFPASFEYMKASVERTSRWAERCLTAHTNTDKQGLFGIIQGGEFEELRRQSAKDLVSLDFPGYAIGGLSVGEPKDVMNRVLEFTTPMMPENKPRYLMGVGSPDSLIDGSIHGVDMFDCVLPTRIARNGTFFTHQGRLVIKGAKFARDFGPIDEKCDCYTCKNYSRAYIRHLFKADETFGLRLASYHNLHFLMKLMENVRQAIREDRLLDFKEEFFEEYGYNKPNAKNF

SEQ ID NO: 59883 - protein, 379 aa, Psychrobacillus soli
  misc_feature (1)..(379): tr|A0A544TBG4|A0A544TBG4_9BACI Queuine tRNA-ribosyltran sferase OS=Psychrobacillus soli OX=1543965 GN=tgt PE=3 SV=1
MTAVTYELIKKDKQTGARLGIVHTPHGSFETPTFMPVGTQATVKTMAPEEIKEMDAGIILSNTYHLWLRPGHDIIREAGGLHKFMNWDRAILTDSGGFQVFSLSDMRKIEEEGVHFRNHLNGDKLFLSPEKSMEIQNALGSDIMMAFDECPPYPASFEYMKASVERTSRWAERCLTAHTNTDKQGLFGIIQGGEYEELRRQSAKDLISMDFPGYAIGGLSVGEPKDVMNRVLDFTTPLMPDNKPRYLMGVGSPDSLIDGSIRGVDMFDCVLPTRIARNGTFMTSKGRLVIKGAAFARDFGPIDEKCDCYTCKNYSRAYIRHLFKADETFGLRLASYHNLHFLMKLMENVRQAIREDRLLDFKEEFFEEYGYNKPNAKNF

SEQ ID NO: 59884 - protein, 379 aa, Psychrobacillus sp.
  misc_feature (1)..(379): tr|A0A1H9SJ76|A0A1H9SJ76_9BACI Queuine tRNA-ribosyltran sferase OS=Psychrobacillus sp. OK032 OX=1884358 GN=tgt PE=3 SV=1
MSAITYELIKKDKQTGARLGIVHTPHGSFETPTFMPVGTQATVKTMAPEEIKEMDAGIILSNTYHLWLRPGHDIIREAGGLHKFMNWDRAILTDSGGFQVFSLSDMRKIEEEGVHFRNHLNGDKLFLSPEKSMEIQNALGSDIMMAFDECPPYPASFEYMKASVERTSRWAERCLTAHTNTDKQGLFGIIQGGEYEELRRQSAKDLISMDFPGYAIGGLSVGEPKDVMNRVLDYTTPLMPDNKPRYLMGVGSPDSLIDGAIRGVDMFDCVLPTRIARNGTFMTSKGRLVIKGAAFARDFGPIDEKCDCYTCKNYSRAYIRHLFKADETFGLRLASYHNLHFLMKLMENVRQAIREDRLLDFKEEFFEEYGYNKPNAKNF

SEQ ID NO: 59885 - protein, 379 aa, Psychrobacillus sp.
  misc_feature (1)..(379): tr|A0A544TP34|A0A544TP34_9BACI Queuine tRNA-ribosyltran sferase OS=Psychrobacillus sp. Z8 OX=2325572 GN=tgt PE= 3 SV=1
MAAITYELIKKDKQTGARLGIVHTPHGSFETPTFMPVGTQATVKTMAPEDLKAMEAGIILSNTYHLWLRPGHDIIREAGGLHKFMNWDRAILTDSGGFQVFSLSDMRKIEEEGVHFRNHLNGDKLFLSPEKSMEIQNALGSDIMMAFDECPPYPASFEYMKASVERTSRWAERCLEAHTNTEKQGLFGIIQGGEYEELRRQSAKDLISLDFPGYAVGGLSVGEPKDVMNRVLDFTAPLMPENKPRYLMGVGSPDSLIDGSIRGIDMFDCVLPTRIARNGTFFTSKGRLVIKGAAFARDFGPIDEKCDCYTCKNYSRAYLRHLFKADETFGLRLASYHNLHFLMNLMKDVRQAIREDRLLDFKEEFFEEYGYNKPNAKNF

SEQ ID NO: 59886 - protein, 383 aa, Psychrobacter alimentarius
  misc_feature (1)..(383): tr|A0A144NQT5|A0A144NQT5_9GAMM Queuine tRNA-ribosyltran sferase OS=Psychrobacter alimentarius OX=261164 GN=tgt PE=3 SV=1
MQFVLHKTASGDTRARRGTVHLNHGDVQTPAFMPVGTYGTVKGMLPRDIEAIGADIILGNTFHLWLRPGTEVIDKFGGLHKFMHWDKPILTDSGGFQVFSLGAMRKITEEGVNFKSPIDGAKVFLSPEKSMQIQYSLNSDIVMQFDECTPYPATHDEAKKSLELSLRWGQRCIDEHKRLGSTNALFGIVQGSMYPDLRQQSLEGLLDIGFDGYAIGGLSVGEPKEEMIDVLDYLPDDMPADKPRYLMGVGKPEDLVEGVRRGVDMFDCVMPTRNARNGHYFVTGDTDNAGVVRIRNSQYRNDEGPLDPECDCYTCQNFSRAYLYHLNKCKEMLGAQLATIHNLRYYQRLMQGIRDAIEQDNFDAFVSEFYSKRGQTVPELNLR

SEQ ID NO: 59887 - protein, 383 aa, Psychrobacter aquaticus
  misc_feature (1)..(383): tr|U4T8Q1|U4T8Q1_9GAMM Queuine tRNA-ribosyltransferase OS=Psychrobacter aquaticus CMS 56 OX=1354303 GN=tgt PE= 3 SV=1
MQFVLHKTASGETRARRGTVHLNHGDVQTPAFMPVGTYGTVKGMLPRDIEAIGADIILGNTFHLWLRPGTEVIDKFGGLHKFMHWDKPILTDSGGFQVFSLGAMRKITEEGVDFKSPIDGAKVFLSPEKSMQIQYSLNSDIVMQFDECTPYPATHDEAKASLELSLRWGQRCVDEHNRLGSTNALFGIIQGSMYADLRKQSLDGLLKIGFDGYAIGGLSVGEPKDEMMDVLDYMPHAMPADKPRYLMGVGKPEDIVEAVRRGVDMFDCVMPTRNARNGHYFVTGDTDNAGVVRIRNSQYRNDDGPLDPECDCYTCQNFSRAYLYHLNKCKEMLGAQLATIHNLRYYQRLMQGIRDAIEQDNFDEFVNEFYSKRGQTTPELKLR

SEQ ID NO: 59888 - protein, 383 aa, Psychrobacter arcticus
  misc_feature (1)..(383): sp|Q4FRI6|TGT_PSYA2 Queuine tRNA-ribosyltransferase OS= Psychrobacter arcticus (strain DSM 17307 / 273-4) OX=25 9536 GN=tgt PE=3 SV=1
MQFVLHKTASGVTRARRGTVHLNHGDVQTPAFMPVGTYGTVKGMLPRDIEAIGADIILGNTFHLWLRPGTDIIDKFGGLHKFMHWDKPILTDSGGFQVFSLGAMRKITEEGVTFKSPIDGAKVFLSPEKSMQIQYSLNSDIVMQFDECTPYPATHDEAKKSLELSLRWGQRCVDEHKKLGSTNALFGIIQGSMYADLRKQSLEGLLEIGFDGYAIGGLSVGEPKEEMIDVLDYIANDMPADKPRYLMGVGKPEDLVEGVRRGVDMFDCVMPTRNARNGHYFVTGDVDNAGVVRIRNSQYRTDEGPLDPECDCYTCQNFSRAYLSHLNKCKEMLGAQLATIHNLRYYQRLMQGIRDAIEQDKFDEFVTEFYSKRGQTVPELNLR

SEQ ID NO: 59889 - protein, 383 aa, Psychrobacter cryohalolentis
  misc_feature (1)..(383): sp|Q1QA23|TGT_PSYCK Queuine tRNA-ribosyltransferase OS= Psychrobacter cryohalolentis (strain K5) OX=335284 GN=t gt PE=3 SV=1
MQFVLHKTASGVTRARRGTVHLNHGDVQTPAFMPVGTYGTVKGMLPRDIEAIGADIILGNTFHLWLRPGTDIIDKFGGLHKFMHWDKPILTDSGGFQVFSLGAMRKITEEGVTFKSPIDGAKVFLSPEKSMQIQYSLNSDIVMQFDECTPYPATHDEAKKSLELSLRWGQRCVDEHKNLGSTNALFGIIQGSMYADLRKQSLEGLLEIGFDGYAIGGLSVGEPKEEMIDVLDYIADDMPADKPRYLMGVGKPEDLVEGVRRGVDMFDCVMPTRNARNGHYFVTGDADNAGVVRIRNSQYRTDEGPLDPECDCYTCQNFSRAYLSHLNKCKEMLGAQLATIHNLRYYQRLMQNIRDAIEQDKFDEFVNEFYSKRGQTVPELNLR

SEQ ID NO: 59890 - protein, 383 aa, Psychrobacter fozii
  misc_feature (1)..(383): tr|A0A2V4V2A2|A0A2V4V2A2_9GAMM Queuine tRNA-ribosyltran sferase OS=Psychrobacter fozii OX=198480 GN=tgt PE=3 SV =1
MQFVLHKTASGNTRARRGTVHLNHGDVQTPAFMPVGTYGTVKGMLPRDIEAIGADIILGNTFHLWLRPGTEVIDKFGGLHKFMHWDKPILTDSGGFQVFSLGAMRKITEEGVDFKSPIDGAKVFLSPEKSMQIQYSLNSDIVMQFDECTPYPATHDEAKKSLELSLRWGQRCVDEHNRLGSTNALFGIVQGSMYPDLRQQSLEGLLNIGFDGYAIGGLSVGEPKDEMMDVLDYLPDDMPADKPRYLMGVGKPEDLVEGVRRGVDMFDCVMPTRNARNGHYFVTGDTDNAGVVRIRNSQYRNDEGSLDPECDCYTCQNFSRAYLYHLNKCKEMLGAQLATIHNLRYYQRLMQGIRDAIEQDKFDEFVIEFYTKRGQTVPELNLR

SEQ ID NO: 59891 - protein, 383 aa, Psychrobacter frigidicola
  misc_feature (1)..(383): tr|A0A5C7A502|A0A5C7A502_9GAMM Queuine tRNA-ribosyltran sferase OS=Psychrobacter frigidicola OX=45611 GN=tgt PE =3 SV=1
MQFTLHKTASGETRARRGTVHLNHGEVQTPAFMPVGTYGTVKGMLPRDIEAIGADIILGNTFHLWLRPGTEVIDKFGGLHKFMHWNKPILTDSGGFQVFSLGAMRKITEEGVHFKSPIDGAKVFLSPEKSMQIQYSLNSDIVMQFDECTPYPATHDEAKKSLELSLRWGKRCLDEHKNLGSTNALFGIIQGSMYEDLRRQSLEGLLGIGFDGYAIGGLSVGEPKDEMMAVLDYIPDIMPTDKPRYLMGVGKPEDIVEAVRRGVDMFDCVMPTRNARNGHYFVTGDLDNAGVVRIRNSQYRHDERPLDPECDCYTCQNFSRAYLYHLNKCKEMLGAQLATIHNLRYYQRLMIGIREAIEQDNFDAFVTEFYSKRGQTVPELHLR

SEQ ID NO: 59892 - protein, 383 aa, Psychrobacter immobilis
  misc_feature (1)..(383): tr|A0A2V2A4S9|A0A2V2A4S9_PSYIM Queuine tRNA-ribosyltran sferase OS=Psychrobacter immobilis OX=498 GN=tgt PE=3 S V=1
MQFVLHKTASGDTRARRGTVHLNHGDVQTPAFMPVGTYGTVKGMLPRDIEAIGADIILGNTFHLWLRPGTEVIDKFGGLHKFMHWDKPILTDSGGFQVFSLGAMRKITEEGVDFKSPIDGAKVFLSPEKSMQIQYSLNSDIVMQFDECTPYPATHDEAKKSLELSLRWGQRCVDEHKRLGSTNALFGIIQGSMYPDLRQQSLEVLLDIGFDGYAIGGLSVGEPKDEMIDVLDYLPDDMPADKPRYLMGVGKPEDLVEGVRRGVDMFDCVMPTRNARNGHYFVTGDADNAGVVRIRNSQYRSDEGPLDPECDCYTCQNFSRAYLYHLNKCKEMLGAQLATIHNLRYYQRLMQGIRDAIEQDKFDEFVSEFYNKRGQTVPELNLR

SEQ ID NO: 59893 - protein, 383 aa, Psychrobacter pacificensis
  misc_feature (1)..(383): tr|A0A1G6VW83|A0A1G6VW83_9GAMM Queuine tRNA-ribosyltran sferase OS=Psychrobacter pacificensis OX=112002 GN=tgt PE=3 SV=1
MQFVLHKTASGATRARRGTVHLNHGDVQTPAFMPVGTYGTVKGMLPRDIEAIGADIILGNTFHLWLRPGTEVIDKFGGLHKFMHWDKPILTDSGGFQVFSLGAMRKITEEGVNFKSPIDGAKVFLSPEKSMQIQYSLNSDIVMQFDECTPYPATHDEAKKSLELSLRWGQRCVDEHNRLGSTNALFGIVQGSMYPDLRQQSLEGLLDIGFDGYAIGGLSVGEPKEEMIDVLDYLPDDMPADKPRYLMGVGKPEDLVEGVRRGVDMFDCVMPTRNARNGHYFVTGDADNAGVVRIRNSQYRNDEGPLDPECDCYTCQNFSRAYLYHLNKCKEMLGAQLATIHNLRYYQRLMQGIRDAIEQDQFDEFVSEFYNKRGQTIPELNLR

SEQ ID NO: 59894 - protein, 383 aa, Psychrobacter pasteurii
  misc_feature (1)..(383): tr|A0A1R4EDQ0|A0A1R4EDQ0_9GAMM Queuine tRNA-ribosyltran sferase OS=Psychrobacter pasteurii OX=1945520 GN=tgt PE =3 SV=1
MQFTLHKTAAGESRARRGTVTLAHGEIRTPAFMPVGTYGTVKGMLPRDIEDIGADIILGNTFHLWLRPGTEVIDKFGGLHQFMNWNKPILTDSGGFQVFSLGAMRKITEEGVAFKSPIDGAKVFLSPEKSMQIQYSLNSDIVMQFDECTPYPATYSEAQKSLELSLRWGQRCVDEHNKLGNTNALFGIVQGSMYEDLRRQSMEGLLDIGFDGYAIGGLSVGEPKEEMISVLNYMPELMPADKPRYLMGVGKPEDILEAVRRGVDMFDCVMPTRNARNGHYFVTGNEENQGIVRIRNSQYREDMGPLDPECDCYCCQNFTRAYLYHLNKCKEMLGAQLATIHNLRYYQRLMQGIRDAIDNDTFDEFVADFYQKRGQDVPPLELK

SEQ ID NO: 59895 - protein, 383 aa, Psychrobacter phenylpyruvicus
  misc_feature (1)..(383): tr|A0A379LJG7|A0A379LJG7_9GAMM Queuine tRNA-ribosyltran sferase OS=Psychrobacter phenylpyruvicus OX=29432 GN=tg t PE=3 SV=1
MQFTLHKTAVGESRARRGTVKLTHGEIRTPAFMPVGTYGTVKGMLPRDIENIGADIILGNTFHLWLRPGTEVIDKFGGLHQFMNWNKPILTDSGGFQVFSLGAMRKITEEGVAFKSPIDGAKVFLSPEKSMQIQYSLNSDIVMQFDECTPYPATYSEAQKSLELSLRWGQRCVDEHNKLGNTNALFGIVQGSMYEDLRRQSMEGLLQIGFDGYAIGGLSVGEPKEEMISVLNYMPELMPADKPRYLMGVGKPEDILEAVRRGVDMFDCVMPTRNARNGHYFVTGNEENQGIVRIRNSQYREDMGPLDPECDCYCCQNFSRAYLYHLNKCKEMLGAQLATIHNLRYYQRLMQGIRDAIDNDTFDEFVADFYHKRGQDVPSLELE

SEQ ID NO: 59896 - protein, 383 aa, Psychrobacter piechaudii
  misc_feature (1)..(383): tr|A0A1R4G972|A0A1R4G972_9GAMM Queuine tRNA-ribosyltran sferase OS=Psychrobacter piechaudii OX=1945521 GN=tgt P E=3 SV=1
MQFTLHKTAAGESRARRGTVKLTHGEIRTPAFMPVGTYGTVKGMLPRDIENIGADIILGNTFHLWLRPGTEVIDKFGGLHQFMNWNKPILTDSGGFQVFSLGAMRKITEEGVAFKSPIDGAKVFLSPEKSMQIQYSLNSDIVMQFDECTPYPATYSEAQKSLELSLRWGQRCVDEHNKLGNTNALFGIVQGSMYEDLRRQSMEGLLEIGFDGYAIGGLSVGEPKEEMISVLNYMPELMPADKPRYLMGVGKPEDILEAVRRGVDMFDCVMPTRNARNGHYFVTGNEENQGIVRIRNSQYREDMGPLDPECDCYCCQNFTRAYLYHLNKCKEMLGAQLATIHNLRYYQRLMQGIRDAIDNDTFDEFVADFYHKRGQEVPALELS

SEQ ID NO: 59897 - protein, 383 aa, Psychrobacter piscatorii; identical to SEQ ID NO: 59893
  misc_feature (1)..(383): tr|A0A0T6DUD1|A0A0T6DUD1_9GAMM Queuine tRNA-ribosyltran sferase OS=Psychrobacter piscatorii OX=554343 GN=tgt PE =3 SV=1

SEQ ID NO: 59898 - protein, 383 aa, Psychrobacter sp.
  misc_feature (1)..(383): sp|A5WGS6|TGT_PSYWF Queuine tRNA-ribosyltransferase OS= Psychrobacter sp. (strain PRwf-1) OX=349106 GN=tgt PE=3 SV=1
MQFTLHKTAAGESRARRGTVTVNHGEIRTPAFMPVGTYGTVKGMLPRDIEDIGADIILGNTFHLWLRPGTEVIDKFGGLHQFMNWNKPILTDSGGFQVFSLGAMRKITEEGVAFKSPIDGAKVFLSPEKSMQIQYSLNSDIVMQFDECTPYPATYSEAQKSLELSLRWGQRCVDEHKKLGNTNALFGIVQGSMYEDLRRQSMDGLLEIGFDGYAIGGLSVGEPKEEMISVLNYMPELMPADKPRYLMGVGKPEDILEAVRRGVDMFDCVMPTRNARNGHYFVTGNEDNQGIVRIRNSQYREDQGPLDPECDCYCCQNFSRAYLYHLNKCKEMLGAQLATIHNLRYYQRLMQGIRDAIDEDRFDEFVADFYHRRGQDVPPLELK

SEQ ID NO: 59899 - protein, 253 aa, Psychrobacter sp.
  misc_feature (1)..(253): tr|X0QV02|X0QV02_9GAMM Queuine tRNA-ribosyltransferase OS=Psychrobacter sp. JCM 18903 OX=1298610 GN=JCM18903_4 86 PE=3 SV=1
MQIQYSLNSDIVMQFDECTPYPATHDEAKTSLELSLRWGQRCVDEHNRLGSTNALFGIIQGSMYPDLRQQSLEGLLDIGFDGYAIGGLSVGEPKDEMIDVLDYLPDDMPADKPRYLMGVGKPEDLVEGVRRGVDMFDCVMPTRNARNGHYFVTGDADNAGVVRIRNSQYRNDEGPLDPECDCYTCQNFSRAYLYHLNKCKEMLGAQLATIHNLRYYQRLMQGIRDAIEQDKFDEFVSEFYNKRGQTVPELNLR

SEQ ID NO: 59900 - protein, 383 aa, Psychrobacter urativorans
  misc_feature (1)..(383): tr|A0A0M4TW98|A0A0M4TW98_9GAMM Queuine tRNA-ribosyltran sferase OS=Psychrobacter urativorans OX=45610 GN=tgt PE =3 SV=1
MQFTLHKTASGETRARRGTVHLNHGDVQTPAFMPVGTYGTVKGMLPRDIEAIGADIILGNTFHLWLRPGTEVIDKFGGLHKFMHWDKPILTDSGGFQVFSLGAMRKITEEGVHFKSPIDGAKVFLSPEKSMQIQYSLNSDIVMQFDECTPYPATHDEAKKSLELSLRWGQRCLDEHKNLGSTNALFGIIQGSMYKDLRQQSLEGLLEIGFDGYAIGGLSVGEPKEEMIDVLDYIADDMPADKPRYLMGVGKPEDLVEGVRRGVDMFDCVMPTRNARNGHYFVTGDLDNAGVVRIRNSQYRHDERPLDPECDCYTCQNFSRAYLYHLNKCKEMLGAQLATIHNLRYYQRLMLGIREAIEQDNFDAFVTEFYSKRGQTVPELHLR

SEQ ID NO: 59901 - protein, 376 aa, Psychroflexus gondwanensis
  misc_feature (1)..(376): tr|N1WYD1|N1WYD1_9FLAO Queuine tRNA-ribosyltransferase OS=Psychroflexus gondwanensis ACAM 44 OX=1189619 GN=tgt PE=3 SV=1
MTFELLSKDPNSKARAGKLTTDHGVIETPIFMPVGTIGTVKGVHQRELKEEINPDIILGNTYHLYLRPGTEILKKAGGLHKFMNWDRNILTDSGGYQVYSLSANRKIKEIGVKFKSHIDGSTHLFTPESAVDIQREIGADIIMAFDECTPYPCDYKYAQRSMHMTHRWLDRCMTHMKSTSPLYGHQQTLFPIVQGSTYKDLRQQSAEYIANVGAEGNAIGGLSVGEPDDEMYAMTEVVNAILPEDKPRYLMGVGTPSNLLENIALGVDMFDCVMPTRNARNGMLFTSEGTINIKNKKWEDDFSPLDPAGYTWVDTEYSKAYLKHLFSVKELLGKQIATIHNLGFYLWLVREARRQIQAGTFRTWKDIMVKKLSIRL

SEQ ID NO: 59902 - protein, 376 aa, Psychroflexus halocasei
  misc_feature (1)..(376): tr|A0A1H4C7H0|A0A1H4C7H0_9FLAO Queuine tRNA-ribosyltran sferase OS=Psychroflexus halocasei OX=908615 GN=tgt PE= 3 SV=1
MTFEKLAVDPNSKARAGKITTDHGTIETPIFMPVGTRATVKGVHQRELKEEINPDIILGNTYHLYLRPGTDILEKAGGLHKFMNWDRNILTDSGGFQVYSLSANRKIKENGVKFKSHIDGSTHLFTPEGVMDIQRKIGADIIMAFDECTPYPCDYRYAKRSMHMTHRWLDRCVKRINETDPLYGHNQTLFPIVQGSTYKDLREQSAEYIANVGAEGNAIGGLSVGEPDDEMYAMTEHVNSILPEDKPRYLMGVGTPVNLLENIALGVDMFDCVMPTRNARNGMLFTANGFINIKNKKWEDNFSAIDENAYTWVDTAYSKAYLRHLFSVKELLGLQIASIHNLGFYLWLMREARQKIIDGTFRTWKEQMVKNMNTRL

SEQ ID NO: 59903 - protein, 376 aa, Psychroflexus salarius
  misc_feature (1)..(376): tr|A0A1M4WYY1|A0A1M4WYY1_9FLAO Queuine tRNA-ribosyltran sferase OS=Psychroflexus salarius OX=1155689 GN=tgt PE= 3 SV=1
MKFEKLKVDPLSKARAGTITTDHGTIETPIFMPVGTRATVKGIHQKELREAINPDIILGNTYHLFLRPGTEILKKAGGLHQFMNWDRNILTDSGGYQVYSLSANRKIKEEGVKFKSHIDGSMHWFTPENVMDIQREIGADIIMAFDECTPYPCDYKYAKRSMHMTHRWLERCIKRINETEPLYGHQQTLFPIVQGSTYKDLRQQSAEYIAGVGAEGNAIGGLSVGEPDDEMYAMTEVVNNILPEDKPRYLMGVGTPINLLENIALGVDMFDCVMPTRNARNGMLFTADGFINIKNKKWEDDFSPIDANGYTWVDTEYSKAYLRHLFSVKELLGLQIASIHNLGFYLWLVREARQQIIDGTFKPWKEKMVKNMATRL

SEQ ID NO: 59904 - protein, 378 aa, Psychroflexus sediminis
  misc_feature (1)..(378): tr|A0A1G7WGF9|A0A1G7WGF9_9FLAO Queuine tRNA-ribosyltran sferase OS=Psychroflexus sediminis OX=470826 GN=tgt PE= 3 SV=1
MHMKFELLSKDPNSKARAGKITTDHGVIETPIFMPVGTIATVKGVHQRELKEEINPDVILGNTYHLYLRPGTDILKKAGGLHKFMNWDRNILTDSGGYQVYSLSANRKINEQGVKFKSHIDGSTHLFTPESAVDVQREIGADIIMAFDECTPYPCDYNYAKRSMHMTHRWLDRCMTHMKKTSPLYGHDQTLFPIVQGSTYKDLRKQSAEYIANVGAEGNAIGGLSVGEPNDEMYAMTEVVTEILPEDKPRYLMGVGTPSNLLENIALGVDMFDCVMPTRNARNGMLFTAEGTINIKNKKWEDDFSVLDPAGYTWVDTEYSKAYLKHLFSVKELLGKQIATIHNLGFYLWLVREARRQIQAGTFRAWKDIMVKKLSVRL

SEQ ID NO: 59905 - protein, 376 aa, Psychroflexus sp.
  misc_feature (1)..(376): tr|A0A2I0D620|A0A2I0D620_9FLAO Queuine tRNA-ribosyltran sferase OS=Psychroflexus sp. MES1-P1E OX=2058320 GN=tgt PE=3 SV=1
MTFELLSKDPNSKARAGRLTTDHGVIETPIFMPVGTIGTVKGVHQRELKEEINPDIILGNTYHLYLRPGTGILKKAGGLHKFMNWDRNILTDSGGYQVYSLSANRKIKEEGVKFKSHIDGSTHLFTPESAVNIQREIGADIIMAFDECTPYPCDYKYAQRSMHMTHRWLDRCMSHMKNTSPLYGHKQTLFPIVQGSTYKDLRQQSAEYIANVGAEGNAIGGLSVGEPDDEMYAMTEVVNAILPEDKPRYLMGVGTPSNLLENIALGVDMFDCVMPTRNGRNGMLFTSEGTINIKNKKWEEDFSPLDPAAYTWVDTEYSKAYLKHLFSVKELLGKQIATIHNLGFYLWLVREARRQIQAGTFRTWKDTMVKKLSIRL

SEQ ID NO: 59906 - protein, 376 aa, Psychroflexus sp.
  misc_feature (1)..(376): tr|A0A4U5TQH8|A0A4U5TQH8_9FLAO Queuine tRNA-ribosyltran sferase OS=Psychroflexus sp. WDS2C27 OX=1883405 GN=tgt PE=3 SV=1
MTFNIHSTDDNSKARTGVITTDHGEIKTPIFMPVGTIATVKSVHQRELLNDIKADIILGNTYHLYLRPETDILQKAGGLHQFMNWSKNILTDSGGYQVYSLSERRKISEDGVKFKSHIDGSMHWFSPENVMDTQRLIGADIMMAFDECTPYPCDYNYAKRSMHMTHRWLERCITRFNATDDLYGHQQHLFPIVQGSTYKDLRKESAQYIADKDLPGNAIGGLSVGEPNDEMYEMTDVVTDVLPKDKPRYLMGVGTPIDLLENIALGIDMFDCVMPTRNARNGMIFTSQGSINIKNLKWKTDFSPLDSDGTTWVDHDYSRAYVRHLFTVNELLAKQICSIHNLGFYLKLVRQAAQHIQDGDFMSWKTMMVNQMQNRL

SEQ ID NO: 59907 - protein, 383 aa, Psychroflexus torquis
  misc_feature (1)..(383): tr|K4IFP8|K4IFP8_PSYTT Queuine tRNA-ribosyltransferase OS=Psychroflexus torquis (strain ATCC 700755 / ACAM 623 ) OX=313595 GN=tgt PE=3 SV=1
MQAIEIYMTFELLSKDPNSKARAGKLTTDHGVIETPIFMPVGTIGTVKGVHQRELKEEINPDIILGNTYHLYLRPGTGILKKAGGLHKFMNWDRNILTDSGGYQVYSLSANRKIKEEGVKFKSHIDGSTHLFTPESAINIQREIGADIIMAFDECTPYPCDYKYAQRSMHMTHRWLDRCMNHMKNTSPLYGHEQTLFPIVQGSTYKDLRQQSAEYIANVGAEGNAIGGLSVGEPDDEMYAMTEVVNAILPEDKPRYLMGVGTPSNLLENIALGVDMFDCVMPTRNGRNGMLFTSEGTINIKNKKWEEDFSPLDPAAYTWVDTEYSKAYLKHLFSVKELLGKQIATIHNLGFYLWLVREARRQIQAGTFRTWKDTMVKKLSIRL

SEQ ID NO: 59908 - protein, 422 aa, Psychromicrobium lacuslunae
  misc_feature (1)..(422): tr|A0A0D4C3L1|A0A0D4C3L1_9MICC Queuine tRNA-ribosyltran sferase OS=Psychromicrobium lacuslunae OX=1618207 GN=tg t PE=3 SV=1
MGENRQVSSPDFSFTTQTRLSDTVPAAGEFLGRTGTINTPHGEIQTPAFIAVGTKATVKAVQPESMAELGAQALLANAYHLYLQPGPDIVDEAGGLGSFMNWAGPTFTDSGGFQVMSLGSGFKKVINMDAVDNAGADDRVAAGRERLAHIDDDGVWFKSHLDGSRHRFTPEVSMQVQHQLGADIMFAFDELTTLHNSRGYQENALERTRLWAERCLAEHRRLTEERHSKPYQALFGVIQGAQYEDLRRKACRDLGNMEIAETQFDGFGLGGALEKENLGTIVRWCCEELPENKPKHLLGISEPDDIFVAIENGADTFDCVSPTRVARNSAFYTPYGRKNLSNAKYKRDFGPLMEGCDCYTCGSYSRAYIHHLYKAKEMLSHTLISIHNERFVVKMVDDARLAIEDGSFFDFKAETLGNYYSS

SEQ ID NO: 59909 - protein, 374 aa, Psychromonas ingrahamii
  misc_feature (1)..(374): sp|A1SWU0|TGT_PSYIN Queuine tRNA-ribosyltransferase OS= Psychromonas ingrahamii (strain 37) OX=357804 GN=tgt PE =3 SV=1
MEYKLINTDGRARRGRLTFDRGSVETPAFMPVGTYGTVKGMTPEEVDATGAEILLGNTFHLWLRPGQKVIKAHGDLHDFMNWKGPILTDSGGFQVFSLGKMRKIKEEGVYFRSPINGSEVFLSPEISMDIQYDLGSDIVMIFDECTPYPATEEETDVSMQLSLRWAQRSRDRFDEQQNPNALFGIIQGGCFEQFRDISLDGLTNIGFDGYAIGGLAVGEPKEDMYRILEYIAPKIPEDKPRYLMGVGKPEDLVEGVRRGIDMFDCVMPTRNARNGHLFTTDGVIKIRNAKHREDATTLDSECDCYTCKNYTRAYLYHLDKCGEILGARLNTIHNLSYYQRLMKGLREAIEQGKLEDFVDTFYQRIGKEKPMLDV

SEQ ID NO: 59910 - protein, 374 aa, Psychromonas sp.
  misc_feature (1)..(374): tr|A0A4Y8A031|A0A4Y8A031_9GAMM Queuine tRNA-ribosyltran sferase OS=Psychromonas sp. RZ22 OX=2555643 GN=tgt PE=3 SV=1
MKYELIKTDGRARRGRLTFDRGTVETPAFMPVGTYGTVKGMTPEEVDATGAEILLGNTFHLWLRPGQKVIRQHGDLHDFMNWKGPILTDSGGFQVFSLGKMRKIKEEGVYFRSPVNGDEVFLSPEVSMDIQHDLGSDIVMIFDECTAYPATEEEADVSMQLSLRWAKRSRQRFDEQKNPNALFGIIQGGCYEHLRDVSLDGLSKIGFDGYAIGGLAVGEPKEDMHRILEHIAPKIPEDKPRYLMGVGKPEDLVEGVRRGVDMFDCVMPTRNARNGHLFTTDGVVKIRNAKHREDTSPLDSECDCYTCKNYTRAYLYHLDKCGEILGARLNTIHNLRYYQRLMKGLRDAIAEGTLEAFVESFYKRIGKEMPVLNN

SEQ ID NO: 59911 - protein, 374 aa, Psychromonas sp.
  misc_feature (1)..(374): tr|A0A366WEQ2|A0A366WEQ2_9GAMM Queuine tRNA-ribosyltran sferase OS=Psychromonas sp. B3M02 OX=2267226 GN=tgt PE= 3 SV=1
MKYELIKTDGRARRGRLTFDRGTVETPAFMPVGTYGTVKGMTPEEVDATGAEILLGNTFHLWLRPGQEVIRQHGDLHDFMNWKGPILTDSGGFQVFSLGKMRKIKEEGVYFRSPVNGDQVFLSPEVSMDIQYDLGSDIVMIFDECTAYPATEQEADVSMKLSLRWAERSRKRFDEQKNPNALFGIIQGGCYEHLRDVSLEGLAKIGFDGYAIGGLAVGEPKEDMHRILEYIAPKIPEDKPRYLMGVGKPEDLVEGVRRGVDMFDCVMPTRNARNGHLFTTDGVVKIRNAKHREDQSPLDAECDCYTCKNYSRAYLYHLDKCGEILGARLNTIHNLRYYQRLMKGLRDAISEGTLDEFVDIFYKRIGKEKPVLNN

SEQ ID NO: 59912 - protein, 376 aa, Psychroserpens burtonensis
  misc_feature (1)..(376): tr|A0A5C7B8U9|A0A5C7B8U9_9FLAO Queuine tRNA-ribosyltran sferase OS=Psychroserpens burtonensis OX=49278 GN=tgt P E=3 SV=1
MKFELKASDPQSKARAGLITTDHGQIETPIFMPVGTVASVKGVHQRELKNDINPDVILANTYHLFLRPQTPILEKAGGLHKFMNWDRNILTDSGGYQVYSLSDNRKIKEEGVKFKSHIDGSYHVFTPENVMEVQRSIGADIIMAFDECTPYPCDYNYAKRSMHMTHRWLERCLTHLDKTPFKYGYEQTFFPIVQGSCYKDLRQQSAEYIANAGAQGNAIGGLSVGEPAEEMYAMTDVVCEILPWDKPRYLMGVGTPINILENIALGVDMFDCVMPTRNARNGMLFTAHGSINIKNLKWADDFSPVDEMGITFVDTEYSKAYLRHLFTVNELLGKQIATIHNLGFYLWLTREARKHIIAGDFRAWKDKMVKQMDKRL

SEQ ID NO: 59913 - protein, 376 aa, Psychroserpens sp.
  misc_feature (1)..(376): tr|A0A4P7WS98|A0A4P7WS98_9FLAO Queuine tRNA-ribosyltran sferase OS=Psychroserpens sp. NJDZ02 OX=2570561 GN=tgt PE=3 SV=1
MTFDLKAKDTQSNARAGVITTDHGVIETPIFMPVGTVGSVKGVHQRELKDDINPDIILGNTYHLYLKPQIDVLEKAGGLHKFMNWDRNILTDSGGYQVYSLSGNNKIKEEGVKFKSHIDGSYHMFAPENVMEIQRSIGADIIMAFDECTPYPCDYNYARRSMHMTHRWLERCITHLEKTPLKYDYSQSFFPIVQGSTYKDLRKQSAEYIAGVGAEGNAIGGLSVGEPADEMYAMTEVVTDILPWDKPRYLMGVGTPINILENIALGVDMFDCVMPTRNARNGMLFTAHGSINIKNLKWREDFSPIDEMGITYVDTEYSKAYLRHLFNVNELLGKQIATIHNLGFYLWLTREARKHIIAGDFRAWKDKMVKQMDNRL

SEQ ID NO: 59914 - protein, 377 aa, Psychrosphaera saromensis
  misc_feature (1)..(377): tr|A0A2S7URV9|A0A2S7URV9_9GAMM Queuine tRNA-ribosyltran sferase OS=Psychrosphaera saromensis OX=716813 GN=tgt P E=3 SV=1
MKFELLNTDGKARRGRITFDRGVIETPAFMPVGTYGTVKGMTPDEVKETGAHICLGNTFHLMLRPGTEIIRKHGDLHDFMGWDKPILTDSGGFQVFSLGDLRKISEAGVEFRSPINGEKIMLTPERSIEVQRELGSDIVMIFDECTPYPATFEEAKTSMELSLRWAERCKKEHGDSESALFGIVQGGMYPDLRESSLEGLEGIGFDGYAIGGLSVGEPKEDMMNILDTTAYKLPENKPRYLMGVGKPEDLVESVRRGIDMFDCVMPTRNARNGHLFVTNGVVKIRNARHKDDPSTLDAECDCYTCKNYSRAYLHHLDKCNEILGARLNTIHNLRFYQRVMEGLRGAIETNTLEEFVADFYAKRELPVPSLSDEGLAK

SEQ ID NO: 59915 - protein, 379 aa, Pueribacillus theae
  misc_feature (1)..(379): tr|A0A2U1K191|A0A2U1K191_9BACI Queuine tRNA-ribosyltran sferase OS=Pueribacillus theae OX=2171751 GN=tgt PE=3 S V=1
MTAIQYELIKTCKQSGARLGRLHTPHGTIETPIFMPVGTLATVKTMSPEELEEIGAQIILSNTYHLWLRPGHDIVQEAGGLHQFMNWDHPILTDSGGFQVFSLSDLREIEEEGVRFRNHLSGEKLFLSPERAVEIQTALGADIIMAFDECPPYPATYEYMKTSVERTSRWAERCLAAHKNVERQGLFGIVQGGEFKELRKQSAEELVSLDFPGYAIGGLSVGEPKPTMNRILEFTTPLLPENKPRYLMGVGSPDSLIDGAIRGIDMFDCVLPTRIARNGTCMTSTGRLTVRNAEYARDFRPLDEECDCHVCKTYTRAYIRHLIKTNETFGFRLTTYHNLHFLLKLMENVRRAIAQDCLLDFKEEFFERYGFYKPDAKNF

SEQ ID NO: 59916 - protein, 374 aa, Puniceibacterium antarcticum
  misc_feature (1)..(374): tr|A0A2G8RFJ6|A0A2G8RFJ6_9RHOB Queuine tRNA-ribosyltran sferase OS=Puniceibacterium antarcticum OX=1206336 GN=t gt PE=3 SV=1
MSTSFTLAASDGMARTGVISTPRGDIRTPAFMPVGTAATVKAMMPESVRATGADILLGNTYHLMLRPTAERVNRLGGLHKFMNWDRPILTDSGGFQVMSLAALRKLTERGVTFKSHIDGSKHEITPERSMEIQRLLGSDIVMSFDECTPYPCTQEQALESMRLSMRWAQRSRDAFGDRPGHMLFGIQQGSVFADQREESAEALKNIGFDGYAVGGLAVGEGQEMMLQTLDFATDMLPKDKPRYLMGVGKPDDIVGAVKRGIDMMDCVLPSRSGRTAQAWTRRGQLNMKNARHQDDPRPLDEHCTCPTCRNYSRAYLHHVFRAQEMISGMLLTWHNLHYYQELMQGMRDAISTGTFAAFETEFHAQRAEGDIDPL

SEQ ID NO: 59917 - protein, 374 aa, Puniceibacterium sediminis
  misc_feature (1)..(374): tr|A0A238V4L9|A0A238V4L9_9RHOB Queuine tRNA-ribosyltran sferase OS=Puniceibacterium sediminis OX=1608407 GN=tgt PE=3 SV=1
MSTSFTLNATDGMARTGVISTPRGDIRTPAFMPVGTAATVKAMMPESVRATGADILLGNTYHLMLRPTAERINRLGGLHKFMNWARPILTDSGGFQVMSLAALRKLTENGVTFKSHIDGSKHEITPERSMEIQRLLGSDIVMAFDECTPYPCTEAQALESMRLSMRWAQRSRDAFGDRPGHMLFGIQQGSVFPDQREESAEALKKIGFDGYAVGGLAVGEGQEMMLQTLDFATDMLPSDKPRYLMGVGKPDDIVGAVKRGIDMMDCVLPSRSGRTAQAWTRRGQLNMKNARHQDDPRPLDEHCTCPTCRNYSRAYLHHVFRAQEMISGMLLTWHNLHYYQELMQGMRDAIAAGDFAGFEAQFHAQRAEGDIEPL

SEQ ID NO: 59918 - protein, 376 aa, Puniceibacterium sp.; identical to SEQ ID NO: 59836
  misc_feature (1)..(376): tr|A0A5B3BWT3|A0A5B3BWT3_9RHOB Queuine tRNA-ribosyltran sferase OS=Puniceibacterium sp. HSS470 OX=2541729 GN=tg t PE=3 SV=1

SEQ ID NO: 59919 - protein, 374 aa, Puniceibacterium sp.
  misc_feature (1)..(374): tr|A0A0J5QE71|A0A0J5QE71_9RHOB Queuine tRNA-ribosyltran sferase OS=Puniceibacterium sp. IMCC21224 OX=1618204 GN =tgt PE=3 SV=1
MSTSFTVSARDGRARTGAISTPRGEIRTPAFMPVGTAATVKAMMPESVRATGADILLGNTYHLMLRPTAERIHALGGLHKFMNWDRPILTDSGGFQVMSLADLRKLTERGVTFKSHIDGSKHEITPERSMEIQRLLGSDIVMAFDECTPYPCTEAQALDSMRLSMRWAQRSRDAFGDRSGHMLFGIQQGSVFPDQRQESAEALKRIGFDGYAVGGLAVGEGQEMMFQTLDFAVDMLPDDKPRYLMGVGKPDDILGAVKRGIDMMDCVLPSRSGRTGQAWTRRGQLNIKNARHQDDPRPLDEDCTCPACRNYSRAYLHHVFRAQEMISGMLLTWHNLHYYQDLMQGIRESISAGRFAEFEGEFHAMRAAGDIEAL

SEQ ID NO: 59920 - protein, 384 aa, Puniceicoccaceae bacterium
  misc_feature (1)..(384): tr|A0A2E6TPP3|A0A2E6TPP3_9BACT Queuine tRNA-ribosyltran sferase OS=Puniceicoccaceae bacterium OX=2026784 GN=tgt PE=3 SV=1
MSKNPKSSFVLEHGNADGPRSGTLSLPGGVVPTPVFMPVGTQATIKGVLPRDLYETVRCPIILGNTYHLNLRPGVEVVEAAGGLSKFMNWSGPVLTDSGGFQVFSLSSLRKMTDEGVCFRSHLDGREIFLGPKQAVQIQEGLKSDIAMCLDECPPADATREQMKKAVSRTTLWAKMCREEWNLGQGKVEGRNLFGIVQGGRFEDLRIQSADELIEMNFPGYAIGGVSVGETEEEMLQQVSWTAKVLPWEKPRYVMGVGTPPQLLKMIGMGADMFDCVMPSRAARHGMAFTSRGTMNLKNQKYQDDYSPLDEETDCFASQQFSKSYLRHLIQAKESLAGVILTLHNLRFFVSLMEQARLKIEQDQFQDWSRAWIAQYESGQKKAE

SEQ ID NO: 59921 - protein, 372 aa, Puniceicoccaceae bacterium
  misc_feature (1)..(372): tr|A0A2D6WN80|A0A2D6WN80_9BACT Queuine tRNA-ribosyltran sferase OS=Puniceicoccaceae bacterium OX=2026784 GN=tgt PE=3 SV=1
MFKLTAKSNNARRGELTTLHGVIQTPIFMPVGTQATVKAVTSRQLDEINTQIILGNTYHLNLRPGSQLIEKLGGLHAFMNWQKPILTDSGGFQVFSLSDLRKITDEGIHFKSHLDGQKLFLSPQSCFQIQAELGTDIAMVLDECPPFPCDKVDCATAVDRTIRWAKEFLGHAEHSGFLERGGQVFGIVQGSTYSDLRVACAQALADLPFSGYAIGGVSVGEPENEMLKQVSYSMPHLPEDKARYVMGVGTPVQLLKMIGMGADMFDCVMPTRLARHANVFTPSGLMNLKNERFKTDERPIMEADNYTCQNYSRSYLRHLLMANEMLGATLLSIHNLHFFLDLMAQARAHIEEDDFDPWSAQWINRYQSGVSG

SEQ ID NO: 59922 - protein, 377 aa, Puniceispirillum marinum
  misc_feature (1)..(377): tr|D5BNK5|D5BNK5_PUNMI Queuine tRNA-ribosyltransferase OS=Puniceispirillum marinum (strain IMCC1322) OX=488538 GN=tgt PE=3 SV=1
MTAFSYDLLSTDGTARRGRLHTAWGVVETPVFMPVGTAATVKGMMPESVKSTGASIILANTYHLMLRPGAERVGRLGGVRKMMGWDGPLLTDSGGFQVMSLGPLRKLDEDGVTFKSHLDGSKHRLTPERSTEIQHLLDATITMAFDECTPFPAEKTVAADSMRLSMRWAKRSRDAFVPREGYGQFGIVQGSVFADLRAESVAALGDIGFEGYAIGGLAVGEGQEAMFEALEFTTPLMQTDKPRYLMGVGKPSDLVGGVARGVDMFDCVLPTRSGRTGQGFTRRGPINIKNARHAEDNRPIDEACSCPACSRFSRAYLHHLFKADEVQGLMLLSWHNIQYYQDLMADMRAAIEAGTFAQFEKNFHAMQSLGDIDPLDP

SEQ ID NO: 59923 - protein, 378 aa, Pusillimonas ginsengisoli
  misc_feature (1)..(378): tr|A0A4U5LM85|A0A4U5LM85_9BURK Queuine tRNA-ribosyltran sferase OS=Pusillimonas ginsengisoli OX=453575 GN=tgt P E=3 SV=1
MTGLQFQLLAQDGAARRGQITLNHGVVQTPIFMPVGTYGSVKAMLPHELDDIGAQIILGNTFHLWLRPGNEVMQKHNGLHGFMQWHKPILTDSGGFQVFSLSGMRKITEEGVKFASPIDGSRLFLTPEESMRIQHALNSDISMVFDECTPYEIEGRPATEEEAAQSMRMSLRWARRSRTEFQHLENPNALFGIVQGGMYENLRDESLAGLVDIGFEGYAIGGLSVGEPKEEMMRVLAHVAPRMPENAPRYLMGVGTPEDLVEGVSRGIDMFDCVMPTRNARNGWLFTRYGDIKIRNARYRDDTRPLDSSCKCHTCANFSRAYLHHLQRANEITGSRLNTMHNLHFYLAIMHEMREAIAAGRFEAWREIFHRDRARGIE

SEQ ID NO: 59924 - protein, 378 aa, Pusillimonas noertemannii
  misc_feature (1)..(378): tr|A0A2U1CR73|A0A2U1CR73_9BURK Queuine tRNA-ribosyltran sferase OS=Pusillimonas noertemannii OX=305977 GN=tgt P E=3 SV=1
MTGLQFELLATDGAARRGRLTLNHGVVQTPIFMPVGTYGSVKAMLPHELDEIGAQIVLGNTFHLWLRPGTGVLEKHGGLHGFMQWQKPILTDSGGFQVFSLDGLRKITEEGVKFASPIDGSRLFLTPEESMRIQRSLNSDIVMVFDECTPYAIDGRPATSEEAARSMRMSLRWARRSREAFDKLENPNALFGIVQGGMYENLRDESLAGLVDIGFHGYAIGGLSVGEPKEDMQRVLAHVAPRLPANAPRYLMGVGTPEDLVEGVSRGVDMFDCVMPTRNARNGWLFTRYGDIKIRNARYRDDTRPLDPSCSCHTCSHFSRAYLHHLQRANEITGSRLNTLHNLHFYLTIMDEMRQAIAEGSFEAWKKQFAENRARGIE

SEQ ID NO: 59925 - protein, 378 aa, Pusillimonas sp.
  misc_feature (1)..(378): tr|A0A368WYU9|A0A368WYU9_9BURK Queuine tRNA-ribosyltran sferase OS=Pusillimonas sp. EA3 OX=2183983 GN=tgt PE=3 SV=1
MTGLNFKLLKTDGSARRGQVTLNHGVVETPIFMPVGTYGSVKAMLPHELDDIGAQIILGNTFHLWLRPGTEVIEKHQGLHGFMQWSRPILTDSGGFQVFSLDGLRKITEEGVRFASPIDGSRLFLTPEESMRIQRALNSDIVMVFDECTPYKIDGRPATHEEAAQSMRMSLRWAQRSKNAFNELENPNALFGIVQGGMYEDLRDESLAGLTQIGFHGYAIGGLSVGEPKEEMMRVLRHVAPKLPDNAPRYLMGVGTPEDLVEGVSHGVDMFDCVMPTRNARNGWLFTRYGDIKIRNARYKDDTQPLDPDCHCHTCRHFSRAYLHHLQRANEITGARLNTLHNLYFYLKIMAEMREAIENGSFQQWKAEFTENRSRGIQ

SEQ ID NO: 59926 - protein, 378 aa, Pusillimonas sp.
  misc_feature (1)..(378): tr|A0A423S4R7|A0A423S4R7_9BURK Queuine tRNA-ribosyltran sferase OS=Pusillimonas sp. NJUB218 OX=2023230 GN=tgt P E=3 SV=1
MTGLNFKLLHTDGQARRGQITLNHGVVQTPIFMPVGTYGSVKAMLPHELDDIGAQIVLGNTFHLWLRPGTEIMEKHGGLHGFMQWPKPILTDSGGFQVFSLNGLRKITEEGVKFASPIDGARLFLTPEESMRIQRSLNSDIAMVFDECTPYTIDGRPATAEEAARSMRMSLRWAKRSRDAFNQLENPNALFGIVQGGMFESLRDESLAGLVDIGFHGYAIGGLSVGEPKEDMMRILAHVAPRLPENAPRYLMGVGTPEDLVEGVSQGVDMFDCVMPTRNARNGWLFTRYGDIKIRNARYRDDTRPLDPSCDCHTCTHFSRAYLHHLQKANEITGSRLNTLHNLHFYLKIMAEMRAAIEAGTFAQWKAKFHEDRARGIS

SEQ ID NO: 59927 - protein, 376 aa, Pustulibacterium marinum
  misc_feature (1)..(376): tr|A0A1I7FQ31|A0A1I7FQ31_9FLAO Queuine tRNA-ribosyltran sferase OS=Pustulibacterium marinum OX=1224947 GN=tgt P E=3 SV=1
MIFELNAKDAQTKARAGKITTDHGVIETPIFMPVGTVGTVKGVHQRELKEEINPDIILGNTYHLYLRPQLDILEKAGGLHKFMNWDRNILTDSGGYQVYSLSANRKIKEEGVKFKSHIDGSYHFFTPENVMDIQRTIGADIIMAFDECTPYPCDYGYAKRSMHMTHRWLDRCINRLSETEPKYGYEQELFPIVQGSTYKDLRKQSAEYIANAGAFGNAIGGLSVGEPAEEMYAMTEVVCDILPEEKPRYLMGVGTPINILENIALGVDMFDCVMPTRNARNGMLFTAHGTINIKNKKWEDDFSPIDEMGITFVDTYYTKAYLRHLFAANEFLGKQIASIHNLGFYLWLVREARKHIIAGDFATWKNMMVQQMNKRL

SEQ ID NO: 59928 - protein, 366 aa, Unknown
  misc_feature (1)..(366): tr|A0A1E4ZHI7|A0A1E4ZHI7_9BACT Queuine tRNA-ribosyltran sferase OS=PVC group bacterium (ex Bugula neritina AB1) OX=1868283 GN=tgt PE=3 SV=1
MWKQLYQDENARVGVMSLSHGEVETPVFMPVGTQATVKGMSPDNLKQIGFQIILANTYHLNLRPGMEIIGESGGLHSFMNWDRNILTDSGGFQVFSLAALRKISEDGVSFRSHIDGSLHMLTPENVIDKQKIMGVDIAMTLDECPPYPSSKSYIQKSMDLTIRWAKKSRQYHPVGSDGPKLFGIVQGGMFHDLRQECANKMIPLDFDGYAFGGLSVGEEKNKMYDIMSAVHEVLPTNKPRYIMGIGTPEDLLEAIDCGVDMFDCVLPSRNARNGTLYTWDGKISIKNRKWQLFQDPIDTKCPCYACQNFSAAYLHHLFKAQEILSLQLNTYHNLCFFYELIQAAKKEIYAKNFKTFKSSLLKKWNK

SEQ ID NO: 59929 - protein, 375 aa, Pyramidobacter piscolens
  misc_feature (1)..(375): tr|D1Y6J1|D1Y6J1_9BACT Queuine tRNA-ribosyltransferase OS=Pyramidobacter piscolens W5455 OX=352165 GN=tgt PE=3 SV=1
MFEYRLIAQDPETGARAGEFTTPHGVIPTPVFMPVGTQATVKAMSPDELKQIGAKIILSNTYHLFLRPGPDLIAKAGGLHGFMNWDRPILTDSGGFQVFSLAGISKVMDDGVEFQSHLDGTRYLMTPELATQIQEKLGSDIAMCFDQCVKLPCTREQAQAAVERTLRWAARCKAAHSRADQAQFGIVQGALLDDLRAACADELVRMDFPGYAIGGLSVGESHAEMYRCLDALMPRLPAHKPRYLMGVGHPANLIEGIARGVDMFDCVLPTRNGRTGTAFTCEGKMNVKNRRYAEDFSPIDPECGCYACRNFTRAYVRHLYKAGEILAVRLLSWHNIHFLVQLAAGARQAIVEGRFGAYRREFMTRYEGGAYLEKI

SEQ ID NO: 59930 - protein, 375 aa, Pyramidobacter sp.
  misc_feature (1)..(375): tr|A0A3A9HQF2|A0A3A9HQF2_9BACT Queuine tRNA-ribosyltran sferase OS=Pyramidobacter sp. CG50-2 OX=2382160 GN=tgt PE=3 SV=1
MFEYRLIAQDPETGARAGEFVTPHGVIPTPVFMPVGTQATVKAMSPDELKRIGAKIILSNTYHLFLRPGPDLIAKAGGLHGFMNWDRPILTDSGGFQVFSLAGISKVMDDGVEFQSHLDGTRYLMTPELATQVQEKLGADIAMCFDQCVKLPCSREQAQAAVQRTLRWAARCKAAHTRAGQAQFGIVQGALFDDLRAACAEELARMDFPGYAIGGLSVGESHAEMYRCLDALMPRLPECKPRYLMGVGHPANLIEGIARGVDMFDCVLPTRNGRTGTVFTHEGKMNVKNRRYAEDFSPIDPECDCYACRNFTRAYVRHLYRAGEILAVRLLSWHNIHFLVRLAAGARQAIVEGRFGAYRREFMTRYEGGAYLENV

SEQ ID NO: 59931 - protein, 375 aa, Pyramidobacter sp.
  misc_feature (1)..(375): tr|A0A1V4AJV5|A0A1V4AJV5_9BACT Queuine tRNA-ribosyltran sferase OS=Pyramidobacter sp. C12-8 OX=1943580 GN=tgt P E=3 SV=1
MFEYRLIAQDPETGARAGEFVTPHGVIPTPVFMPVGTQATVKAMSPDELKRIGAKIILSNTYHLFLRPGPDLIAKAGGLHGFMNWDRPILTDSGGFQVFSLAGINKIMDDGVEFQSHLDGTRYLMTPELATQVQEKLGADIAMCFDQCVKLPCSREQAQAAVQRTLRWAARCKASHTRAGQAQFGIVQGALFDDLRAACAEELARMDFPGYAIGGLSVGESHAEMYRCLDALMPRLPERKPRYLMGVGHPANLIEGIARGVDMFDCVLPTRNGRTGTAFTCEGKMNVKNRRYAEDFSPIDPECGCYACRNFTRAYVRHLYRAGEILAVRLLSWHNIHFLVQLAAGARQAIVEGRFGAYRREFMTRYEGGAYLENV

SEQ ID NO: 59932 - protein, 392 aa, Pyrinomonas methylaliphatogenes
  misc_feature (1)..(392): tr|A0A0B6X147|A0A0B6X147_9BACT Queuine tRNA-ribosyltran sferase OS=Pyrinomonas methylaliphatogenes OX=454194 GN =tgt PE=3 SV=1
MSAQPIIWQTLAQDEGARAGILRTRRATIETPVFMPVGTLGSVKGVRFEALETELDARIILANTYHLYLRPGVELIRACGGLHRFIGWERAMLTDSGGFQVWSLSGLRRVTEEGVEFRSHIDGSQCFLSPEIAMEAQAALGAEIVMAFDECPPGKSSLEEARRSMELTLRWAQRSRRRFLELQREGADAGRTQEQDLLSGAQAQFGIVQGAIHLDLRRESLARTVEIGFEGYALGGLSVGEEKGAMYEVLAEIAPLMPADRPRYLMGVGTPEDLLEAVAHGIDMFDCVLPTRTARNGLAWTSRGRLNVKNARWARDTKPLDEECACAVCRRHSRAYLRHLYLAGEMLAAILLTHHNLFFFLDTMRRVRQSIRSGCFSRFRQEFLERFNAGLD

SEQ ID NO: 59933 - protein, 379 aa, Quasibacillus thermotolerans
  misc_feature (1)..(379): tr|A0A0F5HMN3|A0A0F5HMN3_9BACI Queuine tRNA-ribosyltran sferase OS=Quasibacillus thermotolerans OX=1221996 GN=t gt PE=3 SV=1
MPAIKYELIKTCKQTGARLGRVHTPHGSFETPVFMPVGTLATVKTMTPEELKELGAQIILSNTYHLWLRPGHELIKEAGGLHKFMNWDRSILTDSGGFQVFSLSEFRKIEEEGVHFRNHLNGDKLFLSPEKAMEIQNALGPDIMMAFDECPPYPAEHEYMKKSVERTSRWAERCLEAHARPEDQGLFGIVQGGEYEDLRRQSARDLVSLDFPGYAIGGLSVGEPKDVMNRVLDFTTPLLPADKPRYLMGVGSPDSLIDGSIRGVDMFDCVLPTRIARNGTLMTSEGRLVVKNAKYARDFGPLDENCGCYACRNYSRAYIRHLIRTNETLGIRLTTYHNLYFLVELMSKVREAIREDRLGDFREEFFETYGFNRPDAKNF

SEQ ID NO: 59934 - protein, 376 aa, Quisquiliibacterium sp.
  misc_feature (1)..(376): tr|A0A5C8P4X9|A0A5C8P4X9_9BURK Queuine tRNA-ribosyltran sferase OS=Quisquiliibacterium sp. CC-CFT501 OX=2498847 GN=tgt PE=3 SV=1
MLKYELLATDGLARRGRITLNHGVVETPIFMPVGTYGAVKAMSPRELDEVGAQIILGNTFHLWLRPGLEVFAKFGGLHRFNGWQKPILTDSGGFQVWSLGELRKISEEGVRFASPVNGDRLMLTPEESMRIQRALDSDIAMIFDECTPYETAGVPTGHDEAAASMRLSLRWARRSRDAFDRLENPNALFGIVQGGMYETLRDESLAGLVDIGFHGYAIGGLSVGEPKEEMLRILSHTAPRLPAGKPRYLMGVGTPEDLVAGVAAGIDMFDCVMPTRNARNGWLFTRFGDLRLRNARHRDDTRPIDETCGCHACADFSRAYVHHLQKVNEILGARLATIHNLHYYLTLMREMREAIAAGRFEAWRAAFHRDRARGVG

SEQ ID NO: 59935 - protein, 374 aa, Rahnella aquatilis
  misc_feature (1)..(374): tr|H2IZL8|H2IZL8_RAHAC Queuine tRNA-ribosyltransferase OS=Rahnella aquatilis (strain ATCC 33071 / DSM 4594 / J CM 1683 / NBRC 105701 / NCIMB 13365 / CIP 78.65) OX=745 277 GN=tgt PE=3 SV=1
MKYELSTTDGRARRGRLVFERGVVETPAFMPVGTYGTVKGMTPEEVKETGAQILLGNTFHLWLRPGQEIMKLHGDLHDFMNWHGPILTDSGGFQVFSLGAMRKIKEEGVHFRNPINGDPVFLSPEKSMEIQNDLGSDIVMIFDECTPYPADWDYAKRSMEMSLRWAKRSRDRFNELNNKNALFGIIQGSVYEDLRDVSLKGLVDIGFDGYAVGGLAVGEPKEDMHRILEHVCPQIPEDKPRYLMGVGKPEDLVEGVRRGIDMFDCVMPTRNARNGHLFVTDGIVKIRNAKHKDDTSTLDEHCDCYTCRNYSRAYLHHLDRCNEILGARLNTIHNLRYYQRLMAGLRQAIEEGKLEAFVTDFYERKGKPVPPLNF

SEQ ID NO: 59936 - protein, 374 aa, Rahnella aquatilis
  misc_feature (1)..(374): tr|H8NYN9|H8NYN9_RAHAQ Queuine tRNA-ribosyltransferase OS=Rahnella aquatilis HX2 OX=1151116 GN=tgt PE=3 SV=1
MKYELSTTDGRARRGRLIFERGVVETPAFMPVGTYGTVKGMTPEEVKDTGAQILLGNTFHLWLRPGQEIMKLHGDLHDFMNWHGPILTDSGGFQVFSLGAMRKIKEEGVHFRNPINGDPVFLSPEKSMEIQNDLGSDIVMIFDECTPYPADWDYAKRSMEMSLRWAKRSRDRFNELNNKNALFGIIQGSVYEDLRDVSLKGLVDIGFDGYAVGGLAVGEPKEDMHRILEHVCPQIPEDKPRYLMGVGKPEDLVEGVRRGIDMFDCVMPTRNARNGHLFVTDGIVKIRNAKHKDDTSTLDEHCDCYTCRNYSRAYLHHLDRCNEILGARLNTIHNLRYYQRLMAGLRQAIEEGKLEAFVTDFYERKGKPVPPLNF

SEQ ID NO: 59937 - protein, 374 aa, Rahnella inusitata
  misc_feature (1)..(374): tr|A0A419MCR6|A0A419MCR6_9GAMM Queuine tRNA-ribosyltran sferase OS=Rahnella inusitata OX=58169 GN=tgt PE=3 SV=1
MKYELSTTDGRARRGRLVFERGVVETPAFMPVGTYGTVKGMTPEEVKETGAQILLGNTFHLWLRPGQEIMKLHGDLHDFMNWHGPILTDSGGFQVFSLGAMRKIKEEGVHFRNPINGDPVFLSPEKSMEIQNDLGSDIVMIFDECTPYPADWDYAKRSMEMSLRWAQRSRDRHNELNNKNALFGIIQGSVYEDLRDVSLKGLVDIGFDGYAVGGLAVGEPKEDMHRILEHVCPQIPQDKPRYLMGVGKPEDLVEGVRRGIDMFDCVMPTRNARNGHLFVTDGIVKIRNAKHKDDTSTLDEHCDCYTCRNYSRAYLHHLDRCNEILGARLNTIHNLRYYQRLMAGLRQAIEEGKLELFVTDFYESKGKPVPPLNF

SEQ ID NO: 59938 - protein, 374 aa, Rahnella sp.; identical to SEQ ID NO: 59936
  misc_feature (1)..(374): tr|A0A0H3FG14|A0A0H3FG14_RAHSY Queuine tRNA-ribosyltran sferase OS=Rahnella sp. (strain Y9602) OX=741091 GN=tgt PE=3 SV=1

SEQ ID NO: 59939 - protein, 374 aa, Rahnella sp.
  misc_feature (1)..(374): tr|A0A2N0W8A4|A0A2N0W8A4_9GAMM Queuine tRNA-ribosyltran sferase OS=Rahnella sp. AA OX=2057180 GN=tgt PE=3 SV=1
MKYELSTTDGRARRGRLVFERGVVETPAFMPVGTYGTVKGMTPEEVKETGAQILLGNTFHLWLRPGQEIMKLHGDLHDFMNWHGPILTDSGGFQVFSLGAMRKIKEEGVHFRNPINGDPVFLSPEKSMEIQNDLGSDIVMIFDECTPYPADWDYAKRSMEMSLRWAKRSRDRFNELNNKNALFGIIQGSVYEDLRDVSLKGLVDIGFDGYAVGGLAVGEPKEDMHRILEHVCPQIPEDKPRYLMGVGKPEDLVEGVRRGIDMFDCVMPTRNARNGHLFVTDGIVKIRNAKHKDDTSTLDEHCDCYTCRNYSRAYLHHLDRCNEILGARLNTIHNLRYYQRLMAGLRQAIEEGKLETFVTDFYERKGKPVPPLNF

SEQ ID NO: 59940 - protein, 374 aa, Rahnella woolbedingensis
  misc_feature (1)..(374): tr|A0A419N6Y9|A0A419N6Y9_9GAMM Queuine tRNA-ribosyltran sferase OS=Rahnella woolbedingensis OX=1510574 GN=tgt P E=3 SV=1
MKYELSTTDGRARRGRLVFERGVVETPAFMPVGTYGTVKGMTPEEVKETGAQILLGNTFHLWLRPGQEIMKLHGDLHDFMNWHGPILTDSGGFQVFSLGAMRKIKEEGVHFRNPINGDPVFLSPEKSMEIQNDLGSDIVMIFDECTPYPADWDYAKRSMEMSLRWAQRSRDRFNELNNKNALFGIIQGSVYEDLRDVSLKGLVDIGFDGYAVGGLAVGEPKEDMHRILEHVCPQIPEDKPRYLMGVGKPEDLVEGVRRGIDMFDCVMPTRNARNGHLFVTDGIVKIRNAKHKDDTSTLDEHCDCYTCRNYSRAYLHHLDRCNEILGARLNTIHNLRYYQRLMAGLRQAIEEGKLETFVTEFYERKGKPVPPLNF

SEQ ID NO: 59941 - protein, 376 aa, Raineya orbicola
  misc_feature (1)..(376): tr|A0A2N3IK22|A0A2N3IK22_9BACT Queuine tRNA-ribosyltran sferase OS=Raineya orbicola OX=2016530 GN=tgt PE=3 SV=1
MTFELLHTDSSCKARLGRIYTDHGTIETPIFMPVGTAGTVKAVHFRELHKDIQAEIILGNTYHLYLRPGLEILQNAGGLHKFGGWNKPILTDSGGYQVYSLAENRKITDEGVKFKSHIDGSYHFFTPENVMDIQRVIGADIIMAFDECPPYPCEYSYAKKSLMLTHKWLKRCCERVDNTTGLYGYSQALFPIVQGGVFKDLRQESAEFIASLKREGNAIGGLAVGEPAEKMYEITEFVCDILPADKPRYLMGVGTPANILESIALGVDMFDCVMPTRNARNGMLFTTQGIINIRNEKWKNDFSPIDEVLGGEVSGFYTKAYLRHLMISKEILASQIASIQNLRFYLWLVREARKHIAENNFLQWKNKIIPQIMQKL

SEQ ID NO: 59942 - protein, 427 aa, Raineyella antarctica
  misc_feature (1)..(427): tr|A0A1G6GXE0|A0A1G6GXE0_9ACTN Queuine tRNA-ribosyltran sferase OS=Raineyella antarctica OX=1577474 GN=tgt PE=3 SV=1
MSLVEDATVSTDGADGPAAADPSFGFAARTVLENGLGRTGTIRTPHGQIRTPAFVAVGTKATVKAVTPSHVEDLGAQAVLANAYHLYLQPGSDIVDEAGGLGRFMNWPGPTFTDSGGFQVMSLGAGFKKVLAMDTAGLQSDDVIAEGKTRRAFVDEDGVTFYSHLNGDELRFTPEVSMRIQHQLGADIMFAFDELTTLMNTRDYQVESVERTRRWAERCLAEHGRLTTERVGKPYQALFGVVQGAQYEDLRRTAARGLAEMQVEGRGFDGFGIGGALEKANLGTIVGWVSEELPDDKPRHLLGISEPDDFFTAIENGADTFDCVQPSRVARNAALYTRDGRFNITRAENKRDFGPIEADCDCYTCQNFSRAYLHHLFKAKEMLASTLATIHNERFTVRLVDEIRTSIDDDRFAELREETLGRFYAQR

SEQ ID NO: 59943 - protein, 383 aa, Ralstonia insidiosa
  misc_feature (1)..(383): tr|A0A191ZZV7|A0A191ZZV7_9RALS Queuine tRNA-ribosyltran sferase OS=Ralstonia insidiosa OX=190721 GN=tgt PE=3 SV =1
MLKYELLTTDGLARRGRMTLNHGVVETPIFMPVGTYGAVKAMSPAELKDIGAQIILGNTFHLWLRPGLEVMDAHKGLHGFNGWDKPILTDSGGFQVFSLGDLRKITEEGVTFASPINGDKLFLSPEISMQIQRRLNSDIVMQFDECTPYKIGDRPATEAEAAASMRMSLRWAQRSRNEFERENNPNALFAIVQGGMFENLRDESLAGLQAIDADAGGEGFGGYAIGGLSVGEPKEDMMRVLQHVAPRLPANKPHYLMGVGTPEDLVAGVAAGVDMFDCVMPTRNARNGWLFTRFGDIKIKNAVHRNDPRPLDETCGCYTCRNFSRAYLHHLQRVGEILGARLNTIHNLYYYLELMAEMRTAIESHGFAAFQARFAADRARGAL

SEQ ID NO: 59944 - protein, 383 aa, Ralstonia mannitolilytica
  misc_feature (1)..(383): tr|A0A2N5LD63|A0A2N5LD63_9RALS Queuine tRNA-ribosyltran sferase OS=Ralstonia mannitolilytica OX=105219 GN=tgt P E=3 SV=1
MLKYELLTTDGLARRGRMTLNHGVVETPIFMPVGTYGAVKAMSPAELEDIGAQIILGNTFHLWLRPGLDVMDAHKGLHGFNGWDKPILTDSGGFQVFSLGDLRKITEEGVTFASPINGDRLFLSPEISMQIQRRLNSDIVMQFDECTPYKIGDRPATEAEAAASMRMSLRWAQRSRNEFEREGNPNALFGIVQGGMFEHLRDESLAGLQAIDADAGGQGFGGYAIGGLSVGEPKEDMMRVLQHVAPRLPANKPHYLMGVGTPEDLVAGVAAGVDMFDCVMPTRNARNGWLFTRFGDIKIKNAVHRNDPRPLDETCGCYTCSNFSRAYLHHLQRVGEILGARLNTIHNLYYYLELMAEMRAAIESHGFAAFQARFAADRARGAL

SEQ ID NO: 59945 - protein, 383 aa, Ralstonia mannitolilytica
  misc_feature (1)..(383): tr|A0A160BRQ5|A0A160BRQ5_9RALS Queuine tRNA-ribosyltran sferase OS=Ralstonia mannitolilytica OX=105219 GN=tgt P E=3 SV=1
MLKYELLTTDGLARRGRMTLNHGVVETPIFMPVGTYGAVKAMSPAELKDIGAQIILGNTFHLWLRPGLDVMDAHKGLHGFNGWDKPILTDSGGFQVFSLGDLRKITEEGVTFASPINGDRLFLSPEISMQIQRRLNSDIVMQFDECTPYKIGDRPATEAEAAASMRMSLRWAQRSRNEFEREGNPNALFGIVQGGMFEHLRDESLAGLQAIDADAGGQGFGGYAIGGLSVGEPKEDMMRVLQHVAPRLPADKPHYLMGVGTPEDLVAGVAAGVDMFDCVMPTRNARNGWLFTRFGDIKIKNAVHRNDPRPLDETCGCYTCRNFSRAYLHHLQRVGEILGARLNTIHNLYYYLELMAEMRAAIESHGFAAFQARFAADRARGAL

SEQ ID NO: 59946 - protein, 383 aa, Ralstonia pickettii
  misc_feature (1)..(383): tr|R0CHR3|R0CHR3_RALPI Queuine tRNA-ribosyltransferase OS=Ralstonia pickettii OR214 OX=1264675 GN=tgt PE=3 SV= 1
MLKYELLTTDGLARRGRMTLNHGVVETPIFMPVGTYGAVKAMSPAELKDIGAQIILGNTFHLWLRPGLEVMDAHKGLHGFNGWDKPILTDSGGFQVFSLGDLRKITEDGVTFASPINGDKLFLSPEISMQIQRRLNSDIVMQFDECTPYKIGDRPATEAEAAASMRMSLRWAQRSRNEFEREKNPNALFAIVQGGMFENLRDESLAGLQAIDADAGGEGFGGYAIGGLSVGEPKEDMMRVLQHVAPRLPANKPHYLMGVGTPEDLVAGVAAGVDMFDCVMPTRNARNGWLFTRFGDIKIKNAVHRNDPRPLDETCGCYTCSNFSRAYLHHLQRVGEILGARLNTIHNLYYYLELMAEMRTAIESHGFAAFQARFAADRARGAL

SEQ ID NO: 59947 - protein, 383 aa, Ralstonia pickettii
  misc_feature (1)..(383): sp|B2UC75|TGT_RALPJ Queuine tRNA-ribosyltransferase OS= Ralstonia pickettii (strain 12J) OX=402626 GN=tgt PE=3 SV=1
MLKYELLTTDGLARRGRMTLNHGVVETPIFMPVGTYGAVKAMSPAELKDIGAQIILGNTFHLWLRPGLEVMDAHKGLHGFNGWDKPILTDSGGFQVFSLGDLRKITEDGVTFASPINGDKLFLSPEISMQIQRRLNSDIVMQFDECTPYKIGDRPATEAEAAASMRMSLRWAQRSRNEFEREKNPNALFAIVQGGMFENLRDESLAGLQAIDADAGGEGFGGYAIGGLSVGEPKEDMMRVLQHVAPRLPADKPHYLMGVGTPEDLVAGVAAGVDMFDCVMPTRNARNGWLFTRFGDIKIKNAVHRNDPRPLDETCGCYTCSNFSRAYLHHLQRVGEILGARLNTIHNLYYYLELMAEMRTAIESHGFAAFQARFAADRARGAL

SEQ ID NO: 59948 - protein, 383 aa, Ralstonia pseudosolanacearum
  misc_feature (1)..(383): tr|A0A223GQ76|A0A223GQ76_9RALS Queuine tRNA-ribosyltran sferase OS=Ralstonia pseudosolanacearum OX=1310165 GN=t gt PE=3 SV=1
MLNFDLLTTDGLARRGRMTLNHGVVETPIFMPVGTYGAVKAMSPVELKDIGAQIILGNTFHLWLRPALEVIDAHKGLHGFVGWDKPMLTDSGGFQVFSLGDLRKITEEGVHFASPINGDRLFLSPEISMQIQRRLNSDIVMQFDECTPYQIDGRPATEAEAAASMRMSLRWAQRSRNEFERERNPNALFGIVQGGMFEPLRDESLAGLQAIDADAGGQGFGGYAIGGLSVGEPKEDMIRVLQHVAPRLPANKPHYLMGVGTPEDLVAGVAAGIDMFDCVMPTRNARNGWLFTRFGDIKIKNAVHRNDPRPLDETCGCYTCRNFSRAYLHHLQRVGEILGARLNTIHNLHYYLELMADMRTAIESHSFAVFRARFAADRARGAL

SEQ ID NO: 59949 - protein, 383 aa, Ralstonia pseudosolanacearum
  misc_feature (1)..(383): tr|A0A454TMF7|A0A454TMF7_9RALS Queuine tRNA-ribosyltran sferase OS=Ralstonia pseudosolanacearum OX=1310165 GN=t gt PE=3 SV=1
MLNFDLLTTDGLARRGRMTLNHGVVETPIFMPVGTYGAVKAMSPVELKDIGAQIILGNTFHLWLRPALEVIDAHKGLHGFVGWDKPMLTDSGGFQVFSLGDLRKITEEGVHFASPINGDRLFLSPEISMQIQRRLNSDIVMQFDECTPYQIDGRPATEAEAAASMRMSLRWAQRSRNEFERERNPNALFGIVQGGMFEPLRDESLAGLQAIDADAGGQGFGGYAIGGLSVGEPKEDMMRVLQHVAPRLPANKPHYLMGVGTPEDLVAGVAAGIDMFDCVMPTRNARNGWLFTRFGDIKIKNAVHRNDPRPLDETCGCYTCRNFSRAYLHHLQRVGEILGARLNTIHNLHYYLELMADMRTAIESHSFAAFRARFAADRARGAL

SEQ ID NO: 59950 - protein, 383 aa, Ralstonia solanacearum; identical to SEQ ID NO: 59948
  misc_feature (1)..(383): sp|Q8XVW4|TGT_RALSO Queuine tRNA-ribosyltransferase OS= Ralstonia solanacearum (strain GMI1000) OX=267608 GN=tg t PE=3 SV=1

SEQ ID NO: 59951 - protein, 383 aa, Ralstonia solanacearum
  misc_feature (1)..(383): tr|A0A399W534|A0A399W534_RALSL Queuine tRNA-ribosyltran sferase OS=Ralstonia solanacearum OX=305 GN=tgt PE=3 SV =1
MLKFDLLTTDGLARRGRMTLNHGVVETPIFMPVGTYGAVKAMSPVELKDIGAQIILGNTFHLWLRPALEVIDAHKGLHGFVGWDKPMLTDSGGFQVFSLGDLRKITEEGVHFASPINGDRLFLSPEISMQIQRRLNSDIVMQFDECTPYQIDGRPATEAEAAASMRMSLRWAQRSRNEFERENNPNALFAIVQGGMFEPLRDESLAGLQAIDTDAGGQGFGGYAIGGLSVGEPKEDMMRVLQHVAPRLPANKPHYLMGVGTPEDLVAGVAAGIDMFDCVMPTRNARNGWLFTRFGDIKIKNAVHRNDPRPLDETCGCYACRNFSRAYLHHLQRVGEILGARLNTIHNLHYYLELMADMRAAIESHSFAAFRARFAADRSRGAL

SEQ ID NO: 59952 - protein, 376 aa, Ralstonia sp.
  misc_feature (1)..(376): tr|A0A1H0TMG3|A0A1H0TMG3_9RALS Queuine tRNA-ribosyltran sferase OS=Ralstonia sp. 25mfcol4.1 OX=1761899 GN=tgt P E=3 SV=1
MLNFELLTTDGNARRGHVTLNHGVVETPIFMPVGTYGSVKAMSPLELNEIGAQIILGNTFHLWLRPGLDVVDTHEGLHKFIGWDKPILTDSGGFQVFSLGELRKITEEGVTFASPVNGDKLFLSPEISMQIQRTLNSDIVMQFDECTPYEIDGRPATHDEAARSMRMSLRWAKRSRDEFDRLANPNALFGIVQGGMFEDLRDESLAGLSELDFHGYAIGGLSVGEPKEDMMRVLEHVGPRLPAHKPHYLMGVGTPEDLVAGVAHGVDMFDCVMPTRNARNGWLFTRFGDVKIRNAAHRNDPRPLDEQCGCYTCRNFSRAYLHHLHRVGEILGARLNTIHNLYYYLELMREMRTAIEEHRFQAFRRQFAENRARGTK

SEQ ID NO: 59953 - protein, 383 aa, Ralstonia sp.; identical to SEQ ID NO: 59943
  misc_feature (1)..(383): tr|A0A100HQR6|A0A100HQR6_9RALS Queuine tRNA-ribosyltran sferase OS=Ralstonia sp. NT80 OX=1218247 GN=tgt PE=3 SV =1

SEQ ID NO: 59954 - protein, 383 aa, Ralstonia syzygii; identical to SEQ ID NO: 52661
  misc_feature (1)..(383): tr|G2ZYT5|G2ZYT5_9RALS Queuine tRNA-ribosyltransferase OS=Ralstonia syzygii R24 OX=907261 GN=tgt PE=3 SV=1

SEQ ID NO: 59955 - protein, 386 aa, Ramlibacter henchirensis
  misc_feature (1)..(386): tr|A0A4Z0CA02|A0A4Z0CA02_9BURK Queuine tRNA-ribosyltran sferase OS=Ramlibacter henchirensis OX=204072 GN=tgt PE =3 SV=1
MLRFDLLATEGLARRGRLTLNHGVVQTPIFMPVGTYGTVKGVTPRSLEEMGAQIILGNTFHLWMRPGLDVLAQFGGLHRFERWERPILTDSGGFQVWSLGEMRKISEEGVKFASPVNGDRLFLTPEVSMQVQTALNSDIVMQFDECTPYETKGHVTTEAEARFSMELSLRWAARCKTEFARLENPNALFGIVQGGMFEHLREASLAALVDMDFPGYAIGGVSVGEPKEDMLRIMAHTPHRLPAHKPRYLMGVGTPEDLVDGVAQGVDLFDCVMPTRNARNGHLFTRFGDLKIRNARHRSDERPLDETCTCYACKGETRPDGTVSGGFSRAYLHHLERCGEMLAPMLASIHNLHFYLNLMREIREALEAGRFAELARQFRADRARGI

SEQ ID NO: 59956 - protein, 386 aa, Ramlibacter rhizophilus
  misc_feature (1)..(386): tr|A0A4Z0BEU7|A0A4Z0BEU7_9BURK Queuine tRNA-ribosyltran sferase OS=Ramlibacter rhizophilus OX=1781167 GN=tgt PE =3 SV=1
MLQFELLATEGLARRGRLTLNHGVVQTPIFMPVGTYGTVKGVTPRSLEEMGAQIILGNTFHLWMRPGLDVLQQFGGLHRFEQWNKPILTDSGGFQVWSLGEMRRISEEGVKFASPVNGDRLFLTPEISMQIQRILNSDIVMQFDECTPYETKGHRTTEAEARFSMELSRRWALRCQAEFQRLENPNALFGIVQGGMFEHLRQESLEALVEMDFPGYAIGGVSVGEPKEDMLRIMAHTPQRLPAHKPRYLMGVGTPEDLVEGVAQGVDLFDCVMPTRNARNGHLFTRFGDLKIRNARHRGDERPLDETCGCYTCRGVTNADGTVSGGFSRAYLHHLERCGEMLAPMLASIHNLHFYLDTMRQIREALDAGRFTAWAQAFREDRRRGV

SEQ ID NO: 59957 - protein, 386 aa, Ramlibacter sp.
  misc_feature (1)..(386): tr|A0A4Y7BGI7|A0A4Y7BGI7_9BURK Queuine tRNA-ribosyltran sferase OS=Ramlibacter sp. WS9 OX=1882741 GN=tgt PE=3 S V=1
MLSFELLKTDGHARRGRLTLNHGVVQTPIFMPVGTYGTVKGVTPRSLEEMGAQIILGNTFHLWMRPGLDVLKQFGGLHRFESWNKPILTDSGGFQVWSLGEMRKISEEGVKFASPVNGDKLFLTPEISMQIQTLLNSDIVMQFDECTPYDTKGHITTDAEARVSMELSRRWADRCKTEFARLQNPNALFGIVQGGMFEHLREESLDALVEMDFPGYAVGGVSVGEPKEEMLRIMAHTPHRLPANKPRYLMGVGTPEDLVEGVANGVDMFDCVMPTRNARNGHLFTRFGDLKLRNAKHRTDERPLDETCTCYACKGSTAADGTVSGGFSRAYLHHLERCGEMLAPMLASIHNLHYYLNLMREIREALDAGTFAAFVQRFKQDRARGV

SEQ ID NO: 59958 - protein, 386 aa, Ramlibacter sp.
  misc_feature (1)..(386): tr|A0A4Z0BUX0|A0A4Z0BUX0_9BURK Queuine tRNA-ribosyltran sferase OS=Ramlibacter sp. 18x22-1 OX=2530451 GN=tgt PE =3 SV=1
MLKFELLATEGLARRGRLTLNHGVVQTPIFMPVGTYGTVKGVTPRSLDDMGAQIILGNTFHLWMRPGLDVLAQFGGLHRFEQWHRPILTDSGGFQVWSLGEMRKITEEGVKFASPVNGDRLFLTPEISMQIQTALNSDIVMQFDECTPYETKGHLTTEAEARFSMELSLRWAQRCKTEFARLNNPNALFGIVQGGMFEHLREESLATLVEMDFPGYAVGGVSVGEPKEDMLRITAHTPHRLPENKPRYLMGVGTPEDLVEGVAQGVDMFDCVMPTRNARNGHLFTRFGDLKLRNSRHRTDERPLDESCTCYACKGHTAPDGTVSGGFSRAYLHHLERCGEMLAPMLASIHNLHYYLNLMREIRESLEAGRFAQFRTVFREDRARGV

SEQ ID NO: 59959 - protein, 386 aa, Ramlibacter tataouinensis
  misc_feature (1)..(386): tr|A0A127JSS5|A0A127JSS5_9BURK Queuine tRNA-ribosyltran sferase OS=Ramlibacter tataouinensis OX=94132 GN=tgt PE =3 SV=1
MLNFEVTHTEGLARRGRLTLNHGVVQTPIFMPVGTYGTVKGITPRSLDEMDAQIILGNTFHLWMRPGLDVVKQFGGLHRFEQWDKPILTDSGGFQVWSLGEMRKISEEGVKFASPVNGDRLFLTPEISMQIQTVLNSDIVMQFDECTPYETKGHRTTEAEARFSMELSRRWAQRCQAEFARLENPNALFGIVQGGMFEHLREESLAALVEMDFPGYAVGGVSVGEPKEDMLRIMAHTPQRLPAHKPRYLMGVGTPEDLVAGVAQGVDMFDCVMPTRNARNGHLFTRYGDLKIRNSRHRSDERPLDESCTCYTCQGYTRAGGSVSGGFSRAYLHHLERCGEMLAPMLATIHNLHYYLNLMREIRQALEAGGFAAFAQRFRSERQRGI

SEQ ID NO: 59960 - protein, 386 aa, Ramlibacter tataouinensis
  misc_feature (1)..(386): tr|F5Y1G2|F5Y1G2_RAMTT Queuine tRNA-ribosyltransferase OS=Ramlibacter tataouinensis (strain ATCC BAA-407 / DSM 14655 / LMG 21543 / TTB310) OX=365046 GN=tgt PE=3 SV=1
MLHFELLATEGLARRGRLTLRHGVVETPIFMPVGTYGTVKGVTPRSLEEMGAQIILGNTFHLWMRPGLDVLAQFGGLHRFERWDRPILTDSGGFQVWSLGEMRKISEEGVRFASPVNGDKLFLTPETSMQIQAALNSDIVMQFDECTPYETKGHVTTEAEARFSMELSRRWAVRCKAEFARLENPNALFGIVQGGMFEHLREESLAALVEMDFPGYAVGGVSVGEPKEDMLRIMAHTPRLLPADKPRYLMGVGTPEDLVAGVAQGVDLFDCVMPTRNARNGHLFTRFGDLKIRNARHRGDERPLDESCTCYACRGHTRPDGSVSGGFSRAYLHHLERCGEMLAPMLASIHNLHYYLNLMREVREALDAGRFADFARQFRQDRARGV

SEQ ID NO: 59961 - protein, 375 aa, Raoultella electrica
  misc_feature (1)..(375): tr|A0A514EVT5|A0A514EVT5_9ENTR Queuine tRNA-ribosyltran sferase OS=Raoultella electrica OX=1259973 GN=tgt PE=3 SV=1
MKFELDTTDGRARRGRLVFDRGVVETPAFMPVGTYGTVKGMTPEEVEATGAQIILGNTFHLWLRPGQEIMKLHGDLHDFMQWKGPILTDSGGFQVFSLGDIRKITEQGVHFRNPINGDPIFLDPEKSMEIQYDLGSDIVMIFDECTPYPADWDYAKRSMEMSLRWAKRSRDRFDGLGNKNALFGIIQGSVYEDLRDISVKGLVDIGFDGYAVGGLAVGEPKEDMHRILEHVCPQIPADKPRYLMGVGKPEDLVEGVRRGIDMFDCVMPTRNARNGHLFVTDGVVKIRNAKHKSDTAPLDAECDCYTCRNYSRAYLHHLDRCNEILGARLNTIHNLRYYQRLMAGLRKAIEEGKLESFVTDFYQRQGRPVPPLNVD

SEQ ID NO: 59962 - protein, 375 aa, Raoultella ornithinolytica
  misc_feature (1)..(375): tr|A0A1Y6GSW0|A0A1Y6GSW0_RAOOR Queuine tRNA-ribosyltran sferase OS=Raoultella ornithinolytica OX=54291 GN=tgt P E=3 SV=1
MKFELDTTDGRARRGRLVFDRGVVETPAFMPVGTYGTVKGMTPEEVEATGAQIILGNTFHLWLRPGQEIMKLHGDLHDFMQWKGPILTDSGGFQVFSLGDIRKITEQGVHFRNPINGDPIFLDPEKSMEIQYDLGSDIVMIFDECTPYPADWDYAKRSMEMSLRWAQRSRDRFDSLGNKNALFGIIQGSVYEDLRDISVKGLVDIGFDGYAVGGLAVGEPKEDMHRILEHVCPQIPADKPRYLMGVGKPEDLVEGVRRGIDMFDCVMPTRNARNGHLFVTDGVVKIRNAKHKSDTAPLDAECDCYTCRNYSRAYLHHLDRCNEILGARLNTIHNLRYYQRLMAGLRKAIEEGKLEGFVADFYQRQGRPVPPLDVD

SEQ ID NO: 59963 - protein, 375 aa, Raoultella ornithinolytica
  misc_feature (1)..(375): tr|A0A4V2TJ00|A0A4V2TJ00_RAOOR Queuine tRNA-ribosyltran sferase OS=Raoultella ornithinolytica OX=54291 GN=tgt P E=3 SV=1
MKFELDTTDGRARRGRLVFERGVVETPAFMPVGTYGTVKGMTPEEVEATGAQIILGNTFHLWLRPGQEIMKLHGDLHDFMQWKGPILTDSGGFQVFSLGDIRKITEQGVHFRNPINGDPIFLDPEKSMEIQFDLGSDIVMIFDECTPYPADWDYAKRSMEMSLRWAQRSRDRFDGLGNKNALFGIIQGSVYEDLRDISVKGLVDIGFDGYAVGGLAVGEPKEDMHRILEHVCPQIPADKPRYLMGVGKPEDLVEGVRRGIDMFDCVMPTRNARNGHLFVTDGVVKIRNAKHKSDTATLDAECDCYTCRNYSRAYLHHLDRCNEILGARLNTIHNLRYYQRLMAGLRKAIEEGKLESFVADFYQRQGRTVPPLNVD

SEQ ID NO: 59964 - protein, 375 aa, Raoultella planticola; identical to SEQ ID NO: 56356
  misc_feature (1)..(375): tr|A0A2X2G5S5|A0A2X2G5S5_RAOPL Queuine tRNA-ribosyltran sferase OS=Raoultella planticola OX=575 GN=tgt PE=3 SV= 1

SEQ ID NO: 59965 - protein, 375 aa, Raoultella planticola
  misc_feature (1)..(375): tr|A0A377TBB0|A0A377TBB0_RAOPL Queuine tRNA-ribosyltran sferase OS=Raoultella planticola OX=575 GN=tgt PE=3 SV= 1
MKFELDTTDGRARRGRLVFDRGVVETPAFMPVGTYGTVKGMTPEEVEATGAQIILGNTFHLWLRPGQEIMKLHGDLHDFMQWKGPILTDSGGFQVFSLGDIRKITEQGVHFRNPINGDPIFLDPEKSMEIQYDLGSDIVMIFDECTPYPADWDYAKRSMEMSLRWAQRSRDRFDSLGNKNALFGIIQGSVYEDLRDISVKGLVDIGFDGYAVGGLAVGEPKEDMHRILEHVCPQIPADKPRYLMGVGKPEDLVEGVRRGIDMFDCVMPTRNARNGHLFVTDGVVKIRNAKHKSDTAPLDAECDCYTCRNYSRAYLHHLDRCNEILGARLNTIHNLRYYQRLMAGLRKAIEEGKLESFVADFYQRQGRPVPPLDVD

SEQ ID NO: 59966 - protein, 375 aa, Raoultella sp.; identical to SEQ ID NO: 59963
  misc_feature (1)..(375): tr|A0A509CR36|A0A509CR36_9ENTR Queuine tRNA-ribosyltran sferase OS=Raoultella sp. NCTC 9189 OX=2583577 GN=tgt P E=3 SV=1

SEQ ID NO: 59967 - protein, 375 aa, Raoultella sp.
  misc_feature (1)..(375): tr|A0A4R3ZKD7|A0A4R3ZKD7_9ENTR Queuine tRNA-ribosyltran sferase OS=Raoultella sp. BIGb0138 OX=2485115 GN=tgt PE =3 SV=1
MKFELDTTDGRARRGRLVFDRGVVETPAFMPVGTYGTVKGMTPEEVEATGAQIILGNTFHLWLRPGQEIMKLHGDLHDFMQWKGPILTDSGGFQVFSLGDIRKITEQGVHFRNPINGDPIFLDPEKSMEIQYDLGSDIVMIFDECTPYPADWDYAKRSMEMSLRWAQRSRDRFDGLGNKNALFGIIQGSVYEDLRDISVKGLVDIGFDGYAVGGLAVGEPKEDMHRILEHVCPQIPADKPRYLMGVGKPEDLVEGVRRGIDMFDCVMPTRNARNGHLFVTDGVVKIRNAKHKSDTAPLDAECDCYTCRNYSRAYLHHLDRCNEILGARLNTIHNLRYYQRLMAGLRKAIEEGKLESFVTDFYQRQGRPVPPLNVD

SEQ ID NO: 59968 - protein, 287 aa, Raoultella terrigena
  misc_feature (1)..(287): tr|A0A3P8M495|A0A3P8M495_RAOTE Queuine tRNA-ribosyltran sferase OS=Raoultella terrigena OX=577 GN=tgt_2 PE=3 SV =1
MKFELDTTDGRARRGRLVFERGVVETPAFMPVGTYGTVKGMTPEEVEATGAQIILGNTFHLWLRPGQEIMKLHGDLHDFMQWKGPILTDSGGFQVFSLGDIRKITEQGVHFRNPINGDPIFLDPEKSMEIQFDLGSDIVMIFDECTPYPADWDYAKRSMEMSLRWAQRSRDRFDGLGNKNALFGIIQGSVYEDLRDISVKGLVDIGFDGYAVGGLAVGEPKEDMHRILEHVCPQIPADKPRYLMGVGKPEDLVEGVRRGIDMFDCVMATRNAAQRSPVRHRWRRKNP

SEQ ID NO: 59969 - protein, 104 aa, Raoultella terrigena
  misc_feature (1)..(104): tr|A0A4U9DEJ2|A0A4U9DEJ2_RAOTE Queuine tRNA-ribosyltran sferase OS=Raoultella terrigena OX=577 GN=tgt_1 PE=4 SV =1
MKLHGDLHDFMQWKGPILTDSGGFQVFSLGDIRKITEQGVHFRNPINGDPIFLDPEKSMEIQFDLGSDIVMIFDECTPYPADWDYAKRSMEMSLRWAQRKPRPL

SEQ ID NO: 59970 - protein, 345 aa, Raphidiopsis brookii
  misc_feature (1)..(345): tr|D4TRS5|D4TRS5_9CYAN Queuine tRNA-ribosyltransferase OS=Raphidiopsis brookii D9 OX=533247 GN=tgt PE=3 SV=1
METPRFMPVGTLANVKTVTPAQLEDTGAQMILSNTYHLHLQPGEKIVAGGGGLHKFMAWNGPMLTDSGGFQVFSLSEMRKITEEGVVFRSPHDGQMIKLTPEKSIEIQNILGADVIMAFDECPPYPATYQEVTAATDRTYRWLERCIMSHQRLDQALFPIVQGGVYLDMRIRAATDLAKLDMPGYAIGGVSVGEPPELMAQIVRTTAPLLPRNKPRYLMGVGTYREMVIAIAAGVDLFDCVIPTRWARHGTAMVQGERWNLKNSKFREDFIPIDETCHCYTCSNFSRAYVSHLVRSQEILAYTLLSIHNITELIRFTQAIRESILQNRFLTDFGHWMNDPEKDLE

SEQ ID NO: 59971 - protein, 373 aa, Raphidiopsis curvata
  misc_feature (1)..(373): tr|A0A1Z4VBV0|A0A1Z4VBV0_9CYAN Queuine tRNA-ribosyltran sferase OS=Raphidiopsis curvata NIES-932 OX=1973482 GN= tgt PE=3 SV=1
MSNFSFRLVANCSQTQARAGVFSTPHGIVETPRFMPVGTLANVKTVTPAQLADTGAQMILSNTYHLHLQPGEKIVAGGGGLHKFMAWDGPMLTDSGGFQVFSLSEMRKITEEGVVFRSPHDGQMIKLTPEKSIEIQNILGADVIMAFDECPPYPATYQEVTAATDRTYRWLERCIKSHQRLDQALFPIVQGGVYLDLRTRAATDLAKLDMPGYAIGGVSVGEPPELMAQIVRTTAPLLPRNKPRYLMGVGTYREMVIAIAAGVDLFDCVIPTRWARHGTAMVQGERWNLKNTKFREDFAPIDETCHCYTCSNFSRAYVSHLVRSQEILAYTLLSIHNITELIRFTQAIRESILQNRFLTDFGHWMNDPEKDLE

SEQ ID NO: 59972 - protein, 376 aa, Reichenbachiella agariperforans
  misc_feature (1)..(376): tr|A0A1M6U995|A0A1M6U995_9BACT Queuine tRNA-ribosyltran sferase OS=Reichenbachiella agariperforans OX=156994 GN =tgt PE=3 SV=1
MDFKLEVTDAKSKARAGVITTDHGQIETPIFMPVGTAGTVKTVHQRELNEDVKAQIILGNTYHLYLRPGLDVIEAAGGLHKFNGFEKPMLTDSGGYQVYSLKHRRKITEEGVKFQSHIDGSRHNFTPEVVMDIQRTIGADIIMAFDECTPYPCDRKYARESMEMTHRWLKRCCDRFDQTESKYGYSQTLFPIVQGSTYHDLREKSAETIASFGREGNAIGGLSVGEPAEMMYESTDLVCSILPADKPRYLMGVGTPENILECIALGVDMFDCVMPTRNARHGLIYTSEGIINIKNKKWEKDFSPLDPNLGGYVDTAYSKAYVRHLVHSSEALGAQIASIHNLAFYLWLVGEARAHIKAGDFSTWKNLILPKISSRL

SEQ ID NO: 59973 - protein, 376 aa, Reichenbachiella faecimaris
  misc_feature (1)..(376): tr|A0A1W2G6L9|A0A1W2G6L9_9BACT Queuine tRNA-ribosyltran sferase OS=Reichenbachiella faecimaris OX=692418 GN=tgt PE=3 SV=1
MNFELLQKDPKSKARAGKITTDHGEIETPIFMPVGTAGTVKALHQRELKEDVKAEIILGNTYHLYLRPGLDVIEAAGGLHQFNGWDRPMLTDSGGYQVYSLKDRRKITEEGVKFQSHIDGSRHNFTPESVMDIQRTIGADIIMAFDECTPYPCDEKYAKNSMEMTHRWLKRCCDRFDETEPKYGYDQTLFPIVQGSTYHDLRTKSAETIASFGREGNAIGGLSVGEPAEMMYESTDLVCSILPEDKPRYLMGVGTPSNLIECIALGVDMFDCVLPTRNARHGVLYTSEGIINIKNEKWEKDFSPVDPNLAGHVDMNYSKAYLRHLIRTGEMLGAQIASIHNLSFFLWLVKEARAHILQGDFASWKNAILPKLSNRL

SEQ ID NO: 59974 - protein, 376 aa, Reichenbachiella sp.
  misc_feature (1)..(376): tr|A0A2G5L4R7|A0A2G5L4R7_9BACT Queuine tRNA-ribosyltran sferase OS=Reichenbachiella sp. 5M10 OX=1889772 GN=tgt PE=3 SV=1
MDFKLEATDGKSNARAGVITTDHGQIETPIFMPVGTAGTVKAVHQRELKEDIKGEIILGNTYHLYLRPGLEVIEAAGGLHMFNGFDRPMLTDSGGYQVYSLKHRRKITEEGVKFQSHIDGSRHHFTPEYVMDIQRTIGADIIMAFDECTPYPCDRKYARESMEMTHRWLKRCCDRFDETQPKYGYSQTLFPIVQGSTYHDLREKSAETIASFGREGNAIGGLSVGEPAEMMYETTDLVCGILPKDKPRYLMGVGTPENILECISLGVDMFDCVMPTRNARHGLIYTSEGIINIKNKKWERDFSPLDPNLGGYVDSAYTKAYVRHLIHSSEALGAQITSVHNLTFYLWLVKEARKHIKSGSFSAWKNAILPKISTRL

SEQ ID NO: 59975 - protein, 372 aa, Reinekea blandensis
  misc_feature (1)..(372): tr|A4BG47|A4BG47_9GAMM Queuine tRNA-ribosyltransferase OS=Reinekea blandensis MED297 OX=314283 GN=tgt PE=3 SV= 1
MTFKLHNTDGKARRGTLTFPRGTVETPAFMPVGTYGTVKGMTPKDVEAIGAEIILGNTFHLMLRPGTQVISEHGDLHDFAQWEKPILTDSGGFQVFSLGKLRKITEEGVTFQSPVDGAKVKMTPESSMEVQRALGSDIVMIFDECTPYPATEAEAKQSMEMSLRWAKRSKDAHGDSPSALFGIIQGGMYQNLREVSLKGLTDIEFDGYAIGGLSVGEPKDEMMKVLDYLPAMMPEDKPRYLMGVGKPEDLVEGVRRGVDMFDCVMPTRNARNGHLFVTDGVVKIRNAKHRHDTTALDPECDCYTCQNFSKAYLYHLDKCGEILGAQLNTIHNLRYYQRLMAGLRDAIDANQLDAFVDDFYARRGLETPPLAP

SEQ ID NO: 59976 - protein, 378 aa, Reinekea forsetii
  misc_feature (1)..(378): tr|A0A2K8KUZ8|A0A2K8KUZ8_9GAMM Queuine tRNA-ribosyltran sferase OS=Reinekea forsetii OX=1336806 GN=tgt PE=3 SV= 1
MSHSSFMSFTLHNTDGKARRGTLSFPRGDVQTPAFMPVGTYGTVKGMTPRDLEDIGAEIILGNTFHLMLRPGTEVISDHGDLHDFANWSKPILTDSGGFQVFSLGKMRKITEDGVTFQSPVNGDKVHMTPESSMAVQKALGSDIVMIFDECTPFPATHAEVKKSMELSLRWAKRSKDAHGDSPSALFGIIQGGMLRDLREVSLAGLTEIGFDGYAIGGLSVGEPKEEMMQVLDYLPALMPADKPRYLMGVGKPEDLVEGVRRGVDMFDCVMPTRNARNGHLFVTDGVVKIRNAKYRHDTSSLDADCDCYTCRNFTKAYLYHLDKCGEMLGAQLNTIHNLRYYQRLMAQLRGAIEENRLDAYVEGFYQLRGLETPALTP

SEQ ID NO: 59977 - protein, 378 aa, Reinekea marinisedimentorum
  misc_feature (1)..(378): tr|A0A4R3IEB3|A0A4R3IEB3_9GAMM Queuine tRNA-ribosyltran sferase OS=Reinekea marinisedimentorum OX=230495 GN=tgt PE=3 SV=1
MTRSCFMEFKLHNTDGKARRGTLSFPRGEVQTPAFMPVGTYGTVKGMTPKDVKEIGADIILGNTFHLMLRPGTEVISAHGDLHDFAQWDKPILTDSGGFQVFSLGKLRKITEDGVTFQSPVNGSKVHMTPESSMEVQRALGSDIVMIFDECTPYPATEAEAKNSMELSLRWAKRSKDAHGDSPSALFGIIQGGMYQNLREVSLKGLTDIDFDGYAIGGLSVGEPKDEMMQVLDYLPAMMPEDKPRYLMGVGKPEDLVEGVRRGVDMFDCVMPTRNARNGHLFVTDGVVKIRNAKHRHDTTTLDPECDCYTCKNFSKAYLYHLDKCGEMLGAQLNTIHNLRYYQRLMAELREAIEENRLEAYVDEFYTRRGLQTPPLAP

SEQ ID NO: 59978 - protein, 378 aa, Reinekea sp.
  misc_feature (1)..(378): tr|A0A5C8Z1Q1|A0A5C8Z1Q1_9GAMM Queuine tRNA-ribosyltran sferase OS=Reinekea sp. SSH23 OX=2593301 GN=tgt PE=3 SV =1
MSRSCFMEFTLHNTDGKARRGTLKFPRGEVQTPAFMPVGTYGTVKGMTPKEVEEIGADIILGNTFHLMLRPGTEVISAHGDLHDFAQWHKPILTDSGGFQVFSLGKLRKITEDGVTFQSPVNGSKVHMTPESSMEVQRALGSDIVMIFDECTPYPATEAEAKKSMELSLRWAKRSKDAHGDSPSALFGIIQGGMYQNLRQTSLQGLTEIDFDGYAIGGLSVGEPKDEMMQVLDYLPAMMPEDKPRYLMGVGKPEDLVEGVRRGVDMFDCVMPTRNARNGHLFVTDGVVKIRNAKHRHDTGPLDPQCDCYTCKNFSKAYLYHLDKCGEMLGAQLNTIHNLRYYQRLMADLRAAIEDNRLDQYVDEFYSLRGLQTPPLAP

SEQ ID NO: 59979 - protein, 446 aa, Renibacterium salmoninarum
  misc_feature (1)..(446): tr|A9WVJ0|A9WVJ0_RENSM Queuine tRNA-ribosyltransferase OS=Renibacterium salmoninarum (strain ATCC 33209 / DSM 20767 / JCM 11484 / NBRC 15589 / NCIMB 2235) OX=288705 GN=tgt PE=3 SV=1
MRMFCLTQMRLAIRNGLGCENRQVPQSDFSFTIGSKLSETSPTKSAEKPDGGEFLGRTGTISTPHGEIQTPAFIAVGTKATVKAVLPESMKELGAQALLANAYHLYLQPGPEIVDQAGGLGSFMNWSGPTFTDSGGFQVMSLGSGFKKVIDMVNIDQSGADDRVAPGKERLAHIDDDGVWFKSHLDGSKHRFTPEVSLQIQHQLGADVMFAFDELTTLHNSRGYQEEALERTRLWAERCISEHQRLIVERETKPYQALFGVIQGAQYEDLRRKASRDLGGMDIDGMQFDGFGLGGALEKENLGTIVRWCCEELPENKPKHLLGISEPDDIFVAIENGADTFDCVSPTRVARNSAFYTPFGRKNLSNAKYKRDFGPLMDGCDCYTCINYSRAYIHHLYKSKEMISATLISIHNERFVVKMVDDARLAIEDGSFFEFKDETLTNYYSA

SEQ ID NO: 59980 - protein, 374 aa, Reyranella soli
  misc_feature (1)..(374): tr|A0A512ND20|A0A512ND20_9PROT Queuine tRNA-ribosyltran sferase OS=Reyranella soli OX=1230389 GN=tgt PE=3 SV=1
MSLSFELLGTDGAARRGRIGTAHGTVETPAFMPLGTGGTVKAMLPQSVAETGAEIVLGNTFHLMLRPGAERVAAQGGLHKFMNWPRPILTDSGGFQVMSLKDLRKLDPDGVTFRSPFDGSQHRLTPERSIKIQHLLDTNITMSFDECTSWPVAEDAAAFSMRLSMKWAERGRRAFVDRPGYGLFGIVQGSVFPDLRAESVKALIDIGFDGYAVGGLAVGEGQQAMFGVLDVTTPMLPDDRPRYLMGVGRPADIVGAVKRGIDMFDCVLPTRGGRTAQAFTRRGELNLRNARHRDDHRPIDEQCACPACRHHSRAYLHHLIRVEEILGAMLLTWHNLQYYQDIMRGLRDAIEGGSLDSWAAAFEEEQGRGDIPPL

SEQ ID NO: 59981 - protein, 374 aa, Reyranella sp.
  misc_feature (1)..(374): tr|A0A521R5P4|A0A521R5P4_9PROT Queuine tRNA-ribosyltran sferase OS=Reyranella sp. OX=1929291 GN=tgt PE=3 SV=1
MSLSYKLLGTDGEARRGQITTAHGTIETPAFMPVGTAGTVKAMMPQSVAGTGAEIVLGNTFHLMLRPGAERVASLGGLHKFMNWPGPILTDSGGFQVMSLKELRKLDPDGVTFRSPADGSQHRLTPERSIEIQRLLDADITMSFDECTSWPVEEPAAAFSMRLSMKWAERGKRAFTERPGYGLFGIVQGSVFPALREESAKALTSIGFDGYAVGGLAVGEGQETMFRVLDQTVPLLPADRPRYLMGVGRPADIVGAVKRGIDMFDCVMPTRSGRTAQAFTRRGELNLRNARHRDDPRPIDEHCACPACKHHSRAYLHHLIRSEEILGAMLLTWHNLHYYQDVMRGLRGAIESNSLGHWIAAFESDQSLGDIPPL

SEQ ID NO: 59982 - protein, 251 aa, Reyranella sp.
  misc_feature (1)..(251): tr|A0A521LM79|A0A521LM79_9PROT Queuine tRNA-ribosyltran sferase (Fragment) OS=Reyranella sp. OX=1929291 GN=tgt PE=3 SV=1
MSLSFELKGQDGAARRGRIATAHGTIETPAFMPVGTAGTVKAMLPQSVAETGAEIVLGNTFHLMLRPGAERVAALGGLHKFMNWPGPILTDSGGFQVMSLKELRKLDNDGVTFRSPVDGTQHRLTPARSIEIQRLLDADITMSFDECTSWPVEEPAAAFSMRLSMKWAELGKKAFTERPGYGLFGIVQGSIFPALREESTKALTAIGFDGYAVGGLAVGEGQELMFKTLDTTVPMLPQDRPRYLMGVGRPG

SEQ ID NO: 59983 - protein, 380 aa, Rheinheimera nanhaiensis
  misc_feature (1)..(380): tr|I1DSN1|I1DSN1_9GAMM Queuine tRNA-ribosyltransferase OS=Rheinheimera nanhaiensis E407-8 OX=562729 GN=tgt PE= 3 SV=1
MKFELDTTDGKARRGRLIFDRGVVETPAFMPVGTYGTVKGMTPEELEATGAQICLGNTFHLMLRPGTEIIKKHGDLHDFMHWHKPILTDSGGFQVFSLGELRKITEEGVKFRSPLNGERIMLTPERSMEVQRDLGSDIVMIFDECTPYPATEMQAKKSMEMSLRWAKRSKDAHGDNSAALFGIIQGGMYPHLRDVSLNGLEEIGFDGYAIGGLSVGEPKEDMIRILDHTTDKMPAHKPRYLMGVGKPEDIVEAVRRGIDMFDCVMPTRNARNGHLFVSTGVVKIRNAKYKDDIGPLDAECDCYTCKNYSRAYLHHLDRCNEIQGARLNTIHNLHHYQKLMQGLRGAIAAGTLEQFVAQFYAKRGMAVPELAAPAQNNEQH

SEQ ID NO: 59984 - protein, 380 aa, Rheinheimera pacifica
  misc_feature (1)..(380): tr|A0A1H6J906|A0A1H6J906_9GAMM Queuine tRNA-ribosyltran sferase OS=Rheinheimera pacifica OX=173990 GN=tgt PE=3 SV=1
MKFELDTTDGKARRGRLIFERGVVETPAFMPVGTYGTVKGMTPEELDATGAQICLGNTFHLMLRPGTEIIKKHGDLHDFMHWHKPILTDSGGFQVFSLGELRKITEEGVKFRSPLNGERIMLTPERSMEVQRDLGSDIVMIFDECTPYPATEQEAKKSMEMSLRWAKRSKDAHGDNPAALFGIIQGGMYPNLRDVSLNGLEDIGFDGYAIGGLSVGEPKADMIRILNHTTDKMPAHKPRYLMGVGKPEDIVEAVRRGIDMFDCVMPTRNARNGHLFVSTGVVKIRNAKYKDDIGPLDAECDCYTCKNYSRAYLHHLDRCNEIQGARLNTMHNLHHYQKLMQGLRTAIAAGNLEQFVEQFYTKRGLPVPALQAIDTNTEQH

SEQ ID NO: 59985 - protein, 380 aa, Rheinheimera salexigens
  misc_feature (1)..(380): tr|A0A1E7Q9A3|A0A1E7Q9A3_9GAMM Queuine tRNA-ribosyltran sferase OS=Rheinheimera salexigens OX=1628148 GN=tgt PE =3 SV=1
MKFELDTTDGKARRGRLIFDRGVVETPAFMPVGTYGTVKGMTPEELEATGAQICLGNTFHLMLRPGTDIISKHGDLHNFMHWQKPILTDSGGFQVFSLGELRKITEEGVKFRSPLNGERIMLTPERSMEVQRALGSDIVMIFDECTPYPATEQQAKKSMELSLRWAKRSKDAHGDNPSALFGIIQGGMYPGLRDVSLQGLEDIGFDGYAIGGLSVGEPKDDMINILNHTTDQMPAQKPRYLMGVGKPEDIVEAVRRGIDMFDCVMPTRNARNGHLFVNTGVVKIRNAKYKDDITPLDAECDCYTCKNYSRSYLHHLDRCNEILGARLNTMHNLRHYQVLMQGLRDAIAAGNLEQFVEQFYAKRDLPVPTLENSLTNTEQN

SEQ ID NO: 59986 - protein, 377 aa, Rheinheimera sp.
  misc_feature (1)..(377): tr|A0A3S2VTZ4|A0A3S2VTZ4_9GAMM Queuine tRNA-ribosyltran sferase OS=Rheinheimera sp. YQF-1 OX=2499626 GN=tgt PE= 3 SV=1
MKFELLKTDGKARRGRLVFERGVVETPAFMPVGTYGTVKGMTPEELDATGAQICLGNTFHLMLRPGTEIIKKHGDLHDFMNWHKPILTDSGGFQVFSLGELRKIKEEGVTFRSPLNGEKIMLTPERSMQVQRDLGSDIVMIFDECTPYPATEQQAKKSMEMSLRWAKRSKDEHGDNPSALFGIIQGGMYPELRDISLQGLEEIGFDGYAIGGLSVGEPKEDMIKILNHTTGQMPQHKPRYLMGVGKPEDIVEAVRRGIDMFDCVMPTRNARNGHLFVSTGVIKIRNAKHKDDASTLDAECDCYTCKNYSRSYLHHLDRCNEILGARLNTIHNLHHYQKLMQGLRAAIAEQKLEDFVAEFYQKRGMEVPPLETSITEQ

SEQ ID NO: 59987 - protein, 380 aa, Rheinheimera sp.
  misc_feature (1)..(380): tr|A0A486XRW6|A0A486XRW6_9GAMM Queuine tRNA-ribosyltran sferase OS=Rheinheimera sp. BAL341 OX=1708203 GN=tgt PE =3 SV=1
MKFELDTTDGKARRGRLIFDRGVVETPAFMPVGTYGTVKGMTPEELEATGAQICLGNTFHLMLRPGTEIIKKHGDLHDFMHWHKPILTDSGGFQVFSLGELRKITEEGVKFRSPLNGERIMLTPERSMEVQRDLGSDIVMIFDECTPYPATEMQAKKSMEMSLRWAKRSKDAHGDNPSALFGIIQGGMYPHLRDVSLNGLEEIGFDGYAIGGLSVGEPKEDMIRILNHTTDKMPAHKPRYLMGVGKPEDIVEAVRRGIDMFDCVMPTRNARNGHLFVSTGVVKIRNAKYKDDIGPLDAECDCYTCKNYSRAYLHHLDRCNEIQGARLNTVHNLHHYQKLMQGLRAAIAAGTLDQFVETFYTKRGLPVPTLTTLEQNKEQH

SEQ ID NO: 59988 - protein, 392 aa, Rheinheimera tuosuensis
  misc_feature (1)..(392): tr|A0A285IXE7|A0A285IXE7_9GAMM Queuine tRNA-ribosyltran sferase OS=Rheinheimera tuosuensis OX=1323745 GN=tgt PE =3 SV=1
MKFELDTTDGRARRGRLIFERGTVETPAFMPVGTYGTVKGMTPEELDATGAQICLGNTFHLMLRPGTEIIKKHGDLHDFMHWHKPILTDSGGFQVFSLGELRKITEEGVKFRSPLNGERIMLTPERSMEVQRDLGSDIVMIFDECTPYPASEQQAKKSMEMSLRWAKRSKDAHGDNPAALFGIIQGGMYPNLRDVSLQGLEEIGFDGYAIGGLSVGEPKQDMINILNHTTGQMPGHKPRYLMGVGKPEDIVEAVRRGIDMFDCVMPTRNARNGHLFISSGVVKIRNAKHKDDISPLDPECDCYTCKNYSRSYLHHLDRCNEILGARLNTIHNLHHYQKLMQGLRDAIAAGTLEQFVSEFYAKRELPVPPLEQLADRLDANRLDNTETPVSTN

SEQ ID NO: 59989 - protein, 376 aa, Rhizobacter gummiphilus
  misc_feature (1)..(376): tr|A0A1W6LH95|A0A1W6LH95_9BURK Queuine tRNA-ribosyltran sferase OS=Rhizobacter gummiphilus OX=946333 GN=tgt PE= 3 SV=1
MLQFELLQTDGHARRGRLTLNHGVVETPVFMPVGTYGTVKGVLPSSLEEMGAQIILGNTFHLWLRPGIDVLNQFGGLHRFEGWNKPILTDSGGFQVWSLGEMRKISEEGVRFASPVNGDKLFLTPETSMQIQRALNSDIVMQFDECTPYETKGHLTTEREARVSMELSLRWAKRCLDEFNRNENPNALFGIVQGGMFEHLREESLNALVDLDLPGYAIGGVSVGEPKPEMQRIVAHTPHRLPANKPRYLMGVGTPEDLVEGVAAGVDMFDCVMPTRNARNAHLFTRFGDVRLRNSRFRTDERPVDETCTCHTCKHFSRAYLHHLERCGEMLAPMLASIHNLHYYVNLMREVREALDAGTFPQFVAQFKADRARGTT

SEQ ID NO: 59990 - protein, 375 aa, Rhizobacter sp.
  misc_feature (1)..(375): tr|A0A0Q7A6G9|A0A0Q7A6G9_9BURK Queuine tRNA-ribosyltran sferase OS=Rhizobacter sp. Root404 OX=1736528 GN=tgt PE =3 SV=1
MLTFDLLKTEGHARRGRLTLNHGVVETPVFMPVGTYGTVKGVMPASLEAMGAQIILGNTFHLWLRPGLDVLKQFGGLHRFEAWNKPILTDSGGFQVWSLGEMRKISEEGVKFASPVNGDKLFLTPEISMQIQRVLNSDIVMQFDECTPYETKGHLTTEREARVSMELSLRWASRCLTEHARLENPNALFGIVQGGMFENLREESLAKLVELDLPGYAIGGVSVGEPKPLMQRIVAHTPHRLPAHKPRYLMGVGTPEDLVEGVEGGVDMFDCVMPTRNARNGHLFTRFGDLKIRNARHKADESPPDMTCTCHTCANFSRAYLHHLDRCNEMLGPMLASIHNLHYYVNLMREVREALDAGAFATFATRFREDRARGV

SEQ ID NO: 59991 - protein, 385 aa, Rhizobacter sp.
  misc_feature (1)..(385): tr|A0A1M7QCR1|A0A1M7QCR1_9BURK Queuine tRNA-ribosyltran sferase OS=Rhizobacter sp. OV335 OX=1500264 GN=tgt PE=3 SV=1
MLQFDLLKTEGHARRGRLTLNHGVVETPIFMPVGTYGTVKGVMPQSLEDMGAQIILGNTFHLWLRPGVDILRQFGGLHRFEGWTKPILTDSGGFQVWSLGDMRKISEEGVRFASPVNGDKLFLTPEISMQIQRALNSDIVMQFDECTPYESKGHLTTEREARSSMELSLRWARRCLAEFQRNENPNALFGIVQGGMFETLREESLASLVELDLPGYAIGGVSVGEPKAEMQRIMAHTPHRLPAHKPRYLMGVGTPEDLVEGVAAGVDMFDCVMPTRNARNGHLFTRFGDLRLRNARYRTDERPIDETCSCHTCKGFSRAYLHHLDRCGEMLGPMLTTIHNLHYYLNLMREVRDALDAGRFAEFTKQFAADRARGPGPIPEPANLP

SEQ ID NO: 59992 - protein, 373 aa, Rhizobiaceae bacterium
  misc_feature (1)..(373): tr|A0A4V6BBB3|A0A4V6BBB3_9RHIZ Queuine tRNA-ribosyltran sferase OS=Rhizobiaceae bacterium LC148 OX=1120689 GN=t gt PE=3 SV=1
MTENFQFTLKATDGGARLGEVSMPRGTIRTPAFMPVGTVGTVKAMYLDQVRETGADIILGNTYHLMLRPGAERVARLGGLHELIRWPHPILTDSGGFQVMSLAGLRKLDEKGVTFKSHVDGSLHHMSPERSIEIQGLLGSDIQMQLDECVALPAEPKEIERAMELSLRWAERCKVAFGNQPGKAMFGIVQGGDQPNLRIRSAEGLKELDLKGYAVGGLAVGEPQEVMLQMLETTLPVLPSEKPRYLMGVGTPDDILKSVARGIDMFDCVMPTRSGRHGLAFTRRGRINIRNAKHAEDLRPLDEESSCPAARDYSRAYLHHLVRSDEALGGMLLSWNNLSYYQDLMKGIRKAIAEGRFADFYAETQEVWARGDV

SEQ ID NO: 59993 - protein, 377 aa, Rhizobiaceae bacterium
  misc_feature (1)..(377): tr|A0A2D8K4T4|A0A2D8K4T4_9RHIZ Queuine tRNA-ribosyltran sferase OS=Rhizobiaceae bacterium OX=1913961 GN=tgt PE= 3 SV=1
MSQEFQFTLKTTDGNARLGAITMPRGEIRTPAFMPVGTAGTVKAMYLDQVRDLGADIILGNTYHLMLRPGAERVARLGGLHSLIRWKYPILTDSGGFQVMSLAALRQIDEKKGVTFKSHIDGSVHHMSPERSIEIQGLLGSDIQMQLDECVRLPAERAEIEKSTEMSLRWAERCREAFGDQPGKAMFGIVQGGDIPDLRVRSARGLADLDLKGYAVGGLAVGEPQEVMLAMLETTLPELPTTKPRYLMGVGTPDDILKSVSRGIDMFDCVMPTRAGRHGLAFTRRGKVNLRNARHAEDLRPLDAESYCPAARDYSRAYLHHLVRANESLAGMLLTWNNLHYYQSLMQGIRAAIAEGRYADFMAETQEGWARGDIAPV

SEQ ID NO: 59994 - protein, 377 aa, Rhizobiales bacterium
  misc_feature (1)..(377): tr|A0A1M3MHW0|A0A1M3MHW0_9RHIZ Queuine tRNA-ribosyltran sferase OS=Rhizobiales bacterium 63-22 OX=1895812 GN=tg t PE=3 SV=1
MTTENFQFKVLATDGAARRGEISMPRGVVRTPAFMPVGTAGTVKAMYMDQVKELGADIILGNTYHLMLRPGAERVARLGGLHEFGGWKGPILTDSGGFQVMSLAQLRKLNEQGVTFRSHIDGKAYEMSPERSIEIQGLLDSDIQMQLDECVALPSPEKNTERAMELSLRWAERCKAAFGEQAGKAMFGIVQGGDVARLRERSAEALKAMDLKGYSIGGLAVGEPQAVMLDMLEVVCPILPSEKPRYLMGVGTPDDMLKSVARGVDMFDCVMPTRAGRHGLAFTRFGKVNLRNARHAEDHRPLDPESNCPAARDYSRAYLHHLVKSGEALGAMLLTWNNLAYYQYLMQGIRAAISEGRFADFAAETTAGWERGDMPAL

SEQ ID NO: 59995 - protein, 376 aa, Rhizobiales bacterium
  misc_feature (1)..(376): tr|A0A1H4VBB1|A0A1H4VBB1_9RHIZ Queuine tRNA-ribosyltran sferase OS=Rhizobiales bacterium GAS188 OX=1884351 GN=t gt PE=3 SV=1
MTSFSFKIEARDGAARQGEIATPRGAIRTPAFMPVGTAATVKAMYPAEVRALGADIVLANTYHLMLRPGAERVAALGGLHRFMNWERPIITDSGGFQVMSLANLRKISERGVTFRSHIDGSAHELTPERAIEIQNLLGSDIVMQLDECVALPASDEVAEKAMRLSLAWAERCQKAFGRPEGRALFGIVQGGASESLRVESATALAAMQFQGYAIGGLAVGEPQEVMLRMIEATEPHLPRDKPRYLMGVGTPDDLIRSVERGIDMFDCVMPTRAGRHGLAYTRFGKVNLKNARHADDPRPLDGQSTSAAARDWSRAYLHHLTKAGEILGMMMLTAVNIAYYQELMGELRAAIAAGRLTDAIGEIREGWARGEADAKG

SEQ ID NO: 59996 - protein, 376 aa, Rhizobium acidisoli
  misc_feature (1)..(376): tr|A0A0N1ME92|A0A0N1ME92_9RHIZ Queuine tRNA-ribosyltran sferase OS=Rhizobium acidisoli OX=1538158 GN=tgt PE=3 S V=1
MTENFQFTLKKTDAGARLGEISMPRGTIRTPAFMPVGTVGTVKAMYLDQVRETGADIILGNTYHLMLRPSAERVARLGGLHKLIRWEHPILTDSGGFQVMSLSGLRKLDEQGVTFKSHVDGSLHHMSPERSIEIQGLLGSDIQMQLDECVALPAEPREIERAMEMSLRWAERCRVAFGEQPGKAMFGIVQGGDIPALRVRSAQALSELDLKGYAIGGLAVGEPQDVMLQMLDTTLPVLPGEKPRYLMGVGTPDDILKSVARGIDMFDCVMPTRSGRHGLAFTRRGKVNIRNARHAEDMRPLDDQSNCPASRDYSRAYLHHLVRSNEALGGMLLSWNNLAYYQELMQGIRKAIAEGRFADFMAETMEEWARGDLDPV

SEQ ID NO: 59997 - protein, 376 aa, Rhizobium aethiopicum
  misc_feature (1)..(376): tr|A0A1C3XWQ5|A0A1C3XWQ5_9RHIZ Queuine tRNA-ribosyltran sferase OS=Rhizobium aethiopicum OX=1138170 GN=tgt PE=3 SV=1
MTENFQFTLEKTDAGARLGEISMPRGTIRTPAFMPVGTVGTVKAMYLDQVRETGADIILGNTYHLMLRPTAERVARLGGLHKLIRWEHPILTDSGGFQVMSLSGLRKLDEQGVTFKSHVDGSLHHMSPERSIEIQGLLGSDIQMQLDECVALPAEPKEIERAMEMSLRWAERCKVAFGEQPGKAMFGIVQGGDIPALRVRSAKALSELDLKGYAIGGLAVGEPQDVMLQMLETTLPVLPLEKPRYLMGVGTPDDILKSVARGIDMFDCVMPTRSGRHGLAFTRRGKVNIRNARHAEDMRPLDEQSNCPASRDYSRAYLHHLVRANEALGGMLLSWHNLAYYQELMQGIRKAIAEGRFADFMAETMEEWARGDLDPV

SEQ ID NO: 59998 - protein, 376 aa, Rhizobium album
  misc_feature (1)..(376): tr|A0A2U2DT12|A0A2U2DT12_9RHIZ Queuine tRNA-ribosyltran sferase OS=Rhizobium album OX=2182425 GN=tgt PE=3 SV=1
MSETFQFNLKKVEGSARLGEITMPRGTIRTPAFMPVGTVGTVKAMYLDQVRDSGADIILGNTYHLMLRPGPERVARLGGLHELIRWPHPILTDSGGFQVMSLSSLRKLDEQGVTFKSHVDGSTHHMSPERSIEIQGLLDSDIQMQLDECVALPAEPKDIERAMEMSLRWAERCRVAFGEQPGKAMFGIVQGGDVQALRVRSAEGLKQLDLKGYAVGGLAVGEPQPVMLDMLDITLPVLPTEKPRYLMGVGTPDDILKSVARGIDMFDCVMPTRSGRHGLAFTRRGKVNIRNARHAEDSRPLDEESTCPAARDYSRAYLHHLVRSNEALGGMLLSWNNLHYYQELMQGIRKSIAEGRFRDFYAETLENWAQGDIPPR

SEQ ID NO: 59999 - protein, 376 aa, Rhizobium altiplani
  misc_feature (1)..(376): tr|A0A109JLC0|A0A109JLC0_9RHIZ Queuine tRNA-ribosyltran sferase OS=Rhizobium altiplani OX=1864509 GN=tgt PE=3 S V=1
MTENFQFTLKKTDAGARLGEVSMPRGTIRTPAFMPVGTVGTVKAVYLDQVRDTGADIILGNTYHLMLRPTAERVARLGGLHRLIRWEHPILTDSGGFQVMSLSGLRKLDEQGVTFKSHVDGSLHHMSPERSIEIQGLLDSDIQMQLDECVALPAEPREIERAMELSLRWAERCKVAFGNQPGKAMFGIVQGGDVPALRVRSAAALTDLDLKGYAVGGLAVGEPQEVMLKMLEETLPVLPTEKPRYLMGVGTPDDILKSVARGIDMFDCVMPTRSGRHGLAFTRRGKVNIRNARHAEDMRPLDEQSNCPASRDYSRAYLHHLVRANEALGGMLLSWHNLAYYQELMQGIRKSIVEGRFVDFMAETMEEWARGDLDPV

SEQ ID NO: 60000 - protein, 376 aa, Rhizobium anhuiense
  misc_feature (1)..(376): tr|A0A3S0SEF6|A0A3S0SEF6_9RHIZ Queuine tRNA-ribosyltran sferase OS=Rhizobium anhuiense OX=1184720 GN=tgt PE=3 S V=1
MTDHFQFTLDKTDAGARLGKISMPRGEIRTPAFMPVGTVGTVKAMYLDQVRETGADIILGNTYHLMLRPTAERVARLGGLHKLIRWEHPILTDSGGFQVMSLSGLRKLDEQGVTFKSHVDGSLHHMSPERSIEIQGLLGSDIQMQLDECVALPAEPKEIERAMEMSLRWAERCRVAFGEQPGKAMFGIVQGGDIPALRIRSAEALSQLDLKGYAIGGLAVGEPQDVMLQMLETTLPVLPLEKPRYLMGVGTPDDILKSVARGIDMFDCVMPTRSGRHGLAFTRRGKVNIRNARHAEDMRPLDEQSNCPASRDYSRAYLHHLVRSNEALGGMLLSWNNLAYYQELMQGIRKAIAEGRFADFMAETQEEWARGDLQPV

SEQ ID NO: 60001 - protein, 376 aa, Rhizobium azibense
  misc_feature (1)..(376): tr|A0A4R8ANC7|A0A4R8ANC7_9RHIZ Queuine tRNA-ribosyltran sferase OS=Rhizobium azibense OX=1136135 GN=tgt PE=3 SV =1
MTENFQFTLRRTDAGARLGEISMPRGTIRTPAFMPVGTVGTVKAMYLDQVRETGADIILGNTYHLMLRPTAERVARLGGLHSLIRWEHPILTDSGGFQVMSLSGLRKLDEQGVTFKSHVDGSLHHMSPERSIEIQGLLDSDIQMQLDECVALPAEPREIERAMELSLRWAERCKVAFGNQLGKAMFGIVQGGDIPALRIRSAEELAQLDLKGYAVGGLAVGEPQDVMLKMLDETLPVLPGEKPRYLMGVGTPDDILKSVARGIDMFDCVMPTRSGRHGLAFTRRGRVNIRNARHAEDLRPLDEQSNCPASRDYSRAYLHHLVRANEALGGMLLSWHNLSYYQELMQGTRTAIAEGRFADFMSETQEEWAKGDLERA

SEQ ID NO: 60002 - protein, 376 aa, Rhizobium azibense
  misc_feature (1)..(376): tr|A0A4R3RJS2|A0A4R3RJS2_9RHIZ Queuine tRNA-ribosyltran sferase OS=Rhizobium azibense OX=1136135 GN=tgt PE=3 SV =1
MTENFQFTLRRTDAGARLGEISMPRGTIRTPAFMPVGTVGTVKAMYLDQVRETGADIILGNTYHLMLRPTAERVARLGGLHSLIRWEHPILTDSGGFQVMSLSGLRKLDEQGVTFKSHVDGSLHHMSPERSIEIQGLLGSDIQMQLDECVALPAEPREIERAMELSLRWAERCKVAFGNQAGKAMFGIVQGGDIPALRIRSAEELKQLDLKGYAVGGLAVGEPQDVMLKMLEETLPVLPGEKPRYLMGVGTPDDILKSVARGIDMFDCVMPTRSGRHGLAFTRRGRVNIRNARHAEDLRPLDEQSNCPASRDYSRAYLHHLVRANEALGGMLLSWHNLSYYQELMQGIRTAIAEGRFADFMAETLEEWAKGDLERA

SEQ ID NO: 60003 - protein, 376 aa, Rhizobium esperanzae
  misc_feature (1)..(376): tr|A0A246DW46|A0A246DW46_9RHIZ Queuine tRNA-ribosyltran sferase OS=Rhizobium esperanzae OX=1967781 GN=tgt PE=3 SV=1
MTENFQFTLEKSDAGARLGEISMPRGTIRTPAFMPVGTVGTVKAMYLDQVRETGADIILGNTYHLMLRPTAERVARLGGLHKLIRWEHPILTDSGGFQVMSLSGLRQLDEQGVTFKSHVDGSLHHMSPERSIEIQGLLGSDIQMQLDECVALPAEPKEIERAMEMSLRWAERCKVAFGEQPGKAMFGIVQGGDIPALRVRSAEELTKLDLKGYAVGGLAVGEPQDVMLNMLKETLPVLPVEKPRYLMGVGTPDDILKSVARGIDMFDCVMPTRSGRHGLAFTRRGKVNIRNARHAEDMRPLDEQSNCPASRDYSRAYLHHLVRANEALGGMLLSWHNLAYYQELMQGIRKAIAEGRFADFMAETMEEWARGDLDPV

SEQ ID NO: 60004 - protein, 376 aa, Rhizobium etli
  misc_feature (1)..(376): tr|F2A5L5|F2A5L5_RHIET Queuine tRNA-ribosyltransferase OS=Rhizobium etli CNPAF512 OX=993047 GN=tgt PE=3 SV=1
MTENFQFTLKRTDAGARLGEISMPRGAIRTPAFMPVGTVGTVKAMYLDQVRETGADIILGNTYHLMLRPTAERVARLGGLHKLVRWEHPILTDSGGFQVMSLSGLRKLDEQGVTFKSHVDGSLHHMSPERSIEIQGLLDSDIQMQLDECVALPAEPKEIERAMEMSLRWAERCRVAFGEQPGKAMFGIVQGGDIPALRIRSAEALSQLDLKGYAVGGLAVGEPQDVMLRMLETTLPVLPGEKPRYLMGVGTPDDILKSVARGIDMFDCVMPTRSGRHGLAFTRRGKVNIRNARHAEDMRPLDEKSTCPASRDYSRAYLHHLVRANEALGGMLLSWHNLAYYQELMQGIRKAIAEGRFADFMAETMEEWARGDLDPV

SEQ ID NO: 60005 - protein, 376 aa, Rhizobium etli
  misc_feature (1)..(376): tr|A0A0A8GCM2|A0A0A8GCM2_RHIET Queuine tRNA-ribosyltran sferase OS=Rhizobium etli bv. phaseoli str. IE4803 OX=1 432049 GN=tgt PE=3 SV=1
MTENFQFTLKKTDAGARLGEISMPRGEIRTPAFMPVGTVGTVKAMYLDQVRESGADIILGNTYHLMLRPTAERVARLGGLHKLIRWEHPILTDSGGFQVMSLSGLRRLDEHGVTFKSHVDGSLHHMSPERSIEIQGLLGSDIQMQLDECVALPAEPREIERAMEMSLRWAERCRVAFGEQPGKAMFGIVQGGDIPALRVRSAEALSQLDLKGYAVGGLAVGEPQDVMLRMLETTLPVLPSEKPRYLMGVGTPDDILKSVARGIDMFDCVMPTRSGRHGLAFTRRGKVNIRNARHAEDMRPLDEQSNCPASRDYSRAYLHHLVRANEALGGMLLSWHNLAYYQELMQGIRKAIAEGRFADFMAETQEEWARGDLEPV

SEQ ID NO: 60006 - protein, 376 aa, Rhizobium favelukesii
  misc_feature (1)..(376): tr|W6RBB7|W6RBB7_9RHIZ Queuine tRNA-ribosyltransferase OS=Rhizobium favelukesii OX=348824 GN=tgt PE=3 SV=1
MTENFQFTLKKTDAGARLGEVSMPRGTVRTPAFMPVGTVGTVKAMYLDQVRETGADIILGNTYHLMLRPTAERVARLGGLHKLIRWEHPILTDSGGFQVMSLSGLRKLDEQGVTFKSHVDGSLHHMSPERSIEIQGLLGSDIQMQLDECVALPAEPREIERAMELSLRWAERCKVAFGNQPGKAMFGIVQGGDVPSLRIRSAEALSELDLKGYAVGGLAVGEPQDVMLKMLEETLPVLPTEKPRYLMGVGTPDDILKSVARGIDMFDCVMPTRSGRHGLAFTRRGKVNIRNARHAEDMRPLDDQSNCPASRDYSRAYLHHLVRANEALGGMLLSWHNLAYYQELMQGIRKAIAEGRFADFMAETQEEWARGDLEPV

SEQ ID NO: 60007 - protein, 376 aa, Rhizobium fredii
  misc_feature (1)..(376): tr|A0A2A6M3Z9|A0A2A6M3Z9_RHIFR Queuine tRNA-ribosyltran sferase OS=Rhizobium fredii OX=380 GN=tgt PE=3 SV=1
MTETFQFKLLATDGKARRGEVSMPRGTIRTPAFMPVGTVGTVKAMYLDQVRELGADIILGNTYHLMLRPGAERVARLGGLHTFIRWERPILTDSGGFQVMSLSSLRKLNEQGVTFKSHVDGALYHMSPERSIEIQGLLDSDIQMQLDECVALPAEPGEIERAMEMSIRWAERCKVAFGDQPGKAMFGIVQGGDLPKLRERSALALKELDLKGYAIGGLAVGEPQEVMLDMLDVTCPLLPAEKPRYLMGVGTPDDILKSVAHGIDMFDCVMPTRSGRHGLAFTRYGRINLRNARHAEDTRPLDEQSSCPAARDYSRAYLHHLIRSNESLGGMLLSWSNLAYYQELMAGIRKAIEEGRYADFMAETQEGWERGDLAPV

SEQ ID NO: 60008 - protein, 376 aa, Rhizobium fredii; identical to SEQ ID NO: 60007
  misc_feature (1)..(376): tr|G9A6U7|G9A6U7_RHIFH Queuine tRNA-ribosyltransferase OS=Rhizobium fredii (strain HH103) OX=1117943 GN=tgt PE =3 SV=1

SEQ ID NO: 60009 - protein, 376 aa, Rhizobium freirei
  misc_feature (1)..(376): tr|N6V7Z6|N6V7Z6_9RHIZ Queuine tRNA-ribosyltransferase OS=Rhizobium freirei PRF 81 OX=363754 GN=tgt PE=3 SV=1
MSESFQFQLKKTDGGARLGEVSMPRGTIRTPAFMPVGTVGTVKAMYLDQVRETGADIILGNTYHLMLRPTAERVARLGGLHQLIRWPHPILTDSGGFQVMSLSGLRKLDEQGVTFKSHVDGSLHHMSPERSIEIQGLLDSDIQMQLDECVALPATPKDIERAMEMSLRWAERCKVAFGNQPGKAMFGIVQGGDVPELRVRSAQALSSMDLKGYAVGGLAVGEPQEVMLRMLEITLPELPREKPRYLMGVGTPDDILKSVARGIDMFDCVMPTRSGRHGLAFTRRGKVNIRNARHAEDMRPLDEQSSCPASRDYSRAYLHHLVRANEALGGMLLSWHNLAYYQELMQGIRQAIAEGRFADFMAETQENWARGDLEPV

SEQ ID NO: 60010 - protein, 376 aa, Rhizobium galegae
  misc_feature (1)..(376): tr|A0A5J5KNB0|A0A5J5KNB0_RHIGA tRNA guanosine(34) trans glycosylase Tgt OS=Rhizobium galegae OX=399 GN=tgt PE=4 SV=1
MTETFQFNLKATDGGARLGEITMPRGTIRTPAFMPVGTVGTVKAMYLDQVRDTGADIILGNTYHLMLRPGAERVARLGGLHELIRWKHPILTDSGGFQVMSLSGLRKLDEKGVTFKSHVDGSLHHMSPERSIEIQGLLGSDIQMQLDECVALPAEPKEIERAMELSLRWAERCRVAFGDQPGKAMFGIVQGGDQPELRIRSAEGLKQLDLKGYAVGGLAVGEPQDVMLKMLETTLPVLPFEKPRYLMGVGTPDDMLKSVARGIDMFDCVMPTRSGRHGLAFTRRGKVNIRNARHAEDMRPLDEESSCPAARDYSRAYLHHLVRADEALGGMLLSWNNLNYYQDLMKGIRQAIAEGRFADFYAETQEMWAKGDIDPV

SEQ ID NO: 60011 - protein, 376 aa, Rhizobium gallicum
  misc_feature (1)..(376): tr|A0A1L5NIG7|A0A1L5NIG7_9RHIZ Queuine tRNA-ribosyltran sferase OS=Rhizobium gallicum OX=56730 GN=tgt PE=3 SV=1
MTENFQFTLRRTDAGARLGEISMPRGTIRTPAFMPVGTVGTVKAMYLDQVRETGADIILGNTYHLMLRPTAERVARLGGLHSLIRWEHPILTDSGGFQVMSLSGLRKLDEQGVTFKSHVDGSLHHMSPERSIEIQGLLDSDIQMQLDECVALPAEPREIERAMELSLRWAERCKVAFGNQLGKAMFGIVQGGDIPALRIRSAEELAQLDLKGYAVGGLAVGEPQDVMLKMLEETLPVLPGDKPRYLMGVGTPEDILKSVARGIDMFDCVMPTRSGRHGLAFTRRGRVNIRNARHAEDLRPLDEQSNCPASRDYSRAYLHHLVRANEALGGMLLSWHNLSYYQELMQGIRTAIAEGRFADFMAETQEEWAKGDLERA

SEQ ID NO: 60012 - protein, 376 aa, Rhizobium gallicum; identical to SEQ ID NO: 60001
  misc_feature (1)..(376): tr|A0A0B4X245|A0A0B4X245_9RHIZ Queuine tRNA-ribosyltran sferase OS=Rhizobium gallicum bv. gallicum R602 OX=1418 105 GN=tgt PE=3 SV=1

SEQ ID NO: 60013 - protein, 376 aa, Rhizobium grahamii
  misc_feature (1)..(376): tr|A0A370KS22|A0A370KS22_9RHIZ Queuine tRNA-ribosyltran sferase OS=Rhizobium grahamii OX=1120045 GN=tgt PE=3 SV =1
MTENFQFTLKKTDAGARLGEVSMPRGTIRTPAFMPVGTVGTVKAMYLDQVRDTGADIILGNTYHLMLRPTAERVARLGGLHKLIRWEHPILTDSGGFQVMSLSGLRKLDEQGVTFKSHVDGSLHHMSPERSIEIQGLLDSDIQMQLDECVALPAEPREIERAMELSLRWAERCKIAFGNQPGKAMFGIVQGGDVPALRVRSAAALTDLDLKGYAVGGLAVGEPQDVMLKMLEETLPVLPTEKPRYLMGVGTPDDMLKSVARGIDMFDCVMPTRSGRHGLAFTRRGKVNIRNARHAEDMRPLDDQSNCPASRDYSRAYLHHLVRANEALGGMLLSWHNLAYYQELMQGIRKAIAEGRFADFMAETQEEWARGDLEPV

SEQ ID NO: 60014 - protein, 376 aa, Rhizobium grahamii
  misc_feature (1)..(376): tr|S3HKV0|S3HKV0_9RHIZ Queuine tRNA-ribosyltransferase OS=Rhizobium grahamii CCGE 502 OX=990285 GN=tgt PE=3 SV =1
MTENFQFTLKKTDAGARLGEVSMPRGTIRTPAFMPVGTVGTVKAMYLEQVRDTGADIILGNTYHLMLRPTAERVARLGGLHKLIRWEHPILTDSGGFQVMSLSGLRKLDEQGVTFKSHVDGSLHHMSPERSIEIQGLLDSDIQMQLDECVALPAEPREIERAMELSLRWAERCKIAFGNQPGKAMFGIVQGGDVPALRVRSAAALTDLDLKGYAVGGLAVGEPQDVMLKMLEETLPVLPTEKPRYLMGVGTPDDILKSVARGIDMFDCVMPTRSGRHGLAFTRRGKVNIRNARHAEDMRPLDDQSNCTASRDYSRAYLHHLVRANEALGGMLLSWHNLAYYQELMQGIRKAIAEGRFADFMAETQAEWARGDLEPA

SEQ ID NO: 60015 - protein, 376 aa, Rhizobium hainanense
  misc_feature (1)..(376): tr|A0A1C3UPC3|A0A1C3UPC3_9RHIZ Queuine tRNA-ribosyltran sferase OS=Rhizobium hainanense OX=52131 GN=tgt PE=3 SV =1
MSESFQFQLKKTDGGARLGEVSMPRGTIRTPAFMPVGTVGTVKAMYLDQVRETGADIILGNTYHLMLRPTAERVARLGGLHQLIRWPHPILTDSGGFQVMSLSGLRKLDEQGVTFKSHVDGSLHHMSPERSIEIQGLLDSDIQMQLDECVALPATPKEIERAMEMSLRWADRCKVAFGNQPGKAMFGIVQGGDVPELRVRSAQALSSMDLKGYAVGGLAVGEPQEVMLRMLEITLPELPTEKPRYLMGVGTPDDILKSVARGIDMFDCVMPTRSGRHGLAFTRRGKVNIRNARHAEDMRPLDEQSNCPASRDYSRAYLHHLVRANEALGGMLLSWHNLAYYQELMQGIRQAIAEGRFADFMAETMENWARGDLEPV

SEQ ID NO: 60016 - protein, 376 aa, Rhizobium hidalgonense
  misc_feature (1)..(376): tr|A0A2A6KHM2|A0A2A6KHM2_9RHIZ Queuine tRNA-ribosyltran sferase OS=Rhizobium hidalgonense OX=1538159 GN=tgt PE= 3 SV=1
MTETFQFTLDKTDAGARLGKISMPRGEIRTPAFMPVGTVGTVKAMYLDQVRETGADIILGNTYHLMLRPTAERVARLGGLHKLIRWEHPILTDSGGFQVMSLSGLRKLDEQGVTFKSHVDGSLHHMSPERSIEIQGLLGSDIQMQLDECVALPAEPKEIERAMEMSLRWAERCRVAFGEQPGKAMFGIVQGGDIPALRIRSAQALSQLDLKGYAIGGLAVGEPQDVMLQMLETTLPVLPGQKPRYLMGVGTPDDILKSVARGIDMFDCVMPTRSGRHGLAFTRRGKVNIRNARHAEDMRPLDEQSNCPASRDYSRAYLHHLVRSNEALGGMLLSWNNLAYYQELMQGIRKAIAEGRFADFMAETQEEWARGDLQPV

SEQ ID NO: 60017 - protein, 376 aa, Rhizobium ipomoeae
  misc_feature (1)..(376): tr|A0A4S8P4Y6|A0A4S8P4Y6_9RHIZ Queuine tRNA-ribosyltran sferase OS=Rhizobium ipomoeae OX=1210932 GN=tgt PE=3 SV =1
MSENFTFNLKATSGKARLGEITMPRGTVRTPAFMPVGTVGTVKAMYLDQVKEGGADIILGNTYHLMLRPGPERVARLGGLHKLIRWPGPILTDSGGFQVMSLSGLRKLDEQGVTFKSHIDGSLHHMSPERSIEIQGLLDSDIQMQLDECVSLPNEPREIERAMELSLRWAERCRVAFGNQPGKAMFGIVQGGDQPALRIRSAEGLKQLDLKGYSIGGLAVGEPQAVMLDMLRITLPVLPTEKPRYLMGVGTPDDMLKSVAEGIDMFDCVMPTRSGRHGLAFTRRGKVNIRNARHAEDMRPLDEQSSCPAARDYSRAYLHHLVRSNEALGGMLLSWNNLSYYQELMQGIRQAIAEDRFEDFKAETIEMWARGDIDPV

SEQ ID NO: 60018 - protein, 376 aa, Rhizobium jaguaris
  misc_feature (1)..(376): tr|A0A387FUQ8|A0A387FUQ8_9RHIZ Queuine tRNA-ribosyltran sferase OS=Rhizobium jaguaris OX=1312183 GN=tgt PE=3 SV =1
MSESFQFQLKKTDGGARLGEVSMPRGTIRTPAFMPVGTVGTVKAMYLDQVRETGADIILGNTYHLMLRPTAERVARLGGLHELIRWRHPILTDSGGFQVMSLSGLRKLDEKGVTFKSHVDGSTHHMSPERSIEIQGLLGSDIQMQLDECVALPATPKEIERAMELSLRWAERCKVAFGDQPGKAMFGIVQGGDVQELRVRSAQALKQMDLKGYAVGGLAVGEPQDVMLRMLELTLPELPADKPRYLMGVGTPDDILKSVARGIDMFDCVMPTRSGRHGLAFTRRGKVNIRNARHAEDMRPLDDQSTCPASRDYSRAYLHHLVRANEALGGMLLSWHNLAYYQELMQGIRQAIAEGRFADFMAETQENWARGDLEPA

SEQ ID NO: 60019 - protein, 376 aa, Rhizobium laguerreae
  misc_feature (1)..(376): tr|A0A1S9G6Y6|A0A1S9G6Y6_9RHIZ Queuine tRNA-ribosyltran sferase OS=Rhizobium laguerreae OX=1076926 GN=tgt PE=3 SV=1
MTDNFQFTLKKTDAGARLGQISMPRGEIRTPAFMPVGTVGTVKAMYLDQVRETGADIILGNTYHLMLRPTAERVARLGGLHKLIRWEHPILTDSGGFQVMSLSGLRKLDEQGVTFKSHVDGSLHHMSPERSIEIQGLLGSDIQMQLDECVALPAEPKEIERAMEMSLRWAERCRVAFGEQPGKAMFGIVQGGDIPALRIRSAEALAQLDLKGYAIGGLAVGEPQDVMLQMLETTLPVLPLEKPRYLMGVGTPDDILKSVARGIDMFDCVMPTRSGRHGLAFTRRGKVNIRNARHAEDMRPLDEQSNCPASRDYSRAYLHHLVRSNEALGGMLLSWHNLAYYQELMQGIRKAIAEGRFADFMAETQEQWARGDLEPV

SEQ ID NO: 60020 - protein, 376 aa, Rhizobium leguminosarum
  misc_feature (1)..(376): tr|A0A154IIL7|A0A154IIL7_RHILE Queuine tRNA-ribosyltran sferase OS=Rhizobium leguminosarum OX=384 GN=tgt PE=3 S V=1
MTDNFQFTLDKTDAGARLGQISMPRGEIRTPAFMPVGTVGTVKAMYLDQVRETGADIILGNTYHLMLRPTAERVARLGGLHKLIRWEHPILTDSGGFQVMSLSGLRKLDEQGVTFKSHVDGSLHHMSPERSIEIQGLLGSDIQMQLDECVALPAEPKEIERAMEMSLRWAERCRVAFGEQPGKAMFGIVQGGDIPALRIRSAEALSQLDLKGYAIGGLAVGEPQDVMLQMLETTLPVLPLEKPRYLMGVGTPDDILKSVARGIDMFDCVMPTRSGRHGLAFTRRGKVNIRNARHAEDMRPLDEQSNCPASRDYSRAYLHHLVRANEALGGMLLSWHNLAYYQELMQGIRKAIAEGRFADFMAETQEEWARGDLEPV

SEQ ID NO: 60021 - protein, 376 aa, Rhizobium leguminosarum
  misc_feature (1)..(376): tr|J0V089|J0V089_RHIL1 Queuine tRNA-ribosyltransferase OS=Rhizobium leguminosarum bv. viciae (strain WSM1455) OX=755176 GN=tgt PE=3 SV=1
MTDNFQFTLKKTDAGARVGQISMPRGEIRTPAFMPVGTVGTVKAMYLDQVRETGADIILGNTYHLMLRPTAERVARLGGLHKLIRWEHPILTDSGGFQVMSLSGLRKLDEQGVTFKSHVDGSLHHMSPERSIEIQGLLGSDIQMQLDECVALPAEPKEIERAMEMSLRWAERCRVAFGEQPGKAMFGIVQGGDIPALRIRSAEALAQLDLKGYAIGGLAVGEPQDVMLQMLETTLPVLPLEKPRYLMGVGTPDDILKSVARGIDMFDCVMPTRSGRHGLAFTRRGKVNIRNARHAEDMRPLDEQSNCPASRDYSRAYLHHLVRSNEALGGMLLSWHNLAYYQELMQGIRKAIAEGRFADFMAETQEEWARGDLEPV

SEQ ID NO: 60022 - protein, 376 aa, Rhizobium loessense
  misc_feature (1)..(376): tr|A0A1G4T3C4|A0A1G4T3C4_9RHIZ Queuine tRNA-ribosyltran sferase OS=Rhizobium loessense OX=158890 GN=tgt PE=3 SV =1
MTENFQFTLRRTDAGARLGEISMPRGTIRTPAFMPVGTVGTVKAMYLDQVRETGADIILGNTYHLMLRPTAERVARLGGLHSLIRWEHPILTDSGGFQVMSLSGLRKLDEQGVTFKSHVDGSLHHMSPERSIEIQGLLGSDIQMQLDECVALPAEPREIERAMELSLRWAERCKIAFGNQLGKAMFGIVQGGDIPALRIRSAEELAQLDLKGYAVGGLAVGEPQDVMLKMLEETLPVLPGEKPRYLMGVGTPDDILKSVARGIDMFDCVMPTRSGRHGLAFTRRGKVNIRNARHAEDVRPLDEESNCPASRDYSRAYLHHLVRANEALGGMLLSWHNLSYYQELMQGIRTAIAEDRFADFMAETQEEWAKGDLERA

SEQ ID NO: 60023 - protein, 376 aa, Rhizobium loti
  misc_feature (1)..(376): tr|A0A1A5R579|A0A1A5R579_RHILI Queuine tRNA-ribosyltran sferase OS=Rhizobium loti OX=381 GN=tgt PE=3 SV=1
MAKPFTFKVLATDGKARRGVIDMPRGEIRTPAFMPVGTGGTVKAMYMDQVRGVGADIILGNTYHLMLRPGAERVARLGGLHEFARWPHPILTDSGGFQVMSLSKLRKLTEKGVTFRSHIDGAAYEMSPERSIEIQGLLDSDIQMQLDECTALPAELKEIERAMELSLRWAERCKTAFGDQPGKAMFGIVQGGDNAALRIRSAQALSAMELKGYAVGGLAVGEPQAVMLEMLDITCPVLPHNKPRYLMGVGTPDDILKSVARGIDMFDCVMPTRAGRHGLAYTRRGKVNLRNARHADDPRPLDEESDCPAARGYSRAYLHHLVRSQEALGAMLLTWNNLSYYQKLMQDIRAAIETGSFDVRGAEITEGWARGDIPVL

SEQ ID NO: 60024 - protein, 376 aa, Rhizobium loti
  misc_feature (1)..(376): tr|A0A2T3E446|A0A2T3E446_RHILI Queuine tRNA-ribosyltran sferase OS=Rhizobium loti OX=381 GN=tgt PE=3 SV=1
MTETFQFKLLAADGNARRGEVVTPRGTIRTPAFMPVGTVGTVKAMYLDQVRDLGADIILGNTYHLMLRPGAERVARLGGLHKFIRWERPILTDSGGFQVMSLSSLRKLNEQGVTFKSHVDGALYHMSPERSIEIQGLLGSDIQMQLDECVALPAEPDEIERAMEMSLRWAERCKVAFGDQPGKAMFGIVQGGDIPRLRERSALALRDLDLKGYAVGGLAVGEPQEVMLGMLDVTCPVLPADKPRYLMGVGTPDDILKSVAHGIDMFDCVMPTRSGRHGLAFTRYGRINLRNARHAEDTRPLDEQSSCPATRDYSRAYLHHLIRSNESLGGMLLSWNNLAYYQELMAGIRKAIEEGRYTDFMAETMEGWQRGDLPPV

SEQ ID NO: 60025 - protein, 376 aa, Rhizobium lusitanum
  misc_feature (1)..(376): tr|A0A1C3VHN9|A0A1C3VHN9_9RHIZ Queuine tRNA-ribosyltran sferase OS=Rhizobium lusitanum OX=293958 GN=tgt PE=3 SV =1
MSESFQFQLKKTDGGARLGEVSMPRGTIRTPAFMPVGTVGTVKAMYLDQVRETGADIILGNTYHLMLRPTAERVARLGGLHELIRWKHPILTDSGGFQVMSLSGLRKLDEKGVTFKSHVDGSLHHMSPERSIEIQGLLGSDIQMQLDECVALPSTPKEIERAMEMSLRWADRCKAAFGDQPGKAMFGIVQGGDIPDLRVRSAQALSGLDLKGYAVGGLAVGEPQEVMLRMLEITLPELPTEKPRYLMGVGTPDDILKSVARGIDMFDCVMPTRSGRHGLAFTRRGKVNIRNARHAEDMRPLDQQSSCPASRDYSRAYLHHLVRANEALGGMLLSWHNLAYYQELMQGIRQAIAEDRFADFMAETQENWARGDLEPV

SEQ ID NO: 60026 - protein, 376 aa, Rhizobium meliloti
  misc_feature (1)..(376): tr|A0A437GJX4|A0A437GJX4_RHIML Queuine tRNA-ribosyltran sferase OS=Rhizobium meliloti OX=382 GN=tgt PE=3 SV=1
MTEAFQFKLLANDGNARRGEVVTPRGTIRTPAFMPVGTVGTVKAMYLDQVRDLGADIILGNTYHLMLRPGAERVARLGGLHKFIRWERPILTDSGGFQVMSLSSLRKLNEQGVTFKSHVDGALYHMSPERSIEIQGLLGSDIQMQLDECVALPAEPDEIERAMEMSLRWAERCKVAFGDQPGRAMFGIVQGGDIPRLRERSALALRDLDLKGYAVGGLAVGEPQEVMLGMLDVTCPVLPADKPRYLMGVGTPDDILKSVAHGIDMFDCVMPTRSGRHGLAFTRYGRINLRNARHAEDTRPLDEQSSCPATRDYSRAYLHHLIRSNESLGGMLLSWSNLAYYQELMAGIRKAIEEGRYTDFMAETMEGWQRGDLPPV

SEQ ID NO: 60027 - protein, 376 aa, Rhizobium meliloti; identical to SEQ ID NO: 60024
  misc_feature (1)..(376): sp|Q92PY4|TGT_RHIME Queuine tRNA-ribosyltransferase OS= Rhizobium meliloti (strain 1021) OX=266834 GN=tgt PE=3 SV=1

SEQ ID NO: 60028 - protein, 376 aa, Rhizobium mesoamericanum
  misc_feature (1)..(376): tr|K0PWI6|K0PWI6_9RHIZ Queuine tRNA-ribosyltransferase OS=Rhizobium mesoamericanum STM3625 OX=1211777 GN=tgt P E=3 SV=1
MTEKFQFTLKKTDAGARLGEVSMPRGTIRTPAFMPVGTVGTVKAMYLDQVRDTGADIILGNTYHLMLRPTAERVARLGGLHKLIRWEHPILTDSGGFQVMSLSGLRKLDEQGVTFKSHVDGSLHHMSPERSIEIQGLLDSDIQMQLDECVALPAEPREIERAMELSLRWAERCKVAFGNQPGKAMFGIVQGGDVPALRIRSAAALTNLDLKGYAVGGLAVGEPQDVMLKMLEETLPVLPTEKPRYLMGVGTPDDILKSVARGIDMFDCVMPTRSGRHGLAFTRRGKVNIRNARHAEDMRPLDEQSNCPASRDYSRAYLHHLVRANEALGGMLLSWHNLAYYQELMQGIRKAISEGHFANFMAETMEEWARGDLDPV

SEQ ID NO: 60029 - protein, 376 aa, Rhizobium miluonense
  misc_feature (1)..(376): tr|A0A1C3X1A7|A0A1C3X1A7_9RHIZ Queuine tRNA-ribosyltran sferase OS=Rhizobium miluonense OX=411945 GN=tgt PE=3 S V=1
MSESFQFQLKKTDGGARLGEVSMPRGTIRTPAFMPVGTVGTVKAMYLDQVRETGADIILGNTYHLMLRPTAERVARLGGLHQLIRWPHPILTDSGGFQVMSLSGLRKLDEQGVTFKSHVDGSLHHMSPERSIEIQGLLDSDIQMQLDECVALPATPKDIERAMEMSLRWAERCKVAFGNQPGKAMFGIVQGGDVPELRVRSAQALSSMDLKGYAVGGLAVGEPQEVMLRMLEITLPELPTEKPRYLMGVGTPDDILKSVARGIDMFDCVMPTRSGRHGLAFTRRGKVNIRNARHAEDMRPLDEQSNCPASRDYSRAYLHHLVRANEALGGMLLSWHNLAYYQELMQGIRQAIAEGRFADFMAETQENWARGDLEPV

SEQ ID NO: 60030 - protein, 376 aa, Rhizobium mongolense
  misc_feature (1)..(376): tr|A0A559SNP1|A0A559SNP1_9RHIZ Queuine tRNA-ribosyltran sferase OS=Rhizobium mongolense USDA 1844 OX=1079460 GN =tgt PE=3 SV=1
MTENFQFTLRRTDAGARLGEISMPRGTIRTPAFMPVGTVGTVKAMYLDQVRETGADIILGNTYHLMLRPTAERVARLGGLHSLIRWEHPILTDSGGFQVMSLSGLRKLDEQGVTFKSHVDGSLHHMSPERSIEIQGLLGSDIQMQLDECVALPAEPREIERAMELSLRWAERCKVAFGNQLGKAMFGIVQGGDIPALRIRSAEELAQLGLKGYAVGGLAVGEPQEVMLKMLEETLPVLPGEKPRYLMGVGTPDDILKSVARGIDMFDCVMPTRSGRHGLAFTRRGKVNIRNARHAEDVRPLDEQSNCPASRDYSRAYLHHLVRANEALGGMLLSWHNLSYYQELMQGIRTAIAAGRFADFMAETQEEWAKGDLERA

SEQ ID NO: 60031 - protein, 376 aa, Rhizobium multihospitium
  misc_feature (1)..(376): tr|A0A1C3WLV1|A0A1C3WLV1_9RHIZ Queuine tRNA-ribosyltran sferase OS=Rhizobium multihospitium OX=410764 GN=tgt PE =3 SV=1
MSESFQFQLKKTDGGARLGEVSMPRGTIRTPAFMPVGTVGTVKAMYLDQVRETGADIILGNTYHLMLRPTAERVARLGGLHQLIRWPHPILTDSGGFQVMSLSGLRKLDEQGVTFKSHVDGSLHHMSPERSIEIQGLLDSDIQMQLDECVALPATPKDIERAMEMSLRWAERCKVAFGNQPGKAMFGIVQGGDVPELRVRSAQALSGMDLKGYAVGGLAVGEPQEVMLRMLEITLPELPTEKPRYLMGVGTPDDILKSVARGIDMFDCVMPTRSGRHGLAFTRRGKVNIRNARHAEDMRPLDEQSNCPASRDYSRAYLHHLVRANEALGGMLLSWHNLAYYQELMQGIRQAIAEGRFADFMAETQENWARGDLEPV

SEQ ID NO: 60032 - protein, 376 aa, Rhizobium naphthalenivorans
  misc_feature (1)..(376): tr|A0A512HD17|A0A512HD17_9RHIZ Queuine tRNA-ribosyltran sferase OS=Rhizobium naphthalenivorans OX=1118451 GN=tg t PE=3 SV=1
MHDTFQFTLKATSGKARLGEISMPRGVIRTPAFMPVGTVGTVKAMYLDQVREGGADIILGNTYHLMLRPGPERVARLGGLHELIRWPHPILTDSGGFQVMSLSGLRKLDEQGVTFKSHIDGSLHHMSPERSIEIQGMLDSDIQMQLDECVALPAERNEIERAMEMSLRWAERCRIAFGEQPGKAMFGIVQGGDIPDLRIRSAEGLKQLDLKGYAVGGLAVGEPQHVMLEMLGITLPVLPTEKPRYLMGVGTPDDILKSVAQGIDMFDCVMPTRSGRHGLAFTRRGKVNIRNARHAEDMRPLDEQSNCPASREYSRAYLHHLVRSNEALGGMLLSWNNLSYYQELMQGIRKSIDEGRFEDFMAETQEMWARGDIDPI

SEQ ID NO: 60033 - protein, 376 aa, Rhizobium nepotum
  misc_feature (1)..(376): tr|A0A0D8KC45|A0A0D8KC45_9RHIZ Queuine tRNA-ribosyltran sferase OS=Rhizobium nepotum 39/7 OX=1368418 GN=tgt PE= 3 SV=1
MHEKFTFTLKATSGGARLGEVAMPRGVIRTPAFMPVGTVGTVKAMYLDQVRELGADIILGNTYHLMLRPGPERVARLGGLHELIRWPHPILTDSGGFQVMSLSGLRKLDEKGVTFKSHVDGSLHHMSPERSIEIQGMLDSDIQMQLDECIALPAERKEIERAMEMSLRWAERCRVAFGEQSGKAMFGIVQGGDQPDLRIRSAEGLKQLDLKGYAVGGLAVGEPQEVMLGMLDITLPVLPTEKPRYLMGVGTPDDILKSVARGIDMFDCVMPTRSGRHGLAFTRRGRVNIRNARHAEDMRPLDEQSNCPASRDYSRAYLHHLTRSNEALGGMLLSWHNLAYYQELMQGIRKSIEEGRFADFYAETIEMWARGDIDPV

SEQ ID NO: 60034 - protein, 376 aa, Rhizobium oryzae
  misc_feature (1)..(376): tr|A0A1X7GGB1|A0A1X7GGB1_9RHIZ Queuine tRNA-ribosyltran sferase OS=Rhizobium oryzae OX=464029 GN=tgt PE=3 SV=1
MTETFQFNLKKTDGGARLGEVSMPRGTIRTPAFMPVGTVGTVKAMYLDQVRDTGADIILGNTYHLMLRPGAERVARLGGLHNLIRWPHPILTDSGGFQVMSLSGLRKLDEKGVTFKSHVDGSLHHMSPERSIEIQGLLGSDIQMQLDECVALPAEPKEIERAMELSLRWAERCKIAFGDQPGKAMFGIVQGGDQPDLRIRSAEGLRELDLKGYAVGGLAVGEPQQVMLQMLETTLPVLPSEKPRYLMGVGTPDDILKSVARGIDMFDCVMPTRSGRHGLAFTRRGKVNIRNARHAEDLRPLDEESACPAALDYSRAYLHHLVRSDEALGGMLLSWNNLHYYQDLMKGIREAIAEGRFADFYAETQEMWAKGDIDPV

SEQ ID NO: 60035 - protein, 376 aa, Rhizobium oryzae
  misc_feature (1)..(376): tr|A0A1Q9AWQ8|A0A1Q9AWQ8_9RHIZ Queuine tRNA-ribosyltran sferase OS=Rhizobium oryzae OX=464029 GN=tgt PE=3 SV=1
MTDRFQFSLLATDGKARRGQISMPRGVVRTPAFMPVGTVGTVKAMYLTQVRELGADIILGNTYHLMLRPGAERVARLGGLHELIRWPEPILTDSGGFQVMSLSGLRKLDEKGVTFKSHVDGALHHMSPERSIEIQGLLDSDIQMQLDECLALPAERNEIERAMELSLRWAERCKVAFGDQPGKAMFGIVQGGDIPELRVRSAEALAGLDLKGYAVGGLAVGEPQAVMLDMLDTTCPALPADKPRYLMGVGTPDDILKSVARGIDMFDCVMPTRSGRHGLAFTRHGRINIRNARHAEDPRPLDEASSCPAARDYSRAYLHHLVRSNEALGGMLLTWNNLSYYQDLMAGIRAAIEEGRFQSFMEETQETWARGDIAPR

SEQ ID NO: 60036 - protein, 376 aa, Rhizobium oryziradicis
  misc_feature (1)..(376): tr|A0A1Q8ZPI5|A0A1Q8ZPI5_9RHIZ Queuine tRNA-ribosyltran sferase OS=Rhizobium oryziradicis OX=1867956 GN=tgt PE= 3 SV=1
MSEQFTFTLKATSGKARLGEISMPRGTIRTPAFMPVGTVGTVKAMYLDQVREGGADIILGNTYHLMLRPGAERVARLGGLHELIRWPQPILTDSGGFQVMSLSGLRKLDEQGVTFKSHIDGSSHHMSPERSIEIQGLLDSDIQMQLDECIALPAEPREIERAMEMSLRWAERCRVAFGEQPGKAMFGIVQGGDQPALRIRSAEGLKQLDLKGYAVGGLAVGEPQDVMLSMLDITLPVLPTEKPRYLMGVGTPDDMLKSVALGVDMFDCVMPTRSGRHGLAFTRRGKVNIRNARHAEDMRPLDEQSSCPAARDYSRAYLHHLVRSNEALGGMLLSWNNLSYYQELMQGIRKSIAEGRFEDFKAETMEMWARGDIDPR

SEQ ID NO: 60037 - protein, 376 aa, Rhizobium phaseoli
  misc_feature (1)..(376): tr|A0A0M3GTT6|A0A0M3GTT6_9RHIZ Queuine tRNA-ribosyltran sferase OS=Rhizobium phaseoli Ch24-10 OX=1128399 GN=tgt PE=3 SV=1
MTENFQFTLDKTDAGARLGEISMPRGAIRTPAFMPVGTVGTVKAMYLDQVRETGADIILGNTYHLMLRPTAERVARLGGLHKLIRWEHPILTDSGGFQVMSLSGLRKLDEQGVTFKSHVDGSLHQMSPERSIEIQGLLGSDIQMQLDECVALPAEPKELERAMEMSLRWAERCRVAFGEQPGKAMFGIVQGGDIPALRIRSAEALSQLDLKGYAVGGLAVGEPQDVMLRMLETTLPVLPGEKPRYLMGVGTPDDILKSVARGIDMFDCVMPTRSGRHGLAFTRRGKVNIRNARHAEDMRPLDEQSNCPASRDYSRAYLHHLVRANEALGGMLLSWHNLAYYQELMQGIRKAIAEGRFADFMAETMEEWARGDLDPV

SEQ ID NO: 60038 - protein, 376 aa, Rhizobium phaseoli
  misc_feature (1)..(376): tr|A0A192TC66|A0A192TC66_9RHIZ Queuine tRNA-ribosyltran sferase OS=Rhizobium phaseoli OX=396 GN=tgt PE=3 SV=1
MTENFQFTLDKTDAGARLGEISMPRGAIRTPAFMPVGTVGTVKAMYLDQVRETGADIILGNTYHLMLRPTAERVARLGGLHKLIRWEHPILTDSGGFQVMSLSGLRKLDEQGVTFKSHVDGSLHHMSPERSIEIQGLLGSDIQMQLDECVALPAEPKEIERAMEMSLRWAERCRVAFGEQPGKAMFGIVQGGDIPALRIRSAEALSQLDLKGYAVGGLAVGEPQDVMLRMLETTLPVLPVEKPRYLMGVGTPDDILKSVARGIDMFDCVMPTRSGRHGLAFTRRGKVNIRNARHAEDMRPLDEQSNCPASRDYSRAYLHHLVRANEALGGMLLSWHNLAYYQELMQGIRKAIAEGRFADFMAETMEEWARGDLDPV

SEQ ID NO: 60039 - protein, 376 aa, Rhizobium pisi
  misc_feature (1)..(376): tr|A0A427MA90|A0A427MA90_9RHIZ Queuine tRNA-ribosyltran sferase OS=Rhizobium pisi OX=574561 GN=tgt PE=3 SV=1
MTENFQFTLKKTDAGARLGEISMPRGTIRTPAFMPVGTVGTVKAMYLDQVRETGADIILGNTYHLMLRPTAERVARLGGLHKLIRWEHPILTDSGGFQVMSLSGLRKLDEQGVTFKSHVDGSLHHMSPERSIEIQGLLGSDIQMQLDECVALPAEPKEIERAMEMSLRWAERCRVAFGEQPGKAMFGIVQGGDIPALRIRSAEELTKLDLKGYAVGGLAVGEPQEVMLKMLNETLPVLPGEKPRYLMGVGTPDDILKSVARGIDMFDCVMPTRSGRHGLAFTRRGKVNIRNARHAEDMRPLDEQSNCPASRDYSRAYLHHLVRSNEALGGMLLSWHNLAYYQELMQGIRKAIAEGRFADFMAETQEEWARGDLQPV

SEQ ID NO: 60040 - protein, 376 aa, Rhizobium pusense; identical to SEQ ID NO: 52789
  misc_feature (1)..(376): tr|A0A4U1K6L8|A0A4U1K6L8_9RHIZ Queuine tRNA-ribosyltran sferase OS=Rhizobium pusense OX=648995 GN=tgt PE=3 SV=1

SEQ ID NO: 60041 - protein, 376 aa, Rhizobium pusense; identical to SEQ ID NO: 51343
  misc_feature (1)..(376): tr|A0A1L9CTT1|A0A1L9CTT1_9RHIZ Queuine tRNA-ribosyltran sferase OS=Rhizobium pusense OX=648995 GN=tgt PE=3 SV=1

SEQ ID NO: 60042 - protein, 376 aa, Rhizobium radiobacter; identical to SEQ ID NO: 52789
  misc_feature (1)..(376): tr|A0A0X8IZF7|A0A0X8IZF7_RHIRD Queuine tRNA-ribosyltran sferase OS=Rhizobium radiobacter OX=358 GN=tgt PE=3 SV= 1

SEQ ID NO: 60043 - protein, 376 aa, Rhizobium radiobacter
  misc_feature (1)..(376): tr|A0A024IWS6|A0A024IWS6_RHIRD Queuine tRNA-ribosyltran sferase OS=Rhizobium radiobacter OX=358 GN=tgt PE=3 SV= 1
MHDKFTFTLKATSGGARLGEVAMPRGVIRTPAFMPVGTVGTVKAMYLDQVRELGADIILGNTYHLMLRPGPERVARLGGLHELIRWPHPILTDSGGFQVMSLSGLRKLDEKGVTFKSHVDGSLHHMSPERSIEIQGMLDSDIQMQLDECIALPAERKEIERAMEMSLRWAERCRVAFGEQPGKAMFGIVQGGDQPDLRVRSAEGLKQLDLKGYAVGGLAVGEPQDVMLGMLDITLPVLPTEKPRYLMGVGTPDDILKSVARGIDMFDCVMPTRSGRHGLAFTRRGRVNIRNARHAEDMRPLDEQSNCPASRDYSRAYLHHLTRSNEALGGMLLSWHNLAYYQELMQGIRKSIEEGRFADFYAETIEMWARGDIDPV

SEQ ID NO: 60044 - protein, 376 aa, Rhizobium rhizosphaerae
  misc_feature (1)..(376): tr|A0A1Q9AFY6|A0A1Q9AFY6_9RHIZ Queuine tRNA-ribosyltran sferase OS=Rhizobium rhizosphaerae OX=1672749 GN=tgt PE =3 SV=1
MTDRFQFTLLATDGKARRGQVSMPRGIVRTPAFMPVGTVGTVKAMYLTQVRELGADIILGNTYHLMLRPGAERVARLGGLHELIRWPEPILTDSGGFQVMSLSGLRKLDEQGVTFKSHVDGALHHMSPERSIEIQGLLDSDIQMQLDECVALPAERNEIERAMELSLRWAERCKVAFGDQPGKAMFGIVQGGDSPELRVRSAEALAGLDLKGYAVGGLAVGEPQEVMLDMLDITCPALPFDKPRYLMGVGTPDDILKSVARGIDMFDCVMPTRSGRHGLAFTRHGRVNLRNARHAEDPRPLDEASSCPAARDYSRAYLHHLVRSNEALGGMLLTWNNLAYYQDLMAGIRASIEEGRFQSFMEETQETWARGDIPAR

SEQ ID NO: 60045 - protein, 376 aa, Rhizobium rosettiformans
  misc_feature (1)..(376): tr|A0A4S8Q0Y5|A0A4S8Q0Y5_9RHIZ Queuine tRNA-ribosyltran sferase OS=Rhizobium rosettiformans W3 OX=538378 GN=tgt PE=3 SV=1
MSENFTFNLKATSGKARLGEITMPRGTVRTPAFMPVGTVGTVKAMYLDQVKEGGADIILGNTYHLMLRPGPERVARLGGLHELIRWPGPILTDSGGFQVMSLSGLRKLDEQGVTFKSHVDGSLHHMSPERSIEIQGLLDSDIQMQLDECVALPAEPREIERAMELSLRWAERCRVAFGNQPGKAMFGIVQGGDQPNLRIRSAEGLKQLDLKGYAVGGLAVGEPQAVMLDMLRITLPVLPTEKPRYLMGVGTPDDILKSVAEGIDMFDCVMPTRSGRHGLAFTRRGKVNIRNARHAEDMRPLDEQSNCPATRDYSRAYLHHLVRSNEALGGMLLSWNNLSYYQELMQGIRQAIAENRFEDFKAETIEMWNRGDIDPV

SEQ ID NO: 60046 - protein, 376 aa, Rhizobium selenitireducens
  misc_feature (1)..(376): tr|A0A376AG89|A0A376AG89_9RHIZ Queuine tRNA-ribosyltran sferase OS=Rhizobium selenitireducens ATCC BAA-1503 OX= 1336235 GN=tgt PE=3 SV=1
MHDTFQFTLKATSGKARLGEISMPRGVIRTPAFMPVGTVGTVKAMYLDQVREGGADIILGNTYHLMLRPGPERVARLGGLHELIRWPGPILTDSGGFQVMSLSGLRKLDEKGVTFKSHVDGSTHYMSPERSIEIQGMLDSDIQMQLDECVALPAEPKEIERAMEMSLRWAERCRVAFGEQPGKAMFGIVQGGDIPDLRVRSAEGLKQLDLKGYAVGGLAVGEPQDVMLKMLGITLPVLPVEKPRYLMGVGTPDDILKSVAEGIDMFDCVMPTRSGRHGLAFTRRGKVNIRNARHAEDMRPLDDQSNCPAARDYSRAYLHHLVRSNEALGGMLLSWNNLSYYQELMQGIRKSIEEGRFEDFKAETMEMWARGDIDPV

SEQ ID NO: 60047 - protein, 377 aa, Rhizobium smilacinae
  misc_feature (1)..(377): tr|A0A5C4XHF0|A0A5C4XHF0_9RHIZ Queuine tRNA-ribosyltran sferase OS=Rhizobium smilacinae OX=1395944 GN=tgt PE=3 SV=1
MSTENFQFTLKKTDGGARLGKVSMPRGTIRTPAFMPVGTVGTVKAMYLDQVKDTGADIILGNTYHLMLRPGAERVARLGGLHKLIRWEHPILTDSGGFQVMSLSGLRKLDEKGVTFKSHIDGSLHHMSPERSIEIQGLLGSDIQMQLDECVALPAEPKEIERAMELSLRWAERCRVAFGEQPGKAMFGIVQGGDQPALRIRSAEGLKQLDLKGYAVGGLAVGEPQDVMLSMLDTTLPVLPTEKPRYLMGVGTPDDMLKSVARGIDMFDCVMPTRSGRHGLAFTRRGKVNLRNARHAEDMRPLDEESSCPAARDYSRAYLHHLCRADEALGGMLLSWNNLHYYQDLMKGIRQAIAEGRFADFYAETQEAWAKGDIDKL

SEQ ID NO: 60048 - protein, 376 aa, Rhizobium sophoriradicis
  misc_feature (1)..(376): tr|A0A2A5KW17|A0A2A5KW17_9RHIZ Queuine tRNA-ribosyltran sferase OS=Rhizobium sophoriradicis OX=1535245 GN=tgt P E=3 SV=1
MTENFQFTLNKTDAGARLGEISMPRGEIRTPAFMPVGTVGTVKAMYLDQVRETGADIILGNTYHLMLRPTAERVARLGGLHKLIRWEHPILTDSGGFQVMSLSGLRKLDEQGVTFKSHVDGSLHHMSPERSIEIQGLLGSDIQMQLDECVALPAEPKEIERAMEMSLRWAERCRVAFGEQPGKAMFGIVQGGDIPALRVRSAEALSQLDLKGYAVGGLAVGEPQDVMLRMLETTLPVLPVEKPRYLMGVGTPDDILKSVARGIDMFDCVMPTRSGRHGLAFTRRGKVNIRNARHAEDMRPLDEQSNCPASRDYSRAYLHHLVRANEALGGMLLSWHNLAYYQELMQGIRKAIAEGRFADFMAETQEEWARGDLEPV

SEQ ID NO: 60049 - protein, 376 aa, Rhizobium sp.
  misc_feature (1)..(376): tr|A0A192LWK4|A0A192LWK4_9RHIZ Queuine tRNA-ribosyltran sferase OS=Rhizobium sp. N113 OX=1703960 GN=tgt PE=3 SV =1
MTENFQFTLEKSDAGARLGEISMPRGTIRTPAFMPVGTVGTVKAMYLDQVRETGADIILGNTYHLMLRPTAERVARLGGLHKLIRWEHPILTDSGGFQVMSLAGLRKLDEQGVTFKSHVDGSLHHMSPERSIEIQGLLGSDIQMQLDECVALPAEPKEIERAMEMSLRWAERCKVAFGEQPGKAMFGIVQGGDIPALRIRSAEALTKLDLKGYAVGGLAVGEPQDVMLNMLKETLPVLPVEKPRYLMGVGTPDDILKSVARGIDMFDCVMPTRSGRHGLAFTRRGKVNIRNARHAEDMRPLDEQSNCPASRDYSRAYLHHLVRANEALGGMLLSWHNLAYYQELMQGIRKAISEGRFADFMAETMEEWSRGDLDPV

SEQ ID NO: 60050 - protein, 65 aa, Rhizobium sp.
  misc_feature (1)..(65): tr|A0A2S6BA53|A0A2S6BA53_9RHIZ tRNA guanosine(34) trans glycosylase Tgt (Fragment) OS=Rhizobium sp. KAs_5_22 OX =2067668 GN=tgt PE=4 SV=1
CYACANGFSRAYLRHLDRCNEMLGPMLGTLHNLRYYQRLMAQMRAAIEQGTFAAFRESFYAARMQ

SEQ ID NO: 60051 - protein, 374 aa, Rhizobium straminoryzae
  misc_feature (1)..(374): tr|A0A549TGM7|A0A549TGM7_9RHIZ Queuine tRNA-ribosyltran sferase OS=Rhizobium straminoryzae OX=1387186 GN=tgt PE =3 SV=1
MTTENFQFTLKATDGKARLGEISMPRGAIRTPAFMPVGTVGTVKAMYLNQVREGGADIILGNTYHLMLRPGPERVARLGGLHELIRWPEPILTDSGGFQVMSLSGLRKLDEKGVTFKSHVDGSTHHMSPERSIEIQGLLDSDIQMQLDECVALPAEPKEIERAMELSLRWAERCRVAFGNQPGKAMFGIVQGGDQPALRIRSAEGLKQLDLKGYAVGGLAVGEPQAVMLDMLNITLPVLPTEKPRYLMGVGTPDDILKSVACGIDMFDCVMPTRSGRHGLAFTRKGKVNIRNAKHAEDMRPLDEQSSCPATRDYSRAYLHHLVRSNEALGGMLLSWNNLSYYQELMQGIRKAIAEGRYADFMAETQDAWARGDD

SEQ ID NO: 60052 - protein, 379 aa, Rhizobium subbaraonis
  misc_feature (1)..(379): tr|A0A285UAG5|A0A285UAG5_9RHIZ Queuine tRNA-ribosyltran sferase OS=Rhizobium subbaraonis OX=908946 GN=tgt PE=3 SV=1
MTERFEFKLSATDGKARRGEVSMPRGAIRTPAFMPVGTVGTVKAMYLDQVRDLGADIILGNTYHLMLRPGAERVARLGGLHELIRWPYPILTDSGGFQVMSLSGLRKLDEQGVTFKSHVDGSLHHMSPERSIEIQGLLDSDIQMQLDECVRLPAEPKEIERAMEMSYRWAERCKVAFGDQPGKAMFGIVQGGDIPELRVRSAQALTGLDLKGYAIGGLAVGEPQAVMLDMIDTTCPHLPFEKPRYLMGVGTPDDILKSVAHGIDMFDCVMPTRSGRHGLAFTRHGRINIRNARHAEDMRPLDELSSCPASRDYSRAYLHHLVRSNESLGGMLLTWNNLAYYQELMAGIRSAIEEGRYADFMAETQEAWARGEADAKKSA

SEQ ID NO: 60053 - protein, 376 aa, Rhizobium sullae
  misc_feature (1)..(376): tr|A0A2N0D0G8|A0A2N0D0G8_RHISU Queuine tRNA-ribosyltran sferase OS=Rhizobium sullae OX=50338 GN=tgt PE=3 SV=1
MTENFQFALKKTDAGARLGEISMPRGTIRTPAFMPVGTVGSVKAMYLDQVRETGADIILGNTYHLMLRPTAERVARLGGLHSLIRWEHPILTDSGGFQVMSLSALRKLNEQGVTFKSHVDGSLHHMSPERSIEIQGLLGSDIQMQLDECVALPSEPREIERAMELSLRWAERCKVAFGNQPGKAMFGIVQGGDIPALRIRSAEELAQLDLKGYAVGGLAVGEPQDVMLKMLEETLPVLPSEKPRYLMGVGTPDDILKSVARGIDMFDCVMPTRSGRHGLAFTRRGKVNIRNARHAEDTRPLDDQSNCAASRDYSRAYLHHLVRANEALGGMLLSWHNLNYYQELMQGIRAAISEGRFADFMAETQEEWAKGDLERA

SEQ ID NO: 60054 - protein, 376 aa, Rhizobium sullae
  misc_feature (1)..(376): tr|A0A4R3Q5A4|A0A4R3Q5A4_RHISU Queuine tRNA-ribosyltran sferase OS=Rhizobium sullae OX=50338 GN=tgt PE=3 SV=1
MTENFQFALKKTDAGARLGEISMPRGTIRTPAFMPVGTVGSVKAMYLDQVRETGADIILGNTYHLMLRPTAERVARLGGLHSLIRWEHPILTDSGGFQVMSLSALRKLNEQGVTFKSHVDGSLHHMSPERSIEIQGLLGSDIQMQLDECVALPSEPREIERAMELSLRWAERCKVAFGNQPGKAMFGIVQGGDIPALRIRSAEELAQLDLKGYAVGGLAVGEPQDVMLKMLEETLPVLPSEKPRYLMGVGTPDDILKSVARGIDMFDCVMPTRSGRHGLAFTRRGKVNIRNARHAEDMRPLDDQSNCPASRDYSRAYLHHLVRANEALGGMLLSWHNLNYYQELMQGIRAAISEGRFADFMAETQEEWAKGDLERA

SEQ ID NO: 60055 - protein, 376 aa, Rhizobium taibaishanense
  misc_feature (1)..(376): tr|A0A1Q9AB16|A0A1Q9AB16_9RHIZ Queuine tRNA-ribosyltran sferase OS=Rhizobium taibaishanense OX=887144 GN=tgt PE =3 SV=1
MSEQFTFTLKATSGKARLGEVSMPRGTIRTPAFMPVGTVGTVKAMYLDQVREGGADIILGNTYHLMLRPGPERVARLGGLHELIRWPQPILTDSGGFQVMSLSGLRKLDEQGVTFKSHIDGSLHHMSPERSIEIQGLLDSDIQMQLDECVALPAEPREIERAMEMSLRWAERCRVAFGEQPGKAMFGIVQGGDQPALRIRSAEGLKQLDLKGYAVGGLAVGEPQDVMLSMLDITLPVLPSEKPRYLMGVGTPDDILKSVARGIDMFDCVMPTRSGRHGLAFTRRGKVNIRNARHAEDMRPLDEQSSCPAARDYSRAYLHHLVRSNEALGGMLLSWNNLSYYQELMQGIRQSIAEGRFEDFMAETMECWARGDIDPA

SEQ ID NO: 60056 - protein, 376 aa, Rhizobium tibeticum
  misc_feature (1)..(376): tr|A0A1H8LID0|A0A1H8LID0_9RHIZ Queuine tRNA-ribosyltran sferase OS=Rhizobium tibeticum OX=501024 GN=tgt PE=3 SV =1
MTENFQFTLKKTDAGARLGEVSMPRGTIRTPAFMPVGTVGTVKAMYLDQVRDTGADIILGNTYHLMLRPTAERVARLGGLHKLIRWEHPILTDSGGFQVMSLSGLRKLDEQGVTFKSHVDGSLHHMSPERSIEIQGLLDSDIQMQLDECVALPAEPREIERAMELSLRWAERCKVAFGNQPGKAMFGIVQGGDVPSLRIRSAEALTELDLKGYAVGGLAVGEPQDVMLKMLEETLPVLPTEKPRYLMGVGTPDDILKSVARGIDMFDCVMPTRSGRHGLAFTRRGKVNIRNARHAEDMRPLDDQSNCPASRDYSRAYLHHLVRANEALGGMLLSWHNLAYYQELMQGIRKAIAEARFADFVAETQEEWARGDLEPV

SEQ ID NO: 60057 - protein, 376 aa, Rhizobium tropici
  misc_feature (1)..(376): tr|L0LM70|L0LM70_RHITR Queuine tRNA-ribosyltransferase OS=Rhizobium tropici CIAT 899 OX=698761 GN=tgt PE=3 SV= 1
MSESFQFQLKKTDGGARLGEVSMPRGTIRTPAFMPVGTVGTVKAMYLDQVRETGADIILGNTYHLMLRPTAERVARLGGLHQLIRWPHPILTDSGGFQVMSLSGLRKLDEQGVTFKSHVDGSLHHMSPERSIEIQGLLDSDIQMQLDECVALPATPKEIERAMEMSLRWAERCKVAFGNQPGKAMFGIVQGGDVPELRVRSAQALSGMDLKGYAVGGLAVGEPQEVMLRMLEITLPELPTEKPRYLMGVGTPDDILKSVARGIDMFDCVMPTRSGRHGLAFTRRGKVNIRNARHAEDMRPLDEQSNCPASRDYSRAYLHHLVRANEALGGMLLSWHNLAYYQELMQGIRQAIAEGRFADFMAETQENWARGDLEPV

SEQ ID NO: 60058 - protein, 376 aa, Rhizobium tropici
  misc_feature (1)..(376): tr|A0A5B0VQD3|A0A5B0VQD3_RHITR Queuine tRNA-ribosyltran sferase OS=Rhizobium tropici OX=398 GN=tgt PE=3 SV=1
MSESFQFQLKKTDGGARLGEVSMPRGTIRTPAFMPVGTVGTVKAMYLDQVRESGADIILGNTYHLMLRPTAERVARLGGLHELIRWPHPILTDSGGFQVMSLSGLRKLDEQGVTFKSHVDGSLHHMSPERSIEIQGLLGSDIQMQLDECVALPATPKEIERAMEMSLRWAERCKVAFGNQPGKAMFGIVQGGDIPELRVRSAQALSSMDLKGYAVGGLAVGEPQEVMLRMLEITLPELPTEKPRYLMGVGTPDDILKSVARGIDMFDCVMPTRSGRHGLAFTRRGKVNIRNARHAEDMRPLDEQSSCPASRDYSRAYLHHLVRANEALGGMLLSWHNLAYYQELMQGIRQAIAEGRFADFMAETLENWARGDLEPV

SEQ ID NO: 60059 - protein, 376 aa, Rhizobium tubonense
  misc_feature (1)..(376): tr|A0A2W4CDY6|A0A2W4CDY6_9RHIZ Queuine tRNA-ribosyltran sferase OS=Rhizobium tubonense OX=484088 GN=tgt PE=3 SV =1
MSDTFQFNLKKTNGGARLGEVSMPRGTIRTPAFMPVGTVGTVKAMYLDQVRDSGADIILGNTYHLMLRPGPERVARLGGLHELIRWPWPILTDSGGFQVMSLSGLRKLDERGVTFKSHVDGSLHHMSPERSIEIQGMLDSDIQMQLDECIALPAEPKEIERAMEMSLRWAERCKVAFGTQPGKAMFGIVQGGDIPELRIRSAEALTQLDLKGYAVGGLAVGEPQGVMLEMLEITLPALPTERPRYLMGVGTPDDILKSVARGIDMFDCVMPTRSGRHGLAFTRRGKVNIRNARHAEDMRPLDEQSNCPASRDYSRAYLHHLVRSNEALGGMLLSWHNLAYYQELMLGIRKSIDEGRFADFMAETQETWARGDIEAV

SEQ ID NO: 60060 - protein, 376 aa, Rhizobium tumorigenes
  misc_feature (1)..(376): tr|A0A2W4DPM7|A0A2W4DPM7_9RHIZ Queuine tRNA-ribosyltran sferase OS=Rhizobium tumorigenes OX=2041385 GN=tgt PE=3 SV=1
MSQTFQFQLKKTDAGARLGEVSMPRGSIRTPAFMPVGTVGTVKAMYLDQVRDSGADIILGNTYHLMLRPGAERVARLGGLHELIRWPLPILTDSGGFQVMSLSGLRKLDEQGVTFKSHVDGSTHYMSPERSIEIQGLLDSDIQMQLDECVALPCEPKEIQRAMEMSLRWAERCRVAFGEQPGKAMFGIVQGGDIPDLRIRSAQGLTQLDLKGYAIGGLAVGEPQDVMLKMLETTLPVLPTDRPRYLMGVGTPDDILKSVARGIDMFDCVMPTRSGRHGLAFTRRGKVNLRNARHAEDMRPLDEQSNCPASRDYSRAYLHHLTRTGEALGGMLLSWHNLAYYQELMQGIRQSIKEGRFADFMAETQENWAKGDLERI

SEQ ID NO: 60061 - protein, 376 aa, Rhizobium vallis
  misc_feature (1)..(376): tr|A0A432PMX8|A0A432PMX8_9RHIZ Queuine tRNA-ribosyltran sferase OS=Rhizobium vallis OX=634290 GN=tgt PE=3 SV=1
MTENFQFTLKKTDAGARLGEVSMPRGTIRTPAFMPVGTVGTVKAMYLDQVRETGADIILGNTYHLMLRPTAERVARLGGLHKLIRWEHPILTDSGGFQVMSLSGLRKLDEQGVTFKSHVDGSLHHMSPERSIEIQGLLGSDIQMQLDECVALPAEPKEIERAMEMSLRWAERCRVAFGEQPGKAMFGIVQGGDIPALRIRSAEALSQLDLKGYAIGGLAVGEPQEVMLQMLETTLPVLPTEKPRYLMGVGTPDDILKSVARGIDMFDCVMPTRSGRHGLAFTRRGKVNIRNARHAEDMRPLDDQSNCPASRDYSRAYLHHLVRSNEALGGMLLSWHNLAYYQELMQGIRKAIAEGRFADFMAETQEEWARGDLQPV

SEQ ID NO: 60062 - protein, 379 aa, Rhizomicrobium sp.
  misc_feature (1)..(379): tr|A0A177QBR2|A0A177QBR2_9PROT Queuine tRNA-ribosyltran sferase OS=Rhizomicrobium sp. SCGC AG-212-E05 OX=179965 5 GN=tgt PE=3 SV=1
MNDFRFELLATDGAARTGVIHTPRGDIRTPAFMPVGTAATVKAMLPQSVRETGADILLGNTYHLMLRPGAERVARLGGLHKFMDWSRPILTDSGGFQVMSLAALRKITEEGVRFQSHIDGHAEFLSPERAMEIQRLLGSDIQMVLDECPAFPAEKPVIEKSLALSMRWAQRSKDAFGLQTEEERAGRACFGIVQGGTYPDLRQRSAQGLMEIGFDGYAVGGLAVGEGQVAMFETLEATVPQLPADKPHYLMGVGKPDDIVGAVLRGIDMFDCVLPTRSGRNGQAFTRAGALNLKNARFAEDAAPLDDACGCPACRQFSRAYLHHTVKSGEIIAAMLLTWHNLTYYQDLMAQLRGAIGEGRVNSFAAAFRNAYAPAEVAL

SEQ ID NO: 60063 - protein, 379 aa, Rhizorhabdus dicambivorans
  misc_feature (1)..(379): tr|A0A2A4G2J1|A0A2A4G2J1_9SPHN Queuine tRNA-ribosyltran sferase OS=Rhizorhabdus dicambivorans OX=1850238 GN=tgt PE=3 SV=1
MTTPRFDFSIHATDGKARTGTIRMKRGEIRTPAFMPVGTAATVKAMKPADVRATGADIILGNTYHLMLRPGAERVARLGGLHHFMRWDRPILTDSGGYQVMSLSALTKRSEEGVAFKSHLDGSAHMLSPERSMEIQRLLGSDIVMAFDELVPTTSTPQQQLEAMERSMRWAKRSRAGFDAGGEHAERAALFGIQQGALDEGLRRRSADALLDIGFDGYAVGGLAVGEGQEAMFATLDFAPGQLDAAKPRYLMGVGKPDDIVGAVERGIDMFDCVLPTRSGRNGQAFTRSGPINLRNAKFGEDQKPLDESCGCPVCAQFSRAYIHHLIRAGEILGAMLMTEHNLSFYQALMADLRAAIGEGRLTAFAAEFRAKYYRGGAG

SEQ ID NO: 60064 - protein, 376 aa, Rhodanobacter denitrificans
  misc_feature (1)..(376): tr|A0A2W5KRG3|A0A2W5KRG3_9GAMM Queuine tRNA-ribosyltran sferase OS=Rhodanobacter denitrificans OX=666685 GN=tgt PE=3 SV=1
MSALRFDLHARDGAARTGAVHLARGAIRTPAFMPVGTYGSVKAMTPRDLHEIGADVILGNTFHLYLRPGLDVVSAFGGLHRLIGWDRPILTDSGGFQVFSLAHKRKITEQGVTFASPVDGSKVFLSPEESMRIQRALDSDIVMIFDECTPYPAEEKVARESMELSLRWALRSRQAFDAQENPHALFGIVQGSVYPELRKRSADALIGIGFDGYAIGGLAVGEPEHERNAMLDTVCPFLPEDRPRYLMGVGRPEDIVEAVRRGVDMFDCVMPTRNARNGFLFTRQGTLRIRNARYARDTEVVEPGCACYTCRSGFSRAYLRHLDRCGEILACQLATIHNLHHYQQLMADLRAAIAESRLERFVADFYAQRRGGDGAS

SEQ ID NO: 60065 - protein, 387 aa, Rhodanobacter denitrificans
  misc_feature (1)..(387): tr|M4NE69|M4NE69_9GAMM Queuine tRNA-ribosyltransferase OS=Rhodanobacter denitrificans OX=666685 GN=tgt PE=3 SV =1
MGVADQTRDNARMTSLQFELHATDGAARRGRLGFARGTVETPAFMPVGTYGSVKAMTPRDLVETGAEIILGNTFHLFLRPGLEVIEPFGGLHKFIGWDKPILTDSGGFQVFSLAHKRKITEEGVTFASPVDGSKVFLSPEVSMRIQKTLDSDIAMIFDECTPYPATEKVAADSMELSLRWAERSRRAFDDLKNPNSLFGIVQGSVYETLRRRSAEGLVKLGFDGYAIGGLAVGEPEAERNHALDFTVPLLPADRPRYLMGVGRPEDIVEAVRRGIDMFDCVMPTRNARNGFLFTAAGTLRIRNAKYASDTAVIEEGCDCYACSHGFSRAYLRHLDRCNEILGSQLATMHNLRYYQRLMIGLRQAIADHALEAFVAEFYARRQGAAVS

SEQ ID NO: 60066 - protein, 377 aa, Rhodanobacter fulvus
  misc_feature (1)..(377): tr|I4VNB2|I4VNB2_9GAMM Queuine tRNA-ribosyltransferase OS=Rhodanobacter fulvus Jip2 OX=1163408 GN=tgt PE=3 SV= 1
MQFDLQATDGAARRGQLRFARGTVETPAFMPVGTYGSVKAMTPRDVRETGAEIILGNTFHLFLRPGLEIVEKFGGLHRFIGWDKPILTDSGGFQVFSLAHKRKITEEGVLFASPVDGSKVFLSPEVSMRIQTTLDSDIAMIFDECTPYPATEKVASDSMELSLRWAARSRQAFDDLQRVNSKPPNALFGIVQGSVYENLRQRSAAGLVEIGFDGYAIGGLAVGETEDERNHALDFTVPLLPHDKPRYLMGVGRPEDIVEAVRRGVDMFDCVMPTRNARNGFLFTAEGTLRIRNAKFADDTRVIEEGCDCHACANGFSRAYLRHLDRCNEILGSQLATMHNLRYYQRLMAGLRDAIASQTLEAFTAAFYAQRQAAAGV

SEQ ID NO: 60067 - protein, 377 aa, Rhodanobacter glycinis
  misc_feature (1)..(377): tr|A0A502FPZ6|A0A502FPZ6_9GAMM Queuine tRNA-ribosyltran sferase OS=Rhodanobacter glycinis OX=582702 GN=tgt PE=3 SV=1
MTFDLHATDGAARRGRLTFARGTVETPAFMPVGTYGSVKAMTPRDVTETGAEIILGNTFHLFLRPGLEIVEKFGGLHKFIGWDKPILTDSGGFQVFSLAHKRKITEEGVTFASPVDGSKVFLSPEVSMQIQKTLDSDIAMIFDECTPYPATEKVAGDSMELSLRWAERSRRAFDDLQRVDSKPPNALFGIVQGSMYENLRQRSAAGLVNIGFSGYAVGGLAVGEPEAERNHALDFTVPLLPADKPRYLMGVGRPEDIVEAVRRGIDMFDCVMPTRNARNGFLFTAEGTLRIRNAKFATDTRAIEEGCDCYACSNGFSRAYLRHLDRCNEILGSQLATMHNLRYYQRLMAGLREAIGSHTLPAFTAEFYARRQGAVIA

SEQ ID NO: 60068 - protein, 380 aa, Rhodanobacter glycinis
  misc_feature (1)..(380): tr|A0A1I4EC35|A0A1I4EC35_9GAMM Queuine tRNA-ribosyltran sferase OS=Rhodanobacter glycinis OX=582702 GN=tgt PE=3 SV=1
MTSLKFDLLATDGAARRGRLNFPRGTVETPAFMPVGTYGSVKAMTPRDITDIGAEIILGNTFHLFLRPGLDIVGKFGGLHRFIGWDKPILTDSGGFQVFSLAHKRKLTEEGVTFASPVDGSKVFLSPEVSMKIQTVLDSDIAMIFDECTPYLVDGAPATQKLAADSMELSLRWAARSRQAFNELGNPNNLFGIVQGGVYEPLRRRSAEGLVDIGFDGYAVGGLAVGEPEEERNRTLDFTLPMLPADKPRYLMGVGRPEDIVEAVRRGVDMFDCVMPTRNARNGFLFVPEGTLRIRNAKFADDTRVIEEGCDCYACANGFSRAYLRHLDRCNEILASQLATMHNLRHYQRLMAGLREAIAAGKLDDFVAAFYARRAGSVTV

SEQ ID NO: 60069 - protein, 382 aa, Rhodanobacter sp.
  misc_feature (1)..(382): tr|A0A1V3P275|A0A1V3P275_9GAMM Queuine tRNA-ribosyltran sferase OS=Rhodanobacter sp. C05 OX=1945855 GN=tgt PE=3 SV=1
MTAMNFDLFATDGAARRGRLTFARGTVETPAFMPVGTYGSVKAMTPRDVTEIGAEIILGNTFHLFLRPGLEIVEKFGGLHKFIGWDKPILTDSGGFQVFSLAHKRKITEEGVTFASPVDGSKVFLSPEVSMQIQKTLDSDIAMIFDECTPYPATEKVASDSMELSLRWAERSRRAFDDLQRVDSRPPNALFGIVQGSVYENLRQRSAAGLVNIGFDGYAVGGLAVGEPEAERNHALDFTVPLLPVDKPRYLMGVGRPEDIVEAVRRGIDMFDCVMPTRNARNGFLFTAEGTLRIRNAKYALDTRVIEEGCDCYACSNGFSRAYLRHLDRCNEILGSQLATIHNLRYYQRLMAGLREAIAGHALDAFVAGFYAQRQSGGAASS

SEQ ID NO: 60070 - protein, 376 aa, Rhodanobacter sp.
  misc_feature (1)..(376): tr|A0A522H2R1|A0A522H2R1_9GAMM Queuine tRNA-ribosyltran sferase OS=Rhodanobacter sp. OX=1883446 GN=tgt PE=3 SV= 1
MTSLQFDIHATDGAARRGRLGFARGTVETPAFMPVGTYGSVKAMTPRDIVDVGAEIILGNTFHLFLRPGLEIVEKFGGLHRFIGWDKPILTDSGGFQVFSLAHKRKITEQGVTFASPVDGSKVFLSPEVSMQIQRTLDSDIAMIFDECTPYPATEKMAGDSMELSLRWAERSRRAFGDLNNPNALFGIVQGSVYEDLRRRSAAGLVDIGFDGYAVGGLAVGEPEAERNHALDFTVPLLPEDKPRYLMGVGRPEDIVEAVRRGIDMFDCVMPTRNARNGFLFTAEGTLRIRNAKFADDTRIIEKDCDCYSCSNGFSRAYLRHLDRCNEILASQLATMHNLRYYQRLMAGLREAIAQGVLGDFVSRFYALRQGAFVRV

SEQ ID NO: 60071 - protein, 384 aa, Rhodanobacter spathiphylli
  misc_feature (1)..(384): tr|I4W5F1|I4W5F1_9GAMM Queuine tRNA-ribosyltransferase OS=Rhodanobacter spathiphylli B39 OX=1163407 GN=tgt PE= 3 SV=1
MTSLQFNVHATDGAARRGRLTFARGTIETPAFMPVGTYGSVKAMTPRDVTETGAEIILGNTFHLFLRPGLEIVGKFGGLHRFIGWDKPILTDSGGFQVFSLAHKRKITEEGVTFASPVDGSKVFLSPEVSMQIQKTLDSDIAMIFDECTPYPATEKVASDSMELSLRWAARSRRAFDDLKNPNSLFGIVQGSVYENLRRRSAAGLIDIGFDGYAVGGLAVGEPEAERNHALDFTVPLLPVDKPRYLMGVGRPEDIVEAVRRGIDMFDCVMPTRNARNGFLFTAEGTLRIRNAKYATDTAVIEEGCDCYSCSNGFSRAYLRHLDRCNEILGSQLATMHNLRYYQRLMAGLREAIAGQALEAFVAEFYARRRVAGTGSGSISAGEK

SEQ ID NO: 60072 - protein, 375 aa, Rhodanobacter thiooxydans
  misc_feature (1)..(375): tr|A0A154QI33|A0A154QI33_9GAMM Queuine tRNA-ribosyltran sferase OS=Rhodanobacter thiooxydans OX=416169 GN=tgt P E=3 SV=1
MTSLRFDLHATDGAARRGRLTFVRGTVETPAFMPVGTYGSVKAMTPRDVTDIGAEIILGNTFHLFLRPGLEVIEPFGGLHRFIGWDKPILTDSGGFQVFSLAHKRRITEEGVTFASPVDGSKVFLSPEVSMQIQKTLDSDIAMIFDECTPYPATEKVAADSMELSLRWAERSRRAFDDLKNPNSLFGIVQGSVYETLRRRSAEGLVKLGFDGYAVGGLAVGEPEAERNHSLDFTVPLLPADKPRYLMGVGRPEDIVEAVRRGIDMFDCVMPTRNARNGFLFTTEGTLRIRNAKYATDTGVIEEGCDCYSCSHGFSRAYLRHLDRCNEILGSQLATMHNLRYYQRLMAGLRAAIAGRTLESFVAEFYARRQGAAVS

SEQ ID NO: 60073 - protein, 433 aa, Rhodanobacteraceae bacterium
  misc_feature (1)..(433): tr|A0A2Z6E513|A0A2Z6E513_9GAMM Queuine tRNA-ribosyltran sferase OS=Rhodanobacteraceae bacterium Dysh456 OX=2010 829 GN=tgt PE=3 SV=1
MAVGFDAGSSGTESKGQGGRAVVNDVVVHRGRDEGFRGVAAVGDARSAWDNRPMTSLTFELLASDGAARRGRLHFPRGTVETPAFMPVGTYGSVKAMTPRDLVEVGAEIILGNTFHLHLRPGLEIVKKFGGLHRFIGWGRPILTDSGGFQVFSLAHRRKLTEEGVTFASPVDGSRVFLSPEVSMRIQTVLDSDIAMIFDECTPYEIDGVPIDEQRAAESMALSLRWAERSRRAFDELGNPNNLFGIVQGGVHEALRRRSAEGLVGIGFDGYAVGGLAVGEPEEVRNRTLDFTVPMLPADKPRYLMGVGRPEDIVEAVRRGIDMFDCVMPTRNARNGFLFVPEGTLRIRNAKYAADTRVIEEGCDCYACANGFSRAYLRHLDRCNEILASQLATMHNLRHYQRLMAGLRAAIEAGTLEDFTAAFYARRRGAAVA

SEQ ID NO: 60074 - protein, 398 aa, Rhodanobacteraceae bacterium
  misc_feature (1)..(398): tr|A0A522S2Q3|A0A522S2Q3_9GAMM Queuine tRNA-ribosyltran sferase OS=Rhodanobacteraceae bacterium OX=2052182 GN=t gt PE=3 SV=1
MQFDLLTTDGPARRGRITLPHGVIETPAFMPVGTYGSVKAMTPRDLAGVGAEIILGNTFHLWLRPGLDVIGEFRGLHKFIGWDKPILTDSGGFQVFSLAERRKLTEEGVTFASPVDGSRVFLSPEESMRIQTVLDSDIVMAFDECTPYTIDGKPVDAWIVRESMELSLRWAARSRRAFDELGNRNALFGIVQGGVHDDLRALSAEGLLGIGFDGYALGGLAVGEPEGERNATLESTLPRLPADKPRYLMGVGRPEDIVEAVRRGIDMFDCVMPTRHARNGFLFTRAGTLRIRNAKYASDTRPIEEGCTCYACANGFSRAYLRHLDRCGEMLGAQLATIHNLHHYLTLMRELRGAIEAQALDRYVAEFYARRHPPARVTRGPLRAEGGVLLPPSLAKGD

SEQ ID NO: 60075 - protein, 375 aa, Rhodobaca barguzinensis
  misc_feature (1)..(375): tr|A0A2K8K5G2|A0A2K8K5G2_9RHOB Queuine tRNA-ribosyltran sferase OS=Rhodobaca barguzinensis OX=441209 GN=tgt PE= 3 SV=1
MGFSFKISARDGRARTGAISTPRGDIRTPAFMPVGTAATVKAMMPESVRETGADILLGNTYHLMLRPTSERIAALGGLHKFMNWDRPILTDSGGFQVMSLASLRKLTEEGVRFSSHIDGSRHLLTPERSMEIQRLLGSDIVMSFDECTPWPADEKTARASMELSMRWAKRSRDAFGDRPGHALFGIQQGSVYPDQRAESAEKLRAIGFDGYAIGGLAVGEGQELMFQVLDYAPGQLPDDKPRYLMGVGKPDDIVGAVQRGVDMFDCVLPSRSGRTGQGWTAHGPVNLRNARHRDDPRPLEEGCSCPACRNYSRAYLHHVIKSDEIIGSMLLTWHNLTYYQRLMQGLRDAIAAGTLEQFVARFHAEREQGDIDPAN

SEQ ID NO: 60076 - protein, 375 aa, Rhodobacter aestuarii
  misc_feature (1)..(375): tr|A0A1N7M1L3|A0A1N7M1L3_9RHOB Queuine tRNA-ribosyltran sferase OS=Rhodobacter aestuarii OX=453582 GN=tgt PE=3 SV=1
MTQFSFSLSATDGTARTGVISTPRGEIRTPAFMPVGTAATVKAMMPESVRATGADILLGNTYHLMLRPTAERIARLGGLHKFMNWERPILTDSGGFQVMSLASLRKLTEEGVTFSSHIDGSKHHLTPERSMEIQKLLGSDIVMAFDECPALPATDAEVAKSMRLSMRWAQRSRDAFGDRPGHALFGIMQGGVTRELREESAEALKQIGFDGYAVGGLAVGEGQEAMFSVLDYAPGFLPEDKPRYLMGVGKPDDIVGAVERGIDMMDCVLPSRSGRTGQAWTRRGQINIKNARHQDDPRPLDEACTCPACRNYSRAYLHHVFRSQEMISGMLLTWHNLHYYQELMQGLRDAIAAGTLSAFVAQFHAQRAEGDIDPL

SEQ ID NO: 60077 - protein, 376 aa, Rhodobacter azotoformans
  misc_feature (1)..(376): tr|A0A2T5K968|A0A2T5K968_9RHOB Queuine tRNA-ribosyltran sferase OS=Rhodobacter azotoformans OX=43057 GN=tgt PE= 3 SV=1
MTQRFSFELTATDGGARTGVISTPRGEIRTPAFMPVGTAGTVKAMLPESVRATGADILLGNTYHLMLRPTAERVARLGGLHRFMNWERPILTDSGGFQVMSLADLRKLTEEGVTFRSHIDGSKHHLSPERSMEIQRLLGSDIVMAFDECPALPASEAAVATSMRLSMRWAERSRDAFGDRPGHALFGIMQGGVTRELREESAEALTAIGFEGYAIGGLAVGEGQEAMFGVLDYAPGFLPEDRPRYLMGVGKPDDIVGAVERGVDMMDCVLPSRSGRTGQAWTRRGQVNIKNARHMDDPRPLDEACTCPCCRTYSRAYLHHVFRAQEIIASMLLTWHNLHYYQDLMQGLRAAISDGRLAAFVAQFHAQRAEGDIEPL

SEQ ID NO: 60078 - protein, 376 aa, Rhodobacter blasticus
  misc_feature (1)..(376): tr|A0A2T4JB75|A0A2T4JB75_RHOBL Queuine tRNA-ribosyltran sferase OS=Rhodobacter blasticus DSM 2131 OX=1188250 GN =tgt PE=3 SV=1
MTERFGFTVNARDGRARSGVISTPRGDVRTPAFMPVGTAGTVKAMLPESVRATGADILLGNTYHLMLRPTAERIARLGGLHRFMNWDRPILTDSGGFQVMSLADLRKLTEDGVTFRSHVDGSKHHLSPERSMEIQRLLGSDIVMCFDECPALPATDEAVAKSMRLSMRWAQRSRDAFGDRPGHALFGIMQGGVNRDLREESATALKAIDFDGYAVGGLAVGEGQEAMFGVLDYAPDFLPEDKPRYLMGVGKPDDIVGAVERGIDMMDCVLPSRSGRTGQAWTPRGQVNIKNARHQDDPRPLDEGCTCPACRSYSRAYLHHVFKAQEIIASMLLTWHNLHYYQQLMQGLRDAIDAGQLAAFVAEFHARRAEGDIPPL

SEQ ID NO: 60079 - protein, 375 aa, Rhodobacter capsulatus
  misc_feature (1)..(375): tr|D5ATQ8|D5ATQ8_RHOCB Queuine tRNA-ribosyltransferase OS=Rhodobacter capsulatus (strain ATCC BAA-309 / NBRC 1 6581 / SB1003) OX=272942 GN=tgt PE=3 SV=1
MTQFSFTLSATDGAARTGVIHTPRGEIRTPAFMPVGTAATVKAMLPESVRATGADILLGNTYHLMLRPTAERIARLGGLHKFMNWERPILTDSGGFQVMSLASVRKLTEEGVTFSSHIDGSKHHLSPERSMEIQKLLGSDIVMAFDECPALPADDATVAKSMRLSMRWAQRSRDAFGDRPGHALFGIMQGGVTRDLREESATKLKEIGFDGYAIGGLAVGEGQEAMFSVLDYAPGFLPADKPRYLMGVGKPDDIVGAVARGIDMMDCVLPSRSGRTGQAWTRRGQINIKNARHMDDPRPLDEACSCPACRNYSRAYLHHVFKAQEMISGMLLTWHNLHYYQDLMAGLRAAIAAGQLSAFVADFHAQRAAGDIDPL

SEQ ID NO: 60080 - protein, 367 aa, Rhodobacter capsulatus
  misc_feature (1)..(367): tr|A0A0E2PF43|A0A0E2PF43_RHOCA Queuine tRNA-ribosyltran sferase (Fragment) OS=Rhodobacter capsulatus Y262 OX=14 15161 GN=U715_09415 PE=3 SV=1
SATDGAARTGVIHTPRGEIRTPAFMPVGTAATVKAMLPESVRATGADILLGNTYHLMLRPTAERIARLGGLHKFMNWERPILTDSGGFQVMSLASLRKLTEEGVTFSSHIDGSKHHLSPERSMEIQKLLGSDIVMAFDECPALPADDATVAKSMRLSMRWAQRSRDAFGDRPGHALFGIMQGGVTRDLREESATKLKEIGFDGYAIGGLAVGEGQEAMFSVLDYAPGFLPADKPRYLMGVGKPDDIVGAVARGIDMMDCVLPSRSGRTGQAWTRRGQINIKNARHMDDPRPLDEACSCPACRNYSRAYLHHVFKAQEMISGMLLTWHNLHYYQDLMAGLRAAIAAGQLSAFVADFHAQRAAGDIDPL

SEQ ID NO: 60081 - protein, 376 aa, Rhodobacter johrii
  misc_feature (1)..(376): tr|A0A330H9M0|A0A330H9M0_9RHOB Queuine tRNA-ribosyltran sferase OS=Rhodobacter johrii OX=445629 GN=tgt PE=3 SV= 1
MTQRFSFELTATDGRARTGVISTPRGEIRTPAFMPVGTAGTVKAMLPENVRATGADILLGNTYHLMLRPTAERVARLGGLHRFMNWDRPILTDSGGFQVMSLADLRKLTEEGVTFRSHIDGSKHHLSPERSMEIQRLLGSDIVMAFDECPALPATEEAVARSMRLSMRWARRSREAFGDRPGHALFGIMQGGVTRDLREESAAALCEIGFEGYAIGGLAVGEGQEAMFGVLDYAPGFLPEDRPRYLMGVGKPDDIVGAVERGVDMMDCVLPSRSGRTGQAWTRRGQVNIKNARHMDDPRPLDEACSCPACRSYSRAYLHHVFRAQEIIASMLLTWHNLHYYQELMQGLRAAIAAGRLGEFVAAFHAARAEGDIEPL

SEQ ID NO: 60082 - protein, 375 aa, Rhodobacter maris
  misc_feature (1)..(375): tr|A0A285RXB8|A0A285RXB8_9RHOB Queuine tRNA-ribosyltran sferase OS=Rhodobacter maris OX=446682 GN=tgt PE=3 SV=1
MTRFSFAVTATDGKARSGVISTARGEIRTPAFMPVGTAATVKAMLPESVRATGADILLGNTYHLMLRPSAERIARLGGLHKFMNWERPILTDSGGFQVMSLASLRKLTEEGVTFSSHIDGSKHHLSPERSMEIQKLLGSDIVMAFDECPALPATEEAVAKSMRLSMRWAQRSRDAFGDRPGHALFGIMQGGVTRALREESAEALTAIGFDGYAVGGLAVGEGQEAMFSVLDYAPGCLPEERPRYLMGVGKPDDIVGAVERGIDMMDCVLPSRSGRTGQAWTRRGQINIKNARHMDDPRPLDEACTCPACRNYSRAYLHHVFRAQEMISGMLLTWHNLHYYQELMAGLRAAIAAGQLSDFVAQFHALRAEGDIDPL

SEQ ID NO: 60083 - protein, 376 aa, Rhodobacter megalophilus
  misc_feature (1)..(376): tr|A0A239CEV5|A0A239CEV5_9RHOB Queuine tRNA-ribosyltran sferase OS=Rhodobacter megalophilus OX=418630 GN=tgt PE =3 SV=1
MTQRFSFELTATDGRARTGVISTPRGEIRTPAFMPVGTAGTVKAMLPENVRATGADILLGNTYHLMLRPTAERVARLGGLHRFMNWDRPILTDSGGFQVMSLADLRKLSEEGVTFRSHIDGSKHHLSPERSMEIQRLLGSDIVMAFDECPALPATEEAVAQSMRLSMRWAGRSREAFGDRPGHALFGIMQGGVTRDLREESAAALREVGFEGYAIGGLAVGEGQEAMFGVLDYAPGFLPEDRPRYLMGVGKPDDIVGAVERGVDMMDCVLPSRSGRTGQAWTRRGQVNIKNARHMDDPRPLDEACSCPACRSYSRAYLHHVFRAQEIIASMLLTWHNLHYYQELMQGLRTAIAAGRLGEFVAAFHAARAEGDIEPL

SEQ ID NO: 60084 - protein, 376 aa, Rhodobacter ovatus
  misc_feature (1)..(376): tr|A0A285D2B6|A0A285D2B6_9RHOB Queuine tRNA-ribosyltran sferase OS=Rhodobacter ovatus OX=439529 GN=tgt PE=3 SV= 1
MSRRFSFQVTATDGRARLGAISTPRGEIRTPAFMPVGTAATVKAMLPESVRATGADILLGNTYHLMLRPTAERIARLGGLHRFMNWERPILTDSGGFQVMSLADLRKLTEEGVTFRSHIDGSRHHLSPERSMEIQRLLGSDIVMAFDECPALPATEADVAKSMRLSMRWAQRSRDAFGDRPGHALFGIMQGGVTRELREESAAALRAIGFDGYAIGGLAVGEGQEAMFGVLDYAPGYLPEDRPRYLMGVGKPDDIVGAVERGVDMMDCVLPSRSGRTGQAWTRRGQVNIKNARHMDDPRPLDEDCTCPACRNYSRAYLHHVFRAQEIIASMLLTWHNLHYYQQLMQGLRDAIAEGRLAGFVAGFHAARAAGDIEPV

SEQ ID NO: 60085 - protein, 376 aa, Rhodobacter sp.
  misc_feature (1)..(376): tr|V7EGT9|V7EGT9_9RHOB Queuine tRNA-ribosyltransferase OS=Rhodobacter sp. CACIA14H1 OX=1408890 GN=tgt PE=3 SV= 1
MAQGFGFTVHATDGKARTGIIQTTRGEIRTPAFMPVGTAATVKAMLPESVRATGADILLGNTYHLMLRPTAERIARLGGLHRFMNWDRPILTDSGGFQVMSLASLRKLTEEGVRFSSHIDGSKHMLTPERSMEIQKLLGSDIVMCFDECPALPATEDEVAKSMRLSMRWAQRSRDAFGDRPGHALFGIMQGGVTRDLREESAEALKRIGFDGYAVGGLAVGEGQEAMFSVLDYAPGFLPEDRPRYLMGVGKPDDIVGAVERGIDMMDCVLPSRSGRTGQAWTRRGQINIKNARHQDDPRPLDEDCTCPACRNYSRAYLHHVNRAQEIIASMLLTWHNLHYYQELMQGLRDAIAAGRLSAFVADFHARRAEGDIDPL

SEQ ID NO: 60086 - protein, 376 aa, Rhodobacter sp.
  misc_feature (1)..(376): tr|A0A366JX99|A0A366JX99_9RHOB Queuine tRNA-ribosyltran sferase OS=Rhodobacter sp. 140A OX=2183910 GN=tgt PE=3 SV=1
MTEKFSFTLHATDGKARTGVISTPRGEIRTPAFMPVGTAGTVKAMMPESVAATGADILLGNTYHLMLRPTAERIDRLGGLHKFMNWPKPILTDSGGFQVMSLSGLRKLTEEGVTFASHVDGSKHFLSPERSMEIQRLLGSDIVMAFDECPALPADETRVAESMRLSMRWAERSRDAFGDRPGHALFGIMQGGVTPELRAESAEKLTEIGFDGYAVGGLAVGEGQEAMFGVLDYAPGFLPEDRPRYLMGVGKPDDIVGAVERGIDMMDCVLPSRSGRTGQAWTRRGQVNIKNARHMDDPRPLDEHCTCPACRNYSRAYLHHVFRAGEMISGMLLTWHNLQYYQELMQGLRDAIAAGRLSAFVAEFHALRAGGDIEPL

SEQ ID NO: 60087 - protein, 376 aa, Rhodobacter sphaeroides
  misc_feature (1)..(376): sp|Q3J2H4|TGT_RHOS4 Queuine tRNA-ribosyltransferase OS= Rhodobacter sphaeroides (strain ATCC 17023 / 2.4.1 / NC IB 8253 / DSM 158) OX=272943 GN=tgt PE=3 SV=1
MTQRFSFELTATDGRARTGVISTPRGEIRTPAFMPVGTAGTVKAMLPENVRATGADILLGNTYHLMLRPTAERVVRLGGLHRFMNWDRPILTDSGGFQVMSLADLRKLSEEGVTFRSHIDGSKHHLSPERSMEIQRLLGSDIVMAFDECPALPATEEAVAQSMRLSMRWARRSREAFGDRPGHALFGIMQGGVTRDLREESAAALREIGFEGYAIGGLAVGEGQEAMFGVLDYAPGLLPEDRPRYLMGVGKPDDIVGAVERGVDMMDCVLPSRSGRTGQAWTRRGQVNIKNARHMDDPRPLDEACSCPACRSYSRAYLHHVFRAQEIIASMLLTWHNLHYYQELMQGLRTAIAAGRLGEFVAAFHAARAEGDIEPL

SEQ ID NO: 60088 - protein, 376 aa, Rhodobacter sphaeroides
  misc_feature (1)..(376): sp|A3PJT9|TGT_RHOS1 Queuine tRNA-ribosyltransferase OS= Rhodobacter sphaeroides (strain ATCC 17029 / ATH 2.4.9) OX=349101 GN=tgt PE=3 SV=1
MTQRFSFELTATDGRARTGVISTPRGEIRTPAFMPVGTAGTVKAMLPENVRATGADILLGNTYHLMLRPTAERVARLGGLHRFMNWDRPILTDSGGFQVMSLADLRKLSEEGVTFRSHIDGSKHHLSPERSMEIQRLLGSDIVMAFDECPALPATEEAVAQSMRLSMRWARRSREAFGDRPGHALFGIMQGGVTRDLREESAAALREIGFEGYAIGGLAVGEGQEAMFGVLDYAPGFLPEDRPRYLMGVGKPDDIVGAVERGVDMMDCVLPSRSGRTGQAWTRRGQVNIKNARHMDDPRPLDEACSCPACRSYSRAYLHHVFRAQEIIASMLLTWHNLHYYQELMQGLRTAIAAGRLGEFVAAFHAARAEGDIEPL

SEQ ID NO: 60089 - protein, 376 aa, Rhodobacter veldkampii
  misc_feature (1)..(376): tr|A0A2T4JHM2|A0A2T4JHM2_9RHOB Queuine tRNA-ribosyltran sferase OS=Rhodobacter veldkampii DSM 11550 OX=1185920 GN=tgt PE=3 SV=1
MTTAFRFDLHATDGRARTGVIHTPRGAIRTPAFMPVGTAATVKAMLPESVRATGADILLGNTYHLMLRPTAERIARLGGLHRFMGWDRPILTDSGGFQVMSLASLRKMTEEGVRFSSHIDGSKHMLSPERSMEIQRLLGSDIVMAFDECTSFPADEATARASMELSMRWARRSRDAFGDRPGHALFGIMQGSVYPDQRAESAAALRAIGFDGYAVGGLAVGEGQETMFSVLDYAPDLLPSDRPRYLMGVGKPDDIVGAVERGIDMMDCVLPSRSGRTGQAFTRRGVVNIKNARHMDDPRPLDEACTCPACRGYSRAYLHHVFRAQEIISSMLLTWHNLHYYQELMSGLRSAIAGGRLSAFVAEFHAQRAQGDIEPL

SEQ ID NO: 60090 - protein, 377 aa, Rhodobacter vinaykumarii
  misc_feature (1)..(377): tr|A0A1N7JIR4|A0A1N7JIR4_9RHOB Queuine tRNA-ribosyltran sferase OS=Rhodobacter vinaykumarii OX=407234 GN=tgt PE =3 SV=1
MSDPAFRFDLAATCGAARTGTIHTPRGPIRTPAFMPVGTAATVKAMLPESVAATGADILLGNTYHLMLRPTAERVAALGGLHRFMNWSGPILTDSGGFQVMSLTGLRKMTEEGVRFASHIDGSRHMLSPERSMEIQRLLGSDIVMAFDECTPYPATREQAQASMELSMRWARRSRDAFGDRPGHALFGIMQGSTFPDLRAQSAETLREIGFDGYAIGGLAVGEGQAAMFEVLDYAPGLLPADRPRYLMGVGKPDDIVGAVQRGVDMMDCVLPSRSGRTGQAFTRHGVVNIKNARHAEDPRPLDEACTCPACRGYSRAYLHHVFRAGEIISSMLLTWHNLHYYQELMAGLRGAIAAGTLDSFVADFHAMRAPGDIPPL

SEQ ID NO: 60091 - protein, 375 aa, Rhodobacter viridis
  misc_feature (1)..(375): tr|A0A318UH17|A0A318UH17_9RHOB Queuine tRNA-ribosyltran sferase OS=Rhodobacter viridis OX=1054202 GN=tgt PE=3 S V=1
MTQFSFSLSATDGAARAGVIHTPRGEIRTPAFMPVGTAATVKAMMPESVRATGADILLGNTYHLMLRPTAERIARLGGLHKFMNWERPILTDSGGFQVMSLASLRKLTEEGVTFSSHIDGSKHHLSPERSMEIQKLLGSDIVMAFDECPALPADDATVAKSMRLSMRWAERSRDAFGDRPGHALFGIMQGGVTRELREESAEKLKEIGFDGYAVGGLAVGEGQEAMFSVLDYAPGFLPADKPRYLMGVGKPDDIVGAVERGIDMMDCVLPSRSGRTGQAWTRRGQINIKNARHMDDPRPLDEACGCPACRNYSRAYLHHVFKAQEMISGMLLTWHNLHYYQDLMAGLREAIAAGRLSAFVAEFHAARAEGDIDPL

SEQ ID NO: 60092 - protein, 370 aa, Rhodobacteraceae bacterium
  misc_feature (1)..(370): tr|A0A3N9QNE1|A0A3N9QNE1_9RHOB Queuine tRNA-ribosyltran sferase OS=Rhodobacteraceae bacterium CH30 OX=2490538 G N=tgt PE=3 SV=1
MLKFTLHKTSGGARRGTLELNHGTVETPVFQPVGTYGSVKAMSPLELNEIGAQIILGNTFHLWLRPGLEVIESFGGLHGFMGWDKPILTDSGGFQVFSLGALRKLTEEGCTFHSPVNGDKLFLSPEISMKIQTVLNSDIVMQLDECTPGQVDHKTAESSMQMSLRWAARSRQAFDDLNNPNALFGIVQGNLYTDLRQKSLEGLMEIGFDGIAIGGLSVGEPKPEMYRMLEEMRDMLPAEKPHYLMGVGTPEDLVQGVANGIDMFDCVMPTRNARNGWIFTRYGDIKIKNARHKLDHAPLDEECSCYACRNFSRAYLHHLHRTGEILGARLNTIHNLHYYQELMQEMRDAIDADRFEDWRASFHEKRARGA

SEQ ID NO: 60093 - protein, 379 aa, Rhodobacteraceae bacterium
  misc_feature (1)..(379): tr|A0A1B6YFV9|A0A1B6YFV9_9RHOB Queuine tRNA-ribosyltran sferase OS=Rhodobacteraceae bacterium EhC02 OX=1849170 GN=tgt PE=3 SV=1
MTQTAGRFRFDLTATDGKARTGAISTPRGTIRTPAFMPVGTAATVKGMLPESVAATGADILLGNTYHLMLRPTAERIDRLGGLHRFMNWDKPILTDSGGFQVMSLAALRKLTEEGVTFKSHIDGSRHHLSPERSMEIQRLLGSDIVMCFDECPALPATDAEVAKSMRLSMRWAQRSRDAFGDRPGHALFGIQQGGVTQELRAESAEALCAIGFDGYAVGGLAVGEGQEAMFGVLDYAPDMLPQDKPRYLMGVGKPDDIVGAVKRGIDMMDCVLPSRSGRTGQAFTRHGVVNIKNARHQDDPRPLDEACGCPACRGYSRAYLHHVFRAGEMISGMLLTWHNLHYYQELMQGMRDAIAAGRFAAFEADFHAQRAEGDIPPL

SEQ ID NO: 60094 - protein, 376 aa, Rhodobacterales bacterium
  misc_feature (1)..(376): tr|A0A1Y5HB64|A0A1Y5HB64_9RHOB Queuine tRNA-ribosyltran sferase OS=Rhodobacterales bacterium 56_14_T64 OX=18562 99 GN=tgt PE=3 SV=1
MSPKVTFDLQASDGKARTGVISTPRGEIRTPAFMPVGTAATVKAMMPESVRATGADILLGNTYHLMLRPTAERIDRLGGLHKFMNWERPILTDSGGFQVMSLAGLRKLTEHGVTFKSHVDGSKHEITPERSMEIQRLLGSDIVMCFDECPALPATDAQVAESMRMSMRWAARSRDAFGDRPGHALFGIQQGGVTQELRAESAEKLREIGFDGYAVGGLAVGEGQEAMFGVLDYAPDMLPEDKPRYLMGVGKPDDIVGAVARGIDMMDCVLPSRSGRTGQVYTRQGVVNIKNARHIDDPRPLDENCSCPACRNYSRAYLSHVFRSNEMISGMLLTWHNLQYFQDIMAGMREAIAAGVFSTWQSDFHAGRAQGDIEPL

SEQ ID NO: 60095 - protein, 386 aa, Rhodobacterales bacterium
  misc_feature (1)..(386): tr|A0A2M7QMT4|A0A2M7QMT4_9RHOB Queuine tRNA-ribosyltran sferase OS=Rhodobacterales bacterium CG_4_10_14_0_8_um_ filter_70_9 OX=1974084 GN=tgt PE=3 SV=1
MALAAFAKDGDAPVFRFSVSAADGAARTGVIATPRGDIRTPAFMPVGTAATVKGMLPESVRATGADIVLGNTYHLMLRPGAERMARLGGLHRFMNWPRPILTDSGGFQVMSLTGLRKMSEEGVRFASHIDGSTHMLTPERSMEIQRLLGSDIVMSFDECTPFPAEEAVAAASMRLSMRWAQRSRDAFGDRPGHALFGIQQGSVFRALREESAEKLRAIGFDGYAIGGLAVGEGQEAMFGVLDYATGLLPPDKPRYLMGVGTPSDIVGAVRRGVDMFDCVMPTRSGRTGLAHTRFGQVKIKNARHADDPRPIDPDCACPCCTGYSRAYLHHVFKAGEMICAMLLTWHNLHYYQELMQGLRAAIAAQRLEDFARAFDSARAAGDLPPL

SEQ ID NO: 60096 - protein, 368 aa, Rhodobiaceae bacterium
  misc_feature (1)..(368): tr|A0A2E0T7T9|A0A2E0T7T9_9RHIZ Queuine tRNA-ribosyltran sferase OS=Rhodobiaceae bacterium OX=2026785 GN=tgt PE= 3 SV=1
MFKIIAKDRHARCGQIDLSHGMIETPVFMPVGTQGTVKAISVDTLKKIGFKIILGNTYHLYLRPGIEILNKIGGLNNFMKWDRPILTDSGGFQIMSLSKLMKIEEGGVKFQSHIDGKEFYLSPDISMKVQDSIGSDIHMILDQCIEFDQDISNIRKAMNLSLKWAEMSKKSFVKKKGRMLFGIIQGGTDQHLREHSAIETIDIGFDGYAIGGLAVGEGHDLMLKTLDFTIPNLPDEKPRYLMGVGTPEDLVESVKRGVDMFDCVMPTRAGRHGLAYTKFGAINLRNSKFSDDMRPIDEESGCPIASEYSRSYLHHLIKSKEILAAMLISEINLNYYNTLMVDLRLAIRDNRLDRTIEVIKGDWATVDA

SEQ ID NO: 60097 - protein, 368 aa, Rhodobiaceae bacterium
  misc_feature (1)..(368): tr|A0A2E9YLW7|A0A2E9YLW7_9RHIZ Queuine tRNA-ribosyltran sferase OS=Rhodobiaceae bacterium OX=2026785 GN=tgt PE= 3 SV=1
MKKYSFNVKANDGFARLGQIKTSNGSINTPAFMPIATQGSIKFTPIEFIKEIGFDLILSNTYHLLLRPGLKVLNKFDGISRFMKWDGPMLTDSGGFQVMSLAKFRKISKEGVKFQSHIDGSTHILTPENVVDSQNIINSNIQMSLDECLHYPASFEDSKKSMRLSLNWAERARRRFLDTKKNKSDAQFGIIQGGIFKDLRIESIKENTDIDFDGYAIGGLAVGEGHEMMKEIVKYTTPELPINKVRYLMGVGKPKDIIIAVENGIDIFDCVIPTREGRHGNAYTNYGIINLNNSKFSNDLNPIDEESTYYVTKNYSKSYLHHLLRINEPLGGMLVSLHNLNYYNVLMNKIRNAIRDKKFNTFKENFLL

SEQ ID NO: 60098 - protein, 381 aa, Rhodobium orientis
  misc_feature (1)..(381): tr|A0A327JGB3|A0A327JGB3_9RHIZ Queuine tRNA-ribosyltran sferase OS=Rhodobium orientis OX=34017 GN=tgt PE=3 SV=1
MSRYTYRLIASDGMARRSELTTAHGLVKTPAFMPVGTQGTVKAMYTDQVRATGADVVLGNTYHLMLRPGAERVARLGGLHRFMNWPHTILTDSGGFQVMSLAQLRKLDETGVKFRSHLDGSEHVLTPERSIEIQGLLGADIQMQLDECIRLPASEDEVARAMRLSLAWAERSKAAFAAMGGPEKGQGLHGIVQGGDVKSLRIESARELAAMDFGGYSIGGLAVGEPQDVMLDMLETTLPELPETKPRYLMGVGTPEDIVESVARGVDMFDCVLPTRAGRHGLAYTRFGKINLKNARHADDPRPLDETSNCPAARDYSRAYLHHLVKAGEALSMMLLTWNNLAYYQSLMAGMREAISAGTFAGFREETLAGWARGDIAPHVP

SEQ ID NO: 60099 - protein, 375 aa, Rhodoblastus acidophilus
  misc_feature (1)..(375): tr|A0A212RG65|A0A212RG65_RHOAC Queuine tRNA-ribosyltran sferase OS=Rhodoblastus acidophilus OX=1074 GN=tgt PE=3 SV=1
MTDDFRFTLRARDGGARLGEISTPRGAIRTPAFMPVGTAATVKAMYPGQVRELGADVVLGNVYHLMLRPGAERVAELGGLHKFMNWPHNILTDSGGFQVMSLAKLRKLDENGVTFQSHIDGSRHQLTPERSMEIQRLLGSDIQMQFDECVKLPCSHEEAERAMRLSLRWAERSRKAFGEQPGRACFGIVQGGAERDLRIESARALADMDFGGMAVGGLAVGEPQEVMLAMIETVMPHLPEHKPHYLMGVGTPDDLLQSVKRGIDMFDCVMPTRAGRHGLAYTRWGKLNLKNARHAEDPRPLDPTSSCPAARDYSRAYLHHLVRCQEILGMMLLTWVNLAYYQDLMAGAREAISAGRYDDYLAQVKDNWTRDGEPG

SEQ ID NO: 60100 - protein, 375 aa, Rhodoblastus sphagnicola
  misc_feature (1)..(375): tr|A0A2S6MXS2|A0A2S6MXS2_9RHIZ Queuine tRNA-ribosyltran sferase OS=Rhodoblastus sphagnicola OX=333368 GN=tgt PE =3 SV=1
MTEDFQFTLRARDGGARLGEISTPRGIIRTPAFMPVGTAATVKAMYPGQVRELGADVVLGNVYHLMLRPGAERVAQLGGLHRFMNWPHNILTDSGGFQVMSLAKLRKLDENGVTFQSHIDGSRHQLTPERSMEIQRLLGSDIQMQFDECVKLPCSHEEAERAMRLSLRWAERSRKAFGEQPGRACFGIVQGGAERDLRIESAKTLSDMDFGGLAVGGLAVGEPQDVMLAMIETVMPHLSEHKPHYLMGVGTPDDLLESVARGIDMFDCVMPTRAGRHGLAYTRWGKINLKNAKNADDPRPLDPMSTCPAARDYSRAYLHHLMRCQEILGMMLLTWVNLAYYQDLMVYAREAIAQGRYDDYRAEVKENWARGGEPG

SEQ ID NO: 60101 - protein, 421 aa, Rhodococcus aetherivorans
  misc_feature (1)..(421): tr|A0A059MGF1|A0A059MGF1_9NOCA Queuine tRNA-ribosyltran sferase OS=Rhodococcus aetherivorans OX=191292 GN=tgt P E=3 SV=1
MTDPSATASAVPTPPDPFFTVGTRLANGLGRTGTIHTPHGDIHTPAFVGVGTKATVKAVLPEAMKELGVQALLANAYHLYLQPGSDIVDEAGGLGKFMNWDGPTFTDSGGFQVMSLGVGFKKVLAMDAVGVRSDDVIAEGKERLAHVDDDGVTFKSHLDGSRHRFTPEVSMRIQHQLGADIMFAFDELTTLMNTRGYQEQSVERTQAWAVRCIAEHEKLTAQRAHRPYQALFGVVQGAQYEDLRRQACRGLESIVGESGRGFDGYGIGGALEKQNLGTIVRWCTEELPEHKPRHLLGISEPDDMFVAIEHGVDTFDCVNPSRVARNAAIYHPDGRFNINTSRFRRDFTPIDEDCDCYTCRHYTRAYIHHLFKAKEMLASTLCTIHNERFTVRLVDEIRAAIDGGYLEEHKAETLGRFYARR

SEQ ID NO: 60102 - protein, 421 aa, Rhodococcus agglutinans
  misc_feature (1)..(421): tr|A0A438BBT6|A0A438BBT6_9NOCA Queuine tRNA-ribosyltran sferase OS=Rhodococcus agglutinans OX=1644129 GN=tgt PE =3 SV=1
MSDVVPTPPDPFFTVGTRLPDRLGRTGTIHTPHGDIQTPAFIAVGTKATVKAVLPESMRDLGAQAVLANAYHLYLQPGPDIVDEAGGLGKFMNWDGPTFTDSGGFQVMSLGVGFKKVLAMEAVGVQSDDVIAEGKQRLAHVDDDGVTFKSHLDGSPHRFTPEVSMQIQHQLGADIMFAFDELTTLLNTRGYQEQSVERTQAWAVRCIAEHEKLTAERAHRPYQALFGVVQGAQYEDLRRQAARGLESITGVSGRGFDGYGIGGALEKQNLGTIVRWVNEELPEHKPRHMLGISEPDDMFVAIENGADTFDCVNPSRVARNAAIYHPDGRFNINTARFRRDFTPIDDECDCYTCANYTRAYIHHLFKAKEMLASTLCTIHNERFTVRLVDRIRESIEGGYFEELKRETLGRFYGKRPSSNGA

SEQ ID NO: 60103 - protein, 414 aa, Rhodococcus biphenylivorans
  misc_feature (1)..(414): tr|A0A2Z4VN05|A0A2Z4VN05_9NOCA Queuine tRNA-ribosyltran sferase OS=Rhodococcus biphenylivorans OX=1500843 GN=tg t PE=3 SV=1
MPTPPDPFFTVGARLDNGLGRTGTIHTPHGDIRTPAFVPVGTKATVKAVLPETMAELGSQALLANAYHLYLQPGSDIVDEAGGLGKFMNWPGPTFTDSGGFQVMSLGAGFKKVIAMESVGVQNDDVIAKGKERLAHVDDDGVTFKSHLDGSRHRFTPEVSMRIQHELGADIMFAFDELTTLMNTRGYQERSLERTQAWAVRCIAEHEKLTAERARRPYQALFGVVQGAQYEDLRRQACRGLESIVGETGRGFDGYGIGGALEKHNLGTIVRWCTEELPEHKPRHLLGISEPDDIFVAVEHGVDTFDCVNPSRVARNAAIYHPDGRFNINTSRHRRDFTPIDENCDCYTCRNYTRAYIHHLFKAKEMLASTLCTIHNERFTVRLVDDIRANMENGTLAEFKAETLGRFYASRRRA

SEQ ID NO: 60104 - protein, 437 aa, Rhodococcus coprophilus
  misc_feature (1)..(437): tr|A0A2X4U1H8|A0A2X4U1H8_9NOCA Queuine tRNA-ribosyltran sferase OS=Rhodococcus coprophilus OX=38310 GN=tgt PE=3 SV=1
MTCHNRRVSVLRSTDSALPVPPDPFFTVGARLDNGLGRTGTIHTPHGDIRTPAFIGVGTKATVKAVLPEAMKELGAQALLANAYHLYLQPGSDIVDEAGGLGKFMNWDGPTFTDSGGFQVMSLGVGFKKVIAMEAVGVQNDDVMAHGKERLARVDDDGVTFKSHLDGSMHRFTPEVSMQIQHQLGADIMFAFDELTTLMNTRGYQERSIERTQAWAVRCIAEHEKLTAERAHRPYQALFGVVQGAQYEDLRREACRGLESIVGESGRGFDGYGIGGALEKHNLGTIVRWCCEELPDSKPRHMLGISEPDDVFVAIEHGADTFDCVNPSRVARNAAIYHPDGRFNINTSRFRRDFTPIDENCDCYTCTHYTRAYIHHLFKAKEMLASTLCTIHNERFTVRLVDDIRLSIEGGYFDEHKAETLGRFYAKKRQAAAETGA

SEQ ID NO: 60105 - protein, 429 aa, Rhodococcus enclensis
  misc_feature (1)..(429): tr|A0A1C4EF06|A0A1C4EF06_9NOCA Queuine tRNA-ribosyltran sferase OS=Rhodococcus enclensis OX=1049584 GN=tgt PE=3 SV=1
MTSAVPTPPEPVVDKRPESIFTIGTRLEDRLGRTGTIHTPHGDIATPSFVAVGTKATVKAVLPESMKELGAQSLLANAYHLYLQPGPDIVDEAGGLGKFMNWDGPTFTDSGGFQVMSLGVGFKKVLAMEAVGVQSDDVIAKGKERLATVDDEGVTFKSHLDGSKHRFTPEVSMQIQHQLGADIMFAFDELTTLLNTRGYQERSVERTQAWAIRCINEHEKLTAERADKPYQALFGVIQGAQYEDLRRQACRGLESIEGENGYGFDGYGIGGALEKQNLGTIVRWCNEELPENKPRHMLGISEPDDFFVAIENGADTFDCVNPSRVARNAAIYVRSGRFNINTSRFRRDFTPIDDECDCYTCANYTRAYIHHLFKAKEMLASTLCTIHNERFTVKLVDDIRASIEGGYFHDFKADMLGKFYAAKTPAPQA

SEQ ID NO: 60106 - protein, 429 aa, Rhodococcus enclensis
  misc_feature (1)..(429): tr|A0A2A5JHE9|A0A2A5JHE9_9NOCA Queuine tRNA-ribosyltran sferase OS=Rhodococcus enclensis OX=1049584 GN=tgt PE=3 SV=1
MTSAVPTPPAPSVDKRPESIFTIGTRLEDRLGRTGTIHTPHGDIATPSFVAVGTKATVKAVLPESMKELGAQSLLANAYHLYLQPGPDIVDEAGGLGKFMNWDGPTFTDSGGFQVMSLGVGFKKVLAMEAVGVQSDDVIAKGKERLATVDDEGVTFKSHLDGSKHRFTPEVSMQIQHQLGADIMFAFDELTTLLNTRGYQERSVERTQAWAIRCINEHEKLTAERVDKPYQALFGVIQGAQYEDLRRQACRGLESIEGENGYGFDGYGIGGALEKQNLGTIVRWCNEELPENKPRHMLGISEPDDFFVAIENGADTFDCVNPSRVARNAAIYVRSGRFNINTSRFRRDFTPIDDECDCYTCANYTRAYIHHLFKAKEMLASTLCTIHNERFTVKLVDDIRASIEGGYFHDFKADMLGKFYAAKTPAPQA

SEQ ID NO: 60107 - protein, 420 aa, Rhodococcus erythropolis
  misc_feature (1)..(420): tr|C0ZM75|C0ZM75_RHOE4 Queuine tRNA-ribosyltransferase OS=Rhodococcus erythropolis (strain PR4 / NBRC 100887) OX=234621 GN=tgt PE=3 SV=1
MPAVDKRPESIFTIGTRLEDRLGRTGTIHTPHGDIATPSFVAVGTKATVKAVLPESMKELGAQSLLANAYHLYLQPGPDIVDEAGGLGKFMNWDGPTFTDSGGFQVMSLGVGFKKVLAMEAVGVQSDDVIAKGKERLATVDDEGVTFKSHLDGSKHRFTPEVSMQIQHQLGADIMFAFDELTTLLNTRGYQERSVERTQAWAIRCINEHEKLTAERAEKPYQALFGVIQGAQYEDLRRQACRGLESIEGENGYGFDGYGIGGALEKQNLGTIVRWCNEELPENKPRHMLGISEPDDFFVAIENGADTFDCVNPSRVARNAAIYVRSGRFNINTSRFRRDFTPIDDECDCYTCANYTRAYIHHLFKAKEMLASTLCTIHNERFTVKLVDDIRASIEGGYFHDFKADMLGKFYAAKTPAPQT

SEQ ID NO: 60108 - protein, 429 aa, Rhodococcus erythropolis; identical to SEQ ID NO: 60105
  misc_feature (1)..(429): tr|A0A395QIM4|A0A395QIM4_RHOER Queuine tRNA-ribosyltran sferase OS=Rhodococcus erythropolis OX=1833 GN=tgt PE=3 SV=1

SEQ ID NO: 60109 - protein, 412 aa, Rhodococcus fascians
  misc_feature (1)..(412): tr|A0A161GDM4|A0A161GDM4_RHOFA Queuine tRNA-ribosyltran sferase OS=Rhodococcus fascians D188 OX=1051973 GN=tgt PE=3 SV=1
MSSSNFGFDIGTRLDGELGRTGTIHTPHGDIATPAFIAVGTKATVKAVLPEAMKELGAQAVLANAYHLYLQPGSDIVDEAGGLGKFMNWDGPTFTDSGGFQVMSLGVGFKKVISMDASRVESDDVIAEGKERLAHVDDDGVTFKSHLDGSKHRFTPEVSMQIQHRLGADIMFAFDELTTLMNTRGYQEKSVDRTQAWAKRCVLEHERLTVERADKPYQALFGVVQGAQYEDLRRKAAHDLETITGETGRGFDGYGIGGALEKQNLGTITRWVNEELPEHKPRHMLGISEPDDFFVAIENGADTFDCVNPSRVARNAAIYVPTGRFNINTAKHRRDFTPIDENCDCYTCAHYTKAYIHHLFKAKEMLASTLCTIHNERFTVKLVDDIRASIEQQRFTEFKTEYLGRFYAPKTA

SEQ ID NO: 60110 - protein, 412 aa, Rhodococcus fascians
  misc_feature (1)..(412): tr|A0A260U1A9|A0A260U1A9_RHOFA Queuine tRNA-ribosyltran sferase OS=Rhodococcus fascians OX=1828 GN=tgt PE=3 SV= 1
MSSSNFGFDIGTRLDGELGRTGTIHTPHGDIATPAFIAVGTKATVKAVLPEAMKELGAQAVLANAYHLYLQPGSDIVDEAGGLGKFMNWDGPTFTDSGGFQVMSLGVGFKKVISMDASRVESDDVIAEGKERLAHVDDDGVTFKSHLDGSKHRFTPEVSMQIQHRLGADIMFAFDELTTLMNTRGYQEKSVDRTQAWAKRCVLEHERLTVERADKPYQALFGVVQGAQYEDLRRKAAHDLETITGDTGRGFDGYGIGGALEKQNLGTITRWVNEELPEHKPRHMLGISEPDDFFVAIENGADTFDCVNPSRVARNAAIYVPTGRFNINTAKHRRDFTPIDENCDCYTCAHYTKAYIHHLFKAKEMLASTLCTIHNERFTVKLVDDIRASIEQQRFTEFKTEYLGRFYASKTA

SEQ ID NO: 60111 - protein, 419 aa, Rhodococcus gordoniae
  misc_feature (1)..(419): tr|A0A379M2F3|A0A379M2F3_9NOCA Queuine tRNA-ribosyltran sferase OS=Rhodococcus gordoniae OX=223392 GN=tgt PE=3 SV=1
MTDPSIPTPSDPFFTVGARLDNGLGRTGTIHTPHGDIRTPAFIPVGTKATVKAVLPETMAELGSQALLANAYHLYLQPGSDIVDEAGGLGQFMNWPGPTFTDSGGFQVMSLGAGFKKVIAMESVGVQNDEVIAKGKERLAHVDDDGVTFKSHLDGSRHRFTPEVSMRIQHELGADIMFAFDELTTLMNTRGYQERSLERTQAWAVRCIAEHEKLTAERAHRPYQALFGVVQGAQYEDLRRQACRGLESIVGETGRGFDGYGIGGALEKHNLGTIVRWCTEELPEHKPRHLLGISEPDDVFVAVEHGVDTFDCVNPSRVARNAAIYHPDGRFNINTSRHRRDFTPIDENCDCYTCRNYTRAYIHHLFKAKEMLASTLCTIHNERFTVRLVDDIRTSIENGTFAEFKTETLGRFYASRRQA

SEQ ID NO: 60112 - protein, 417 aa, Rhodococcus hoagii
  misc_feature (1)..(417): tr|A0A3S5Y1S6|A0A3S5Y1S6_RHOH1 Queuine tRNA-ribosyltran sferase OS=Rhodococcus hoagii (strain 103S) OX=685727 G N=tgt PE=3 SV=1
MPTPPDPFFTVGTRLPDRLGRTGTIHTPHGDIRTPAFIAVGTKATVKAVLPESMKDLGTQAVLANAYHLYLQPGPDIVDEAGGLGKFMNWDGPTFTDSGGFQVMSLGVGFKKVLAMEAVGVQSDDVIAEGKQRLAHVDDDGVTFKSHLDGSPHRFTPEVSMQIQHQLGADIMFAFDELTTLLNTRGYQEQSVERTQAWAVRCIAEHEKLTAERAHRPYQALFGVVQGAQYEDLRRQAARGLESITGVSGRGFDGYGIGGALEKQNLGTIVRWVNEELPEHKPRHMLGISEPDDMFVAIENGADTFDCVNPSRVARNAAIYHPDGRFNINTARFRRDFTPIDDECDCYTCAHYTRAYIHHLFKAKEMLASTLCTIHNERFTVRLVDRIRESIEGGYFDEYKAEVLGRFYGSKPSSTGA

SEQ ID NO: 60113 - protein, 421 aa, Rhodococcus hoagii
  misc_feature (1)..(421): tr|A0A2R3S407|A0A2R3S407_RHOHA Queuine tRNA-ribosyltran sferase OS=Rhodococcus hoagii OX=43767 GN=tgt PE=3 SV=1
MSDVVPTPPDPFFTVGTRLPDRLGRTGTIHTPHGDIRTPAFIAVGTKATVKAVLPESMKDLGTQAVLANAYHLYLQPGPDIVDEAGGLGKFMNWDGPTFTDSGGFQVMSLGVGFKKVLAMEAVGVQSDDVIAEGKQRLAHVDDDGVTFKSHLDGSPHRFTPEVSMQIQHQLGADIMFAFDELTTLLNTRGYQEQSVERTQAWAVRCIAEHEKLTAERAHRPYQALFGVVQGAQYEDLRRQAARGLESITGVSGRGFDGYGIGGALEKQNLGTIVRWVNEELPEHKPRHMLGISEPDDMFVAIENGADTFDCVNPSRVARNAAIYHPDGRFNINTARFRRDFTPIDDECDCYTCAHYTRAYIHHLFKAKEMLASTLCTIHNERFTVRLVDRIRESIEGGYFDEYKAEVLGRFYGSKPSSTGA

SEQ ID NO: 60114 - protein, 414 aa, Rhodococcus imtechensis
  misc_feature (1)..(414): tr|I0WQ70|I0WQ70_9NOCA Queuine tRNA-ribosyltransferase OS=Rhodococcus imtechensis RKJ300 = JCM 13270 OX=116586 7 GN=tgt PE=3 SV=1
MNAVVPTPPDPFFTVGTRLDGQLGRTGTIHTPHGDIATPSFVAVGTKATVKAVLPESMKELGAQSLLANAYHLYLQPGPDIVDEAGGLGKFMNWDGPTFTDSGGFQVMSLGVGFKKVLAMEAVGVRSDDVIAKGKERLATVDDDGVTFKSHLDGSRHRFTPEVSMQIQHQLGADIMFAFDELTTLLNTRRYQEQSVERTQAWAVRCIAEHEKLTAERSHRPYQALFGVVQGAQYEDLRRQACRGLESITGESGRGFDGYGIGGALEKQNLGTIVRWCNEELPEHKPRHMLGISEPDDFFVAIENGADTFDCVNPSRVARNAAIYHPDGRFNINTSRFRRDFTPIDENCDCYTCANYTSAYIHHLFKAKEMLASTLCTIHNERFTVRLVDQIRASIEGGYFDEFKADTLGRFYRT

SEQ ID NO: 60115 - protein, 414 aa, Rhodococcus jostii
  misc_feature (1)..(414): tr|Q0S920|Q0S920_RHOJR Queuine tRNA-ribosyltransferase OS=Rhodococcus jostii (strain RHA1) OX=101510 GN=tgt PE =3 SV=1
MNAVVPTPPDPFFTVGTRLDGQLGRTGTIHTPHGDIATPSFVAVGTKATVKAVLPESMKELGAQSLLANAYHLYLQPGPDIVDEAGGLGKFMNWDGPTFTDSGGFQVMSLGVGFKKVLAMEAVGVRSDDVIAKGKERLATVDDDGVTFKSHLDGSRHRFTPEVSMQIQHQLGADIMFAFDELTTLLNTRGYQEQSVERTQAWAVRCIAEHEKLTAERAHRPYQALFGVVQGAQYEDLRRQACRGLESITGESGRGFDGYGIGGALEKQNLGTIVRWCNEELPEHKPRHMLGISEPDDFFVAIENGADTFDCVNPSRVARNAAIYHPDGRFNINTSRFRRDFTPIDENCDCYTCANYTSAYIHHLFKAKEMLASTLCTIHNERFTVRLVDQIRASIEGGYFDEFKAETLGRFYRT

SEQ ID NO: 60116 - protein, 414 aa, Rhodococcus jostii
  misc_feature (1)..(414): tr|A0A1H5C0Q2|A0A1H5C0Q2_9NOCA Queuine tRNA-ribosyltran sferase OS=Rhodococcus jostii OX=132919 GN=tgt PE=3 SV= 1
MNAVVPTPPDPFFTVGTRLEGKLGRSGTIHTPHGDIATPSFVAVGTKATVKAVLPESMKELGAQSVLANAYHLYLQPGPDIVDEAGGLGKFMNWDGPTFTDSGGFQVMSLGVGFKKVLAMEAVGVRSDDVIAKGKERLATVDDDGVTFKSHLDGSRHRFTPEVSMQIQHQLGADIMFAFDELTTLLNTRGYQEQSVERTQAWAVRCIAEHEKLTAERSHRPYQALFGVVQGAQYEDLRRQACRGLESITGESGRGFDGYGIGGALEKQNLGTIVRWCNEELPEHKPRHMLGISEPDDFFVAIENGADTFDCVNPSRVARNAAIYHPDGRFNINTSRFRRDFTPIDENCDCYTCANYTSAYIHHLFKAKEMLASTLCTIHNERFTVRLVDQIRDSIDGGYFDEFKAETLGRFYRT

SEQ ID NO: 60117 - protein, 414 aa, Rhodococcus koreensis
  misc_feature (1)..(414): tr|A0A1H4UBQ6|A0A1H4UBQ6_9NOCA Queuine tRNA-ribosyltran sferase OS=Rhodococcus koreensis OX=99653 GN=tgt PE=3 S V=1
MNAVVPTPPDPFFTVGTRLDGQLGRTGTIHTPHGDIATPSFVAVGTKATVKAVLPESMKDLGAQSLLANAYHLYLQPGPDIVDEAGGLGKFMNWDGPTFTDSGGFQVMSLGVGFKKVLAMEAVGVRSDDVIAKGKERLATVDDDGVTFKSHLDGSRHRFTPEVSMQIQHQLGADIMFAFDELTTLLNTRGYQEQSVERTQAWAVRCIAEHEKLTAERSHRPYQALFGVVQGAQYEDLRRQACRGLESITGESGRGFDGYGIGGALEKQNLGTIVRWCNEELPEHKPRHMLGISEPDDVFVAIENGADTFDCVNPSRVARNAAIYHPDGRFNINTSRFRRDFTPIDENCDCYTCANYTSAYIHHLFKAKEMLASTLCTIHNERFTVRLVDQIRASIEGGYFAEFKAETLGRFYRT

SEQ ID NO: 60118 - protein, 408 aa, Rhodococcus kroppenstedtii
  misc_feature (1)..(408): tr|A0A1I0SYV4|A0A1I0SYV4_9NOCA Queuine tRNA-ribosyltran sferase OS=Rhodococcus kroppenstedtii OX=293050 GN=tgt PE=3 SV=1
MSAPQDDFFTVGTRLDGQLGRTGTLRTPHGTIETPAFIAVGTKATVKAVLPETMKELGAQALLANAYHLYLQPGPDIVDEAGGLGAFMNWDGPTFTDSGGFQVMSLGVGFKKVISMDASRVQSDDVIAEGKERLARVDDDGVTFKSHLDGSRHRFTPEVSMQIQHQLGADIMFAFDELTTLMNTRAYQELSLDRTQAWAVRCIAEHERLTRERADKPYQALFGVVQGAQYEDLRRQAARGLESIVGESGRGFDGYGIGGALEKQNLGAIVRWVNEELPEHKPRHMLGISEPDDFFVAIENGADTFDCVNPSRVARNAAIYTRDGRYNVNTARFRRDFTPLDGDCDCYTCAHYTRAYLHHLFKAKEMLASTLATIHNERFTVRLVDDIRASIHDGRFDEFKAETLGRFY

SEQ ID NO: 60119 - protein, 417 aa, Rhodococcus kyotonensis
  misc_feature (1)..(417): tr|A0A177YKK0|A0A177YKK0_9NOCA Queuine tRNA-ribosyltran sferase OS=Rhodococcus kyotonensis OX=398843 GN=tgt PE= 3 SV=1
MRVAPKVVPVSAPNDPFFSIGTRIEDRLGRTGTIHTPHGDIATPAFIAVGTKATVKAVLPEAMKELGAQAVLANAYHLYLQPGPDIVDEAGGLGKFMNWDGPTFTDSGGFQVMSLGVGFKKVISMDASRVESDDVIAEGKERLAHVDDDGVTFKSHLDGSRHRFTPEVSMQIQHQLGADIMFAFDELTTLMNTRGYQELSVDRTHEWAKRCVAEHERLTAERVGKPYQALFGVVQGAQYEDLRRKAASGLETIEGETGRGFDGYGIGGALEKQNLGTITRWVNEELPEHKPRHMLGISEPDDFFTAIENGADTFDCVNPSRVARNAAIYVPTGRFNINTARFKRDFTPIDENCDCYTCAHYTKAYIHHLFKAKEMLASTLCTIHNERFTVKLVDDIRASIEQGRFEEFKKEFLGRFY

SEQ ID NO: 60120 - protein, 422 aa, Rhodococcus kyotonensis
  misc_feature (1)..(422): tr|A0A239FD95|A0A239FD95_9NOCA Queuine tRNA-ribosyltran sferase OS=Rhodococcus kyotonensis OX=398843 GN=tgt PE= 3 SV=1
MGGAPKVGPVSAPNDPFFTIGTRLDDRLGRTGTIHTPHGDIATPAFIAVGTKATVKAVLPEAMKELGAQAVLANAYHLYLQPGPDIVDEAGGLGKFMNWDGPTFTDSGGFQVMSLGVGFKKVISMDATRVESDDVIAEGKERLAHVDDDGVTFKSHLDGSRHRFTPEVSMQIQHQLGADIMFAFDELTTLMNTRGYQELSVDRTQAWARRCVLEHERLTAERVGKPYQALFGVVQGAQYEDLRRKAAHDLETIEGETGRGFDGYGIGGALEKQNLGTITRWVNEELPEHKPRHMLGISEPDDFFTAIENGADTFDCVNPSRVARNAAIYVPTGRFNINTAKHRRDFTPIDENCDCYTCANYTRAYIHHLFKAKEMLASTLCTIHNERFTVKLVDDIRASIEQHRFHEFKEEFLGRFYSAQRS

SEQ ID NO: 60121 - protein, 410 aa, Rhodococcus maanshanensis
  misc_feature (1)..(410): tr|A0A1H7IA29|A0A1H7IA29_9NOCA Queuine tRNA-ribosyltran sferase OS=Rhodococcus maanshanensis OX=183556 GN=tgt P E=3 SV=1
MSQSFFTLGTRLPGRLGRTGTIHTPHGEIKTPAFIAVGTNATVKAVLPETMKDLGTQAVLANAYHLYLQPGPDIVDEAGGLGRFMNWPGPTFTDSGGFQVMSLGVGFKKVLSMDSVGVQSDDVIAVGKERLAHVDDDGVTFKSHRDGSRHRFTPEISMSIQHRLGADIIFAFDELTTLFNTRGYQEESVERTQAWAVRCIAEHERLTAERSHRPYQALFGVVQGAQYEDLRRKACRGLESIVGETGNGFDGYGIGGALEKQNLGTIVRWCNEELPEHKPRHLLGISEPDDLFVAIENGADTFDCVNPSRVARNAAIYTTTGRFNINTSRFRRDYNPIDDECDCYTCKNYSRAYLHHLFKSKEMLSSTLATIHNERFTIRLVDRIRESIDGGYFDELKSETLGRFYATSRV

SEQ ID NO: 60122 - protein, 414 aa, Rhodococcus opacus; identical to SEQ ID NO: 60115
  misc_feature (1)..(414): tr|A0A2S8JE05|A0A2S8JE05_RHOOP Queuine tRNA-ribosyltran sferase OS=Rhodococcus opacus OX=37919 GN=tgt PE=3 SV=1

SEQ ID NO: 60123 - protein, 414 aa, Rhodococcus opacus
  misc_feature (1)..(414): tr|A0A3A9TRP1|A0A3A9TRP1_RHOOP Queuine tRNA-ribosyltran sferase OS=Rhodococcus opacus OX=37919 GN=tgt PE=3 SV=1
MNAVVPTPPDPFFTVGTRLDGQLGRTGTIHTPHGDIATPSFVAVGTKATVKAVLPESMKELGAQSLLANAYHLYLQPGPDIVDEAGGLGKFMNWDGPTFTDSGGFQVMSLGVGFKKVLAMEAVGVRSDDVIAKGKERLATVDDDGVTFKSHLDGSRHRFTPEVSMQIQHQLGADIMFAFDELTTLLNTRGYQERSVERTQAWAVRCIAEHEKLTAERSHRPYQALFGVVQGAQYEDLRRQACRGLESITGESGRGFDGYGIGGALEKQNLGTIVRWCNEELPEHKPRHMLGISEPDDFFVAIENGADTFDCVNPSRVARNAAIYHPDGRFNINTSRFRRDFTPIDENCDCYTCANYTSAYIHHLFKAKEMLASTLCTIHNERFTVRLVDQIRASIEGGYFDEFKADTLGRFYRT

SEQ ID NO: 60124 - protein, 414 aa, Rhodococcus pyridinivorans
  misc_feature (1)..(414): tr|A0A0V9UFW1|A0A0V9UFW1_9NOCA Queuine tRNA-ribosyltran sferase OS=Rhodococcus pyridinivorans KG-16 OX=1441730 GN=tgt PE=3 SV=1
MPTPRDPFFTVGARLDNGLGRTGTIHTPHGDIRTPAFVPVGTKATVKAVLPETMAELGSQALLANAYHLYLQPGSDIVDEAGGLGKFMNWPGPTFTDSGGFQVMSLGAGFKKVIAMESVGVQNDDVIAKGKERLAHVDDDGVTFKSHLDGSRHRFTPEVSMRIQHELGADIMFAFDELTTLMNTRGYQERSLERTQAWAVRCIAEHEKLTAERAHRPYQALFGVVQGAQYEDLRRQACRGLESIVGETGRGFDGYGIGGALEKHNLGTIVRWCTEELPEHKPRHLLGISEPDDIFVAVEHGVDTFDCVNPSRVARNAAIYHPDGRFNINTSRHRRDFTPIDENCDCYTCRNYTRAYIHHLFKAKEMLASTLCTIHNERFTVRLVDDIRTNMENGTLAEFKAETLGRFYASRRQV

SEQ ID NO: 60125 - protein, 419 aa, Rhodococcus pyridinivorans
  misc_feature (1)..(419): tr|V9XK31|V9XK31_9NOCA Queuine tRNA-ribosyltransferase OS=Rhodococcus pyridinivorans SB3094 OX=1435356 GN=tgt PE=3 SV=1
MTDSSIPTPPDPFFTVGARLDNGLGRTGTIHTPHGDIRTPAFVPVGTKATVKAVLPEMMAELGSQALLANAYHLYLQPGSDIVDEAGGLGKFMNWPGPTFTDSGGFQVMSLGAGFKKVIAMESVGVQNDDVIAKGKERLAHVDDDGVTFKSHLDGSRHRFTPEVSMRIQHELGADIMFAFDELTTLMNTRGYQERSLERTQAWAVRCIAEHEKLTAERARRPYQALFGVVQGAQYEDLRRQACRGLESIVGETGRGFDGYGIGGALEKHNLGTIVRWCTEELPEHKPRHLLGISEPDDIFVAVEHGVDTFDCVNPSRVARNAAIYHPDGRFNINTSRHRRDFTPIDENCDCYTCRNYTRAYIHHLFKAKEMLASTLCTIHNERFTVRLVDDIRANMENGTLAEFKAETLGRFYASRCRA

SEQ ID NO: 60126 - protein, 379 aa, Rhodococcus qingshengii
  misc_feature (1)..(379): tr|A0A4R6A171|A0A4R6A171_9NOCA Queuine tRNA-ribosyltran sferase OS=Rhodococcus qingshengii OX=334542 GN=tgt PE= 3 SV=1
MTAIRYEFIKTCKQTGARLGRVHTPHGSFDTPAFMPVGTLATVKTMSPEDLKEMGAGIILSNTYHLWLRPGNEIIKEAGGLHKFMNWDRAILTDSGGFQVFSLSEFRKIEEEGVHFRNHMSGEKLFLSPEKAMEIQNDLGSDIMMAFDECPPFPATYEYMQKSVERTSRWAERCLNAHQRPNDQGLFGIVQGGEFEELRKQSAKDLVSLDFPGYAVGGLSVGEPKDVMNRVLEFTTPLLPTDKPRYLMGVGSPDSLIDGAIRGIDMFDCVLPTRIARNGTLMTSTGRLVVKNAKFAKDFGPLDPDCDCYTCRNYSRAYIRHLIKCDETFGIRLTSYHNLYFLLRLMEKVRQAIREDRLGDFREEFFERYGFNKPNAKNF

SEQ ID NO: 60127 - protein, 429 aa, Rhodococcus qingshengii; identical to SEQ ID NO: 60105
  misc_feature (1)..(429): tr|A0A069JGS0|A0A069JGS0_9NOCA Queuine tRNA-ribosyltran sferase OS=Rhodococcus qingshengii OX=334542 GN=tgt PE= 3 SV=1

SEQ ID NO: 60128 - protein, 415 aa, Rhodococcus rhodnii
  misc_feature (1)..(415): tr|R7WID5|R7WID5_9NOCA Queuine tRNA-ribosyltransferase OS=Rhodococcus rhodnii LMG 5362 OX=1273125 GN=tgt PE=3 SV=1
MTDSAASPAPADPFFTIGTRLDDRAGRTGTIHTPHGDITTPSFVAVGTKATVKAVLPESMRDLGAQSLLANAYHLYLQPGPDIVDEAGGLGRFMNWDGPTFTDSGGFQVMSLGVGFKKVLAMEAVGVRSDDVIAKGKERLATVDEDGVTFKSHLDGSRHRFTPEVSMGIQHQLGADIIFAFDELTTLMNTREYQERSVERTQAWAVRCIAEHEKLTAQRAHKPYQALFGVVQGAQYEDLRRQACRGLESIVGETGRGFDGYGIGGALEKQNLGTIVGWCTDELPEHKPRHLLGISEPDDFFVAVENGIDTFDCVNPSRVARNAAIYHPDGRFNINTSRFRRDFTPIDDECDCYTCRHYTRAYIHHLFKAKEMLASTLCTIHNERFTVRLVDDIRRSIDSGDYDAFKDETLGRFYR

SEQ ID NO: 60129 - protein, 416 aa, Rhodococcus rhodochrous; identical to SEQ ID NO: 58182
  misc_feature (1)..(416): tr|A0A379MHX5|A0A379MHX5_RHORH Queuine tRNA-ribosyltran sferase OS=Rhodococcus rhodochrous OX=1829 GN=tgt PE=3 SV=1

SEQ ID NO: 60130 - protein, 414 aa, Rhodococcus rhodochrous
  misc_feature (1)..(414): tr|A0A385LIA5|A0A385LIA5_RHORH Queuine tRNA-ribosyltran sferase OS=Rhodococcus rhodochrous OX=1829 GN=tgt PE=3 SV=1
MPTPPDPFFTVGARLDNGLGRTGTIHTPHGDIRTPAFVPVGTKATVKAVLPETMAELGSQALLANAYHLYLQPGSDIVDEAGGLGKFMNWPGPTFTDSGGFQVMSLGAGFKKVIAMESVGVQNDDVIAKGKERLAHVDDDGVTFKSHLDGSRHRFTPEVSMRIQHELGADIMFAFDELTTLMNTRGYQERSLERTQAWAVRCIAEHEKLTAERAHRPYQALFGVVQGAQYEDLRRQACRGLESIVGETGRGFDGYGIGGALEKHNLGTIVRWCTEELPEHKPRHLLGISEPDDIFVAVEHGVDTFDCVNPSRVARNAAIYHPDGRFNINTSRHRRDFTPIDENCDCYTCRNYTRAYIHHLFKAKEMLASTLCTIHNERFTVRLVDDIRANMENGTLAEFKAETLGRFYASRRQA

SEQ ID NO: 60131 - protein, 421 aa, Rhodococcus ruber
  misc_feature (1)..(421): tr|A0A385HGY1|A0A385HGY1_9NOCA Queuine tRNA-ribosyltran sferase OS=Rhodococcus ruber OX=1830 GN=tgt PE=3 SV=1
MTDPSTTASAVPTPPDPFFTVGTRLDNGLGRTGTIHTPHGNIHTPAFVGVGTKATVKAVLPEAMKELGAQALLANAYHLYLQPGSDIVDEAGGLGKFMNWDGPTFTDSGGFQVMSLGVGFKKVLAMDAVGVRSDDVIAEGKERLAHVDDDGVTFKSHLDGSRHRFTPEASMRIQHQLGADIIFAFDELTTLMNTRGYQERSVERTQAWAVRCIAEHEKLTAQRAHRPYQALFGVVQGAQYEDLRRQACRGLESVVGESGRGFDGYGIGGALEKQNLGTIVRWCTEELPEHKPRHLLGISEPDDMFVAIEHGVDTFDCVNPSRVARNAAIYHPDGRFNINTSRFRRDFTPIDEDCDCYTCRHYTRAYIHHLFKAKEMLASTLCTIHNERFTVRLVDDIRAAVDGGNFEEHKAETLSRFYARR

SEQ ID NO: 60132 - protein, 421 aa, Rhodococcus ruber
  misc_feature (1)..(421): tr|A0A098BQ55|A0A098BQ55_9NOCA Queuine tRNA-ribosyltran sferase OS=Rhodococcus ruber OX=1830 GN=tgt PE=3 SV=1
MTDPSTTASAVPTPPDPFFTVGTRLDNGLGRTGTIHTPHGDIHTPAFVGVGTKATVKAVLPEAMKELGAQALLANAYHLYLQPGSDIVDEAGGLGKFMNWDGPTFTDSGGFQVMSLGVGFKKVLAMDAVGVQSDDVIAEGKERLAHVDDDGVTFKSHLDGSRHRFTPEASMRIQHQLGADIIFAFDELTTLMNTRGYQERSVERTQAWAVRCIAEHEKLTAQRAHRPYQALFGVVQGAQYEDLRRQACRGLESVVGESGRGFDGYGIGGALEKQNLGTIVRWCTEELPEHKPRHLLGISEPDDMFVAIEHGVDTFDCVNPSRVARNAAIYYPDGRFNINTSRFRRDFTPIDEDCDCYTCRHYTRAYIHHLFKAKEMLASTLCTIHNERFTVRLVDDIRAAVDGGYFEEHKAETLGRFYARR

SEQ ID NO: 60133 - protein, 421 aa, Rhodococcus sp.
  misc_feature (1)..(421): tr|A0A4P8Q3C3|A0A4P8Q3C3_9NOCA Queuine tRNA-ribosyltran sferase OS=Rhodococcus sp. SGAir0479 OX=2567884 GN=tgt PE=3 SV=1
MSEVVPSPPDPFFTVGTRLPDKLGRTGTIHTPHGDIRTPAFIAVGTKATVKAVLPEAMKDLGAQAVLANAYHLYLQPGPDIVDEAGGLGRFMNWDGPTFTDSGGFQVMSLGVGFKKVLAMEAVGVQSDDVIAAGKERLAHVDDDGVTFKSHLDGSPHRFTPEVSMQIQHQLGADIMFAFDELTTLLNTRGYQEQSVERTQAWAVRCIAEHEKLTAERAHRPYQALFGVVQGAQYEDLRRQAARGLESITGVSGRGFDGYGIGGALEKQNLGTIVRWVNEELPEHKPRHMLGISEPDDMFVAIENGADTFDCVNPSRVARNAAIYHPDGRFNINTARFRRDFTPIDDECDCYTCAHYTRAYIHHLFKAKEMLASTLCTIHNERFTVRLVDRIRESIEGGYFEEYKRETLGRFYGKRPSTSGE

SEQ ID NO: 60134 - protein, 410 aa, Rhodococcus sp.
  misc_feature (1)..(410): tr|A0A285E0S6|A0A285E0S6_9NOCA Queuine tRNA-ribosyltran sferase OS=Rhodococcus sp. OK270 OX=1882814 GN=tgt PE=3 SV=1
MSQPFFTLGTRLPGRLGRTGTIHTPHGEIQTPAFIAVGTNATVKAVLPETMKELGTQAVLANAYHLYLQPGPDIVDGAGGLGRFMNWPGPTFTDSGGFQVMSLGVGFKKVLSMDSVGVQSDDVIAVGKERLAHVDDDGVTFKSHRDGSRHRFTPEISMSIQHRLGADIIFAFDELTTLFNTRGYQEESVERTQAWAVRCIAEHERLTAERSHRPYQALFGVVQGAQYEDLRRQACRGLESIVGESGTGFDGYGIGGALEKQNLGTIVRWCNEELPEHKPRHLLGISEPDDLFVAIENGADTFDCVNPSRVARNAAIYTTTGRFNINTSRFRRDYNPIDDECDCYTCKNYSRAYLHHLFKSKEMLSSTLATIHNERFTIRLVDRIRESIEGGYFDDLKSETLGRFYATSRV

SEQ ID NO: 60135 - protein, 421 aa, Rhodococcus triatomae
  misc_feature (1)..(421): tr|M2VK20|M2VK20_9NOCA Queuine tRNA-ribosyltransferase OS=Rhodococcus triatomae BKS 15-14 OX=1278078 GN=tgt PE =3 SV=1
MSSNDDAPVPAPNDPFFTVGTRIPGQLGRTGTIHTPHGDIRTPAFIAVGTNATVKAVLPETIREAGAQAVLANAYHLYLQPGPDVVDEAGGLGRFMNWSGPTFTDSGGFQVMSLGVGFKKVLAMEAVGVQSDDVIAQGKERLAHVDDDGVTFKSHRDGSRHRFTPEVSMGIQHQLGADIIFAFDELTTLFNTRAYQEESVQRTQAWAVRCIAEHERLTAERRHRPYQALFGVVQGAQYEDLRREACRGLESIVGETGRGFDGYGIGGALEKQNLGTIVRWCNEELPEHKPRHLLGISEPDDLFTAIENGADTFDCVNPSRVARNAAIYTENGRFNINTSRFRRDFNPIDEHCDCYTCRNYSRAYIHHLFKAKEMLASTLATIHNERFTIRLVDRIRDSIDGGYFDDLRDRTLSSFYATARA

SEQ ID NO: 60136 - protein, 427 aa, Rhodococcus triatomae
  misc_feature (1)..(427): tr|A0A1G8I919|A0A1G8I919_9NOCA Queuine tRNA-ribosyltran sferase OS=Rhodococcus triatomae OX=300028 GN=tgt PE=3 SV=1
MSPAAVPDSSATPTSPPPTPSDPFFTIGTRLDGQLGRTGVIHTPHGDIRTPSFVAVGTKATVKAVLPESMKELGAQSLLANAYHLYLQPGPDIVDEAGGLGAFMNWDGPTFTDSGGFQVMSLGVGFKKVLAMEHVGVRSDEVIAAGKERLATVDDDGVTFKSHLDGSRHRFTPEVSMQIQHQLGADIIFAFDELTTLFNTREYQEQSVERTQAWAVRCIAEHEKLTAARTHRPYQALFGVVQGAQYEDLRRRACRGLESLTGETGRGFDGYGIGGALEKDNLGTIVRWCSEELPEHKPRHMLGISEPDDFFVAVENGADTFDCVNPSRVARNAAIYHPDGRFNINTSRFRRDFTPIDENCDCYTCAHYTRAYLHHLFKAKEMLASTLCTIHNERFTVRLVDDIRDSIDAGRFDEFKAETLGRFYAGR

SEQ ID NO: 60137 - protein, 425 aa, Rhodococcus tukisamuensis
  misc_feature (1)..(425): tr|A0A1G6MRL9|A0A1G6MRL9_9NOCA Queuine tRNA-ribosyltran sferase OS=Rhodococcus tukisamuensis OX=168276 GN=tgt P E=3 SV=1
MNSAVQPQAGVGPAKRPESIFTIGTRLEDRLGRTGTVHTPHGDIATPSFVVVGTKATVKAVLPESVKELGTQSVLANAYHLYLQPGADIVDAAGGLGKFMNWDGPTFTDSGGFQVMSLGVGFRKVLAMESVGVQSDDVIADGKERLATVDDDGVTFKSHLDGSRHRFTPEVSMQIQHQLGADIMFAFDELTTLLNTRGYQERSVQRTQEWAIRCIAEHEKLTAERADKPYQALFGVVQGAQYEDLRRQACRGLESIEGENGYGFDGYGIGGALEKQNLGTIVRWCNEELPEHKPRHMLGISEPDDFFVAIENGADTFDCVNPSRVARNAAIYVRSGRFNINTSRFRRDFTPIDDECDCYTCANYTRAYIHHLFKAKEMLASTLCTIHNERFTVKLVDDIRASIEGGYFHDFKAETLGRFYGPDKP

SEQ ID NO: 60138 - protein, 414 aa, Rhodococcus wratislaviensis
  misc_feature (1)..(414): tr|X0QAY3|X0QAY3_9NOCA Queuine tRNA-ribosyltransferase OS=Rhodococcus wratislaviensis NBRC 100605 OX=1219028 G N=tgt PE=3 SV=1
MNAVVPTPPDPFFTVGTRLDGQLGRTGTIHTPHGDIATPSFVAVGTKATVKAVLPESMKELGAQSLLANAYHLYLQPGPDIVDEAGGLGKFMNWDGPTFTDSGGFQVMSLGVGFKKVLAMEAVGVRSDDVIAKGKERLATVDDDGVTFKSHLDGSRHRFTPEVSMQIQHQLGADIMFAFDELTTLLNTRGYQEQSVERTQAWAVRCIAEHEKLTAERSHRPYQALFGVVQGAQYEDLRRQACRGLESITGESGRGFDGYGIGGALEKQNLGTIVRWCNEELPEHKPRHMLGISEPDDFFVAIENGADTFDCVNPSRVARNAAIYHPDGRFNINTSRFRRDFTPIDENCDCYTCANYTSAYIHHLFKAKEMLASTLCTIHNERFTVRLVDQIRASIEGGYFGEFKADTLGRFYRT

SEQ ID NO: 60139 - protein, 414 aa, Rhodococcus wratislaviensis
  misc_feature (1)..(414): tr|A0A402C1C6|A0A402C1C6_9NOCA Queuine tRNA-ribosyltran sferase OS=Rhodococcus wratislaviensis OX=44752 GN=tgt PE=3 SV=1
MNAVVPTPPDPFFTVGTRLDGQLGRTGTIHTPHGDIATPSFVAVGTKATVKAVLPESMKELGAQSVLANAYHLYLQPGPDIVDEAGGLGKFMNWDGPTFTDSGGFQVMSLGVGFKKVLAMEAVGVRSDDVIAKGKERLATVDDDGVTFKSHLDGSRHRFTPEVSMQIQHQLGADIMFAFDELTTLLNTRGYQEQSVERTQAWAVRCIAEHEKLTAERSHRPYQALFGVVQGAQYEDLRRQACRGLESITGESGRGFDGYGIGGALEKQNLGTIVRWCNEELPEHKPRHMLGISEPDDFFVAIENGADTFDCVNPSRVARNAAIYHPDGRFNINTSRFRRDFTPIDENCDCYTCANYTRAYIHHLFKAKEMLASTLCTIHNERFTVRLVDQIRAGIEGGYFEEFKAETLGRFYRT

SEQ ID NO: 60140 - protein, 370 aa, Rhodocyclaceae bacterium
  misc_feature (1)..(370): tr|A0A5C7KDL7|A0A5C7KDL7_9RHOO Queuine tRNA-ribosyltran sferase OS=Rhodocyclaceae bacterium OX=1898103 GN=tgt P E=3 SV=1
MKYELITTDGAARRGRLTLAHGVVETPVFMPVGTYGTVKAMTPQSLTEIGAQICLGNTFHLWLRPGLEVIREFGGLHRFMGWDKPILTDSGGFQVFSLGELRKITEEGVKFSSPIDGAKLFLTPEESMRIQHALNSDIVMIFDECTPYPATRDEAAKSMRLSMRWAQRSRDEHNRLGNANALFGIVQGGMYEDLRDESLAGLDQIGFDGMAIGGLSVGEPKEDMARILAHTAPRLPTHKPRYLMGVGTPEDLVNAVQAGIDMFDCVMPTRNARNGHLFTRFGDVKIKNAAHRHDTRPLDESCDCYTCKNFSRAYLHHLFRAGEILGSMLNTIHNLHYYQVVMRELRAAIESGTLAAHVARFHTDRAQEAR

SEQ ID NO: 60141 - protein, 369 aa, Rhodocyclaceae bacterium
  misc_feature (1)..(369): tr|A0A524BBT2|A0A524BBT2_9RHOO Queuine tRNA-ribosyltran sferase OS=Rhodocyclaceae bacterium OX=1898103 GN=tgt P E=3 SV=1
MQFELLKTDGAARRGTLTLAHGQIQTPVFMPVGTYGTVKAMTPASLAEIGAQVCLGNTFHLWLRPGLDVIKAHNGLHDFMQWHKPILTDSGGFQVFSLGALRKITEEGVKFSSPHDGAKLFLSPEISMQIQHVLNSDIVMIFDECTPYPATREEAAKSMRLSMRWARRSRDEHDKLENRNALFGIVQGGMYEDLRDESLAGLDDIGFDGMAIGGLSVGEPKEDMVRILAHTAPKLPTHKPRYLMGVGTPEDLVRSVKAGIDMFDCVMPTRNARNGHLFTRFGDIKIKNARHRTDTGPLDPSCTCYTCQNFSRSYLHHLFRSGEILGGMLNTIHNLHFYQTIMAEMRAAIEAGTLEQWSAEFARTRNSGE

SEQ ID NO: 60142 - protein, 370 aa, Rhodocyclales bacterium
  misc_feature (1)..(370): tr|A0A1G3HMG4|A0A1G3HMG4_9RHOO Queuine tRNA-ribosyltran sferase OS=Rhodocyclales bacterium RIFCSPLOWO2_02_FULL_ 63_24 OX=1802018 GN=tgt PE=3 SV=1
MNFQLLATDGAARRGVLRLAHGAAPTPTFMPVGTYGTVKAMSPDELAGIGASIVLGNTFHLWLRPGLEVIVAHGGLHRFMGWNGPILTDSGGFQVFSLGDLRKISEEGVKFASPINGDRLFLTPEESMRIQHVLNSDVVMIFDECTPYPADLPTAAESMRLSLRWARRSRDEHDRLENSNALFGIVQGGMHESLRDESLAELVDIGFDGFAIGGLSVGEPKEEFSRILAHTAPRLPVDKPRYLMGVGTPEDLVYAVGQGIDMFDCVMPTRNARNGWLFTRYGDVKIKNAQHKSDTRPLDETCGCYTCRHFTRAYLHHLHRVGEILGARLNTIHNLFYYQTLMAEMRAAIEQGDFAGFSARFNRGRAGEQV

SEQ ID NO: 60143 - protein, 368 aa, Rhodocyclales bacterium
  misc_feature (1)..(368): tr|A0A1G3HSV3|A0A1G3HSV3_9RHOO Queuine tRNA-ribosyltran sferase OS=Rhodocyclales bacterium GWA2_65_20 OX=180201 7 GN=tgt PE=3 SV=1
  misc_feature (305)..(307): Xaa can be any naturally occurring amino acid
MQFDLLATAGSARRGRLTLAHGVVETPVFMPVGTYGTVKAMAPNELVDIGARIVLGNTFHLWLRPGLDIVAAHGGLHRFMGWDGPILTDSGGFQVFSLGDLRKITEDGVKFASPLNGDRLFMRPEDSMQIQHVLNSDIVMIFDECTPYPATEREAADSMRLSLRWARRSRAEHDRLKNANALFGIVQGGMYEDLRDESLAGLAAIGFDGYAIGGLSVGEPKEDMVRILAHTAPRLPPDRPRYLMGVGTPEDLVHAVAQGIDMFDCVLPTRNARNGWLFTRHGDVKIKNACHKADTRPLDATCGCXXXRNFTRAYLHHLHRAHEILGARLNTIHNLFYYQALMAELRAAIAAGGLDAYIEEFERRRRGG

SEQ ID NO: 60144 - protein, 399 aa, Rhodoferax antarcticus
  misc_feature (1)..(399): tr|A0A1Q8YIY1|A0A1Q8YIY1_9BURK Queuine tRNA-ribosyltran sferase OS=Rhodoferax antarcticus ANT.BR OX=1111071 GN= tgt PE=3 SV=1
MLNFDLLQTDPAQGDYAGSHARRAALTLSHGVVQTPIFMPVGTYGTVKGVMPASLEDMGAKIILGNTFHLWMRPGQDVMRSFGGLHGFERWDKPILTDSGGFQVWSLGAMRKITEQGVHFSSPVNGDKLFMSPEVSMQIQTTLNSDIAMQLDECTPYLSVEPKTKGQITTEREARTSMEMSLRWAKRSQDEFARLENPNALFGIVQGGMFEHLRQESLDALVAMNFPGYAVGGVSVGEPKDEMLRVMAHSPHRLPAHKPRYLMGVGTPEDLVEGVVQGVDMFDCVMPTRNARNGTLFTRFGDLKIRNARHKTDHGPLDTSCTCYACKGQTRPDGTVSGGFSRAYLHHLDRCAEMLSPMLSSIHNLHYYLNLMTEIRTSLDTSSFGAFRAQFKADRARGV

SEQ ID NO: 60145 - protein, 401 aa, Rhodoferax fermentans
  misc_feature (1)..(401): tr|A0A1T1ATF5|A0A1T1ATF5_RHOFE Queuine tRNA-ribosyltran sferase OS=Rhodoferax fermentans OX=28066 GN=tgt PE=3 S V=1
MLTFDLLHTDPANADTGYAGSHARRGTLTLNHGVVQTPIFMPVGTYGTVKGVMPSSLEDMGAQIILGNTFHLWMRPGQDVMQSFGGLHGFERWNKPILTDSGGFQVWSLGAMRKITEQGVHFSSPVNGDKLFMSPEVSMQIQTTLNSDIVMQLDECTPYLSVEPKTKGQITTEREARTSMEMSLRWAKRSQDEFARLENPNALFGIVQGGMFEHLRQESLEALVAMNFPGYAVGGVSVGEPKDEMLRIMAHSPHRLPTNKPRYLMGVGTPEDLVEGVAQGVDMFDCVMPTRNARNGTLFTRYGDLKIRNARHKTDHGPLDPTCTCYACKGVTRPDGSVSGGFSRAYLHHLDRCAEMLSPMLSSIHNLHYYLNLMAEIRASLESGTFGAFRAQFKADRARGV

SEQ ID NO: 60146 - protein, 405 aa, Rhodoferax ferrireducens
  misc_feature (1)..(405): tr|Q221C6|Q221C6_RHOFT Queuine tRNA-ribosyltransferase OS=Rhodoferax ferrireducens (strain ATCC BAA-621 / DSM 15236 / T118) OX=338969 GN=tgt PE=3 SV=1
MLQFDLLQTDPSSHARRGRLTLNHGVVQTPIFMPVGTYGTVKGVTPRSLEDMDAQIILGNTFHLWMRPGLDVMAQFGGLHQFEKWNKPILTDSGGFQVWSLGAMRKITEDGVHFSSPVNGDKLFMSPEVSIQIQTTLNSDIAMQLDECTPYLSVEPKTKGQITTEDEARASMEMSLRWAQRSRAEFARLENPNALFGIVQGGMFEGLRQESLEQLVAMDFPGYAVGGVSVGEPKDEMLRIMAHTPHRLPAHKPRYLMGVGTPEDLIEGVAQGVDMFDCVMPTRNARNGTFFTRYGDLKIRNARHKMDQRPLDETCTCYACAGSATHANTPDTGAGRSWAQGGRGGFSRAYLHHLDRCGEMLGPMLSSIHNLHYYLNLMTEVRAALDAGTFGAFRQQFKANRARGV

SEQ ID NO: 60147 - protein, 401 aa, Rhodoferax ferrireducens
  misc_feature (1)..(401): tr|A0A1W9KTR2|A0A1W9KTR2_9BURK Queuine tRNA-ribosyltran sferase OS=Rhodoferax ferrireducens OX=192843 GN=tgt PE =3 SV=1
MLHFDLLATDPVNLASGYAGSHARRGTLTLNHGVVQTPIFMPVGTYGTVKGVMPSSLEDMGAQIILGNTFHLWMRPGAEVMRSFGGLHGFERWDKPILTDSGGFQVWSLGAMRKITEQGVHFSSPVNGDKLFMSPEVSMQIQTTLHSDIVMQLDECTPYLSVEPKTKGQITTEREARVSMEMSLRWAKRSQDEFARLENPNALFGIVQGGMFEHLRQESLDALVAMNFPGYAVGGVSVGEPKDEMLRIMAHSPHRLPAHKPRYLMGVGTPEDLVEGVAQGVDMFDCVMPTRNARNGTLFTRFGDLKIRNARHKTDHGPLDATCTCYTCKGQTRPDGSVSGGFSRAYLHHLDRCAEMLSPMLSSIHNLHYYLNLMTEIRAALEAGTFGAFRAQFKADRARGV

SEQ ID NO: 60148 - protein, 390 aa, Rhodoferax koreense
  misc_feature (1)..(390): tr|A0A1P8JR13|A0A1P8JR13_9BURK Queuine tRNA-ribosyltran sferase OS=Rhodoferax koreense OX=1842727 GN=tgt PE=3 S V=1
MLQFELLTTDPTSHARRGTLTLNHGVVQTPIFMPVGTYGTVKGVMPRSLEEMGAQIILGNTFHLWMRPGREVMQSFGGLHGFEKWNKPILTDSGGFQVWSLGAMRKITEEGVHFASPVNGDKLFMSPEVSMQIQTGLNSDIVMQLDECTPYETKGHLTTEAEARKSMEMSLRWAQRSKDEFARLENPNALFGIVQGGMFKHLRQESLEALVAMDFPGYAVGGVSVGEPKDEMLDIMAHTPHRLPAHKPRYLMGVGTPEDLVQGVADGVDMFDCVMPTRNARNGTIFTRYGDLKLRNARHKTDHQPLDATCTCHACAGTSGVSWADGGREGFSRAYLHHLDRCGEMLGPMLTTVHNLHYYLNLMREVREALDAGTFAAFRAQFKADRARGV

SEQ ID NO: 60149 - protein, 401 aa, Rhodoferax saidenbachensis
  misc_feature (1)..(401): tr|A0A1P8K666|A0A1P8K666_9BURK Queuine tRNA-ribosyltran sferase OS=Rhodoferax saidenbachensis OX=1484693 GN=tgt PE=3 SV=1
MLKFELLKTDPAEGSYLGSHARRGTLTLNHGVVQTPIFMPVGTYGTVKGVMPQSLHDMGAQIILGNTFHLWMRPGLDVMEKFGGLHQFEKWDKPILTDSGGFQVWSLGEMRKISEEGVKFASPVNGDKLFLTPEISMQIQTTLNSDIVMQFDECTPYLSVEPKTKGLVTTEREARSSMELSLRWAKRCQEEFARLNNPNALFGIVQGGMHEHLRDESLAGLEALDFPGIAVGGLSVGEPKEDMMRVLKHIGPKLPKHKPHYLMGVGTPEDLIAGVQNGIDMFDCVMPTRNARNGTLFSRYGDLKIRNARHKSDPQPLDVTCTCHACAGKSGVSWADGGRDGFSRAYLHHLDRCGEMLGPMLASIHNLHYYLNLMQEVRDALDAGTFGAFVNQFHTDRARGV

SEQ ID NO: 60150 - protein, 396 aa, Rhodoferax sp.
  misc_feature (1)..(396): tr|A0A515DFQ5|A0A515DFQ5_9BURK Queuine tRNA-ribosyltran sferase OS=Rhodoferax sp. CHu59-6-5 OX=2509614 GN=tgt P E=3 SV=1
MLQFELLKTDDAQGDYAGSHARRGRLTLNHGVVETPIFMPVGTYGTVKGVLPRSLEEMGAQIILGNTFHLWMRPGQDVMASFGGLHQFEKWSRPILTDSGGFQVWSLGEMRRITEEGVHFASPVNGDKLFMSPEVSMQIQTLLNSDIAMQLDECTPYETKGHITTEREARQSMEMSLRWATRSRDEFQRLQNPNALFGIVQGGMFENLREESLEQLVAMDFPGYAIGGVSVGEPKDEMLRIMAHTPHKLPAHKPRYLMGVGTPEDLVEGVAQGVDMFDCVMPTRNARNGTLFTRFGDLKIRNARHKTDHQPLDPSCTCHACAGASGVAWADGGRDGFSRAYQHHLDRCGEMLGPMLASIHNLHYYLNLMREVREALDGGRFGEFVRQFKADRARGV

SEQ ID NO: 60151 - protein, 405 aa, Rhodoferax sp.
  misc_feature (1)..(405): tr|A0A515EK18|A0A515EK18_9BURK Queuine tRNA-ribosyltran sferase OS=Rhodoferax sp. Gr-4 OX=2527691 GN=tgt PE=3 S V=1
MLKFELLATDPATTTPEGSYLGSHARRGRLTLNHGVVQTPIFMPVGTYGTVKGVMPRSLEEMGAQIILGNTFHLWMRPGTEVISQFGGLHDFEKWDKPILTDSGGFQVWSLGEMRKISEEGVKFSSPVNGDKLFLTPEISMQIQRALNSDIAMQFDECTPYLSVEPKTKGQVTTEREARDSMELSLRWAKRCQAEMDRLENPNALFGIVQGGMFEHLRDESLAGLEELDFPGIAVGGLSVGEPKEHMMRVLQHVGPKLPKHKPHYLMGVGTPEDLIAGVQNGIDMFDCVMPTRNARNGTLFSRFGDLKIRNARHKTDKQPLDETCTCHACAGTSGVSWANGGRDGFSRAYLHHLDRCGEMLGPMLASIHNLHYYLNLMQEVRDALDAGRFGAFVKQFHADRARGV

SEQ ID NO: 60152 - protein, 375 aa, Rhodohalobacter barkolensis
  misc_feature (1)..(375): tr|A0A2N0VFG2|A0A2N0VFG2_9BACT Queuine tRNA-ribosyltran sferase OS=Rhodohalobacter barkolensis OX=2053187 GN=tg t PE=3 SV=1
MFTLQKTSSKTKARLGKLTTDHGTIETPIFMPVGTLGTVKAVNQDDLSEKIKAQIILGNTYHLYLRPGNKIIQDAGGLHKFIGWDKPILTDSGGYQIFSLAEIRNLKEKGATFQSHIDGSKHLFTPENVVGTQRILGSDILMILDECPPYPAEFDYVKNSMELTHRWAKRGREEFLKTDPLYGHKQFQFGIVQGGVHKDLRKESSEYMASLDFEGLAIGGLSVGEPTDLMYEISDFNTDYLPENKPRYLMGVGTPANLLQNVAFGIDMFDCVMPTRNARNGMIFTRNGKINVRNAKWKHHHKPLDPDFPSELCQRYNMSYIHHLIRSNEILGLQLTSKHNLTFYLWLMERIREQIKNDTYHEWYSGMMQTVDQKI

SEQ ID NO: 60153 - protein, 375 aa, Rhodohalobacter sp.
  misc_feature (1)..(375): tr|A0A371QK58|A0A371QK58_9BACT Queuine tRNA-ribosyltran sferase OS=Rhodohalobacter sp. SW132 OX=2293433 GN=tgt PE=3 SV=1
MFKLEKTSSSSKARTGILKTDHGSIKTPIFMPVGTVGSVKAVNQDDLADKVKAQIILGNTYHLYLRPGNEIMENAGGLHSFMRWDRPILTDSGGYQIFSLSDNRKLEEEGATFKSHLDGSKHLFTPENVVETQRVLGSDIIMILDECPPYPAEKSYVHESMGLTHRWAKRGREAFLTSKPKYGHSQAQFGIVQGGTFKDLRKESSEYMASLNFEGLAIGGLSVGEPNELMYEITDFNTEHLPEEKPRYLMGVGTPANLLQCVARGVDMFDCVMPTRNARNGMIFTRYGKINLRNAKWKHHHQPLDTDFPSDLCSKYKMSYLHHLFKANELLGLELASKQNLTFYLWLMSEARSRIEDDTFSDWYPGMSETVDKKI

SEQ ID NO: 60154 - protein, 391 aa, Rhodomicrobium udaipurense
  misc_feature (1)..(391): tr|A0A037UZJ8|A0A037UZJ8_9RHIZ Queuine tRNA-ribosyltran sferase OS=Rhodomicrobium udaipurense JA643 OX=858455 G N=tgt PE=3 SV=1
MTQPFSYKLLAQDGAARLGEIATPRGVIRTPAFMPVGTTASVKAVFLDDVKAAGSDIILGNTYHLMLRPGAERIAKLGGLHSFMRWDGPILTDSGGFQVMSLAQLRKLTEKGVTFRSHIDGAMYELTPERSIEVQNLLGSDIQMQFDECTPFPATFGEAESSMRLSLRWAERSLAAFAQYGQPGRALFGIVQGSTFPELRKESAAKLTSMDFHGYSVGGLAVGEGQRAMFDTLDFTTPLLPTNKPRYLMGVGTPADIVGAVERGIDMFDCVMPTRSGRHGQAFTWAGKLNIKNAAHVEDLRPLDETSTCPASRDYSRAYIHHLFRSGEYLAPMILSWANIGFYQELMAAIRKSIAEGTFADVAARVRAVYPSTVDDDAGADAETARSLKSK

SEQ ID NO: 60155 - protein, 391 aa, Rhodomicrobium vannielii
  misc_feature (1)..(391): tr|E3I2T7|E3I2T7_RHOVT Queuine tRNA-ribosyltransferase OS=Rhodomicrobium vannielii (strain ATCC 17100 / ATH 3. 1.1 / DSM 162 / LMG 4299) OX=648757 GN=tgt PE=3 SV=1
MTQPFSYKLLAQDGAARLGEIATPRGVIRTPAFMPVGTTASVKAVFLDDVKAAGSDIILGNTYHLMLRPGAERIAKLGGLHSFMRWDGPILTDSGGFQVMSLAQLRKLTEKGVTFRSHIDGAMYELTPERSIEVQNLLGSDIQMQFDECTPFPATFDEAESSMRLSLRWAERSLAAFAQYGRPGRALFGIVQGSTFPELRRESAAKLTSMDFHGYSVGGLAVGEGQRAMFDTLDFTTPLLPTNKPRYLMGVGTPADIVGAVERGIDMFDCVMPTRSGRHGQAFTWAGKLNIKNAAHIEDLRPLDETSTCPASRDYSRAYIHHLFRSGEYLAPMILSWANIGFYQELMAAIRKSIAEGTFADVAARVRAVYPSTVEDDAGADAEAARSLKSK

SEQ ID NO: 60156 - protein, 376 aa, Rhodonellum psychrophilum
  misc_feature (1)..(376): tr|U5BQ53|U5BQ53_9BACT Queuine tRNA-ribosyltransferase OS=Rhodonellum psychrophilum GCM71 = DSM 17998 OX=11230 57 GN=tgt PE=3 SV=1
MKFQLEFTDPKSKARAGTIKTDHGDIETPIFMPVGTAGSVKAVHQRELTYDVKAQIILGNTYHLYLRPGLDILERAGGLHKFNGWSKPILTDSGGYQVFSLSGTNKITEKGVIFKSHIDGSKHIFSPENVMDIQRVIGADIIMAFDECTPYPCEYVYAQNSMHMTHRWLERCIAQFDSTEGKYGYSQTLFPIVQGSVYKDLRVQSAEFIASCGREGNAIGGLSVGEPAEMMYEMTELVTDILPKDKPRYLMGVGTPANILECIALGVDMFDCVMPTRNARNGMLFTTEGIINIRNEKWKDDFSAIDLGIDSYVSSFYSKAYLRHLVISKEILGAQIASIHNLSFYLWLVGQAREKIKSGEFSSWKNVMVEKVSRRL

SEQ ID NO: 60157 - protein, 381 aa, Rhodopila globiformis
  misc_feature (1)..(381): tr|A0A2S6NI56|A0A2S6NI56_RHOGL Queuine tRNA-ribosyltran sferase OS=Rhodopila globiformis OX=1071 GN=tgt PE=3 SV =1
MNLNCASTERFRFEVRATDGLARAGAIQTAHGPLETPAFMVVGTVGTVKAMTADAVRCTGTQCVLGNTYHLMLRPGAERIAALGGLHRFMDWPGPILTDSGGFQIMSLAALRKIDADGVTFQSHIDGSRHRLTPAICMELQRQFDSTVTMVLDECTAFPATYEDAEASMEMSMRWALSSKEAFTRRPGYGLFGIVQGSTFPDLRLRSVKALKDIGFDGYAVGGLAVGEGQAAMLSTLDITVPQLPADAPRYLMGVGTPDDILGAVQRGIDMFDCVIPTRAGRTARAYTSAGIRNMRNARYADDAGPLDPECPCPACTRHSRAYLHHLFRTQEMLGPMLLTWHNITYYQSLMRGIRQAIQAGGFAAFAAGKRAAWQAGDVLP

SEQ ID NO: 60158 - protein, 372 aa, Rhodopirellula bahusiensis
  misc_feature (1)..(372): tr|A0A2G1WC16|A0A2G1WC16_9PLAN Queuine tRNA-ribosyltran sferase OS=Rhodopirellula bahusiensis OX=2014065 GN=tgt PE=3 SV=1
MFRYELIGTDGGARRGVFHTPRGPVRTPGFMPVGTLGTVKGLTIDQVAATGADMILGNTYHLRLRPGHETVAALGGLHKMCGWDGPILTDSGGFQVFSLGAINKVTEHAATFRSHIDGAKIELTPEHSIEIQQALGSDVAMVLDHVIALPAPMTQVEDALARSIRWAARCRVAADREDQALFAIVQGGLDRTLRQQCATELAAMSFEGYAVGGLSVGEPPEDMYTTTGFTTPHLPVDKPRYLMGVGTPRDLLENIARGIDLFDCVMPTRNGRNALAFTDEGPLKLRNAVHKLDTRPLMEDCPCLACRHSRGYLRHLFVAGEMLGPILLSHHNLMYYGRLMQATRDAIEAGEFEAFKNAKLAGWGHEPFHESV

SEQ ID NO: 60159 - protein, 372 aa, Rhodopirellula baltica
  misc_feature (1)..(372): sp|Q7UWK9|TGT_RHOBA Queuine tRNA-ribosyltransferase OS= Rhodopirellula baltica (strain DSM 10527 / NCIMB 13988 / SH1) OX=243090 GN=tgt PE=3 SV=1
MFRYELIGTDGGARRGVFHTPRGPVRTPGFMPVGTLGTVKGLTIDQVAATGADMILGNTYHLRLRPGHETVAALGGLHKMCGWDGPILTDSGGFQVFSLGAINKVNEHAATFRSHIDGAKIELTPEHSIEIQQALGSDVAMVLDHVIALPAPMTQVEDALARSIRWAARCRIAADREDQALFAIVQGGLDRTLRQQCASELAAMSFEGYAVGGLSVGEPPEDMYTTTGFTTPHLPADKPRYLMGVGTPRDLLENIARGIDLFDCVMPTRNGRNALAFTDEGPLKLRNAVHKLDTRPLMEDCPCLACRHSRGYLRHLFVAGEMLGPILLSHHNLMYYGRLMQATRDAIEAGEFEAFKNAKLAGWGHEPFQETV

SEQ ID NO: 60160 - protein, 372 aa, Rhodopirellula baltica
  misc_feature (1)..(372): tr|K5DFS7|K5DFS7_RHOBT Queuine tRNA-ribosyltransferase OS=Rhodopirellula baltica SH28 OX=993517 GN=tgt PE=3 SV =1
MFRYELIGTDGGARRGVFHTPRGPVRTPGFMPVGTLGTVKGLTIDQVAATGADMILGNTYHLRLRPGHETVAALGGLHKMCGWDGPILTDSGGFQVFSLGAINKVNEHAATFRSHIDGAKIELTPEHSIEIQQALGSDVAMVLDHVIALPAPMTQVEDALARSIRWAARCRIAADREDQALFAIVQGGLDRTLRQQCASELAAMSFEGYAVGGLSVGEPPEDMYTTTGFTTPHLPADKPRYLMGVGTPRDLLENIARGIDLFDCVMPTRNGRNALAFTDEGPLKLRNAVHKLDTRPLMEDCPCLACRHSRGYLRHLFVAGEMLGPILLSHHNLMYYGRLMQATRDAIEAGEFEAFKNAKLAGWGHEPFQESV

SEQ ID NO: 60161 - protein, 356 aa, Rhodopirellula europaea
  misc_feature (1)..(356): tr|M5RZX2|M5RZX2_9PLAN Queuine tRNA-ribosyltransferase OS=Rhodopirellula europaea SH398 OX=1263868 GN=tgt PE=3 SV=1
MFHTPRGPVRTPGFMPVGTLGTVKGLTIDQVAATGADMILGNTYHLRLRPGHETVAALGGLHKMCGWDGPILTDSGGFQVFSLGAINKVNEHAATFRSHIDGAKIELTPEHSIEIQQALGSDVAMVLDHVIALPAPMTKVEDALARSIRWAARCRNAADREDQALFAIVQGGLDRTLRQQCASELAAMSFEGYAVGGLSVGEPPEDMYTTTGFTTPHLPADKPRYLMGVGTPRDLLENIARGIDLFDCVMPTRNGRNALAFTDEGPLKLRNAVHKLDTRPLMEDCPCLACRHSRGYLRHLFVAGEMLGPILLSHHNLMYYGRLMQATRDAIEAGEFEAFKNAKLAGWGHEPFHESV

SEQ ID NO: 60162 - protein, 342 aa, Rhodopirellula europaea
  misc_feature (1)..(342): tr|M2A751|M2A751_9PLAN Queuine tRNA-ribosyltransferase OS=Rhodopirellula europaea 6C OX=1263867 GN=tgt PE=3 SV =1
MPVGTLGTVKGLTIDQVAATGADMILGNTYHLRLRPGHETVAALGGLHKMCGWDGPILTDSGGFQVFSLGAINKVNEHAATFRSHIDGAKIELTPEHSIEIQQALGSDVAMVLDHVIALPAPMTQVEDALARSIRWAARCRNAADREDQALFAIVQGGLDRTLRQQCASELAAMSFEGYAVGGLSVGEPPEDMYTTTGFTTPHLPADKPRYLMGVGTPRDLLENIARGIDLFDCVMPTRNGRNALAFTDEGPLKLRNAVHKLDTRPLMEDCPCLACRHSRGYLRHLFVAGEMLGPILLSHHNLMYYGRLMQATRDAIEAGEFEAFKNAKLAGWGHEPFYESV

SEQ ID NO: 60163 - protein, 374 aa, Rhodopirellula islandica
  misc_feature (1)..(374): tr|A0A0J1EGI9|A0A0J1EGI9_RHOIS Queuine tRNA-ribosyltran sferase OS=Rhodopirellula islandica OX=595434 GN=tgt PE =3 SV=1
MFRYELIGTDGGARRGVFHTPRGPVRTPGFMPVGTLGTVKGLTIDQVAATGADMILGNTYHLRLRPGHETVAALGGLHKMCGWDGPILTDSGGFQVFSLGAINKVTEHAATFRSHIDGAKIELTPEHSIEIQQALGSDVAMVLDHVIALPAPMTQVEDALARSIRWAARCRDAADREDQALFAIVQGGLDRTLRQQCASELAAMSFEGYAVGGLSVGEPPEDMYTTTGFTTPHLPADKPRYLMGVGTPRDLLENIARGIDLFDCVMPTRNGRNALAFTDEGPLKLRNAVHKLDTRPLMEDCPCLACRHSRGYLRHLFVAGEMLGPILLSHHNLMYYGRLMQATRDAIEAGEFESFKNAKLAGWGHEPFRETVAS

SEQ ID NO: 60164 - protein, 372 aa, Rhodopirellula sallentina
  misc_feature (1)..(372): tr|M5UHW8|M5UHW8_9PLAN Queuine tRNA-ribosyltransferase OS=Rhodopirellula sallentina SM41 OX=1263870 GN=tgt PE= 3 SV=1
MFRFDLQHESNGARRGVFRTPRGDVQTPGFMPVGTVGTVKGLTIDQVAATGADMILGNTYHLRLRPGHETVARLGGLHKMCGWDGPILTDSGGFQVFSLGALNKVTEQAATFRSHLDGSKIELTPEHSIEIQQALGSDVAMVLDHVIALPAEQAVVEDALARSIRWAKRCRDAADRPEQALFAIVQGGLDPELRRQCATELATMPFEGFAVGGLSVGEAPEEMYATTAVTTVHLPVDKPRYLMGVGTPRDLLENIARGIDLFDCVMPTRNGRNALAFTDDGPIKLRNAVHREDTRPIMEDCPCLACRHSRGYLRHLFNANEMLGPILLSHHNLTYYGNLMRQTRQAIEEDRFHAFAAGKLRGWGYEPMDAVA

SEQ ID NO: 60165 - protein, 374 aa, Rhodopirellula sp.
  misc_feature (1)..(374): tr|A0A1Z8MIX9|A0A1Z8MIX9_9PLAN Queuine tRNA-ribosyltran sferase OS=Rhodopirellula sp. TMED11 OX=1986614 GN=tgt PE=3 SV=1
MVFRFELQCTDTSTALGTPARRGVFHTPHGPVQTPGFMPVGTQGTVKGLTIDQVAGTGAHMILGNTYHLGLRPGHEVVKALGGLHAMSGWEGPILTDSGGFQVFSLDGINKISERSVIFRSHIDGALIDLTPEYSMQIQESLGSDVAMVLDHVVALPAEKDAVQDAMERSIRWAKRCLEYAGRADQAKFAIVQGGLDVELRVQCAREMAAMNFEGYAVGGLSVGEPPPEMYRITQATTPELPQQKPRYLMGVGRPIDLLESVALGIDLFDCVMPTRNGRNGYAFTDAGPIKIRNAKHKTDTSPLDPNCDCLACTRHSRGYLRHLFIVGEMLGPSLLSLHNLTYYQKVMQGAREAIEQGCFAQYMATKKQQWGIE

SEQ ID NO: 60166 - protein, 370 aa, Rhodopirellula sp.
  misc_feature (1)..(370): tr|A0A255REI4|A0A255REI4_9PLAN Queuine tRNA-ribosyltran sferase OS=Rhodopirellula sp. MGV OX=2023130 GN=tgt PE= 3 SV=1
MSFRFELHQTDPQTGARRGTFQTPHGPVQTPGFMPVGTQGTVKGLTIDQVKSTGAHMILGNTYHLGLRPGPEIVRALGGLHAMFAWDGPILTDSGGFQVFSLKDISKINEQSVVFRSHIDGAIVDLTPEYSIEIQEALGSDVAMVLDHVVALPAPDGEVQDAMERSIRWAKRCLEHASRADQAKFAIVQGGLNTELRQQCARELATMDFEGFAVGGLSVGETPDEMYRITAATTPELPVERPRYLMGVGRPIDLLESITRGIDLFDCVMPTRNGRNGFAFTENGHVKIRNAVHKTDTSPLDPTCDCFTCTRHSRGYLRHLFIAGEMLGPSLLSLHNLHYYQRVMAGARTAIEAGTLTEYIAEKKRLWGMQ

SEQ ID NO: 60167 - protein, 426 aa, Rhodoplanes elegans
  misc_feature (1)..(426): tr|A0A327JYG0|A0A327JYG0_9RHIZ Queuine tRNA-ribosyltran sferase OS=Rhodoplanes elegans OX=29408 GN=tgt PE=3 SV= 1
MRGTRCVHARGPSRGRADLRFGALRDVRLPRVGGPPRTASRSIHLRFRRRFRLKFTHLATDGVARLGTLETPHGTVRTPAFMPVGTQAAMKGVHWHEVRETGADIVLSNTYHLMLRPGAERIARLGGLHAFMGWSGPILTDSGGFQVMSLSELRKVDESGVTFRSHIDGATVVLSPERAVEIQRLLGSDIAMQLDECVALPAERAEIDRAMRLSLRWAERCKRAFEPDLPSGRALFAIVQGGDDVALRRESARELVAMEFQGYAIGGLAVGEPQATMLAMIEEVAPLLPTDRPRYLMGVGTPDDLLKSVARGVDMFDCVLPTRNGRHGLAYTRRGPVNLKNARHAEDPRPLDPESPCRIAREVPRAYLHHLIRANETLGAMYLSVVNIAYFQTLMQDIRAAIAESRFADHAAEVTAAWTRGDVPAL

SEQ ID NO: 60168 - protein, 374 aa, Rhodoplanes piscinae
  misc_feature (1)..(374): tr|A0A327K710|A0A327K710_9RHIZ Queuine tRNA-ribosyltran sferase OS=Rhodoplanes piscinae OX=444923 GN=tgt PE=3 S V=1
MKFDLHVTDGTARLSTLDTPHGRVRTPAFMPVGTQAAMKGVHWHEVREAGADIVLSNTYHLMLRPSAERIARLGGLHAFMGWPHPILTDSGGFQVMSLAKLRKVAEHGVTFQSHVDGATVELTPERAVEIQRLLGSDIAMQLDECVALPAPPAEIERAMRLSLRWAERCKRAFEEDLPSGRALFGIVQGGDVPDLRRESARALVDLDFQGYAIGGLAVGEPQATMLAMIEEVAPLLPADRPRYLMGVGTPDDLLKGVARGIDMFDCVLPTRNGRHGLAYTRFGPVNLKNARHAEDPRPLDPESPCRVAATVPRAYLHHLIRVDEMLGAMLLSIVNIAYFQTLMQGVRAAIAERRFADHAAAVTEDWSRGDIPAL

SEQ ID NO: 60169 - protein, 374 aa, Rhodoplanes piscinae
  misc_feature (1)..(374): tr|A0A447CVF0|A0A447CVF0_9RHIZ Queuine tRNA-ribosyltran sferase OS=Rhodoplanes piscinae OX=444923 GN=tgt PE=3 S V=1
MIFDLHVTDGAARLGTLDTPHGRVRTPAFMPVGTQAAMKGVHWHEVREAGADIVLSNTYHLMLRPSAERIARLGGLHAFMGWPHPILTDSGGFQVMSLAKLRKVAERGVTFQSHVDGATVELTPERAVEIQRLLGSDIAMQLDECVALPAPPAEIERAMRLSLRWAERCKRAFEEDMPSGRALFGIVQGGDVPDLRRESARALVDLDFQGYAIGGLAVGEPQATMLAMIEEVAPLLPADRPRYLMGVGTPDDLLKGVARGIDMFDCVLPTRNGRHGLAYTRFGPVNLKNARHAEDPRPLDPESPCRVAATVPRAYLHHLIRVDEMLGAMLLSIVNIAYFQTLMQGVRAAIAERRFADHAAAVTEDWSRGDVPAL

SEQ ID NO: 60170 - protein, 374 aa, Rhodoplanes roseus
  misc_feature (1)..(374): tr|A0A327L088|A0A327L088_9RHIZ Queuine tRNA-ribosyltran sferase OS=Rhodoplanes roseus OX=29409 GN=tgt PE=3 SV=1
MKFTHLATDGAARLGSLETPHGTVRTPAFMPVGTQAAMKGVHWHEVRETGADIVLSNTYHLMLRPGAERIQKLGGLHAFMGWSGPILTDSGGFQVMSLSELRKVDESGVTFRSHVDGAIVALSPERAVEIQRCLGSDIAMQLDECVALPAETAELDRAMRLSLRWAERCKRAFEPDLASGRALFAIVQGGDDVALRRESARALVDMDFQGYAIGGLAVGEPQETMLAMIEEVAPLLPTDRPRYLMGVGTPDDLVKGVARGIDMFDCVLPTRNGRHGLAYTRCGPVNLKNARHQEDPRPLDPESPCRIAREVPRAYLHHLIRAGEALGAMYLSIVNIAYFQTLMQGLRDAIGAGRFADHAAEVTAAWARGDVPPL

SEQ ID NO: 60171 - protein, 377 aa, Rhodoplanes sp.
  misc_feature (1)..(377): tr|A0A127EUM5|A0A127EUM5_9RHIZ Queuine tRNA-ribosyltran sferase OS=Rhodoplanes sp. Z2-YC6860 OX=674703 GN=tgt P E=3 SV=1
MTEAFSFRLIGTDGIARRGEFVTPHGAVQTPAFMPVGTQATVKGLMPEAVRATGAEILLGNTYHLMLRPGAERIAALGGLHRFMNWNGPILTDSGGFQVMSLSELRKISDNGVVFRSHVDGAMVDLTPERAIEIQSLLGADISMQLDECIKLPNTKPELERAMRLSIAWAERCKRAFESVPKGRALFGIVQGGDDMTLRGESARALVDIGFHGYAIGGLAVGEPQETMLKVVEETTPQLPADQPRYLMGVGTPDDLLKAVARGIDMFDCVMPTRNGRHGAVFTRRGQVNLDNARHRDDPRPIDEQSPCEAARIYSRAYLHHLMRVNEMLGAILLSTINLAYYQELMAGARSAIEQGRYAAYCDAIWEGWAKGDLPPI

SEQ ID NO: 60172 - protein, 377 aa, Rhodopseudomonas faecalis
  misc_feature (1)..(377): tr|A0A318TB55|A0A318TB55_9BRAD Queuine tRNA-ribosyltran sferase OS=Rhodopseudomonas faecalis OX=99655 GN=tgt PE =3 SV=1
MSLPNHFELLGQSGAARTGRLTTPHGVVRTPAFMPVGTAGAMKGLHWREVRDAGADIVLGNTYHLMLRPGAERIAALGGLQRFTTWNGPMLTDSGGFQVMSLAQLRKVTEQAVKFRSHIDGAAIELSPERAIEVQLLLGSDIAMQLDECVRLPAERDDILRAMELSLRWAERCKRAFERAPEGHMLFGIVQGGDIPQLRHASARGLIEIGFHGYAIGGLAVGEPQEVMLAMIEEAAPILPADRPRYLMGVGTPEDILEAVARGIDMFDCVMPTRNGRHGVAFTRFGPVNLRNARHADDPRPLDESSEWPSTRNCSRAYLHHLVKSGETLGAMLLSEINIAYYQSLMAGMRAAIAQGRFAEFREQTHADWARGDIAAL

SEQ ID NO: 60173 - protein, 380 aa, Rhodopseudomonas palustris
  misc_feature (1)..(380): tr|Q2IW39|Q2IW39_RHOP2 Queuine tRNA-ribosyltransferase OS=Rhodopseudomonas palustris (strain HaA2) OX=316058 G N=tgt PE=3 SV=1
MSVPNHFDLLATDGAARTGRLTTPHGVVRTPAFMPVGTAGAMKGLHWREVRDAGADIVLGNTYHLMLRPGAERIAALGGLQRFTTWNGPMLTDSGGFQVMSLAQLRKVSEKAVNFRSHIDGAAIELSPERAIEVQLLLGSDIAMQLDECVRLPAERADIERAMQLSLRWAERCKRAFETAPDGHMLFGIVQGGDVPELRHASARGLIELGFHGYAIGGLAVGEPQEVMLAMIEEAAPILPADRPRYLMGVGTPEDMLEAVARGIDMFDCVMPTRNGRHGVAFTRFGPVNLRNARHADDPRPLDEASDWPSTRNCSRAYLHHLIKSGETLGAMLLSEINIAYYQRLMRDIREAITRGSFETFRMQTRADWEQGDIASRDPA

SEQ ID NO: 60174 - protein, 377 aa, Rhodopseudomonas palustris
  misc_feature (1)..(377): tr|E6VK78|E6VK78_RHOPX Queuine tRNA-ribosyltransferase OS=Rhodopseudomonas palustris (strain DX-1) OX=652103 G N=tgt PE=3 SV=1
MTVPNHFELLGTDGAARTGRLTTPHGVVRTPAFMPVGTAGAMKGLHWREVRDAGADIVLGNTYHLMLRPGAERIAALGGLQRFTTWNGPMLTDSGGFQVMSLAQLRKVNEQAVTFRSHIDGAALELSPERAIEVQRLLGSDIAMQLDECVRLPADRADIERAMQLSLRWAERCKRAFETAPAGYMLFGIVQGGDVPELRHASARGLIDIGFHGYAIGGLAVGEPQEVMLAMIEEVAPILPEDRPRYLMGVGTPEDILEAVARGIDMFDCVMPTRNGRHGLAFTQYGPINLRNAKHADDPRPLDEESDWPSTRNYSRAYLHHLVKSSETLGAMLLSEINTAYYQRLMRDIRAAIAAGRFEEFRLRTREAWDRGDLPPR

SEQ ID NO: 60175 - protein, 377 aa, Rhodopseudomonas pentothenatexigens
  misc_feature (1)..(377): tr|A0A336JU51|A0A336JU51_9BRAD Queuine tRNA-ribosyltran sferase OS=Rhodopseudomonas pentothenatexigens OX=99969 9 GN=tgt PE=3 SV=1
MTVPNHFELLGTDGAARTGRLTTPHGVVRTPAFMPVGTAGAMKGLHWREVRDAGADIVLGNTYHLMLRPGAERIAALGGLQRFTTWNGPMLTDSGGFQVMSLAQLRKVNEQAVTFRSHIDGAALELSPERAIEVQRLLGSDIAMQLDECVRLPADHADIERAMQLSLRWAERCKRAFETAPDGYMLFGIVQGGDVPELRHDSARGLIDIGFHGYAIGGLAVGEPQEVMLAMIEEAAPILPADRPRYLMGVGTPEDILEAVARGIDMFDCVMPTRNGRHGLAFTQYGPINLRNAKHADDPRPLDEESDWPSTRNYSRAYLHHLVKSSETLGAMLLSEINTAYYQRLMRDIRAAIAAGRFEEFRLRTREAWERGDLPPR

SEQ ID NO: 60176 - protein, 380 aa, Rhodopseudomonas pseudopalustris
  misc_feature (1)..(380): tr|A0A1H8ST32|A0A1H8ST32_9BRAD Queuine tRNA-ribosyltran sferase OS=Rhodopseudomonas pseudopalustris OX=1513892 GN=tgt PE=3 SV=1
MSVPNHFELLGRDGAARTGRLTTPHGVVRTPAFMPVGTAGAMKGLHWREVRDAGADIVLGNTYHLMLRPGAERIAALGGLQRFTTWNGPMLTDSGGFQVMSLAQLRKVSEKAVNFRSHIDGAAIELSPERAIEVQLLLGSDIAMQLDECVRLPAERADIERAMQLSLRWAERCKRAFEQAPDGHMLFGIVQGGDVPELRHASARGLVDLGFHGYAIGGLAVGEPQEVMLAMIEEAAPILPADRPRYLMGVGTPEDILEAVARGIDMFDCVMPTRNGRHGVAFTPFGPVNLRNARHADDPRPLDEDSDWPSTRNCSRAYLHHLVKSGETLGAMLLSEINIAYYQRLMRDMRGAIADGSFGTFRAQTRAGWAQGDISPRGSA

SEQ ID NO: 60177 - protein, 381 aa, Rhodopseudomonas sp.
  misc_feature (1)..(381): tr|A0A0N1CA52|A0A0N1CA52_9BRAD Queuine tRNA-ribosyltran sferase OS=Rhodopseudomonas sp. AAP120 OX=1523430 GN=tg t PE=3 SV=1
MSVPNHFELLGTNGAARTGRLTTPHGVVRTPAFMPVGTAGAMKGLHWREVRDAGADIVLGNTYHLMLRPGAERIAALGGLQRFTTWNGPMLTDSGGFQVMSLAQLRKVTEKAVTFRSHIDGAAIELSPERAIEVQLLLGSDIAMQLDECVRLPAEHADIDRAMQLSLRWADRCKRAFESAPQGHMLFGIVQGGDVPELRHASARGLIELGFHGYAIGGLAVGEPQEVMLAMIEEAAPILPADRPRYLMGVGTPEDILEAVARGIDMFDCVMPTRNGRHGVAFTKFGPVNLRNARHADDARPLDETSDWPSTRNCSRAYLHHLIKSGETLGAMLLSEINIAYYQHLMRDIRAAIAAGTFEQFRAQTRENWARGDIAPRESAS

SEQ ID NO: 60178 - protein, 376 aa, Rhodosalinus sediminis
  misc_feature (1)..(376): tr|A0A3D9BN55|A0A3D9BN55_9RHOB Queuine tRNA-ribosyltran sferase OS=Rhodosalinus sediminis OX=1940533 GN=tgt PE= 3 SV=1
MTKRVSFECLATDGAARLGRIDTPRGAIRTPAFMPVGTAATVKAMRPESVAATGADILLGNTYHLMLRPTAERIARLGGLHRFMNWERPILTDSGGFQVMSLAELRKLTERGVTFKSHIDGSRHELTPERSMEIQRLLGSDIVMCFDECPALPADRTRIAESMQLSMRWAARSREAFGDRPGHALFGIQQGGLERDLRAESAEALREIGFDGYAVGGLAVGEGQAAMFGVLDYAPAMLPADKPRYLMGVGKPDDIVGAVKRGIDMMDCVLPTRSGRTAQAFTPRGAVNLKNARHQDDPRPLDEDCACPACRSYSRAYLHHLFRSGEILSAMLLTWHNLQYYQDLMAGMRAAIAEGRFAAWEAAFHARRAEGDIPPL

SEQ ID NO: 60179 - protein, 376 aa, Rhodosalinus sp.
  misc_feature (1)..(376): tr|A0A365U8N8|A0A365U8N8_9RHOB Queuine tRNA-ribosyltran sferase OS=Rhodosalinus sp. E84 OX=2259333 GN=tgt PE=3 SV=1
MTTRFSFSLLATDGAARLGRIDTPRGQIRTPAFMPVGTAATVKAMRPESVAETGADILLGNTYHLMLRPGAERIARLGGLHRFMNWDRPILTDSGGFQVMSLAELRKLTEKGVTFRSHIDGARHELTPERSMEIQRLLGSDIVMAFDECPALPADRRRIEESMRLSMRWAARSREAFGDRPGHALFGIQQGGLERDLRAESAAALKEIGFDGYAVGGLAVGEGQAAMFGVLDHAPAMLPADRPRYLMGVGKPDDIVGAVKRGIDMMDCVLPTRSGRTGQAFTRRGAVNIKNARHQEDPRPLDADCGCPACRDYSRAYLHHLFRAGEILSAMLLTWHNLHYFQELMAGMREAIAAGRFAAWEAEFHRMRALGDIEPL

SEQ ID NO: 60180 - protein, 382 aa, Rhodospira trueperi
  misc_feature (1)..(382): tr|A0A1G6ZXQ1|A0A1G6ZXQ1_9PROT Queuine tRNA-ribosyltran sferase OS=Rhodospira trueperi OX=69960 GN=tgt PE=3 SV= 1
MTDAATASLFRYTYLATDGAARLGRVETAHGPIDTPAFMPVGTAGTVKAMRPEQVAETGAQIVLGNTYHLMLRPGAERIARLGGLRRFMNWPGPVLTDSGGFQVMSLSTLRKLDEDGVTFQSHIDGSRHRLTPERSIEIQHLLGSTITMAFDECTPYPATRDQAAESMHLSMRWAKRSRAAFEQRNGYALFGIVQGGVYEDLRRQSVDALTDIGFDGYAIGGLAVGEPHDEMLRVLESVTPLLPDDRPRYLMGVGRPQDIIAAVARGVDLFDCVMPTRSGRTAQAFTRRGTVNLRNARHADDSRPLDETCDCPCCRDYSRAYLHHLVKAGEMLGPMLLTAHNLQHYQDLMAGLRGAIGEGRLTAFLETRGSEYASGDIPPSA

SEQ ID NO: 60181 - protein, 375 aa, Rhodospirillaceae bacterium; identical to SEQ ID NO: 57191
  misc_feature (1)..(375): tr|A0A1Z8LM32|A0A1Z8LM32_9PROT Queuine tRNA-ribosyltran sferase OS=Rhodospirillaceae bacterium TMED8 OX=1986645 GN=tgt PE=3 SV=1

SEQ ID NO: 60182 - protein, 402 aa, Rhodospirillaceae bacterium
  misc_feature (1)..(402): tr|A0A2E6QC82|A0A2E6QC82_9PROT Queuine tRNA-ribosyltran sferase OS=Rhodospirillaceae bacterium OX=1898112 GN=tg t PE=3 SV=1
MSTSVPDKLEYPGFGFEILERDAASRARLGRLSTPHGELMTPAFIFCATKAAIRGASPRDLRAANVEMVLANTYHLLIQPGPDVVEKLGGLHKFMGWDGPMLTDSGGFQIFSLGQGTESSEIKGSRDGKRNPLLLDLSEEGAVFRSPRDGTKHKLTPESAIRIQRQLRPDLAVVLDECTPVHVERSYTENSLKLTHKWAERSLAEFARHHDGTQGLYGVIQGGIYEDLRREGAEFIASLPFFGHAVGGCLGDHKDAMYDIVEFAMAPLAETAQEKPVHLLGIGGIHDIWEGVAMGVDTFDCVSPTRIARHGWALKKNAKDFRINLRNARFREDGKPLDDKCGCYACENFSRGYIHHLIKADEILGLQLLTQHNIAFMVGLMAEIRSALLRGQFAEAKREWLG

SEQ ID NO: 60183 - protein, 350 aa, Rhodospirillales bacterium
  misc_feature (1)..(350): tr|A0A257VDS7|A0A257VDS7_9PROT Queuine tRNA-ribosyltran sferase (Fragment) OS=Rhodospirillales bacterium 12-71- 4 OX=1970563 GN=B7Z53_05335 PE=3 SV=1
MAAHDGAARAGVLHTAHGEVPTPVFMPVGTAGTVKAMTADAVRATGARMVLGNTYHLMLRPGAERVARLGGLHRMMDWHGPILTDSGGFQVMSLSGLRKLDQDGVTFQSHIDGSKHRLTPEQSVRIQHLLGADVTMCFDECTPFPATHEQAADSMRLSMRWAARSRQAFVAREGHGLFGIVQGSVFEDLRTESVAALAGIGFEGYAIGGLAVGEGQAEMLRVLDFTAPLLPQQAPRYLMGVGTPSDLIESVRRGVDMFDCVIPTRSGRTGRAYTSRGVLNLRNARHADDPEPLDAACDCPACRNHSRAYLHHLVKAEEMLGPMLLTWHNIRYYQALMARLRQAILAGRFA

SEQ ID NO: 60184 - protein, 374 aa, Rhodospirillales bacterium
  misc_feature (1)..(374): tr|A0A259MDJ9|A0A259MDJ9_9PROT Queuine tRNA-ribosyltran sferase OS=Rhodospirillales bacterium 39-66-50 OX=19705 70 GN=tgt PE=3 SV=1
MSLSYEQLGSDGAARRGRITTAHGTIETPAFMPVGTAGTVKAMLPQSVAETGAEIVLGNTFHLMLRPGAERVAALGGLHKFMNWPGPILTDSGGFQVMSLKELRKLDPDGVTFRSPKDGSQHRLTPESSIGIQRLLDADITMSFDECTSWPAEEPEAAFSMRLSMKWAERGRRAFVERSGYGLFGIVQGSTFPELRAESAKALIDIGFDGYAVGGLAVGEGQELMFGTLDYTVPMLPADRPRYLMGVGRPGDIVGAVKRGIDMFDCVMPTRAGRTAQAFTRRGELNMRNARHRDDPRPIDEQCGCPACKHHSRAYLHHLIRADEILGAMLLTWHNLHYYQDVMRGLRGAIESKTLDSWIASFERDQALGDIPPL

SEQ ID NO: 60185 - protein, 407 aa, Rhodospirillum centenum
  misc_feature (1)..(407): tr|B6IU64|B6IU64_RHOCS Queuine tRNA-ribosyltransferase OS=Rhodospirillum centenum (strain ATCC 51521 / SW) OX= 414684 GN=tgt PE=3 SV=1
MPQTIPYPGFGFDILHRDPASRARVGRLTTPHGTIETPNFIFCGTKASVKGVTPAQLREERTDIILSNTYHLMIQPGAETVARLGGLHRFMGWDGPMLTDSGGYQIFAMGHGSVADEIKGRRSQVREKTLLRISEEGAEFRSYTNGEKLFLTPERSVDIQRKLGADLVVQLDECTPYHVDRDYTARSMRMSHRWGDRSLAEFVRGGGLSANGLPQAMYGIVQGGVYPDLRRESAEYTADRPFFATAVGGSLGAHKDQMVEVVAMAMPHVHPDRPVHLLGIGGIVDIFAGVALGIDTFDCVSPTRIARHGWALMPGVPGERLNLRNARFREDADPIDPACDCHACRRFSRGYIHHLLKAGEMLALQLVSLHNIAVMNRLMREVREAIRTGTLDAARRRWVAPAATVKA

SEQ ID NO: 60186 - protein, 375 aa, Rhodospirillum rubrum
  misc_feature (1)..(375): tr|Q2RXR0|Q2RXR0_RHORT Queuine tRNA-ribosyltransferase OS=Rhodospirillum rubrum (strain ATCC 11170 / ATH 1.1.1 / DSM 467 / LMG 4362 / NCIB 8255 / S1) OX=269796 GN=tg t PE=3 SV=1
MTALSFTVKATEGKARLGRIETAHGPADTPIFMPVGTAATVKAMTPDSVRATGAQIVLGNTYHLMLRPSAERIARLGGLHRFMGWSGPILTDSGGYQVMSLSKLRKLTEEGVTFQSHIDGSRHLLTPERSMEIQDLLDATITMAFDECTPYPAERQTVAESMRMSMRWAERSRAAFRPRPGYGLFGICQGGVHGDLRAESVAALTAIGFEGYAVGGLAVGEPQDEMFRVLDETCPLLPADRPRYLMGVGKPEDIVGAVLRGIDMFDCVMPTRSGRTAQGFTRRGEVNLRNARHRDDPRPLDSACSCPACTSFSRAYLHHLVRAEEILGAMLLTWHNIQYYQDLMAGLRAAIGEQRLAAFVTDFHTTRGLGDIEPV

SEQ ID NO: 60187 - protein, 383 aa, Rhodothalassium salexigens
  misc_feature (1)..(383): tr|A0A4R2PPF8|A0A4R2PPF8_RHOSA Queuine tRNA-ribosyltran sferase OS=Rhodothalassium salexigens DSM 2132 OX=11882 47 GN=tgt PE=3 SV=1
MTASPRPRFHYTVHARDGRARTGTLAMARGDIATPAFMPVGTAATVKGMLPEQVRATGADILLGNTYHLMLRPGAERVAALGGLHGFMNWDRPILTDSGGFQVMSLTDLRKLTEEGVTFRSHLDGTKHLLTPERSMEIQRLLGSDIVMAFDECTPFPASHDQARTSMELSMRWAARSRAGFDAGGDHAARAALFGIVQGGVYEDLRARSAEALQAIGFDGYAVGGLAVGEGQDLMFQTLDHTVPHLPDDAPRYLMGVGKPDDIVGAVCRGIDMFDCVLPTRSGRTGQAFTFAGPVTLKNARHRDDPRPLDPRVASPAAAYSRAYLHHLVKAGEMLGAILLTWHNLAFYQTLMAELRQAIADNRLDAYAEAFLAGYRGGDIEPL

SEQ ID NO: 60188 - protein, 377 aa, Rhodothermaceae bacterium
  misc_feature (1)..(377): tr|A0A2E3QZE5|A0A2E3QZE5_9BACT Queuine tRNA-ribosyltran sferase OS=Rhodothermaceae bacterium OX=2026787 GN=tgt PE=3 SV=1
MPLIFELQAECPETGARAGLLHTDHGTVETPTFQPVGTVGSVKGVAPRTLREIGVQQILANTYHLALRPGREVLRAMGGLHRFMQWDGPILTDSGGFQVFSLAELRKVTEEGVRFQSHLDGTPLHFTPETVVDTQRDIGSDIMMVLDELTPATVDEAEARRANGRTLRWAERAFAHYHATEPLYGHHQALFPIVQGATFPAIRRESADALMQLGAEGYAIGGLSVGEAAPVMYEMVEIVNAVLPADRPRYLMGVGTPQNLIENVARGVDLFDCVMPTRNARTGTLFTTDGMVNIKNARWKTEQAPVDAGLDVYHSQTFSKGYLRHLTKANEPLFIEIASVQNLALYLWTMRQMRTAILEGRFPAWRREWADRLARKA

SEQ ID NO: 60189 - protein, 378 aa, Rhodothermaceae bacterium
  misc_feature (1)..(378): tr|A0A424HPD0|A0A424HPD0_9BACT Queuine tRNA-ribosyltran sferase OS=Rhodothermaceae bacterium TMED105 OX=1986665 GN=tgt PE=3 SV=1
  misc_feature (136)..(136): Xaa can be any naturally occurring amino acid
  misc_feature (172)..(172): Xaa can be any naturally occurring amino acid
  misc_feature (181)..(181): Xaa can be any naturally occurring amino acid
  misc_feature (184)..(184): Xaa can be any naturally occurring amino acid
  misc_feature (196)..(196): Xaa can be any naturally occurring amino acid
MSKIFEHHHTDTSSKARLGTLHTDHGPIQTPIFMPVGTQATVKGVSREDLKTRINAPIILGNTYHLYLRPGMDLMREAGGLHAFMGWDRAILTDSGGYQIFSLSDMRSLEEKGAKFKSHLDGSEHWFTPENVVDIXRDLGSDIMMILDECPPWPASYKYVRESMELTHRWAXRGRSAFEQXEPXYGHKQLQFGIVXGGTYSDLRKASAEFMASLPFEGLAIGGLSVGEPTEVMMQITNENTDVLPEDRPRYLMGVGTPANLLEAIRRGIDMFDCVMPTRNARNGMLFTRHGIVNLRNAHWRNHHKPLDPEFPSEVCQAYNTSYLHHLFRCNELLGMELASEHNLTFYLWLMAEARQAIAKNRYEAWVGPMIEDVTRRL

SEQ ID NO: 60190 - protein, 375 aa, Rhodothermaeota bacterium
  misc_feature (1)..(375): tr|A0A2A5X658|A0A2A5X658_9BACT Queuine tRNA-ribosyltran sferase OS=Rhodothermaeota bacterium MED-G18 OX=1986239 GN=tgt PE=3 SV=1
MFFKLLNTSSKTNARCGKIFTDRGTISTPIFMPVGTLGSVKGVHQHELKNEIKSQIILSNTYHLYLRPGTEVLKHAGGLHKFINWDKPILTDSGGYQVFSLSNNVKIFEKGVNFNSHIDGSKHLFTPESVIHTQREIGSDICMVLDECIKYPCEYSYAKESLELTHRWLDRSIEEFKISNSLYNRNQFLFPIVQGSTFKDLRIKSAEYVSKKNLPGNAIGGLSVGEPKEVIYENVDLVCNILPSDKPRYLMGVGTPENILECISLGVDMFDCVMPTRNGRNGMLFTQNGTINIKNKKWEKDFSPIDNELGLLSSLYSKSYLRHLIINKEMLGSQIASIHNLSFYIWLVKEARKHIISDDFHIWKTKILNKVSNRL

SEQ ID NO: 60191 - protein, 378 aa, Rhodothermaeota bacterium
  misc_feature (1)..(378): tr|A0A368D8A1|A0A368D8A1_9BACT Queuine tRNA-ribosyltran sferase OS=Rhodothermaeota bacterium MED-G64 OX=2164156 GN=tgt PE=3 SV=1
MSKIFEHHHTDTSSKARLGTLHTDHGPIQTPIFMPVGTQATVKGVSREDLKTRINAPIILGNTYHLYLRPGMDLMREAGGLHAFMGWDRAILTDSGGYQIFSLSDMRSLEEKGAKFKSHLDGSEHWFTPENVVDIQRDLGSDIMMILDECPPWPASYKYVRESMELTHRWAHRGRSAFEQTEPCYGHKQLQFGIVQGGTYSDLRKASAEFMASLPFEGLAIGGLSVGEPTEVMMQITNENTDVLPEDRPRYLMGVGTPANLLEAIRRGIDMFDCVMPTRNARNGMLFTRHGIVNLRNAHWRNHHKPLDPEFPSEVCQAYNTSYLHHLFRCNELLGMELASEHNLTFYLWLMAEARQAIAKNRYEAWVGPMIEDVTRRL

SEQ ID NO: 60192 - protein, 376 aa, Rhodothermus marinus
  misc_feature (1)..(376): tr|G2SGS6|G2SGS6_RHOMG Queuine tRNA-ribosyltransferase OS=Rhodothermus marinus (strain SG0.5JP17-172) OX=76257 0 GN=tgt PE=3 SV=1
MRFTLEHVDAETRARAGRLETPHGVVETPMFMPVGTVGSVKAVGPRELRRDVGAQIILGNTYHLYLRPGLEVLRRAGGLHRFMGWDGPILTDSGGFQVFSLAALRKLSEEGVWFQSHLDGSRHLFTPENVIDYQRVIGADIMMVLDECPPGDASLEAARRAHELTLRWAERSKRRFEETAPLYGYEQVLFAIVQGGVFPELRRESARALVAMDFPGYAIGGLSVGEPTELMYAMVEVVTEILPADRPRYLMGVGTPANLLENIARGVDLFDCVMPTRNGRNGTIFTTEGILNIRNRKWQTDFSPLDPGLDGYVSQTFTKAYVRHLFQAGEILGLQIATIQNLSFYLWLMREARRAILEGRYRSWMNEMLPRISRRL

SEQ ID NO: 60193 - protein, 376 aa, Rhodothermus marinus
  misc_feature (1)..(376): tr|D0MG52|D0MG52_RHOM4 Queuine tRNA-ribosyltransferase OS=Rhodothermus marinus (strain ATCC 43812 / DSM 4252 / R-10) OX=518766 GN=tgt PE=3 SV=1
MRFTLEYVDSETRARAGRLETPHGVVETPMFMPVGTVGSVKAVSPRELRRDVGAQIILGNTYHLYLRPGLEVLRQAGGLHRFMGWDGPILTDSGGFQVFSLAALRKLSEEGVWFQSHLDGSRHLFTPENVIDYQRVIGADIMMVLDECPPGDASLEAARRAHELTLRWAERSKRRFEETAPLYGYEQALFAIVQGGVFPELRRESARALVAMDFPGYAIGGLSVGEPTELMYEMVEVVTEILPADRPRYLMGVGTPANLLENIARGVDLFDCVMPTRNGRNGTIFTTEGILNIRNRKWQTDFSPLDPGLDGYVSQTFTKAYVRHLFQAGEILGLQIATLQNLSFYLWLMREARRAILEGRYRSWMNEMLPRISRRL

SEQ ID NO: 60194 - protein, 376 aa, Rhodothermus profundi
  misc_feature (1)..(376): tr|A0A1M6QME9|A0A1M6QME9_9BACT Queuine tRNA-ribosyltran sferase OS=Rhodothermus profundi OX=633813 GN=tgt PE=3 SV=1
MRFTLEYVDSETRARAGRLETPHGVVETPMFMPVGTVGSVKAVGPRELRQDIGAQIILGNTYHLYLRPGLEVLRQAGGLHRFMGWDGPILTDSGGFQVFSLAALRKLTEEGVWFQSHLDGSRHLFTPEGVVDYQRVIGADIMMVLDECPPGDASLEAARRAHELTLRWAERSKRRFEATRPLYGYEQALFAIVQGGVFPALRRASARALVDMNFPGYAIGGLSVGEPAERMYEMVEVVTEILPVERPRYLMGVGTPANLLENIARGVDLFDCVMPTRNGRNGTLFTTEGILNIRNRKWRTDFSPLDPGLDSYVSQTFTKAYVRHLFQAGEILGLHLATLQNLSFYLWLMREARRAILEGRYRSWMAEMLPRVSRRL

SEQ ID NO: 60195 - protein, 370 aa, Rhodovarius sp.
  misc_feature (1)..(370): tr|A0A437MMK9|A0A437MMK9_9PROT Queuine tRNA-ribosyltran sferase OS=Rhodovarius sp. CCP-6 OX=1979269 GN=tgt PE=3 SV=1
MTLSYSLTATDGAARAGTLHTAHGEVQTPVFMPVGTAGTVKGMTADAVRSTGARIVLGNTYHLMLRPGAERVARLGGLHRMMDWQGPILTDSGGFQVMSLSALRKMDKDGVTFQSHIDGSKHRLTPERSIEIQHLLDADITMSFDECTPHPATHEVAAKSMRLSMAWAERGRRAFVPREGYGLFGIVQGSTYADLRAESVKALTDIGFEGYAVGGLAVGEGQEAMFATLDVTTPLMPQDKPRYLMGVGTPDDIIGAVARGIDMFDCVIPTRSGRMGRAYTSQGVLNMRNARHCDDGSALDPACDCPACTRHSRAYIHHLIKSQEMLGPILLTWHNIRYYQQLMARLRAAILAGRFAEEAAAIRAGWSTPA

SEQ ID NO: 60196 - protein, 376 aa, Rhodovulum adriaticum
  misc_feature (1)..(376): tr|A0A4R2NIA1|A0A4R2NIA1_RHOAD Queuine tRNA-ribosyltran sferase OS=Rhodovulum adriaticum OX=35804 GN=tgt PE=3 S V=1
MTVAFTFDLKATDGKARSGVISTPRGEIRTPAFMPVGTAATVKAMMPDSVAATGADIILGNTYHLMLRPTAERIDRLGGLHRFMNWQGPILTDSGGFQVMSLAELRKLTEEGVTFKSHIDGSRHTLTPERSMEIQRLLGSDIVMCFDECPALPATDAEVARAMRLSMRWAERSKAAFGDRPGHALFGIMQGGVTRELREESAEALKAIGFDGYAVGGLAVGEGQEAMFDVLDYAPDCLPVDKPRYLMGVGKPDDIVGAVARGIDMMDCVLPTRSGRTGQVFTRRGVVNIKNARHADDPRPLDEQCTCPACRNYSRAYLHHVFRAQEIIASMLLTWHNLHYYQELMAGMRAAIAEGRFADWQEAFHAQRAQGDIPPL

SEQ ID NO: 60197 - protein, 376 aa, Rhodovulum bhavnagarense
  misc_feature (1)..(376): tr|A0A4R2REB9|A0A4R2REB9_9RHOB Queuine tRNA-ribosyltran sferase OS=Rhodovulum bhavnagarense OX=992286 GN=tgt PE =3 SV=1
MTAAFNFEVKATDGKARGGVITTPRGQIRTPAFMPVGTAGTVKAMLPDSVAATGADIILGNTYHLMLRPTAERIDRLGGLHRFMNWRGPILTDSGGFQVMSLAELRKLTEDGVTFKSHVDGSRHTLTPERSMEIQRLLGSDIVMCFDECPALPATDDEVARAMRLSMRWAERSRAAFGDRPGHALFGIMQGGVTRELREESAEALKSIGFDGYAVGGLAVGEGQEAMFGVLDYAPDCLPADKPRYLMGVGKPDDIVGAVARGIDMMDCVLPTRSGRTGQVFTRRGVVNIKNARHADDPRPLDEECACPACRHYSRAYLHHVFRAQEIISSMLLTWHNLHYYQDLMAGMRAAIAEGRFADWQATFHAARAEGDIAPL

SEQ ID NO: 60198 - protein, 376 aa, Rhodovulum euryhalinum
  misc_feature (1)..(376): tr|A0A4V2SAA9|A0A4V2SAA9_9RHOB Queuine tRNA-ribosyltran sferase OS=Rhodovulum euryhalinum OX=35805 GN=tgt PE=3 SV=1
MTAAFNFDVTAIDGAARTGVIATPRGAIRTPAFMPVGTAGTVKAMLPESVAATGADILLGNTYHLMLRPGAERVARLGGLHRFMHWERPILTDSGGFQVMSLAGLRKLTEHGVTFKSHIDGSRHELTPERSMEIQRLLGSDIVMCFDECPALPASDDEVARAMRLSMRWAERSRAAFGDRPGHALFGIMQGGVNRELREESAEALKAIGFDGYAVGGLAVGEGQAAMFGVLDYAPGFLPAEKPRYLMGVGKPEDIVGAVARGIDMMDCVLPTRSGRTGQVFTRRGALNIKNARHQDDPRPIDEACTCPACRNYSRAYLHHVFRAQEIIASMLLTWHNLHYYQELMAGMRAAIAEGRFAAWQAGFHALREEGDVPPV

SEQ ID NO: 60199 - protein, 375 aa, Rhodovulum imhoffii
  misc_feature (1)..(375): tr|A0A2T5BNT7|A0A2T5BNT7_9RHOB Queuine tRNA-ribosyltran sferase OS=Rhodovulum imhoffii OX=365340 GN=tgt PE=3 SV =1
MPCFDFDLTSRDGKARTGRIRTPRGDIRTPAFMPVGTAATVKAMMPESVAATGADILLGNTYHLMLRPTAERIDRLGGLHRFMNWEKPILTDSGGFQVMSLTGLRKLTEEGVRFRSHIDGSRHMLSPERSMEIQRLLGSDIVMAFDECTPFPADEETARNSMELSMRWARRSREAFGDRSGHALFGIQQGGVYPGLRAASAEKLREIGFDGYAIGGLAVGEGQETMFGVLDYAPDMLPEDKPRYLMGVGKPDDIVGAVARGVDMMDCVLPSRSGRTGQVFTRRGVLNIKNARHQDDPRPIDETCTCPACRSYSRAYLHHVFRAQEIISSMLLTWHNLHYYQQLMSDIRAAIAEGRFADWQAGFHAERAEGDVARL

SEQ ID NO: 60200 - protein, 375 aa, Rhodovulum kholense
  misc_feature (1)..(375): tr|A0A2T5UHV2|A0A2T5UHV2_9RHOB Queuine tRNA-ribosyltran sferase OS=Rhodovulum kholense OX=453584 GN=tgt PE=3 SV =1
MTTFGFTLHATDGAARTGAIATPRGTIRTPAFMPVGTAGTVKAMLPESVAATGADILLGNTYHLMLRPGAERVARLGGLHAFMHWDKPILTDSGGFQVMSLSGLRKMSEDGVAFRSHIDGSTHMLSPERSMEIQRLLGSDIVMCFDECPALPASEAEVARAMRLSMRWAERSKAAFGDRPGHALFGIMQGGVTRELREESARALTAIGFDGYAVGGLAVGEGQEAMFGVLDYATGFLPEDRPRYLMGVGKPDDIVGAVARGIDMMDCVLPSRSGRTGQAFTRRGVVNIKNARHADDPRPLDEHCSCPACRNYSRAYLHHVFRAQEILSSMLLTWHNLHYFQELMAGMRAAIAEGRFAAWQAAFHAKRAEGDIDPL

SEQ ID NO: 60201 - protein, 376 aa, Rhodovulum marinum
  misc_feature (1)..(376): tr|A0A4R2Q3W3|A0A4R2Q3W3_9RHOB Queuine tRNA-ribosyltran sferase OS=Rhodovulum marinum OX=320662 GN=tgt PE=3 SV= 1
MTAAFNFDLKATDGKARTGVITTPRGAIRTPAFMPVGTAGTVKAMLPDSVAATGADILLGNTYHLMLRPGAERVARLGGLHRFMNWERPILTDSGGFQVMSLAGLRKLTEEGVTFKSHIDGSKHELTPERSMEIQRLLGSDIVMCFDECPALPATDDEVARAMRLSMRWAERSRAAFGDRPGHALFGIMQGGVTPELREESAAALKAIGFDGYAVGGLAVGEGQAAMFGVLDYAPGFLPEDKPRYLMGVGKPEDIVGAVARGIDMMDCVLPTRSGRTGQVFTRRGALNIKNARHQDDPRPIDEACTCPACRNYSRAYLHHVFRAQEIIASMLLTWHNLHYYQEIMAGMRAAIAEGRFEAWQADFHAGRAEGDLPPL

SEQ ID NO: 60202 - protein, 376 aa, Rhodovulum robiginosum
  misc_feature (1)..(376): tr|A0A3R9PHA9|A0A3R9PHA9_9RHOB Queuine tRNA-ribosyltran sferase OS=Rhodovulum robiginosum OX=68292 GN=tgt PE=3 SV=1
MARPFRFQLEATDGAARRGAIETPRGTIRTPAFMPVGTAATVKAMLPESVAATGADILLGNTYHLMLRPGAERIARMGGLHSFMNWDRPILTDSGGFQVMSLAELRKLTEEGVRFRSHVDGSRHMLSPESSMEIQRLLGSDIVMAFDECTPYPADAATARSSMELSMRWAARSRAAFGDRPGHALFGIQQGSVFRDQRAESAERLIEIGFDGYAVGGLAVGEGQERMFEVLDYAPAMLPADRPRYLMGVGKPDDIVGAVARGIDMMDCVLPTRSGRTGQAFTRRGVVNIKNARHADDPRPLDEACACPACRAYSRAYLHHVFRAGEIIASMLMTWHNLHYYQDLMAGMRAAISKGRFAEFEAAFHAGRAEGDIPPL

SEQ ID NO: 60203 - protein, 375 aa, Rhodovulum sp.
  misc_feature (1)..(375): tr|A0A1N6IBU8|A0A1N6IBU8_9RHOB Queuine tRNA-ribosyltran sferase OS=Rhodovulum sp. ES.010 OX=1882821 GN=tgt PE=3 SV=1
MQGFGFQLLATDGAARSGVISTPRGEVRTPAFMPVGTAGTVKAMLPESVAATGADILLGNTYHLMLRPGAERVARLGGLHRLMNWDRPILTDSGGFQVMSLAGLRKLTETGVTFKSHIDGSRHELTPERSMEIQRLLGSDIVMCFDECPGLPATEDEVARAMRLSMRWAERSKAAFGDRPGHALFGIMQGGVTPDLREESAEALTAIGFDGYAVGGLAVGEGQDAMFGVLDYAPGFLPADKPRYLMGVGKPEDIVGAVAHGIDMMDCVLPTRSGRTGQAFTRRGAVNIKNARHQDDPRPLDEACTCPACRAYSRAYLHHVFRAGEIIASMLLTWHNLHYYQDVMNGMRAAIAEGRFAAFEAEFRAGLAQGDIPPL

SEQ ID NO: 60204 - protein, 375 aa, Rhodovulum sp.
  misc_feature (1)..(375): tr|A0A1V0I351|A0A1V0I351_9RHOB Queuine tRNA-ribosyltran sferase OS=Rhodovulum sp. MB263 OX=308754 GN=tgt PE=3 S V=1
MTTFGFTLHATDGAARSGAISTPRGTIRTPAFMPVGTAATVKAMLPESVAATGADILLGNTYHLMLRPGAERVARLGGLHGFMHWDKPILTDSGGFQVMSLAGLRKMSEEGVRFKSHIDGSTHVLSPERSMEIQRLLGSDIVMCFDECPALPASEAEVARAMRLSMRWAERSKQAFGERPGHALFGIMQGGVTRELREESAAALTAIGFDGYALGGLAVGEGQEAMFGVLDYATDFLPEGRPRYLMGVGKPDDIVGAVARGVDMMDCVLPSRSGRTGQVFTRRGVVNIKNARHADDPRPLDEACSCPACRNYSRAYLHHVFRAQEIISSMLLTWHNLHYFQELMAEMRAAIAAGRFSDWQAGFHAVRAEGDIEPL

SEQ ID NO: 60205 - protein, 376 aa, Rhodovulum steppense
  misc_feature (1)..(376): tr|A0A4R1YNG0|A0A4R1YNG0_9RHOB Queuine tRNA-ribosyltran sferase OS=Rhodovulum steppense OX=540251 GN=tgt PE=3 S V=1
MATAFNFDLTATDGAARTGVIATSRGAIRTPAFMPVGTAGTVKAMLPESVAATGADILLGNTYHLMLRPGAERVARLGGLHCFMHWERPILTDSGGFQVMSLAGLRKLTEQGVTFKSHIDGSRHELTPERSMEIQRLLGSDIVMCFDECPALPTSDEEVARAMRLSMRWAERSRVAFGDRPGHALFGIMQGGVNRALREESAEALKAIGFDGYAVGGLAVGEGQEAMFGVLDYAPGFLPADRPRYLMGVGKPDDIVGAVARGIDMMDCVLPTRSGRTGQVFTRRGALNIKNARHQDDPRPIDEACTCPACRNYSRAYLHHVFRSQEIIASMLLTWHNLHYYQEIMSGMRAAIAEGRFAAWQADFHALRAEGDIEPL

SEQ ID NO: 60206 - protein, 375 aa, Rhodovulum sulfidophilum
  misc_feature (1)..(375): tr|A0A1Q9QU61|A0A1Q9QU61_RHOSU Queuine tRNA-ribosyltran sferase OS=Rhodovulum sulfidophilum OX=35806 GN=tgt PE= 3 SV=1
MTTFGFTLHATDGAARSGAISTPRGQIRTPAFMPVGTAGTVKAMLPESVAATGADILLGNTYHLMLRPGAERVARLGGLHGFMHWDKPILTDSGGFQVMSLAGLRKMSEEGVRFKSHIDGSTHVLSPERSMEIQRLLGSDIVMCFDECPALPASEAEVARAMRLSMRWAERSKQAFGDRPGHALFGIMQGGVTRELREESALALTDIGFDGYALGGLAVGEGQEAMFGVLDYATGFLPEDRPRYLMGVGKPDDIVGAVARGVDMMDCVLPSRSGRTGQVFTRRGVVNIKNARHADDPRPLDEACQCPACRNYSRAYLHHVFRAQEIISSMLLTWHNLHYFQELMAEMRAAIAGGRFTDWQAGFHAARAEGDIEPL

SEQ ID NO: 60207 - protein, 375 aa, Rhodovulum sulfidophilum
  misc_feature (1)..(375): tr|A0A2W5NKJ5|A0A2W5NKJ5_RHOSU Queuine tRNA-ribosyltran sferase OS=Rhodovulum sulfidophilum OX=35806 GN=tgt PE= 3 SV=1
MSRIEFDIAARDGMARTGVLRMPRGEIRTPAFMPVGTAGTVKAMLPESVRETGADILLGNTYHLMLRPGAERVARLGGLHRFMNWERPILTDSGGFQVMSLNELRKLTEEGVTFKSHVDGSTHFLSPETSMEIQRLLGSDIVMCFDECPALPATEEAVAASMRLSMRWALRSREAFGDRPGHALFGIMQGGVTRDLREESAEALRGIGFDGYAIGGLAVGEGQEAMFGVLDYAPGFLPEDRPRYLMGVGKPDDIVGAVMRGVDMFDCVLPSRSGRTGQVFTRRGALNIKNARHAEDPRPLDEACGCPACRSYSRAYLHHVFKASEIIASMLLTWHNLRYYQDLVAGLRAAIAEGRLAAFAAEFEAERARGDIAPV

SEQ ID NO: 60208 - protein, 379 aa, Rhodovulum visakhapatnamense
  misc_feature (1)..(379): tr|A0A4R8FEJ5|A0A4R8FEJ5_9RHOB Queuine tRNA-ribosyltran sferase OS=Rhodovulum visakhapatnamense OX=364297 GN=tg t PE=3 SV=1
MRTPMTTFGFTLHATDGAARSGAIATPRGTIRTPAFMPVGTAGTVKAMLPESVAATGADILLGNTYHLMLRPGAERVARLGGLHAFMHWNKPILTDSGGFQVMSLAGLRKMSEDGVAFRSHIDGSTHMLSPERSMEIQRLLGSDIVMCFDECPALPASEAEVARAMRLSMRWAERSKQAFGDRPGHALFGIMQGGVTRELREESAEALTAIGFDGYAVGGLAVGEGQEAMFGVLDYATGFLPADRPRYLMGVGKPDDIVGAVARGIDMMDCVLPSRSGRTGQAFTRRGVVNIKNARHADDPRPLDEHCSCPACRNYSRAYLHHVFRAQEILSSMLLTWHNLHYFQELMAGMRAAIAEGRFAAWQAAFHAGRAEGDIEPP

SEQ ID NO: 60209 - protein, 367 aa, Richelia intracellularis
  misc_feature (1)..(367): tr|M1WPW9|M1WPW9_9NOST Queuine tRNA-ribosyltransferase OS=Richelia intracellularis HM01 OX=1165095 GN=tgt PE=3 SV=1
MTANFSFQRLAKCSQTHARVGIFSTPHGVVETPRFMPVGTLASVKTLTPSQLKDTGAQMILSNTYHLHLQPGEDIVAGSGGLHKFMGWDGPILTDSGGFQVFSLSKMRKVTEEGVTFRSPHDGKIIELTPERSIEIQNILGADVIMAFDECPSHISTYEEVEAATARTYRWLERCILSHKRLDQALFGIVQGGMYLDLRSQAVVDLEKFDLPGYAIGGVSVGEEPDMIRKIVQDTAPLLPVNKPRYLMGVGTYKEMIMAIASGMDIFDCVIPTRWARHGTAMVKGERWNLKNAQFRRDFSPIDADCPCYTCQNFTRAYLSHLVRSQEILAYTLLSIHNITELIQFTQKVRNAILNDHFTKQFAQWLN

SEQ ID NO: 60210 - protein, 367 aa, Richelia intracellularis
  misc_feature (1)..(367): tr|M1WZ72|M1WZ72_9NOST Queuine tRNA-ribosyltransferase OS=Richelia intracellularis HH01 OX=1165094 GN=tgt PE=3 SV=1
MTANFSFQRLAKCSQTHARVGIFSTPHGVVETPRFMPVGTLASVKTLTPSQLKDTGAQMILSNTYHLHLQPGEDIVAGSGGLHKFMGWDGPILTDSGGFQVFSLSKMRKVTEEGVTFRSPHDGKIIELTPERSIEIQNILGADVIMAFDECPSHISTYEEVEAATARTYRWLERCILSHKRLDQALFGIVQGGIYLDLRSQAVVDLEKFDLHGYAIGGVSVGEEPDMIRKIVQDTAPLLPVNKPRYLMGVGTYKEMIMAIASGMDIFDCVIPTRWARHGTAMVKGERWNLKNAQFRRDFSPIDADCPCYTCQNFTRAYLSHLVRSQEILAYTLLSIHNITELIQFTQKVRNSILNDHFTKQFAQWLN

SEQ ID NO: 60211 - protein, 367 aa, Richelia sp.
  misc_feature (1)..(367): tr|A0A3B9F7P0|A0A3B9F7P0_9NOST Queuine tRNA-ribosyltran sferase OS=Richelia sp. OX=2053605 GN=tgt PE=3 SV=1
MTANFSFQRLAKCSQTHARVGIFSTPHGVVETPRFMPVGTLASVKTLTPSQLKDTGAQMILSNTYHLHLQPGEDSVAGSGGLHKFMGWDGPILTDSGGFQVFSLSKMRKVTEEGVTFRSPHDGKIIELTPERSIEIQNILGADVIMAFDECPSHISTYEEVEAATARTYRWLERCILSHKRLDQALFGIVQGGIYLDLRSQAVVDLEKFDLHGYAIGGVSVGEEPDMIRKIVQDTAPLLPVNKPRYLMGVGTYKEMIMAIASGMDIFDCVIPTRWARHGTAMVKGERWNLKNAQFRRDFSPIDADCPCYTCQNFTRAYLSHLVRSQEILAYTLLSIHNITELIQFTQKVRNSILNDHFTKQFAQWLN

SEQ ID NO: 60212 - protein, 361 aa, Rickettsia africae
  misc_feature (1)..(361): sp|C3PLJ4|TGT_RICAE Queuine tRNA-ribosyltransferase OS= Rickettsia africae (strain ESF-5) OX=347255 GN=tgt PE=3 SV=1
MSKFSFNIHHQHKKARSGIIVTAHGEMRTPAFMPVGTRGTVKAMLPESVAETGADILLGNTYHLMLQPTAERIVQLGGLHKFMNWDKPILTDSGGFQVMSLSKLCKITEEGVSFSSHINGDKYMLTPERSTEIQYLLGSTITMAFDECTPYPATFEEAKTSMQLTTRWANRSRNAFVKREGYAQFGIIQGSVYEELREQSAKDLVELDFEGYAIGGLAVGEGQELMFKVLDYAPEFLPQNKPRYLMGVGKPVDIIGAVSRGIDMFDCVIPTRSGRNGQAFTKYGTVNIRNSKYADDNKPLEHDCLCPACRNYSKAYLHHLVRIGEILGSMLMTWHNLTYFQNLMSRIRAYIKLGKDFDFDS

SEQ ID NO: 60213 - protein, 361 aa, Rickettsia akari
  misc_feature (1)..(361): sp|A8GPN2|TGT_RICAH Queuine tRNA-ribosyltransferase OS= Rickettsia akari (strain Hartford) OX=293614 GN=tgt PE= 3 SV=1
MSKFSFNIHHQHKKARSGIIATAHGEIRTPAFMPVGTRGTVKAMLPESVAETGADILLGNTYHLMLQPSAERIARLGGLHKFMNWDKPILTDSGGFQVMSLSKLRKITEEGVSFSSHINGDKYMLTPERSTAIQYLLGSTITMAFDECTPYPVTFEEAKTSMQLTTRWAHRSRNAFVKREGYAQFGIIQGSVYEELREQSAKGLVELDFDGYAIGGLAVGEGQELMFKVLDYAPDFLPQNKPRYLMGVGKPADIIGAVNRGIDMFDCVIPTRSGRNGQAFTKYGTVNICNSKYSGDNEPLEHDCPCPACTNYTKAYLHHLVRIGEILGSMLMTWHNLTYFQNLISRIREYIKLGKDFDFYS

SEQ ID NO: 60214 - protein, 361 aa, Rickettsia amblyommatis
  misc_feature (1)..(361): tr|A0A0F3Q9I8|A0A0F3Q9I8_RICAM Queuine tRNA-ribosyltran sferase OS=Rickettsia amblyommatis str. Darkwater OX=13 59166 GN=tgt PE=3 SV=1
MSKFSFNIHHQHKKARSGIIVTAHGEMRTPAFMPVGTRGTVKAMLPESVAETGADILLGNTYHLMLQPTAERIVRLGGLHKFMNWDKPILTDSGGFQVMSLSKLRKITEEGVSFSSHINGDKYMLTPERSTEIQYLLGSTITMAFDECTSYPATFEEAKTSMQLTTRWANRSRNAFVKREGYAQFGIIQGSVYEELREQSAKDLVELDFEGYAIGGLAVGEGQELMFKVLNYTPDFLPQNKPRYLMGVGKPADIIGAVSRGIDMFDCVIPTRSGRNGQAFTKYGTVNIRNSKYADDNKPLEHDCLCPACRNYNKAYLHHLVRIGEILGSMLMTWHNLTYFQNLMSRIRAYIKLGKDFDFDS

SEQ ID NO: 60215 - protein, 361 aa, Rickettsia amblyommatis; identical to SEQ ID NO: 60214
  misc_feature (1)..(361): tr|H8K390|H8K390_RICAG Queuine tRNA-ribosyltransferase OS=Rickettsia amblyommatis (strain GAT-30V) OX=1105111 GN=tgt PE=3 SV=1

SEQ ID NO: 60216 - protein, 361 aa, Rickettsia argasii
  misc_feature (1)..(361): tr|A0A0F3RI79|A0A0F3RI79_9RICK Queuine tRNA-ribosyltran sferase OS=Rickettsia argasii T170-B OX=1268837 GN=tgt PE=3 SV=1
MSKFSFNIHHQHKKARSGIIVTAHGEMRTPAFMPVGTRGTVKAMLPESVAETGADILLGNTYHLMLQPTAERIVQLGGLHKFMNWDKPILTDSGGFQVMSLSKLRKITEEGVSFSSHINGDKYMLTPERSTEIQYLLGSTITMAFDECTPYPATFEEAKISMQLTTRWANRSRNAFVKREGYAQFGIIQGSVYEELREQSAKDLVELDFEGYAIGGLAVGEGQELMFKVLDYVPDFLPQNKPRYLMGVGKPADIIGAVSRGIDMFDCVIPTRSGRNGQAFTKYGTVNIHNSKYADDNKPLEHDCLCPACRNYSKAYLHHLVRIGEILGSMLMTWHNLTYFQNLMSRIRAYIKLGKDFDFDS

SEQ ID NO: 60217 - protein, 361 aa, Rickettsia asembonensis
  misc_feature (1)..(361): tr|A0A0C2QWR8|A0A0C2QWR8_9RICK Queuine tRNA-ribosyltran sferase OS=Rickettsia asembonensis OX=1068590 GN=tgt PE =3 SV=1
MSKFSFNIHHQNKKARSGVITTMHGEIRTPAFMPVGTRGTIKAMLPESVAETGSDILLGNTYHLMLQPTAERIARLGGLHKFMNWDKPILTDSGGFQVMSLSKLRKITEEGVSFSSHINGDKYMLTPERSTEIQYLLGSTITMAFDECTPYPATFEEAKTSMQFTTRWANRSRNAFVKRDGYAQFGIIQGSVYEELREQSAKDLVALDFEGYAIGGLAVGEGQELMFKVLNYAPDFLPQNKPRYLMGVGKPADIIGAVRRGIDMFDCVIPTRSGRNGQAFTKYGTVNIRNSKYADDNEPLEHDCLCPACKNYSKAYLHHLVRIGEILGSMLMTWHNLTYFQNLMSRIREYIKLGKDFDFDS

SEQ ID NO: 60218 - protein, 361 aa, Rickettsia asiatica
  misc_feature (1)..(361): tr|A0A510G8D8|A0A510G8D8_9RICK Queuine tRNA-ribosyltran sferase OS=Rickettsia asiatica OX=238800 GN=tgt PE=3 SV =1
MSKFSFNIHHQHKKARSGIIATAHGEIRTPAFMPVGTRGTVKAMLPESVAETGADILLGNTYHLMLQPTAERIARPGGLHKFMNWDKPILTDSGGFQVMSLSKLRKITEEGVSFSSHINGDKYMLTPERSTEIQYLLGSTITMAFDECTPYPATFEEAKTSMQLTTRWANRSRKAFIKREGYAQFGIMQGSVYEELREQSAMDLVELDFEGYAIGGLAVGEGQELMFKVLDYAPDFLPQNKPRYLMGVGKPADIISAVSRGIDMFDCVIPTRSGRNGQAFTKYGTVNIRNSKYADDNEPLEHDCLCPACKNYSKAYIHHLVRIGEILGAMLMTWHNLTYFQNLMSRIREYIKLGKDFDFSS

SEQ ID NO: 60219 - protein, 361 aa, Rickettsia australis
  misc_feature (1)..(361): tr|H8K9W2|H8K9W2_RICAC Queuine tRNA-ribosyltransferase OS=Rickettsia australis (strain Cutlack) OX=1105110 GN= tgt PE=3 SV=1
MSKFSFNIHHQHKKARSGIIATAHGEIRTPAFMPVGTRGTVKAMLPESVAETGADILLGNTYHLMLQPSAERIARLGGLHKFMNWDKPILTDSGGFQVMSLSKLRKITEEGVSFSSHINGDKYMLTPERSTAIQYLLGSTITMAFDECTPYPVTFEEAKTSMQLTTRWANRSRNAFVKREGYAQFGIIQGSVYEELREQSAKDLVELDFEGYAIGGLAVGEGQELMFKVLDYAPDLLPQNKPRYLMGVGKPADIICAVNRGIDMFDCVIPTRSGRNGQAFTKYGTVNIRNSKYAGDNEPLEHDCSCPACTNYTKAYLHHVVRIGEILGSMLMTWHNLTYFQNLMSRIREYIKLGKDFDFDS

SEQ ID NO: 60220 - protein, 359 aa, Rickettsia bellii
  misc_feature (1)..(359): sp|Q1RH25|TGT_RICBR Queuine tRNA-ribosyltransferase OS= Rickettsia bellii (strain RML369-C) OX=336407 GN=tgt PE =3 SV=1
MSKFSFNINHQYKKARSGIITTAHGNIRTPAFMPVGTRGTVKAMLPESVAETGADILLGNTYHLMLQPSAERIAKLGGLHKFMNWGKPILTDSGGFQVMSLSKLRKITEEGVSFNSHINGDKYLLTPERSTEIQHLLGSTITMAFDECTPYPATFEEAKTSMQLTTRWAHRSREAFVKRDGYAQFGIIQGSTYEELREQSAKDLIELDFEGYAIGGLAVGEGQELMFKVLAPDFLPQNKPRYLMGVGKPADIIGAVSRGVDMFDCVIPTRSGRNGQAFTKYGTVNIRNSKYAEDNDPLEADCLCPACQNYSKAYLHHLVRIGEILGAMLMTWHNLTYFQNLMSRIREYIALGKDFDFTT

SEQ ID NO: 60221 - protein, 361 aa, Rickettsia bellii
  misc_feature (1)..(361): sp|A8GUA5|TGT_RICB8 Queuine tRNA-ribosyltransferase OS= Rickettsia bellii (strain OSU 85-389) OX=391896 GN=tgt PE=3 SV=1
MSKFSFNINHQYKKARSGIITTAHGNIRTPAFMPVGTRGTVKAMLPESVAETGADILLGNTYHLMLQPSAERIAKLGGLHKFMNWGKPILTDSGGFQVMSLSKLRKITEEGVSFNSHINGDKYLLTPERSTEIQHLLGSTITMAFDECTPYPATFEEAKTSMQLTTRWAHRSREAFVKRDGYAQFGIIQGSTYEELREQSAKDLIELDFEGYAIGGLAVGEGQELMFKVLDYAPDFLPQNKPRYLMGVGKPADIIGAVSRGVDMFDCVIPTRSGRNGQAFTKYGTVNIRNSKYAEDNDPLEADCLCPACQNYSKAYLHHLVRIGEILGAMLMTWHNLTYFQNLMSRIREYIALGKDFDFTT

SEQ ID NO: 60222 - protein, 361 aa, Rickettsia buchneri
  misc_feature (1)..(361): tr|A0A067A983|A0A067A983_9RICK Queuine tRNA-ribosyltran sferase OS=Rickettsia buchneri OX=1462938 GN=tgt_2 PE=3 SV=1
MSKFSFNIHHQNKKARSGIITTAHGEIRTPAFMPVGTRGTVKAMLPESVAETGADILLGNTYHLMLQPTAERIARLGGLHKFMNWDKPILTDSGGFQVMSLSKLRKITEEGVSFSSHINGDKYMLTPERSTEIQYLLGSTITMAFDECTPYHSTFEEAKTSMQLTTRWTKRSRNAFVKREGYAQFGIIQGSIYEELREQSAKDLVELDFEGYAIGGLAVGEGQELMFKVLDYAPDFLPQNKPRYLMGVGKPADIIGAVSRGIDMFDCVIPTRSGRNGQAFTKYGMVNIRNSKYVDDNEPLEHDCLCPACKNYSKAYLHHLVRIGEILGSMLMTWHNLTYFQNLMSRIREYIKLGKDFDFNS

SEQ ID NO: 60223 - protein, 361 aa, Rickettsia canadensis
  misc_feature (1)..(361): sp|A8EZT7|TGT_RICCK Queuine tRNA-ribosyltransferase OS= Rickettsia canadensis (strain McKiel) OX=293613 GN=tgt PE=3 SV=1
MSKFSFNIHQMHKKARSGVITTAHGEIRTPAFMPVGTRGTIKAMLSESVAETGADILLGNTYHLMLQPSSERIARLGGLHKFMNWHKPILTDSGGFQVMSLSKLCKITEEGVSFSSHINGDKYMLTPERSTEIQYLLGSTITMAFDECTAYPATFEEAKTSVQLTTRWADRSRKAFVKREGYAQFGIIQGSVYQELREQSAKDLVKLDFEGYAIGGLAVGEGQELMFKVLDYTPNFLPQNKPCYLMGVGKPADIIGAVSRGIDMFDCVIPTRSGRNGQAFTKYGTVNIRNSKYADDDEPLEYDCLCPACKNYSKAYLHYLVKIGEILGSMLMTWHNLTYFQNLMSRIRTYIKAGQDFDFIT

SEQ ID NO: 60224 - protein, 361 aa, Rickettsia conorii; identical to SEQ ID NO: 60212
  misc_feature (1)..(361): sp|Q92GM6|TGT_RICCN Queuine tRNA-ribosyltransferase OS= Rickettsia conorii (strain ATCC VR-613 / Malish 7) OX=2 72944 GN=tgt PE=3 SV=1

SEQ ID NO: 60225 - protein, 361 aa, Rickettsia endosymbiont
  misc_feature (1)..(361): tr|A0A0F3R719|A0A0F3R719_9RICK Queuine tRNA-ribosyltran sferase OS=Rickettsia endosymbiont of Ixodes pacificus OX=1133329 GN=tgt PE=3 SV=1
MSKFSFNIHHQNKKARSGIITTAHGEIRTPAFMPVGTRGTVKAMLPESVAETGADILLGNTYHLMLQPTAERIARLGGLHKFMNWDKPILTDSGGFQVMSLSKLRKITEEGVSFSSHINGNKYMLTPERSTEIQYLLGSTITMAFDECTPYPSTFEEAKTSMQLTTRWAKRSRNAFVKQEGYAQFGIIQGSIYEELREQSAKDLVELDFEGYAIGGLAVGEGQELMFKVLDYAPDFLPQNKPRYLMGVGKPADIIGTVSRGIDMFDCVIPTRSGRNGQAFTKYGTVNIRNSKYVDDNEPLEYDCLCPACKNYSKAYLHHLVRIGEILGSMLMTWHNLTYFQNLMSRIREYIKLGKDFDFNS

SEQ ID NO: 60226 - protein, 361 aa, Rickettsia endosymbiont
  misc_feature (1)..(361): tr|A0A162VKD2|A0A162VKD2_9RICK Queuine tRNA-ribosyltran sferase OS=Rickettsia endosymbiont of Proechinophthirus fluctus OX=1462733 GN=tgt PE=3 SV=1
MSKFSFNIHHQHKKARSGIIVTAHGEMRTPAFMPVGTRGTVKAMLPESVAETGADILLGNTYHLMLQPTAERIVQLGGLHKFMNWDKPILTDSGGFQVMSLSKLCKITEEGVSFSSHINGDKYMLTPERSTEIQYLLGSTITMAFDECTPYPATFEEAKTSMQLTTRWANRSRNAFVKREGYAQFGIIQGSVYEELREQSAKALVELDFEGYAIGGLAVGEGQELMFKVLDYAPDFLPQNKPRYLMGVGKPVDIIGAVSRGIDMFDCVIPTRSGRNGQAFTKYGTVNIRNSKYADDNKPLEHDCLCPACRNYSKAYLHHLVRIGEILGSMLMTWHNLTYFQNLMSRIRAYIKLGKDFDFDS

SEQ ID NO: 60227 - protein, 361 aa, Rickettsia felis
  misc_feature (1)..(361): sp|Q4UN16|TGT_RICFE Queuine tRNA-ribosyltransferase OS= Rickettsia felis (strain ATCC VR-1525 / URRWXCal2) OX=3 15456 GN=tgt PE=3 SV=1
MSKFSFNIHHQHKKARNGVITTAHGEIRTPAFMPVGTRGTVKAMLPESVAETGADILLGNTYHLMLQPTAERIARLGGLHKFMNWDKPILTDSGGFQVMSLSKLRKITEEGVSFSSHINGDKYMLTPERSTEIQHLLGSTITMAFDECTPYPATFEEAKTSMQLTTRWANRSRNAFVKRDGYAQFGIIQGSVYEELREQSARDLVELDFEGYAIGGLAVGEGQELMFKVLDYAPDFLPQNKPCYLMGVGKPADIIGAVRRGIDMFDCVIPTRSGRNGQAFTKYGTVNIRNSKYADDNEPLEHDCLCPACKNYSKAYLHLLVRIGEILGAMLMTWHNLTYFQNLMSRIRKYIKLGKDFDFDS

SEQ ID NO: 60228 - protein, 361 aa, Rickettsia felis; identical to SEQ ID NO: 60227
  misc_feature (1)..(361): tr|A0A0F3MSA2|A0A0F3MSA2_RICFI Queuine tRNA-ribosyltran sferase OS=Rickettsia felis str. Pedreira OX=1359196 GN =tgt PE=3 SV=1

SEQ ID NO: 60229 - protein, 361 aa, Rickettsia heilongjiangensis
  misc_feature (1)..(361): tr|G0GZC8|G0GZC8_RICH0 Queuine tRNA-ribosyltransferase OS=Rickettsia heilongjiangensis (strain ATCC VR-1524 / 054) OX=1032845 GN=tgt PE=3 SV=1
MSKFSFNIHHQHKKARSGIIVTAHGEMRTPAFMPVGTRGTVKAMLPESVAETGADILLGNTYHLMLQPTAERIVQLGGLHKFMNWDKPILTDSGGFQVMSLSKLRKITEEGVSFSSHINGDKYMLTPERSTEIQYLLGSTITMAFDECTPYPATFEEAKISMQLTTRWANRSRNAFVKREGYAQFGIIQGSVYEELREQSAKDLVELDFEGYAIGGLAVGEGQELMFKVLDYVPDFLPQNKPRYLMGVGKPADIIGAVSRGIDMFDCVIPTRSGRNGQAFTKYGTVNIRNSKYADDNKPLEHDCLCPACRNYSKAYLHHLVRIGEILGSMLMTWHNLTYFQNLMSRIRAYIKLGKDFDFDS

SEQ ID NO: 60230 - protein, 361 aa, Rickettsia japonica
  misc_feature (1)..(361): tr|A0A3B7DBX2|A0A3B7DBX2_RICJA Queuine tRNA-ribosyltran sferase OS=Rickettsia japonica OX=35790 GN=tgt PE=3 SV= 1
MSKFSFNIHHQHKKARSGIIVTAHGEMRTPAFMPVGTRGTVKAMLPESVAETGADILLGNTYHLMLQPTAERIVQLGGLHKFMNWDKPILTDSGGFQVMSLSKLRKITEEGVSFSSHINGDKYMLTPERSTEIQYLLGSTITMAFDECTPYPATFEEAKTAMQLTTRWANRSRNAFVKREGYAQFGIIQGSVYEELREQSAKDLVELDFEGYAIGGLAVGEGQELMFKVLDYVPDFLPQNKPRYLMGVGKPADIIGAVSRGIDMFDCVIPTRSGRNGQAFTKYGTVNIRNSKYVDDNKPLEHDCLCPACRNYSKAYLHHLVRIGEILGSMLMTWHNLTYFQNLMSRIRAYIKLGKDFDFDS

SEQ ID NO: 60231 - protein, 361 aa, Rickettsia japonica; identical to SEQ ID NO: 60230
  misc_feature (1)..(361): tr|G4KLC4|G4KLC4_RICJY Queuine tRNA-ribosyltransferase OS=Rickettsia japonica (strain ATCC VR-1363 / YH) OX=65 2620 GN=tgt PE=3 SV=1

SEQ ID NO: 60232 - protein, 361 aa, Rickettsia massiliae
  misc_feature (1)..(361): tr|H6QI57|H6QI57_RICMA Queuine tRNA-ribosyltransferase OS=Rickettsia massiliae str. AZT80 OX=1105112 GN=tgt PE =3 SV=1
MSKFSFNIHHQHKKARSGIIVTAHGEMRTPAFMPVGTRGTVKAMLPESVAETGADILLGNTYHLMLQPTAERIVLLGGLHKFMNWDKPILTDSGGFQVMSLSKLRKITEEGVSFSSHINGDKYMLTPERSTEIQYLLGSTITMAFDECTPYPATFEEAKTSMQLTTRWANRSRNAFVKREGYAQFGIIQGSVYEELREQSAKDLVELDFEGYAIGGLAVGEGQELMFKVLDYAPDFLPQNKPRYLMGVGKPADIIGAVSRGIDMFDCVIPTRAGRNGQAFTKYGTVNIRNSKYADDNKPLEHDCLCPACRNYSKAYLHHLVRIGEILGSMLMTWHNLTYFQNLMSRIRGYIKLGKDFDFDS

SEQ ID NO: 60233 - protein, 361 aa, Rickettsia massiliae
  misc_feature (1)..(361): sp|A8F2K6|TGT_RICM5 Queuine tRNA-ribosyltransferase OS= Rickettsia massiliae (strain Mtu5) OX=416276 GN=tgt PE= 3 SV=1
MSKFSFNIHHQHKKARSGIIVTAHGEMRTPAFMPVGTRGTVKAMLPESVAETGADILLGNTYHLMLQPTAERIVLLGGLHKFMNWDKPILTDSGGFQVMSLSKLRKITEEGVSFSSHINGDKYMLTPERSTEIQYLLGSTITMAFDECTPYPATFEEAKTSMQLTTRWANRSRNAFVKREGYAQFGIIQGSVYEELREQSAKDLVELDFEGYAIGGLAVGEGQELMFKVLDYAPDFLPQNKPRYLMGVGKPADIIGAVSRGIDMFDCVIPTRAGRNGQAFTKYGTVNIRNSKYADDNKPLEHDCLCPACRNYSKAYLHHLVRIGEILGSMLMTWHNLTYFQNLMSRIREYIKLGKDFDFDS

SEQ ID NO: 60234 - protein, 361 aa, Rickettsia monacensis
  misc_feature (1)..(361): tr|A0A0B7IZ80|A0A0B7IZ80_9RICK Queuine tRNA-ribosyltran sferase OS=Rickettsia monacensis OX=109232 GN=tgt PE=3 SV=1
MSKFSFNIHHQNKKARSGIITTAHGEIRTPAFMPVGTRGTVKAMLPESVAETGADILLGNTYHLMLQPTAERIARLGGLHKFMNWDKPILTDSGGFQVMSLSKLRKITEEGVSFSSHINGDKYMLTPERSTEIQYLLGSTITMAFDECTPYPSTFEEAKTSIQLTTRWAKRSRNAFVKREGYAQFGIIQGSIYEELREQSAKDLVELDFEGYAIGGLAVGEGQELMFKVLDYAPDFLPQNKPRYLMGVGKPADIIGAVSRGIDMFDCVIPTRSGRNGQAFTKYGTVNIRNSKYVDDNEPLEYDCLCPACKNYSKAYLHHLVRIGEILGSMLMTWHNLTFFQNLMSRIREYIKLGKDFDFNS

SEQ ID NO: 60235 - protein, 361 aa, Rickettsia montanensis
  misc_feature (1)..(361): tr|H8KCJ1|H8KCJ1_RICMS Queuine tRNA-ribosyltransferase OS=Rickettsia montanensis (strain OSU 85-930) OX=110511 4 GN=tgt PE=3 SV=1
MSKFSFNIHHQHKKARSGIIVTAHGEMRTPAFMPVGTRGTVKAMLPESVAETGADILLSNTYHLMLQPTAERIVRLGGLHKFMNWDKPILTDSGGFQVMSLSKLRKITEEGVSFSSHINGDKYMLTPERSTEIQYLLGSTITMAFDECTPYPATFEEAKTSMQLTTRWANRSRNAFVKREGYAQFGIIQGSVYEELREQSAKDLVELDFEGYAIGGLAVGEGQELMFKVLDYAPDFLPQNKPRYLMGVGKPADIIGAVSRGIDMFDCVIPTRSGRNGQAFTKYGTVNIRNSKYADDNKPLEHDCLCPACRNYSKAYLHHLVRIGEILGPMLMTWHNLTYFQNLMSRIRAYIKLGKDFDFDS

SEQ ID NO: 60236 - protein, 361 aa, Rickettsia parkeri; identical to SEQ ID NO: 60212
  misc_feature (1)..(361): tr|A0A0F3QP52|A0A0F3QP52_RICPA Queuine tRNA-ribosyltran sferase OS=Rickettsia parkeri str. Grand Bay OX=1359203 GN=tgt PE=3 SV=1

SEQ ID NO: 60237 - protein, 361 aa, Rickettsia peacockii
  misc_feature (1)..(361): sp|C4K0T2|TGT_RICPU Queuine tRNA-ribosyltransferase OS= Rickettsia peacockii (strain Rustic) OX=562019 GN=tgt P E=3 SV=1
MSKFSFNIYHQHKKARSGIIVTAHGEMRTPAFMPVGTRGTVKAMLPESVAETGADILLGNTYHLMLQPTAERIVQLGGLHKFMNWDKPILTDSGGFQVMSLSKLCKITEEGVSFSSHINGDKYMLTPERSTEIQYLLGSTITMAFDECTPYPATFEEAKTSMQLTTRWANRSRNAFVKREGYAQFGIIQGSVYEELREQSSKDLVELDFEGYAVGGLAVGEGQELMFKVLDYAPDFLPQNKPRYLMGVGKPADIIGAVSRGIDMFDCVIPTRSGRNGQAFTKYGTVNIRNSKYADDNKPLEHDCLCPACRNYSKAYLHHLVRIGEILGSMLMTWHNLTYFQNLMSRIRAYIKLGKDFDFDS

SEQ ID NO: 60238 - protein, 361 aa, Rickettsia philipii
  misc_feature (1)..(361): tr|H6PV15|H6PV15_RICP3 Queuine tRNA-ribosyltransferase OS=Rickettsia philipii (strain 364D) OX=481009 GN=tgt P E=3 SV=1
MSKFSFNIHHQHKKARSGIIVTAHGEMRTPAFMPVGTRGTVKAMLPESVAETGADILLGNTYHLMLQPTAERIVQLGGLHKFMNWDKPILTDSGGFQVMSLSKLCKITEEGVSFSSHINGDKYMLTPERSTEIQYLLGSTITMAFDECTPYPATFEEAKTSMQLTTRWAKRSRNTFVKREGYAQFGIIQGSVYEELREQSAKDLVELDFDGYAIGGLAVGEGQELMFKVLDYAPDFLPQNKPRYLMGVGKPADIIGAVSRGIDMFDCVIPTRSGRNGQAFTKYGTVNIRNSKYADDNKPLEHDCLCPACRNYSKAYLHHLVRIGEILGSMLMTWHNLTYFQNLMSRIRAYIKLGKDFDFDS

SEQ ID NO: 60239 - protein, 361 aa, Rickettsia prowazekii
  misc_feature (1)..(361): sp|Q9ZCK8|TGT_RICPR Queuine tRNA-ribosyltransferase OS= Rickettsia prowazekii (strain Madrid E) OX=272947 GN=tg t PE=3 SV=1
MSKFSFTIHSHYKKARSGVITTAHGEIRTPAFMPVGTRGAVKAMLTEAVVETGADILLGNTYHLMLQPSAERIAYLGGLHKFMNWDKPILTDSGGFQVMSLSKLCKITEEGVSFRSHINGNKYMLTPEYSTEIQYLLGSTITMALDECTPYPSTFEKAKTSMHLTTRWANRSRDAFVKREGYAQFGIIQGSVYKELREQSVKDLVKCDFEGYAIGGLAVGEGQELMFRVLDYVPDFLPQNKPRYLMGVGKPSDIIGAVSRGIDMFDCVIPTRSGRNGQAFTKYGTVNIRNSKYADDKEPLEHDCKCPACTNYTKAYLHHLVRIREILGPMLMTWHNLTYFQNLMSRIRTYIKLGKDFDFVH

SEQ ID NO: 60240 - protein, 361 aa, Rickettsia prowazekii; identical to SEQ ID NO: 60239
  misc_feature (1)..(361): tr|D5AXZ1|D5AXZ1_RICPP Queuine tRNA-ribosyltransferase OS=Rickettsia prowazekii (strain Rp22) OX=449216 GN=tgt PE=3 SV=1

SEQ ID NO: 60241 - protein, 361 aa, Rickettsia raoultii
  misc_feature (1)..(361): tr|A0A126EA70|A0A126EA70_9RICK Queuine tRNA-ribosyltran sferase OS=Rickettsia raoultii OX=369822 GN=tgt PE=3 SV =1
MSKFSFNIHHQHKKARSGIIVTAHGEMRTPAFMPVGTRGTVKAMLPESVAETGADILLGNTYHLMLQPTAERIVRLGGLHKFMNWDKPILTDSGGFQVMSLSKLRKITEEGVSFSSHINGDKYMLTPERSTEIQYLLGSTITMAFDECTPYPATFEEAKTSMQLTTRWANRSRNAFVKREGYAQFGIIQGSVYEELREQSAKDLVELDFEGYAIGGLAVGEGQELMFKVLDYAPDFLPQNKPCYLMGVGKPADIIGAVSRGIDMFDCVIPTRSGRNGQAFTKYGTVNIRNSKYADDNKPLEHDCLCPACKNYSKAYLHHLVRIGEILGSMLMTWHNLTYFQNLMSRIRAYIKLGKDFDFDS

SEQ ID NO: 60242 - protein, 361 aa, Rickettsia rhipicephali
  misc_feature (1)..(361): tr|A0A0S2C8G2|A0A0S2C8G2_RICRH Queuine tRNA-ribosyltran sferase OS=Rickettsia rhipicephali OX=33992 GN=tgt PE=3 SV=1
MSKFSFNIHHQHKKARSGIIVTARGEMRTPAFMPVGTRGTVKAMLPESVAETGADILLGNTYHLMLQPTAERIALLGGLHKFMNWDKPILTDSGGFQVMSLSKLRKITEEGVSFSSHINGDKYMLTPERSTEIQYLLGSTITMAFDECTPYPATFEEAKTSMQLTTRWANRSRNAFVKREGYAQFGIIQGSVYEELREQSAKDLVELDFEGYAIGGLAVGEGQELMFKVLDYAPDFLPQNKPRYLMGVGKPADIIGAVSRGIDMFDCVIPTRAGRNGQAFTKYGTVNIRNSKYADDNKPLEHDCLCPACRNYSKAYLHHLVRIGEILGSMLMTWHNLTYFQNLMSRIRAYIKLGKDFDFDS

SEQ ID NO: 60243 - protein, 361 aa, Rickettsia rhipicephali; identical to SEQ ID NO: 60232
  misc_feature (1)..(361): tr|A0A0F3PFK4|A0A0F3PFK4_RICRH Queuine tRNA-ribosyltran sferase OS=Rickettsia rhipicephali str. Ect OX=1359199 GN=tgt PE=3 SV=1

SEQ ID NO: 60244 - protein, 35 aa, Rickettsia rickettsii
  misc_feature (1)..(35): tr|A0A0H3AXH8|A0A0H3AXH8_RICRS Queuine tRNA-ribosyltran sferase OS=Rickettsia rickettsii (strain Sheila Smith) OX=392021 GN=tgt PE=4 SV=1
MLWRKLYWLKSPKNAERLKRAISDFEENKNFRNWI

SEQ ID NO: 60245 - protein, 361 aa, Rickettsia rickettsii
  misc_feature (1)..(361): sp|B0BUZ2|TGT_RICRO Queuine tRNA-ribosyltransferase OS= Rickettsia rickettsii (strain Iowa) OX=452659 GN=tgt PE =3 SV=1
MSKFSFNIHHQHKKARSGIIVTAHGEMRTPAFMPVGTRGTVKAMLPESVAETGADILLGNTYHLMLQPTAERIVQLGGLHKFMNWDKPILTDSGGFQVMSLSKLCKITEEGVSFSSHINGDKYMLTPERSTEIQYLLGSTITMAFDECTPYPATFEEAKTSMQLTTRWANRSRNTFVKREGYAQFGIIQGSVYEELREQSAKDLVELDFDGYAIGGLAVGEGQELMFKVLDYAPDFLPQNKPRYLMGVGKPADIIGAVSRGIDMFDCVIPTRSGRNGQAFTKYGTVNIRNSKYADDNKPLEHDCLCPACRNYSKAYLHHLVRIGEILGSMLMTWHNLTYFQNLMSRIRAYIKLGKDFDFDS

SEQ ID NO: 60246 - protein, 361 aa, Rickettsia sibirica; identical to SEQ ID NO: 60212
  misc_feature (1)..(361): tr|Q7P9L3|Q7P9L3_RICS2 Queuine tRNA-ribosyltransferase OS=Rickettsia sibirica (strain ATCC VR-151 / 246) OX=27 2951 GN=tgt PE=3 SV=1

SEQ ID NO: 60247 - protein, 361 aa, Rickettsia slovaca
  misc_feature (1)..(361): tr|H8LPR1|H8LPR1_RICSL Queuine tRNA-ribosyltransferase OS=Rickettsia slovaca str. D-CWPP OX=1105109 GN=tgt PE= 3 SV=1
MSKFSFNIHHQHKKARSGIIVTAHGEMRTPAFMPVGTRGTVKAMLPEAVAETGADILLGNTYHLMLQPTAERIVQLGGLHKFMNWDKPILTDSGGFQVMSLSKLCKITEEGVSFSSHINGDKYMLTPERSTEIQYLLGSTITMAFDECTPYPATFEEAKTSMQLTTRWANRSRNAFVKREGYAQFGIIQGSVYEELREQSAKDLVELDFEGYAIGGLAVGEGQELMFKVLDYAPDFLPQNKPRYLMGVGKPADIIGAVSRGIDMFDCVIPTRSGRNGQAFTKYGTVNIRNSKYADDNKPLEHDCLCPACRNYSKAYLHHLVRIGEILGSMLMTWHNLTYFQNLMSRIRAYIKLGKDFDFDS

SEQ ID NO: 60248 - protein, 361 aa, Rickettsia sp.
  misc_feature (1)..(361): tr|A0A1C3EXC4|A0A1C3EXC4_9RICK Queuine tRNA-ribosyltran sferase OS=Rickettsia sp. wb OX=1851512 GN=tgt PE=3 SV= 1
MSKFSFNINHQHKKARSGVITTAHGEIRTPAFMPVGTRGTVKAMLPESVGETGADILLGNTYHLMLQPSAERIARLGGLHKFMNWDKPILTDSGGYQVMSLSKLRKITEEGVSFNSHINGDKYLLTPERSTEIQHLLGSTITMAFDECTPYPATFEEAKTSMQLTTRWAYRSREAFVKPDGYAQFGIIQGSTYEELRKQSAKDLIELNFEGYAIGGLAVGEGQELMFKVLDYAPDFLPQNKPRYLMGVGKPADIIGAVSRGVDMFDCVIPTRSGRNGQAFTKYGTVNIRNSKYAEDNEPLETDCLCPACQNYSKAYLHHLVRIGEILGAMLMTWHNLTYFQNLMSRIREYIALGKDFDFTT

SEQ ID NO: 60249 - protein, 361 aa, Rickettsia sp.; identical to SEQ ID NO: 60248
  misc_feature (1)..(361): tr|A0A249E1I5|A0A249E1I5_9RICK Queuine tRNA-ribosyltran sferase OS=Rickettsia sp. MEAM1 (Bemisia tabaci) OX=118 2263 GN=tgt PE=3 SV=1

SEQ ID NO: 60250 - protein, 361 aa, Rickettsia typhi
  misc_feature (1)..(361): sp|Q68W26|TGT_RICTY Queuine tRNA-ribosyltransferase OS= Rickettsia typhi (strain ATCC VR-144 / Wilmington) OX=2 57363 GN=tgt PE=3 SV=1
MSKFSFTIHSNYKKARSGVITTAHGKIRTPTFMPVGTRGTVKAMLTESVVETGADILLGNTYHLMLQPSAERIAYLGGLHKFMNWDKPILTDSGGFQVMSLSKLRKITEEGVSFRSHINGNKYMLTPEYSTEIQYLLGSTITMALDECTPYPSTFEEAKTSMNLTTRWANRSRDAFVKREGYAQFGIIQGSVYKELREQSVKDLVKFDFDGYAIGGLAVGEGQELMFKVLDYVSDFLPQNKPRYLMGVGKPADIIGAVSRGIDMFDCVIPTRSGRNGQAFTKYGTVNIRNSKYAEDKAPLEYDCKCPACTNYTKAYLHHLVRIREILGPMLMTWHNLTYFQNLMSRIRAYIKLGKDFDFVN

SEQ ID NO: 60251 - protein, 367 aa, Rickettsiaceae bacterium
  misc_feature (1)..(367): tr|A0A1W9SBP9|A0A1W9SBP9_9RICK Queuine tRNA-ribosyltran sferase OS=Rickettsiaceae bacterium 4572_127 OX=1971637 GN=tgt PE=3 SV=1
MLKYTLLATDKNARRGVLETAHGEINTPAFMPVGTIATVKTQTPEMVKKTGAEVILGNTYHLMLGRRADIIEKAGGLHKFMNWDKAILTDSGGFQVMSLSDLAKVTEEGVEFKSHLDGGAKHFLTPEKSVQIQHQLDSNITMCLDRCRELPLPRKEIKEALDLSMRWAKRSKDAFIDRDGYGIFGITQGGLDKELRLESASKLTEIGFDGYAIGGLAVGEPQHEMFDTLEFTCPALPENKPRYLMGVGTPLDILGAVERGVDMFDCVMPTRSGRTAKAFTSHGELNLRNAKFREDFSSLDSECECETCRNYSRAYLSHLIRANEILGAILLTQHNLFFYQNLMKQIRKHIEDKTFLEFKKEFIGKYL

SEQ ID NO: 60252 - protein, 364 aa, Rickettsiaceae bacterium
  misc_feature (1)..(364): tr|A0A4Q3DJK4|A0A4Q3DJK4_9RICK Queuine tRNA-ribosyltran sferase OS=Rickettsiaceae bacterium OX=2023360 GN=tgt P E=3 SV=1
MSHTPPFSFKLIKQQNRARLGIINTAHGQIRTPAFMPVGTRGTVKAMFPESVASLGSDVLLGNTYHLMLRPGASRIHKLGGLHKFMNWQKPILTDSGGFQVMSLSNLRKIHEEGVIFNSHIDGSKHLLSPEKSTEIQYLLGSTITMAFDECTPYPATEEQASKSMELTSRWAKRSRDAFIQRPGYGQFGIIQGGIYQHLREQSASDITKLGFEGYAIGGLAVGEGHELMLKVLEYSPDFLPINKPRYLMGVGKPADIIAAVAKGIDMFDCVIPTRSGRNGQAFTKAGTINIRNSRYADDDQPLDTDCLCPACQKYSKAYLHHLVRTGEILGSMLMTWHNLHYFQDLMTKIRSYIEQQRDFDFLT

SEQ ID NO: 60253 - protein, 376 aa, Rickettsiales bacterium
  misc_feature (1)..(376): tr|A0A2E0F878|A0A2E0F878_9RICK Queuine tRNA-ribosyltran sferase OS=Rickettsiales bacterium OX=2026788 GN=tgt PE =3 SV=1
MENVKSFNFKLKANDGNARAGEIETIHGNIKTPVFMPVGTAASVKAIFPKDLLELNIEIILANTYHLMLRPGEELIKKFSGLQKFMNWEKPILTDSGGFQVWSLSKLRKMDEKGIEFSSHIDGKKYKLTPESSILIQEKLNSTISMVLDECTEYPATYTRSKESMKLSMRWAERCKKAFTQRQGYGLFGIIQGGMFNDLRKESSKILNEMEFDGYALGGLSVGENHEEMINIVKETTQHMDKKKPRYIMGVGRPVDIFNSVENGIDMFDCVLPTRFGRNGRAFTDVGEINLRNARYANDKSLLDETTDCYVSTNFSKSYLHHLTKSNEILSSMILSLHNIAYYKKMMDEIRVSIVNKSFKDLKKKYLKIHESFKKN

SEQ ID NO: 60254 - protein, 373 aa, Rickettsiales bacterium
  misc_feature (1)..(373): tr|A0A1Z9MWK4|A0A1Z9MWK4_9RICK Queuine tRNA-ribosyltran sferase OS=Rickettsiales bacterium TMED211 OX=1986869 G N=tgt PE=3 SV=1
  misc_feature (2)..(3): Xaa can be any naturally occurring amino acid
  misc_feature (8)..(8): Xaa can be any naturally occurring amino acid
  misc_feature (53)..(53): Xaa can be any naturally occurring amino acid
MXXNFFKXLNQDGKARTGLLKTKHGQVETPVFMPVGTLGTVKGIFPRDLKDIXVQIILGNTYHLMLRPGEELISEMGGLQKFMNWDRPILTDSGGFQIWSLSKLRIIDQDGVTFSSHIDGKKFRLTPEISVTVQKKLNANITMVLDECTTHPSTYMESKKSLELSLNWARKCKEVYEEREGFGLFAIIQGGMYKDLRKNSCENLIDMNFDGYAIGGLSVGEKHSEMIDIVNFTSEFLPVEKPRYLMGVGRPVDIFKSVEKGIDMFDCVLPTRFGRTGRAFTLNGELNLRNSKFSNDERPLDNNLNCFASKEFSRSYIHHLTKTNEILSSMILSLHNVAFYQKMMSDIRTSIKNKNYKELMNSYLKNHKFYEKT

SEQ ID NO: 60255 - protein, 362 aa, Rickettsiales endosymbiont
  misc_feature (1)..(362): tr|A0A4Q7DH98|A0A4Q7DH98_9RICK Queuine tRNA-ribosyltran sferase OS=Rickettsiales endosymbiont of Peranema trich ophorum OX=2486577 GN=tgt PE=3 SV=1
MSVAFRILKQGTRARTGLVETAHGIIKTPAFMPVGTVGSVKAMFPEDVSGAGADIILSNTYHLMLRPGAERVARMGGLHKLMNWHKPILTDSGGFQVMSLAGLRKVSHHGVIFRSHIDGTKYELTPERSMEIQHLLGSTITMAFDECTSYPATHLEAQKSMELSMAWADRSKSAYISRSGYGLFGIVQGGMYEDLRTESVKILNSIQFDGYAIGGLAVGEDKATMLRILDHTTSLMRQDKPRYLMGVGKPSDIVQAVCMGVDMFDCVLPTRSGRNGQAFVKGGTINIRNQKYAEDETRLDPYCSCYTCTNYTRAYLHHLVKAKEILGAMLMTLHNVSYYLDLMSKIRKAIEDDSLEELIRDF

SEQ ID NO: 60256 - protein, 376 aa, Rickettsiales endosymbiont
  misc_feature (1)..(376): tr|A0A3S8T453|A0A3S8T453_9RICK Queuine tRNA-ribosyltran sferase OS=Rickettsiales endosymbiont of Stachyamoeba l ipophora OX=2486578 GN=tgt PE=3 SV=1
MTLKFELLKTLKIGQFIARRGKLHTKHGIIDTPTFMPVGTQGTVKAMTVDMLQATNAQIILGNTYHLMLRPGVERIKELGGLHQFSNWHGPILTDSGGFQVMSLSKLRKINEEGVTFNSHIDGSKHLLTPEKSMQIQHALDSNITMSFDECTPYPATFDQAKISMELSMRWAGRSRDAFFDRDGYGIFGIVQGSIYPELRETSAKSLLDIGFDGYAVGGLAVGEGQELMFKTLKYTTPILPENKPRYLMGVGKPGDLVGAVMHGIDMFDCVIPTRSGRNGQAFVRGGTINIRNSKYALDQTPLDQDCSCYTCSNHTKAYLHHLVRAGEILGAMLMTWHNIFFYQDLMQAMRNAIEQEDEAFFVQNNFTNLQLTDLS
